United States Patent Application Publication US 2011/0183924 A1 - sequence listing, part 5

SEQ ID NO: 10993 - DNA, 1110 bp, Homo sapiens
tggagcgtctcctgctcgcgcacgccagaagcagctcggggtctctccgccgccccgccgctcgcccgcccggatcccgcctgcggcagttgccgcacaacatgctacctgcggccgccccggcggctcctggaaccccggttcgcggcgatgccagccaccccagcgaagccgccgcagttcagtgcttggataatttgaaagtacaatagttggtttccctgtccacccgccccacttcgcttgccatcacagcacgcctatcggatgtgagaggagaagtcccgctgctcgggcactgtctatatacgcctaacacctacatatattttaaaaacattaaatataattaacaatcaaaagaaagaggagaaaggaagggaagcattactgggttactatgcacttgcgactgatttcttggctttttatcattttgaactttatggaatacatcggcagccaaaacgcctcccggggaaggcgccagcgaagaatgcatcctaacgttagtcaaggctgccaaggaggctgtgcaacatgctcagattacaatggatgtttgtcatgtaagcccagactattttttgctctggaaagaattggcatgaagcagattggagtatgtctctcttcatgtccaagtggatattatggaactcgatatccagatataaataagtgtacaaaatgcaaagctgactgtgatacctgtttcaacaaaaatttctgcacaaaatgtaaaagtggattttacttacaccttggaaagtgccttgacaattgcccagaagggttggaagccaacaaccatactatggagtgtgtcagtattgtgcactgtgaggtcagtgaatggaatccttggagtccatgcacgaagaagggaaaaacatgtggcttcaaaagagggactgaaacacgggtccgagaaataatacagcatccttcagcaaagggtaacctgtgtcccccaacaaatgagacaagaaagtgtacagtgcaaaggaagaagtgtcagaagggagaacgaggaaaaaataaagggagatgctgtgccgtctcgctccttattttatataattaaaatcaggaaaagaaattgggatc

SEQ ID NO: 10994 - DNA, 249 bp, Homo sapiens
tcctcccctatgtggtgctcccgggagcccagcccaacactggagcgtctcctgctcgcgcacgccagaagcagctcggggtctctccgccgccccttggccatggccgctgtgccgacggcgcccgctcccctgcgctccaggggcccccgccgctgcagccgcagccgccgcagcttctgagcccaaggggccgccgctgcagccgccgccgccgccgctcgcccgcccggatcccgcctgcggcag

SEQ ID NO: 10995 - DNA, 2763 bp, Homo sapiens
cggccgcatccccgacacgcaccagcggagccaaagggcgcgcgaggcgatggggttcgcgtgtctgcgcgtttgcagagctgccggacgtcccccgcccgagggttgaagacagcaaaaccccagctgtggggagccggagtgcatcctaacgttagtcaaggctgccaaggaggctgtgcaacatgctcagattacaatggatgtttgtcatgtaagcccagactattttttgctctggaaagaattggcatgaagcagattggagtatgtctctcttcatgtccaagtggatattatggaactcgatatccagatataaataagtgtacaaaatgcaaagctgactgtgatacctgtttcaacaaaaatttctgcacaaaatgtaaaagtggattttacttacaccttggaaagtgccttgacaattgcccagaagggttggaagccaacaaccatactatggagtgtgtcagtattgtgcactgtgaggtcagtgaatggaatccttggagtccatgcacgaagaagggaaaaacatgtggcttcaaaagagggactgaaacacgggtccgagaaataatacagcatccttcagcaaagggtaacctgtgtcccccaacaaatgagacaagaaagtgtacagtgcaaaggaagaagtgtcagaagggagaacgaggaaaaaaaggaagggagaggaaaagaaaaaaacctaataaaggagaaagtaaagaagcaatacctgacagcaaaagtctggaatccagcaaagaaatcccagagcaacgagaaaacaaacagcagcagaagaagcgaaaagtccaagataaacagaaatcggtatcagtcagcactgtacactagagggttccatgagattattgtagactcatgatgctgctatctcaaccagatgcccaggacaggtgctctagccattaggaccacaaatggacatgtcagttattgctctgtctaaacaacattcccagtagttgctatattcttcatacaagcatagttaacaacaaagagccaaaagatcaaagaagggatactttcagatggttgtcttgtgtgcttctctgcatttttaaaagacaagacattcttgtacatattatcaataggctataagatgtaacaacgaaatgatgacatctggagaagaaacatcttttccttataaaaatgtgttttcaagctgttgttttaagaagcaaaagatagttctgcaaattcaaagatacagtatcccttcaaaacaaataggagttcagggaagagaaacatccttcaaaggacagtgttgttttgaccgggagatctagagagtgctcagaattagggcctggcatttggaatcacaggatttatcatcacagaaacaactgttttaagattagttccatcactctcatcctgtatttttataagaaacacaagagtgcataccagaattgaatataccatatgggattggagaaagacaaatgtggaagaaatcatagagctggagactacttttgtgctttacaaaactgtgaaggattgtggtcacctggaacaggtctccaatctatgttagcactatgtggctcagcctctgttaccccttggattatatatcaacctgtaaacatgtgcctgtaacttacttccaaaaacaaaatcatacttattagaagaaaattctgattttatagaaaaaaaatagagcaaggagaatataacatgtttgcaaagtcatgtgttttctttctcaatgagggaaaaacaattttattacctgcttaatggtccacctggaactaaaagggatactattttctaacaaggtatatctagtaggggagaaagccaccacaataaatatatttgttaatagtttttcaagttttgttcactctgttttattgtttgttttattgagaaattcttactcttagagactcatgaattaagaaagagaattctgctaactcagagaacctggttcctatgtaattcagaatatattacatttctcagtaatatttgttttttgaatccacctttatctgagccaatggagatttacttatagcgtattaggagatatttattccattttcttattttaatcaacattctaattatagacacatgggcctccctagctgatttcactgctcccccttcattgcttagaaatgggcatcatttcttgtatgtcagatccccctgcatcttcaacatttagtcttttcttctccatattttctatctgtggatctctttaggggattgaagtcaccctagctgaaggcctcaccagtgtttcacagaggacacagcccaccccttgcaggaggaggtatctctgagtgtgcagcacagaatcgcatgacccaccttaaccttcctgttgtcatggaaggatgcacggctgctctgtccactgtgattcctagccctctcaagatcactgctttctgaagaatttgcaatgactctggcttctggctgcttatctctggacacccgttctccaccagttgtacagttcatgtaatctacttggcttaattgattttccacttctctcttcctcttctaagatataaacattttaaatgatttattcctgtttcttattctggtgtttctttccttgtccctatgagataagtgtctcaactcactaaatctattcccaatgtataaaataattctaattccattttcagctaaaacatatattaccaagaagaaacaaacttt

SEQ ID NO: 10996 - DNA, 481 bp, Homo sapiens
ctggcaggtttcatctacgcctgttatgttgtgaaatgtataactgaagaagaggacagctttgatttcataggtggctttgactcttatggctatcaagggcctcagaagacatctcatttacaactacagcctatgtacatgtcaaaataatacagatgacttcagtatgtcagcccatggacctttcaaagaacttttttcgcagtggcctcctgcatttcatgaagagcaagaagcaactgagtttaaatacatacacgtattaacaaaacaaatgcaaagcctctacatacaacactgacacacacacacacacacacgtgagcacgcacacaccaattccacttgacctcctctttctaactgaaacagacaaatatgcaggacacgcccatcttggatttcctgaaagcaggcccctttctcccaggccttcggaaagttcagaaggagatgtgttgatgcccaacggttgccg

SEQ ID NO: 10997 - DNA, 428 bp, Homo sapiens
aaacatgtatatctaaatattaaataaaacaaaatgtaaagatatctaagatgttaagattttagtaaaataagttaatgaaaaagaaagccagggtctgggaagtatgaatatttaggactactaaactatgggattataagagtgggtaatgacagttagccactcaagaaatacacattttcaagcaccaaggttgtccttgtcaaatgagtctgggctttctgttttctctggcagatctgaaggtgatagattacctaacaccttctgtgatgcttcctgggatctttgtgtcggggtgcatatttagtggaaaaccctctgaataagtcagtcctgaatcccagatggccctgctatgatcctgcaaaggtcatcctgatcccaggattagagagggccactgccaagggcacagaaatgct

SEQ ID NO: 10998 - DNA, 678 bp, Homo sapiens
ggctgagggagacagagagcacgaggagggcaggaaagaccaagggagggctttgtgcaggaggtagggcccgggaagcccagagacaagagcaagcacacggtgctgctgcgtgcagtgagtagcccagctagagggcacggcctgtgctgaggagccgtgggaggaagagagggctgggaaggtaagtgtgtgcattggtgtgtgtgtgagggttcacctgccaattctgagtacacatgaaggctatgtttctgaagatcaccaagtgaccatgtggaggctggcctggacaggcagcctggaggcagggagaccagggaggagcctgttccgacagttgaggccagagtcggggagggctgacctggggcactggcagtggagatgggagggagtgaagctgtgaaggacacacagacagacagagagcagggcttggtgactgatggcaggggtcaggcagagttaaagatgatgacactgtgcacacaaaagacggcgccaacagcaaaaccaccaacagatacagagctgctgggaaggggagctcgaggggagaggagggtgagcacccctcacagagcctctcatagagcctggcacctaacaggcacccagtcacagatggatgcggatggttcacagacgggccatgagctcagcaggctgttttct

SEQ ID NO: 10999 - DNA, 199 bp, Homo sapiens
acacccagcctgagctcagctcagggaggggacaggacatttctgacagaggacacagaggcctgcgctgttaagaggccagcgtggggctgtgaggggacattcatgccacaacctggcctatgcctggctcgcctcagctgtatcctggggtcatgggccccgtgtgaataaaaaagaagaaaaacttgaattctcg

SEQ ID NO: 11000 - DNA, 327 bp, Homo sapiens
tatagatactgagtctcactgtgttgcccaggtgaaaataaatttagaaatttaaactttaaatgtaataattgcaccaggtgagatggctcactcctgtaatctcagcactttgggaggtgaaggctggcagatcacttgaggttaagatttggagaggtcagatcacttgaggacaggagttggtcagcctggccgacatggtgaaaccccatctctactaaaaatacaaaaattagctgggtgtggtggtgcgtgcctgtaatcccagctactcgggaggctgaggcaggagaatcgcttgaacctgggaggcagaggcctgca

SEQ ID NO: 11001 - DNA, 446 bp, Homo sapiens
acacattgtgcaatgattaaatcaagctagttaccatattaacaataaagttaattaacatattaaaataaagctaataacgtattaaccaagctaattaacatattaacaatcaagctaattaacatattcacataatcctaactctgacctatatcacctcacctagttttttttgtggggagaatatgtcaaatctacttttagtcattgtgaaagacgcgatgtattattaactatcatcactgtggtgtgatagatcttggaatttatttgttttatctaactgaaaaaaattaattttaatgtaatttatgtattttttgagacagtctcaccctatagccaggctggagtacagcatcatgttcatagctctcggcagcctccaagtcatggctcaggtgaccctcccacctcagcctcccaggtagctgggagtacag

SEQ ID NO: 11002 - DNA, 284 bp, Homo sapiens
ttttttttttattctgagggctttacttttttctctattagctttactctcttcctctattagtccctgttaattctgactccaagtcttctccttccctggcccacagaggaatagaaagcagtctcatagtttctgtcttgtttcttgaagtaaacacacaattttggtgtgtgtgtgggggggggcttttgctaggagggttttttttttaaataaaggatacctataataatttatcatgtattttccatgtaaactctgtccctctgtctccactttct

SEQ ID NO: 11003 - DNA, 388 bp, Homo sapiens
tttatacctcttttgttttaataccattttgatgtttgtttgtatcttttactatatagtttttgttttaattttagtgcaactcagaagatagaagcactattataaattttacaagcaattaactttagactgatagaaataggtatttaaatgtatgaaaggctgatagagaatttagaatgccattatttctgctgcctctttctcctttggatttcattaataatagtactttcatgccaggtacattttctttatgtagaattgtttttgaaattttcctttgatttttcatcctatctgctgtaattactgtgcatatttaatcatgtccatataagcatgttaattgttcagtgacagaagtagaaggtgacatggcaag

SEQ ID NO: 11004 - DNA, 395 bp, Homo sapiens
gtcccctctcttccccacacccaggttcagcccaggacagctcacacactccatccccagccaggtggggccagggcctctccaacatccccaagctggggatgcttctggcaggatgacgggcctggaagccaagtaactggctgaccccggggacaaggtgaccacgacgaacgacgacacgagcaaaccaggccgcagctgatcctcctgaggctgcaggggccctgtgtccccatccgttccctctgtgcaaaaccttgactccctgaggtctcctgccccaccctgcacccttcttgctctgaatatggaggcaccttgtacttccaggaggcaaaagagccctgagggaacctccttccatttcctgctgtgaggacagcggacccctg

SEQ ID NO: 11005 - DNA, 643 bp, Homo sapiens
cctataatggcctgaactagtttttcaggttaactttggaatacccttggccaagaagaggggtccatgcagatgtttggaggggggggtcttaaagctttatttttagattacagcatattgcttttgcactatcataaagtaaaaacatcataagtcaagccaccataaatagcggaccatctgtatatctgaaagaagatgaaccaagacttggttattgttaaagctgatgattggctgtatgaagatttactatacaattttgtgtacttttgtaagttcttggttgtttctaaacttataacaaaataaataattggccatcttcattggattgtgaagccatttcctcccacatgttcgtaaaaatggtagccatggcccctgactgaacccaggtatgaatggccttcattgattttgtagaccctgaccttctctgttcttccagagaaggtggtactcagataaaaactttgaagcattttattgttcagaatatgactttgatcttctcataagactcaagtttttgaatgcttaaggctctttatcgctagtgtatgtaagtaatatcattgtccttaaccaccatctgcctctccccccagacacacataagtttatgataactacagag

SEQ ID NO: 11006 - DNA, 552 bp, Homo sapiens
cttttcttttcctttcttttctttttttctcttgcagagtgacctttaatacctgggaaggatgaataagcacaacctacattattgctttattttagaaaagagagccagaaatggtagtacattataatatgagttaccataatctctttagctctttaattctcttctcccatttttgcttttgtaaataagacattatcaagaattagagaaattttaggtctatgtgtgagcatcttaacaaatgatagtaggaggcaaaaaataattagttataaagctgtaaaagggaaccaagaaagggaaaataatccgcaataacttaaaaataatcaaacaagaatatagtataaaaggagaaattttcctaccttttggaaaagcaaaaagttccgtttctacattgctgttaggctcaggagattgaataactttagataatttaaacatggaaaacatacaaattatttgatttgaaattttttttaaaaactaccttctttatagtttatttcatatatgtaataaagtacttctacaaaacacatt

SEQ ID NO: 11007 - DNA, 334 bp, Homo sapiens
ggggaccctgagtagggaaagccctttccacgtggctggctttgacacaaacacaccattccagatgtggggagggtcactattttggtttgatgtatggagcccttggtcaggagcagctctgggtagggcactgtgatgaaaatgctattcactaatactgtcaagcagtgaatagtgccaggaactatccaagcagtttcgccctctgccttaatccctaccacagccctgaaagtctcagtgacaatcccatgattttacagatgaggaaaccaaggcaccgagcagctaaatggcttcccccaggactgccttgtggtactcgccgtgg

SEQ ID NO: 11008 - DNA, 876 bp, Homo sapiens
ggttgcagtgagccaagatcgcaccactgcactccaacctggtgacagagtgagactctgtctcaaaaaaaataataataataatgcaaaagtggtgaaattgttttctggactgtcatttacacaaggtattttttaaatgtctgttagacttggagcctgaaatcaagcatatttgaacaaacaaaagactaaacaatcttgagctttgttcccatctacttttgtccttttacataagtccccttgcctacttcttccccctttccatgtgattttttttcctgcaggagaagtgaattgacgttattgagttcctgttttgtgccagcttttattaccttttaatgctttctctatttctagggggtagatagtctcaaagtaagtagttaagtggttggccaatattaccccaatagtggagctgagagctgaacccggttttatctgactcttatatccctgctttctccagtaattttgaaaaaggtgatctaatatacagagttagattttgatgtgatccatttgcatgttctatgtctcaaatgagtcttaattcttatttcttaaacagtggttaagttttaagaaatccatacttagagtactgcagtcagtagtataaaggccttactcttctcctatattgggaagtgaatatatttttcaaagtcgcccattccagatgtactaataacacttaagatatttggccattcattcatttaacaagtattcattgagcatcattatgaaatactacacgaagtatttaatgatgaacagaaaagacaggagcttgtgctctcatggctcttacattataaggaggcaatagattataagcaagcagatcattataacaggatg

SEQ ID NO: 11009 - DNA, 454 bp, Homo sapiens
aggcagggagggagggcctcctgggggcacagcccaggtagcaacatggcaaagtagaaatggacttggaatgatgagctctggaacaatagtaatagcataattggaataattattattgctattgttatgtgataataaccaatcaggagggcattaggcaacgttttacatgtatgagctcaaatgtggccccagctctgacctttcttgctgttgtggctctgggcaggtcgcggctgcactcggggcctcagtttccccactggggcatgaggatttcaagaaaaattccctctagctggaggacactctgtgtgcaaatgcctggaggtgtgtttagaagtggtttggaccccttgactggaatggagtagggggaatcctgttttgccctatgcctcatacagatcagagggtgggaaccttgaacacatcttttttttttttttag

SEQ ID NO: 11010 - DNA, 632 bp, Homo sapiens
ctgttttaagcattttgcctccactacctcctttcagcctcacaacaacctgtgaagtaggttccattatcatcccccttttatagatgaggaacacccctggttaagtaacttgcccaacatatctggtaagttgaagagctagaatctgaatcctggtgtctgtctttgttcccgttattccaaactgattcacttataaaatggagctaattatagcttcttcaggattattacagggattgtcataaaatttgcagataatgcttaacacataataaccactcagcgttttcggaagaagtaggaacttttatttcctttaatgattccattctcttccacagtttccctcactgctttagatagtaactaggtgttattttctttcagtctctgctgtggtgcttctgaaaattactgtcttctgaagtaggtttggggagtaggtcagaacataccttatctgctgtagccaaggacagaaaggctggtttttcatgcagccatgggggtgagggcatgattgtgcgtgttccccagtgggtgttacaggggcctgctctcacaagtagaaaactctgtgtggggcgaagggagatgataagtgatcttatggtgtggcgtctttt

SEQ ID NO: 11011 - DNA, 470 bp, Homo sapiens
ttaccattttagtttttaaaacaggtttattgaggtataattaataaacaaagaattgcacatatttaataaatagccattttgttttaaggacaaattgattcccaggtgccttctgattttcaactaaagcaatgaatttattttgtacattgtgaaggaataaataataagagtgccatgaaattctcctaagaccatagtttatttgcagtatcacagagtttcagtagctgcaaaaaaaaaaaaccttaccaatcctccaggtcaatccccattttgcagattaaaagtcatcctatagacttcactgctgcagagctacctagtggatgagactcaaactccagatatttcctatttgtatttcctgacaataacattttataggaaaaggaatttgtagccacataaacttcaaggtccactcaaatgctacctcctctatgaagcctctcctaatcacccag

SEQ ID NO: 11012 - DNA, 377 bp, Homo sapiens
gacatttggaggctgggggtggtgaggtactaactatggccctcatatccgaatgcagtctttctataaatgccaactgaaaatagtgtcattttgatataattctcttccctattgtacaatgttctagtagtttttaatataacacccatagtttctgaaaacagaagacaaactaatcaattctaatgcaaatttatcaggtggcttataatacagaaatgtcttgaaaaacatttagtttttacctttaaatttttgacaaacaggtaccatcttagtcgtcgaagtaggggacagaaggactgatgatcacaaagctgactgagagtaaaaacatgttttaatttgtcatatttgtatttctcttcgagcta

SEQ ID NO: 11013 - DNA, 413 bp, Homo sapiens
gctaacatgtatttttggatgcctcttttaatagaacaattaataccagtattatgattacctgtttataccaatgtagccacattacttacttttttgtggggggtattgccctttgagattctgatgtaagacctctgacacattgacttacctaaactttttgaggatatacaggttatattactttttccaagataggaatttctgcaccaagtcacacaatgtcaacctatgtcacttcagatttttaagatttaaaaaatctataccactgcagtcagaagcttttggaatctaccatttaaactaataattttcctgttactgaaaagggagttaggcaaagagcaaacagaccctgacggtgatcccaacgaccacgttcatttgaggctgaaataaaatgaagt

SEQ ID NO: 11014 - DNA, 306 bp, Homo sapiens
tgtataatttcatgtttccctctgggatcattttccttgtgtctaaagaattctttagcatttctttcagtacaggtttgctggtgataaattcctctgttttgtttgcctagtagacatctttattttactttcatttttgaagcatatttttgctggtatagaattataaattggcacttattttcttttaatactttacctgaagatgtcactccattgtcttctgacttccatcatttctgtagaaaagtaggctgtaaatcttttttgttgtgccattaaaaattctcttttttctgctta

SEQ ID NO: 11015 - DNA, 1004 bp, Homo sapiens
cctgaagtctgtccgacagatcatagccatgttagtcccacagtcacagaggccaatggattaaattattttatctcccttgagaacaaaaaataaaatcctaagccccccacccgacttaacagaccccctgttggccaacggaacctcaaataaatcttaaaattcagttctcggccatgacaggacaggaggtcagacatacctccctgtacctccctccctcttatggtttagacccaacaactgagcagcattaatgttaaaatagagatcatgagactgacagaacagactctttgtggcaataagacctcaaattataaacagggcctagggccatgccaggcgagggttaagtcttgtaccctactcttaaagaattaactagattctaactaccacatgggttttatttttctctagcagccaagcaagcactggctgtgagagaagcaagattaaaacaattacaactcacccagttcacagacgctgagtaactgatctcctgccccactaaccttaacgacagctttctctggacaagggactgatttcagtaactttctcctgataagagaccatcctccatggactggttctggccagttttagaggctgtgcctttacagaggctgagcctttacagaggctgagtacctttatgtccctgcttcactttttgatgtgtagggcctaattataatacatttaaatgtcaagtctccaccccagaatgaacatgcatgtttattgaatatgcatgtgttaggacctcttttatgagtattctcataaaatgatgtagctcctctgatatcctattgagtatgtatatgtagccaactcatttggctcaaattcctgtcctctccttccctccctggaaatgcctgcctctggccttggctgtaggccacacttcccagcctgtcataatggccaccttgcggactgcaaacctttataagaaataaagctctcttttctaaatttaaaaa

SEQ ID NO: 11016 - DNA, 950 bp, Homo sapiens
cctgaagtctgtccgacagatcatagccatgttagtcccacagtcacagaggccaatggattaaattattttatctcccttgagaacaaaaaataaaatcctaagccccccacccgacttaacagaccccctgttggccaacggaacctcaaataaatcttaaaattcagttctcggccatgacaggacaggaggtcagacatacctccctgtacctccctccctcttatggtttagacccaacaactgagcagcattaatgttaaaatagagatcatgagactgacagaacagactctttgtggcaataagacctcaaattataaacagggcctagggccatgccaggcgagggttaagtcttgtaccctactcttaaagaattaactagattctaactaccacatgggttttatttttctctagcagccaagcaagcactggctgtgagagaagcaagattcactaaccttaacgacagctttctctggacaagggactgatttcagtaactttctcctgataagagaccatcctccatggactggttctggccagttttagaggctgtgcctttacagaggctgagcctttacagaggctgagtacctttatgtccctgcttcactttttgatgtgtagggcctaattataatacatttaaatgtcaagtctccaccccagaatgaacatgcatgtttattgaatatgcatgtgttaggacctcttttatgagtattctcataaaatgatgtagctcctctgatatcctattgagtatgtatatgtagccaactcatttggctcaaattcctgtcctctccttccctccctggaaatgcctgcctctggccttggctgtaggccacacttcccagcctgtcataatggccaccttgcggactgcaaacctttataagaaataaagctctcttttctaaatttaaaaa

SEQ ID NO: 11017 - DNA, 373 bp, Homo sapiens
gtccatttgtgttactataaagggatatctgaagctgggtaatttacaaagaagagaggtttatttggttcatggttctgcaggctatacaagaagcgtgacaccagcgtctgcatctggtgagggtatcaggctacttccactcatggtggaaggcaaaagctagcctgagtgcagagatcacatggcaaggtagtaggaggaggaggaaaaagagaaggaagagagggaggtgctgagtgagaactcactcactcccttgagaataacaccaagccattcatgaggaatctgcccccacaacccagacaccttccactaggccccatcaccaacagtgaggatcagatttcaacatgagacttggtaggta

SEQ ID NO: 11018 - DNA, 307 bp, Homo sapiens
cgtgttttaactatacccccaccaaacatatcttgcctcagattttaaagcaaattccaagtgtcaatcctttccttataaatatttcagtatgtatccttgagtaagtccataaggactaatttcttttagcataactataatgccattaaaacagctactttttagttgcagataagaagtagggtaggaattgctggggtctaacccagttctgatgacattaaatagatcctagatagttggacaaatcatttaactttcttctcttcctgctctcttgtcttttaaagggggaagctcaact

SEQ ID NO: 11019 - DNA, 409 bp, Homo sapiens
taatgttgcttaacaactgaccctcctgaatctcagtagcttgaaacaacaaacatttatttcacatgaacttctcagctccaggcagaggtgaagttcaggcaagctccacgtggcttttgattctaggactcaagctgaagaatcagacacggtctgtgctgtgatattcttgcggtgtatggtagaatacaaaatatatactggagacttgtaaagtctcttagaaccttgttttggaactgccatgctgtcatatttccccacattctactggccaaaataaatcaaattaccaagtccaatatcaatgatgcaggaaagtacacccttctggggcaggggagtggagcagagtgctgggaaaagagagtgcatattttctgaacagtcacaagtatgcattttc

SEQ ID NO: 11020 - DNA, 3303 bp, Homo sapiens
  misc_feature (480)..(480): n is a, c, g, or t
actaaatgcagtggtaggtgggtttatgagtatattaattgcctttatccatttgtgaagttaagttgatgagggcaaggtttttgtttgtttaatttgtatatgtctaaaggtatttggaactttttacaggaattaaacatatatgcaaatttgtatataaaaatagcatggccatcatttgaatgcttgtaaatgaaaggattatcttttttgagatctatatataaatagaaatagaaaatccagctggactgattaggattcttttttaattcatttgtgtataacatttttattacaattacacatcagttttgacacagtcatagcaacattaatattttcccatgatgcagatcctttttgtaatgggcttgttctttgagatctctgtaaagaaccctgtgaactagaaaacataactcacagagatacttttttaaaaaatttatttactggaactgaaagttccagttngggatgaagcatttcatctcacttcataacacctctttgactgcacttcagtgaattgttcttatgtgcactgtgtagcaacttacattataacaaagcagataagggctgtaagctgctgcttatgttgaaaagtggttcttcagattttctctcataaaatccagttgaagataaataatttttttatactttatcactgaacccaagtgtttatttaaatgtcaacagtacttctaagaacgttgcctgtcatcgtggtctttggtcttggataactaaactgcctttccagagaaccaaatgtcagagttactagaccaaatagtggttaaaacctccaaaggaagtaatgtaatcttattcataatgggattaacatattttagacattcattttaaacactacctcagttaatatagagtataaaaatctgtggtttaatccctcaaaagttaacagtaattttttttttgtcttacacacacacacaccccctcccccaccatcactatccctgtaccctcaccttggtcatctatcctgaaataaggcttagttagtattggcctgaatgttttgtgttttttttttgttttttttttttactgttactttgaaaaatatgtatgtataccttatcatatctgcctatatcacttactttggggagatactcagagctttgtggttatcagtatactaaaaaaaaaaaaaagtctacgcttaaatttatagtgctatttggtttctccatgatttcactgacaggtctaatacattttctttgagtacttgtttgtaaaaagtagactttatggtgaaaaatacatgcagtgccaagtgattaacttaagtgtttaaaaatattaaattatagcagaagaggttaggaatgatatcagcagtaatagaaataattgagaaaatcatctataaataatagatattacagactatagaataccaaaataatgtcaatactgtagtttttaaagattttaggattaatcttagtccatataaatttgtactattggtaattattgaataattgggaggaatctgggcagttgtgctggttgtaaactatgaatttctaatcgtaaagtgaattgttatttctaattgaactttttttcaagaacagatttcagcctcacatactaagtaaatactgataaataaggaaattagaaatttagtattcataattaaatatgctctaaaatttcctatacttttatttcctgtttattcttaggtagattggaagggggaaacagtctgttctccctaattaaattttttctaataacgattagtagaatatggacattctatatgacagtgacattaaaagaggctctttggaagtatatacattattaacataatgtgtacaagtccttttgaaatgacaactttaatgggtttcagctcttttatctagagcttgagataattcaagctgagtttttcagggcatatcacaacggcaaagtgttcagcagtgggatatcaatgcttatttacattttcctactgctatttatataaaatgttattccattcagaggatgccttttatccccacattaaagcacagatcattaagcaataaaaaccaaattgtctgtcattcaaattataactgcagttatttttgcatggtaagagtgaggtgctaattttgtgtgagatgaactttgtaaactactttgggaaatgttctttggaagtaaggttttttctcctttagtcttatgcttccacttttgtctcagattcacaatccattaaaacatggggaaaaaagaaaaggtaaaattgagagacttttgttagaggagctatttggaatgaaccaacatttcagattttccaaaatgtaagttaggaagtctccattgtctctgcattaacaaaatacactgttactatcttaatctcaagagtgtcattacagtgagaatctcatttaaaagcataccagtgaaattaatagcagtgcttatcaaagaacactgaaatctgtgagaatctttctaggagcattcttttcttcttttagttccaagttccagggtatttttcattcctagtaggtttatatgactcacagaatgtggacttttttcctgtttggagtatttttgtaatgtaagtatcggatagctgcaccacagcatgcataaattgcacattttgttttactttctttatagaatatttaatttcaaaaatataatttatgccaaaaaaagcatacctttcaattttgctacttggttgatttagcacaaaatgcaaagtcttggggcagagagggggagtgaaaaaaattttataggtaattgttacaaaaatacctgtcagaaaccctaaagctgcattgtaaaacaaatggtgtaaactagttttgaaaagtggtaaggaattgtgaaaaaaatctcagacttaatgctctctaaccacatgagtttcttcttttttatttagtaatacgctgctacatatttggaggttctggtgtttgtaggtcactgaacagacattgaaatctgatttatattgtataactgtaacatagaaagaaaaagtatttatattttttctgtaagaatatttcattgagttgtgtataatttaaataagatttgtccccaaatggttttgctcaccttgattttttttgttgtgattttcttgtttttgtataatgtgtatagtttatgtcaagggcattaaaagcctcctgaagcataatcttatcaaagggatacattgttaataaaatgtacttaaaattcaaaaaaaaa

SEQ ID NO: 11021 - DNA, 3370 bp, Homo sapiens
  misc_feature (480)..(480): n is a, c, g, or t
actaaatgcagtggtaggtgggtttatgagtatattaattgcctttatccatttgtgaagttaagttgatgagggcaaggtttttgtttgtttaatttgtatatgtctaaaggtatttggaactttttacaggaattaaacatatatgcaaatttgtatataaaaatagcatggccatcatttgaatgcttgtaaatgaaaggattatcttttttgagatctatatataaatagaaatagaaaatccagctggactgattaggattcttttttaattcatttgtgtataacatttttattacaattacacatcagttttgacacagtcatagcaacattaatattttcccatgatgcagatcctttttgtaatgggcttgttctttgagatctctgtaaagaaccctgtgaactagaaaacataactcacagagatacttttttaaaaaatttatttactggaactgaaagttccagttngggatgaagcatttcatctcacttcataacacctctttgactgcacttcagtgaattgttcttatgtgcactgtgtagcaacttacattataacaaagcagataagggctgtaagctgctgcttatgttgaaaagtggttcttcagattttctctcataaaatccagttgaagataaataatttttttatactttatcactgaacccaagtgtttatttaaatgtcaacagtacttctaagaacgttgcctgtcatcgtggtctttggtcttggataactaaactgcctttccagagaaccaaatgtcagagttactagaccaaatagtggttaaaacctccaaaggaagtaatgtaatcttattcataatgggattaacatattttagacattcattttaaacactacctcagttaatatagagtataaaaatctgtggtttaatccctcaaaagttaacagtaattttttttttgtcttacacacacacacaccccctcccccaccatcactatccctgtaccctcaccttggtcatctatcctgaaataaggcttagttagtattggcctgaatgttttgtgttttttttttgttttttttttttactgttactttgaaaaatatgtatgtataccttatcatatctgcctatatcacttactttggggagatactcagagctttgtggttatcagtatactaaaaaaaaaaaaaagtctacgcttaaatttatagtgctatttggtttctccatgatttcactgacaggtctaatacattttctttgagtacttgtttgtaaaaagtagactttatggtgaaaaatacatgcagtgccaagtgattaacttaagtgtttaaaaatattaaattatagcagaagaggttaggaatgatatcagcagtaatagaaataattgagaaaatcatctataaataatagatattacagactatagaataccaaaataatgtcaatactgtagtttttaaagattttaggattaatcttagtccatataaatttgtactattggtaattattgaataattgggaggaatctgggcagttgtgctggttgtaaactatgaatttctaatcgtaaagtgaattgttatttctaattgaactttttttcaagaacagatttcagcctcacatactaagtaaatactgataaataaggaaattagaaatttagtattcataattaaatatgctctaaaatttcctatacttttatttcctgtttattcttaggtagattggaagggggaaacagtctgttctccctaattaaattttttctaataacgattagtagaatatggacattctatatgacagtgacattaaaagaggctctttggaagtatatacattattaacataatgtgtacaagtccttttgaaatgacaactttaatgggtttcagctcttttatctagagcttgagataattcaagctgagtttttcagggcatatcacaacggcaaagtgttcagcagtgggatatcaatgcttatttacattttcctactgctatttatataaaatgttattccattcagaggatgccttttatccccacattaaagcacagatcattaagcaataaaaaccaaattgtctgtcattcaaattataactgcagttatttttgcatggtaagagtgaggtgctaattttgtgtgagatgaactttgtaaactactttgggaaatgttctttggaagtaaggttttttctcctttagtcttatgcttccacttttgtctcagattcacaatccattaaaacatggggaaaaaagaaaaggtaaaattgagagacttttgttagaggagctatttggaatgaaccaacatttcagattttccaaaatgtaagttaggaagtctccattgtctctgcattaacaaaatacactgttactatcttaatctcaagagtgtcattacagtgagaatctcatttaaaagcataccagtgaaattaatagcagtgcttatcaaagaacactgaaatctgtgagaatctttctaggagcattcttttcttcttttagttccaagttccagggtatttttcattcctagtaggtttatatgactcacagaatgtggacttttttcctgtttggagtatttttgtaatgtaagtatcggatagctgcaccacagcatgcataaattgcacattttgttttactttctttatagaatatttaatttcaaaaatataatttatgccaaaaaaagcatacctttcaattttgctacttggttgatttagcacaaaatgcaaagtcttggggcagagagggggagtgaaaaaaattttataggtaattgttacaaaaatacctgtcagaaaccctaaagctgcattgtaaaacaaatggtgtaaactagttttgaaaagtggtaaggaattgtgaaaaaaatctcagacttaatgctctctaaccacatgagtttcttcttttttatttagtaatacgctgctacatatttggaggttctggtgtttgtaggtcactgaacagacattgaaatctgatttatattgtataactgtaacatagaaagaaaaagtatttatattttttctgtaagaatatttcattgagttgtgtataatttaaataagatttgtccccaaatggttttgctcaccttgattttttttgttgtgattttcttgtttttgtataatgtgtatagtttatgtcaagggcattaaaagcctcctgaagcataatcttatcaaagggattccatatggggggattgccatcttggggatctaccacttgcggattccattgggattccatatggggattccatctggggattccatcttgggatccatctaggg

SEQ ID NO: 11022 - DNA, 1324 bp, Homo sapiens
  misc_feature (1244)..(1244): n is a, c, g, or t
cggacgcgtgggcgacccacgcgtccgggattaaagatgatttgcattctttatgagcctctcatggtccagctcacctcaactgtgcgttggtgtggaagatattgcttgttactgactttccttttctttcagattaaaggatcctggtcaaataaaagaggtaaagaaaattacaatccctacagctacggaaatatctttaccaactgctgtgttgccctgtgtgggcccatctcaccaaggtaagactcaggacgcatcgtgctcttcaacagaccttggaaaaccgaatgcctcggccgttagcacaggccgcccgccccggtggaatgggtcgccgccaccacgtgaccactttgtgccgcgtggatgtggccttcgtgaaatcgagatctggctgtttgtcgtgtcacacttcacaccttttttgatcttcaattgaatctgtgtctgattggggggaaatttcctaaagcccaaaatagagagacagatgcctgtggccctgctaatgactgaggccctgctaatgactgaaggtgcgtgcagggagctgtggttagcatcgtcaaggagacaggacacatgtgcaggaaggaagcagccagaagtctgaggaaaccagtttcgaaagttgatttgcacacaatagaaatgttcatagggagaaagccacatgggccgcagtcgttgatactgtggtcatggtaataatgacgatgacacgaaccatggcagtagctgacctttattgaatctgtgttaagctctgctctaagttctttatctgcattagcctttcacaagctcactctgtacctataggtaggcaccgttatatcccattctatggatgaggaaagtgaggcacagagtttaaataatgtgcccaagatcacacagcaagtaaatgccggctagtcaggacacacacccaggccacccaatgtcagagccagtatgtgcccactgaggcacgctgcctccaagtcagagtgtacaagttcaaaatacagattctttgtgagttacacctatggagaatattttcaactgataaatcaaaccatgatcaacaaatagatattgagcaaatctacctggtctctagaatgagtttccaagttattactgcttcctaccttttggtctccaaatgtgtaaaacagggagaaatgacaaaagccaccatgactgtgtccagggcagacccactgtgcacccagaccttaccgatatgngcttgtggaatgcaaacttcatttgattatcagcctcagtgaatcctcattagagaggtaaaaagaattcaagaaaaaaa

SEQ ID NO: 11023 - DNA, 2838 bp, Homo sapiens
gcggccgcccagtcgccagcgctctctcctgggaggatccgctgccggaggaaggagtggacccaacctggccgcgccgcagaagtggctcccgaggaagccggcgccggggccgccgcctcgtgtcccctcggggcgcagtgctcgggggtcggcgggccagagccgaggcgcggccggggagccgggggctgcggggccgagcgggcagccgcgcgagggggcgggcgctcggcgacccgggggccggccgggctgagccccgcgccccgggacgcgggctggaagcgacggaggagtgctgccgcgggctgcggaccagcgccgtcccctcacggagcggggattctgctatgacagttgggctccccggagggttaacctgggtgtcctcggcaaagttgtcgccgagccgggagcccgtgtaggggccgcggcgccgcggctcggggggcggccgggcggccggcggcggtcgtggctcggcggggcccgcgcggccggggggctcctgggggtgtgcgcccccagccggctgccctcgtggatgcctcccggcggcggcgggcccatgaaagactgcgagtacagccagatcagcacccacagctcctcccccatggagtcgccccacaagaagaagaaaatcgcggcccggaggaaatgggaggtgttcccgggaagaaacaagttcttctgtaacgggaggatcatgatggcccggcagacgggcgtcttctacctgacgctcgtcctcatcctggtcactagcggactcttcttcgccttcgactgtccgtacctggcggtgaaaatcacccctgccatccctgcagtcgctggcatcctgttcttctttgtgatggggaccctgctccgcaccagcttcagcgaccccggagtcctcccacgagccacgcctgatgaagccgccgatctggaaaggcaaatagatatcgcaaacggcaccagttcaggggggtaccgcccgcctcccagaaccaaagaagtcatcatcaatggccagaccgtgaaacttaaatactgtttcacctgcaagattttccggccccctcgcgcctcccattgcagcctttgtgataactgcgtagaacggtttgatcaccactgtccctgggtaggcaactgtgtggggaaaagaaactacagatttttttatatgtttattttatctctgtcttttctgacagtctttatatttgcattcgttatcacccacgtcattcttcgttcacagcaaacaggattcctaaatgcccttaaggacagtcctgcaagcgtcctggaggctgtggtgtgcttcttctctgtctggtccatcgttggcctctcaggattccacacctacttgatcagctccaaccagacaacaaatgaggacattaaaggatcctggtcaaataaaagaggtaaagaaaattacaatccctacagctacggaaatatctttaccaactgctgtgttgccctgtgtgggcccatctcaccaagcctgatcgacagaagagggtacatccagcccgacacgccgcagccagcagcaccctccaatggcatcaccatgtacggggccacgcagtcacagagtgacatgtgcgaccaagaccagtgcattcagagcaccaaattcgttttgcaggctgcagccacgcccctgctgcagagcgagcccagcctcaccagcgacgagctgcacctgcccgggaagcctggcctgggcacgccctgcgccagcctcacactgggcccgcccacaccgcccgcctccatgcccaacctcgccgaggccacgctcgcggacgtgatgccccggaaagatgagcacatgggccaccagttcctgacgcccgatgaggcgccctcgccccccaggctactggcggcgggcagccccctggcgcacagccgcaccatgcacgtgctgggcctggccagccaggactccctgcatgaggactctgtgcgcggcctggtgaagctcagctccgtgtgacccacatggccccaggccgggggacaccagaggctcctccatgggcagcaggagtgagcggaggggtgtgtcccacagcgactttcccagccaatgccacggtggagatgacagccccaggtctggggtacagagaccacttaggatggcacagggtggctggccccggatgctgagagcttggtttcatttgaattttcttccccaacctgagtgctttgacaacaatggaaatagagaagtggctgctttcttttggtgaccctccaggggtggaatcggagtgtgtctgcccgcccttgtgacagacacacggaaggcttctgacgcttgtggccagactgcaattgcacttatgtgttatgctactaatatttgaaacagacctgccattccatttgttaattaaaaaaaaaaaaaatcctaaagggaaaaaaccgaccaggtgtggatctgcatgccacgctgccgtctgtgttacagtggtgttgctatttccaaggaagtgctgctttctttttctttttttaattttgtgaattttcaagtgctgttttgttggaagacagtgcaacgaactgagactaatggacagtgtcatcactcagcttactgggctgaggcgtctgtggagaggtggcaccggggctgcagagggcggctggggttccgtcgtgtcgggtgtcacttcaccttctgtttggccgctcgatgaggtctcgtgttgagatattgtgtgccacaacccccacagtcttcacctccgtgtgtgatgaaacttcccgtggacagccaataaaatgacgtcctctgttattttggat

SEQ ID NO: 11024 - DNA, 1942 bp, Homo sapiens
ctcagtcacgtggcccctgcacgtgtgcaacgaaggaggccggggtcccagcggaggatatcgcaaacggcaccagttcaggggggtaccgcccgcctcccagaaccaaagaagtcatcatcaatggccagaccgtgaaacttaaatactgtttcacctgcaagattttccggccccctcgcgcctcccattgcagcctttgtgataactgcgtagaacggtttgatcaccactgtccctgggtaggcaactgtgtggggaaaagaaactacagatttttttatatgtttattttatctctgtcttttctgacagtctttatatttgcattcgttatcacccacgtcattcttcgttcacagcaaacaggattcctaaatgcccttaaggacagtcctgcaagcgtcctggaggctgtggtgtgcttcttctctgtctggtccatcgttggcctctcaggattccacacctacttgatcagctccaaccagacaacaaatgaggacattaaaggatcctggtcaaataaaagaggtaaagaaaattacaatccctacagctacggaaatatctttaccaactgctgtgttgccctgtgtgggcccatctcaccaagcctgatcgacagaagagggtacatccagcccgacacgccgcagccagcagcaccctccaatggcatcaccatgtacggggccacgcagtcacagagtgacatgtgcgaccaagaccagtgcattcagagcaccaaattcgttttgcaggctgcagccacgcccctgctgcagagcgagcccagcctcaccagcgacgagctgcacctgcccgggaagcctggcctgggcacgccctgcgccagcctcacactgggcccgcccacaccgcccgcctccatgcccaacctcgccgaggccacgctcgcggacgtgatgccccggaaagatgagcacatgggccaccagttcctgacgcccgatgaggcgccctcgccccccaggctactggcggcgggcagccccctggcgcacagccgcaccatgcacgtgctgggcctggccagccaggactccctgcatgaggactctgtgcgcggcctggtgaagctcagctccgtgtgacccacatggccccaggccgggggacaccagaggctcctccatgggcagcaggagtgagcggaggggtgtgtcccacagcgactttcccagccaatgccacggtggagatgacagccccaggtctggggtacagagaccacttaggatggcacagggtggctggccccggatgctgagagcttggtttcatttgaattttcttccccaacctgagtgctttgacaacaatggaaatagagaagtggctgctttcttttggtgaccctccaggggtggaatcggagtgtgtctgcccgcccttgtgacagacacacggaaggcttctgacgcttgtggccagactgcaattgcacttatgtgttatgctactaatatttgaaacagacctgccattccatttgttaattaaaaaaaaaaaaaatcctaaagggaaaaaaccgaccaggtgtggatctgcatgccacgctgccgtctgtgttacagtggtgttgctatttccaaggaagtgctgctttctttttctttttttaattttgtgaattttcaagtgctgttttgttggaagacagtgcaacgaactgagactaatggacagtgtcatcactcagcttactgggctgaggcgtctgtggagaggtggcaccggggctgcagagggcggctggggttccgtcgtgtcgggtgtcacttcaccttctgtttggccgctcgatgaggtctcgtgttgagatattgtgtgccacaacccccacagtcttcacctccgtgtgtgatgaaacttcccgtggacagccaataaaatgacgtcctctgttattttggat

SEQ ID NO: 11025 - DNA, 1969 bp, Homo sapiens
ctgccctgtgaagaaggtgcctgcttctctttgccttccaccatgattgtaaatttcctgaggcttttccagtcatgtggaactatatcgcaaacggcaccagttcaggggggtaccgcccgcctcccagaaccaaagaagtcatcatcaatggccagaccgtgaaacttaaatactgtttcacctgcaagattttccggccccctcgcgcctcccattgcagcctttgtgataactgcgtagaacggtttgatcaccactgtccctgggtaggcaactgtgtggggaaaagaaactacagatttttttatatgtttattttatctctgtcttttctgacagtctttatatttgcattcgttatcacccacgtcattcttcgttcacagcaaacaggattcctaaatgcccttaaggacagtcctgcaagcgtcctggaggctgtggtgtgcttcttctctgtctggtccatcgttggcctctcaggattccacacctacttgatcagctccaaccagacaacaaatgaggacattaaaggatcctggtcaaataaaagaggtaaagaaaattacaatccctacagctacggaaatatctttaccaactgctgtgttgccctgtgtgggcccatctcaccaagcctgatcgacagaagagggtacatccagcccgacacgccgcagccagcagcaccctccaatggcatcaccatgtacggggccacgcagtcacagagtgacatgtgcgaccaagaccagtgcattcagagcaccaaattcgttttgcaggctgcagccacgcccctgctgcagagcgagcccagcctcaccagcgacgagctgcacctgcccgggaagcctggcctgggcacgccctgcgccagcctcacactgggcccgcccacaccgcccgcctccatgcccaacctcgccgaggccacgctcgcggacgtgatgccccggaaagatgagcacatgggccaccagttcctgacgcccgatgaggcgccctcgccccccaggctactggcggcgggcagccccctggcgcacagccgcaccatgcacgtgctgggcctggccagccaggactccctgcatgaggactctgtgcgcggcctggtgaagctcagctccgtgtgacccacatggccccaggccgggggacaccagaggctcctccatgggcagcaggagtgagcggaggggtgtgtcccacagcgactttcccagccaatgccacggtggagatgacagccccaggtctggggtacagagaccacttaggatggcacagggtggctggccccggatgctgagagcttggtttcatttgaattttcttccccaacctgagtgctttgacaacaatggaaatagagaagtggctgctttcttttggtgaccctccaggggtggaatcggagtgtgtctgcccgcccttgtgacagacacacggaaggcttctgacgcttgtggccagactgcaattgcacttatgtgttatgctactaatatttgaaacagacctgccattccatttgttaattaaaaaaaaaaaaaatcctaaagggaaaaaaccgaccaggtgtggatctgcatgccacgctgccgtctgtgttacagtggtgttgctatttccaaggaagtgctgctttctttttctttttttaattttgtgaattttcaagtgctgttttgttggaagacagtgcaacgaactgagactaatggacagtgtcatcactcagcttactgggctgaggcgtctgtggagaggtggcaccggggctgcagagggcggctggggttccgtcgtgtcgggtgtcacttcaccttctgtttggccgctcgatgaggtctcgtgttgagatattgtgtgccacaacccccacagtcttcacctccgtgtgtgatgaaacttcccgtggacagccaataaaatgacgtcctctgttattttggat

SEQ ID NO: 11026 - DNA, 1642 bp, Homo sapiens
gcggccgcccagtcgccagcgctctctcctgggaggatccgctgccggaggaaggagtggacccaacctggccgcgccgcagaagtggctcccgaggaagccggcgccggggccgccgcctcgtgtcccctcggggcgcagtgctcgggggtcggcgggccagagccgaggcgcggccggggagccgggggctgcggggccgagcgggcagccgcgcgagggggcgggcgctcggcgacccgggggccggccgggctgagccccgcgccccgggacgcgggctggaagcgacggaggagtgctgccgcgggctgcggaccagcgccgtcccctcacggagcggggattctgctatgacagttgggctccccggagggttaacctgggtgtcctcggcaaagttgtcgccgagccgggagcccgtgtaggggccgcggcgccgcggctcggggggcggccgggcggccggcggcggtcgtggctcggcggggcccgcgcggccggggggctcctgggggtgtgcgcccccagccggctgccctcgtggatgcctcccggcggcggcgggcccatgaaagactgcgagtacagccagatcagcacccacagctcctcccccatggagtcgccccacaagaagaagaaaatcgcggcccggaggaaatgggaggtgttcccgggaagaaacaagttcttctgtaacgggaggatcatgatggcccggcagacgggcgtcttctacctgacgctcgtcctcatcctggtcactagcggactcttcttcgccttcgactgtccgtacctggcggtgaaaatcacccctgccatccctgcagtcgctggcatcctgttcttctttgtgatggggaccctgctccgcaccagcttcagcgaccccggagtcctcccacgagccacgcctgatgaagccgccgatctggaaaggcaaatagatatcgcaaacggcaccagttcaggggggtaccgcccgcctcccagaaccaaagaagtcatcatcaatggccagaccgtgaaacttaaatactgtttcacctgcaagattttccggccccctcgcgcctcccattgcagcctttgtgataactgcgtagaacggtttgatcaccactgtccctgggtaggcaactgtgtggggaaaagaaactacagatttttttatatgtttattttatctctgtcttttctgacagtctttatatttgcattcgttatcacccacgtcattcttcgttcacagcaaacaggattcctaaatgcccttaaggacagtcctgcaagcgtcctggaggctgtggtgtgcttcttctctgtctggtccatcgttggcctctcaggattccacacctacttgatcagctccaaccagacaacaaatgaggacattaaaggatcctggtcaaataaaagaggtaaagaaaattacaatccctacagctacggaaatatctttaccaactgctgtgttgccctgtgtgggcccatctcaccaagcctgatcgacagaagagggtacatccagcccgacacgccgcagccagcagcaccctccaatggcatcaccatgtacggggccacgcagtcacagagtgacatggtaggagtgggggccactgctccctgc

SEQ ID NO: 11027 - DNA, 308 bp, Homo sapiens
aagattgcagtcgtttggggaagtcttacctcgtgaggagggagttgaagagaaacggaggcaagatatgccatgaaagtttaattctctgtgtacatgtgattttcagtggtacttcgagaagtagatcttttcataatcacataagtaacattcagggtatgtggttactctttattgggcataaatgagcttttaaatttcttgtttacgaaatctgtggagattgacgtatggcaaattattcttatcaggtttatcgggacatcaggttcatcttcacaacttttaaccttctcttagattcc

SEQ ID NO: 11028 - DNA, 389 bp, Homo sapiens
atcatctcttttttaatggaagagtttaatttgtcaacatttattttggttacttgtatatttggactcatttctactatcttagtttttgttttctatttatcatccttttcttttgcttttttttgagacagagtcttgctctgtcgcccaggctgaagtgcagtggcgtgtgatctcggctcactgcaacctcagcctcctgggttcaagagattctcctgcctcagcctcccgagtagctgggattacaggcatgcgccataacgcccagctaattttttgtatttttagtagagatggggattcaccatgttggccaggctggtttcgaacccctaacctcaggtgatccacctgtcttggcctcccaaagtgctaggattaca

SEQ ID NO: 11029 - DNA, 439 bp, Homo sapiens
gtcagatctctttgaccatcataattttcttggttataatttttgcaatgacagtatcagtgagcccctgtctttactaaaaatcaaaacaaaaaaaaatttttttaaacctggtgtggtggcgcatgcctgtagtcccagctactggggaagctgtggcaagagctcttgagctgtgttcatgccactgcagtccagcctgggcgactgagcaagaccctgtcaaaaaaaaaaaaaaaggaaagaccctgttatagattagaaagagcactggacttggggccaggatgtttgtgtaaatgtccctgtgtgacctttagtgagtcacttagccttttgtaaaccccagccacagcatgactgcatcactggttcctttgaaccccctgtgttccatcagcctgctggaacagtccaccatgcagggcgcttggtactc

SEQ ID NO: 11030 - DNA, 462 bp, Homo sapiens
acctcaaaaagtaaatcagtgagtggatgtaggaattggggtaaatgagcaatagctgccttgtcatttcaagttctgtgtcttactcctatttcacaatcctttcataggagagagagagagagttttctttaaaggcaaggtttgtgggtaagaaaaattattgaaataatgtaggaataactcaaaaccagagaagcctttgactcagttcaaagaggctattaggaggaaattgactaaagctgtacagactctaagacctgggcacttacattcctttgcatttcttgaagaatgctttgaattcttgttctactcctaggaggctctcgaacttcagatactaatctcaaaacgagttatggagtccagaagacatcaattccctgtgacaaacagaaaactaatttacattcctgctgaaactctgtagattttattttctcaggaaaaaaaaaa

SEQ ID NO: 11031 - DNA, 248 bp, Homo sapiens
ggtcgacgctggaatgaaagtgaaacatagttaacaacttttgagagtcgtgaagccagcattcattagtggcaccatggatgatgtaaagagcattgactaaatgatattagaaaactacagaaacagtccgggtgaggtggctcacatctgtaatcccagcactttgggaggccaaggcaggcagatcacctgaggtcaggagttcaagaccagcctggccaacatggcgaaatcatgtctctact

SEQ ID NO: 11032 - DNA, 338 bp, Homo sapiens
caggaagcaaagaaaaaaagtatgagcacgtgtgtgtttactttccaagaccaggcagaggctgttgattatttggaaaaccttggaagacctttaagtggccacggtgacccaagtgaccttcgaggagacaaagtctgcatctttgcgcccaaatttgccaaaggcgttgccagagacatctttctagaagaagctagaacaaaataaaagtttctgcaaaggaactttttgagcctgtaactagagcacaagctgcttccggggaaggcggagggaacacgtgggcacattgagttgcacgtggacgcggagtgcgcaggcgtgcgctgaggcca

SEQ ID NO: 11033 - DNA, 430 bp, Homo sapiens
tcttcataaccttagaagaggctacagtttcttaggtatgacatgaaaagcacaaggaataaaagaatagataaataaacttaacatcataaaaattaaaaacatttgtgcattaaaagacattatcaaagggccaggggcagaggctcatacctgtaatctctgtgcattgggaggccaaggtgggcggatcacttgaggcaagcctgcccaacatggcaaaaccctgtctctattaaaaatacaaaaattagccaggtttagtggtaaacatctgtaatcccagctactcgggggactgaggcatgagaatcacttgaacctgggaagcggaggttgcagtgagccgagattgtgccactgcattccagcctgggcaacagagtgagactctgtctcaaaaaataaaatacattaaattataaaataa

SEQ ID NO: 11034 - DNA, 408 bp, Homo sapiens
tcttcatatgattttgtaaatcatgagtgaaagctacttaaacagttttgttttgttttcttaacataacaaaattagagcacttgatctggttttcatgttagtgaatttcaatgaaaagattaacagaggccaggcatggtgactcatgcctgtaatcccagtacagtggagagaccaaggcgggcggatcccttgaacccaggagttccagcttggacaacatggtgaaacccatctctacaaaaataaaaattagccaggcgtggtggtacgtgcctgtagtccccactacttgggaggctgaggtagaaggatcccttgagcccaggaggtggaggttgcagtgagccgagattatgccactgcactccagcctgcgtcacagagttgtttttgttttgtttt

SEQ ID NO: 11035 - DNA, 408 bp, Homo sapiens
gggagcaagacacagtccctgccttttaaaggaagtctagcatatttgggtcactcgtgtcaagttttaagaattaatattagattcttgagctacattatggcaagtttctgcaaatgttaatggctgaactatctcaagataggcagtgaagctggatggattcaattatgttttataagaccacatttgtatacttctgtgctctccactgtgttgacttttcaggatatcaggttgaaaagcaggccttgtgggatgtaattataaaagctttttttttgtcactttcaaattactttttttccctttttgtctctttcaatttactctttgagactggttcatcctctttcatgggttaacttaatttttctggttgcttttagataatacaaatcatccttc

SEQ ID NO: 11036 - DNA, 394 bp, Homo sapiens
ggcaggtggctccctgctcaaggcctccctattcgtggtctctatacttgctgttccttcaagcaattgatcacataaaacagataacaagccgttaatgactttcaagttgtctggaatgttttttactcaaatactccaaagcataatacctcatcttctttaagtctttgcttaaagattatgtaccatgtgattatgtaactcatggtacataatcagttctctgattaccttatgtaaaacagtactgtctattccctttctctgatttatttatctccatagcccttctcaccactcacataggatatatcttgctttcttgttaaattattttatttatttaatgcttattgtctttctctcccattcatatgaacggcagtttttt

SEQ ID NO: 11037 - DNA, 1394 bp, Homo sapiens
  misc_feature (1394)..(1394): n is a, c, g, or t
cccttctataagggcatcttcgtgacgtcgtaggctgccgttctgggtccccgggtccgagttagtcgctacgaaacggccggccgcttcgaccaagacactccttgcttcaggccactccagacagcgtgtgctgaagggtgccctgggtggtcagaaacaagtgcatgaactttctctttgaagtgtttttgtccctgtttcctagagttcttggcattttacacgtctttctttctttttttttttttttcatattaaacttgtagttttattcaggtttgattttaacaaatgtgtcggggagagagcccgcagggaagggtaaagcccatgggggcaggcccttcccagatgcctgaggagggggcaggtcccctcccctctcctcttcttccctccccatctaaaggggtttggggagagacacaggcaggcgagggggctggtccccagtctgttgggtggtgctcagggtaaagggctatgggcaacaggggaccagaccaaggatgagtggggagggcacaaggaccatttgccagaatccaccgctttctgattccagattgaatttaaaaaaaaaaaaaaaaaaaaaaaaaaaaagtgtggtgggcggccttggggcccggaaaaagttttaaaaccattcgcgtggggggggcggggccccagagggttaggggaccaggggcaaagggcggtccccaaggaggaaccccgggccggacaggggtgggttcccccccaataaaaaaggggccggggggggaaacccgagggggtcttgggaccaaatccacagaggggaggtccaggagggccagatacacgggaggctctacctcacgaaggggggcccagggcgagagcccggaaaactaaaattacgccagcgcgcgcggggtggaggggaagacaaccagcaacagaagacacacgaacatcagcacagcacagacacgagcagcgccgataacagagacgacggaaacagtaaggagacgagtcgacgcagcaagagcagcaaacagcagaacgaaagcgacacggcagccgacggacaatcgaagaggaaacagacacgcaagaggatagatcagacgcacgcaggaccaggcgacaacgaacagtgaggaaggcagaccagagcaagaaggatagagcaacaagcgggcacacagaaaggaggaatcactcacgagagagcggaggcagcgactggagaagagccgaagaggagaggacggcagggcacaacagagagtcagagcacagacgggagcggatgaacaagagacagggacgaagagagcaaagacggacaaagacgcagagagaggagacgagagaacagcagatcgcaagggagcagaacaagagaagaagagagn

SEQ ID NO: 11038 - DNA, 482 bp, Homo sapiens
gaaaatatagttgtaaagttatttatataaaatcacatttaacctgtaacgtattgtaagatgagtgttggtgaaacaccttctttgtctggggaataacctgtggtttgttgccttgagccaggaaagaattcagaacatggacacatgggtgggttaaggagcaggaagtttagtagtggaaaggtgagaggaagaggagaacagcttcttgcaagagagaggagatagagggagagcgagacgtctggaaaaaaggaggatcaataacaagttctgaaattgaggcagtaattaatatcctaccaaccaaaaaaagcccaggaccagatggattcacagccaaattctaccagaggtataaagaggagctggtaccattccttctgaaagtattccgaacaatagaaaaagagggactcctcctcaactcattctatgaggccagcattatcctgataccaaaacctggcagagacaca

SEQ ID NO: 11039 - DNA, 452 bp, Homo sapiens
tgtctaactaactaactgcatgaatgaaaacttattttccaaaagacagctccctctgaggcccacaattttgtaaataataacaacagaaatacatttccccactgaattcctgagaaaagaattcgcctaattatataaactccccactgctccttacatcctcttttccccaggcactttaacatggactcccaaaatgctttggctctcccactctcctagtatagcagatggagtgcttgggagtgtctgatttagagacaagaaggcaagagggagacgggcggcagctagaagcggcccatcctcagagtgtatgcaagacaggaagtgtctgaatatggaccaaatcaaaggctgaggcagctctgggggagccctgtccggtgtttgaggaactcgaagacacaacttctaagacattcttactacagcacaaaagtctgtta

SEQ ID NO: 11040 - DNA, 630 bp, Homo sapiens
catcccaaagaactgggattacaggtgtgagtcaccactgttggtgtgtcctaaattttaatggctattttggtaccttaccagttctttgaaggaatacctgtatttattgagtggctgtgagctagttgtagtgctcagtccttgggtgggtagctttatctaatatgagtatttttagtttagaaaaatattgtgacttatacagttaactccatttattaatgtcactaattgatgaacaaatttttttgtattaatctgatgcctttgcccttgtgttgaacatgggttaagaaaatgcttttcaggctgagcatggtggctcatgcctataatcttcaacactttgggaggcccagccaggcggatcacttgagcccaggagttcaagaccagcctggtcagtatggcaagacctcacctctactttaaaaaaaaaaaatagcagggtgtagtgtcacatgcctgtagccccaattactcaggaggctgagccgggaggattgctttgagcccaggagttcgaggctacagcgagctataatcgagccactgcactccagcctgggcaaccgagggagaccttgtctcaaaaaaacaaacaaacaaacaaaaaaacaaagaaaa

SEQ ID NO: 11041 - DNA, 381 bp, Homo sapiens
cctgaacctcctgggctcaagcagtcctcctatctcagcctcctacctgtagctgggactacaggaacatgccaccatgcccagctaatttttaaattattttttgtagagacagtgcctcactgtgttgccccaggagttcaagaccagcctggtcagtatggcaagacctcacctctactttaaaaaaaaaaaatagcagggtgtagtgtcacatgcctgtagccccaattactcaggaggctgagccgggaggattgctttgagcccaggagttcgaggctacagcgagctataatcgagccactgcactccagcctgggcaaccgagggagaccttgtctcaaaaaaacaaacaaacaaacaaaaaaacaaagaaaa

SEQ ID NO: 11042 - DNA, 461 bp, Homo sapiens
tcatcagcaccacagctgagtgttacctgggatgggctgtggtgccactccggtgcctccctccttcttctatcctacagggactaccatgaatcctacttaccgcactggagagctgtgcagatggaaggaagtgggagatgtggaaacactttcaacaactgaagcagcaggccaagaaaaggtgtcaatagctgtgcttttgcccacaaaaaagtgagtcttcttcattaatgtatgtcttgaacatggaacccgtcccctccaggttgttgactgggctgtgccccctgttgtcagagaagtgtcagtgtctgggaccatctactggtgatatttccctgctcagaagagtcatgaccacagaccccaggcatttcctcttggcaggcactgtgcccagagttttaggaacaggctcactgagtccatacatcagaaggtaggtcctagggccactc

SEQ ID NO: 11043 - DNA, 448 bp, Homo sapiens
ttcttaaatcacctccacttacacacattgttaagcatctaatagaaaacaaccgtcccttccctagttcttttcctctttggattgctttttaagagcaagttgggaaagtctttgtttttatgggccccagttcccatttccaatctcacctccatgctccacaacccccctgaattaaagaaggtctccagcgttgtcaatcaacccaccatgcaccaggccataaaatcttattttcagccacctgcaggatgatggagggaagaggaaaccgaactgaggaagaggcgggagcagagctgcagccggccgctgaagatggtttcaacagaattctttggcgggtggaagggtgcggagtctcgggtcatttcctgcgaggtctgggctgtatggggggaatctgtaatagcactgcctcacagttccattagtgtcagaactc

SEQ ID NO: 11044 - DNA, 1919 bp, Homo sapiens
ggcctggccgtgttaggcttcgctggcgtaaagtccccgggagctttgcccctcacggagaacgttagttgaccctgatggggacccgtagggtaaaggttttgttttgtttttttttacggaaaaggttgtggttaggccccttggaaagttgcgacaaaactcgagttagacaaggaaggtcggaactaagtggccacagcaacaatgcaccagcaagcagggagcgtgataggaagagctaaagaggaatcgggaaaccctgggtaaaagtcgtccaagtggaacttcctttggtcgggggtctgatactcgaaggaaacggtctttcacttctgggttagggcgtccgcccagagggcgactgcaatgaaggaaattgtgccctgcgacttcccgtaacagagctgtgtgtccacgctcccttttccgagcaggcgcggacgcttgtgcctggaagtaaacttgttaacggttctttgccttttggggaggggagacagcccagagaaggctttggagacccttgagtcggccagcgagcagggtttcttacttgagcgcctccacaaataaacgctccttcgctcctccgtcgcgtgcgtttccctgggataataagtgggaaagtggtggcttttatttttttgagacagggtctcaccgccgtcgcccaggccggatggagtgcagtggcgcgatcacggctcactgcagcctcgacttcccaggctcagagatgggtttcaccatgtttcccagccttgtctcaaactcctgacctcaagtgatccgccgtcttgggtcttcgaaagtgctgggacagcaggagtgagccaccgcatctggcccggaaagtgttttggagcgtagaaaaatgcaaattatagggctgccttcaaggatcccgaaggacccacagatttgccgcatcaggctcctatgcacgccggtaatttgatgtgttgagatgcactgcccagtgcgttgtttttactggaggagcttgtgtgcggagctccttgctagtgtatgtgttgggatgggagagaagtgcgggagaactatgagataatgccccctgatcctcagggtcttaggaggtatggtcggagaggctaagctaaagtatgaaagccgtgtgtaggcccttctgtgtagtgcagaaaaggtagaggtatgtgatttgaaagagtagggatgacatggaggatgcgactcctggttggatctataaactaatgtctttggaacgaaagcacatgcaaccttttgaaaatggatgggtgataatgaaagaccattccagagaagaaacaccatggtgcaaaggctcaagaggcatactggaagtacaatgaagagagcaatctaactgaaatgggaaaaaaagaaacaaagagtaaaaagtaagatttgatgagaaagatggaatcgatttttaaatttttttatctacacaacaaaatttattatcttaaccatttttgagtgaataattcgttagtattaagtatatttacctcgtgcggccagtctccagaattcttttcatcttgcaaaacaaaccccgaacccattaaacaatttctcattcgccattttccagctagccttggtaacctccattctagttctgtctctgtgaatttgactgtgtaccccgtgtaagtggtatcatacagtatttgtatttttgtgactggcatatttcacatagcataatctccttgtggtttatccatcttgtagcatgtgtcagaatttccttcccttttaagactaaataatattccattgtgtgtatataccacttgtgttatttccaccttttggttattgtgaataatactgcttcaaacatgagtgtacagataactcttcaagatccttttagggtaatacagagatagtaagtt

SEQ ID NO: 11045 - DNA, 1722 bp, Homo sapiens
ggcctggccgtgttaggcttcgctggcgtaaagtccccgggagctttgcccctcacggagaacgttagttgaccctgatggggacccgtagggtaaaggttttgttttgtttttttttacggaaaaggttgtggttaggccccttggaaagttgcgacaaaactcgagttagacaaggaaggtcggaactaagtggccacagcaacaatgcaccagcaagcagggagcgtgataggaagagctaaagaggaatcgggaaaccctgggtaaaagtcgtccaagtggaacttcctttggtcgggggtctgatactcgaaggaaacggtctttcacttctgggttagggcgtccgcccagagggcgactgcaatgaaggaaattgtgccctgcgacttcccgtaacagagctgtgtgtccacgctcccttttccgagcaggcgcggacgcttgtgcctggaaggtctcaccgccgtcgcccaggccggatggagtgcagtggcgcgatcacggctcactgcagcctcgacttcccaggctcagagatgggtttcaccatgtttcccagccttgtctcaaactcctgacctcaagtgatccgccgtcttgggtcttcgaaagtgctgggacagcaggagtgagccaccgcatctggcccggaaagtgttttggagcgtagaaaaatgcaaattatagggctgccttcaaggatcccgaaggacccacagatttgccgcatcaggctcctatgcacgccggtaatttgatgtgttgagatgcactgcccagtgcgttgtttttactggaggagcttgtgtgcggagctccttgctagtgtatgtgttgggatgggagagaagtgcgggagaactatgagataatgccccctgatcctcagggtcttaggaggtatggtcggagaggctaagctaaagtatgaaagccgtgtgtaggcccttctgtgtagtgcagaaaaggtagaggtatgtgatttgaaagagtagggatgacatggaggatgcgactcctggttggatctataaactaatgtctttggaacgaaagcacatgcaaccttttgaaaatggatgggtgataatgaaagaccattccagagaagaaacaccatggtgcaaaggctcaagaggcatactggaagtacaatgaagagagcaatctaactgaaatgggaaaaaaagaaacaaagagtaaaaagtaagatttgatgagaaagatggaatcgatttttaaatttttttatctacacaacaaaatttattatcttaaccatttttgagtgaataattcgttagtattaagtatatttacctcgtgcggccagtctccagaattcttttcatcttgcaaaacaaaccccgaacccattaaacaatttctcattcgccattttccagctagccttggtaacctccattctagttctgtctctgtgaatttgactgtgtaccccgtgtaagtggtatcatacagtatttgtatttttgtgactggcatatttcacatagcataatctccttgtggtttatccatcttgtagcatgtgtcagaatttccttcccttttaagactaaataatattccattgtgtgtatataccacttgtgttatttccaccttttggttattgtgaataatactgcttcaaacatgagtgtacagataactcttcaagatccttttagggtaatacagagatagtaagtt

SEQ ID NO: 11046 - DNA, 1448 bp, Homo sapiens
ggcctggccgtgttaggcttcgctggcgtaaagtccccgggagctttgcccctcacggagaacgttagttgaccctgatggggacccgtagggtaaaggttttgttttgtttttttttacggaaaaggttgtggttaggccccttggaaagttgcgacaaaactcgagttagacaaggaaggtcggaactaagtggccacagcaacaatgcaccagcaagcagggagcgtgataggaagagctaaagaggaatcgggaaaccctggagatgggtttcaccatgtttcccagccttgtctcaaactcctgacctcaagtgatccgccgtcttgggtcttcgaaagtgctgggacagcaggagtgagccaccgcatctggcccggaaagtgttttggagcgtagaaaaatgcaaattatagggctgccttcaaggatcccgaaggacccacagatttgccgcatcaggctcctatgcacgccggtaatttgatgtgttgagatgcactgcccagtgcgttgtttttactggaggagcttgtgtgcggagctccttgctagtgtatgtgttgggatgggagagaagtgcgggagaactatgagataatgccccctgatcctcagggtcttaggaggtatggtcggagaggctaagctaaagtatgaaagccgtgtgtaggcccttctgtgtagtgcagaaaaggtagaggtatgtgatttgaaagagtagggatgacatggaggatgcgactcctggttggatctataaactaatgtctttggaacgaaagcacatgcaaccttttgaaaatggatgggtgataatgaaagaccattccagagaagaaacaccatggtgcaaaggctcaagaggcatactggaagtacaatgaagagagcaatctaactgaaatgggaaaaaaagaaacaaagagtaaaaagtaagatttgatgagaaagatggaatcgatttttaaatttttttatctacacaacaaaatttattatcttaaccatttttgagtgaataattcgttagtattaagtatatttacctcgtgcggccagtctccagaattcttttcatcttgcaaaacaaaccccgaacccattaaacaatttctcattcgccattttccagctagccttggtaacctccattctagttctgtctctgtgaatttgactgtgtaccccgtgtaagtggtatcatacagtatttgtatttttgtgactggcatatttcacatagcataatctccttgtggtttatccatcttgtagcatgtgtcagaatttccttcccttttaagactaaataatattccattgtgtgtatataccacttgtgttatttccaccttttggttattgtgaataatactgcttcaaacatgagtgtacagataactcttcaagatccttttagggtaatacagagatagtaagtt

SEQ ID NO: 11047 - DNA, 1637 bp, Homo sapiens
ggcctggccgtgttaggcttcgctggcgtaaagtccccgggagctttgcccctcacggagaacgttagttgaccctgatggggacccgtagggtaaaggttttgttttgtttttttttacggaaaaggttgtggttaggccccttggaaagttgcgacaaaactcgagttagacaaggaaggtcggaactaagtggccacagcaacaatgcaccagcaagcagggagcgtgataggaagagctaaagaggaatcgggaaaccctgggtaaaagtcgtccaagtggaacttcctttggtcgggggtctgatactcgaaggaaacggtctttcacttctgggttagggcgtccgcccagagggcgactgcaatgaaggaaattgtgccctgcgacttcccgtaacagagctgtgtgtccacgctcccttttccgagcaggcgcggacgcttgtgcctggaagtaaacttgttaacggttctttgccttttggggaggggagacagcccagagaaggctttggagacccttgagtcggccagcgagcagggtttcttacttgagcgcctccacaaataaacgctccttcgctcctccgtcgcgtgcgtttccctgggataataagtgggaaagtggtggcttttatttttttgagacagggtctcaccgccgtcgcccaggccggatggagtgcagtggcgcgatcacggctcactgcagcctcgacttcccaggctcagagatgggtttcaccatgtttcccagccttgtctcaaactcctgacctcaagtgatccgccgtcttgggtcttcgaaagtgctgggacagcaggagtgagccaccgcatctggcccggaaagtgttttggagcgtagaaaaatgcaaattatagggctgccttcaaggatcccgaaggacccacagatttgccgcatcaggctcctatgcacgccggtaatttgatgtgttgagatgcactgcccagtgcgttgtttttactggaggagcttgtgtgcggagctccttgctagtgtatgtgttgggatgggagagaagtgcgggagaactatgagataatgccccctgatcctcagggtcttaggaggtatggtcggagaggctaagctaaagtatgaaagccgtgtgtaggcccttctgtgtagtgcagaaaaggtagaggtatgtgatttgaaagagtagggatgacatggaggatgcgactcctggttggatctataaactaatgtctttggaacgaaagcacatgcaaccttttgaaaatggatgggtgataatgaaagaccattccagagaagaaacaccatggtgcaaaggctcaagaggcatactggaagtacaatgaagagagcaatctaactgaaatgggaaaaaaagaaacaaagagtaaaaagtaagatttgatgagaaagatggaatcgatttttaaatttttttatctacacaacaaaatttattatcttaaccatttttgagtgaataattcgttagtattaagtatatttacctcgtgcggccagtctccagaattcttttcatcttgcaaaacaaaccccgaacccattaaacaatttctccttgtgctccacttctcaaccactgcacttggctagtcttaaac

SEQ ID NO: 11048 - DNA, 1529 bp, Homo sapiens
ggcctggccgtgttaggcttcgctggcgtaaagtccccgggagctttgcccctcacggagaacgttagttgaccctgatggggacccgtagggtaaaggttttgttttgtttttttttacggaaaaggttgtggttaggccccttggaaagttgcgacaaaactcgagttagacaaggaaggtcggaactaagtggccacagcaacaatgcaccagcaagcagggagcgtgataggaagagctaaagaggaatcgggaaaccctggggtctcaccgccgtcgcccaggccggatggagtgcagtggcgcgatcacggctcactgcagcctcgacttcccaggctcagagatgggtttcaccatgtttcccagccttgtctcaaactcctgacctcaagtgatccgccgtcttgggtcttcgaaagtgctgggacagcaggagtgagccaccgcatctggcccggaaagtgttttggagcgtagaaaaatgcaaattatagggctgccttcaaggatcccgaaggacccacagatttgccgcatcaggctcctatgcacgccggtaatttgatgtgttgagatgcactgcccagtgcgttgtttttactggaggagcttgtgtgcggagctccttgctagtgtatgtgttgggatgggagagaagtgcgggagaactatgagataatgccccctgatcctcagggtcttaggaggtatggtcggagaggctaagctaaagtatgaaagccgtgtgtaggcccttctgtgtagtgcagaaaaggtagaggtatgtgatttgaaagagtagggatgacatggaggatgcgactcctggttggatctataaactaatgtctttggaacgaaagcacatgcaaccttttgaaaatggatgggtgataatgaaagaccattccagagaagaaacaccatggtgcaaaggctcaagaggcatactggaagtacaatgaagagagcaatctaactgaaatgggaaaaaaagaaacaaagagtaaaaagtaagatttgatgagaaagatggaatcgatttttaaatttttttatctacacaacaaaatttattatcttaaccatttttgagtgaataattcgttagtattaagtatatttacctcgtgcggccagtctccagaattcttttcatcttgcaaaacaaaccccgaacccattaaacaatttctcattcgccattttccagctagccttggtaacctccattctagttctgtctctgtgaatttgactgtgtaccccgtgtaagtggtatcatacagtatttgtatttttgtgactggcatatttcacatagcataatctccttgtggtttatccatcttgtagcatgtgtcagaatttccttcccttttaagactaaataatattccattgtgtgtatataccacttgtgttatttccaccttttggttattgtgaataatactgcttcaaacatgagtgtacagataactcttcaagatccttttagggtaatacagagatagtaagtt

SEQ ID NO: 11049 - DNA, 1383 bp, Homo sapiens
  misc_feature (1206)..(1206): n is a, c, g, or t
tataggctaggtacgggctgggtttgaattcggccgaggctccagcatggaggaggccaccggctgtgcagggttcaatctcatccacttggtggccacgggcatctcctgcttcttgggctctgggctcctgaccctagcagtgtacctgtcttgccagcactgccagcgtcagtcccaggagtccacactggtccatcctgccacccccaaccatttgcactacaagggcggaggcaccccgaagaatgaaaagtacacacccatggaattcaagaccctgaacaagaataacttgatccctgatgacagagccaacttctacccattgcagcagaccaatgtgtacacgactacttactacccaagccccctgaacaaacacagcttccggcccgaggcctcacctggacaacggtgcttccccaacagctgataccgccgtcctggggacttgggcttcttgccttcataaggcacagagcagatggagatgggacagtggagccagtttggttttctccctctgcactaggccaagaacttgctgccttgcctgtggggggtcccatccggcttcagagagctctggctggcattgaccatgggggaaagggctggtttcaggctgacatatggccgcaggtccagttcagcccaggtctctcatggttatcttccaacccactgtcacgctgacactatgctgccatgcctgggctgtggacctactgggcatttgaggaattggagaatggagatggcaagagggcaggcttttaagtttgggttggagacaacttcctgtggcccccacaagctgagtctggccttctccagctggccccaaaaaaggcctttgctacatcctgattatctctgaaagtaatcaatcaagtggctccagtagctctggattttctgccagggctgggccattgtggtgctgccccagtatgacatgggaccaaggccagcgcaggttatccacctctgcctggaagtctatactctacccagggcatccctctggtcagaggcagtgagtactgggaactggaggctgacctgtgcttagaagtcctttaatctgggctggtacaggcctcagccttgccctcaatgcacgaaaggtggcccaggagagaggatcaatgccataggaggcagaagtctggcctctgtgcctctatggagactatcttncagttgctgctcaacagagttgttggctgagacctgcttgggagtctctgctggcccttcatctgttcaggaacacacacacacacacactcacacacgcacacacaatcacaatttgctacagcaacaaaaaagacattgggctgtggcattattaattaaagatgatatccagtc

SEQ ID NO: 11050 - DNA, 1889 bp, Homo sapiens
  misc_feature (1712)..(1712): n is a, c, g, or t
gccgagacgaggacctgtcccgcggacggtctccggctcctgcgacaccgacgccctggtggaggacctcctgtccgcagcgggagcacctccccgcacacggtgagcgggggctgggccgcctggggcccgtggtcgtcctgctcccgggactgcgagctgggcttccgcgtccgcaagagaacgtgcactaacccggagccccgcaacgggggcctgccctgcgtgggcgatgctgccgagtaccaggactgcaacccccaggcttgcccagttcggggtgcttggtcctgctggacctcatggtctccatgctcagcttcctgtggtgggggtcactatcaacgcacccgttcctgcaccagccccgcaccctccccagaaggctggtcgccctggtctgagtggagtaagtgcactgacgacggagcccagagccgaagccggcactgtgaggagctcctcccagggtccagcgcctgtgctggaaacagcagccagagccgcccctgcccctacagcgagattcccgtcatcctgccagcctccagcatggaggaggccaccggctgtgcagggttcaatctcatccacttggtggccacgggcatctcctgcttcttgggctctgggctcctgaccctagcagtgtacctgtcttgccagcactgccagcgtcagtcccaggagtccacactggtccatcctgccacccccaaccatttgcactacaagggcggaggcaccccgaagaatgaaaagtacacacccatggaattcaagaccctgaacaagaataacttgatccctgatgacagagccaacttctacccattgcagcagaccaatgtgtacacgactacttactacccaagccccctgaacaaacacagcttccggcccgaggcctcacctggacaacggtgcttccccaacagctgataccgccgtcctggggacttgggcttcttgccttcataaggcacagagcagatggagatgggacagtggagccagtttggttttctccctctgcactaggccaagaacttgctgccttgcctgtggggggtcccatccggcttcagagagctctggctggcattgaccatgggggaaagggctggtttcaggctgacatatggccgcaggtccagttcagcccaggtctctcatggttatcttccaacccactgtcacgctgacactatgctgccatgcctgggctgtggacctactgggcatttgaggaattggagaatggagatggcaagagggcaggcttttaagtttgggttggagacaacttcctgtggcccccacaagctgagtctggccttctccagctggccccaaaaaaggcctttgctacatcctgattatctctgaaagtaatcaatcaagtggctccagtagctctggattttctgccagggctgggccattgtggtgctgccccagtatgacatgggaccaaggccagcgcaggttatccacctctgcctggaagtctatactctacccagggcatccctctggtcagaggcagtgagtactgggaactggaggctgacctgtgcttagaagtcctttaatctgggctggtacaggcctcagccttgccctcaatgcacgaaaggtggcccaggagagaggatcaatgccataggaggcagaagtctggcctctgtgcctctatggagactatcttncagttgctgctcaacagagttgttggctgagacctgcttgggagtctctgctggcccttcatctgttcaggaacacacacacacacacactcacacacgcacacacaatcacaatttgctacagcaacaaaaaagacattgggctgtggcattattaattaaagatgatatccagtc

SEQ ID NO: 11051 - DNA, 1952 bp, Homo sapiens
  misc_feature (1775)..(1775): n is a, c, g, or t
gccgagacgaggacctgtcccgcggacggtctccggctcctgcgacaccgacgccctggtggaggacctcctgtccgcagcgggagcacctccccgcacacggtgagcgggggctgggccgcctggggcccgtggtcgtcctgctcccgggactgcgagctgggcttccgcgtccgcaagagaacgtgcactaacccggagccccgcaacgggggcctgccctgcgtgggcgatgctgccgagtaccaggactgcaacccccaggcttgcccagttcggggtgcttggtcctgctggacctcatggtctccatgctcagcttcctgtggtgggggtcactatcaacgcacccgttcctgcaccagccccgcaccctccccaggtgaggacatctgtctcgggctgcacacggaggaggcactatgtgccacacaggcctgcccagaaggctggtcgccctggtctgagtggagtaagtgcactgacgacggagcccagagccgaagccggcactgtgaggagctcctcccagggtccagcgcctgtgctggaaacagcagccagagccgcccctgcccctacagcgagattcccgtcatcctgccagcctccagcatggaggaggccaccggctgtgcagggttcaatctcatccacttggtggccacgggcatctcctgcttcttgggctctgggctcctgaccctagcagtgtacctgtcttgccagcactgccagcgtcagtcccaggagtccacactggtccatcctgccacccccaaccatttgcactacaagggcggaggcaccccgaagaatgaaaagtacacacccatggaattcaagaccctgaacaagaataacttgatccctgatgacagagccaacttctacccattgcagcagaccaatgtgtacacgactacttactacccaagccccctgaacaaacacagcttccggcccgaggcctcacctggacaacggtgcttccccaacagctgataccgccgtcctggggacttgggcttcttgccttcataaggcacagagcagatggagatgggacagtggagccagtttggttttctccctctgcactaggccaagaacttgctgccttgcctgtggggggtcccatccggcttcagagagctctggctggcattgaccatgggggaaagggctggtttcaggctgacatatggccgcaggtccagttcagcccaggtctctcatggttatcttccaacccactgtcacgctgacactatgctgccatgcctgggctgtggacctactgggcatttgaggaattggagaatggagatggcaagagggcaggcttttaagtttgggttggagacaacttcctgtggcccccacaagctgagtctggccttctccagctggccccaaaaaaggcctttgctacatcctgattatctctgaaagtaatcaatcaagtggctccagtagctctggattttctgccagggctgggccattgtggtgctgccccagtatgacatgggaccaaggccagcgcaggttatccacctctgcctggaagtctatactctacccagggcatccctctggtcagaggcagtgagtactgggaactggaggctgacctgtgcttagaagtcctttaatctgggctggtacaggcctcagccttgccctcaatgcacgaaaggtggcccaggagagaggatcaatgccataggaggcagaagtctggcctctgtgcctctatggagactatcttncagttgctgctcaacagagttgttggctgagacctgcttgggagtctctgctggcccttcatctgttcaggaacacacacacacacacactcacacacgcacacacaatcacaatttgctacagcaacaaaaaagacattgggctgtggcattattaattaaagatgatatccagtc

SEQ ID NO: 11052 - DNA, 1402 bp, Homo sapiens
  misc_feature (1225)..(1225): n is a, c, g, or t
cctgttgctgtttctgctcccagggaggcaggcaggagtctgtcctcttcacagtggccctcatcttactacctgcctctcttcccctagggttcaatctcatccacttggtggccacgggcatctcctgcttcttgggctctgggctcctgaccctagcagtgtacctgtcttgccagcactgccagcgtcagtcccaggagtccacactggtccatcctgccacccccaaccatttgcactacaagggcggaggcaccccgaagaatgaaaagtacacacccatggaattcaagaccctgaacaagaataacttgatccctgatgacagagccaacttctacccattgcagcagaccaatgtgtacacgactacttactacccaagccccctgaacaaacacagcttccggcccgaggcctcacctggacaacggtgcttccccaacagctgataccgccgtcctggggacttgggcttcttgccttcataaggcacagagcagatggagatgggacagtggagccagtttggttttctccctctgcactaggccaagaacttgctgccttgcctgtggggggtcccatccggcttcagagagctctggctggcattgaccatgggggaaagggctggtttcaggctgacatatggccgcaggtccagttcagcccaggtctctcatggttatcttccaacccactgtcacgctgacactatgctgccatgcctgggctgtggacctactgggcatttgaggaattggagaatggagatggcaagagggcaggcttttaagtttgggttggagacaacttcctgtggcccccacaagctgagtctggccttctccagctggccccaaaaaaggcctttgctacatcctgattatctctgaaagtaatcaatcaagtggctccagtagctctggattttctgccagggctgggccattgtggtgctgccccagtatgacatgggaccaaggccagcgcaggttatccacctctgcctggaagtctatactctacccagggcatccctctggtcagaggcagtgagtactgggaactggaggctgacctgtgcttagaagtcctttaatctgggctggtacaggcctcagccttgccctcaatgcacgaaaggtggcccaggagagaggatcaatgccataggaggcagaagtctggcctctgtgcctctatggagactatcttncagttgctgctcaacagagttgttggctgagacctgcttgggagtctctgctggcccttcatctgttcaggaacacacacacacacacactcacacacgcacacacaatcacaatttgctacagcaacaaaaaagacattgggctgtggcattattaattaaagatgatatccagtc

SEQ ID NO: 11053 - DNA, 1182 bp, Homo sapiens
  misc_feature (1120)..(1120): n is a, c, g, or t
  misc_feature (1130)..(1130): n is a, c, g, or t
  misc_feature (1174)..(1174): n is a, c, g, or t
gccgagacgaggacctgtcccgcggacggtctccggctcctgcgacaccgacgccctggtggaggacctcctgtccgcagcgggagcacctccccgcacacggtgagcgggggctgggccgcctggggcccgtggtcgtcctgctcccgggactgcgagctgggcttccgcgtccgcaagagaacgtgcactaacccggagccccgcaacgggggcctgccctgcgtgggcgatgctgccgagtaccaggactgcaacccccaggcttgcccagttcggggtgcttggtcctgctggacctcatggtctccatgctcagcttcctgtggtgggggtcactatcaacgcacccgttcctgcaccagccccgcaccctccccagaaggctggtcgccctggtctgagtggagtaagtgcactgacgacggagcccagagccgaagccggcactgtgaggagctcctcccagggtccagcgcctgtgctggaaacagcagccagagccgcccctgcccctacagcgagattcccgtcatcctgccagcctccagcatggaggaggccaccggctgtgcagggttcaatctcatccacttggtggccacgggcatctcctgcttcttgggctctgggctcctgaccctagcagtgtacctgtcttgccagcactgccagcgtcagtcccaggagtccacactggtccatcctgccacccccaaccatttgcactacaagggcggaggcaccccgaagaatgaaaagtacacacccatggaattcaagaccctgaacaagaataacttgatccctgatgacagagccaacttctacccattgcagcagaccaatgtgtacacgactacttactacccaagccccctgaacaaacacagcttccggcccgaggcctcacctggacaacggtgcttccccaacagctgataccgccgtcctggggacttgggcttcttgccttcataaggcacagagcagatggagatgggacagtggagccagtttggttttctccctctgcactaggccaagaacttgctgccttgcctgtggggggtcccatccggcttcagagagctctggctggcattgaccatggggaagntggtcagctnattgcgaagtcagtagcagcttatgttttcacatgacctaattntgctgctg

SEQ ID NO: 11054 - DNA, 416 bp, Homo sapiens
gcacaccctccagctcaacacattaacgcaataacaacacctacgtggctgggactgttaatgatttaaaaatttaaattatgtgtaatgatatttcacaaattaatgatttaaaaatttaaattatgtgtaatgacatttcagaagataaaagctcccctggggctcaaccatggcgatttgtagtggagtcacagagccatctatacatccagtagcagaatgttggggaaccgtgctttgtcacttcgtggggtacagtgacatcccttcccaccccaaacttattaatcaggagattcaggtggacttctgaggtgggggcatattgctggcactagcctgggttcttttccctctcctaccattaaagccctgatgtcctccaccgaaaggggtgtaggatcattgtggta

SEQ ID NO: 11055 - DNA, 326 bp, Homo sapiens
aactttagaacctggaccctacctaggaagattagcaagtacacaccactgaggaaggactttaaagaaatatttagctattttcagaaaaaaggctccagtacttcagaatttataataaagatgtgtgttccaaatgttgtaactgttccattaaaagtgatgctaatgaatcatagaatcagtttaatttcactaaacttagtttttactattttcaaagctatacaaacaaatcaatatgaaattacatcatgtttttgcattttatcatggttctcatcacttcctctatataaatgaagagaagaagcagtaaaattcaa

SEQ ID NO: 11056 - DNA, 413 bp, Homo sapiens
tcctcctgggtctactcagcttgtccctctattagggcacccacctaccccccttcacctccccaacacttcctaatccctaaactaagctcagggaggcatttgtcatctctgcctggctcagatgagatgctctgccctgagtactatgagagattgggaagcaggattctatgtaggatggttaggagcctggggcttgtcatgagtaagaactgggtttgaattccgtatcctcaactttcaaatgttgggacctctgaaattgctttaacttctctcagtgccagttttctcatctgaaaactgaggatagaatacctacctagtaaggggggtatgggaaatgcatgtaaagtatttaataagtgctcaataaaataaaaccattgatttatctcatcatagcctgt

SEQ ID NO: 11057 - DNA, 407 bp, Homo sapiens
tttttttttctcctctgtatgtaaagcaacatatttctgcaccatttaagagaaaagaaaatgagtcagtgtgagctgccaacagctggctgacaaccttgagcactgggtgggttggaaaccatccagactttgcataaggagttcattttgggttagttaaaaaaaaaaaaggcgggaggtgggggaaggagttggcccagatcctgttccacaaattcaggaacaaggagttgagattcccttcagaaactgctggagggtggctctgcaggtccgtttgccaaacactatttgacatctgcttgtttccctgcctgacacaagaagaaccgttaactgtccaggtttttcctctgacaagccaatgattcaatgcagcagttgaaccatgtgaaggttaattc

SEQ ID NO: 11058 - DNA, 233 bp, Homo sapiens
tgtcttccaggagcggatttccaaggcccgccacgagactggagtctgagtcttccggtccaggagggaaccgcgctcggccccgcagtctcctcccctgcctactaccctccccagcctggcggctcagagcacgtgcggccctgagcccagctccccctcgtctccaatgtccacctcgtcctctggctcggtcagcacgaagggaccggcgggcaggctcagccgagcct

SEQ ID NO: 11059 - DNA, 355 bp, Homo sapiens
caaagatgctgtcagtctaggcagaatctgggccccacagagtggtaggcagaatgcaggtatcacctagcagccaggaatggtcaagctagcagagagagaaaagccatgcttcagaaattaaaaacttctgactcttcctgtctaaggaggaattggcagctggctcccaaggccctgcttcccttcagacctaactggtgtttgtgtttgtttgactatatatgtattttttcaagtccttctgtgcatgtctgtgtctgcatatgcctcacattcagtgtacttgtacttcatagcattaagaagaattgtctgattcacttaagttcagtgagtttcctttcatttcctt

SEQ ID NO: 11060 - DNA, 503 bp, Homo sapiens
ttgtattttttaaagtattggtcctcaacaaaattggacactttataaagtggtcctcacctcaaatcatttgagaaacacggctcaaagcccttgctgccaattgacagacaggcttgtttgtgtttgttgttcatcctctgcctccccaactccaccgcccactccacgtggcaaggattcactgggctttgttcactgctgattccctgggcctcaatgtatatctggtgagtgaatgaatggataaatgaagcaatcaacctcaagtaggtctcataactttctggtcacttttgattattgaatctgcatccgccaggtgcggtggtgtgcacctgtagtcccagaacttgggaggctgaggcaagaggatcacttgaggccaggattttgaggctgcagtgagctctcatgacactagtgtactgcagcccaggcagaaaaccaacactttgtctctaaaaacaaaaataaagaaataaactcaatccaatgtcctt

SEQ ID NO: 11061 - DNA, 566 bp, Homo sapiens
caattgcatctgcaaaggaatgccctgtgtgtgattcctcaagatttctttcagttgcttccgaacctgacttggctggacctccggtacaatagaattaaagcgcttccttctgggattggagctcaccagcatttgaaaactttgcttttagaaagaaatcctatcaaaatgttacctgtggagctggggagcgtaaccacgctgaaagcactgaacctaagacactgccctctggaattccctcctcagctcgttgtgcagaagggattggtggctatccagcgcttcctgcggatgtgggcagtagaacactctctccccagaaatccaacttctcaaggtttgtaggaggtgatttatgacaaatcacattaacgttgaagttacagctttttaaaatcagggcagaacctgtcttctctttaataacatcctgagaaatacaggagccatgggtcctctgctgagttgacacagtgtacactgatctcaggccgaccccgtcatctctgtgacttttccttggttctataaatctgggcacattatagatcctggctcaa

SEQ ID NO: 11062 - DNA, 1109 bp, Homo sapiens
caattgcatctgcaaaggaatgccctgtgtgtgattcctcaagatttctttcagttgcttccgaacctgacttggctggacctccggtacaatagaattaaagcgcttccttctgggattggagctcaccagcatttgaaaactttgcttttagaaagaaatcctatcaaaatgttacctgtggagctggggagcgtaaccacgctgaaagcactgaacctaagacactgccctctggaattccctcctcagctcgttgtgcagaagggattggtggctatccagcgcttcctgcggatgtgggcagtagaacactctctccccagaaatccaacttctcaagaggctccaccggttagagagatgaccctctgtgacctcccgagcccaggactggagttgtctggagaccacgcgtctaaccaaggagctgtgaacgctcaggacccagaggggctgtgatgaaagagaaggccagctttctcccgcctgtggaaaagccagacctgagtgaactcaggaagtctgcggactcctcagagaactggcccagcgaggaggagatcaggcgcttttggaagctgaggcaggagattgttgagcacgtgaaggcagacgttctgggagatcagctcttgacgagggaattacctccaaatctcaaggcggccttgaacattgagaaagaactaccaaagccaagacacgttttcagaaggaagacagcctcctccaggagcatcttacccgacctcttgtcaccgtaccaaatggcgatccgagcaaaaagactggaagagagccgagcggcggcgctccgagagctccaggagaagcaggctctgatggagcagcagagacgagagaaaagggcactgcaggagtggagagagcgagccagaggatgaggaagaggaaggaagagctcagcaaactcctgcctccgcggaggagcatggtggcatcaaagattccctctgccacagatctgatagataacaggaaagtaccactgaatccgcctggaaaaatgaaaccaagcaaagagaaatcgccacaagcaagtaaagaaaaagctgtgcccctaagcaggtacatggggatcctct

SEQ ID NO: 11063 - DNA, 1092 bp, Homo sapiens
caattgcatctgcaaaggaatgccctgtgtgtgattcctcaagatttctttcagttgcttccgaacctgacttggctggacctccggtacaatagaattaaagcgcttccttctgggattggagctcaccagcatttgaaaactttgcttttagaaagaaatcctatcaaaatgttacctgtggagctggggagcgtaaccacgctgaaagcactgaacctaagacactgccctctggaattccctcctcagctcgttgtgcagaagggattggtggctatccagcgcttcctgcggatgtgggcagtagaacactctctccccagaaatccaacttctcaagaggctccaccggttagagagatgaccctctgtgacctcccgagcccaggactggagttgtctggagaccacgcgtctaaccaaggagctgtgaacgctcaggacccagaggggctgtgatgaaagagaaggccagctttctcccgcctgtggaaaagccagacctgagtgaactcaggaagtctgcggactcctcagagaactggcccagcgaggaggagatcaggcgcttttggaagctgaggcaggagattgttgagcacgtgaaggcagacgttctgggagatcagctcttgacgagggaattacctccaaatctcaaggcggccttgaacattgagaaagaactaccaaagccaagacacgttttcaggacaagggtccctaggaaacaggctctgcagagactacatgagagaaaaactcgaatcatgggcgtggtagggcgtgcgcctacacatatgggagaaggaagacagcctcctccaggagcatcttacccgacctcttgtcaccgtaccaaatggcgatccgagcaaaaagactggaagagagccgagcggcggcgctccgagagctccaggagaagcaggctctgatggagcagcagagacggtggcatcaaagattccctctgccacagatctgatagataacaggaaagtaccactgaatccgcctggaaaaatgaaaccaagcaaagagaaatcgccacaagcaagtaaagaaatgaggttggtaactgcaact

SEQ ID NO: 11064 - DNA, 319 bp, Homo sapiens
atttatcatgtatgccataatagtgggcttttccttcagatcagaacattttaaatttaaaagaaggagtcttgcttcaccacttttgagctcaggctttttttggaaactcattcaattgcccagcactgtgatcacctagagggcatatgcacactcaaagcatggaccctgagctgtcaccaggtgcagtgctatctaccatccaccagtggtgccagtgttgaatgatgggggaaggcttgagttcttttattaggctgggtggcagttaccaacgtcttcatttcagcttaaattcacatggattctttagcag

SEQ ID NO: 11065 - DNA, 783 bp, Homo sapiens
agcttgaaactacattattagcgtagttcttgtgggttcctgtgtttaatgcttgcctggttcttaacctatattagctttctgtgtgtttaaaaaaaatctttatcttttgtgtaagtcggttttccttattcttacacactttaatgtatgtaggctgctctgttgtaaagaccatctgtcttctgctgggctgaggacctctgtgcatttccactctttgaccatctcaggacaggcacaacaaaaaaatgttaaaaacttggatgttgtcatggatatgtggatgctttacattgtgtgtgtgtgcgtgtgtgtgtaattttagtgtgaaaaatggtatcaggtttctccaaggcaacaaaaccattaggagattttgtatataacagatagatattatatgtaatttcaaggaattagtttacttggttgttggggctggcaagtctgaaatctgtcttctggttgagctggccattgggttgggaactctagcacaggagctgatgctgcacctttagccaggatttctcaggaaatcccagtttactgccttgtaagtgattagatgagacccaaccacataattgagggtagtctcctttacataaagtcagctgattgtaggtttaaccatatctacaaaaatacctttatagcaacacctagttagtatttgatagaataattgaatactgtggcaaaattgtaacataaaactaaccatcacagatgagtatattatttcacaatagattgtccttcatatcagcttcttga

SEQ ID NO: 11066 - DNA, 482 bp, Homo sapiens
tttttttttttgagacagagttatctagctctgttgcccaggccggagtgcagtggcatggtctcggctcactgcaatctccgccttccgggtttaagcaattcttctgccacagcctcccaagtagctgggattacaggtgcctgccaccatgccaggctaattttttgtatttttagcagagatgaggtttcaccatgttggccaggctggtctcaaaactcctgaccacaggtgatgcacctgcctcagcctcctaaagggctgggattacaggtgtgagccattgcgccctgcctgctcaaattatttagtgaaaaaattgtgataaaagtttttaaagttttagaatttaaaggtaagcaaacttcacaaacctatcttgacaaacagggttttagctcacattcctgctccgtcaaggcccaaatgtcttagcgatgccgattttctaagcttctgaatgatagacactgttagtc

SEQ ID NO: 11067 - DNA, 325 bp, Homo sapiens
gggagagagagtgcagtcagactaggctgcagggtgaaggcaagacacccaacagacacgttaagagaaagggggccgggcacggtggctcacgcctgtaatcccagcactttgggacgccaaggcgggcggatcacgaggtcaggagatcgagaccatcctggctaacacggtgaaaccccgtctctactaaaaatacaaaaagaaattagccgggcatggtggcgggagcctgtggtcccagctactcgggaggctgaggcaggagaatggcgtgaacccgggaggcagagcttgcagtgagccgagatagcgccactgcact

SEQ ID NO: 11068 - DNA, 379 bp, Homo sapiens
cagcctgggcaacagagcaagaccctgtctcaaaaaaaaaattggaaaaaaatttaaacttttagatagcattcattcaagaaatatttatttagccactcacataatagcaagcagtaagctctaagatatagtgttaagtgtttggtgattttgctggactttgagattaatatcaagaaggttgaacataatcttccccaaattgcccttcctttttccctatcagagtcagaacctcgggctggagggaccttgggactatcccaagtgcaattctgatgttcttattggcttcagggtgcttgacttcaagatcaagcgaggcctggaagggcctgggccagggctttccttcagctcttgggcccccaaacac

SEQ ID NO: 11069 - DNA, 329 bp, Homo sapiens
tattaaaataattttctttttcattcctgatgttgtgcagtttactctgctgtgtctggatgtgagtttatttttttcctgctcaatgctagcaacacactttctttttttttattttgttttaatacttggatattttattccagcaatcctactttaatctcaataatcagctagagataatcatgttagcaacagtatcaaaatagtagtataaacgttgagcaataagagaatattgctcaatattatagaaaaaagggtaaaattttacataatcattagtctatgattttagacactatttaatgccataaaattcttttata

SEQ ID NO: 11070 - DNA, 478 bp, Homo sapiens
gtgacataaaaataataaccatttatttattattactttgtgggtcagtaatttgggctgagctcagatgggctgtcttctggtctcagatgatcttacttttgtgtcagtggtcagctactaatcagctaggtgactttgcttcttagggttgcctggctatcagctggagtgatgggagcaagcgggccatatttctttcatcatctagcaggctatcccaggcttgttgataagtcttgttgatatgtggcagtgcagggttgcaagagagagtagaagcatgcaaggcctcctcaggctttgactcagaaatggaacgatgtcacttctgccatatgctattggcaaggccagcccagattcaagaagtggagaaacagacatcactccttgatgggagactgagagacaaggtcacagagaaaaggagaattatgatacttgtaacacaccatgagcaagaatgaacaaagaa

SEQ ID NO: 11071 - DNA, 380 bp, Homo sapiens
gcgcccacgtgcggagtccccgggttaggaaaggccgcgcatccggaggccacgcagagcctcggggcttgcgcagaggggctgcggtgagtcctgaccctgagtgggggtcacggggctcgttgctcgctgaagtgaacacggttgcagctgtgcacagtggcggagggagaggatgagggactctgacccaaggttatgtggcagtgaggggcaagcagaaatgggggcctccggaccccaccccgagacagggctgctggccgctgcactatgctgaatatagcccaaattcttacatgggtcgtccccggggaatgctcatttttcaggctccagagcttgagagaaagtgcgaacccggtccctgagcaggtctg

SEQ ID NO: 11072 - DNA, 400 bp, Homo sapiens
aacacatggctttgttctctgtttattctctctgttctcttttctcctttaagagttgtgttgaaaatgggatctaattaaacctaagagcttctgtacagcaaaagaaactatcaacagagtacacagacaacctacagaatagaagaaaatattcacaaactatgcatctgacaaaggcctaatgttcacaatctataaggaacgtaaacaaatcaacaaggaaaaaacaaataaccccataaaaaagtgggcaaaggacatgaacaaacacttctcaaaagaagatgtataagtggtcaacaaagatatgaaaaaatgctcatcatagctaatcatcggagaaatgcaaatcaaaatggcaatgagatgctagctcacaccagtcagtatggctttc

SEQ ID NO: 11073 - DNA, 357 bp, Homo sapiens
tccagttctgcctctgcctagatttgaacctctcaagttatttgaggtcttatggtttgaatctctacgaagcctgggttccattagatggtcttctgagcccctttgttgactctcaaattgtgattctccaaaatgcccagaactctgttagccctatccaaaaatatatgtgtggccttgctacttaattgcaaccttggtgctggacagaagagaaaagcagcttcaaagactacatttctgaataagagagaagatcctgcactaatgaaagaaggcttgaggtatcctttgcctgaatctctttagactttaccccagagaataggcttggagtcagaactcccatcagca

SEQ ID NO: 11074 - DNA, 202 bp, Homo sapiens
tgcaaaagcagcggtaagaggaaagtttacagtactaaagtcctacatcaaatattataaagatctaaagttaatgacctaatatcacaccaagaaaaactagaaaaatgagaataaactatccccaaagctaaaagaagaaaaaaataactaaagatcagaagtgaatgacattgataacccaaaatccacacaaagaatc

SEQ ID NO: 11075 - DNA, 491 bp, Homo sapiens
caagataaaggcactgccactgcctaagagccaggtgctagtcttctaaaatggagctgtccatcagctgttttcaagagattttatttactaagaatgtccacagatagagagactatgtgagtgaaactcattaaagcaaatgctaacaaaatgaagccttgcctggcccagagaatgagccaaaatgcctagtggggtatctcccaggagcctgctgagagacgcattccttggactctgtgttagttgcattggagagcatcaattaaaattacgattatatgctcccgtcaaacttggccttttttcttcaatccaccagccactccaggccactccaggcccaagtttggagggactggaagcagatgtcacttactaggggaggagaaagggtgtttggtggagtgaggaagactgcagaagtaaatcgtgttcttcctcctttcccaaagctggcttccaataggcctaatttgccaagaaaa

SEQ ID NO: 11076 - DNA, 730 bp, Homo sapiens
gatgtaggcctgtagtcccagctacctgggagactgaggtgggaggatccctggagcctgagagattgaggctgcagtgagctgtcatcatgccactgcactccagcctgggtgacagagtgagagcctgtttaaaaaaatttttttttttcaagaaaatagatgaaaagatagagaattttgccagatgtataatcttccttcagagagtatccactctttcttctgccagacagattcagggctgcttgcctcagtccaatcagggattgaactgagtcaaggcaaagttgcagtcttggtaaagctaaatttatctttggttcacctctgcttgtaatctacgaccttctaaagctgagagtttgatgtttgtgccagggttcctcctcctggaaggttttgaactctaatctttgtttcctcagcacactgaatctgccagaactccactctgcttttcaggctttctggtgagcctcttagcctccttcccttcagagtttggcaaatatcttgagtggaaaatgagctgagtgttagattcagttttctgtatacaccctcctcaccaggatattgacttctgaattcttaagttttcttcttcccagctctatgaggccactaatagctctatcaatgttattggccctcatcccaggcaacactcagcttctcagctttttgccttcccagaatcagcaaatacattcagctaaaaaaaaaa

SEQ ID NO: 11077 - DNA, 452 bp, Homo sapiens
tatttcttttattttcaaagcctaggattgagccagtaacaaattgcctaacataaatcagcattatggaacttctgtctctctattctcaactctttttgccttatattataagaaaacgtaaaaggagtcagaagaaaagcagagagcttgcagaaatagcttgccactagcaacttaattcagcccccaaaataggaaattcacagctggttaaacatctgtgggccactggcggctgagaatgttcaaacacttaaactgtgttttccagatcaagccaatccagaagtctttaaatcaccataataaccagagaatagaacttccctggctggctgtgggctctttgggtacagttagctcgtaccctcagctgctcagagtggccccagggcctgctggactctcagggcctggtgctggcatctgtgtttccctcaggctcctct

SEQ ID NO: 11078 - DNA, 366 bp, Homo sapiens
gactttatcacttgccttttccttttgctttaaggtttaaaggatttgggtggggggagctgaagaaagaatattcatttctgtctttagtcatcatgttacaatttgcaaaccattttcacattctcactgtgaggtgagagagatacctttctccctggctttatagataaagaaactgaggctgggagatattgcctacctggtctaggcccagctagcaagtgatggagccagaacttggacccagatccactgactgcctattctgtgttttcgctatattactagcagttagggttctgtttcctgactaccagaatggaaagtttttctctcaccaaatttcagaagacaccttttttt

SEQ ID NO: 11079 - DNA, 890 bp, Homo sapiens
ctaagtgtctgtaacattatgctaaatgaaataaaccagacaccagaggtaagaactgtatgattccatttatgtggaatataaatataaatatagcataatgttttcaaggttcattcattttgtagcatgtatcagtacttcattcctttttatggccgggtaatattccattgaatgtatataccacagtttatccattcattggctgatggacacatgggttattttcacctcttgagtattgtgaacagtgctgctgtgaacaaacatgtgcaagtaagtatttgtttgaatacctattttcagttttttgggggtatatatctagaagtagaattgctgggtcatacagaaatactgtgttaaactttttgagaaacctcaaaattgttttccacagcagccacaccattttacattttcaccaccaatgtacaaggcttcaacttctccacatcctcaccaacacttagttttcacttttttgattattgccatcctagtgagtgtgaattggtatctcattgtgattttgatttgcgtttccctaatgactaatgttgttgagcaactcttcatgtgcctgtggccatttgtatattttctttgcagaaatgtctacttaagtcttttgaccactttaaattggattctttgtcttttctgttgagtcaaacaagttttttatgtattctggatgctagactcttatgagataatgtgatttgcaaatattttctctcagtattgttcaatttgctcttatttttgttgttggtgagttgaaagttgagtcattgatttgagattttttttcttttccaatatgggcaataccttctaagtcctagtttagtgcactccacaacgttcgatatgttattttc

SEQ ID NO: 11080 - DNA, 326 bp, Homo sapiens
acgctgagtgctggactctgtttccacgcgaggccttggggtggaggggtgtctcaagggagtggccaaggcagaggaccctctttctggatgtcctcacttgcccatgggaagggaggtggtcctggctgagccacaaggccctgcaggcccaggccctgcacacatgcaccttggcagagccagccagagaggcctgatgaccagagcacccaagcggcaagggcaggcaggagtgcccaggagggagccaagctgtggccgctctgctgagccatccgttccagcaggcagcaggcagcggactgagaatgctcagttcagaa

SEQ ID NO: 11081 - DNA, 230 bp, Homo sapiens
cctgctgtcttttcttttctgttcttttctttcttttttcttttcttttgagatagggtcttgctctgttgtctagcctggagtgcagtggtatgatcacagcctatttcccaggctcaagtgatcctcccacctcagcctccaaagcagctgggatcacaggcagtgccaccatgctcagttaatttattttttgtagagatagcatctatttgcccaggctggtctca

SEQ ID NO: 11082 - DNA, 311 bp, Homo sapiens
aacgccccacctactagtgtgtgctcggtggaaatgtcttgtgactgtgcttaaaatgaagggcatgattgggaggccaaggtgggcggatcacaatgtcaggagttcgagaccagcatggctgacatagtgaaaccccatctctactaaaaatacaaaaaattagctgggtgtggtggtatgcacatgtaatcccagctactcgggaggctgaggcaggagaatcgcttgaacccgggaggcagaggttgcagtgagccgagatcacgccattgcactccagcccaggagacagtgcaagactccatctc

SEQ ID NO: 11083 - DNA, 424 bp, Homo sapiens
atctgaagggataatggctacttgaattacttactgaagcataaggaaaaggaaaagctgatctgtgttcatgttatttttgtatgactaaaagtaactaatattgctgacaaaagggtatgtgaattttatatgactaaaggttattaggagctgatcattgctttgagtttagtgtcttagatataattttaatatgaaatatcaattttattttccacatttttttccaggctggggtgtagtggtgtgatcttggctcacgcaacctctgcctcctgggtttaagtgattctccagcctcagctactcaagaggctgaggcatgacaatcgcttgaaccagggacacagaggttgcagtgagccgagatcacgccactgcagtccagcctggcgacagagcaagacttcatcatgtgaaa

SEQ ID NO: 11084 - DNA, 308 bp, Homo sapiens
acaggccaagtagagaccccatttgcatagtaaaagattagggtggagtggccagcttcttcacgtgctatgtaaacatcacacctggtccaaccaatcttcgggccctatgtatatcagacaccatttcttcaagcctgtctataaaaccctgtgcactctactgcaggctggaagtctctcttgtaggagagggagctgttctcctttctctttcttttgcctattaaacctctgctcttaacctcactccatgtgtgtccgtgtccttgatttccttggcatgagacaacgaacctcaggaattt

SEQ ID NO: 11085 - DNA, 1634 bp, Homo sapiens
tctctactatgatgtttgactgacaacagcaatgtgggtctgtattgccctatgttctaagtcctggggtcatatatttgcttaaaaaaactgttctagtggctggggactagtgtgctttctaatttttttgatgtgaggttgatattgtgataatcttatgtcttcttgaccctttggactctttaatatgtatgacatgcaattgtggggttagattaattcaactcctgaggtcctgaaggaacttcacccagtcaagaggaagacagccaaggctgcagctgctgaaggaaccccatatctgggcagacatctttgtgagatctatatggctgaaatgagaaaaacgagaaattgggaaaggcagaattttggactttaattattttggactttgaattaggaaatttaattttgggcagtcctttttcccttggagtttaatagttgatggggtgggggtgaggtcatatagttcaaactaaggcatttttattatgttgttgatattgtattatttggagtattttaatgctatctttgggagtcattgtataattgttgtcagctatgtcaggaaatatggctggacataattgtaaattagggctgcaattgtgatcaaattttcagtctagggtgtaatgtagccttagagttaatttaattactgttctattttgacttatttcagagcctcttgggggcaaaaacaactgctcaccaatcttacattgatgggagcagaacttttctaagatactgttggtctccctggaaggggacagccacagccctgtttgttgaccagagtcttgagcattaaccattgtggcttaagagaatgaaaatgtacaagggtatgatgggatctatcctcttcctctctccatgctcctgactcaagaaaaggaaaagacttgcatctctcaaaaatgtttggaagaaagttctacccatcttctcttacactcattcaatcttatgcttgggaggaggaataacttgatgagattgagaaaatggttataatggataggcagcttaggccactcttggatcttgagttcgttccacacagcaagatgtgggaaagactgcagtccttcactacatggctgggtaaacatctgctttctagacccaactatctctccttggggtgggggaatcccaaagtcgttagacttatgatagaagttcatttcagcctcaggtccaagccatgttctccaatccagctctatcagctataaagctggtatctattttgattcttttttacagttttaatatataaattgttttttagaaaaataacacatgcctatggtaaaagtcaaacagtataaaagggtatactattaaaaagtaagtctctcttcctccttctcacccctggcctcagttccctggtcccattttcaaaaagtaacaactgttaccagttactgatgtatcattccagagatattccatgtatttacaagcatattgtgtgtgggtatgtgtgtatcaggtttttttttttttttacacaaatggtggcatactatacatgctgttctgaattttgcttttttcactgaacaatatattaaagctgatatcttaatccctaaatgattcct

SEQ ID NO: 11086 - DNA, 534 bp, Homo sapiens
tctctactatgatgtttgactgacaacagcaatgtgggtctgtattgccctatgttctaagtcctggggtcatatatttgcttaaaaaaactgttctagtggctggggactagtgtgctttctaatttttttgatgtgaggttgatattgtgataatcttatgtcttcttgaccctttggactctttaatatgtatgacatgcaattgtggggttagattaattcaactcctgaggtcctgaaggaacttcacccagtcaagaggaagacagccaaggctgcagctgctgaaggaaccccatatctgggcagacatctttgtgagatctatatggctgaaatgagaaaaacgagaaattgggaaaagcgctgtaggtttacctacagcgccttcatcaaacacatcaccactaccattccaacactatcaccatctacaccaccatcattgcccatcactatcaccccccctacttacatcatcacccccatccacaccaccatcacccacattcaccattcacaattcacact

SEQ ID NO: 11087 - DNA, 587 bp, Homo sapiens
atacttgatactgacagaaactcaacaaccctcacataataaaacttaggagtatgatttttcaggacatctgaactcagtgtatgtcagaaaagtcacataggacaaatctcggacagcatcctgaatgaccatggcttttatccccaaagtcttcctcatcagacaggtaatatcataagaaatctgacattttaacaaatataggaaattcttcacacacacagacacacactcacacatacacacccaaagtctcattaaatatatgataatttagttttgaatgtgtaaaagttttcaacaaattatcatattttatatcagagcttgttacaaggagaaaatctatcaatttgagaaaggtaagtaatagcctttatctagatattgctttatcagaactgttgtttcacatataatatcaaaacttttaatgaaatataagacattcactataataaaaagcttaaaaagaacaaaaaataaactgcataaactgaaaagcagtgttgcaaatatgtgaatgttttgtgagttattgattgtttatgtatgtatatatgcatggtacttaccaggtattt

SEQ ID NO: 11088 - DNA, 405 bp, Homo sapiens
tcttgagactaccattactttattgtgttaggtcagagatacaaaaacagacagatgcacacatagacatgcctccaaatgcttcaaaatctattctacaaatagcattagctccatttttcttctaattttactctcatacaaagattcctttcctgagctgcctacttcccattttctacatttccttaatccactcctttctctacttagtattttaccttcttgaaacttgcagctcttcaaaattatgtaatctcccaaaggccaaaagcttcatttcagtctagtatacatgtttcttcaaatcgataatattttatttatagtacaaataattttaatattttctcagtaaaccaaatatattgtggaaaatgtcaaaagtttaaaaataatgcctaa

SEQ ID NO: 11089 - DNA, 464 bp, Homo sapiens
gggggtgtggttggctctgagagccccgggaaggaactgactgggaggccggttgtgctccgggctcaccttgccccaggagtgccgtccgtctgtccaggggccacataggggcccatgcgggctctgccagcagctgcagggcgtttcggagatggcctcggagaagcccctgggcggagagggacggacttaggcttggcctcttgtgaccagctttttgatgtagtacttgatggaaaacagcttacttagctttcaaaattttgaattcatagatccagggctccagcttggtcaacgagctcctgcgaaacagttgcagagatattattttgtaactccttctcaaaatagaaatatgactgagtggttgagaagataaatgcagtaattagggctttccagagatttgtctgaggcattgttcaattggggcttgaaattcttttttttggttcaca

SEQ ID NO: 11090 - DNA, 901 bp, Homo sapiens
ggcctctcgagagtgcaggcgccgtggggcgtcagctggacaaaagccgacccgacttcatttgtctgcctcgaccccgaccccggctggtagacagcactcctgatgcacgggacgagggagcggcacgagcaaaggccctgaaacaggagggagcgcgggccatccatcagtgctggtgagctgagctcagctgacaagccagcctggcacggagcgctgcccctcctgctggtcccagatccgttctgtccggaggagaatttcttatccccaggagatgcctggcctcgttaggagcctcctcacccgcccgcccgcaccaaccctctgactccctccacctcaccgcctgggaacaacaggaagagagcaggacagcagcagaaaggagtgctgcttatgtggctcttctcagaatcaggaggctcccaggccaggaatgtgaaaccattatgcagatgaagaagatgaagcccgagaggttatgaaacagacccaagtgggctcgctcttcagtctcggcataaggaatccggaacctgggcccgtgtccggaactgctgtgcccaggcagcttgcctggaaatcaggtagcgtggggggaccccaaaatccccctgtgacagaccacgaatctgccgtgtttgtgcacctctgttttgcttcccagaaacgaaactttggcaactggagagggatggagtggggcgggtggggtacagcaagatcgggaaacagcaccgtcctcaaatgcctgcagaaggtgagagaaccagcaagtgtgatgaagcacctgtgtgcttcgcagccattaccgtgtctaaatctcacaaccacacagtgaggaagggtttctgtttccattttatagataagcaaactgaggctcagagaaagt

SEQ ID NO: 11091 - DNA, 1089 bp, Homo sapiens
ggcctctcgagagtgcaggcgccgtggggcgtcagctggacaaaagccgacccgacttcatttgtctgcctcgaccccgaccccggctggtagacagcactcctgatgcacgggacgagggagcggcacgagcaaaggccctgaaacaggagggagcgcggggtacctgagtgagattcatcgtagatgcctggatgaagagaggggccttgcgcttctatttgccttgttacatagtgtttcttggaaaggctgtccttccctactccaagcccctcccctcactccccacccaggatctgggcactggaggcgccagacatcttatgccctgtccaaggctagcagggccatccatcagtgctggtgagctgagctcagctgacaagccagcctggcacggagcgctgcccctcctgctggtcccagatccgttctgtccggaggagaatttcttatccccaggagatgcctggcctcgttaggagcctcctcacccgcccgcccgcaccaaccctctgactccctccacctcaccgcctgggaacaacaggaagagagcaggacagcagcagaaaggagtgctgcttatgtggctcttctcagaatcaggaggctcccaggccaggaatgtgaaaccattatgcagatgaagaagatgaagcccgagaggttatgaaacagacccaagtgggctcgctcttcagtctcggcataaggaatccggaacctgggcccgtgtccggaactgctgtgcccaggcagcttgcctggaaatcaggtagcgtggggggaccccaaaatccccctgtgacagaccacgaatctgccgtgtttgtgcacctctgttttgcttcccagaaacgaaactttggcaactggagagggatggagtggggcgggtggggtacagcaagatcgggaaacagcaccgtcctcaaatgcctgcagaaggtgagagaaccagcaagtgtgatgaagcacctgtgtgcttcgcagccattaccgtgtctaaatctcacaaccacacagtgaggaagggtttctgtttccattttatagataagcaaactgaggctcagagaaagt

SEQ ID NO: 11092 - DNA, 1400 bp, Homo sapiens
ggcctctcgagagtgcaggcgccgtggggcgtcagctggacaaaagccgacccgacttcatttgtctgcctcgaccccgaccccggctggtagacagcactcctgatgcacgggacgagggagcggcacgagcaaaggccctgaaacaggagggagcgcggggtacctgagtgagattcatcgtagatgcctggatgaagagaggggccttgcgcttctatttgccttgttacatagtgtttcttggaaaggctgtccttccctactccaagcccctcccctcactccccacccaggatctgggcactggaggcgccagacatcttatgccctgtccaaggctagcaggtccttgtccctgaagggccatggagctaagtgaccagcgtgcctctctgggtcccgtgtgtgtggtaggaatcttcacactgccttgctgtgaccgtgggccatcgcatcacctccctgtgccttggtttcctggcctctaaagactgaccttaaggggttgtttgtaaggatgaaggcacaaatgcaagccaagtccttagaattctcagcacatagcaagtgctcaatgaaccgcctggctgctgttcgctggggacacagtcttttgctctctggatgtctgaccgtgccctgtccctgcctcacagggccatccatcagtgctggtgagctgagctcagctgacaagccagcctggcacggagcgctgcccctcctgctggtcccagatccgttctgtccggaggagaatttcttatccccaggagatgcctggcctcgttaggagcctcctcacccgcccgcccgcaccaaccctctgactccctccacctcaccgcctgggaacaacaggaagagagcaggacagcagcagaaaggagtgctgcttatgtggctcttctcagaatcaggaggctcccaggccaggaatgtgaaaccattatgcagatgaagaagatgaagcccgagaggttatgaaacagacccaagtgggctcgctcttcagtctcggcataaggaatccggaacctgggcccgtgtccggaactgctgtgcccaggcagcttgcctggaaatcaggtagcgtggggggaccccaaaatccccctgtgacagaccacgaatctgccgtgtttgtgcacctctgttttgcttcccagaaacgaaactttggcaactggagagggatggagtggggcgggtggggtacagcaagatcgggaaacagcaccgtcctcaaatgcctgcagaaggtgagagaaccagcaagtgtgatgaagcacctgtgtgcttcgcagccattaccgtgtctaaatctcacaaccacacagtgaggaagggtttctgtttccattttatagataagcaaactgaggctcagagaaagt

SEQ ID NO: 11093 - DNA, 438 bp, Homo sapiens
gtctgcctcgaccccgaccccggctggtagacagcactcctgatgcacgggacgagggagcggcacgagcaaaggccctgaaacaggagggagcgcggtgagtgccttgcccagatccctgggccgtcgtgggacttgggccttctgtgcgctgcggggagccgtgcagggctgcggcgtgggatgccggactcgccctgggtgtcgggggaaggagatgggggaggttgtactggggccatacagtcattgtagaacctgttccccccgagggccgtctgtcgggtcccagagccaggaccacggttgggacaatttgagcgcccacctgagcaccgttgtccctgtgcgaatgtgctttggtgaaaactgtgcctccttctctagaggaaactagataccccctacccgcaaatcaggccaagcccaccatgttat

SEQ ID NO: 11094 - DNA, 301 bp, Homo sapiens
aaaaagcttctacatcaggtatacaaacaaaaagccgagagcaatggatcacgtctgaaatcccaacactttgggaggctgaagcggtaggatcgcttgagctcagttcaagaccagcccgggccacatagcaagaccctgtctctacgaaaaaatttaaaaaattagcctggcatagtggtgcatgcctgtagtcccagctacttgggagggtggagcaggaggactacttcagtccatagtttgaggatacagtgagcttattcaagccactgcactccagcatgggcaatggagtgaa

SEQ ID NO: 11095 - DNA, 531 bp, Homo sapiens
tctttcctgtgtttgtctgttacagtttatacttctggtttatcattcttttcttcatattagtatttcttattgtgatagaaaatgcttcccagtatccattcttacattcatcctcagtgttacaatttctaaagttttaggtgtccattttctgattattgttgcagctaggaatagctttgtggctaagttttgtcaaagggaaagaagtagaattggtgtgtgaaagatccagaaaatgtgtgcctttttcttaaaaaggaaggaagtgtgccctcctccccacactcccattttattttatttttgctgccattcaggctgacacaggagtaaacatgccaggctatgagaagggagcctgtgatcttaattattacagaactcccatacttgtgttaaacttcgtatacttatgagaaggtaatacatttcaatcttatttgatcctctgttcttttgggctttgtcatttgcactaaaatctaatcctaacaaataaacacttgtaatatctttcccgctaaa

SEQ ID NO: 11096 - DNA, 369 bp, Homo sapiens
ccaagaacttaaaataagcctaataaacatactaaaagagataagggaagatattagcggcatataataagaacaagagaacaaagaagcacgcagaaatattaggtacaaaaatataatacttgaagtatatagactggataaataatagaatttaaatgaggagtaaattaatgaatccaaagatcagtttgaggaaatcttcaaacctaagaacaaggatatagaaaatataaaagaaaggctaagggattgacagtgctaacatctgaataacaggagactcagaaagaaaaataggctgggtctggtggctcacacctacaatcccagcactgtgggaagccaaggcgggaggaccacttgagg

SEQ ID NO: 11097 - DNA, 195 bp, Homo sapiens
atcatccttcttactggaatgatatgccattatggttttaaatactaatacatgttaaggactctcaaattgatgtcttaagccctgacccaaattcctactcaaaatttcatcttaagtgtctaatgagcatcacaatattccattactcttcctttactctcaatggaagagactggtgaacttttttcccag

SEQ ID NO: 11098 - DNA, 429 bp, Homo sapiens
tataactcaatcaccagtctttataaatttgcttttttatatttaaaccaaacctaatgctaattgtgatatgttatttattctcacctgatttgaatcattggattcaattaaatgagtttaattatcattaaataattctaagagaaataatgtctattcggatggtgggaattttctttctacatgcagccccattctgaatgaatgaaatcaaatcacgtgaagatcagggtcctagagtaacttaatattttgtacattggttatttgactcctcatttttatattacatgttatatcaagggagggggcataaaagaaatacaaaaattgcagaggtatctggaatgtacctatttgttaattctatttgtcatttcttttgtttcatcttttgagtaataagctgcttggaaaagtttctgt

SEQ ID NO: 11099 - DNA, 421 bp, Homo sapiens
gaactatttgtgattttccaaagaatatctatatctattttctcagaattcataatttcctagtttttctatctacttcactgatactaagctaagaaagtgacttactatccaattgtccacccacacaataattgtgtggtctaataattctaggccatattttctcaatttaatgaaagtatgtcttagttaaagtcttgtttgtagtaaggctagtccacagcaaataaaacccattgtcatctaagtctagtcatggcatgtcttttttataggtggttccacataagtgacttttccaggtaaccgaagcttataattcagatgcccaaatgattttcattttaattacattgattagaaattatttaaaataataactcccttttttttgctttcttaagcatagtatctcaaa

SEQ ID NO: 11100 - DNA, 478 bp, Homo sapiens
ataataataataataatagcaataataaacaacaacaacaaaaaaaccaactaggggatggggaaaaggtataaagagaacaacaattcaatgtcgtcctcaacaagcacttctcaggtttagaatattgtatactcagtaggcctttaataatttgctatgtccagcctggactgcatcatttggaaaggtaggagacaaccttgaacccttgctgcctttctcccatattgaatttaacctgtgtcatattcctgtaaactgcccagctcatttcatatcactgtatcaaccataaagcaaacacgaacaggcgtatctgagctgaaaagtaaacagttatcaggtgacttctcgtgccatgtggagctgtctgaggaatagcaataaatgtgaaaccttgccccatggggacttaatggtgttagacaatcttgtgacagaaaccataattcctctggttgctgtggcaattgac

SEQ ID NO: 11101 - DNA, 901 bp, Homo sapiens
tgttcatatagttccatgtgcctttttacttaactgcactgataggcaatgtaatgaagaagtttccttttaaaacgtaaaatgtaattaaacagagtttatcttaaattggctggacccgcacagcttgactgagacatacacagctgtcttcattttgaagcacctacactagtcaagcttctttctaacccgcccttagggtttgcctgttggtctgtcttccctactgggctgttaatcccttggaggcagattgtcttgtttcccagagtttttccagcatataccatggcagacaattttcaccttatctattctaactcgtaagcctcagctagtgcctccatcctcgggtgcatagcccagtgacaggcatgtaacagactttgcctacaagcagttgctgatccataaatgacgttggcaaccttcttgtggcagtgagtaacatatttctttcctcctgataggcttggaatcctcatccccatctggcaattttctttccatctttcctacactcacaatggagcccacacgcctcacaacccccttgactaaaccagatgacagcaagaatgcctagttccaagtgagcaagggtgaagccttaggcccttgtctcctccagacctcctctctgctctaagagtatactgggcatggggtgtggtcggggggttgggggcggaggagtacttaacctcaaactgagaaaaagggtgtcctgagcaagtttcatagcgtagcagcttccatttgaaatgtgaagctttgaaggcctgttgctacagtaaccagctagctcctgactccaatgcctgtctaatctaaggtggaaatgtcccagaaacagaccccaggctggcagctcttaactatgacccatctcataagc

SEQ ID NO: 11102 - DNA, 1491 bp, Homo sapiens
gaagcccttgtttgtgaacagtgattgtttcccggatgacagccagatgccgggcagggccacgcagatcttagctggagcctacaggtacaagtgagagccaccccctttgacgtaactggactggcatttacggaactcatgtacagcccactctcaggaacaccagccaggaaccgtgacatggaggagaggaattgggaggaaccgaggggtcatcaaaggctggtagggcttaggtgctctagcaaacatcctagtctgtggggttccagagctctggtgctacagctcccaaccctttgattggcccaggaactggctgttgagtgggcatccgtgttcatagctctgccccttgcaaccctaaagcagataaaatgcaggaggcagaaattgctggcagacagcatccaattaatccccactacccaattcagtttcttcccctgacctgacacgtccctgcccagctgtgcctcccactgttcaccttttgaggcacaaaacgggctgtttatgctgctgctgcatttagctcaaaacagggcttcagagtcaaggttctggactcaggcacccggattaaatcctgccctatgaattcctagccaggtgacctcaggcctacataacctttctgtacctcaacttcctcatccagaaaacagggatgatgctgtctacctcattggatggttgtgcaggatcaaagattcagtcattcagcaaacctataccgagtacctactgtacattcatgagtgctaggcagccagccttccaggtgctcaggtacatctgtgaacacaactggctattggaggaagcaaaatcagtaacatgacctgctctctttgatctgtgctacagaaaaaaaggaaagtggagaggcatcaggaagtcaggagtgctggggaggggctggtaacagtcatggtattaaagaggagggcaggcaggccttactgtgaaggtggtatttgagatgaagtagttggtcagagtccctgtttgacacatggagaccaccttgacagcaaaggccctaagggggagcggtgcaaagcaaggtgggctggtgagtgagaggagagggatggcatagagctgggtgggggcacaggagcccgtggggaaggtgttcgcctctgaatgaagtggggttgtatcagataccacgggtgaagcatcgggaagaggatcctgcctgtaaaccctgctcaaggactgcaccatcatcatgcccagtgtgtgcgtgtattaggtttgtatgaatataatgttgccaattgtatctgtttttatgaaatgtttgctatgtgccaatgattattcgatccatggggagaccatagaagaatgatccaaggagttgggaggggaatcaaataataaatcagcgattctgcaatataacgccattggtgatcggtgtcatgaaagaaatacaacatggtggggaagagtgtgctggggatgttcaggtag

SEQ ID NO: 11103 - DNA, 430 bp, Homo sapiens
cttcgccatctgctctgcaccgaaattggattctcctacgcagaggagaaggtggagaagattctccgtcttccggagggtagctactgccggtagctccgatttccttcggatcccctttcaagggcaagcagaaggaaatcagttctccaaagaaagtggcccggctgagtaagtgggaacaaggtggttggactgaggcacgggatcttttagctccgttgctcttctaatcccgtggccttgggcaccgccacttcatcctctgaactgctggaataatcacttctgactagcagagttactgggagccgctgtttgtcagtgttcacattctgactttagcaggagatggagcgagcgaaggagtgaagcccttgtttgtgaacagtgattgtttcccggatgacagccagatgccgggcagggc

SEQ ID NO: 11104 - DNA, 1140 bp, Homo sapiens
ccagttcgagcttcctggctgctttgtttacctaatcaagcctgggcaatggcgggcgcccctcccccagcctcgctgccgccttgcagtttgatctcagactgctgtgctagcaatcagcgagactccgtgggcgtaggaccctccgagccaggtgcgggatatattctcgtggtgcgccgttttttaagcccgtcggaaaggcgcagtatttgggtaggagtgacccgattttccaggtgccgtccgtcacccctttctttgactcagaaagggaactccctgaccccttgcgcttcccaagtgaggcaatgcctcgccctgcttcggctcgcgcatggtgctcgctcccactgacctgcgcccactgtctggcactccctagtgagatgaacccggtacctcagctggaaatgcagaaatcacccgtcttctgcgtcgctcacgctgggagctgtagaccggagctgtagacaggagctgttcctattcgggcatcttggctcctccttgacaagcttgaaggtgagcacctcgaagggcttctttttatgttgaaaggcacgggtttgcatggcggttcatcagaggtcaataccccagtttgagaaagtccactgtggggaggaaagagagacttaaacaagccctggaaaaacaaagaatggaacacccctccgctgacttcaaccaactgcctgctgatgcggcctgactcccagccctttttgcagttttgaagtgacaaactgactaggctacaaagtattcaaccatgggctggttctggctggttcaccgaggctgtgtacaaagtgtcttcatgtcctgtgtttcaccttttaacatacagaacctaattttactgcattttaatgttaattctccactcgaaggtgaacatgggatgtatgtaacacatatgtttgcttatcaagcacacatatgaccccctttcatgaatattcatagttccccctgtgacctgttgaatatgtctgtttagccaacctgtttggcataaaactcctatcccaccctatctccctcaaagtacctgtttgtggtctcagctggaggtgccacttcccagcctgcagtttgcaacccttctcaagaaataaagtcttcctttccaag

SEQ ID NO: 11105 - DNA, 717 bp, Homo sapiens
gacagagcgagactccgtctcagaaaaataaacaaacaaataaataataaaaccctgagccctctgactgactgaacagacccctcttggccaaggtgacccccaaaaaactaaaaactaagtttcccggccgtaaggagatgggaaattgcgcctccgtataccccttcctcactgttaccagggtttttttttgtttgtttcccaaattaaacagaaacaagccctggaaaaacaaagaatggaacacccctccgctgacttcaaccaactgcctgctgatgcggcctgactcccagccctttttgcagttttgaagtgacaaactgactaggctacaaagtattcaaccatgggctggttctggctggttcaccgaggctgtgtacaaagtgtcttcatgtcctgtgtttcaccttttaacatacagaacctaattttactgcattttaatgttaattctccactcgaaggtgaacatgggatgtatgtaacacatatgtttgcttatcaagcacacatatgaccccctttcatgaatattcatagttccccctgtgacctgttgaatatgtctgtttagccaacctgtttggcataaaactcctatcccaccctatctccctcaaagtacctgtttgtggtctcagctggaggtgccacttcccagcctgcagtttgcaacccttctcaagaaataaagtcttcctttccaag

SEQ ID NO: 11106 - DNA, 1014 bp, Homo sapiens
ccagttcgagcttcctggctgctttgtttacctaatcaagcctgggcaatggcgggcgcccctcccccagcctcgctgccgccttgcagtttgatctcagactgctgtgctagcaatcagcgagactccgtgggcgtaggaccctccgagccaggtgcgggatatattctcgtggtgcgccgttttttaagcccgtcggaaaggcgcagtatttgggtaggagtgacccgattttccaggtgccgtccgtcacccctttctttgactcagaaagggaactccctgaccccttgcgcttcccaagtgaggcaatgcctcgccctgcttcggctcgcgcatggtgctcgctcccactgacctgcgcccactgtctggcactccctagtgagatgaacccggtacctcagctggaaatgcagaaatcacccgtcttctgcgtcgctcacgctgggagctgtagaccggagctgtagacaggagctgttcctattcgggcatcttggctcctccttgaaaacaagccctggaaaaacaaagaatggaacacccctccgctgacttcaaccaactgcctgctgatgcggcctgactcccagccctttttgcagttttgaagtgacaaactgactaggctacaaagtattcaaccatgggctggttctggctggttcaccgaggctgtgtacaaagtgtcttcatgtcctgtgtttcaccttttaacatacagaacctaattttactgcattttaatgttaattctccactcgaaggtgaacatgggatgtatgtaacacatatgtttgcttatcaagcacacatatgaccccctttcatgaatattcatagttccccctgtgacctgttgaatatgtctgtttagccaacctgtttggcataaaactcctatcccaccctatctccctcaaagtacctgtttgtggtctcagctggaggtgccacttcccagcctgcagtttgcaacccttctcaagaaataaagtcttcctttccaag

SEQ ID NO: 11107 - DNA, 796 bp, Homo sapiens
ccagttcgagcttcctggctgctttgtttacctaatcaagcctgggcaatggcgggcgcccctcccccagcctcgctgccgccttgcagtttgatctcagactgctgtgctagcaatcagcgagactccgtgggcgtaggaccctccgagccaggtgcgggatatattctcgtggtgcgccgttttttaagcccgtcggaaaggcgcagtatttgggtaggagtgacccgattttccaggtgccgtccgtcacccctttctttgactcagaaagggaactccctgaccccttgcgcttcccaagtgaggcaatgcctcgccctgcttcggctcgcgcatggtgctcgctcccactgacctgcgcccactgtctggcactccctagtgagatgaacccggtacctcagctggaaatgcagaaatcacccgtcttctgcgtcgctcacgctgggagctgtagaccggagctgtagacaggagctgttcctattcgggcatcttggctcctccttgacaagcttgaaggtgagcacctcgaagggcttctttttatgttgaaaggcacgggtttgcatggcggttcatcagaggtcaataccccagtttgagaaagtccactgtggggaggaaagagagacttgtaagtaccaactgtgctccactctggttttgtctgtaagcctggaagactcaagctctgggacactttccttctagtcttgggactggtagcacctccagcaactcccaccccgctgcgggcaagctgttccttttcttttaacctatttgtctc

SEQ ID NO: 11108 - DNA, 383 bp, Homo sapiens
tatggcatactaacatttatctttggaagacagaaaaaaaaagaatttgacatttgtctttaaaaaaatatttatgtaacaagactctgacatttgcaaatggctccttatttgcaactaagtctggcctctatgagtgacagaagtgactggaaattttcagaattattaaatggatctcacagttcattgttaaggagatagcttggtggtatggaaagaacaaaagctttgaagccactcagatgattaaaaaaaaatggggggaagatatggtgcctcacacctgtaatcccagcacttcgtgaggctgaggtgggaggatcacttgagcccaggagtttgacaccagcctgggcaatatattgagaccctgtctgtat

SEQ ID NO: 11109 - DNA, 439 bp, Homo sapiens
gtagagcctgaaagtaggaccgaattgctgcaatctaatgattaaacttgaatggatgactagtggcttcttatggatgaacaaataaagtcatttcttttgatagaatctagaatctactcctggtgaagattccgttaacattatttaaatgacaacaaaggatttagggttttacataaacttagttgataaagcagtggcaggatttgagaggattgactccaattttgaaagacactctactgtgggtaaaatgccatcaaaaagcatcacatgctacagagaaatctttcatgaagagtcaaccgatgcagcaaacatcattgttgtcttatgttaagaaattggttgtgaggcacggtggctcactcctgtaactctagcaggttgggaggccaaggcgggcgaatcacttgaggctaggagttcgagacca

SEQ ID NO: 11110 - DNA, 836 bp, Homo sapiens
tcacattcagcatagggaaaactgaagggtgccaggctcggggacttcttccaacagagtggctcttccccaaatatgaaagaaaatcatcaaattaaattgaaggcaaaactaagcttccaccacaaagacatagcagatagttgcaaggtggattccttcgggccttttcctttcctaaggctaaaacaatgctaagacaaaagtcttcttgcagctgtctccgcccctccgagataaatactttcccaattctcccccaccctgtacacacacccacgcccgcggcagctggatttctgtcttctgcaatagctcgatttaaatgctttgcttttactctttattatcactattatttgtgtgaagccctctcgcctgctcctggtcaccagcaggagcctgcttccctccctccttccccccaagcctctgggcagcagaagctagctgggagctctgtgcagctggcggcgacgccatgtgactgtgagccgagcaccatcacccagagtcactctctagctttcccctaatacacttcacacccacgcactgtggaggtgcgagagaggttgctccgtgcggtgctattcgaggcagatgcagagagcgccctggagtaagctctccaatcctagagctgcgcgggaccctgactgaaggcggagggggcgggagggggtgctgttgctatatttagactccctatggagtttctgtgcagggactttcagggtgaaagatctagagacttaaaatgactcgtgtgcccgctttaaacgtcaaaatcttggcctttctgcaagcagtaaaatgaaaaccacttcctctta

SEQ ID NO: 11111 - DNA, 1090 bp, Homo sapiens
cgaaagggttgtagacatggcggccatcaggatgggaaaactgacaaccatgcctgcaggtctgatatatgcatctgtaagtgtacatgcagccaaacaagaggaatccaaaaagcagctagtgaaaccagagcagctccccatatatactgcaccaccgctccagtctaaatatgttgaagagcagcctggtcatttacaaatgggctttgcttccatccgcactgcaactggttgttacattggctggtgcaagggtgtttatgtctttgtgaaaaatgggataatggatacagtacaatttggaaaagatgcttatgtctatctgaagaatcctcctcgagattttcttccgaaaatgggagttattacagtttcaggattggcgggcttggtttcagcgagaaaaggttccaagtttaagaaaattacttatcctctgggactggccactttaggagcaactgtttgctacccagttcagtccgtaataattgctaaggtaacagcaaaaaaggtatatgctacaagccagcaaatttttggagcagttaaatcattgtggacaaaaagcagcaaagaagagtcactccctaaacctaaagaaaaaactaagctaggatcctcttccgaaatagaagtacctgcaaaaacaactcacgtcttgaaacactcagtgcccttgccaacagaactcagctctgaagcaaagaccaaatcagaatccacttcaggtgcaacccagtttatgcctgaccccaagctcatggatcacgggcagtcccacccagaagatatagatatgtacagcactagaagctgaagtagactgcatgcagagactacacagaaaactacaagatgtgtggcgttgcaaataatgatgaaaataaatcatgtaatgggtaactgatacatagagtattacctaaaccaagtttctcccttacatttccaaatatgccatttgataaattacataagtggttaacacacaaactgtgaatgcagtgtaaacaatattaaatgattgatgaggagacttaggtagaagtattagcttgcatttgatgacctttaagggcactta

SEQ ID NO: 11112 - DNA, 468 bp, Homo sapiens
agagaacacacatgcgtgtgcagtgtagtaaacctcatgtgcagtggctgattacctttggagacagagcagatgaccataagcctcatctgggtaagaacagctcaatttagccatcatacccaggctttaccagcccaggaccccaaagcctacattattctgattggtagcatagcagcatttcttcatatctgccttcctagtatggatacaactttaggaaatggtcctactagactagacagaaatttgactcaaaatggttgaggccatgccaacctgaatagaagtgccagcacatggcttctgtgttatctgttatctcactgctttgagaagcataaagcctcatccaaaacaatgatgtgagggaaagcttacaaagaacactgtggaatggcccttttcatatatgagaaaatatttgaaaacacgtacaatacattaatactatgaaaaaaagaa

SEQ ID NO: 11113 - DNA, 4503 bp, Homo sapiens
gaaaggaagggagaagggagagagagagagagagagagagagagagagagagagagagagagagagagagagagagagagagactcacagagctaaaaccttcatccatgtggaggacagtctgagggagccactgtcccttgtccactgactcactggctggtccgagttttctccgcttctggcagtggcacctccgctgagcttttaaaccaagtcattgggacttagcgtctttctacccggcagggaagggaggagttggcaagaatttggctcacccattccccctgcaagcctccagcgtcgcggagcactagacatctactatgactgacaccgtgttcagcaacagttctaaccgttggatgtaccccagtgaccggccccttcaatcaaagctccaggcaggctggtccgtccaccccggtggtcagcctgacaggcagaggaagcaggaagagctgactgatgaggagaaagaaatcatcaacagggtgattgctcgagctgagaaaatggaagagatggagcaggagcgaatcggacgcctggtggaccgcctagaaaacatgaggaagaacgtggctggagatggggtgaaccgctgcatactgtgtggagaacagctggggatgctgggctctgcctgtgtagtatgtgaggactgtaagaagaacgtctgcaccaagtgcggagtggagaccaacaaccgcctgcattctgtgtggctctgcaaaatctgcattgagcagagggaggtgtggaagcgttctggagcgtggttcttcaaaggcttccccaaacaggtcctcccacagcctatgcctataaagaagaccaagccccagcagcctgtcagtgagcctgctgcccctgaacagcctgctcctgagcccaagcaccctgcccgggctccagctcgaggtgacagtgaagataggaggggcccgggtcagaagacaggccctgacccagcctctgctcccgggcgaggaaactatgggcctcccgtgcgcagggcctccgaggcacgaatgagctcatctagccgagattcagagagctgggaccacagtgggggtgctggagactccagccggagcccagcaggtttgagacgggccaactcagtccaggcctccagacctgccccaggctcggtgcagagcccagcgccacctcagcctgggcagccagggaccccaggaggaagcagaccgggtcctgggccagcaggacgctttccagatcagaagccagaggtggctccgagcgaccctgggaccactgccccaccccgagaggagagaacagggggagtcgggggctacccagcagttggagccagagaggaccgaatgagccacccctccggaccctattcccaagcatctgcagctgccccccagcctgctgcagcccgccagccaccacccccagaggaggaggaagaggaagccaacagctacgattcggatgaagcaaccaccctgggtgccctggaattcagccttctctacgaccaggacaacagctccctgcagtgcaccatcattaaggccaagggcctgaagcccatggattcaaacggcttggctgatccctacgttaagctgcacctcctgccgggagccagcaagtccaacaagcttcgtacaaaaactctgcggaatacccggaaccccatctggaatgagaccctcgtgtatcacggcatcaccgatgaggacatgcaaaggaagaccctcaggatctccgtctgtgatgaggacaaatttggccacaatgaatttattggtgagaccagattctccctcaagaaactgaagcccaaccagaggaagaatttcaacatctgcctggagcgagtgattcctatgaaacgtgctgggaccaccgggtcagcccgaggcatggccctttatgaggaagagcaggtggagcgtgttggtgacatcgaggagcgtggcaagatcctggtctccctcatgtacagcacacagcagggaggcctcattgtgggcatcatacgctgcgtgcacctggctgccatggacgctaatggctactcagacccattcgtcaagctctggctgaaaccggacatgggaaagaaggccaaacacaagactcaaattaaaaagaaaaccttgaatcccgaattcaatgaggagtttttctatgacatcaaacacagtgacctggcaaagaagtcactggacatttcagtctgggactatgacatcggcaagtccaatgattacatcggaggctgccagctggggatctctgccaagggagagcgcttaaaacactggtacgagtgtctgaaaaataaagacaagaagatagagcgctggcaccagctacagaatgagaaccacgtgtcaagtgattaggctagtgcccaggtccccatctccatgtcccgggtcccccccagcctgctctagctgcccaccgcaccctgatctctcttctctatgcctacctccccccataccctgctgatctccctgagcctgcctttgagcccccgtcacgttgggcactgctgccaaagactccctcctccctgatgctgggatgtgggctctgaatacagcccctctctcatccctgggatggagcaatggggatggggttggggagacgtttacaaagaggttgatcatttaataacctctcagtttgggtaaattacaaaggttcttcatcatttaggactgtttttagaccctcctagccttgaacacacacatgtacacacacacacacacacacacacacacaccctttcattccctgtgttgtgtctctgtatatccccagttgtcagcagacccggacaatgctgtgagagaagcattggggcacaaatagagcctccgggctcccactgccccctgagatgtacaccctgattgccaggaaaacagactgctgtgttcagtaacacaccctccctgctccaagtgcaccaggatgcaaatgcacagaattcaccaggggcttggacgctctcctctttccgaatgtcacctgtgtgcttcctagcaaaacaaaaacaaacgacaacaacaaaaaacccttcctctgtcaccttttctcctcctccctcttctttcccttccatgatagtagattctctctttctcagcctctcccctctcctttctctccctgcctttcttccctttgcctttctctctctctaaagcagtaacaccgcaaaaacaacagcaaaaaaagtgtatgttaacctagcctcacccccttgctctcaccagcctgaccaggaaactgagaaactggcccaaacctgagattccacttgggcccacgcttcttaactgacccactcctcccgttggcagaaccagacattcccagggcttgggccaatggctggcactgccctgagtgcatggcagcatccctcaagctgtgtagatgccccatagaggactctctcatccgtgggctccccgggtgggcacggaggcatttagaagaccagggccatgggtctgaggaagcctcagccaaagcctccagcctttctcctttctccgctcttaggtaaatgaacaagctaccctcctccccaatgcccttgactctgtttcattgactcttttgcatcccatctctcactcagaaccccctccagtctctctgtctctctttgtctgtctctctgtctcctgcactctcgttactaagcttcctgggagaatcaaataatatcatggctatggaacagtagagagagacaggcctgatgccaaaggctttgggctcatcatcaatctttcactttcttcctataaaaaaaattattttataaaggaggaaaaggcaatgtgggcaaacattacaaatttgaggttgaagtcaggcaatcttcaatgccctgtgagaaaggttcgattttcccaattttgatgaagtcttccctcatgaaaatcactcccagtcatcccaaacccctgacattctctacagaagcatcagacagatactcaaactctcactttccccaaatcacatctcttaacttttcaacgccctccaccctcagctccctgcacaattcatgggaggactcatttcttgccttgaataaccattttctaaacatcgagctcttcaccttccccaaggtggccaacagcttcctggctgccatctttccttttgaccttatctttccccattagtccctggtggcacctactctcagcccacctccctcaccacagtttccccttaggagacagcatgctggctgtgtcgcccaagcctgatgctggtgtaggcgctggaatcagcatgcagcaagctcacagtgcccctagtctgggtgcccgctgtccccgacaaatgtaaccacctccctgcctagaatacacacacgtcctccggtgcatgcacaaccacccagcatctttctttgtgatgatgtagccaaaaataaagtaggagcatccaaaaaaa

SEQ ID NO: 11114 - DNA, 932 bp, Homo sapiens
  misc_feature (19)..(19): n is a, c, g, or t
atcgggctagtagaggccngtggtgaatcggccgaggggacagtctgagggagccactgtcccttgtccactgactcactggctggtccgagttttctccgcttctggcagtggcacctccgctgagcttttaaaccaagtcattgggacttagcgtctttctacccggcagggaagggaggagttggcaagaatttggctcacccattccccctgcaagcctccagcgtcgcggagcactagacatctactatgactgacaccgtgttcagcaacagttctaaccgttggatgtaccccagtgaccggccccttcaatcaaagctccaggcaggctggtccgtccaccccggtggtcagcctgacaggcagaggaagcaggaagagctgactgatgaggagaaagaaatcatcaacagggtgattgctcgagctgagaaaatggaagagatggagcaggagcgaatcggacgcctggtggaccgcctagaaaacatgaggaagaacgtggctggagatggggtgaaccgctgcatactgtgtggagaacagctggggatgctgggctctgcctgtgtagtatgtgaggactgtaagaagaacgtctgcaccaagtgcggagtggagaccaacaaccgcctgcattctgtgtggctctgcaaaatctgcattgagcagagggaggtgtggaagcgttctggagcgtggttcttcaaaggcttccccaaacaggtcctcccacagcctatgcctataaagaagaccaagccccagcagcctgtcagtgagcctgctgcccctgaacagcctgctcctgagcccaagcaccctgcccgggctccagctcgaggtgcagtgaagatgggagggccgggtcgcaaacgggccggaccgccctgctcccgcgagaccatgggctccggccaggcccg

SEQ ID NO: 11115 - DNA, 4646 bp, Homo sapiens
gaggcaggcttggttcccgcttggttccccctgcactgggaagctgccgccccgcttcccttgctcacacagggctttgcagtagtggtggcagccgcggcagaaactggctctggggaagcaattgattcgtctactgccagcagcccggagttgcctacgcggactggaaaggagagagagagagagagagagagagagagagagagagagagagagagagagactcacagagctaaaaccttcatccatgtggaggacagtctgagggagccactgtcccttgtccactgactcactggctggtccgagttttctccgcttctggcagtggcacctccgctgagcttttaaaccaagtcattgggacttagcgtctttctacccggcagggaagggaggagttggcaagaatttggctcacccattccccctgcaagcctccagcgtcgcggagcactagacatctactatgactgacaccgtgttcagcaacagttctaaccgttggatgtaccccagtgaccggccccttcaatcaaagctccaggcaggctggtccgtccaccccggtggtcagcctgacaggcagaggaagcaggaagagctgactgatgaggagaaagaaatcatcaacagggtgattgctcgagctgagaaaatggaagagatggagcaggagcgaatcggacgcctggtggaccgcctagaaaacatgaggaagaacgtggctggagatggggtgaaccgctgcatactgtgtggagaacagctggggatgctgggctctgcctgtgtagtatgtgaggactgtaagaagaacgtctgcaccaagtgcggagtggagaccaacaaccgcctgcattctgtgtggctctgcaaaatctgcattgagcagagggaggtgtggaagcgttctggagcgtggttcttcaaaggcttccccaaacaggtcctcccacagcctatgcctataaagaagaccaagccccagcagcctgtcagtgagcctgctgcccctgaacagcctgctcctgagcccaagcaccctgcccgggctccagctcgaggtgacagtgaagataggaggggcccgggtcagaagacaggccctgacccagcctctgctcccgggcgaggaaactatgggcctcccgtgcgcagggcctccgaggcacgaatgagctcatctagccgagattcagagagctgggaccacagtgggggtgctggagactccagccggagcccagcaggtttgagacgggccaactcagtccaggcctccagacctgccccaggctcggtgcagagcccagcgccacctcagcctgggcagccagggaccccaggaggaagcagaccgggtcctgggccagcaggacgctttccagatcagaagccagaggtggctccgagcgaccctgggaccactgccccaccccgagaggagagaacagggggagtcgggggctacccagcagttggagccagagaggaccgaatgagccacccctccggaccctattcccaagcatctgcagctgccccccagcctgctgcagcccgccagccaccacccccagaggaggaggaagaggaagccaacagctacgattcggatgaagcaaccaccctgggtgccctggaattcagccttctctacgaccaggacaacagctccctgcagtgcaccatcattaaggccaagggcctgaagcccatggattcaaacggcttggctgatccctacgttaagctgcacctcctgccgggagccagcaagtccaacaagcttcgtacaaaaactctgcggaatacccggaaccccatctggaatgagaccctcgtgtatcacggcatcaccgatgaggacatgcaaaggaagaccctcaggatctccgtctgtgatgaggacaaatttggccacaatgaatttattggtgagaccagattctccctcaagaaactgaagcccaaccagaggaagaatttcaacatctgcctggagcgagtgattcctatgaaacgtgctgggaccaccgggtcagcccgaggcatggccctttatgaggaagagcaggtggagcgtgttggtgacatcgaggagcgtggcaagatcctggtctccctcatgtacagcacacagcagggaggcctcattgtgggcatcatacgctgcgtgcacctggctgccatggacgctaatggctactcagacccattcgtcaagctctggctgaaaccggacatgggaaagaaggccaaacacaagactcaaattaaaaagaaaaccttgaatcccgaattcaatgaggagtttttctatgacatcaaacacagtgacctggcaaagaagtcactggacatttcagtctgggactatgacatcggcaagtccaatgattacatcggaggctgccagctggggatctctgccaagggagagcgcttaaaacactggtacgagtgtctgaaaaataaagacaagaagatagagcgctggcaccagctacagaatgagaaccacgtgtcaagtgattaggctagtgcccaggtccccatctccatgtcccgggtcccccccagcctgctctagctgcccaccgcaccctgatctctcttctctatgcctacctccccccataccctgctgatctccctgagcctgcctttgagcccccgtcacgttgggcactgctgccaaagactccctcctccctgatgctgggatgtgggctctgaatacagcccctctctcatccctgggatggagcaatggggatggggttggggagacgtttacaaagaggttgatcatttaataacctctcagtttgggtaaattacaaaggttcttcatcatttaggactgtttttagaccctcctagccttgaacacacacatgtacacacacacacacacacacacacacacaccctttcattccctgtgttgtgtctctgtatatccccagttgtcagcagacccggacaatgctgtgagagaagcattggggcacaaatagagcctccgggctcccactgccccctgagatgtacaccctgattgccaggaaaacagactgctgtgttcagtaacacaccctccctgctccaagtgcaccaggatgcaaatgcacagaattcaccaggggcttggacgctctcctctttccgaatgtcacctgtgtgcttcctagcaaaacaaaaacaaacgacaacaacaaaaaacccttcctctgtcaccttttctcctcctccctcttctttcccttccatgatagtagattctctctttctcagcctctcccctctcctttctctccctgcctttcttccctttgcctttctctctctctaaagcagtaacaccgcaaaaacaacagcaaaaaaagtgtatgttaacctagcctcacccccttgctctcaccagcctgaccaggaaactgagaaactggcccaaacctgagattccacttgggcccacgcttcttaactgacccactcctcccgttggcagaaccagacattcccagggcttgggccaatggctggcactgccctgagtgcatggcagcatccctcaagctgtgtagatgccccatagaggactctctcatccgtgggctccccgggtgggcacggaggcatttagaagaccagggccatgggtctgaggaagcctcagccaaagcctccagcctttctcctttctccgctcttaggtaaatgaacaagctaccctcctccccaatgcccttgactctgtttcattgactcttttgcatcccatctctcactcagaaccccctccagtctctctgtctctctttgtctgtctctctgtctcctgcactctcgttactaagcttcctgggagaatcaaataatatcatggctatggaacagtagagagagacaggcctgatgccaaaggctttgggctcatcatcaatctttcactttcttcctataaaaaaaattattttataaaggaggaaaaggcaatgtgggcaaacattacaaatttgaggttgaagtcaggcaatcttcaatgccctgtgagaaaggttcgattttcccaattttgatgaagtcttccctcatgaaaatcactcccagtcatcccaaacccctgacattctctacagaagcatcagacagatactcaaactctcactttccccaaatcacatctcttaacttttcaacgccctccaccctcagctccctgcacaattcatgggaggactcatttcttgccttgaataaccattttctaaacatcgagctcttcaccttccccaaggtggccaacagcttcctggctgccatctttccttttgaccttatctttccccattagtccctggtggcacctactctcagcccacctccctcaccacagtttccccttaggagacagcatgctggctgtgtcgcccaagcctgatgctggtgtaggcgctggaatcagcatgcagcaagctcacagtgcccctagtctgggtgcccgctgtccccgacaaatgtaaccacctccctgcctagaatacacacacgtcctccggtgcatgcacaaccacccagcatctttctttgtgatgatgtagccaaaaataaagtaggagcatccaaaaaaa

SEQ ID NO: 11116 - DNA, 4885 bp, Homo sapiens
gaggcaggcttggttcccgcttggttccccctgcactgggaagctgccgccccgcttcccttgctcacacagggctttgcagtagtggtggcagccgcggcagaaactggctctggggaagcaattgattcgtctactgccagcagcccggagttgcctacgcggactggaaaggagagagagagagagagagagagagagagagagagagagagagagagagagactcacagagctaaaaccttcatccatgtggaggacagtctgagggagccactgtcccttgtccactgactcactggctggtccgagttttctccgcttctggcagtggcacctccgctgagcttttaaaccaagtcattgggacttagcgtctttctacccggcagggaagggaggagttggcaagaatttggctcacccattccccctgcaagcctccagcgtcgcggagcactagacatctactatgactgacaccgtgttcagcaacagttctaaccgttggatgtaccccagtgaccggccccttcaatcaaagctccaggcaggctggtccgtccaccccggtggtcagcctgacaggcagaggaagcaggaagagctgactgatgaggagaaagaaatcatcaacagggtgattgctcgagctgagaaaatggaagagatggagcaggagcgaatcggacgcctggtggaccgcctagaaaacatgaggaagaacgtggctggagatggggtgaaccgctgcatactgtgtggagaacagctggggatgctgggctctgcctgtgtagtatgtgaggactgtaagaagaacgtctgcaccaagtgcggagtggagaccaacaaccgcctgcattctgtgtggctctgcaaaatctgcattgagcagagggaggtgtggaagcgttctggagcgtggttcttcaaaggcttccccaaacaggtcctcccacagcctatgcctataaagaagaccaagccccagcagcctgtcagtgagcctgctgcccctgaacagcctgctcctgagcccaagcaccctgcccgggctccagctcgaggtgacagtgaagataggaggggcccgggtcagaagacaggccctgacccagcctctgctcccgggcgaggaaactatgggcctcccgtgcgcagggcctccgaggcacgaatgagctcatctagccgagattcagagagctgggaccacagtgggggtgctggagactccagccggagcccagcaggtttgagacgggccaactcagtccaggcctccagacctgccccaggctcggtgcagagcccagcgccacctcagcctgggcagccagggaccccaggaggaagcagaccgggtcctgggccagcaggacgctttccagatcagaagccagaggtggctccgagcgaccctgggaccactgccccaccccgagaggagagaacagggggagtcgggggctacccagcagttggagccagagaggaccgaatgagccacccctccggaccctattcccaagcatctgcagctgccccccagcctgctgcagcccgccagccaccacccccagaggaggaggaagaggaagccaacagctacgattcggatgaagcaaccaccctgggtgccctggaattcagccttctctacgaccaggacaacagctccctgcagtgcaccatcattaaggccaagggcctgaagcccatggattcaaacggcttggctgatccctacgttaagctgcacctcctgccgggagccagcaagtccaacaagcttcgtacaaaaactctgcggaatacccggaaccccatctggaatgagaccctcgtgtatcacggcatcaccgatgaggacatgcaaaggaagaccctcaggatctccgtctgtgatgaggacaaatttggccacaatgaatttattggtgagaccagattctccctcaagaaactgaagcccaaccagaggaagaatttcaacatctgcctggagcgagtgattcctatgaaacgtgctgggaccaccgggtcagcccgaggcatggccctttatgaggaagagcaggtggagcgtgttggtgacatcgaggagcgtggcaagatcctggtctccctcatgtacagcacacagcagggaggcctcattgtgggcatcatacgctgcgtgcacctggctgccatggacgctaatggctactcagacccattcgtcaagctctggctgaaaccggacatgggaaagaaggccaaacacaagactcaaattaaaaagaaaaccttgaatcccgaattcaatgaggagtttttctatgacatcaaacacagtgacctggcaaagaagtcactggacatttcagtctgggactatgacatcggcaagtccaatgattacatcggaggctgccagctggggatctctgccaagggagagcgcttaaaacactggtacgagtgtctgaaaaataaagacaagaagatagagcgctggcaccagctacagaatgagaaccacgtgtcaagtgattaggctagtgcccaggtccccatctccatgtcccgggtcccccccagcctgctctagctgcccaccgcaccctgatctctcttctctatgcctacctccccccataccctgctgatctccctgagcctgcctttgagcccccgtcacgttgggcactgctgccaaagactccctcctccctgatgctgggatgtgggctctgaatacagcccctctctcatccctgggatggagcaatggggatggggttggggagacgtttacaaagaggttgatcatttaataacctctcagtttgggtaaattacaaaggttcttcatcatttaggactgtttttagaccctcctagccttgaacacacacatgtacacacacacacacacacacacacacacaccctttcattccctgtgttgtgtctctgtatatccccagttgtcagcagacccggacaatgctgtgagagaagcattggggcacaaatagagcctccgggctcccactgccccctgagatgtacaccctgattgccaggaaaacagactgctgtgttcagtaacacaccctccctgctccaagtgcaccaggatgcaaatgcacagaattcaccaggggcttggacgctctcctctttccgaatgtcacctgtgtgcttcctagcaaaacaaaaacaaacgacaacaacaaaaaacccttcctctgtcaccttttctcctcctccctcttctttcccttccatgatagtagattctctctttctcagcctctcccctctcctttctctccctgcctttcttccctttgcctttctctctctctaaagcagtaacaccgcaaaaacaacagcaaaaaaagtgtatgttaacctagcctcacccccttgctctcaccagcctgaccaggaaactgagaaactggcccaaacctgagattccacttgggcccacgcttcttaactgacccactcctcccgttggcagaaccagacattcccagggcttgggccaatggctggcactgccctgagtgcatggcagcatccctcaagctgtgtagatgccccatagaggactctctcatccgtgggctccccgggtgggcacggaggcatttagaagaccagggccatgggtctgaggaagcctcagccaaagcctccagcctttctcctttctccgctcttaggtaaatgaacaagctaccctcctccccaatgcccttgactctgtttcattgactcttttgcatcccatctctcactcagaaccccctccagtctctctgtctctctttgtctgtctctctgtctcctgcactctcgttactaagcttcctgggagaatcaaataatatcatggctatggaacagtagagagagacaggcctgatgccaaaggctttgggctcatcatcaatctttcactttcttcctataaaaaaaattattttataaaggaggaaaaggcaatgtgggcaaacattacaaatttgaggttgaagtcaggcaatcttcaatgccctgtgagaaaggttcgattttcccaattttgatgaagtcttccctcatgaaaatcactcccagtcatcccaaacccctgacattctctacagaagcatcagacagatactcaaactctcactttccccaaatcacatctcttaacttttcaacgccctccaccctcagctccctgcacaattcatgggaggactcatttcttgccttgaataaccattttctaaacatcgagctcttcaccttccccaaggtggccaacagcttcctggctgccatctttccttttgaccttatctttccccattagtccctggtggcacctactctcagcccacctccctcaccacagtttccccttaggagacagcatgctggctgtgtcgcccaagcctgatgctggtgtaggcgctggaatcagcatgcagcaagctcacagtgcccctagtctgggtgcccgctgtccccgacaaatgtaaccacctccctgcctagaatacacacacgtcctccggtgcatgcacaaccacccagcatctttctttgtgatgatgtagccaaaaataaagtaggagcatccaaaaaaaaaaaaaaaaagggggggggctaaaagttacccggaggcccagttaccgtacccgttctgacagggcccaaaggggcggtataagcagccggccgcggtaacgccgcgcggacacgcctgggcctggaggccctctgggcactcggacccccattaccgggataatggtagtgcacgctctccgggattcgtacacgcatagcccccacatctcttcgccattcacccccgcatactacg

SEQ ID NO: 11117 - DNA, 757 bp, Homo sapiens
tgagacagagactctttcgcccaggctggagtgcagtggcgcaatctgagttcactgtaatctccgcctcttgggttcaagcaattctcctgcccgagcctcccaagtagctggcattacaggcacatgccaccatgcctggctaatttttgtatttttagtagagatggggtttcaccatgttggccgggctggtctcgaactcctgaccttgtgatgcacccacctcggcctcccaaagtgctgggatttacaggcgtaagccactgagcccagtgcctaggactatattttaaaataagcaatgaaagattctgttttaatttgggatggactatattcatttggactcttgctccttgagctcttctgtacttaaatgggactagcagttctcatctctgagcttcggttttgtcattgagttatgttgaggattaaatactatactgtatgtgatgccagaacttagtatgttgcctggcacactaagttgactcagtaaaggttaggaactgggccagtacaataaatatcagggttttgacattcatctttagattttcaacatgaattaagacatatctgactggaagccagaagatgtgctgaatgagcatgtacagaagatgtccaccaagttgaattacactttagattgaattggaggagtttttttggcttgcttgcttgcttgtttactccaagctaaaatttaaatctggaaagatttcaccatccaagctgtctaacctag

SEQ ID NO: 11118 - DNA, 8478 bp, Homo sapiens
  misc_feature (743)..(743): n is a, c, g, or t
  misc_feature (1167)..(1167): n is a, c, g, or t
  misc_feature (1206)..(1206): n is a, c, g, or t
agcatttcaggccccggacaggaggcagtgccgcttcggccgaaggccgagccgcccgagggctctgggatggtgtgggaccggcaaaccaagatggagtatgagtggaaacctgacgagcaagggcttcagcaaatcctgcagctgttgaaggagtcccagtccccagacaccaccatccagagaaccgtgcaacaaaaactggaacaacttaatcagtatccagactttaacaactacttgatttttgttcttacaaaattaaaatctgaagatgaacccacaagatcattgagtggtcttatcttgaagaataatgtgaaagcacactttcagaacttcccaaatggtgtaacagactttattaaaagtgaatgtttaaataatattggtgactcctctcctctgattagagccactgttggtattttgatcacaactatagcctccaagggagaattgcagaattggcctgacctcttaccaaaactctgtagcctgttggattctgaagattataatacctgtgagggagcatttggtgcccttcagaagatttgtgaagattctgctgagattttagacagtgatgttttagatcgtcctctcaacatcatgattcccaaatttttacagttcttcaagcatagtagtccaaaaataaggtctcacgctgttgcatgtgtcaatcagtttatcatcagtaggactcaagctctaatgttgcacattgattcttttantgagaatctctttgcattagctggtgatgaagaaccagaggtacggaaaaatgtgtgccgagcacttgtgatgttgctcgaagttcgaatggatcgcctgcttcctcacatgcataatatagttgagtacatgctacagaggactcaagatcaagatgaaaatgtggctttagaagcctgtgaattttggctaactttagctgaacagccaatatgcaaagatgtactcgtaaggcatcttcctaagttgattcctgtgttagtgaatggcatgaagtactcagacatagatattatcctacttaagggtgatgttgaagaagacgaaacgattcctgatagtgaacaggatatacggccacgttttcaccgatcgaggacggtggctcagcagcatgatgaagatggaattgaagaggaagangatgatgatgatgaaattgatgatgatgatacaatttcngactggaatctaagaaaatgttctgctgctgccctggatgttcttgcaaatgtgtatcgtgatgaactgctgccacatattttgccccttttgaaagaattactttttcatcatgaatgggttgttaaagaatcaggcattttggttttaggagcaattgctgaaggttgcatgcagggcatgattccatacttgcctgagcttattcctcaccttattcagtgcctctctgataaaaaggctcttgtgcgttccataacatgctggactcttagccgctatgcacactgggtggtcagccagccgccagacacgtacctgaagccattaatgacagaattgctaaagcgcatcctggacagcaacaagagagtacaagaagctgcctgcagtgcctttgctaccctagaagaggaggcttgtacagaacttgttccttaccttgcttatatacttgataccctggtctttgcatttagtaaataccagcataagaacctgctcattctttacgatgccataggaacattagcagattcagtaggacatcatttaaacaaaccagaatatattcagatgctaatgcctccactgatccagaaatggaacatgttaaaggatgaagataaagatctcttccctttacttgagtgcctatcttcagttgccacagcactgcagtctggattccttccgtactgtgaacctgtgtatcagcgttgtgtaaacctagtacagaagactcttgcacaagccatgctaaacaatgctcaaccagatcaatatgaagctccagataaagattttatgatagtggctcttgatttactgagtggcctggctgaaggacttggaggcaacattgaacagctggtagcccgaagtaacatcctgacactaatgtatcagtgcatgcaggataaaatgccagaagttcgacagagttcttttgccctgttaggtgacctcacaaaagcttgctttcagcatgttaagccttgtatagctgatttcatgccaatattgggaaccaacctaaatccagaattcatttcagtctgcaacaatgccacatgggcaattggagaaatctccattcaaatgggtatagagatgcagccttatattcctatggtgttgcaccagcttgtagaaatcattaacagacccaacacaccaaagacgttgttagagaatacagcaataacaattggtcgtcttggttacgtttgtcctcaagaggtggcccccatgctacagcagtttataagaccctggtgcacctctctgagaaacataagagacaatgaggaaaaggattcagcattccgtggaatttgtaccatgatcagtgtgaatcccagtggcgtaatccaagattttatatttttttgtgatgccgttgcatcatggattaacccaaaagatgatctcagagacatgttctgtaagatccttcatggatttaaaaatcaagttggcgatgaaaattggaggcgtttctctgaccagtttcctcttcccttaaaagagcgtcttgcagctttttatggtgtttaatctaatacacttaagctgcagtcccaaaattaggggtccttcagtcttggagactataagggagcctctgcacccagggaaaatgttaccctttacaggggggaagggtaaaccagtagggaatacagtacaatcccaaccctactgggaggggcgggagggaggtgttgccgtcactgtattaagtcgatgttgggaaacgttttaacatctggagcctttgtgggtggaaatatgtctccagttacaactccgcagtggatgtgaagaagcaaaaaaaaaaaatctattcagtctactcacaaaacagtacattgtggaatattatggggaattgtaccaaaacaagaaccatataaatgatgcctagggacaagaaagaggaacaattctatagcgcacaataaaggaaacctaagaatgggagttacaaatagtaaagaagcttttttttttttttaatttaaagtttttttatgtaagttttcccacatgatggggccttgttttgcatgttgatgaagaactacacaaagaaaactaatatagttaaaagtcagcttgccttcccgtagtagaagcaggttcttggaagttacaatttaaggtaccccaaaaaagttggaaataaaacaaaacaaacataaacaatgaagcaccctgtgaaatgccaaatgagtcactccttttaccttttttggggtgggcagggagggaggaataaatggggttgggcatatcaaactaaagatgacatcttaattttgcattgaacattaatgtagcggatataatttgatgattatacttcattagatttaatttctaggccaagatgttactttttaaagtgcagtttaaggttcaggcatgcattctggctcatagtggttgaaagtaatttaaattagtgggaaagtagcatgcttgcatcacatagagtgagattggtattcatttacctatgttgcgccagtttgtgttgcagtttaccaattcaatatagccctgcatttaaagttcctttttaagatttgtggattttatttttattaagaacatagatatataaagtactgtagtttacaggtaggccttgaaatatcttttttaggatctgttaggaataagattgatattgtattgtgtgtaacctgcacaatgtggaaagctgatatacctgtgcaaaatctttgcctctgtgctgtcagtgtgatgtgctttctgcatggttatatactactagtgattttatcaaaacttctaaaatttaaattacgtggtaaaagatctgtaaaaggctgcataaatgttagttggcacataaagacaattgtagaagttgaaaaatgattgctatatttcaatgtttattcccactcaacatactgccttctaagcttccctttttttgttcaaagcatgatcttaaagatatgtttaagttaatggatgtaatgcagggttcctacactgtattttggcgcatgttggtggccctctgtgccctagatatatgcacacagggtgcaagttaaaagctacagagtgaaagttggtttggatcctcttcatttcatttgtttagcttttctgttatttttctctacttacatgtattcctgtgaataaatccttgttaagttaaccctttacttttccttccatgtgtattttcttatatactgtgaatgtgaaaacctaactggtacacttgatcttgtgttcatatgaaagtgcaagtctttattaatttggattgcctgaacagtgtatcccatgatgatgaaggaaaatggagagatttttctttttaactctgctggtcagagatgaagccacgcctttccatttttcaatgctgcatatttaatctgcaacaaaaatgttaagccataacagcctttttatattttagtttgtcacctttgcattgcagaataaatactgaataaccatttttataagcagttgctcctctttgcatggttctattctctaaaagtgttgaatgatacagccattgcactgaagtttgagctgtgtgcgtgtgaatttatactgtttcaaaaatttcaaatgcatggtagcatgtagaaaggtttttgttactatgtgtgtgtgtgtgttttgttttgttttgttctgttttttaacgttctttcacctttcctctactttggctttgcaaatttcagtctgtagagcctgaaattaaattattttatagtgcctgatatttttaatattataagttggattcaaagggtatacagcattttgttttctagtaccattgcttcactgggagctcaaaatttgcctccctgttagtctttaataactgagtagagtagcttttttattcttagattatagtgatattctgtagtgcttcaaatacttagaattctaatatgagagatagtttaatattctggaatagagagtattttaaattgaaatgaccaaattcgatttaaaacaaacacataacaatcttcagtaaagttatttgaacctgtggttgacaattctgtattgactaaaggcaatattgtcacctgtctcattaaaaattagtttccagttaggcagatgaataacactattaaaaatgcacccagttttgtagtcacttgactttttttttttatttaaatgaaatttaatttgaaaatagaaaataaaattaggtaaatatgactggcaacctgaatttgagttgggattctttgtgtatttttcccccttgaggttattgtttcttcctaatttatatttcagatacatagtgtagaacaggaatttgcagaagccatttaagttatcttttgaggtaagctctgatttagcatttattctgataaaatctaatacatcatgggatatatataaagcaacttaattcttgtggtgtagtcttaatagttttgaatgttgactgaatgtctataaaattgtgagtttgtctttgttacattccagtgtttctgcctcttggcatgcttaaagcacggcttacttcatctgctccttacacactaaaatgctgttagtgtgctcaactacagaaatagccgctgctaagtgatgtagattttctacttgaatatttttatgttgtaggaacctcaggaggtcagtgtttactgttttatatatgccttctttttcctgtttgagcttctctctttgaaggattctaacagaacaaagctgctgatcaacctaagttggaaacagaaagtgtaattaatataacttaaatgcatgtttggcagttccatgttacagtccattagcgagtgaacttagtgccacaggtattcatttattcaggaaagaattttgctttttgtattgtctaatctcttcaatgacttcatactgtgtaaaaaaaaatcactttttaatattttttggttggttatttcccaaataatcaacatgtaaataatcttttaagagccagttctgatgctttacattattgctacttgattttgttatgcaagttagatttcagaagaatagattttaaaacacttaaccaagccattacatcttaaaaacaaaacaagtagcatacattttgtaattaacattgataaacactgtgatttttttggttaagactttttcattgatctgaattgcttaaattgcatatattgtaaaataggatcagatgtatattttaaactaatttcaatggattttcctcttgaaatgctttgtctactcagttataaaatattcagatacaagttttatctcaggtgaatactcttgtattgtttttgctttggtgacatgcttataaagggtcatcctagttacattctttgttttttaagtgtatttcattgagaatctttccatttagtctgatttttttcctaatattctagcaggctggggtggtataaagccctcctgacaagccttttgcctacaggtttacctgaaaatgagctacatatggtcgtcattttcttcaaactctcaaaataggaaagtggaaatttttctcccctatataaaattattctgcctagcagaaatgccagaaataaattaattgcatcttagtctaaatttaagtcctttgccatgaggaaaaagtggttttttgcttcatatggtaaatctatattattcatattgaatgtattaacagataatggtgcaaaagcattcttcccagggaagagtgtatcatgcataactgcaatttaagtccttcctttgataatacttcaaaacatacacagctttgcttactgaattatttttgcaaataatacaaggaggggaaactaacttgctactagtgttgttaatgaagtataggccttggaacatttaagaaaactggtcttcagatagttaagggcttgggataatttaagtgaaaagtgagatcagtaatgagctgtgttgttaacaatattatctggtaataataccatgcaatatagcgttgtataccaacttagtgcattttatactgtattaaatatggagatacttctaatgcctctctaaaattaaattttacataaaagttagttttattcacctttaggctttccaagtgaattgtgactaattttttcaatcttacatagatctttcacccattagcattacttacgtagataattctttatgcctagttattatacatattaatttttaaggtatacatttaaattacacaattgttcattgtggtttgtatcccagaatgtgttgtgttttttaaaagatgcataatagctgaatgtatgcatgactttgaaagaagttaaaatggtgattttttttcacctcttgtacattttaaaaccaggccaaatctatttgccaagcagtgtatcactaataagaaaagcagtttttccttttattgcagtttttgtttatctgccatagaatttccttatactgtggcttggtattattcaagattagctatttcgctggtattacatctttttaaaagcctattataacatggttagcctataaggcagtgttggtccccttctaatattggcctcataaaggggttccactgtactttccgcatattactgtgttgttgttttcctttgtggatatataagcaaattgagcttgggtgatttttatggagacaataattagacaatactgtataattagttttacttaatagattatcatcttgtgagaagagatgtttaaacgtggtaaatcacttcatattacaaaacagttttacacttaatatgttaacattgggtgcaataatttagtagcattagctttagttacaaatataactggatctttctgctgacaacttaggttgtatgagttatgcttaaaagctttaaatctgatgtttcctgtacctgccacactatgttagaatgtgtccttcaaacatatcctcctgcaacttctcaaactgtactaaattgatatttcttgaagtctaactctgtgctaacagatctccattttaaatagaatacggttttaatttttgataagctgctgaattttaaagagagttttttggggccaccaaatattttggatcatgcagagaatatatattgtactgtagtaattttgtatttacatttgtatgatgtgacataatagatgtgaatgttaatcactgcttgactatgttaataaagttgtttaactata

SEQ ID NO: 11119 - DNA, 8424 bp, Homo sapiens
  misc_feature (743)..(743): n is a, c, g, or t
  misc_feature (1167)..(1167): n is a, c, g, or t
  misc_feature (1206)..(1206): n is a, c, g, or t
agcatttcaggccccggacaggaggcagtgccgcttcggccgaaggccgagccgcccgagggctctgggatggtgtgggaccggcaaaccaagatggagtatgagtggaaacctgacgagcaagggcttcagcaaatcctgcagctgttgaaggagtcccagtccccagacaccaccatccagagaaccgtgcaacaaaaactggaacaacttaatcagtatccagactttaacaactacttgatttttgttcttacaaaattaaaatctgaagatgaacccacaagatcattgagtggtcttatcttgaagaataatgtgaaagcacactttcagaacttcccaaatggtgtaacagactttattaaaagtgaatgtttaaataatattggtgactcctctcctctgattagagccactgttggtattttgatcacaactatagcctccaagggagaattgcagaattggcctgacctcttaccaaaactctgtagcctgttggattctgaagattataatacctgtgagggagcatttggtgcccttcagaagatttgtgaagattctgctgagattttagacagtgatgttttagatcgtcctctcaacatcatgattcccaaatttttacagttcttcaagcatagtagtccaaaaataaggtctcacgctgttgcatgtgtcaatcagtttatcatcagtaggactcaagctctaatgttgcacattgattcttttantgagaatctctttgcattagctggtgatgaagaaccagaggtacggaaaaatgtgtgccgagcacttgtgatgttgctcgaagttcgaatggatcgcctgcttcctcacatgcataatatagttgagtacatgctacagaggactcaagatcaagatgaaaatgtggctttagaagcctgtgaattttggctaactttagctgaacagccaatatgcaaagatgtactcgtaaggcatcttcctaagttgattcctgtgttagtgaatggcatgaagtactcagacatagatattatcctacttaagggtgatgttgaagaagacgaaacgattcctgatagtgaacaggatatacggccacgttttcaccgatcgaggacggtggctcagcagcatgatgaagatggaattgaagaggaagangatgatgatgatgaaattgatgatgatgatacaatttcngactggaatctaagaaaatgttctgctgctgccctggatgttcttgcaaatgtgtatcgtgatgaactgctgccacatattttgccccttttgaaagaattactttttcatcatgaatgggttgttaaagaatcaggcattttggttttaggagcaattgctgaaggttgcatgcagggcatgattccatacttgcctgagcttattcctcaccttattcagtgcctctctgataaaaaggctcttgtgcgttccataacatgctggactcttagccgctatgcacactgggtggtcagccagccgccagacacgtacctgaagccattaatgacagaattgctaaagcgcatcctggacagcaacaagagagtacaagaagctgcctgcagtgcctttgctaccctagaagaggaggcttgtacagaacttgttccttaccttgcttatatacttgataccctggtctttgcatttagtaaataccagcataagaacctgctcattctttacgatgccataggaacattagcagattcagtaggacatcatttaaacaaaccagaatatattcagatgctaatgcctccactgatccagaaatggaacatgttaaaggatgaagataaagatctcttccctttacttgagtgcctatcttcagttgccacagcactgcagtctggattccttccgtactgtgaacctgtgtatcagcgttgtgtaaacctagtacagaagactcttgcacaagccatgctaaacaatgctcaaccagatcaatatgaagctccagataaagattttatgatagtggctcttgatttactgagtggcctggctgaaggacttggaggcaacattgaacagctggtagcccgaagtaacatcctgacactaatgtatcagtgcatgcaggataaaatgccagaagttcgacagagttcttttgccctgttaggtgacctcacaaaagcttgctttcagcatgttaagccttgtatagctgatttcatgccaatattgggaaccaacctaaatccagaattcatttcagtctgcaacaatgccacatgggcaattggagaaatctccattcaaatgggtatagagatgcagccttatattcctatggtgttgcaccagcttgtagaaatcattaacagacccaacacaccaaagacgttgttagagaatacagcaataacaattggtcgtcttggttacgtttgtcctcaagaggtggcccccatgctacagcagtttataagaccctggtgcacctctctgagaaacataagagacaatgaggaaaaggattcagcattccgtggaatttgtaccatgatcagtgtgaatcccagtggcgtaatccaagattttatatttttttgtgatgccgttgcatcatggattaacccaaaagatgatctcagagacatgttctgtaagatccttcatggatttaaaaatcaagttggcgatgaaaattggaggcgtttctctgaccagtttcctcttcccttaaaagagcgtcttgcagctttttatggtgtttaatctaatacacttaagctgcagtcccaaaattaggggtccttcagtcttggagactataagggagcctctgcacccagggaaaatgttaccctttacaggggggaagggtaaaccagtagggaatacagtacaatcccaaccctactgggaggggcgggagggaggtgttgccgtcactgtattaagtcgatgttgggaaacgttttaacatctggagcctttgtgggtggaaatatgtctccagttacaactccgcagtggatgtgaagaagcaaaaaaaaaaaatctattcagtctactcacaaaacagtacattgtggaatattatggggaattgtaccaaaacaagaaccatataaatgatgcctagggacaagaaagaggaacaattctatagcgcacaataaaggaaacctaagaatgggagttacaaatagtaaagaagcttttttttttttttaatttaaagtttttttatgtaagttttcccacatgatggggccttgttttgcatgttgatgaagaactacacaaagaaaactaatatagttaaaagtcagcttgccttcccgtagtagaagcaggttcttggaagttacaatttaaggtaccccaaaaaagttggaaataaaacaaaacaaacataaacaatgaagcaccctgtgaaatgccaaatgagtcactccttttaccttttttggggtgggcagggagggaggaataaatggggttgggcatatcaaactaaagatgacatcttaattttgcattgaacattaatgtagcggatataatttgatgattatacttcattagatttaatttctaggccaagatgttactttttaaagtgcagtttaaggttcaggcatgcattctggctcatagtggttgaaagtaatttaaattagtgggaaagtagcatgcttgcatcacatagagtgagattggtattcatttacctatgttgcgccagtttgtgttgcagtttaccaattcaatatagccctgcatttaaagttcctttttaagatttgtggattttatttttattaagaacatagatatataaagtactgtagtttacaggtaggccttgaaatatcttttttaggatctgttaggaataagattgatattgtattgtgtgtaacctgcacaatgtggaaagctgatatacctgtgcaaaatctttgcctctgtgctgtcagtgtgatgtgctttctgcatggttatatactactagtgattttatcaaaacttctaaaatttaaattacgtggtaaaagatctgtaaaaggctgcataaatgttagttggcacataaagacaattgtagaagttgaaaaatgattgctatatttcaatgtttattcccactcaacatactgccttctaagcttccctttttttgttcaaagcatgatcttaaagatatgtttaagttaatggatgtaatgcagggttcctacactgtattttggcgcatgttggtggccctctgtgccctagatatatgcacacagggtgcaagttaaaagctacagagtgaaagttggtttggatcctcttcatttcatttgtttagcttttctgttatttttctctacttacatgtattcctgtgaataaatccttgttaagttaaccctttacttttccttccatgtgtattttcttatatactgtgaatgtgaaaacctaactggtacacttgatcttgtgttcatatgaaagtgcaagtctttattaatttggattgcctgaacagtgtatcccatgatgatgaaggaaaatggagagatttttctttttaactctgctggtcagagatgaagccacgcctttccatttttcaatgctgcatatttaatctgcaacaaaaatgttaagccataacagcctttttatattttagtttgtcacctttgcattgcagaataaatactgaataaccatttttataagcagttgctcctctttgcatggttctattctctaaaagtgttgaatgatacagccattgcactgaagtttgagctgtgtgcgtgtgaatttatactgtttcaaaaatttcaaatgcatggtagcatgtagaaaggtttttgttactatgtgtgtgtgtgtgttttgttttgttttgttctgttttttaacgttctttcacctttcctctactttggctttgcaaatttcagtctgtagagcctgaaattaaattattttatagtgcctgatatttttaatattataagttggattcaaagggtatacagcattttgttttctagtaccattgcttcactgggagctcaaaatttgcctccctgttagtctttaataactgagtagagtagcttttttattcttagattatagtgatattctgtagtgcttcaaatacttagaattctaatatgagagatagtttaatattctggaatagagagtattttaaattgaaatgaccaaattcgatttaaaacaaacacataacaatcttcagtaaagttatttgaacctgtggttgacaattctgtattgactaaaggcaatattgtcacctgtctcattaaaaattagtttccagttaggcagatgaataacactattaaaaatgcacccagttttgtagtcacttgactttttttttttatttaaatgaaatttaatttgaaaatagaaaataaaattaggtaaatatgactggcaacctgaatttgagttgggattctttgtgtatttttcccccttgaggttattgtttcttcctaatttatatttcagatacatagtgtagaacaggaatttgcagaagccatttaagttatcttttgaggtaagctctgatttagcatttattctgataaaatctaatacatcatgggatatatataaagcaacttaattcttgtggtgtagtcttaatagttttgaatgttgactgaatgtctataaaattgtgagtttgtctttgttacattccagtgtttctgcctcttggcatgcttaaagcacggcttacttcatctgctccttacacactaaaatgctgttagtgtgctcaactacagaaatagccgctgctaagtgatgtagattttctacttgaatatttttatgttgtaggaacctcaggaggtcagtgtttactgttttatatatgccttctttttcctgtttgagcttctctctttgaaggattctaacagaacaaagctgctgatcaacctaagttggaaacagaaagtgtaattaatataacttaaatgcatgtttggcagttccatgttacagtccattagcgagtgaacttagtgccacaggtattcatttattcaggaaagaattttgctttttgtattgtctaatctcttcaatgacttcatactgtgtaaaaaaaaatcactttttaatattttttggttggttatttcccaaataatcaacatgtaaataatcttttaagagccagttctgatgctttacattattgctacttgattttgttatgcaagttagatttcagaagaatagattttaaaacacttaaccaagccattacatcttaaaaacaaaacaagtagcatacattttgtaattaacattgataaacactgtgatttttttggttaagactttttcattgatctgaattgcttaaattgcatatattgtaaaataggatcagatgtatattttaaactaatttcaatggattttcctcttgaaatgctttgtctactcagttataaaatattcagatacaagttttatctcaggtgaatactcttgtattgtttttgctttggtgacatgcttataaagggtcatcctagttacattctttgttttttaagtgtatttcattgagaatctttccatttagtctgatttttttcctaatattctagcaggctggggtggtataaagccctcctgacaagccttttgcctacaggtttacctgaaaatgagctacatatggtcgtcattttcttcaaactctcaaaataggaaagtggaaatttttctcccctatataaaattattctgcctagcagaaatgccagaaataaattaattgcatcttagtctaaatttaagtcctttgccatgaggaaaaagtggttttttgcttcatatggtaaatctatattattcatattgaatgtattaacagataatggtgcaaaagcattcttcccagggaagagtgtatcatgcataactgcaatttaagtccttcctttgataatacttcaaaacatacacagctttgcttactgaattatttttgcaaataatacaaggaggggaaactaacttgctactagtgttgttaatgaagtataggccttggaacatttaagaaaactggtcttcagatagttaagggcttgggataatttaagtgaaaagtgagatcagtaatgagctgtgttgttaacaatattatctggtaataataccatgcaatatagcgttgtataccaacttagtgcattttatactgtattaaatatggagatacttctaatgcctctctaaaattaaattttacataaaagttagttttattcacctttaggctttccaagtgaattgtgactaattttttcaatcttacatagatctttcacccattagcattacttacgtagataattctttatgcctagttattatacatattaatttttaaggtatacatttaaattacacaattgttcattgtggtttgtatcccagaatgtgttgtgttttttaaaagatgcataatagctgaatgtatgcatgactttgaaagaagttaaaatggtgattttttttcacctcttgtacattttaaaaccaggccaaatctatttgccaagcagtgtatcactaataagaaaagcagtttttccttttattgcagtttttgtttatctgccatagaatttccttatactgtggcttggtattattcaagattagctatttcgctggtattacatctttttaaaagcctattataacatggttagcctataaggcagtgttggtccccttctaatattggcctcataaaggggttccactgtactttccgcatattactgtgttgttgttttcctttgtggatatataagcaaattgagcttgggtgatttttatggagacaataattagacaatactgtataattagttttacttaatagattatcatcttgtgagaagagatgtttaaacgtggtaaatcacttcatattacaaaacagttttacacttaatatgttaacattgggtgcaataatttagtagcattagctttagttacaaatataactggatctttctgctgacaacttaggttgtatgagttatgcttcttcaaacatatcctcctgcaacttctcaaactgtactaaattgatatttcttgaagtctaactctgtgctaacagatctccattttaaatagaatacggttttaatttttgataagctgctgaattttaaagagagttttttggggccaccaaatattttggatcatgcagagaatatatattgtactgtagtaattttgtatttacatttgtatgatgtgacataatagatgtgaatgttaatcactgcttgactatgttaataaagttgtttaactata

SEQ ID NO: 11120 - DNA, 4421 bp, Homo sapiens
  misc_feature (743)..(743): n is a, c, g, or t
  misc_feature (1167)..(1167): n is a, c, g, or t
  misc_feature (1206)..(1206): n is a, c, g, or t
agcatttcaggccccggacaggaggcagtgccgcttcggccgaaggccgagccgcccgagggctctgggatggtgtgggaccggcaaaccaagatggagtatgagtggaaacctgacgagcaagggcttcagcaaatcctgcagctgttgaaggagtcccagtccccagacaccaccatccagagaaccgtgcaacaaaaactggaacaacttaatcagtatccagactttaacaactacttgatttttgttcttacaaaattaaaatctgaagatgaacccacaagatcattgagtggtcttatcttgaagaataatgtgaaagcacactttcagaacttcccaaatggtgtaacagactttattaaaagtgaatgtttaaataatattggtgactcctctcctctgattagagccactgttggtattttgatcacaactatagcctccaagggagaattgcagaattggcctgacctcttaccaaaactctgtagcctgttggattctgaagattataatacctgtgagggagcatttggtgcccttcagaagatttgtgaagattctgctgagattttagacagtgatgttttagatcgtcctctcaacatcatgattcccaaatttttacagttcttcaagcatagtagtccaaaaataaggtctcacgctgttgcatgtgtcaatcagtttatcatcagtaggactcaagctctaatgttgcacattgattcttttantgagaatctctttgcattagctggtgatgaagaaccagaggtacggaaaaatgtgtgccgagcacttgtgatgttgctcgaagttcgaatggatcgcctgcttcctcacatgcataatatagttgagtacatgctacagaggactcaagatcaagatgaaaatgtggctttagaagcctgtgaattttggctaactttagctgaacagccaatatgcaaagatgtactcgtaaggcatcttcctaagttgattcctgtgttagtgaatggcatgaagtactcagacatagatattatcctacttaagggtgatgttgaagaagacgaaacgattcctgatagtgaacaggatatacggccacgttttcaccgatcgaggacggtggctcagcagcatgatgaagatggaattgaagaggaagangatgatgatgatgaaattgatgatgatgatacaatttcngactggaatctaagaaaatgttctgctgctgccctggatgttcttgcaaatgtgtatcgtgatgaactgctgccacatattttgccccttttgaaagaattactttttcatcatgaatgggttgttaaagaatcaggcattttggttttaggagcaattgctgaaggttgcatgcagggcatgattccatacttgcctgagcttattcctcaccttattcagtgcctctctgataaaaaggctcttgtgcgttccataacatgctggactcttagccgctatgcacactgggtggtcagccagccgccagacacgtacctgaagccattaatgacagaattgctaaagcgcatcctggacagcaacaagagagtacaagaagctgcctgcagtgcctttgctaccctagaagaggaggcttgtacagaacttgttccttaccttgcttatatacttgataccctggtctttgcatttagtaaataccagcataagaacctgctcattctttacgatgccataggaacattagcagattcagtaggacatcatttaaacaaaccagaatatattcagatgctaatgcctccactgatccagaaatggaacatgttaaaggatgaagataaagatctcttccctttacttgagtgcctatcttcagttgccacagcactgcagtctggattccttccgtactgtgaacctgtgtatcagcgttgtgtaaacctagtacagaagactcttgcacaagccatgctaaacaatgctcaaccagatcaatatgaagctccagataaagattttatgatagtggctcttgatttactgagtggcctggctgaaggacttggaggcaacattgaacagctggtagcccgaagtaacatcctgacactaatgtatcagtgcatgcaggataaaatgccagaagttcgacagagttcttttgccctgttaggtgacctcacaaaagcttgctttcagcatgttaagccttgtatagctgatttcatgccaatattgggaaccaacctaaatccagaattcatttcagtctgcaacaatgccacatgggcaattggagaaatctccattcaaatgggtatagagatgcagccttatattcctatggtgttgcaccagcttgtagaaatcattaacagacccaacacaccaaagacgttgttagagaatacagcaataacaattggtcgtcttggttacgtttgtcctcaagaggtggcccccatgctacagcagtttataagaccctggtgcacctctctgagaaacataagagacaatgaggaaaaggattcagcattccgtggaatttgtaccatgatcagtgtgaatcccagtggcgtaatccaagattttatatttttttgtgatgccgttgcatcatggattaacccaaaagatgatctcagagacatgttctgtaagatccttcatggatttaaaaatcaagttggcgatgaaaattggaggcgtttctctgaccagtttcctcttcccttaaaagagcgtcttgcagctttttatggtgtttaatctaatacacttaagctgcagtcccaaaattaggggtccttcagtcttggagactataagggagcctctgcacccagggaaaatgttaccctttacaggggggaagggtaaaccagtagggaatacagtacaatcccaaccctactgggaggggcgggagggaggtgttgccgtcactgtattaagtcgatgttgggaaacgttttaacatctggagcctttgtgggtggaaatatgtctccagttacaactccgcagtggatgtgaagaagcaaaaaaaaaaaatctattcagtctactcacaaaacagtacattgtggaatattatggggaattgtaccaaaacaagaaccatataaatgatgcctagggacaagaaagaggaacaattctatagcgcacaataaaggaaacctaagaatgggagttacaaatagtaaagaagcttttttttttttttaatttaaagtttttttatgtaagttttcccacatgatggggccttgttttgcatgttgatgaagaactacacaaagaaaactaatatagttaaaagtcagcttgccttcccgtagtagaagcaggttcttggaagttacaatttaaggtaccccaaaaaagttggaaataaaacaaaacaaacataaacaatgaagcaccctgtgaaatgccaaatgagtcactccttttaccttttttggggtgggcagggagggaggaataaatggggttgggcatatcaaactaaagatgacatcttaattttgcattgaacattaatgtagcggatataatttgatgattatacttcattagatttaatttctaggccaagatgttactttttaaagtgcagtttaaggttcaggcatgcattctggctcatagtggttgaaagtaatttaaattagtgggaaagtagcatgcttgcatcacatagagtgagattggtattcatttacctatgttgcgccagtttgtgttgcagtttaccaattcaatatagccctgcatttaaagttcctttttaagatttgtggattttatttttattaagaacatagatatataaagtactgtagtttacaggtaggccttgaaatatcttttttaggatctgttaggaataagattgatattgtattgtgtgtaacctgcacaatgtggaaagctgatatacctgtgcaaaatctttgcctctgtgctgtcagtgtgatgtgctttctgcatggttatatactactagtgattttatcaaaacttctaaaatttaaattacgtggtaaaagatctgtaaaaggctgcataaatgttagttggcacataaagacaattgtagaagttgaaaaatgattgctatatttcaatgtttattcccactcaacatactgccttctaagcttccctttttttgttcaaagcatgatcttaaagatatgtttaagttaatggatgtaatgcagggttcctacactgtattttggcgcatgttggtggccctctgtgccctagatatatgcacacagggtgcaagttaaaagctacagagtgaaagttggtttggatcctcttcatttcatttgtttagcttttctgttatttttctctacttacatgtattcctgtgaataaatccttgttaagttaacccttta

SEQ ID NO: 11121 - DNA, 6520 bp, Homo sapiens
aagcagcatggttataagtgactaacacgatattaggcaatttgtccaaatttctcattttctttataggtaaagatagcattcttatttgattaattttttgttccactggctttgaaagacaaacgattgttaaagataaaattgtttttgttctttttcttataggtccttcagtcttggagactataagggagcctctgcacccagggaaaatgttaccctttacaggggggaagggtaaaccagtagggaatacagtacaatcccaaccctactgggaggggcgggagggaggtgttgccgtcactgtattaagtcgatgttgggaaacgttttaacatctggagcctttgtgggtggaaatatgtctccagttacaactccgcagtggatgtgaagaagcaaaaaaaaaaaatctattcagtctactcacaaaacagtacattgtggaatattatggggaattgtaccaaaacaagaaccatataaatgatgcctagggacaagaaagaggaacaattctatagcgcacaataaaggaaacctaagaatgggagttacaaatagtaaagaagcttttttttttttttaatttaaagtttttttatgtaagttttcccacatgatggggccttgttttgcatgttgatgaagaactacacaaagaaaactaatatagttaaaagtcagcttgccttcccgtagtagaagcaggttcttggaagttacaatttaaggtaccccaaaaaagttggaaataaaacaaaacaaacataaacaatgaagcaccctgtgaaatgccaaatgagtcactccttttaccttttttggggtgggcagggagggaggaataaatggggttgggcatatcaaactaaagatgacatcttaattttgcattgaacattaatgtagcggatataatttgatgattatacttcattagatttaatttctaggccaagatgttactttttaaagtgcagtttaaggttcaggcatgcattctggctcatagtggttgaaagtaatttaaattagtgggaaagtagcatgcttgcatcacatagagtgagattggtattcatttacctatgttgcgccagtttgtgttgcagtttaccaattcaatatagccctgcatttaaagttcctttttaagatttgtggattttatttttattaagaacatagatatataaagtactgtagtttacaggtaggccttgaaatatcttttttaggatctgttaggaataagattgatattgtattgtgtgtaacctgcacaatgtggaaagctgatatacctgtgcaaaatctttgcctctgtgctgtcagtgtgatgtgctttctgcatggttatatactactagtgattttatcaaaacttctaaaatttaaattacgtggtaaaagatctgtaaaaggctgcataaatgttagttggcacataaagacaattgtagaagttgaaaaatgattgctatatttcaatgtttattcccactcaacatactgccttctaagcttccctttttttgttcaaagcatgatcttaaagatatgtttaagttaatggatgtaatgcagggttcctacactgtattttggcgcatgttggtggccctctgtgccctagatatatgcacacagggtgcaagttaaaagctacagagtgaaagttggtttggatcctcttcatttcatttgtttagcttttctgttatttttctctacttacatgtattcctgtgaataaatccttgttaagttaaccctttacttttccttccatgtgtattttcttatatactgtgaatgtgaaaacctaactggtacacttgatcttgtgttcatatgaaagtgcaagtctttattaatttggattgcctgaacagtgtatcccatgatgatgaaggaaaatggagagatttttctttttaactctgctggtcagagatgaagccacgcctttccatttttcaatgctgcatatttaatctgcaacaaaaatgttaagccataacagcctttttatattttagtttgtcacctttgcattgcagaataaatactgaataaccatttttataagcagttgctcctctttgcatggttctattctctaaaagtgttgaatgatacagccattgcactgaagtttgagctgtgtgcgtgtgaatttatactgtttcaaaaatttcaaatgcatggtagcatgtagaaaggtttttgttactatgtgtgtgtgtgtgttttgttttgttttgttctgttttttaacgttctttcacctttcctctactttggctttgcaaatttcagtctgtagagcctgaaattaaattattttatagtgcctgatatttttaatattataagttggattcaaagggtatacagcattttgttttctagtaccattgcttcactgggagctcaaaatttgcctccctgttagtctttaataactgagtagagtagcttttttattcttagattatagtgatattctgtagtgcttcaaatacttagaattctaatatgagagatagtttaatattctggaatagagagtattttaaattgaaatgaccaaattcgatttaaaacaaacacataacaatcttcagtaaagttatttgaacctgtggttgacaattctgtattgactaaaggcaatattgtcacctgtctcattaaaaattagtttccagttaggcagatgaataacactattaaaaatgcacccagttttgtagtcacttgactttttttttttatttaaatgaaatttaatttgaaaatagaaaataaaattaggtaaatatgactggcaacctgaatttgagttgggattctttgtgtatttttcccccttgaggttattgtttcttcctaatttatatttcagatacatagtgtagaacaggaatttgcagaagccatttaagttatcttttgaggtaagctctgatttagcatttattctgataaaatctaatacatcatgggatatatataaagcaacttaattcttgtggtgtagtcttaatagttttgaatgttgactgaatgtctataaaattgtgagtttgtctttgttacattccagtgtttctgcctcttggcatgcttaaagcacggcttacttcatctgctccttacacactaaaatgctgttagtgtgctcaactacagaaatagccgctgctaagtgatgtagattttctacttgaatatttttatgttgtaggaacctcaggaggtcagtgtttactgttttatatatgccttctttttcctgtttgagcttctctctttgaaggattctaacagaacaaagctgctgatcaacctaagttggaaacagaaagtgtaattaatataacttaaatgcatgtttggcagttccatgttacagtccattagcgagtgaacttagtgccacaggtattcatttattcaggaaagaattttgctttttgtattgtctaatctcttcaatgacttcatactgtgtaaaaaaaaatcactttttaatattttttggttggttatttcccaaataatcaacatgtaaataatcttttaagagccagttctgatgctttacattattgctacttgattttgttatgcaagttagatttcagaagaatagattttaaaacacttaaccaagccattacatcttaaaaacaaaacaagtagcatacattttgtaattaacattgataaacactgtgatttttttggttaagactttttcattgatctgaattgcttaaattgcatatattgtaaaataggatcagatgtatattttaaactaatttcaatggattttcctcttgaaatgctttgtctactcagttataaaatattcagatacaagttttatctcaggtgaatactcttgtattgtttttgctttggtgacatgcttataaagggtcatcctagttacattctttgttttttaagtgtatttcattgagaatctttccatttagtctgatttttttcctaatattctagcaggctggggtggtataaagccctcctgacaagccttttgcctacaggtttacctgaaaatgagctacatatggtcgtcattttcttcaaactctcaaaataggaaagtggaaatttttctcccctatataaaattattctgcctagcagaaatgccagaaataaattaattgcatcttagtctaaatttaagtcctttgccatgaggaaaaagtggttttttgcttcatatggtaaatctatattattcatattgaatgtattaacagataatggtgcaaaagcattcttcccagggaagagtgtatcatgcataactgcaatttaagtccttcctttgataatacttcaaaacatacacagctttgcttactgaattatttttgcaaataatacaaggaggggaaactaacttgctactagtgttgttaatgaagtataggccttggaacatttaagaaaactggtcttcagatagttaagggcttgggataatttaagtgaaaagtgagatcagtaatgagctgtgttgttaacaatattatctggtaataataccatgcaatatagcgttgtataccaacttagtgcattttatactgtattaaatatggagatacttctaatgcctctctaaaattaaattttacataaaagttagttttattcacctttaggctttccaagtgaattgtgactaattttttcaatcttacatagatctttcacccattagcattacttacgtagataattctttatgcctagttattatacatattaatttttaaggtatacatttaaattacacaattgttcattgtggtttgtatcccagaatgtgttgtgttttttaaaagatgcataatagctgaatgtatgcatgactttgaaagaagttaaaatggtgattttttttcacctcttgtacattttaaaaccaggccaaatctatttgccaagcagtgtatcactaataagaaaagcagtttttccttttattgcagtttttgtttatctgccatagaatttccttatactgtggcttggtattattcaagattagctatttcgctggtattacatctttttaaaagcctattataacatggttagcctataaggcagtgttggtccccttctaatattggcctcataaaggggttccactgtactttccgcatattactgtgttgttgttttcctttgtggatatataagcaaattgagcttgggtgatttttatggagacaataattagacaatactgtataattagttttacttaatagattatcatcttgtgagaagagatgtttaaacgtggtaaatcacttcatattacaaaacagttttacacttaatatgttaacattgggtgcaataatttagtagcattagctttagttacaaatataactggatctttctgctgacaacttaggttgtatgagttatgcttaaaagctttaaatctgatgtttcctgtacctgccacactatgttagaatgtgtccttcaaacatatcctcctgcaacttctcaaactgtactaaattgatatttcttgaagtctaactctgtgctaacagatctccattttaaatagaatacggttttaatttttgataagctgctgaattttaaagagagttttttggggccaccaaatattttggatcatgcagagaatatatattgtactgtagtaattttgtatttacatttgtatgatgtgacataatagatgtgaatgttaatcactgcttgactatgttaataaagttgtttaactataaaaaaaaaaaaaaacccacgcgtccttcagatcaatccatctatgcaaatttatggggaaaaattgttttttaaattaaatttccaatacccaagccctaaaattgatggatgtgaccccaggtgttccccttacctcttggccccccaaaacagggacagacatagatggtgggctggaacacccctcacctcctgtattcccagaaagcctcgcgttgaggtgtgttggccagctccctagtttgtgcttactatacctggccacgcctccctacctaaggccgctggcttaaccctaggggcaggcagtgttagatcagacccagaccttctcatcccaccctcatcacatcggggagaggggactccaggggcgggaaggcaggcgtccctccatttggccagggtgggcggcgaggagggggtcactctgcaggaacactgagctctgaacacctctcgcctgctgcctgcctcacaccctctgcattcgctgtttcctctgttgggggagggggtttgtgaggggaatattagattacaccttgtcatttggaaagccccgtgtctccggcggccacagcgaggttgggggggtggtgagggaagtccatggattggccagaactgggggaaaaacaaaaagaaatgagagaaagagagagcgggtacc

SEQ ID NO: 11122 - DNA, 2034 bp, Homo sapiens
gatcccccgggctgcaggagaaaactggtcttcagatagttaagggcttgggataatttaagtgaaaagtgagatcagtaatgagctgtgttgttaacaatattatctggtaataataccatgcaatatagcgttgtataccaacttagtgcattttatactgtattaaatatggagatacttctaatgcctctctaaaattaaattttacataaaagttagttttattcacctttaggctttccaagtgaattgtgactaattttttcaatcttacatagatctttcacccattagcattacttacgtagataattctttatgcctagttattatacatattaatttttaaggtatacatttaaattacacaattgttcattgtggtttgtatcccagaatgtgttgtgttttttaaaagatgcataatagctgaatgtatgcatgactttgaaagaagttaaaatggtgattttttttcacctcttgtacattttaaaaccaggccaaatctatttgccaagcagtgtatcactaataagaaaagcagtttttccttttattgcagtttttgtttatctgccatagaatttccttatactgtggcttggtattattcaagattagctatttcgctggtattacatctttttaaaagcctattataacatggttagcctataaggcagtgttggtccccttctaatattggcctcataaaggggttccactgtactttccgcatattactgtgttgttgttttcctttgtggatatataagcaaattgagcttgggtgatttttatggagacaataattagacaatactgtataattagttttacttaatagattatcatcttgtgagaagagatgtttaaacgtggtaaatcacttcatattacaaaacagttttacacttaatatgttaacattgggtgcaataatttagtagcattagctttagttacaaatataactggatctttctgctgacaacttaggttgtatgagttatgcttaaaagctttaaatctgatgtttcctgtacctgccacactatgttagaatgtgtccttcaaacatatcctcctgcaacttctcaaactgtactaaattgatatttcttgaagtctaactctgtgctaacagatctccattttaaatagaatacggttttaatttttgataagctgctgaattttaaagagagttttttggggccaccaaatattttggatcatgcagagaatatatattgtactgtagtaattttgtatttacatttgtatgatgtgacataatagatgtgaatgttaatcactgcttgactatgttaataaagttgtttaactataaaaaaaaaaaaaaacccacgcgtccttcagatcaatccatctatgcaaatttatggggaaaaattgttttttaaattaaatttccaatacccaagccctaaaattgatggatgtgaccccaggtgttccccttacctcttggccccccaaaacagggacagacatagatggtgggctggaacacccctcacctcctgtattcccagaaagcctcgcgttgaggtgtgttggccagctccctagtttgtgcttactatacctggccacgcctccctacctaaggccgctggcttaaccctaggggcaggcagtgttagatcagacccagaccttctcatcccaccctcatcacatcggggagaggggactccaggggcgggaaggcaggcgtccctccatttggccagggtgggcggcgaggagggggtcactctgcaggaacactgagctctgaacacctctcgcctgctgcctgcctcacaccctctgcattcgctgtttcctctgttgggggagggggtttgtgaggggaatattagattacaccttgtcatttggaaagccccgtgtctccggcggccacagcgaggttgggggggtggtgagggaagtccatggattggccagaactgggggaaaaacaaaaagaaatgagagaaagagagagcgggtacc

SEQ ID NO: 11123 - DNA, 3590 bp, Homo sapiens
  misc_feature (743)..(743): n is a, c, g, or t
  misc_feature (1167)..(1167): n is a, c, g, or t
  misc_feature (1206)..(1206): n is a, c, g, or t
agcatttcaggccccggacaggaggcagtgccgcttcggccgaaggccgagccgcccgagggctctgggatggtgtgggaccggcaaaccaagatggagtatgagtggaaacctgacgagcaagggcttcagcaaatcctgcagctgttgaaggagtcccagtccccagacaccaccatccagagaaccgtgcaacaaaaactggaacaacttaatcagtatccagactttaacaactacttgatttttgttcttacaaaattaaaatctgaagatgaacccacaagatcattgagtggtcttatcttgaagaataatgtgaaagcacactttcagaacttcccaaatggtgtaacagactttattaaaagtgaatgtttaaataatattggtgactcctctcctctgattagagccactgttggtattttgatcacaactatagcctccaagggagaattgcagaattggcctgacctcttaccaaaactctgtagcctgttggattctgaagattataatacctgtgagggagcatttggtgcccttcagaagatttgtgaagattctgctgagattttagacagtgatgttttagatcgtcctctcaacatcatgattcccaaatttttacagttcttcaagcatagtagtccaaaaataaggtctcacgctgttgcatgtgtcaatcagtttatcatcagtaggactcaagctctaatgttgcacattgattcttttantgagaatctctttgcattagctggtgatgaagaaccagaggtacggaaaaatgtgtgccgagcacttgtgatgttgctcgaagttcgaatggatcgcctgcttcctcacatgcataatatagttgagtacatgctacagaggactcaagatcaagatgaaaatgtggctttagaagcctgtgaattttggctaactttagctgaacagccaatatgcaaagatgtactcgtaaggcatcttcctaagttgattcctgtgttagtgaatggcatgaagtactcagacatagatattatcctacttaagggtgatgttgaagaagacgaaacgattcctgatagtgaacaggatatacggccacgttttcaccgatcgaggacggtggctcagcagcatgatgaagatggaattgaagaggaagangatgatgatgatgaaattgatgatgatgatacaatttcngactggaatctaagaaaatgttctgctgctgccctggatgttcttgcaaatgtgtatcgtgatgaactgctgccacatattttgccccttttgaaagaattactttttcatcatgaatgggttgttaaagaatcaggcattttggttttaggagcaattgctgaaggttgcatgcagggcatgattccatacttgcctgagcttattcctcaccttattcagtgcctctctgataaaaaggctcttgtgcgttccataacatgctggactcttagccgctatgcacactgggtggtcagccagccgccagacacgtacctgaagccattaatgacagaattgctaaagcgcatcctggacagcaacaagagagtacaagaagctgcctgcagtgcctttgctaccctagaagaggaggcttgtacagaacttgttccttaccttgcttatatacttgataccctggtctttgcatttagtaaataccagcataagaacctgctcattctttacgatgccataggaacattagcagattcagtaggacatcatttaaacaaaccagaatatattcagatgctaatgcctccactgatccagaaatggaacatgttaaaggatgaagataaagatctcttccctttacttgagtgcctatcttcagttgccacagcactgcagtctggattccttccgtactgtgaacctgtgtatcagcgttgtgtaaacctagtacagaagactcttgcacaagccatgctaaacaatgctcaaccagatcaatatgaagctccagataaagattttatgatagtggctcttgatttactgagtggcctggctgaaggacttggaggcaacattgaacagctggtagcccgaagtaacatcctgacactaatgtatcagtgcatgcaggataaaatgccagaagttcgacagagttcttttgccctgttaggtgacctcacaaaagcttgctttcagcatgttaagccttgtatagctgatttcatgccaatattgggaaccaacctaaatccagaattcatttcagtctgcaacaatgccacatgggcaattggagaaatctccattcaaatgggtatagagatgcagccttatattcctatggtgttgcaccagcttgtagaaatcattaacagacccaacacaccaaagacgttgttagagaatacagcaataacaattggtcgtcttggttacgtttgtcctcaagaggtggcccccatgctacagcagtttataagaccctggtgcacctctctgagaaacataagagacaatgaggaaaaggattcagcattccgtggaatttgtaccatgatcagtgtgaatcccagtggcgtaatccaagattttatatttttttgtgatgccgttgcatcatggattaacccaaaagatgatctcagagacatgttctgtaagatccttcatggatttaaaaatcaagttggcgatgaaaattggaggcgtttctctgaccagtttcctcttcccttaaaagagcgtcttgcagctttttatggtgtttaatctaatacacttaagctgcagtcccaaaattaggggtaagttataagaagtttggaaattttcaggatgaagaaaattttgttagggctgtcatttcaaactactaaatagaataaaaagctatttgttttctatagaggttgaataaaacatagcctcatatcattctatcttgggctttaaatttaaaattacttaagtgggccaggtgtggtggctcatgtctgtaatcccagcacttggggaggccaaggtgggctggtctcgaactcctgaccttgtgatgcacccacctcggcctcccaaagtgctgggatttacaggcgtaagccactgagcccagtgcctaggactatattttaaaataagcaatgaaagattctgttttaatttgggatggactatattcatttggactcttgctccttgagctcttctgtacttaaatgggactagcagttctcatctctgagcttcggttttgtcattgagttatgttgaggattaaatactatactgtatgtgatgccagaacttagtatgttgcctggcacactaagttgactcagtaaaggttaggaactgggccagtacaataaatatcagggttttgacattcatctttagattttcaacatgaattaagacatatctgactggaagccagaagatgtgctgaatgagcatgtacagaagatgtccaccaagttgaattacactttagattgaattggaggagtttttttggcttgcttgcttgcttgtttactccaagctaaaatttaaatctggaaagatttcaccatccaagctgtctaacctag

SEQ ID NO: 11124 - DNA, 9124 bp, Homo sapiens
  misc_feature (714)..(714): n is a, c, g, or t
  misc_feature (1138)..(1138): n is a, c, g, or t
  misc_feature (1177)..(1177): n is a, c, g, or t
ccaggagcagttccgccgggtttcactgtccgtgacttccttcggggcacctcagcaaaccaagatggagtatgagtggaaacctgacgagcaagggcttcagcaaatcctgcagctgttgaaggagtcccagtccccagacaccaccatccagagaaccgtgcaacaaaaactggaacaacttaatcagtatccagactttaacaactacttgatttttgttcttacaaaattaaaatctgaagatgaacccacaagatcattgagtggtcttatcttgaagaataatgtgaaagcacactttcagaacttcccaaatggtgtaacagactttattaaaagtgaatgtttaaataatattggtgactcctctcctctgattagagccactgttggtattttgatcacaactatagcctccaagggagaattgcagaattggcctgacctcttaccaaaactctgtagcctgttggattctgaagattataatacctgtgagggagcatttggtgcccttcagaagatttgtgaagattctgctgagattttagacagtgatgttttagatcgtcctctcaacatcatgattcccaaatttttacagttcttcaagcatagtagtccaaaaataaggtctcacgctgttgcatgtgtcaatcagtttatcatcagtaggactcaagctctaatgttgcacattgattcttttantgagaatctctttgcattagctggtgatgaagaaccagaggtacggaaaaatgtgtgccgagcacttgtgatgttgctcgaagttcgaatggatcgcctgcttcctcacatgcataatatagttgagtacatgctacagaggactcaagatcaagatgaaaatgtggctttagaagcctgtgaattttggctaactttagctgaacagccaatatgcaaagatgtactcgtaaggcatcttcctaagttgattcctgtgttagtgaatggcatgaagtactcagacatagatattatcctacttaagggtgatgttgaagaagacgaaacgattcctgatagtgaacaggatatacggccacgttttcaccgatcgaggacggtggctcagcagcatgatgaagatggaattgaagaggaagangatgatgatgatgaaattgatgatgatgatacaatttcngactggaatctaagaaaatgttctgctgctgccctggatgttcttgcaaatgtgtatcgtgatgaactgctgccacatattttgccccttttgaaagaattactttttcatcatgaatgggttgttaaagaatcaggcattttggttttaggagcaattgctgaaggttgcatgcagggcatgattccatacttgcctgagcttattcctcaccttattcagtgcctctctgataaaaaggctcttgtgcgttccataacatgctggactcttagccgctatgcacactgggtggtcagccagccgccagacacgtacctgaagccattaatgacagaattgctaaagcgcatcctggacagcaacaagagagtacaagaagctgcctgcagtgcctttgctaccctagaagaggaggcttgtacagaacttgttccttaccttgcttatatacttgataccctggtctttgcatttagtaaataccagcataagaacctgctcattctttacgatgccataggaacattagcagattcagtaggacatcatttaaacaaaccagaatatattcagatgctaatgcctccactgatccagaaatggaacatgttaaaggatgaagataaagatctcttccctttacttgagtgcctatcttcagttgccacagcactgcagtctggattccttccgtactgtgaacctgtgtatcagcgttgtgtaaacctagtacagaagactcttgcacaagccatgctaaacaatgctcaaccagatcaatatgaagctccagataaagattttatgatagtggctcttgatttactgagtggcctggctgaaggacttggaggcaacattgaacagctggtagcccgaagtaacatcctgacactaatgtatcagtgcatgcaggataaaatgccagaagttcgacagagttcttttgccctgttaggtgacctcacaaaagcttgctttcagcatgttaagccttgtatagctgatttcatgccaatattgggaaccaacctaaatccagaattcatttcagtctgcaacaatgccacatgggcaattggagaaatctccattcaaatgggtatagagatgcagccttatattcctatggtgttgcaccagcttgtagaaatcattaacagacccaacacaccaaagacgttgttagagaatacagcaataacaattggtcgtcttggttacgtttgtcctcaagaggtggcccccatgctacagcagtttataagaccctggtgcacctctctgagaaacataagagacaatgaggaaaaggattcagcattccgtggaatttgtaccatgatcagtgtgaatcccagtggcgtaatccaagattttatatttttttgtgatgccgttgcatcatggattaacccaaaagatgatctcagagacatgttctgtaagatccttcatggatttaaaaatcaagttggcgatgaaaattggaggcgtttctctgaccagtttcctcttcccttaaaagagcgtcttgcagctttttatggtgtttaatctaatacacttaagctgcagtcccaaaattaggggtccttcagtcttggagactataagggagcctctgcacccagggaaaatgttaccctttacaggggggaagggtaaaccagtagggaatacagtacaatcccaaccctactgggaggggcgggagggaggtgttgccgtcactgtattaagtcgatgttgggaaacgttttaacatctggagcctttgtgggtggaaatatgtctccagttacaactccgcagtggatgtgaagaagcaaaaaaaaaaaatctattcagtctactcacaaaacagtacattgtggaatattatggggaattgtaccaaaacaagaaccatataaatgatgcctagggacaagaaagaggaacaattctatagcgcacaataaaggaaacctaagaatgggagttacaaatagtaaagaagcttttttttttttttaatttaaagtttttttatgtaagttttcccacatgatggggccttgttttgcatgttgatgaagaactacacaaagaaaactaatatagttaaaagtcagcttgccttcccgtagtagaagcaggttcttggaagttacaatttaaggtaccccaaaaaagttggaaataaaacaaaacaaacataaacaatgaagcaccctgtgaaatgccaaatgagtcactccttttaccttttttggggtgggcagggagggaggaataaatggggttgggcatatcaaactaaagatgacatcttaattttgcattgaacattaatgtagcggatataatttgatgattatacttcattagatttaatttctaggccaagatgttactttttaaagtgcagtttaaggttcaggcatgcattctggctcatagtggttgaaagtaatttaaattagtgggaaagtagcatgcttgcatcacatagagtgagattggtattcatttacctatgttgcgccagtttgtgttgcagtttaccaattcaatatagccctgcatttaaagttcctttttaagatttgtggattttatttttattaagaacatagatatataaagtactgtagtttacaggtaggccttgaaatatcttttttaggatctgttaggaataagattgatattgtattgtgtgtaacctgcacaatgtggaaagctgatatacctgtgcaaaatctttgcctctgtgctgtcagtgtgatgtgctttctgcatggttatatactactagtgattttatcaaaacttctaaaatttaaattacgtggtaaaagatctgtaaaaggctgcataaatgttagttggcacataaagacaattgtagaagttgaaaaatgattgctatatttcaatgtttattcccactcaacatactgccttctaagcttccctttttttgttcaaagcatgatcttaaagatatgtttaagttaatggatgtaatgcagggttcctacactgtattttggcgcatgttggtggccctctgtgccctagatatatgcacacagggtgcaagttaaaagctacagagtgaaagttggtttggatcctcttcatttcatttgtttagcttttctgttatttttctctacttacatgtattcctgtgaataaatccttgttaagttaaccctttacttttccttccatgtgtattttcttatatactgtgaatgtgaaaacctaactggtacacttgatcttgtgttcatatgaaagtgcaagtctttattaatttggattgcctgaacagtgtatcccatgatgatgaaggaaaatggagagatttttctttttaactctgctggtcagagatgaagccacgcctttccatttttcaatgctgcatatttaatctgcaacaaaaatgttaagccataacagcctttttatattttagtttgtcacctttgcattgcagaataaatactgaataaccatttttataagcagttgctcctctttgcatggttctattctctaaaagtgttgaatgatacagccattgcactgaagtttgagctgtgtgcgtgtgaatttatactgtttcaaaaatttcaaatgcatggtagcatgtagaaaggtttttgttactatgtgtgtgtgtgtgttttgttttgttttgttctgttttttaacgttctttcacctttcctctactttggctttgcaaatttcagtctgtagagcctgaaattaaattattttatagtgcctgatatttttaatattataagttggattcaaagggtatacagcattttgttttctagtaccattgcttcactgggagctcaaaatttgcctccctgttagtctttaataactgagtagagtagcttttttattcttagattatagtgatattctgtagtgcttcaaatacttagaattctaatatgagagatagtttaatattctggaatagagagtattttaaattgaaatgaccaaattcgatttaaaacaaacacataacaatcttcagtaaagttatttgaacctgtggttgacaattctgtattgactaaaggcaatattgtcacctgtctcattaaaaattagtttccagttaggcagatgaataacactattaaaaatgcacccagttttgtagtcacttgactttttttttttatttaaatgaaatttaatttgaaaatagaaaataaaattaggtaaatatgactggcaacctgaatttgagttgggattctttgtgtatttttcccccttgaggttattgtttcttcctaatttatatttcagatacatagtgtagaacaggaatttgcagaagccatttaagttatcttttgaggtaagctctgatttagcatttattctgataaaatctaatacatcatgggatatatataaagcaacttaattcttgtggtgtagtcttaatagttttgaatgttgactgaatgtctataaaattgtgagtttgtctttgttacattccagtgtttctgcctcttggcatgcttaaagcacggcttacttcatctgctccttacacactaaaatgctgttagtgtgctcaactacagaaatagccgctgctaagtgatgtagattttctacttgaatatttttatgttgtaggaacctcaggaggtcagtgtttactgttttatatatgccttctttttcctgtttgagcttctctctttgaaggattctaacagaacaaagctgctgatcaacctaagttggaaacagaaagtgtaattaatataacttaaatgcatgtttggcagttccatgttacagtccattagcgagtgaacttagtgccacaggtattcatttattcaggaaagaattttgctttttgtattgtctaatctcttcaatgacttcatactgtgtaaaaaaaaatcactttttaatattttttggttggttatttcccaaataatcaacatgtaaataatcttttaagagccagttctgatgctttacattattgctacttgattttgttatgcaagttagatttcagaagaatagattttaaaacacttaaccaagccattacatcttaaaaacaaaacaagtagcatacattttgtaattaacattgataaacactgtgatttttttggttaagactttttcattgatctgaattgcttaaattgcatatattgtaaaataggatcagatgtatattttaaactaatttcaatggattttcctcttgaaatgctttgtctactcagttataaaatattcagatacaagttttatctcaggtgaatactcttgtattgtttttgctttggtgacatgcttataaagggtcatcctagttacattctttgttttttaagtgtatttcattgagaatctttccatttagtctgatttttttcctaatattctagcaggctggggtggtataaagccctcctgacaagccttttgcctacaggtttacctgaaaatgagctacatatggtcgtcattttcttcaaactctcaaaataggaaagtggaaatttttctcccctatataaaattattctgcctagcagaaatgccagaaataaattaattgcatcttagtctaaatttaagtcctttgccatgaggaaaaagtggttttttgcttcatatggtaaatctatattattcatattgaatgtattaacagataatggtgcaaaagcattcttcccagggaagagtgtatcatgcataactgcaatttaagtccttcctttgataatacttcaaaacatacacagctttgcttactgaattatttttgcaaataatacaaggaggggaaactaacttgctactagtgttgttaatgaagtataggccttggaacatttaagaaaactggtcttcagatagttaagggcttgggataatttaagtgaaaagtgagatcagtaatgagctgtgttgttaacaatattatctggtaataataccatgcaatatagcgttgtataccaacttagtgcattttatactgtattaaatatggagatacttctaatgcctctctaaaattaaattttacataaaagttagttttattcacctttaggctttccaagtgaattgtgactaattttttcaatcttacatagatctttcacccattagcattacttacgtagataattctttatgcctagttattatacatattaatttttaaggtatacatttaaattacacaattgttcattgtggtttgtatcccagaatgtgttgtgttttttaaaagatgcataatagctgaatgtatgcatgactttgaaagaagttaaaatggtgattttttttcacctcttgtacattttaaaaccaggccaaatctatttgccaagcagtgtatcactaataagaaaagcagtttttccttttattgcagtttttgtttatctgccatagaatttccttatactgtggcttggtattattcaagattagctatttcgctggtattacatctttttaaaagcctattataacatggttagcctataaggcagtgttggtccccttctaatattggcctcataaaggggttccactgtactttccgcatattactgtgttgttgttttcctttgtggatatataagcaaattgagcttgggtgatttttatggagacaataattagacaatactgtataattagttttacttaatagattatcatcttgtgagaagagatgtttaaacgtggtaaatcacttcatattacaaaacagttttacacttaatatgttaacattgggtgcaataatttagtagcattagctttagttacaaatataactggatctttctgctgacaacttaggttgtatgagttatgcttaaaagctttaaatctgatgtttcctgtacctgccacactatgttagaatgtgtccttcaaacatatcctcctgcaacttctcaaactgtactaaattgatatttcttgaagtctaactctgtgctaacagatctccattttaaatagaatacggttttaatttttgataagctgctgaattttaaagagagttttttggggccaccaaatattttggatcatgcagagaatatatattgtactgtagtaattttgtatttacatttgtatgatgtgacataatagatgtgaatgttaatcactgcttgactatgttaataaagttgtttaactataaaaaaaaaaaaaaacccacgcgtccttcagatcaatccatctatgcaaatttatggggaaaaattgttttttaaattaaatttccaatacccaagccctaaaattgatggatgtgaccccaggtgttccccttacctcttggccccccaaaacagggacagacatagatggtgggctggaacacccctcacctcctgtattcccagaaagcctcgcgttgaggtgtgttggccagctccctagtttgtgcttactatacctggccacgcctccctacctaaggccgctggcttaaccctaggggcaggcagtgttagatcagacccagaccttctcatcccaccctcatcacatcggggagaggggactccaggggcgggaaggcaggcgtccctccatttggccagggtgggcggcgaggagggggtcactctgcaggaacactgagctctgaacacctctcgcctgctgcctgcctcacaccctctgcattcgctgtttcctctgttgggggagggggtttgtgaggggaatattagattacaccttgtcatttggaaagccccgtgtctccggcggccacagcgaggttgggggggtggtgagggaagtccatggattggccagaactgggggaaaaacaaaaagaaatgagagaaagagagagcgggtacc

SEQ ID NO: 11125 - DNA, 9153 bp, Homo sapiens
  misc_feature (743)..(743): n is a, c, g, or t
  misc_feature (1167)..(1167): n is a, c, g, or t
  misc_feature (1206)..(1206): n is a, c, g, or t
agcatttcaggccccggacaggaggcagtgccgcttcggccgaaggccgagccgcccgagggctctgggatggtgtgggaccggcaaaccaagatggagtatgagtggaaacctgacgagcaagggcttcagcaaatcctgcagctgttgaaggagtcccagtccccagacaccaccatccagagaaccgtgcaacaaaaactggaacaacttaatcagtatccagactttaacaactacttgatttttgttcttacaaaattaaaatctgaagatgaacccacaagatcattgagtggtcttatcttgaagaataatgtgaaagcacactttcagaacttcccaaatggtgtaacagactttattaaaagtgaatgtttaaataatattggtgactcctctcctctgattagagccactgttggtattttgatcacaactatagcctccaagggagaattgcagaattggcctgacctcttaccaaaactctgtagcctgttggattctgaagattataatacctgtgagggagcatttggtgcccttcagaagatttgtgaagattctgctgagattttagacagtgatgttttagatcgtcctctcaacatcatgattcccaaatttttacagttcttcaagcatagtagtccaaaaataaggtctcacgctgttgcatgtgtcaatcagtttatcatcagtaggactcaagctctaatgttgcacattgattcttttantgagaatctctttgcattagctggtgatgaagaaccagaggtacggaaaaatgtgtgccgagcacttgtgatgttgctcgaagttcgaatggatcgcctgcttcctcacatgcataatatagttgagtacatgctacagaggactcaagatcaagatgaaaatgtggctttagaagcctgtgaattttggctaactttagctgaacagccaatatgcaaagatgtactcgtaaggcatcttcctaagttgattcctgtgttagtgaatggcatgaagtactcagacatagatattatcctacttaagggtgatgttgaagaagacgaaacgattcctgatagtgaacaggatatacggccacgttttcaccgatcgaggacggtggctcagcagcatgatgaagatggaattgaagaggaagangatgatgatgatgaaattgatgatgatgatacaatttcngactggaatctaagaaaatgttctgctgctgccctggatgttcttgcaaatgtgtatcgtgatgaactgctgccacatattttgccccttttgaaagaattactttttcatcatgaatgggttgttaaagaatcaggcattttggttttaggagcaattgctgaaggttgcatgcagggcatgattccatacttgcctgagcttattcctcaccttattcagtgcctctctgataaaaaggctcttgtgcgttccataacatgctggactcttagccgctatgcacactgggtggtcagccagccgccagacacgtacctgaagccattaatgacagaattgctaaagcgcatcctggacagcaacaagagagtacaagaagctgcctgcagtgcctttgctaccctagaagaggaggcttgtacagaacttgttccttaccttgcttatatacttgataccctggtctttgcatttagtaaataccagcataagaacctgctcattctttacgatgccataggaacattagcagattcagtaggacatcatttaaacaaaccagaatatattcagatgctaatgcctccactgatccagaaatggaacatgttaaaggatgaagataaagatctcttccctttacttgagtgcctatcttcagttgccacagcactgcagtctggattccttccgtactgtgaacctgtgtatcagcgttgtgtaaacctagtacagaagactcttgcacaagccatgctaaacaatgctcaaccagatcaatatgaagctccagataaagattttatgatagtggctcttgatttactgagtggcctggctgaaggacttggaggcaacattgaacagctggtagcccgaagtaacatcctgacactaatgtatcagtgcatgcaggataaaatgccagaagttcgacagagttcttttgccctgttaggtgacctcacaaaagcttgctttcagcatgttaagccttgtatagctgatttcatgccaatattgggaaccaacctaaatccagaattcatttcagtctgcaacaatgccacatgggcaattggagaaatctccattcaaatgggtatagagatgcagccttatattcctatggtgttgcaccagcttgtagaaatcattaacagacccaacacaccaaagacgttgttagagaatacagcaataacaattggtcgtcttggttacgtttgtcctcaagaggtggcccccatgctacagcagtttataagaccctggtgcacctctctgagaaacataagagacaatgaggaaaaggattcagcattccgtggaatttgtaccatgatcagtgtgaatcccagtggcgtaatccaagattttatatttttttgtgatgccgttgcatcatggattaacccaaaagatgatctcagagacatgttctgtaagatccttcatggatttaaaaatcaagttggcgatgaaaattggaggcgtttctctgaccagtttcctcttcccttaaaagagcgtcttgcagctttttatggtgtttaatctaatacacttaagctgcagtcccaaaattaggggtccttcagtcttggagactataagggagcctctgcacccagggaaaatgttaccctttacaggggggaagggtaaaccagtagggaatacagtacaatcccaaccctactgggaggggcgggagggaggtgttgccgtcactgtattaagtcgatgttgggaaacgttttaacatctggagcctttgtgggtggaaatatgtctccagttacaactccgcagtggatgtgaagaagcaaaaaaaaaaaatctattcagtctactcacaaaacagtacattgtggaatattatggggaattgtaccaaaacaagaaccatataaatgatgcctagggacaagaaagaggaacaattctatagcgcacaataaaggaaacctaagaatgggagttacaaatagtaaagaagcttttttttttttttaatttaaagtttttttatgtaagttttcccacatgatggggccttgttttgcatgttgatgaagaactacacaaagaaaactaatatagttaaaagtcagcttgccttcccgtagtagaagcaggttcttggaagttacaatttaaggtaccccaaaaaagttggaaataaaacaaaacaaacataaacaatgaagcaccctgtgaaatgccaaatgagtcactccttttaccttttttggggtgggcagggagggaggaataaatggggttgggcatatcaaactaaagatgacatcttaattttgcattgaacattaatgtagcggatataatttgatgattatacttcattagatttaatttctaggccaagatgttactttttaaagtgcagtttaaggttcaggcatgcattctggctcatagtggttgaaagtaatttaaattagtgggaaagtagcatgcttgcatcacatagagtgagattggtattcatttacctatgttgcgccagtttgtgttgcagtttaccaattcaatatagccctgcatttaaagttcctttttaagatttgtggattttatttttattaagaacatagatatataaagtactgtagtttacaggtaggccttgaaatatcttttttaggatctgttaggaataagattgatattgtattgtgtgtaacctgcacaatgtggaaagctgatatacctgtgcaaaatctttgcctctgtgctgtcagtgtgatgtgctttctgcatggttatatactactagtgattttatcaaaacttctaaaatttaaattacgtggtaaaagatctgtaaaaggctgcataaatgttagttggcacataaagacaattgtagaagttgaaaaatgattgctatatttcaatgtttattcccactcaacatactgccttctaagcttccctttttttgttcaaagcatgatcttaaagatatgtttaagttaatggatgtaatgcagggttcctacactgtattttggcgcatgttggtggccctctgtgccctagatatatgcacacagggtgcaagttaaaagctacagagtgaaagttggtttggatcctcttcatttcatttgtttagcttttctgttatttttctctacttacatgtattcctgtgaataaatccttgttaagttaaccctttacttttccttccatgtgtattttcttatatactgtgaatgtgaaaacctaactggtacacttgatcttgtgttcatatgaaagtgcaagtctttattaatttggattgcctgaacagtgtatcccatgatgatgaaggaaaatggagagatttttctttttaactctgctggtcagagatgaagccacgcctttccatttttcaatgctgcatatttaatctgcaacaaaaatgttaagccataacagcctttttatattttagtttgtcacctttgcattgcagaataaatactgaataaccatttttataagcagttgctcctctttgcatggttctattctctaaaagtgttgaatgatacagccattgcactgaagtttgagctgtgtgcgtgtgaatttatactgtttcaaaaatttcaaatgcatggtagcatgtagaaaggtttttgttactatgtgtgtgtgtgtgttttgttttgttttgttctgttttttaacgttctttcacctttcctctactttggctttgcaaatttcagtctgtagagcctgaaattaaattattttatagtgcctgatatttttaatattataagttggattcaaagggtatacagcattttgttttctagtaccattgcttcactgggagctcaaaatttgcctccctgttagtctttaataactgagtagagtagcttttttattcttagattatagtgatattctgtagtgcttcaaatacttagaattctaatatgagagatagtttaatattctggaatagagagtattttaaattgaaatgaccaaattcgatttaaaacaaacacataacaatcttcagtaaagttatttgaacctgtggttgacaattctgtattgactaaaggcaatattgtcacctgtctcattaaaaattagtttccagttaggcagatgaataacactattaaaaatgcacccagttttgtagtcacttgactttttttttttatttaaatgaaatttaatttgaaaatagaaaataaaattaggtaaatatgactggcaacctgaatttgagttgggattctttgtgtatttttcccccttgaggttattgtttcttcctaatttatatttcagatacatagtgtagaacaggaatttgcagaagccatttaagttatcttttgaggtaagctctgatttagcatttattctgataaaatctaatacatcatgggatatatataaagcaacttaattcttgtggtgtagtcttaatagttttgaatgttgactgaatgtctataaaattgtgagtttgtctttgttacattccagtgtttctgcctcttggcatgcttaaagcacggcttacttcatctgctccttacacactaaaatgctgttagtgtgctcaactacagaaatagccgctgctaagtgatgtagattttctacttgaatatttttatgttgtaggaacctcaggaggtcagtgtttactgttttatatatgccttctttttcctgtttgagcttctctctttgaaggattctaacagaacaaagctgctgatcaacctaagttggaaacagaaagtgtaattaatataacttaaatgcatgtttggcagttccatgttacagtccattagcgagtgaacttagtgccacaggtattcatttattcaggaaagaattttgctttttgtattgtctaatctcttcaatgacttcatactgtgtaaaaaaaaatcactttttaatattttttggttggttatttcccaaataatcaacatgtaaataatcttttaagagccagttctgatgctttacattattgctacttgattttgttatgcaagttagatttcagaagaatagattttaaaacacttaaccaagccattacatcttaaaaacaaaacaagtagcatacattttgtaattaacattgataaacactgtgatttttttggttaagactttttcattgatctgaattgcttaaattgcatatattgtaaaataggatcagatgtatattttaaactaatttcaatggattttcctcttgaaatgctttgtctactcagttataaaatattcagatacaagttttatctcaggtgaatactcttgtattgtttttgctttggtgacatgcttataaagggtcatcctagttacattctttgttttttaagtgtatttcattgagaatctttccatttagtctgatttttttcctaatattctagcaggctggggtggtataaagccctcctgacaagccttttgcctacaggtttacctgaaaatgagctacatatggtcgtcattttcttcaaactctcaaaataggaaagtggaaatttttctcccctatataaaattattctgcctagcagaaatgccagaaataaattaattgcatcttagtctaaatttaagtcctttgccatgaggaaaaagtggttttttgcttcatatggtaaatctatattattcatattgaatgtattaacagataatggtgcaaaagcattcttcccagggaagagtgtatcatgcataactgcaatttaagtccttcctttgataatacttcaaaacatacacagctttgcttactgaattatttttgcaaataatacaaggaggggaaactaacttgctactagtgttgttaatgaagtataggccttggaacatttaagaaaactggtcttcagatagttaagggcttgggataatttaagtgaaaagtgagatcagtaatgagctgtgttgttaacaatattatctggtaataataccatgcaatatagcgttgtataccaacttagtgcattttatactgtattaaatatggagatacttctaatgcctctctaaaattaaattttacataaaagttagttttattcacctttaggctttccaagtgaattgtgactaattttttcaatcttacatagatctttcacccattagcattacttacgtagataattctttatgcctagttattatacatattaatttttaaggtatacatttaaattacacaattgttcattgtggtttgtatcccagaatgtgttgtgttttttaaaagatgcataatagctgaatgtatgcatgactttgaaagaagttaaaatggtgattttttttcacctcttgtacattttaaaaccaggccaaatctatttgccaagcagtgtatcactaataagaaaagcagtttttccttttattgcagtttttgtttatctgccatagaatttccttatactgtggcttggtattattcaagattagctatttcgctggtattacatctttttaaaagcctattataacatggttagcctataaggcagtgttggtccccttctaatattggcctcataaaggggttccactgtactttccgcatattactgtgttgttgttttcctttgtggatatataagcaaattgagcttgggtgatttttatggagacaataattagacaatactgtataattagttttacttaatagattatcatcttgtgagaagagatgtttaaacgtggtaaatcacttcatattacaaaacagttttacacttaatatgttaacattgggtgcaataatttagtagcattagctttagttacaaatataactggatctttctgctgacaacttaggttgtatgagttatgcttaaaagctttaaatctgatgtttcctgtacctgccacactatgttagaatgtgtccttcaaacatatcctcctgcaacttctcaaactgtactaaattgatatttcttgaagtctaactctgtgctaacagatctccattttaaatagaatacggttttaatttttgataagctgctgaattttaaagagagttttttggggccaccaaatattttggatcatgcagagaatatatattgtactgtagtaattttgtatttacatttgtatgatgtgacataatagatgtgaatgttaatcactgcttgactatgttaataaagttgtttaactataaaaaaaaaaaaaaacccacgcgtccttcagatcaatccatctatgcaaatttatggggaaaaattgttttttaaattaaatttccaatacccaagccctaaaattgatggatgtgaccccaggtgttccccttacctcttggccccccaaaacagggacagacatagatggtgggctggaacacccctcacctcctgtattcccagaaagcctcgcgttgaggtgtgttggccagctccctagtttgtgcttactatacctggccacgcctccctacctaaggccgctggcttaaccctaggggcaggcagtgttagatcagacccagaccttctcatcccaccctcatcacatcggggagaggggactccaggggcgggaaggcaggcgtccctccatttggccagggtgggcggcgaggagggggtcactctgcaggaacactgagctctgaacacctctcgcctgctgcctgcctcacaccctctgcattcgctgtttcctctgttgggggagggggtttgtgaggggaatattagattacaccttgtcatttggaaagccccgtgtctccggcggccacagcgaggttgggggggtggtgagggaagtccatggattggccagaactgggggaaaaacaaaaagaaatgagagaaagagagagcgggtacc

SEQ ID NO: 11126 - DNA, 299 bp, Homo sapiens
gaagggcctttgggaagtaattaggattagataaggtcatggggtgaggtatgatggcactggtgacttataagaagagaaagagaaatctgagctggcatgctcttgccctctcactgtgtgatgacttctccatgtcatgatgcagcaagaaggccctcaccagatggtggcaccatgcttttggacttcccagcctctagaactgtgagctaaatcaatttattttctttataatcacccagtttgatattttgtcatagcaacagaatatggacaaagaaagaaaattaatgcaa

SEQ ID NO: 11127 - DNA, 358 bp, Homo sapiens
gctatcacgtggaaagcacttataaactgtgaagtgccgtacaagtgcaagatactcttaccagcagcatgattgttcctgagagtagaatttctaatagtaggctgagcatggtggctcacacctgtaatcccagcactttgggaggctgaggtggacagatcacttgaggtcaggagttcgagaccagcctggccaacatggtgaaaccccgtctctactaaaaatacaaaaatcagtcaggcatggtggcatgtgcccataatcctagctgtttgggaggctgaggcagaagaatcgcttgaacccgggaggcagagtttgcagtgagccgagagtgtgccactgcactccaccc

SEQ ID NO: 11128 - DNA, 282 bp, Homo sapiens
tgtgtgtgtgtgtatatatatatatatatatatatatatatatatatatgtatctccccattatacaaatgaatatgatgatgatgatggtggtagtgcccaaaatgtatttaatgtgctttgtacatactagggaatatatacacacacacattacttttttttgcagggatcttgatacataaagattacatgtgtaaagtggctaggcacaatgcctagcacagaatacatacaaaatgggtatatctgttatgattagtattggtaatctcaggtaga

SEQ ID NO: 11129 - DNA, 1779 bp, Homo sapiens
tgtgtggagagacgttacgattggaacggaagcgcttcctctggcagcaccagctcttgggcctgctgtctgtctatacccggcctagctgtggacctgaggccttgggccatctgctgagccgagcccgaagccctgaagagttgagtttggccacccagttatatgcagggctagtggtcagcctctctggcctcctgcccctggctttccgaagctgtctggctcgggtgcatgcagggacattacagcctcccttcacggcccggttcctgcgcaacttggcactgctagtagggtgggaacagcagggtggcgagggccctgcagccctaggggcgcactttggggaatctgcctcagcccatctgtctgacctggctcctctcctgctacatcctgaggaggaagtagctgaagctgctgcctctctcctggccatttgtccctttccttctgaagccttatccccctcccagctcctgggactggtaagggctggggtgcaccgcttctttgcctctctgaggctgcatggacccccaggtgtggcctcagcctgtcagcttctcacccgcctgtctcagacatccccagctgggctcaaggctgtcctgcagctgctggttgaaggagccttacatcgaggcaacacagaactgtttggtgggcaagtagatggggacaatgagactctctcagttgtttcagcttctttggcttctgcctccctgttggacactaaccggaggcacactgcagctgtgccaggtcctggagggatttggtcagttttccatgctggagtcatcggccgtggcttaaagccacccaagtttgtccagtcacgaaatcagcaggaagtgatctataacacccagagcctcctcagcctcctggttcactgctgcagtgccccagggggcactgaatgtggggaatgctggggggcacccatcttgagtccagaggcagccaaagcagtggcagtgaccttggtggagagtgtgtgtcccgatgcagctggtgcagagctggcctggccccccgaggaacacgcccgggccaccgtggagcgggatctccgcattggccggcgcttccgcgaacagcccctgctctttgagctgttaaagctggtagcagctgcacccccagccctgtgctactgttccgtgctgcttcgggggctgctggccgccctcttgggccattgggaagcctctcgccaccctgacacgacccactccccctggcacctggaggcatcctgcaccttagtggctgtcatggctgagggaagcctcctgcctccggccctgggtaatatgcatgaagtatttagccaactggcacctttcgaggtgcgtctgctgctgctcagtgtctggggttttctccgggagcatgggcccttgcctcagaagttcatcttccaatcagagcggggtcgcttcattcgggacttctccagggagggtggaggtgagggtggaccccatctggctgtgctgcacagtgtcctccaccgcaacatcgaccgcctaggtcttttctctggccgtttccaggcaccttcaccgtccactctccttcgacaggggacgtagccttttcttgctctggaagcccagggaggttgagcagtgagagagggaagggactaacgtgctccggaagggtggaggtttctcttctaagtccttggtctaaagagcgctgtcacttttttctctcccacttttttttttctaaataaaatttgccaacttgagaaaa

SEQ ID NO: 11130 - DNA, 1957 bp, Homo sapiens
tgtgtggagagacgttacgattggaacggaagcgcttcctctggcagcaccagctcttgggcctgctgtctgtctatacccggcctagctgtggacctgaggccttgggccatctgctgagccgagcccgaagccctgaagagttgagtttggccacccagttatatgcagggctagtggtcagcctctctggcctcctgcccctggctttccgaagctgtctggctcgggtgcatgcagggacattacagcctcccttcacggcccggttcctgcgcaacttggcactgctagtagggtgggaacagcagggtggcgagggccctgcagccctaggggcgcactttggggaatctgcctcagcccatctgtctgacctggctcctctcctgctacatcctgaggaggaagtagctgaagctgctgcctctctcctggccatttgtccctttccttctgaagccttatccccctcccagctcctgggactggtaagggctggggtgcaccgcttctttgcctctctgaggctgcatggacccccaggtgtggcctcagcctgtcagcttctcacccgcctgtctcagacatccccagctgggctcaaggctgtcctgcagctgctggttgaaggagccttacatcgaggcaacacagaactgtttggtgggcaagtagatggggacaatgagactctctcagttgtttcagcttctttggcttctgcctccctgttggacactaaccggaggcacactgcagctgtgccaggtcctggagggatttggtcagttttccatgctggagtcatcggccgtggcttaaagccacccaagtttgtccagtcacgaaatcagcaggaagtgatctataacacccagagcctcctcagcctcctggttcactgctgcagtgccccagggggcactgaatgtggggaatgctggggggcacccatcttgagtccagaggcagccaaagcagtggcagtgaccttggtggagagtgtgtgtcccgatgcagctggtgcagagctggcctggccccccgaggaacacgcccgggccaccgtggagcgggatctccgcattggccggcgcttccgcgaacagcccctgctctttgagctgttaaagctggtagcagctgcacccccagccctgtgctactgttccgtgctgcttcgggggctgctggccgccctcttgggccattgggaagcctctcgccaccctgacacgacccactccccctggcacctggaggcatcctgcaccttagtggctgtcatggctgagggaagcctcctgcctccggccctgggtaatatgcatgaagtatttagccaactggcacctttcgaggtgcgtctgctgctgctcagtgtctggggttttctccgggagcatgggcccttgcctcagaagttcatcttccaatcagagcggggtcgcttcattcgggacttctccagggagggtggaggtgagggtggaccccatctggctgtgctgcacagtgtcctccaccgcaacatcgaccgcctaggtcttttctctggccgtttccaggcaccttcaccgtccactctccttcgacaggggacgtagccttttcttgctctggaagcccagggaggttgagcagtgagagagggaagggactaacgtgctccggaagggtggaggtttctcttctaagtccttggtctaaagagcgctgtcacttttttctctcccacttttttttttctaaataaaatttgccaacttgagaaaaaaattacagcaaaaaaaaaaaaagtggaggacatctatgtcgcagacggggaacaaaagggtcattgacaggccactgcgccatacgatgttccggaaccacattttttgtgtccaaggggtgactctcccggcccccaattgtgaccgcaataattcaaaaaccaggtaccgctacg

SEQ ID NO: 11131 - DNA, 1681 bp, Homo sapiens
tgtgtggagagacgttacgattggaacggaagcgcttcctctggcagcaccagctcttgggcctgctgtctgtctatacccggcctagctgtggacctgaggccttgggccatctgctgagccgagcccgaagccctgaagagttgagtttggccacccagttatatgcagggctagtggtcagcctctctggcctcctgcccctggctttccgaagctgtctggctcgggtgcatgcagggacattacagcctcccttcacggcccggttcctgcgcaacttggcactgctagtagggtgggaacagcagggtggcgagggccctgcagccctaggggcgcactttggggaatctgcctcagcccatctgtctgacctggctcctctcctgctacatcctgaggaggaagtagctgaagctgctgcctctctcctggccatttgtccctttccttctgaagccttatccccctcccagctcctgggactggtaagggctggggtgcaccgcttctttgcctctctgaggctgcatggacccccaggtgtggcctcagcctgtcagcttctcacccgcctgtctcagacatccccagctgggctcaaggctgtcctgcagctgctggttgaaggagccttacatcgaggcaacacagaactgtttggtgggcaagtagatggggacaatgagactctctcagttgtttcagcttctttggcttctgcctccctgttggacactaaccggaggcacactgcagctgtgccaggtcctggagggatttggtcagttttccatgctggagtcatcggccgtggcttaaagccacccaagtttgtccagtcacgaaatcagcaggaagtgatctataacacccagagcctcctcagcctcctggttcactgctgcagtgccccagggggcactgaatgtggggaatgctggggggcacccatcttgagtccagaggcagccaaagcagtggcagtgaccttggtggagagtgtgtgtcccgatgcagctggtgcagagctggcctggccccccgaggaacacgcccgggccaccgtggagcgggatctccgcattggccggcgcttccgcgaacagcccctgctctttgagctgttaaagctggtagcagctgcacccccagccctgtgctactgttccgtgctgcttcgggggctgctggccgccctcttgggccattgggaagcctctcgccaccctgacacgacccactccccctggcacctggaggcatcctgcaccttagtggctgtcatggctgagggaagcctcctgcctccggccctgggtaatatgcatgaagtatttagccaactggcacctttcgaggtgcgtctgctgctgctcagtgtctggggttttctccgggagcatgggcccttgcctcagaagttcatcttccaatcagagcggggtcgcttcattcgggacttctccagggagggtggaggtgagggactattttttttctcttttagatgaaatggtccgtgtaatcaaaatggttgagggtgcggaatttaattaagcgtacaaatccctttaatctaaatgcccattggccatgctgtttctaggatgtactacaatcattcagtggtatttggaagtaaatctcggtttctcaagtgttgtcctggagaact

SEQ ID NO: 11132 - DNA, 561 bp, Homo sapiens
caagttggcaaattttatttagaaaaaaaaaagtgggagagaaaaaagtgacagcgctctttagaccaaggacttagaagagaaacctcctgcctccggccctgggtaatatgcatgaagtatttagccaactggcacctttcgaggtgcgtctgctgctgctcagtgtctggggttttctccgggagcatgggcccttgcctcagaagttcatcttccaatcagagcggggtcgcttcattcgggacttctccagggagggtggaggtgagggtggaccccatctggctgtgctgcacagtgtcctccaccgcaacatcgaccgcctaggtcttttctctggccgtttccaggcaccttcaccgtccactctccttcgacaggggacgtagccttttcttgctctggaagcccagggaggttgagcagtgagagagggaagggactaacgtgctccggaagggtggaggtttctcttctaagtccttggtctaaagagcgctgtcacttttttctctcccacttttttttttctaaataaaatttgccaacttgagaaaa

SEQ ID NO: 11133 - DNA, 1659 bp, Homo sapiens
tgtgtggagagacgttacgattggaacggaagcgcttcctctggcagcaccagctcttgggcctgctgtctgtctatacccggcctagctgtggacctgaggccttgggccatctgctgagccgagcccgaagccctgaagagttgagtttggccacccagttatatgcagggctagtggtcagcctctctggcctcctgcccctggctttccgaagctgtctggctcgggtgcatgcagggacattacagcctcccttcacggcccggttcctgcgcaacttggcactgctagtagggtgggaacagcagggtggcgagggccctgcagccctaggggcgcactttggggaatctgcctcagcccatctgtctgacctggctcctctcctgctacatcctgaggaggaagtagctgaagctgctgcctctctcctggccatttgtccctttccttctgaagccttatccccctcccagctcctgggactggtaagggctggggtgcaccgcttctttgcctctctgaggctgcatggacccccaggtgtggcctcagcctgtcagcttctcacccgcctgtctcagacatccccagctgggctcaaggctgtcctgcagctgctggttgaaggagccttacatcgaggcaacacagaactgtttggtgggcaagtagatggggacaatgagactctctcagttgtttcagcttctttggcttctgcctccctgttggacactaaccggaggcacactgcagctgtgccaggtcctggagggatttggtcagttttccatgctggagtcatcggccgtggcttaaagccacccaagtttgtccagtcacgaaatcagcaggaagtgatctataacacccagagcctcctcagcctcctggttcactgctgcagtgccccagggggcactgaatgtggggaatgctggggggcacccatcttgagtccagaggcagccaaagcagtggcagtgaccttggtggagagtgtgtgtcccgatgcagctggtgcagagctggcctggccccccgaggaacacgcccgggccaccgtggagcgggatctccgcattggccggcgcttccgcgaacagcccctgctctttgagctgttaaagctggtagcagctgcacccccagccctgtgctactgttccgtgctgcttcgggggctgctggccgccctcttgggccattgggaagcctctcgccaccctgacacgacccactccccctggcacctggaggcatcctgcaccttagtggctgtcatggctgagggaagcctcctgcctccggccctgggtaatatgcatgaagtatttagccaactggcacctttcgaggtgcgtctgctgctgctcagtgtctggggttttctccgggagcatgggcccttgcctcagaagttcatcttccaatcagagcggggtcgcttcattcgggactttctccttcgacaggggacgtagccttttcttgctctggaagcccagggaggttgagcagtgagagagggaagggactaacgtgctccggaagggtggaggtttctcttctaagtccttggtctaaagagcgctgtcacttttttctctcccacttttttttttctaaataaaatttgccaacttgagaaaa

SEQ ID NO: 11134 - DNA, 416 bp, Homo sapiens
tggaccttgtgggtctcagtttctttatctaaaaaaatgaatgtgtattagttttggaagttgcgtaataaattaccactaacttagaagcctaaaactactaatttattatctcacagttctgtaagtcagaagtttaggcaggcttggctgggttcattgcctagagtctcgcattattatttattattattttttaatctcctaggctaagcttcctttttgggaagaaaagtagtttatttttgctggaatttctctctgtgttgttttcatcttgaggagatcaagtataaaagtgttgcgcatttactgagtaatattacaagcagaatgccacatattattaattgaaattctgattcaaatgtttatattaagtagaatttttccaacacagtgtatatgtgctaaac

SEQ ID NO: 11135 - DNA, 633 bp, Homo sapiens
tcgtgttgccatttatctcatttcttaggtctagtagtaattgcttttataaatttgagagctccagtattaggtgcacacagatttaggactgtgacattttcctgttggactagtccttttattattatataatgtccctctttgtctttttaactgttgttgctttaaagtctttttgtctgatataagaatagctactcctgtgtccatttgcatggaatatctattcccacccctttaccttaagtttatgtgagtccttatgtgttgggtgagtctcttgaagacagcagatacttggttggtgaatttttattcattctgctattctgtatcttttaagtggcacatttaggccatttacattcaatgtgggtattgagatgtgaggtactatgctattcatcatgctggttttctagaatgctggttatgctagcagtgaagttgccacgtggacagactcaggacctctggttagccagggtgttgcaagtggtagaattatctgttgttttctccttctttggtgcaggattgttctgttatgactttgtgtaatggcttgagttcattggcctccaaccaggaggtggaactttcaagacagcaccagctgctgtagcgccc

SEQ ID NO: 11136 - DNA, 377 bp, Homo sapiens
gactttgagaagcagaggtaagaatctagggaacacaaatgaatgcctgatcatagagaagagctagggaataaatttgaatggtgtaaaaatactattgttatagatgtttaaaaacaaaaatttaaaaaatactgatggtagttaaatctcttccaacaaaatttgagcaaaaattcccaaaggaaaataatatttatttagtacctacttcgtgtcaggtatagtgcaacatacgttagttaaagtacattttacattgctttttatctcagtattggattttctaggatatggtattctttattcttgcctgattccgctttatacggaaattaaaatcccaagaaagctgtttgtaaagaaatctgaaggga

SEQ ID NO: 11137 - DNA, 333 bp, Homo sapiens
gggaagtgggcatgaatcactttaattttggcattttttttctctcatgtactacagatgtggaatttatacctttgatttaacatagagaccttttcctcaattggacattgcagaatttcaacttatgtgacagttttccccccacaaaatagaagcattttatttagctgccaagaaatccaaagttgtggtggtaaaagtgagatattgaagctttcgttgccagttaaagtattgttgagcttttcacaattacttaaattggctaatgaatagagcaactcatttgttaggttgtagccagaattctctacataaagtggatctctt

SEQ ID NO: 11138 - DNA, 572 bp, Homo sapiens
cgatgaagtaactaatgtggaatagaaagagacttaaactgtataaaatatacttgcattttctgtaaccatttacggaaaacaggaagtttctcatttctagagagtgaaacctggaagaggcagtcctttcagatagtctgagatatatggccaaaaaaatatctgcggcagtgacatagcaggctacctggaacaatgcagtggcagtttgacgtgacctttctcagtatagctagctggggtgaatcatatgctagtgttctcatctggttgaattttttacatccggaaatgtgattctttcattttataaaagaactcttgggttcttttttagagtcattgattagaagtaagcagttatgtagaattttaacttatatgaaataggagtgtgttacatagggtgtgtgttaggggattatatacctaagtggatcttcattgagttgtttgaaccagaatgatgagctgcagttttaggtcactgggctctccctgtagttttatcttattcaatacttgctgattagaagcaataacaaaagtcttagataatgagaaagaag

SEQ ID NO: 11139 - DNA, 437 bp, Homo sapiens
agaagaccctccccccatgtcctatggtggcccatctcccatgagcaggtagcagggtggaaagtcctgcaggcaggaagcagacctcattcagtcctcccaggcagtcctgttctcctgctcccagaatcctgaacaagaggttttcactcaactgagcataatgggccgcgggctatggggcgctaactgctctgcaaccagaatttggacccatttccctgttgtccactcttacctcatttctatgactcctggcacatcgagtttccagactttctggggctctgtgggggtggagtggccccttcctgttggtatccccttccataggcacttagattccgctatctcggtccttctccgctctctgctttctgacctgctagacgtgttaccattcctttctttgtactccttagtttgaggatttcacc

SEQ ID NO: 11140 - DNA, 322 bp, Homo sapiens
cgttccgggtagagactatgaaagatggggaagagaggatggggttttgaggttgcaggtgaatagcgcctagaggaagataaaaacctttcttccactcaggacaggggaacagggagagaacttaaaccatagtgtgtgtgttggggttggagcggaggtgcatgtgaacactggccgctgtgagagagattgaagtgagaaagggggaaaaaatctccttgtgtgggcttctctcaggacaagaactcgcctgaactcttaccatttacctctgacccgggttcccagcctggtcggagaggagtgaggaaggcatacg

SEQ ID NO: 11141 - DNA, 326 bp, Homo sapiens
tggagacaggttcttgctctgtcacccaggctggagtgcagtggcatgatcacggcttactgcagccttgacctcccagactcaagtgattctcctgagtagctgggaccacaggcgcacaccatcacacctggccaattttttgtattttttgtagagacagggtttttgtcatgttgcccaggctggccttgaactcctgagctcaagccatctgcccacctcagcctcccaaagtgctaggattacaggcatgaaccaccatgcccagcgctgtatttatctagttattacaactaagagagtaagctaggcactaaccagta

SEQ ID NO: 11142 - DNA, 417 bp, Homo sapiens
aatgtaacaattgtaaatatgtatgcccacaacatcagagaaccaaaatatataaagctgacagtagatctaaaggatgaaacaggctgcaataaaataatagtaggggacttcaataccccacttttaagagatggacagatagtggccaggtggagtggctcacacctgtaatcgcagcactttgggaggccagtgtgagcagatcacctgaagtcaggagttctagaccagcctggccaacatgtaaaaaccccatttctcccaaaaaatacaaaaaaaaaaaaaacaaaaactagctgggcatggtggcacatgcctgtagtcccagctactcaggaggctgaggcacaagaattgcttgaacccgggaggcagaggttgcagtgagccaagatcatgtcacagtactccagc

SEQ ID NO: 11143 - DNA, 795 bp, Homo sapiens
tttaggggtagggtttcaccatgttgcccaggctggtctccaactcctgagctcaagcgatccacccaccttggcttctcaaagtgctgggatttcaggcgctcaccaccgcacccagccagtactcgcttttataaacacgcaaaacacctcctacaccacttaaagctgctattatatttctacaacctaacacattctgaaacactggataaataaatatctaaataattattagtttttggtctagtccagtttgagaactgaaagagattctctggctcaaatagcagatcaaacatatacatttatctctcttcagcaaaagaccattttaaacagtagtttaaaaaaatttaaagccaaattattattaaaaaacaaagtaaaattaatggaaagagatctcttctaaagtaaagaaactggagtctgggagagaggaaactagtgaacctagcatgggagttggcactttggggtaaaacaatggactcttgaatgtcagaatacaaaagactaattaacagcttaaccctaaagtaaagcctgcctgccaaccattaattcccaccaagagctcattgtgaacccttctactaaatcttaaagctgagtgatatccaaggtcagcagatatttggttaaaagcctacaatataaatgagactaagataacaacaaaaattacaatagagttgacaggtaagagggagggcaacaaaatttaaaaaaaaaataaaccttattaacattttcagagactcaagaagattattaatccataaaatgaga

SEQ ID NO: 11144 - DNA, 555 bp, Homo sapiens
ttttctttttttgacagagtctcgctctgtcaccaggctggagtacagtggcgcgatctcggctcactgcaatctctgcctcctgggttcaagtgattctcctgcctcagcctcctgagtagctaggattacaggcgcccaccaccatgcccagcaaaattttgtatttttagtagagacggggtttcagcatgttggccaggatggtctcgctcttgacctcatgatccgcccacctcggcctccaaaagtgctgggattataggcgtgagccaccgcacccagcctatccttttttcttaataaggtaagacagaaaacaggagcagccacgtgctctcccgacctctgttgccaacagggacaggcatggaatgtgttctgaccaattagatggaggagagttgcaagttatggctcctgggaggggactggactttcttcctgacagcagccaggccacgagtgaccccgaggccagcctgagtagaaggcagtgtgaagggtcacagggaagaaggatggaggcagccctgggcactgactgtgtgacca

SEQ ID NO: 11145 - DNA, 1138 bp, Homo sapiens
cctggcaaggatgagaccatccccaatcccaaagctaagaagagggagctcagaggagagttagctggaggaacttcgtatttggggattagcatcatcttcagatcatctggctcctgagagaggcttctctgtcttaaaatatatctgttggaacaaaaattaatttgggtcaaactaaatttagagctattacgatgaagaattggggagggcaatacttaggcaataaagaacaaggtggtggagggaggcctgaataataacgatgaaagagagctgaatcagccaatatcctgatataaatgaaatgtcctaccgaatacatcccaggacggagggagtggaaaaaaacacagatttaaagcctctgcagtgagaatctttttcagaggtccagcccccacaaagaattctagacaacagacttaaaacaaatggtcacttgagaagcagagccgtgtcaaagccaagaggtgtcagatatacacttgagatatctatcttagggatgagagaaaaatgtagcttctaagggtatccaaccaaatccccacttgttttattttagaatttctaataagaaattccttcctctgtcgttcggatattatcaatagctctggcttcctgtctctaaaggaacttctgcctgattcaagggaactctgggctgtttcgttagaaggtccctgttctgatcagtaaggaacatcagcggactctcagatccattcacccttggaacatggcccactgttgcaccttgattttgccttatctcgccaactctccaagctcaggtgggccttctgctgtcactgtgcccaggccagtggtaattctctcctgcctgttgtcattgcttttaggtcgttcttgaaaagatgggtgtcacatagtctgatgtgctttatcaaagaacagaggcaagagcaacacagatcatgggggtatgaatccaggaggtcatcaacagcctcgaaagagaattagaacacgtgaattcatttaagcagcccttttctggtccacagtttattgattcaagtacatcgtgcatgtctaactaactaactgcatgaatgaaaacttattttccaaaagacagctcctctgaggccacaattttgtaaat

SEQ ID NO: 11146 - DNA, 533 bp, Homo sapiens
ccctgtgattacagcctaagcctttatacagtcttatctcagagtgatttttattacaaacaccccctccatggctgaagaccaaggcaagtccagaaaaactggtcatgaattaaactttgataaaagattccttctggcctcattttcttgtgttgatttgataccccaatagaagattttcaagtgagcaaaggataactgaggttcgtgcacactcctgacctggcagcagcccctcaggctggctgctgcctacctcagttgacgtcctggcaacacagccactcaggcaagccaggagttccttctgacctctcagaggtttgtggagtaaaaaatgtatctagtgtgagcatgcggcactttgaactacccttgtgtggaaaaattcactaaaacaatgaagaaaataaaaggtatcttttatttggattctgtgaagttggtaacttttaatgcaattggccaaaattgctaactggcaaatttctccgttcttatgtcagccagttcactcatcagaagtctca

SEQ ID NO: 11147 - DNA, 444 bp, Homo sapiens
ccaccttgtgattgttgtttttgttctctgaagtgaacgtactcttttatggtagtgttaaagtcatataataagtacttatggagtaagtaaatgtgtaagacacaagagataacagatgaataagctaagtttgtatcctcaagaagtttaaagagtgaagggagtgaagaacttagtaagacaaagatgaatgtttagaacagtgcctggcacttagtgatgttagaaatgaaccttgaaggttggcaaagattttgatagacagttttcttttgattgtgacctactgagaggtcagtataggcagaaagcacagggcacacagagaagacaagttgaaaggtatagggctttggtggcaccatgggaatgggatatgttgaagacatagtattataggtacagatggtaaatgtaatgtgagaagaaaaagagataatt

SEQ ID NO: 11148 - DNA, 397 bp, Homo sapiens
  misc_feature (390)..(390): n is a, c, g, or t
  misc_feature (392)..(392): n is a, c, g, or t
ggatggtagcaggtaccctgacatgcccactgctgctgatgttgtgaatgctttagatcaacaggcacttgcttctatcctcagaacatacggggaggagaagcatgccaagaaaatcgcttcagcaattgttcaggcacgcagcatctaccccatcaccagaacccagcagcttgccagcatcgttgcaggtagcctcattaattctcaacagtgtctaagagaaaaaattatatttacatgtgtgtgtgcattaatcccccagactccctgagggattcatttgtacttgaaatccaggatagaatcttgcctatccttctctaatgtcagctttcttttgcttttgcatgcttctcccccaaaaaacctctcccccaaatacaatanantaaaa

SEQ ID NO: 11149 - DNA, 659 bp, Homo sapiens
ttttttgagacagagtttcactcttgttgcccaggctggagtgcaatggcatgatcttggctcactgcaacctccacctcctgggttcaagcagttcttctgcctcagcctcccaagtagctgggattacaggcatgtgccaccatgcccggctattattttggtcttaaaatttcactcctgtcagaatgtaggagtgaataaatgctattcataaataaccataattattcagtatttgcagtctcgtgatgttggttattgcataaagtaagttattgcagtaaatgatgctttagaaagcaattttctctcatcagtttcgtccttattcagccttacacaaaaaaaggcatagttctgggcttaattgtgatgtaattaaaattattgagtgaacattttggctcatattttatgacattgtagttcatccccatggtcaatttaaggtagagttcttacaatatattactttcaatataggtattttattaataagaatttatttcagttggacttattaaatgagtggttttgctgagtgtatgagtctataaataaaattttaattgaacatcattggagatttagatatgttggtactgcttatctagcaacttttgtatttgtgaaaccattaaaactagagtaacaat

SEQ ID NO: 11150 - DNA, 1740 bp, Homo sapiens
aggggaggggaaggcagctgaggttgtggggggaggtgccccgccccttggcaggcccctacagccaatggaacggccctggaagagacccgggtcgcctccggagcttcaaaaacatgtgaggagggaagagtgtgcagacggaacttcagccgctgcctctgttctcagcgtcagtgccgccactgcccccgccagagcccaccggccagcatgtcctctgctcacttcaaccgaggccctgcctacgggctgtcagccgaggttaagaacaagctggcccagaagtatgaccaccagcgggagcaggagctgagagagtggatcgagggggtgacaggccgtcgcatcggcaacaacttcatggacggcctcaaagatggcatcattctttgcgaattcatcaataagctgcagccaggctccgtgaagaagatcaatgagtcaacccaaaattggcaccagctggagaacatcggcaacttcatcaaggccatcaccaagtatggggtgaagccccacgacatttttgaggccaacgacctgtttgagaacaccaaccatacacaggtgcagtccaccctcctggctttggccagcatggcgaagacgaaaggaaacaaggtgaacgtgggagtgaagtacgcagagaagcaggagcggaaattcgagccggggaagctaagagaagggcggaacatcattgggctgcagatgggcaccaacaagtttgccagccagcagggcatgacggcctatggcacccggcgccacctctacgaccccaagctgggcacagaccagcctctggaccaggcgaccatcagcctgcagatgggcaccaacaaaggagccagccaggctggcatgactgcgccagggaccaagcggcagatcttcgagccggggctgggcatggagcactgcgacacgctcaatgtcagcctgcagatgggcagcaacaagggcgcctcgcagcggggcatgacggtgtatgggctgccacgccaggtctacgaccccaagtactgtctgactcccgagtacccagagctgggtgagcccgcccacaaccaccacgcacacaactactacaattccgcctagggccacaaggccttccctgttttccccccaagggaggctgctgctgctcttggctggacccagccaggcccagccgaccccctctccctgcatggcatcctccagcccctgtagaactcaacctctacagggttagagtttggagagagcagactggcggggggcccattggggggaaggggaccctccgctctgtagtgctacagggtccaacatagagccgggtgtccccaacagcgcccaaaggacgcactgagcaacgctattccagctgtccccccactccctcacaagtgggtacccccaggaccagaagctcccccagcaaagcccccagagcccaggctcggcctgcccccaccccattcccgcagtgggagcaaactgcatgcccagagacccagcggacacacgcggtttggtttgcagcgactggcatactatgtggatgtgacagtggcgtttgtaatgagagcactttcttttttttctatttcactggagcacaataaatggctgtaaaatctcaaaaaaaaagaaagtgctctcattacaaacgccgctgtcacatccacatagtatgccagtggcgtttgtaatgagagcactttcttttttttttttttgtcgacc

SEQ ID NO: 11151 - DNA, 2006 bp, Homo sapiens
aggggaggggaaggcagctgaggttgtggggggaggtgccccgccccttggcaggcccctacagccaatggaacggccctggaagagacccgggtcgcctccggagcttcaaaaacatgtgaggagggaagagtgtgcagacggaacttcagccgctgcctctgttctcagcgtcagtgccgccactgcccccgccagagcccaccggccagcatgtcctctgctcacttcaaccgaggccctgcctacgggctgtcagccgaggttaagaacaagggggaagacttgttgatttttccatatcccccggcctgacaaagaaattggggagcgcttgagtgctggggtacctgggaagtgacgccgtgaaagtgtgggagatcctgaagacagagggggacggtgaaaggcaggaagcgggcatcagaagtgcggcaggggtctcctgactgtggagctaggaagatacctggacaccaccttcatgctatggttgggtaaactgaggttcggagaggagaggcaaatagctggggtcccagctggcccagaagtatgaccaccagcgggagcaggagctgagagagtggatcgagggggtgacaggccgtcgcatcggcaacaacttcatggacggcctcaaagatggcatcattctttgcgaattcatcaataagctgcagccaggctccgtgaagaagatcaatgagtcaacccaaaattggcaccagctggagaacatcggcaacttcatcaaggccatcaccaagtatggggtgaagccccacgacatttttgaggccaacgacctgtttgagaacaccaaccatacacaggtgcagtccaccctcctggctttggccagcatggcgaagacgaaaggaaacaaggtgaacgtgggagtgaagtacgcagagaagcaggagcggaaattcgagccggggaagctaagagaagggcggaacatcattgggctgcagatgggcaccaacaagtttgccagccagcagggcatgacggcctatggcacccggcgccacctctacgaccccaagctgggcacagaccagcctctggaccaggcgaccatcagcctgcagatgggcaccaacaaaggagccagccaggctggcatgactgcgccagggaccaagcggcagatcttcgagccggggctgggcatggagcactgcgacacgctcaatgtcagcctgcagatgggcagcaacaagggcgcctcgcagcggggcatgacggtgtatgggctgccacgccaggtctacgaccccaagtactgtctgactcccgagtacccagagctgggtgagcccgcccacaaccaccacgcacacaactactacaattccgcctagggccacaaggccttccctgttttccccccaagggaggctgctgctgctcttggctggacccagccaggcccagccgaccccctctccctgcatggcatcctccagcccctgtagaactcaacctctacagggttagagtttggagagagcagactggcggggggcccattggggggaaggggaccctccgctctgtagtgctacagggtccaacatagagccgggtgtccccaacagcgcccaaaggacgcactgagcaacgctattccagctgtccccccactccctcacaagtgggtacccccaggaccagaagctcccccagcaaagcccccagagcccaggctcggcctgcccccaccccattcccgcagtgggagcaaactgcatgcccagagacccagcggacacacgcggtttggtttgcagcgactggcatactatgtggatgtgacagtggcgtttgtaatgagagcactttcttttttttctatttcactggagcacaataaatggctgtaaaatctcaaaaaaaaagaaagtgctctcattacaaacgccgctgtcacatccacatagtatgccagtggcgtttgtaatgagagcactttcttttttttttttttgtcgacc

SEQ ID NO: 11152 - DNA, 1528 bp, Homo sapiens
atcgagggggtgacaggccgtcgatccactctctcagctcctgctcccgctggtggtcatacttctgggccagacttgttcttaacctcgggagcaggagctgagagagtggatcgagggggtgacaggccgtcgcatcggcaacaacttcatggacggcctcaaagatggcatcattctttgcgaattcatcaataagctgcagccaggctccgtgaagaagatcaatgagtcaacccaaaattggcaccagctggagaacatcggcaacttcatcaaggccatcaccaagtatggggtgaagccccacgacatttttgaggccaacgacctgtttgagaacaccaaccatacacaggtgcagtccaccctcctggctttggccagcatggcgaagacgaaaggaaacaaggtgaacgtgggagtgaagtacgcagagaagcaggagcggaaattcgagccggggaagctaagagaagggcggaacatcattgggctgcagatgggcaccaacaagtttgccagccagcagggcatgacggcctatggcacccggcgccacctctacgaccccaagctgggcacagaccagcctctggaccaggcgaccatcagcctgcagatgggcaccaacaaaggagccagccaggctggcatgactgcgccagggaccaagcggcagatcttcgagccggggctgggcatggagcactgcgacacgctcaatgtcagcctgcagatgggcagcaacaagggcgcctcgcagcggggcatgacggtgtatgggctgccacgccaggtctacgaccccaagtactgtctgactcccgagtacccagagctgggtgagcccgcccacaaccaccacgcacacaactactacaattccgcctagggccacaaggccttccctgttttccccccaagggaggctgctgctgctcttggctggacccagccaggcccagccgaccccctctccctgcatggcatcctccagcccctgtagaactcaacctctacagggttagagtttggagagagcagactggcggggggcccattggggggaaggggaccctccgctctgtagtgctacagggtccaacatagagccgggtgtccccaacagcgcccaaaggacgcactgagcaacgctattccagctgtccccccactccctcacaagtgggtacccccaggaccagaagctcccccagcaaagcccccagagcccaggctcggcctgcccccaccccattcccgcagtgggagcaaactgcatgcccagagacccagcggacacacgcggtttggtttgcagcgactggcatactatgtggatgtgacagtggcgtttgtaatgagagcactttcttttttttctatttcactggagcacaataaatggctgtaaaatctcaaaaaaaaagaaagtgctctcattacaaacgccgctgtcacatccacatagtatgccagtggcgtttgtaatgagagcactttcttttttttttttttgtcgacc

SEQ ID NO: 11153 - DNA, 1562 bp, Homo sapiens
aggggaggggaaggcagctgaggttgtggggggaggtgccccgccccttggcaggcccctacagccaatggaacggccctggaagagacccgggtcgcctccggagcttcaaaaacatgtgaggagggaagagtgtgcagacggaacttcagccgctgcctctgttctcagcgtcagtgccgccactgcccccgccagagcccaccggccagcatgtcctctgctcacttcaaccgaggccctgcctacgggctgtcagccgaggttaagaacaagctggcccagaagtatgaccaccagcgggagcaggagctgagagagtggatcgagggggtgacaggccgtcgcatcggcaacaacttcatggacggcctcaaagatggcatcattctttgcgaattcatcaataagctgcagccaggctccgtgaagaagatcaatgagtcaacccaaaattggcaccagctggagaacatcggcaacttcatcaaggccatcaccaagtatggggtgaagccccacgacatttttgaggccaacgacctgtttgagaacaccaaccatacacaggtgcagtccaccctcctggctttggccagcatggcgaagacgaaaggaaacaaggtgaacgtgggagtgaagtacgcagagaagcaggagcggaaattcgagccggggaagctaagagaagggcggaacatcattgggctgcagatgggcaccaacaagtttgccagccagcagggcatgacggcctatggcacccggcgccacctctacgaccccaagctgggcacagaccagcctctggaccaggcgaccatcagcctgcagatgggcaccaacaaaggagccagccaggctggcatgactgcgccagggaccaagcggcagatcttcgagccggggctgggcatggagcactgcgacacgctcaatgtcagcctgcagatgggcagcaacaagggcgcctcgcagcggggcatgacggtgtatgggctgccacgccaggtctacgaccccaagtactgtctgactcccgagtacccagagctgggtgagcccgcccacaaccaccacgcacacaactactacaattccgcctagggccacaaggccttccctgttttccccccaagggaggctgctgctgctcttggctggacccagccaggcccagccgaccccctctccctgcatggcatcctccagcccctgtagaactcaacctctacagggttagagtttggagagagcagactggcggggggcccattggggggaaggggaccctccgctctgtagtgctacagggtccaacatagagccgggtgtccccaacagcgcccaaaggacgcactgagcaacgctattccagctgtccccccactccctcacaagtgggtacccccaggaccagaagctcccccactatatccctccacagtccagtctgctgcctgactccaaatcatttcctctgagctagtaaaccggcattccactagaccctttggggcacattctcgtttggcttgcagtccacggtcacacaatcgtgc

SEQ ID NO: 11154 - DNA, 995 bp, Homo sapiens
aggggaggggaaggcagctgaggttgtggggggaggtgccccgccccttggcaggcccctacagccaatggaacggccctggaagagacccgggtcgcctccggagcttcaaaaacatgtgaggagggaagagtgtgcagacggaacttcagccgctgcctctgttctcagcgtcagtgccgccactgcccccgccagagcccaccggccagcatgtcctctgctcacttcaaccgaggccctgcctacgggctgtcagccgaggttaagaacaagctggcccagaagtatgaccaccagcgggagcaggagctgagagagtggatcgagggggtgacaggccgtcgcatcggcaacaacttcatggacggcctcaaagatggcatcattctttgcgagctgctgctgctcttggctggacccagccaggcccagccgaccccctctccctgcatggcatcctccagcccctgtagaactcaacctctacagggttagagtttggagagagcagactggcggggggcccattggggggaaggggaccctccgctctgtagtgctacagggtccaacatagagccgggtgtccccaacagcgcccaaaggacgcactgagcaacgctattccagctgtccccccactccctcacaagtgggtacccccaggaccagaagctcccccagcaaagcccccagagcccaggctcggcctgcccccaccccattcccgcagtgggagcaaactgcatgcccagagacccagcggacacacgcggtttggtttgcagcgactggcatactatgtggatgtgacagtggcgtttgtaatgagagcactttcttttttttctatttcactggagcacaataaatggctgtaaaatctcaaaaaaaaagaaagtgctctcattacaaacgccgctgtcacatccacatagtatgccagtggcgtttgtaatgagagcactttcttttttttttttttgtcgacc

SEQ ID NO: 11155 - DNA, 602 bp, Homo sapiens
aggggaggggaaggcagctgaggttgtggggggaggtgccccgccccttggcaggcccctacagccaatggaacggccctggaagagacccgggtcgcctccggagcttcaaaaacatgtgaggagggaagagtgtgcagacggaacttcagccgctgcctctgttctcagcgtcagtgccgccactgcccccgccagagcccaccggccagcatgtcctctgctcacttcaaccgaggccctgcctacgggctgtcagccgaggttaagaacaagctggcccagaagtatgaccaccagcgggagcaggagctgagagagtggatcgagggggtgacaggccgtcgcatcggcaacaacttcatggacggcctcaaagatggcatcattctttgcgacgactggcatactatgtggatgtgacagtggcgtttgtaatgagagcactttcttttttttctatttcactggagcacaataaatggctgtaaaatctcaaaaaaaaagaaagtgctctcattacaaacgccgctgtcacatccacatagtatgccagtggcgtttgtaatgagagcactttcttttttttttttttgtcgacc

SEQ ID NO: 11156 - DNA, 664 bp, Homo sapiens
caggggaaagaaataaggaaattgctactcaagaagtggaggcaggagtgggctgccacaatctgggaagaattgtgacacttggtaggccggaaaagtgtctcaaattttacctcgactttattaagcagccatgttaattggctggcatgtgttaaacattccactcgaccagaaaaccaagtcagcaatgatttaaggcacattaaaacgtgaatgctccataaatatttgttaaatgaactaactctggacagagcatcagggaagacttcatgcaagtggcatttggccaggttattaaggactttgcagggtggaaggcctaggaggcacaatggttggtggataattcaagcgaaggcacagcatgaagagatatagaggtgtgaaaggacacagtagacagaaagggtagggtatcagaataactcagtcatctcttagcctgttgaagccatcgtcttgagcatcttataaatatccacctcttcctagctgcaccaccaaggcccattttctttcctgtggactcccagctggctttcaggcactcattcttgcctccttctatccacctccacattgcacctgagttctttttaaccaccaaaatcagtggggccactcttgcctgaagctttttgtcaccttgctctctgga

SEQ ID NO: 11157 - DNA, 326 bp, Homo sapiens
tggaaggttctaagtggggttccttactctattttggactctactggtccaaaatatagtggtacacactattaaatgttcaacatttgggcctttggaaataatgtgacagtctctccaagagattcctgctaaactagtaaggtatgataattgtatccaaaaatccatggaaatcttttccatgaaatctgctttatttgagatgctaagaattctaatttgcctggataacacaatttggctctcttcagtgttctcatcccattcagaagtatccttctggagaggaagagctataaaatgaagagtgaagtccaatagcc

SEQ ID NO: 11158 - DNA, 431 bp, Homo sapiens
ggtcttccttcatagccaggctgagcttgtggcgtgctgcttccatgacccaaagcataatgagcagctgggtatggagggtcacaggctcaaggtctatgagatcttctatttccaaatgtgcccagtatgtaggcaggtatttgttgttttaatggtgcatagcacaaggccaagaggggcaatatgttgcattagaagccctggagcaactaatggccatcaggagtgatccacagactccagaaggcgtgaaaaagttgtcgtgaatgaggttttttgaaagcactaataggagtgatggtcaattttaatttataagtaaaaaacatactggacttatatgtacttagtgagtgtgtcacatgaatctccttgaaagaggatgtcattcatgtaatatcagacctttattcctggagaaagataca

SEQ ID NO: 11159 - DNA, 336 bp, Homo sapiens
tgagatgaagtctccctcttgtgccccaggctggagtgcaatggcgccatctcaggtcactgaaacctctgcctcccagattcaagcgattctcctgcctcagccccccgagtagctgggattacaggtgcctgccaccaggcccggctaatttttgtatttttagtagagacagggttttaccatgttggccaggctggtctagaactcctgacctcaggtgatccacccgcctcggcctcccaaagtgctgggattacaggcgtgagccacagcgcccggccaggactctttcaaagtaaggaaggttcagagcactattaaagagttccagaa

SEQ ID NO: 11160 - DNA, 269 bp, Homo sapiens
gggggccctgcaggctcccctccctgagccctgggtacacctgaccacacccggaggctcaacctccaccttgctcccctggccaatcccggtctggggcaggagaaattgaagcaactttaccaaccaacaatcttcacttaaccgccacatttctcaacccccaccccactctctagcatgtcctctgaggcagactttgtcctgttttgttcatcatgcactggacctggcacatagtaggtgctcaataaaacatctgttgaatg

SEQ ID NO: 11161 - DNA, 2045 bp, Homo sapiens
tgctgagctaaagtgggaaggagcagtaacaccaaaggaggctaattctcttcctgtcagtaggagagagtgtctgcccccagtgtgtgaaaagggaaggcatgagaagtgaaaaatcagccttctggaagcaccttcttaccacgagaaaacaggtgattcttactatctttgagactcatccagattgtgtctgtttaactcttcaggcaatatgaaggcagagaagccatttcagagaagagattttttaaaaaatcatttcgttctttggcattgtcacaggattatgatgtgggttctcataaaaatttcactccccccaaagccacccaaaggaaaggcagtgaaatggggaggaacacacatttgcctggcatcgcaagagctgccttgtagtcatgggttccagtgatcttggaccgatctcttcacttccctggacctcagtttcttccatacaaagaagttgaactggatcatagaaaagatgctgtccagcttggtaatatcagatagggagcagaagctgtctcttagcacatggccagattccggaacaacgatgatggtctccatgtttgtcctaaaaatgcatctcatctcagtagagattttcttccacctcatttgggtctcaatttaaggaaggaagaaaggaaagaaacccggggattctcttcttgaaaggaatatacttcactttctctaggcttctaggataaaaacttcctatccttcatttttcctctttaaacctgccaaaatcaagttgagtaaagataccatacagatatgaaaaagaagccacatccttaaattttcatggagtccaagagcctgctcaccgccagttagcttttcccaggatggtggtggcactgatcatctaggttgcacttttatgttcatgtcccagagcgtttcccatcagccatctcatttcatcttttcatcattcctctgaggaaaagacttcacacatgtataggactttctatatcacaaagtatttcatatccaatgtcttatttagatcttgacaatcactgtttaaggtaatttggcaagttattaatactcatgtcctcattttactgaagaggaaactgaaatgcagagagcttgtcttttgcccaggatcactcacccagtttattgggaggcagcagcacggggattaagaacatgggttatgccgacaaccaaccaggcagaattccagctctgtcagtagttagctgtctggccttaggaaagggatttcacacctctgtggcttagtttccttgtccattaaatgctcataagaatagagctttcctcacagagattgggtgggcacgggagctaaatgagctcatacgtttaagaacaacctctagcacacagtgattaataaatgtcattattattagcaaagccaggacctgggtcttccagcttctagctcagtggcatttctgctgccccacaccaggactatccttcgtatacaggtatgaacctaaagccttcagtgtttcaatgaaaagttcacccaaggtctttctgttcagtaagtctagagctaagggctcctggcactctgttcagtcctttcgctggtaaaccacgctgccctccgttgctctgggcagaatgtcaaaccttcttatgtttttaaaatttataaatcaagcactcttatttaatattactgacagcccgaaggcagacgctcccactctcctggggaagagggtcttctaatctgccatcttaaggaggtaaaagggcttgattgggtaactcattgcaatgggcacgtatttattactgtctcccggccttttctcatgctgtttgtctgctggaattaccactagtgccaggccatttgaatatttgaccatttgtcttagaattctctgaatacaaatgtttttcatacctttactatgtactttttaagaatgaagactatgttgcatgttggtttgtactctctcctgcacataaaaaatgcttagtaaatagatacacaaatgtttcttgattcctaa

SEQ ID NO: 11162 - DNA, 204 bp, Homo sapiens
tccttttccttttcctcttctatatctcagctcccttttcctccattatttgaatataaatccccaagaaatcatgaggcctttatagccgagcctcctgccatccattggtaaccttggtttgtggtcatgctgtggctaagaagtttgccaggagataaaaaccaaggatcaaaattaacctccagggcaggagtgagagag

SEQ ID NO: 11163 - DNA, 559 bp, Homo sapiens
gctatttagattaacatgatgcccccagattgtaaaggactgacacttgcccccatgttcaatctaatatgtggtagattgtattttccaggatggccacatctcccttcccacatgctcttcttacaatatggtcatgacattcctcacgtagagagatgtgtctcctgttcctttcctcttgaatctgggcaggctcgtcactacagtggaagtgattccatgtgatttctgaggctagatcataaaaggtgatgaggcctctgcctaactaggggaaatgctttctcttgagatgctcactcttgaccagcctatagagagatccacagggaggaactgaggccccagcccacagccttggttgagctccagcctgcagtcatccccaacttgccagccatatgagtgggccatcttagaagcagatcctccagtcaagccagcccagctgatgctgtgtggagtggagacaagccttctgtgctgagccatgcaaaaaattgcagatttgtgaacgaaataaatgattgttattgttttaagctaaaaaaaaaag

SEQ ID NO: 11164 - DNA, 524 bp, Homo sapiens
attaatttcaaccagacaggatgaaacagagtagcaatgatggtttccattctttgacttcctttctgttataaaataacaacatggttcaaggagctatgtctgggacattaacaaagccaaaatcttgattagcaagatgtaatgttgaaagtactggttccaagcttcctgaaataatggagagatgataaaatagaaagtttaatagaaaagtataattaatggtaagaatagcagtttacatttcttgattattaatcaatgccaaggatgtatattcagtctagaatttacagccctcaatatcttaaactcaccctacctttcaccctacctcaccctatcctacctcaccctaccttatgtctcaacagattcccctccccatagctaaaccttccacgcgcagggttctggccagccttgactattcatctttcccacactattcaatattttctggatttcatatatcaattatgcctcctccttgctttctttttctattttgttaaaattct

SEQ ID NO: 11165 - DNA, 665 bp, Homo sapiens
gaaagcatcatgatgctttcttttgtatcttctttcgtttcttctttttctttttcaatttcagcaacatacttctcaatttcttcaggatttaaaatcttgagggattgatctcgcctcatgacagcaagttcaatgtttttgccacctgactgaaccacttgctcgtgcactttacacacatgagagaattggaagctaaagctaccaaagacgtagaaagaaatcttagcagggatttagtgcaagaagaagaacagttgatggaagaaacagaaaaagaaaaaagacgacaagaaaaagaaggaagctgctcaaaagaaggccactgaacaaaaaatcaaagtgccagaacagataaagcccagtgtaagccagcctcagcctgccaactctaataacggcacttccacagcaaccagcactaataataatgccaagcgagctacagccaacaatcagcagccacagcagcagcagcaacagcggctcgggcctctccccgcggcgctgcggagggcttgagctcgcgagcctccttcgccgcgccccacttgctcgtgcactttacacacatgagagaattggaagtaaagctaccaaagacgtagaaagaaatcttagcagggatttagtgcaagaagaagaacagttgatggcaagaa

SEQ ID NO: 11166 - DNA, 2181 bp, Homo sapiens
  misc_feature (307)..(307): n is a, c, g, or t
gaattccgcctcccaaagtgcacgattacaggcgtgagccacgataaagatttcttttggacacagtaataacttcacttctgtttactgagtggttacaacacactgggcacttgaccaagactgttgctactttatggaggagaaagacacagaggtaactcagatggtgaatagtgggctgttttaattccagggtgggagctcttaacccttgaatggagatttttctctgagtgccctcaccagtaacatgggggtgtttcacttcacttatctgacagtggtatctgtgaggatacattanagcatttcatagaaacattcaactgctaccaaagtataaggtggtattgtgtcagtcattaacgaatagccactgtttatatagccttatgttctgtgttttataaacatgaagacatttaaccttaggatagctctgcaaggtgtaggtactatctccattttaccgagaaaacagcaggctcagttaggtttatacaacttgcccaaagacagaaagcttgtaaaggcagggctggggttgaaacctggcaccaaaagctcatacaccatgcatctctgtacttctccaactgggtttacttacactagcttaaggcatttccatccgttttatttctttctttccactcttttatgagtcaaaaatttccctatttgcagtttccgatttatttttcagatttaagatagagcatccagattatttatctcattttgattcatctcatagataacgttatctttgtctttagttccatgttctgagtttgtcttatatgattcagatattacatttttagcaaatacagacattgttaacttagcctttttgtaagaaaaccagcaggttgttttctaaccttgtgttgttcttgtgttgtcttccaaagatgaaaaatagagaccaaacacattaacaatgaggcagaataagaacagttgccaaggaatagaggattcccttaggactactgaaaattggttggccacatttgttctttgagtcattgcgagttccctggttttgtaatgatccgatgatgatgtctttgaccagagagtaatgtggtaaaagagatagtgaacatgagttgttgtcttggccgaaggtccctgggcccttattgggtaggtaggtagcagaagtgaaatatgactcttggcagtgacatctcctaacaaaatttgagcctgtaaatgaggatatccctgctcacagaaagcttctgtttttttaggattatttttcttagtgcctttgaatttagatggcttactttggaggtacactttactggctaatcttttccaccccttttcttttgttgggattagtgccagaacagataaagcccagtgtaagccagcctcagcctgccaactctaataacggcacttccacagcaaccagcactaataataatgccaagcgagctacagccaacaatcagcagccacagcagcagcagcaacagcagcagccgcagcagcagcagccacagcagcagccacagccgcagccgcagcagcagcagccacagcagcagccacaggccttgcctcggtatcctcgtgaagtacctccacgatttcgccaccaggaacacaaacagcttctaaagaggggtcagcattttcctgttatagcagcaaaccttggatctgctgttaaggtgttaaacagccagtcagaaagcagtgctttaacaaatcaacagccacaaaataacggagaggtgcagaacagcaaaaaccagtcagtgaataagtagcagatcctggactcacatcaagatctgtctgactccaaagatatgcttgtaaccaccatgctgtgctttggcaacatacaggatgtgattggtaatgaggaagaggacacaaatatataaaccacagtacttcaggatcccattatgaaaattcccagcggggacctgtgtcttctacaagtgattctagcacaaactgtaagaatgctgttgtaagtgacttgtcggaaaaagaagcatggccctcagcccctggcagtgatccggagttggcttcagaatgtatggatgctgattctgcctccagttctgaatcagagagaaacatcactatcatggcttcagggaacacaggtggtgaaaaagatggccttcggaa

SEQ ID NO: 11167 - DNA, 1006 bp, Homo sapiens
gcggcggcggcggcagcgggtcggtgtagaaaatggcgctggtgcagcggctcgggcctctccccgcggcgctgcggagggcttgaggctcgcgagcctccttcgccgcgccccacttgctcgtgcactttacacacatgagagaattggaagctaaagctaccaaagacgtagaaagaaatcttagcagtgccagaacagataaagcccagtgtaagccagcctcagcctgccaactctaataacggcacttccacagcaaccagcactaataataatgccaagcgagctacagccaacaatcagcagccacagcagcagcagcaacagcagcagccgcagcagcagcagccacagcagcagccacagccgcagccgcagcagcagcagccacagcagcagccacaggccttgcctcggtatcctcgtgaagtacctccacgatttcgccaccaggaacacaaacagcttctaaagaggggtcagcattttcctgttatagcagcaaaccttggatctgctgttaaggtgttaaacagccagtcagaaagcagtgctttaacaaatcaacagccacaaaataacggagaggtgcagaacagcaaaaaccagtcagtgaataagtagcagatcctggactcacatcaagatctgtctgactccaaagatatgcttgtaaccaccatgctgtgctttggcaacatacaggatgtgattggtaatgaggaagaggacacaaatatataaaccacagtacttcaggatcccattatgaaaattcccagcggggacctgtgtcttctacaagtgattctagcacaaactgtaagaatgctgttgtaagtgacttgtcggaaaaagaagcatggccctcagcccctggcagtgatccggagttggcttcagaatgtatggatgctgattctgcctccagttctgaatcagagagaaacatcactatcatggcttcagggaacacaggtggtgaaaaagatggccttcggaa

SEQ ID NO: 11168 - DNA, 387 bp, Homo sapiens
gcggcggcggcggcagcgggtcggtgtagaaaatggcgctggtgcagcggctcgggcctctccccgcggcgctgcggagggcttgaggctcgcgagcctccttcgccgcgccccacttgctcgtgcactttacacacatgagagaattggaagctaaagctaccaaagacgtagaaagaaatcttagcaggtaagatgggcgagctttccgtctcccgccccacgataatcgtatatttctactccgattcgccttttctgggttgagaagttcccccgtgacattttcttccgcacccggagagcagacattcgggagaagcggcctgggggaatactggagggattgcggggagatgcgtaattacgcgtgtgtttctttcttta

SEQ ID NO: 11169 - DNA, 262 bp, Homo sapiens
ttgtttttttgtttcagagaattggaagctaaagctaccaaagacgtagaaagaaatcttagcaggtaagatgggcgagctttccgtctcccgccccacgataatcgtatatttctactccgattcgccttttctgggttgagaagttcccccgtgacattttcttccgcacccggagagcagacattcgggagaagcggcctgggggaatactggagggattgcggggagatgcgtaattacgcgtgtgtttctttcttta

SEQ ID NO: 11170 - DNA, 1460 bp, Homo sapiens
tgcgctccgccgctcgcgcctcgggctcggctcgggctccgggatgtccgcgctgtgcgaccctcccggggccccagggccacctgggcctgccccggccacccacggtcccgcgcctctcagtgctcaggagctgtcccaggaaatcaaggcttttctgactggcgtagaccccattctgggccaccaactctcagcccgggaacatgctcgctgtggtcttctcctgctccgttctttgccacctgctcgggctgctgtgcttgaccacttgagaggtgtctttgatgagagtgtccgggcccacctggctgccctggatgaaacccctgtggctggtccacctcacctccgtccacctccaccctctcatgtccctgctggtggacctggtctagaggatgtggttcaggaagtgcagcaggtgctgtctgagtttatccgggccaacccaaaggcctgggcacctgtgattagtgcatggtccattgacctcatggggcaactgagcagcacgtactcaggccagcaccagcgtgttccccacgctactggcgctcttaatgaactgctacagctgtggatgggttgtagggccacgcgtacattaatggacatctatgtgcagtgcctctcggctctcattggtagctgcccagatgcgtgtgtggatgccttgctggatacctctgttcagcattctccacactttgactgggttgtggcacatattggctcctcttttcctggcaccatcatttcccgggttctctcctgtggccttaaggacttttgtgtccatggtggggctggaggtggagctggcagtagtggtggaagctcttctcagaccccctctacagaccccttccctggatctcctgccattcctgcggagaaacgggtgcccaagattgcctcagttgtaggcatcctaggtcacctggcctcccgccacggagatagcatccgacgggagctcctgcgaatgttccatgatagcctggcagggggatctggaggccgcagtggggacccctcccttcaggccacggttccgttcctactgcagctggcagtcatgtcaccagctttgctgggcactgtctctggagagcttgtggattgcctcaagcccccagctgtgctgagccagctgcagcaacaccttcaaggattcccccgagaggagctggacaacatgttgaacctggctgtgcacctggtgagccaggcctctggggcaggtgcctaccgcttgctgcagttcctggtggacacagctatgcctgcttcggtcattaccacccagggcctggctgtgccagaccaccgtgcgtgaggcttgtgaccggctaatccagctgctgctgctgcacctgcaaaaactggttcatcaccggggaggtctcctggggaaggggtgctaaggcccgcccccaactccccgcttgggtgcc

SEQ ID NO: 11171 - DNA, 413 bp, Homo sapiens
tttttcttatgagggaagtatttttattatccctatttaacataaaaggcaaagctcatacaggaaaggtaagttgcctaacatctcacaacactcttaagtctgtttcttttgcttccttgtagtgctcaggagctgtcccaggaaatcaaggcttttctgactggcgtagaccccattctgggccaccaactctcagcccgggaacatgctcgctgtggtcttctcctgctccgttctttgccacctgctcgggctgctgtgcttgaccacttgagaggtgtctttgatgagagtgtccgggcccacctggctgccctggatgaaacccctgtggctggtccacctcacctccgtccacctccccttctgtcgtcttctgcgtcagcccgtgtcgacgcggccgcgaattc

SEQ ID NO: 11172 - DNA, 1462 bp, Homo sapiens
tttttcttatgagggaagtatttttattatccctatttaacataaaaggcaaagctcatacaggaaaggtaagttgcctaacatctcacaacactcttaagtctgtttcttttgcttccttgtagtgctcaggagctgtcccaggaaatcaaggcttttctgactggcgtagaccccattctgggccaccaactctcagcccgggaacatgctcgctgtggtcttctcctgctccgttctttgccacctgctcgggctgctgtgcttgaccacttgagaggtgtctttgatgagagtgtccgggcccacctggctgccctggatgaaacccctgtggctggtccacctcacctccgtccacctccaccctctcatgtccctgctggtggacctggtctagaggatgtggttcaggaagtgcagcaggtgctgtctgagtttatccgggccaacccaaaggcctgggcacctgtgattagtgcatggtccattgacctcatggggcaactgagcagcacgtactcaggccagcaccagcgtgttccccacgctactggcgctcttaatgaactgctacagctgtggatgggttgtagggccacgcgtacattaatggacatctatgtgcagtgcctctcggctctcattggtagctgcccagatgcgtgtgtggatgccttgctggatacctctgttcagcattctccacactttgactgggttgtggcacatattggctcctcttttcctggcaccatcatttcccgggttctctcctgtggccttaaggacttttgtgtccatggtggggctggaggtggagctggcagtagtggtggaagctcttctcagaccccctctacagaccccttccctggatctcctgccattcctgcggagaaacgggtgcccaagattgcctcagttgtaggcatcctaggtcacctggcctcccgccacggagatagcatccgacgggagctcctgcgaatgttccatgatagcctggcagggggatctggaggccgcagtggggacccctcccttcaggccacggttccgttcctactgcagctggcagtcatgtcaccagctttgctgggcactgtctctggagagcttgtggattgcctcaagcccccagctgtgctgagccagctgcagcaacaccttcaaggattcccccgagaggagctggacaacatgttgaacctggctgtgcacctggtgagccaggcctctggggcaggtgcctaccgcttgctgcagttcctggtggacacagctatgcctgcttcggtcattaccacccagggcctggctgtgccagaccaccgtgcgtgaggcttgtgaccggctaatccagctgctgctgctgcacctgcaaaaactggttcatcaccggggaggtctcctggggaaggggtgctaaggcccgcccccaactccccgcttgggtgcc

SEQ ID NO: 11173 - DNA, 419 bp, Homo sapiens
gtctccatgccaacctctcccctgaactccaaactcacgtaccagctgcctgcatggatgcctaatggatatccccaaaccgaatgtgtcccagatggaactcaagcccattcctcctgccactttcctgacctcagcagagggcaatcccattttggcagttcttccaaataaaaaacaggataccactttgacccatctgtcatgaccttcagcagactccgttggttccacctgcaaaccataaccaccttccaagccagcatttgctcttcccactgtaggccagcttggcccttaaggaacatcagtcgggtctgggtgtgtccccagggcctggaaatctcccaggcccacatgacctgagtgtccgctccggtcaggccctgtggccccacagaggacaggcacacctgtcg

SEQ ID NO: 11174 - DNA, 424 bp, Homo sapiens
gggggtggggtaaagagaaggttgttcctttgggttggatcacaggggtgagtatacaaggcagcagcagctgctggctctggagctctggttgctacgtgagaagcttgagtagtgctggctgctgtctccagggaaggacagcagtgcagcgtccattaatgctgctggctgcagggagcagcacttaggcgatggctgcttcaggactaagaagaaaccttgcttttctgggaattttcactgctgagctggtttgctttttattggtggggagatgggaattagtaattcataatctcctacccatttatggatattggcatctggaaactggatcatggttaaagcctttctttttttgtttgtttgatttgatttttgttttttggcagatttttgttttttatctagacatttgtgc

SEQ ID NO: 11175 - DNA, 418 bp, Homo sapiens
aaccagaagcactgaatgaaaagatttaaaatttactgcaggttttaaaaagaaagtgcaaagttaaacaacatgacaaagaaggagaaagtaacttatatcgcagatacaaaggcttcctaagaatctaggaggaaaatggaaaatgctcagtttcattcagaagagaaatgtaaattgaaactttactggcataccactttttatttataaggtttgcaaaaaaaaaaaaaaatccagaagctcattaacatattctaatagtgagcctggaccgatcaaataccactgaagagaatgcaaaatggtgcgccacctctggagaggaatttggcaatatctagtaaaattacatacacactttaccctttgcactctgcattcccactcctaggattttatcccaaagttaaactgg

SEQ ID NO: 11176 - DNA, 261 bp, Homo sapiens
agcacccatcaggagtataaggaatttttctagacttaatgtatttatttgctttagcaacagccgtagaaggttgatgattgagtaggagcgaacacacagcttaaaccttaggctttggagaatcgaaggtccatagtcctccaaatgtgcgtgtgaaacaagcagctaaacgtgagaaaccatgaggctgagttgacaaccttaagttggtcatgattgagggaaatggatagtgggttttgtgtgcgtgggtttttt

SEQ ID NO: 11177 - DNA, 277 bp, Homo sapiens
gaggttgcagtgagctgagatggcgccactatactccagcctgggcaacagagcgagactctgtcttaaacacacaaacaaaaatgaccatccatatgacccagcaatctcactcctaggcatatacccaaaagaactgaaaacaagtgttcaaacaaaaatcggtacacaatgttcacagcgcattattcacaatagccaaaaggtagaaacaactcaaatatccatcaactgatgaaatgaaatgtgctatatccaaacaatagaatattagcta

SEQ ID NO: 11178 - DNA, 354 bp, Homo sapiens
agtcctttccccctcccgtcctgtccccatcagtgttgaaatgtatgctacagttattatggttgtaatttgttatgccatgttgatcttcttgtgcttttcatatcagaacaatgcatttttaacattctgactttctttttctctcaattggtaactgactatatagaaaatttatatttatggatactatttcttttttaataagttcaagggaaaacattgataaaggaaaatttatcctttcaactttctttaggtgccagcattattttcatattaggaagcaggagaaagttaaggaactctgagcaatactagaatggttatatatatttaagtttgtattaaacc

SEQ ID NO: 11179 - DNA, 470 bp, Homo sapiens
gtgtactagaacattcaaagaaaactaagaggggagagttaactataaaataataaactaatgatattgggttcatatgtaccttacacaatatatgttatatgctttgagctgtgcacaacctttctaccttactgagctttattagaatttcagactctattctggtgtcctctctttttaatttttcagaattaatctagtcagggaaaggtatagtctcattatttctttcttagacaacctatgtaggttagctgacagcctcaaagaactcacttgacattcaatgtaagtatgttttagaagtgtcttaaggcttctcctaggagacaggttcaaaaatggtgaggccaggcgcggtggctcacgcctgtaattccagcacttgggaggccgaggtggaggattgcttgagcccaggagttcgagaccagactgggcaacattgtaagaccctgtctttatta

SEQ ID NO: 11180 - DNA, 605 bp, Homo sapiens
attgaatgtcattttactttctggcatgtgaaccaagtgattacaacagattcctggatctcatgtcaaagattcctttgatgtgagaatctgaacatttatttatatctatagatttacaattttagtccattttgagagttatagtatctcttgttacatattgttacattgaattatagatctattcataggcaactttaaatgcccgtagcttttgagtttgagctgttacataggtagctgcatggctttttctgaacatccacaaagtaattactattcaaagtgcatactaataaatcaatgaagcctccacattatttgggaagtagtcaatcaaaggctaaattcaatgttatgataacttttaggcagtagttctttagacttctgtatttaattgaacagaaaaaatgtaaaaaaaggggaggagattgatagggacatcattaataaaacaactactatctactatcactatcatttaacaaaaggacattttaacaccaggaaaaggggaggggtctcagtgtaggggctctacccttttaaggttaaattaaatttaaggttttatttatagacctttatgttgtatttat

SEQ ID NO: 11181 - DNA, 724 bp, Homo sapiens
ggtttggtttaaagctacagaaaggagagagctagagaagaagaaaaaaggtattttgcctgaggacttgaagcttttttttttcccttttcctccgcatgactgactttctcacactcagattccctccagcctgccagagacgtggtagctgccctgccaagagctatcctgggagggctattgaacgagctttgagtaagtacacacacggtggattttctcctcccctcggtacctgctctgcacctgtacagggagcagtcccacacatatcacctgatcacagccctttcagggaccgtgagaaaaataaagcccaggatagaaaagacatgtttgtcatctctccagggctgcagccagcttccagcagtcccagtgcccagaaacagcacattccaggccggctgtgcatgcatgtttgctggggcgcgtgccaggtgggggtgctgggaaggggggggcaactagaggtcacctttgtaatgaccaccttgctgcccccgttctctggcatgtgctgactggtagcttgagaaccctctactagaatcagtatcatagtctttctagatagcagtctgtatgtgctgatcgcagaattcataaccaggatttttttttttttacctataaagcccctgaaatggaatttcaacgtgtgtctgtatgtgcatatttaacaggagcttaataaatattttccaaatgcataaatgga

SEQ ID NO: 11182 - DNA, 444 bp, Homo sapiens
ctgctttgagaaggagccctgcagtgccttgggccttgccaccttccacggtggtctgagtcaagtcttttgggcttccacttggccaggataggtgttgcttggtggcttcactttctgggcacaggcttatcctcttatggcagagggagcacttccctttaagaatgaggcttgaacaattaaaaaaaaaaacacattatttagaatccagctttgaatccaacactccccagcaatgccagactgaatgcatgagattcctcatgctgcagtgccctgagccctgcctggacctgggatctggctgtcactgagcacaaatagggccactgtgtccaagtgctgcctttggaagtggaaatgtattttcagattttgttttcctttcctgtgatctttgtaaatttgggacaagtcctttggattgcttaagtgtttttc

SEQ ID NO: 11183 - DNA, 341 bp, Homo sapiens
aatacctgaggctgggtaattcataaggaaaagaggtttatttggcttccaattctgcaggctgtacaagaagtatggcagtgctatctgcttatggagacggactcagacagcttctagtcatggcagaaaggggaaggggagatggcttgtcacagggtgacagaaggagcaagacagaggggagagaggtccaaaactctttaacaatcagatcttgagaggactaagagtgagaattcactcaatcctgagataatagctccaagccattcgtgaggtatctgccctcatgacctaaacacctcccactaggccccatctttagcattggggatcaa

SEQ ID NO: 11184 - DNA, 403 bp, Homo sapiens
tcacgcttgtaatcccagcacttttggaggccgaggtgggtggatcacgaagtcaggagatcgagaccatcctggctaacatggtgaaaccccgcctctactaaaaatacacacacacacacacaaaaaaaaagccgggtgtggtggtgggcgcctgtagtcccagctactcaggaggctgaggcaggagaatggcgtgaacccgggaggcggagcttgcagtgagccaagattgtgccactgcactgcagcctaggtgacagagcgagactctgtctcaaaaaaaaaaaaaaaaagtagaggctgagaagtgtccagaaggtgagtacatacgagaagaatgagtcctgtttgattgccagcatagcaggatctaaccgtgtgcttccccctccttgagagc

SEQ ID NO: 11185 - DNA, 333 bp, Homo sapiens
  misc_feature (189)..(189): n is a, c, g, or t
actctgagcgcagtttgcttcagtgtccccagcagtttttgctcagtgtccccacgctgaattcttgaaaactcctccaactgcagatcagcctcccccacggcctgcagctcctgtcctccccacaaacactgtgtcctcagcaaagcctggcccagcactggtgaagcgccatctcctgtgacacanacactccagcgacagtttgcttcagttgtccccaacagttcctgaattcttgaaaactcctccaactgcagatcagcctcccccacggcctgcagctcctgtcctccccacaaacactgtgtcctctattggcttagccaatcg

SEQ ID NO: 11186 - DNA, 2100 bp, Homo sapiens
ttccaggttcacaataaaggtgctaagaaagagaatgtaagacaggaaaataattaaatattcttaccgagtgtcttcaataggccgtgtttaagaggcgtcttacactccctgttgccagtggctggaacacaatggatcacacaggggcgatagacaccgaggatgaagtgggacctttagcccatcttgctccaagtcctcagagtgaagctgtggctcatgaattccaggaactctccttgcagtccagtcaaaacttaccccctctgaacgaaaggaaaaatgtgctccagctgaggctgcaacaaaggaggacgagagaacaactagtggaccagggcatcatgccacctttgaagagcccagcggcattccatgaacagataaaaagcttggaacgagccagaactgaaaactttttgaaacacaagattcggagtcgaccagatcgttctgaacttgtcaggatgcacattttagaagaaacatttgcagagccatccctgcaggctactcagatgaagttgaaaagagctcgactagcagatgatctgaatgaaaagattgctcaaagacctggtcctatggagctggtagagaaaaacatccttcctgtggactccagtgttaaagaagcaattataggcgttgggaaggaggactatccccacactcagggcgatttctcatttgatgaagacagcagtgacgctttgtctccggaccagcctgcgagtcaggagtcacaggggtcagccgcgtccccaagtgagccaaaagttagtgaatcgccatctcctgtgactacaaacactccagcgcagtttgctcagtgtccccacgctgaattcttgaaaactcctccaactgcagatcagcctcccccacggcctgcagctcctgtcctccccacaaacactgtgtcctcagcaaagcctggcccagcactggtgaagcaaagccatcccaagaatccaaatgacaaacaccgtagcaaaaagtgcaaagatcccaaaccacgggtaaagaagttaaagtaccaccaatacattccaccagatcagaagggtgagaagaatgagccgcagatggactctaactacgcccgcctgctccagcagcagcagctgttcctgcaactgcagatcctgagtcagcagaagcagcactacaactaccagaccatcctgcctgcaccattcaagccactcaatgacaaaaatagtaacagtgggaattcagctttgaacaatgccacacctaacacaccaagacagaatacatctactcctgtgagaaagccaggacctctgccttctagcctggatgacttaaaggtatcagaactgaagacagaactgaagttaaggggtctgccagtgtcaggcaccaaaccggacctcattgagcgcctaaaaccctaccaggaagtgaacagcagcggccttgctgctgggggcatcgtggcagtgtcatcatcagccattgtcaccagtaacccagaagtcactgtggccttgccggttacaacactacacaacactgtgactagctcagtctctactctcaaggcagaattgccacctacaggaaccagcaacgcaacccgtgtggaaaatgttcattcccctctgcccatttcaccatctccctccgaacagtccagtctcagtactgatgacacaaacatggcagacactttcaccgagattatgaccatgatgtcgccttcacagttcttgagttcatctcctttgagaatgacaaataatgaagacagtctgagtcccaccagcagcactctgtcaaacctggaactggatgcagccgaaaaggatcgcaagcttcaggagaaagagaagcaaatcgaagagctgaagaggaaactggaacaagagcagaagctcgtggaagtgctgaaaatgcaacttgaggttgaaaaacgagggcagcagcagcggcccctggaagcccagcccagtgccccaggtcattctgtcaagtcagatcagaagcacggcagccttggctcctccatcaaagatgaggcctcactccctgactgctccagctccaggcagcccatcccagtagcca

SEQ ID NO: 11187 - DNA, 1349 bp, Homo sapiens
  misc_feature (1146)..(1146): n is a, c, g, or t
ttccaggttcacaataaaggtgctaagaaagagaatgtaagacaggaaaataattaaatattcttaccgagtgtcttcaataggccgtgtttaagaggcgtcttacactccctgttgccagtggctggaacacaatggatcacacaggggcgatagacaccgaggatgaagtgggacctttagcccatcttgctccaagtcctcagagtgaagctgtggctcatgaattccaggaactctccttgcagtccagtcaaaacttaccccctctgaacgaaaggaaaaatgtgctccagctgaggctgcaacaaaggaggacgagagaacaactagtggaccagggcatcatgccacctttgaagagcccagcggcattccatgaacagataaaaagcttggaacgagccagaactgaaaactttttgaaacacaagattcggagtcgaccagatcgttctgaacttgtcaggatgcacattttagaagaaacatttgcagagccatccctgcaggctactcagatgaagttgaaaagagctcgactagcagatgatctgaatgaaaagattgctcaaagacctggtcctatggagctggtagagaaaaacatccttcctgtggactccagtgttaaagaagcaattataggcgttgggaaggaggactatccccacactcagggcgatttctcatttgatgaagacagcagtgacgctttgtctccggaccagcctgcgagtcaggagtcacaggggtcagccgcgtccccaagtgagccaaaagttagtgaatcgccatctcctgtgactacaaacactccagcgcagtttgctcagtgtccccacgctgaattcttgaaaactcctccaactgcagatcagcctcccccacggcctgcagctcctgtcctccccacaaacactgtgtcctcagcaaagcctggcccagcactggtgaagcaaagccatcccaagaatccaaatgacaaacaccgtagcaaaaagtgcaaagatcccaaaccacgggtaaagaagttaaagtaccaccaatacattccaccagatcagaagggtgagaagaatgagccgcagatggactctaactacgcccgcctgctgctgtgtcatctcctagcccagcccaccntgccagggccaggacccagacttcagcaaatgtggctcacacagtgccggcacatgccgggacatgcggggtggctgttgtcatgggcgtctgccccttcacaccaggcagtggggctcagacccaccaggaaggtggccgttcagcccgagctcctgaaacggaatcccaggtcctggttggagagggacacccctgattac

SEQ ID NO: 11188 - DNA, 1052 bp, Homo sapiens
  misc_feature (979)..(979): n is a, c, g, or t
ttccaggttcacaataaaggtgctaagaaagagaatgtaagacaggaaaataattaaatattcttaccgagtgtcttcaataggccgtgtttaagaggcgtcttacactccctgttgccagtggctggaacacaatggatcacacaggggcgatagacaccgaggatgaagtgggacctttagcccatcttgctccaagtcctcagagtgaagctgtggctcatgaattccaggaactctccttgcagtccagtcaaaacttaccccctctgaacgaaaggaaaaatgtgctccagctgaggctgcaacaaaggaggacgagagaacaactagtggaccagggcatcatgccacctttgaagagcccagcggcattccatgaacagataaaaagcttggaacgagccagaactgaaaactttttgaaacacaagattcggagtcgaccagatcgttctgaacttgtcaggatgcacattttagaagaaacatttgcagagccatccctgcaggctactcagatgaagttgaaaagagctcgactagcagatgatctgaatgaaaagattgctcaaagacctggtcctatggagctggtagagaaaaacatccttcctgtggactccagtgttaaagaagcaattataggcgttgggaaggaggactatccccacactcagggcgatttctcatttgatgaagacagcagtgacgctttgtctccggaccagcctgcgagtcaggagtcacaggggtcagccgcgtccccaagtgagccaaaagttagtgaatcgccatctcctgtgactacaaacactccagcgcagtttgctcagtgtccccacgctgaattcttgaaaactcctccaactgcagatcagcctcccccacggcctgcagctcctgtcctccccacaaacactgtgtcctcagcaaagcctggcccagcactggtgaagcgccatctcctgtgacacanacactaatagttaataactgagatcaatttgtaagaaatgtttaattattcctgtagcataacatctggccct

SEQ ID NO: 11189 - DNA, 628 bp, Homo sapiens
ttccaggttcacaataaaggtgctaagaaagagaatgtaagacaggaaaataattaaatattcttaccgagtgtcttcaataggccgtgtttaagaggcgtcttacactccctgttgccagtggctggaacacaatggatcacacaggggcgatagacaccgaggatgaagtgggacctttagcccatcttgctccaagtcctcagagtgaagctgtggctcatgaattccaggaactctccttgcagtccagtcaaaacttaccccctctgaacgaaaggaaaaatgtgaacattcctccatgttattaaatgttcctctcagctgggcatgatggctcacacctgtaatcccagcactttgggaggctgaggtgggaggatcatttaaggccaggagctcgagaccagcctgcacaacatagcaagactcctctacaaaaaatgtttaaagtagctgggcgtggtgatgcacgcctgtagtcccaactactcagaaggcaagagagaggttcccttgcaaccacaatctgggtgacacagccagatcctgtctttccctgtctgttaaaaaacaaaaacttctgaaataaaattactttttacttctttggctcattgtaagcact

SEQ ID NO: 11190 - DNA, 587 bp, Homo sapiens
ttccaggttcacaataaaggtgctaagaaagagaatgtaagacaggaaaataattaaatattcttaccgagtgtcttcaataggccgtgtttaagaggcgtcttacactccctgttgccagtggctggaacacaatggatcacacaggggcgatagacaccgaggatgaagtgggacctttagcccatcttgctccaagtcctcagagtgaagctgtggctcatgaattccaggaactctccttgcagtccagtcaaaacttaccccctctgaacgaaaggaaaaatggaaattttcatcgctcacagagatattccagagtctccagaagacacaatactgtcaatttttaacataaacaaatagagatagatgacatatacttttaatacttaagatacaaaatctaacaaagtaatgttaaaatttgcaaacactctaagcatgcacattaaaaaatagaattaaggtttttttctggaattactataccttccacagttctgatgagtcccacactcacaagtatatttgtaaatttcagttttttaaaagccagaagaaataaaactgctttccctgcagag

SEQ ID NO: 11191 - DNA, 397 bp, Homo sapiens
tctttggtagtgacgttacctttggaaataatctttagattcagccattttagcacaagcagatgatttcatgctggaatggcattggaaagtaggttcctgtgctgatgccggggaagtacattgtggatatgactgcattctcctcccactttctccatctccggtgtgttgcaccgtaatttcacaagtggcaaagctatctcagtgatgactaagaagtcaggagcttcttatttgagtatttattatattaatgggtattggatatagtcatattctcagtctttggctgcctcatctttgtctacaaaatgaatattttctattcattatctgttcaggaaattttcatcgctcacagagatattccagagtctccagaagacacaatact

SEQ ID NO: 11192 - DNA, 5541 bp, Homo sapiens
ggcaaacgccagcaacagcccctcgtcactgcggctcctgaatgagccacagaagcgggactgtggcagcaccggggcaggcactgacaacgaccccaacatctacttcctgatccagaagatgttctacatgctgaacaccctcacgtccaacatgtcccagctgcacagcaaggtggacctgctctcccttgaggtgagccgcatcaagaagcaggtgagccccactgagatggtggccaaattccagccgccccctgagtaccagctcacagccgcagagctcaagcagatcgtggaccagagcctgtcagggggggacctggcctgccgcttgctggtgcagctcttccccgagctcttcagcgacgtggacttctcccggggctgcagtgcctgtggctttgcggccaagcgcaagctggagtcgctgcacctgcagctcatccgcaactatgtggaggtctactacccctcggtgaaggacacggctgtgtggcaggccgagtgcctgccccagctgaacgacttcttcagccgcttctgggcccagcgggaaatggaggacagccagcccagcggccaggtcgccagcttctttgaggcagagcaggtggaccccggccacttcctggacaacaaagaccaggaggaggccctgtctcttgaccggagcagcaccatcgcctcagaccacgtggtggacacgcaggacctcactgagttcctggacgaagcctcctcaccaggcgagtttgccgtcttcctcctccaccggctcttccccgagctcttcgaccaccgcaagctgggtgaacagtacagctgctacggggacggtggaaagcaggagctggacccgcagcggctgcagatcatccgcaactacacggagatctacttccctgacatgcaggaggaggaggcctggctgcagcagtgtgcccagcgcatcaacgacgagctcgagggcctggggctggacgcgggcagtgaaggcgaccccccgcgtgatgactgctacgactcctccagtctgcccgacgacatctcagtggtcaaggtggaggacagcttcgagggcgagcggccgggtcgccgctccaagaagatctggctggtgcccatcgacttcgacaagttagagatcccccagcctgacttcgaggtgcccggtgccgactgcctgctcagcaaggagcagctacgcagcatctacgagagcagcctgtccatcggcaacttcgcctcgcgcctgctggtgcacctgttccccgagctcttcacgcacgagaacctgcgcaagcagtacaactgcagcggctccctgggcaagaagcagctggacccctcccgcatcaagctcatccgccactacgtgcagctgctctacccacgcgccaaaaacgaccgcgtctggaccctggagttcgtgggcaaactggatgagcgctgccggcgccgggacacggagcaaaggcgctcctaccagcagcagcgcaaggtccacgtgccgggccctgagtgcagagacttgaccagctatgcaatcaaccccgagaggttccgggaggagtttgaggggcccccactgccccccgagaggagcagcaaggacttttgcaagatccccttggacgagctggtggtcccctcgcctgacttcccggtgccttctccctacctgctgtctgacaaggaggtgcgtgagatcgtgcagcagagcctctccgtgggcaactttgccgcccggctcctcgtccgcctgtttcccgaactcttcaccgccgagaacctccggctgcagtacaaccattccggggcttgcaacaagaagcaactggaccccacgcggctgcggctcatccgccactacgtggaagccgtctacccggtggagaagatggaggaggtgtggcactacgaatgtatccccagcatcgatgagaggtgccgccgccccaacaggaaaaaatgcgacatcctcaagaaagcaaagaaagtggagaagtgaaggcccgtgacctgcccagagattcggggtcaccagaggctgagcgatgggcacccttgggactgagcaatacttgggagcacgcctatggcatccacagacaggcaccttatgtccgtggggagtggcttactacatttgcacacgtaaacacccacccaaccgcaagaaagaagccttgagtttggtctcttgtacttacaacttctgtcctatgtgccccggcggggcagcctgagtgtggggagagcaagctgtgagggcagggaccagaggttaggggtcctctctccctggttgtgccctccccagcccctcacagcttataatgcaaacccagcaactctcttgcccctcttcccatattttacatcttccattttgacccatttttttttaattaaaaagaaacccttaaaaaaaatcattgggctctttgggggccattttacttagaaaaaaatctctttaaaagtgccatgttcgtgcacagtggctaatcatagcttcaggtggcatggatactgattttactgaccttgttttttacatctgattttggaagagtcaagatgccccttggatggcagtagaggggatggaatagtgcgaagtcctttacgaccacatgcaagttttcccttctgctctggtgccagggaaggcttccgttcagcttggcctgtccttcaggcgcgttggtagaatgttgtgtcactctttaggcgagaacactggatgatgatgatatgaatgtagacagccgtggaaacacgttcgcagtgtctccatctgagccgtgtccttccgctgcccccattccttctccatacatggttgctggttggagggagtggacatgtttccttggaaaacagtgcaggggcttttggcttcttgttagatttaagggtgggcctctttgagctcaccatgaactgtttacttttccgtgtgtgtatttgtacaaaatccaggttccgggagctttgtggtgacttccccagacctcagtgttagctactccaggcagtactacatcctcattcctcagggcgggcccaggtctgggcccctcttggggataccatgcattggaaggacacaggccattttagatggggtacacatgtcccttcccagggtccactcagaactttcctcttggactctctagaaggtcctgctgtcctatacctggccaccccctgccttggggggcacatgtcttcgttccctcccgactgggaatgtcaggctcctgcaggccagctgcatgctctccaggagcaccaactgggaaatcccctgacaggtaaagtcctttaaaatgatacttttacctacctaactctgggggccaaatgcttaagagggaaaggaaacagtcgaatgcaaacagtatgtcataccagagtcctggaaaatttattgaatcacacagggtagtcatagaacccctgtgggatggcttaatattttgctactttaaaatgcagagataacagaaacaatctggattttcttcattcagctgataagaacttcagttccagtggctgtatgacataattttgcctgtacccaggagcattttttaaaatacaggattttaaaagcaatgttaagttgctgatctaactagtaaatttgctcctaagtgtcatttacagattatttctgttgaaactgcaaacagatttagaaaggcacagggactgaatgactctctgtcttacacagctactcatgcacacacgcactgcttactaaaagctgaagtgagatgaagggggcctacacgaataacaagttcaacttctttgtgcctggaaaggagggactggagcagccaggagactcactttcccccctcgcttgggcccttctctatgccttagtctctccagcacatgcacacagcatgcacacacacgcaccctacccaaagacagctgtggccctctcccaccacctcccccttcccaccgctggttgttgggggctggaggcgggaggtcccatggaatttgttctggtttctaggatgtaaacgaggactccaagccatgaattgccctgctttctagagggtggaatgttgaccctgcaactttagaagcacaatcatttattaataatttttttgaaactcccatctacccctgttagagaaatcaacaggttctaggaattaaatatgtctctttgtaacccagagcatgttcaatttttggaaaccgtatttcagtgattttcttaataccttacatgtgtagggcatcttcccccagaatcttacagtccctttctgtgaagagaagtggacacacgtgggaactctcaccatctctggactgtcgtcaggaaacgcctgcaggtccttgccctgtctgtatggtgtcctcacttctccatccatacaggtggctccagtgggcatttttttattttaaattttttacatgaagcaatagaagtacaaaatacttattttttcaaaatttaatgtgttccatgaaacctgttggcagtcgctttccttcccccacatctaaattctttggtttttagttgtttgttttttggatttttttttttttttttttggccttgtatcccaaggactaaaagattagcacagacacgttttgatgttgaatgaactagtaagtcacagtaggtggtagtcttcattgatttctctgtaagtttttaaagaatgtatgaagatagtcacgaatgtactgagtgttcgcatcccccttcagttcaccttggctgtgtctacaggacaacaaatgtttgacagggaataaagtcgtgtctggtgtcatttgcgctagcgtgcccctcccctttcggtgttggctccaaaccttcctttccttttatgtttgtggggagtggggaaccacatcagcagcaatcatcaaccaaccaaccaatgggatctacttagtggtgaatagattggctatttaattggtaaaagttgctggtctgaccacaccacagcatgaccactgggttcatttagagatggcctccgtttccaacgttccccacaaatgtttgcttctttcccagtcaagaggggatctcgagactcccgagtggaggtcgtgagcttgcaccccgcctggctgtgtagatcgactgtatagatacatgaagtgggggtgagggccaaggggctattactgctgttgggaaatacttgcctctcgtagatccagccttaatgtttttctgacatcctagtaatagcagaccctgcacaaagtggatatcagacttaatactgtgaggagacaaaataatgagaatagttttaccaaagataatgaaatctcgcatcatgtctgcattttaccatagattggagtgcatccttaggaaactgaatgtaacaaaaacccaggacatttttggaaattgtatgctctctagcaactttgtgtgaatttttatacaaacactgttttatgagttatataaaatgttataaaaatagaaaaacatgg

SEQ ID NO: 11193 - DNA, 5044 bp, Homo sapiens
tgttatttattttgagatttatcatgagtactttgtgtactgtatcaataatatcttattgctgagtaatattccattgtatgaatataacatagtttatatacttgtggatttttcagaaacggggggttgtttctactgtctcacagttgcacaggccagaaagttctgggccggctttttctggtctaagatgtgatttcaggcagtggtggagttggcatcagacagccgctctccacagcccagttctcaggtgggacacgcaggacctcactgagttcctggacgaagcctcctcaccaggcgagtttgccgtcttcctcctccaccggctcttccccgagctcttcgaccaccgcaagctgggtgaacagtacagctgctacggggacggtggaaagcaggagctggacccgcagcggctgcagatcatccgcaactacacggagatctacttccctgacatgcaggaggaggaggcctggctgcagcagtgtgcccagcgcatcaacgacgagctcgagggcctggggctggacgcgggcagtgaaggcgaccccccgcgtgatgactgctacgactcctccagtctgcccgacgacatctcagtggtcaaggtggaggacagcttcgagggcgagcggccgggtcgccgctccaagaagatctggctggtgcccatcgacttcgacaagttagagatcccccagcctgacttcgaggtgcccggtgccgactgcctgctcagcaaggagcagctacgcagcatctacgagagcagcctgtccatcggcaacttcgcctcgcgcctgctggtgcacctgttccccgagctcttcacgcacgagaacctgcgcaagcagtacaactgcagcggctccctgggcaagaagcagctggacccctcccgcatcaagctcatccgccactacgtgcagctgctctacccacgcgccaaaaacgaccgcgtctggaccctggagttcgtgggcaaactggatgagcgctgccggcgccgggacacggagcaaaggcgctcctaccagcagcagcgcaaggtccacgtgccgggccctgagtgcagagacttgaccagctatgcaatcaaccccgagaggttccgggaggagtttgaggggcccccactgccccccgagaggagcagcaaggacttttgcaagatccccttggacgagctggtggtcccctcgcctgacttcccggtgccttctccctacctgctgtctgacaaggaggtgcgtgagatcgtgcagcagagcctctccgtgggcaactttgccgcccggctcctcgtccgcctgtttcccgaactcttcaccgccgagaacctccggctgcagtacaaccattccggggcttgcaacaagaagcaactggaccccacgcggctgcggctcatccgccactacgtggaagccgtctacccggtggagaagatggaggaggtgtggcactacgaatgtatccccagcatcgatgagaggtgccgccgccccaacaggaaaaaatgcgacatcctcaagaaagcaaagaaagtggagaagtgaaggcccgtgacctgcccagagattcggggtcaccagaggctgagcgatgggcacccttgggactgagcaatacttgggagcacgcctatggcatccacagacaggcaccttatgtccgtggggagtggcttactacatttgcacacgtaaacacccacccaaccgcaagaaagaagccttgagtttggtctcttgtacttacaacttctgtcctatgtgccccggcggggcagcctgagtgtggggagagcaagctgtgagggcagggaccagaggttaggggtcctctctccctggttgtgccctccccagcccctcacagcttataatgcaaacccagcaactctcttgcccctcttcccatattttacatcttccattttgacccatttttttttaattaaaaagaaacccttaaaaaaaatcattgggctctttgggggccattttacttagaaaaaaatctctttaaaagtgccatgttcgtgcacagtggctaatcatagcttcaggtggcatggatactgattttactgaccttgttttttacatctgattttggaagagtcaagatgccccttggatggcagtagaggggatggaatagtgcgaagtcctttacgaccacatgcaagttttcccttctgctctggtgccagggaaggcttccgttcagcttggcctgtccttcaggcgcgttggtagaatgttgtgtcactctttaggcgagaacactggatgatgatgatatgaatgtagacagccgtggaaacacgttcgcagtgtctccatctgagccgtgtccttccgctgcccccattccttctccatacatggttgctggttggagggagtggacatgtttccttggaaaacagtgcaggggcttttggcttcttgttagatttaagggtgggcctctttgagctcaccatgaactgtttacttttccgtgtgtgtatttgtacaaaatccaggttccgggagctttgtggtgacttccccagacctcagtgttagctactccaggcagtactacatcctcattcctcagggcgggcccaggtctgggcccctcttggggataccatgcattggaaggacacaggccattttagatggggtacacatgtcccttcccagggtccactcagaactttcctcttggactctctagaaggtcctgctgtcctatacctggccaccccctgccttggggggcacatgtcttcgttccctcccgactgggaatgtcaggctcctgcaggccagctgcatgctctccaggagcaccaactgggaaatcccctgacaggtaaagtcctttaaaatgatacttttacctacctaactctgggggccaaatgcttaagagggaaaggaaacagtcgaatgcaaacagtatgtcataccagagtcctggaaaatttattgaatcacacagggtagtcatagaacccctgtgggatggcttaatattttgctactttaaaatgcagagataacagaaacaatctggattttcttcattcagctgataagaacttcagttccagtggctgtatgacataattttgcctgtacccaggagcattttttaaaatacaggatttttacagattatttctgttgaaactgcaaacagatttagaaaggcacagggactgaatgactctctgtcttacacagctactcatgcacacacgcactgcttactaaaagctgaagtgagatgaagggggcctacacgaataacaagttcaacttctttgtgcctggaaaggagggactggagcagccaggagactcactttcccccctcgcttgggcccttctctatgccttagtctctccagcacatgcacacagcatgcacacacacgcaccctacccaaagacagctgtggccctctcccaccacctcccccttcccaccgctggttgttgggggctggaggcgggaggtcccatggaatttgttctggtttctaggatgtaaacgaggactccaagccatgaattgccctgctttctagagggtggaatgttgaccctgcaactttagaagcacaatcatttattaataatttttttgaaactcccatctacccctgttagagaaatcaacaggttctaggaattaaatatgtctctttgtaacccagagcatgttcaatttttggaaaccgtatttcagtgattttcttaataccttacatgtgtagggcatcttcccccagaatcttacagtccctttctgtgaagagaagtggacacacgtgggaactctcaccatctctggactgtcgtcaggaaacgcctgcaggtccttgccctgtctgtatggtgtcctcacttctccatccatacaggtggctccagtgggcatttttttattttaaattttttacatgaagcaatagaagtacaaaatacttattttttcaaaatttaatgtgttccatgaaacctgttggcagtcgctttccttcccccacatctaaattctttggtttttagttgtttgttttttggatttttttttttttttttttggccttgtatcccaaggactaaaagattagcacagacacgttttgatgttgaatgaactagtaagtcacagtaggtggtagtcttcattgatttctctgtaagtttttaaagaatgtatgaagatagtcacgaatgtactgagtgttcgcatcccccttcagttcaccttggctgtgtctacaggacaacaaatgtttgacagggaataaagtcgtgtctggtgtcatttgcgctagcgtgcccctcccctttcggtgttggctccaaaccttcctttccttttatgtttgtggggagtggggaaccacatcagcagcaatcatcaaccaaccaaccaatgggatctacttagtggtgaatagattggctatttaattggtaaaagttgctggtctgaccacaccacagcatgaccactgggttcatttagagatggcctccgtttccaacgttccccacaaatgtttgcttctttcccagtcaagaggggatctcgagactcccgagtggaggtcgtgagcttgcaccccgcctggctgtgtagatcgactgtatagatacatgaagtgggggtgagggccaaggggctattactgctgttgggaaatacttgcctctcgtagatccagccttaatgtttttctgacatcctagtaatagcagaccctgcacaaagtggatatcagacttaatactgtgaggagacaaaataatgagaatagttttaccaaagataatgaaatctcgcatcatgtctgcattttaccatagattggagtgcatccttaggaaactgaatgtaacaaaaacccaggacatttttggaaattgtatgctctctagcaactttgtgtgaatttttatacaaacactgttttatgagttatataaaatgttataaaaatagaaaaacatgg

SEQ ID NO: 11194 - DNA, 5141 bp, Homo sapiens
tgttatttattttgagatttatcatgagtactttgtgtactgtatcaataatatcttattgctgagtaatattccattgtatgaatataacatagtttatatacttgtggatttttcagaaacggggggttgtttctactgtctcacagttgcacaggccagaaagttctgggccggctttttctggtctaagatgtgatttcaggcagtggtggagttggcatcagacagccgctctccacagcccagttctcaggtgggacacgcaggacctcactgagttcctggacgaagcctcctcaccaggcgagtttgccgtcttcctcctccaccggctcttccccgagctcttcgaccaccgcaagctgggtgaacagtacagctgctacggggacggtggaaagcaggagctggacccgcagcggctgcagatcatccgcaactacacggagatctacttccctgacatgcaggaggaggaggcctggctgcagcagtgtgcccagcgcatcaacgacgagctcgagggcctggggctggacgcgggcagtgaaggcgaccccccgcgtgatgactgctacgactcctccagtctgcccgacgacatctcagtggtcaaggtggaggacagcttcgagggcgagcggccgggtcgccgctccaagaagatctggctggtgcccatcgacttcgacaagttagagatcccccagcctgacttcgaggtgcccggtgccgactgcctgctcagcaaggagcagctacgcagcatctacgagagcagcctgtccatcggcaacttcgcctcgcgcctgctggtgcacctgttccccgagctcttcacgcacgagaacctgcgcaagcagtacaactgcagcggctccctgggcaagaagcagctggacccctcccgcatcaagctcatccgccactacgtgcagctgctctacccacgcgccaaaaacgaccgcgtctggaccctggagttcgtgggcaaactggatgagcgctgccggcgccgggacacggagcaaaggcgctcctaccagcagcagcgcaaggtccacgtgccgggccctgagtgcagagacttgaccagctatgcaatcaaccccgagaggttccgggaggagtttgaggggcccccactgccccccgagaggagcagcaaggacttttgcaagatccccttggacgagctggtggtcccctcgcctgacttcccggtgccttctccctacctgctgtctgacaaggaggtgcgtgagatcgtgcagcagagcctctccgtgggcaactttgccgcccggctcctcgtccgcctgtttcccgaactcttcaccgccgagaacctccggctgcagtacaaccattccggggcttgcaacaagaagcaactggaccccacgcggctgcggctcatccgccactacgtggaagccgtctacccggtggagaagatggaggaggtgtggcactacgaatgtatccccagcatcgatgagaggtgccgccgccccaacaggaaaaaatgcgacatcctcaagaaagcaaagaaagtggagaagtgaaggcccgtgacctgcccagagattcggggtcaccagaggctgagcgatgggcacccttgggactgagcaatacttgggagcacgcctatggcatccacagacaggcaccttatgtccgtggggagtggcttactacatttgcacacgtaaacacccacccaaccgcaagaaagaagccttgagtttggtctcttgtacttacaacttctgtcctatgtgccccggcggggcagcctgagtgtggggagagcaagctgtgagggcagggaccagaggttaggggtcctctctccctggttgtgccctccccagcccctcacagcttataatgcaaacccagcaactctcttgcccctcttcccatattttacatcttccattttgacccatttttttttaattaaaaagaaacccttaaaaaaaatcattgggctctttgggggccattttacttagaaaaaaatctctttaaaagtgccatgttcgtgcacagtggctaatcatagcttcaggtggcatggatactgattttactgaccttgttttttacatctgattttggaagagtcaagatgccccttggatggcagtagaggggatggaatagtgcgaagtcctttacgaccacatgcaagttttcccttctgctctggtgccagggaaggcttccgttcagcttggcctgtccttcaggcgcgttggtagaatgttgtgtcactctttaggcgagaacactggatgatgatgatatgaatgtagacagccgtggaaacacgttcgcagtgtctccatctgagccgtgtccttccgctgcccccattccttctccatacatggttgctggttggagggagtggacatgtttccttggaaaacagtgcaggggcttttggcttcttgttagatttaagggtgggcctctttgagctcaccatgaactgtttacttttccgtgtgtgtatttgtacaaaatccaggttccgggagctttgtggtgacttccccagacctcagtgttagctactccaggcagtactacatcctcattcctcagggcgggcccaggtctgggcccctcttggggataccatgcattggaaggacacaggccattttagatggggtacacatgtcccttcccagggtccactcagaactttcctcttggactctctagaaggtcctgctgtcctatacctggccaccccctgccttggggggcacatgtcttcgttccctcccgactgggaatgtcaggctcctgcaggccagctgcatgctctccaggagcaccaactgggaaatcccctgacaggtaaagtcctttaaaatgatacttttacctacctaactctgggggccaaatgcttaagagggaaaggaaacagtcgaatgcaaacagtatgtcataccagagtcctggaaaatttattgaatcacacagggtagtcatagaacccctgtgggatggcttaatattttgctactttaaaatgcagagataacagaaacaatctggattttcttcattcagctgataagaacttcagttccagtggctgtatgacataattttgcctgtacccaggagcattttttaaaatacaggatttttacagattatttctgttgaaactgcaaacagatttagaaaggcacagggactgaatgactctctgtcttacacagctactcatgcacacacgcactgcttactaaaagctgaagtgagatgaagggggcctacacgaataacaagttcaacttctttgtgcctggaaaggagggactggagcagccaggagactcactttcccccctcgcttgggcccttctctatgccttagtctctccagcacatgcacacagcatgcacacacacgcaccctacccaaagacagctgtggccctctcccaccacctcccccttcccaccgctggttgttgggggctggaggcgggaggtcccatggaatttgttctggtttctaggatgtaaacgaggactccaagccatgaattgccctgctttctagagggtggaatgttgaccctgcaactttagaagcacaatcatttattaataatttttttgaaactcccatctacccctgttagagaaatcaacaggttctaggaattaaatatgtctctttgtaacccagagcatgttcaatttttggaaaccgtatttcagtgattttcttaataccttacatgtgtagggcatcttcccccagaatcttacagtccctttctgtgaagagaagtggacacacgtgggaactctcaccatctctggactgtcgtcaggaaacgcctgcaggtccttgccctgtctgtatggtgtcctcacttctccatccatacaggtggctccagtgggcatttttttattttaaattttttacatgaagcaatagaagtacaaaatacttattttttcaaaatttaatgtgttccatgaaacctgttggcagtcgctttccttcccccacatctaaattctttggtttttagttgtttgttttttggatttttttttttttttttttggccttgtatcccaaggactaaaagattagcacagacacgttttgatgttgaatgaactagtaagtcacagtaggtggtagtcttcattgatttctctgtaagtttttaaagaatgtatgaagatagtcacgaatgtactgagtgttcgcatcccccttcagttcaccttggctgtgtctacaggacaacaaatgtttgacagggaataaagtcgtgtctggtgtcatttgcgctagcgtgcccctcccctttcggtgttggctccaaaccttcctttccttttatgtttgtggggagtggggaaccacatcagcagcaatcatcaaccaaccaaccaatgggatctacttagtggtgaatagattggctatttaattggtaaaagttgctggtctgaccacaccacagcatgaccactgggttcatttagagatggcctccgtttccaacgttccccacaaatgtttgcttctttcccagtcaagaggggatctcgagactcccgagtggaggtcgtgagcttgcaccccgcctggctgtgtagatcgactgtatagatacatgaagtgggggtgagggccaaggggctattactgctgttgggaaatacttgcctctcgtagatccagccttaatgtttttctgacatcctagtaatagcagaccctgcacaaagtggatatcagacttaatactgtgaggagacaaaataatgagaatagttttaccaaagataatgaaatctcgcatcatgtctgcattttaccatagattggagtgcagacttaatactgtgaggagacaaaataatgagaatagttttaccaaagataatgaaatctcgcatcatgtctgcattttaccatagattggagtgcatccttaggaaactgaatgtaacaaaaacccaggacatttttggaaattgtatgctctctagcaactttgtgtgaatttttatacaaacactgttttatgagttatataaaatgttataaaaatagaaaaacatgg

SEQ ID NO: 11195 - DNA, 5098 bp, Homo sapiens
tgttatttattttgagatttatcatgagtactttgtgtactgtatcaataatatcttattgctgagtaatattccattgtatgaatataacatagtttatatacttgtggatttttcagaaacggggggttgtttctactgtctcacagttgcacaggccagaaagttctgggccggctttttctggtctaagatgtgatttcaggcagtggtggagttggcatcagacagccgctctccacagcccagttctcaggtgggacacgcaggacctcactgagttcctggacgaagcctcctcaccaggcgagtttgccgtcttcctcctccaccggctcttccccgagctcttcgaccaccgcaagctgggtgaacagtacagctgctacggggacggtggaaagcaggagctggacccgcagcggctgcagatcatccgcaactacacggagatctacttccctgacatgcaggaggaggaggcctggctgcagcagtgtgcccagcgcatcaacgacgagctcgagggcctggggctggacgcgggcagtgaaggcgaccccccgcgtgatgactgctacgactcctccagtctgcccgacgacatctcagtggtcaaggtggaggacagcttcgagggcgagcggccgggtcgccgctccaagaagatctggctggtgcccatcgacttcgacaagttagagatcccccagcctgacttcgaggtgcccggtgccgactgcctgctcagcaaggagcagctacgcagcatctacgagagcagcctgtccatcggcaacttcgcctcgcgcctgctggtgcacctgttccccgagctcttcacgcacgagaacctgcgcaagcagtacaactgcagcggctccctgggcaagaagcagctggacccctcccgcatcaagctcatccgccactacgtgcagctgctctacccacgcgccaaaaacgaccgcgtctggaccctggagttcgtgggcaaactggatgagcgctgccggcgccgggacacggagcaaaggcgctcctaccagcagcagcgcaaggtccacgtgccgggccctgagtgcagagacttgaccagctatgcaatcaaccccgagaggttccgggaggagtttgaggggcccccactgccccccgagaggagcagcaaggacttttgcaagatccccttggacgagctggtggtcccctcgcctgacttcccggtgccttctccctacctgctgtctgacaaggaggtgcgtgagatcgtgcagcagagcctctccgtgggcaactttgccgcccggctcctcgtccgcctgtttcccgaactcttcaccgccgagaacctccggctgcagtacaaccattccggggcttgcaacaagaagcaactggaccccacgcggctgcggctcatccgccactacgtggaagccgtctacccggtggagaagatggaggaggtgtggcactacgaatgtatccccagcatcgatgagaggtgccgccgccccaacaggaaaaaatgcgacatcctcaagaaagcaaagaaagtggagaagtgaaggcccgtgacctgcccagagattcggggtcaccagaggctgagcgatgggcacccttgggactgagcaatacttgggagcacgcctatggcatccacagacaggcaccttatgtccgtggggagtggcttactacatttgcacacgtaaacacccacccaaccgcaagaaagaagccttgagtttggtctcttgtacttacaacttctgtcctatgtgccccggcggggcagcctgagtgtggggagagcaagctgtgagggcagggaccagaggttaggggtcctctctccctggttgtgccctccccagcccctcacagcttataatgcaaacccagcaactctcttgcccctcttcccatattttacatcttccattttgacccatttttttttaattaaaaagaaacccttaaaaaaaatcattgggctctttgggggccattttacttagaaaaaaatctctttaaaagtgccatgttcgtgcacagtggctaatcatagcttcaggtggcatggatactgattttactgaccttgttttttacatctgattttggaagagtcaagatgccccttggatggcagtagaggggatggaatagtgcgaagtcctttacgaccacatgcaagttttcccttctgctctggtgccagggaaggcttccgttcagcttggcctgtccttcaggcgcgttggtagaatgttgtgtcactctttaggcgagaacactggatgatgatgatatgaatgtagacagccgtggaaacacgttcgcagtgtctccatctgagccgtgtccttccgctgcccccattccttctccatacatggttgctggttggagggagtggacatgtttccttggaaaacagtgcaggggcttttggcttcttgttagatttaagggtgggcctctttgagctcaccatgaactgtttacttttccgtgtgtgtatttgtacaaaatccaggttccgggagctttgtggtgacttccccagacctcagtgttagctactccaggcagtactacatcctcattcctcagggcgggcccaggtctgggcccctcttggggataccatgcattggaaggacacaggccattttagatggggtacacatgtcccttcccagggtccactcagaactttcctcttggactctctagaaggtcctgctgtcctatacctggccaccccctgccttggggggcacatgtcttcgttccctcccgactgggaatgtcaggctcctgcaggccagctgcatgctctccaggagcaccaactgggaaatcccctgacaggtaaagtcctttaaaatgatacttttacctacctaactctgggggccaaatgcttaagagggaaaggaaacagtcgaatgcaaacagtatgtcataccagagtcctggaaaatttattgaatcacacagggtagtcatagaacccctgtgggatggcttaatattttgctactttaaaatgcagagataacagaaacaatctggattttcttcattcagctgataagaacttcagttccagtggctgtatgacataattttgcctgtacccaggagcattttttaaaatacaggattttaaaagcaatgttaagttgctgatctaactagtaaatttgctcctaagtgtcatttacagattatttctgttgaaactgcaaacagatttagaaaggcacagggactgaatgactctctgtcttacacagctactcatgcacacacgcactgcttactaaaagctgaagtgagatgaagggggcctacacgaataacaagttcaacttctttgtgcctggaaaggagggactggagcagccaggagactcactttcccccctcgcttgggcccttctctatgccttagtctctccagcacatgcacacagcatgcacacacacgcaccctacccaaagacagctgtggccctctcccaccacctcccccttcccaccgctggttgttgggggctggaggcgggaggtcccatggaatttgttctggtttctaggatgtaaacgaggactccaagccatgaattgccctgctttctagagggtggaatgttgaccctgcaactttagaagcacaatcatttattaataatttttttgaaactcccatctacccctgttagagaaatcaacaggttctaggaattaaatatgtctctttgtaacccagagcatgttcaatttttggaaaccgtatttcagtgattttcttaataccttacatgtgtagggcatcttcccccagaatcttacagtccctttctgtgaagagaagtggacacacgtgggaactctcaccatctctggactgtcgtcaggaaacgcctgcaggtccttgccctgtctgtatggtgtcctcacttctccatccatacaggtggctccagtgggcatttttttattttaaattttttacatgaagcaatagaagtacaaaatacttattttttcaaaatttaatgtgttccatgaaacctgttggcagtcgctttccttcccccacatctaaattctttggtttttagttgtttgttttttggatttttttttttttttttttggccttgtatcccaaggactaaaagattagcacagacacgttttgatgttgaatgaactagtaagtcacagtaggtggtagtcttcattgatttctctgtaagtttttaaagaatgtatgaagatagtcacgaatgtactgagtgttcgcatcccccttcagttcaccttggctgtgtctacaggacaacaaatgtttgacagggaataaagtcgtgtctggtgtcatttgcgctagcgtgcccctcccctttcggtgttggctccaaaccttcctttccttttatgtttgtggggagtggggaaccacatcagcagcaatcatcaaccaaccaaccaatgggatctacttagtggtgaatagattggctatttaattggtaaaagttgctggtctgaccacaccacagcatgaccactgggttcatttagagatggcctccgtttccaacgttccccacaaatgtttgcttctttcccagtcaagaggggatctcgagactcccgagtggaggtcgtgagcttgcaccccgcctggctgtgtagatcgactgtatagatacatgaagtgggggtgagggccaaggggctattactgctgttgggaaatacttgcctctcgtagatccagccttaatgtttttctgacatcctagtaatagcagaccctgcacaaagtggatatcagacttaatactgtgaggagacaaaataatgagaatagttttaccaaagataatgaaatctcgcatcatgtctgcattttaccatagattggagtgcatccttaggaaactgaatgtaacaaaaacccaggacatttttggaaattgtatgctctctagcaactttgtgtgaatttttatacaaacactgttttatgagttatataaaatgttataaaaatagaaaaacatgg

SEQ ID NO: 11196 - DNA, 497 bp, Homo sapiens
gctcacccatcctctgtcaaaaccaagcttgcctgctgggttcattgagggaagactgacagagagtgtgctggtgtgagggtcccctggaggagctgaaggacgggaggaacaagtattattatcccatcttcccatctcagagatcaagaaactgaggcccagagaggccctgaattgtacatgttcaaagggcaaattaaggccgggcacagtggctcgtgcctgtaattccagcattttgggaggctgaggcagacggattgcttgagcccaggaatttgagaccagcctggggaacatggcaaaaccctgtctctacaaaatataaaataaaattagctgggcatggtggtgtgcgcctgtggtcccagctactcgggaggctaaggcaagaggattgcttgatcctcttgaggtcgagactgcagtgagccaagattgcactactgcactccagcctgggagacagagcaagaccctgcctcaaaaacaaa

SEQ ID NO: 11197 - DNA, 304 bp, Homo sapiens
ggagaccaaaacatggtgaagaggtagtgtgctttgatatgtgacatcacaaagcacactacctcttcaccatgttttgtataattagtaagacatataatcattatgtttgagctcattggaaatgaaatcacattctaccagggagtaaatggcaatgcacttgagtctggggtcctcatgtcatgactgccactaaaaacaaacagacataaattgttttccctaaatacatttttttctgaaatattgctatagtgagattattgagtgtgtatgtgacctgttattactggtgtcgacg

SEQ ID NO: 11198 - DNA, 800 bp, Homo sapiens
catggtggcgggcgcctgtagtcccagctactcgggaggttgaggcaggagaatggtgtgaatccgggaggcggaggttgcagtgagctgagatcgtgccactgcactccagcctgggcgacagagggagactccgtctcaaaaaaaaaagccagggagaacagcacctcaactgatttattttatagagtaaaagttattttgctataccttttgtaagcagcgtgtactgtgggaaatgcaaactagcagttgttagcaccatccagaaatttctgtcagttccatttcaaatagtttaaatactggctcaaatctctaaaccccaccctatggctacttttcccccagctatatataatggcattctagcaagatattttggatcctcataacttgtgacaaaactgccctatactaacaacaaatcattgtaattatagatctcaaattatgttaaattgctatagttgcaaccaacagcaagaatttgtattttagaatatgttgtgtcttctcattgaccaaaaaataaaaataaaaataaaaataaatcctcaggccctgataaactgtagaaatagcttttctatctttgcagttaaagattttcatcttggaagttatggttaaaaaatttttaaacagttaaaatagtgtagctgtgcttaaagcttctggtaaaagccagtatgctttgtagagcccttatccccctcctgctttttatttgtttttagctcactaaatgatataaacactgatttttccatatatagcactgaataaactgtcatgcc

SEQ ID NO: 11199 - DNA, 463 bp, Homo sapiens
aggataccctggcctgtggcgcgaggtcacaacaggtgagcctcattttgagttatcacttaataaacatttcaagcctttagtagagacttgaaacatgttttcaaggctagtgaacgctgtacaggagaacctgaaaagcaaattcgtgaaatgatttttagttttaagatttgggttctggccagacgtggtggctcctgcttgtaatcccagcactttgggaggctgagacaaggcggatcacttgagtccaggagttcgagaccagcctgggcaacatggcgaaaccccgtctctacaaaaatacaaatattagctgggcatagtggcccacctgtagtcacagctactcgggagactgaggcagaaggatcacttgagcccaggaagtcgaggctgcagtgagctgagattgcaccactgcactttaacgtgggcgacagagtaagaccctgtctca

SEQ ID NO: 11200 - DNA, 958 bp, Homo sapiens
acagataacagagaagctgaaagaaaagccccagaggaaacattctgtggagacatccttagcactccttgcaaactagcctgtctacaaccttatgtttggagggagacttgttcagcatcagcagcaaagtcatttcaggtccaacaattcccaaatagtgtaaggtcaagggatcctcaaaacagtgccttttccttaaggcaacacttttgggttctagtatgtagtaagagagcactggatcactcttttgttcaccccaatccttagttctgctttgacacttgctagatatcccatttctttgcctaaacacatctctgatgtctaccaactccaggtctccatagcaagagaataaccaagcttgaaccaaagttatgtctgtataactgtaacattcttcatcttgatttctatctcctccagtttctcacaactccttccgtgttgtacaagccccagtccagcacaatactctgccctaatcactctgccctccatccatcctctccagcagagtcaatctctaagtggttccgagtcgtagttcactgaccacagaggacttcttcaaaatgtccttctaagatggctactgagaagtttggaagatggcaagaaaagtgcctctgaaacagtgactccaaaattgactgccaagtcaacagaaaatgttgaattgtttcctaatcaatctcatatgacctccataagaacagggataatacttatataatacctattcagatacagataccaaaatattattaagagaacaggtgaagagtggcttaattcacaccattaacatgtaaacatgttacatgttacaaacatgctcctcatgtaatccttatactaaagtttgagatttactggtatcaacagacatttaaggctaggaactgactgtaccaagatgttagaagtttaagtaatactgaccccccaa

SEQ ID NO: 11201 - DNA, 809 bp, Homo sapiens
atagtacatgattccccagcttcaataatggactaatgacccccggaatcccaccgctatagcctgcacttccccaggaattcctgtttaaggcgtctctcaatgaagaccacaaacaggaaatggaggagtggggagttgcctgacatcctggaaactacgttcttaaagaactgcaggcaatgggcgagagttctaatacatggaacagttacaggacactaagttctagagcaattcatctccagaacaaaaactgaaatggaagcaagaaaaaaataagtttctcacaactccttccgtgttgtacaagccccagtccagcacaatactctgccctaatcactctgccctccatccatcctctccagcagagtcaatctctaagtggttccgagtcgtagttcactgaccacagaggacttcttcaaaatgtccttctaagatggctactgagaagtttggaagatggcaagaaaagtgcctctgaaacagtgactccaaaattgactgccaagtcaacagaaaatgttgaattgtttcctaatcaatctcatatgacctccataagaacagggataatacttatataatacctattcagatacagataccaaaatattattaagagaacaggtgaagagtggcttaattcacaccattaacatgtaaacatgttacatgttacaaacatgctcctcatgtaatccttatactaaagtttgagatttactggtatcaacagacatttaaggctaggaactgactgtaccaagatgttagaagtttaagtaatactgaccccccaa

SEQ ID NO: 11202 - DNA, 343 bp, Homo sapiens
atagtacatgattccccagcttcaataatggactaatgacccccggaatcccaccgctatagcctgcacttccccaggaattcctgtttaaggcgtctctcaatgaagaccacaaacaggaaatggaggagtggggagttgcctgacatcctggaaactacgttcttaaagaactgcaggcaatgggcgagagttctaatacatggaacagttacaggacactaagttctagagcaattcatctccagaacaaaaactgaaatggaagcaagaaaaaaataaggtaggccactcctttcctttaaagaccttttatagagtagcatccctttgctagcagtac

SEQ ID NO: 11203 - DNA, 400 bp, Homo sapiens
accgctatagcctgcacttccccaggaattcctgtttaaggcgtctctcaatgaagaccacaaacaggaaatggaggagtggggagttgcctgacatcctggaaactacgttcttaaagaactgcaggtgggagtaagtgggatagaaaaatgggcttttcaaaaactgttgagaacacggactgagtcagttgtatccgcacggctggaagacaggcagctccacctaacctcactcacttactcaggaccaaaaccctacttgctctgcccaagataaagcctgcagcatttgtacctattctacagggaacaccctccattatctttatcttacgctacacctcccttgagtaagccaagtacctatgactaaaaaagaacatgtaagaaaggtgga

SEQ ID NO: 11204 - DNA, 1842 bp, Homo sapiens
aatgtcctgagtgcgggaaagccttcagtgagaagtcacgcctaagaaaacatcagagaactcacacgggagagaaaccatacaaatgtgatggatgtgataaagctttcagtgcaaagtcaggcctaagaatacaccagagaacccacacaggggagaaaccattcgaatgtcatgaatgtgggaaatcttttaactataagtcaatcctcatagtgcatcagagaactcacacaggggagaaaccttttgaatgtaatgaatgcgggaaatctttcagccatatgtcaggcctaaggaatcaccgaagaactcacacaggggaaagaccatataaatgtgatgaatgtgggaaagctttcaaactgaagtcaggcctgaggaaacatcatagaacacacacaggggagaagccctacaaatgtaatcagtgtggaaaagctttcggtcagaaatcacaactcagaggacatcatagaattcacacaggggaaaaaccctataaatgtaatcattgtggggaagctttcagtcagaaatcaaacctcagagtacatcacagaactcatactggggagaaaccctatcaatgtgaggagtgtggaaaacattcaggcagaaatcaaatctcagagggcatcagagaactcacactggggagaagccctatgaatgtaatgaatgtggaaaagctttcagtgagaagtcagtcctaagaaaacatcagcgaactcacaccggggagaaaccatataattgtaatcagtgtggggaagctttcagtcagaaatccaatctcagagtacatcagagaactcacacaggggagaaaccctataaatgtgataaatgtgggagaactttcagtcaaaaatcaagccttagagaacatcagaaagcccacccaggggattaaatgtatgcatataaagaatacgaaaaaactctgagctggaaatcaaacctcacaatacataaatgaacacacaggagagaactgttaacatagtgagcactggaatttcctctacaatttcagcctccaccaaatatcaaagaatagaagataaattgttgaaatctattttatatgggcattctttcagccagagcccagtcttctatggatatacagaactcacacagcaaagaaaccctataaacataatgaatatggaaaatactcttgcgaactcactcctcagaaaactcacgctgcagaaaagctctgagaaagtaataaaaatgtgaaaactttgtgccaacaatcaaaactcattcaccatcagagaaatcacacaatgacaaaagctagaatataataagtgtgtgataaactttaatgaaaagtcagtacagcagaaaatacattcaagatagagacctcatagtatattaaaacaaacaagaaatgaagttaatggatgtgggaaattcttctgccatgtcaaccctcattttaacctacacagaggtaatccctatatgtcgtataataactattgaaatgttcactagtaatcattttcacttctccctcatgccacacctggcctaaatttctcaaccactctctcatctaaacggggtcatattgttaccctctagctagtggaatatggggtcagtgacaggtcttaaatacatcagtcaaattctcaatattttcttctatccctcattagaatggaatggaggaaaaccttgggactcaggctctgatgatggaaagtacaagatggtaggaacccgggtcagagaaggatcctgtggcatggagttttctcctccctgtacacagttggacttcttgcagtgaggaaataaatgtgttccctgctg

SEQ ID NO: 11205 - DNA, 467 bp, Homo sapiens
gatatcaatttattgggctatgtctacaatattatgacatttcaaagattaaagaggctcagagtaaacacaattgtgttaggtttcaactcgattccacaaatattgttcacatttataacacaggtcctggcatatagtaaaagtgggcgagaccagctcagttatataagattgtgggccaggcgcggtggctcacacctgtaatcccagcacattgagaggctgaggtgagtggatcacctgaggtcaggagttcgagaccagcctggccaacatggcaaaatcccatctctactaaaaataccaaaaattagccaggcatggtgcctcgtgcctgtagtcccagctacttgggaggctgagacatgagattcgcttgaacctgggaggcagaggttgccgtgagccaacagtacgccactgcactccagcctgggtgacaaagtgagactctgtctccaaaa

SEQ ID NO: 11206 - DNA, 316 bp, Homo sapiens
gacatgaacagacacttctcaaaagaagacatttatgcagccaaaaaacacatgaaaaatgccttccctctcctttcacaggcccccccttcagcattgacgtcattcagtcatcaaagggacctgtaagacgatctgcctgttctcctgtgaacaatggttaagaacgcattcaaggggtttccagggggatgaggctgggtgtggcagagagggcttgggatcattatttaaatcgcttggcaggaacactggtccattttccttttgtgatatgccaagggaaagggtctgggacaccagaggtccctcattc

SEQ ID NO: 11207 - DNA, 403 bp, Homo sapiens
agatcacaacactgcactccagcctgggcgacaagagcaaaactccatctcaaaaaaaaaaaaaaaaaaaggaaaagaaaaagaaataaaaaactcaaggcaaagaaaaggtttttagtttgttcccctaccactgatgtgaaatggggacctaggggagatgtggaaggatgactaaaatctaacacattgcccaccatttttgaacttgaaggttgagtttgcaaatcatttaccgcctttgcctacctcatctgctagttgccttctggaaattttgcagttccccctcaagtctagttatttgattctaactttggtacaagatttctggttggagaaaatgagatgtaactgaaatttccaggctaccattcattcattcactttagatacagggtct

SEQ ID NO: 11208 - DNA, 290 bp, Homo sapiens
ggaatgcaggcaagttaagatcacccttgagaggtggttctcagatggagctgtgccgccttcctagctgaggacctacagcgttgttgcagtgtagactcatgtaatggtgccatcttttaagcaagtcttgacttttgatgcctcatttgctgctgctagacccaggcggagcaagcttctctggcatgtgggtcgtttgtttgcagtgtgcatttggtgaaattgacagctgggtttccctgtcccccgtccccgcctggaacatcactgttctgagcctgtagcca

SEQ ID NO: 11209 - DNA, 354 bp, Homo sapiens
aacttttattttaggttcagagatacatgtgcaggttcgttagacaggtaaattgtgtgtcgcgggggtttggtgtgcagatttcatcaccccagttaataagcctagtactgatatgtagttttttaatcctctccctcctcccactctccaccctcaagtaggcgtcagtgtctgttgttcctttcattatacaaagtatttttgatattttaaaattacattaagaaaaatctctaatacttctacctagagatgaaaacatctgaataagtattatgaaagagaacctgaagtcatggttaggttaataagttcaactgcttgttcatgtattgagtcttcaccagagga

SEQ ID NO: 11210 - DNA, 303 bp, Homo sapiens
ggcattatatataaaaaaaaaaaacaaaagaagactctgaaaggtggagagaaggcagaccagctagggagctcaggaccaaagaaacaacacagtagttgattccctgggctttctttttgcctcatagatcccagatttggaactgaaggagccacggcacaccagtgggtgctaaaaacagctgcaaccaaagtctgctctctccagctgaaggaacaggaaaaggaaagcctagctagacagaaaactttcacacaataactactctagccaaatatcactggaaaaaaagtacagccc

SEQ ID NO: 11211 - DNA, 150 bp, Homo sapiens
ttttctttttaagttttaccaaaataattccaagtgggatgggaaggcagcctggcagaggccagagcaaccaggagggtgcacaggtgggatggcaacctgatgatgacatcaggagatttgatacatacagggaattaagcagaaaag

SEQ ID NO: 11212 - DNA, 343 bp, Homo sapiens
tgagatggagtttcactcttgtctcccaggctggagtgcaatggtgcaatcttggctcactgcaacctctgcctcccgggttcaagcaatcctcctgcctcagcctcctgagtagctgagattacaggtatgcaccaccacacccagcaaatttttgtctctttaatagagacagggtttcaccatgttggctaagctggtctcgaactcctgacctcaggtgatccacccactttggcctcccaaagtgctgggattacaggcatgagccaccgtgcccagctggggtttcacgtttcttttaaaggattatttttaaaaggctggtcactatgtactaagc

SEQ ID NO: 11213 - DNA, 281 bp, Homo sapiens
tgtctgtatagggctcctcactgttggtgtgtctggtttccaggaggcaggcgtgctgtctgaagaggctttggaagtaccccaaataattcagttcttgacctgccccagggccacacacatgcatatgctctctctgtctctctgtctgtctgtctctctctctctctgtctctggatttctcagagtgtgtatgtgtttttaatttccccgatgctgcagaccttcttaggttccaccagaccatctgttgctgtcatttcagcttggagtgcagtgg

SEQ ID NO: 11214 - DNA, 755 bp, Homo sapiens
ccccaaaagctctatcttgttcatgaaaaacgaagcccagagaagttatgtacaagttcacagagctcattattgacaaaaccagaatttgaatacaactcttctgattccagatttgctggaaatactgtgaaagaagaattcagtctggtagtattacgtgtggttttaatttttttttttaactttagtttgaattttatgtgtgtgtgagcatctgcatttacttttaaaaacttttattgtaaaagccttcaaacatatacaaaagtagagaatacaaagcataatgaacttaagtacctattagccagcttattaaaacatggtcagtcttgtttcacctgttacatcccttttcttttactgtctaaaggaaggaaagaagaatcacaaatcagtttatgaagtctgctttctaaaaagtacttaagtgtttattgccaatatcttattttggtcagcaatcaatcacgtactcaagcatacttctcttaccttcagagaaattaaaatttaatcagcaaaactcatcagcctgtacatttaaaatatatgcatgttattgtacagaaactataccttaataaaaagtgagaaaaaaaatgagacaggaaagagaaaaacatttaaaagacatagtaactgaagaattaaataaccaatccaacacttgaaaaatattacaatgtagcacatgcttaaaagctctctgagctcagggaaaaaagcagcactgtgaatctatagtggtc

SEQ ID NO: 11215 - DNA, 456 bp, Homo sapiens
cacaccaacaattatatcgcagtctgcaaatagctatattttgcttgggcaacaaagccgaggaagcctcagtttgtaatttaaccgaaaacagttttcaaaaagcacatccagtagaaatatccttggcttcttaccttctttctccatcaaggtgaacacttttcattacacctagaaatagccaaacagccagtaaaaaatcactggccagtacaaattcttaggcaataggaactaaccagatgttttatcagccaatcagaatgctgtaaaataacctgagaaaggctggcactgaagacgtttgtggcaatccagtgcctagcacagaagatacttgtgtgtattgcatcaactgctcccagttctccatagcagtggaggagaagtcagagagagaagagagagaccagcttctagacttccctactgccctactggctggttgcatta

SEQ ID NO: 11216 - DNA, 491 bp, Homo sapiens
gttctggtttctctagatttcacctgtaggtgcataagtagtggtcttttgcattataatgtacctagtgggaatgatacaaacagcccttatgaactgtaaatttaatcttacctgaaaagttggctttagagttatctacacagatatttgggtatgtgggtgattttttaaaatcaagttaactattaaaaaccaagttgaaattatcttttattttcagtatcagattaaggcgttaacatttaatgtacttccctgctaagtcctctgataaacatttattgtggggtgtttaccgcagagcctggcttatggtaaagattaggaaaagcttggtgaatgcctccttcacaaaaaagtcatgggaatgttgggcgcagtggctcacaactataatcccagcactttggaatgccaaggcaggaggatcacttgaggcttggagtttaaaaccagcctgggcaacatagtaagcgcctgtctctaca

SEQ ID NO: 11217 - DNA, 279 bp, Homo sapiens
ttcgttttgcctcctgagctgtgattcttatttctcttggtctgcacatccgtcctgcccttgatgttccctgacatcgggttgcctgagatgtcagaattgtaaagttcaaccaatgacggggaaagttcagagggagttttaagttcccctgccccttcactcaggaaaagaatcttactctgaattccatctacaaccccaccaggcagttatttgcctgatttggtctcatcttcagtttgcatcaagttgaaaacagcctgttggaaagccacc

SEQ ID NO: 11218 - DNA, 399 bp, Homo sapiens
aactgcaccctctaatagtagacgtccaacggagtatccattgcaccacagagccgacttggaccttctactattagaaagtaatcacaacagaaacttgaaattaataataacaattgttaacattttagcaacttcacattaaaagtcatagtaattactaactttgattgagagcttactatgtgccaagcactgttctccatacttcacacaaactttaatttgttccttacatttttccttttagataggtactattattatcaccattttacagataagaaaatggagaaagatattaataactttcctagcagcatattgacaataaaaagtaaaacagaaattcaaacctaggcaatttcatagactgaaactcatagtaatgtgtacagt

SEQ ID NO: 11219 - DNA, 651 bp, Homo sapiens
tcaggcttgatagtttctattttcccatcttcaacttcagagattctccttttataactggtcacctatgtctttgaatttctcttgtaattttttttcagttattgaaattttcagctccgtaatttgtttatttttaggtttgctatttattgatatttatactttgttcatacatatttttttaactttctccacatcttcctaaagatgagtatctttaagaccatggttttaaagtctttgtcaggtaaatctgccattagttctttttagggacagtttctgttgactcatttttatatatctgaatgtgccatactaccttctttctttatatgctttatgattttttgttgttgaaaattggacatttgtatctaataatgtggtaactttggaaatctttcccatacttagtttgatgtttttgtttattggtttttaaaaattgtttaggctgtttctgtgccatggatcagcctgagagttaaacttaggccctcctcaggtcttttctgagcctgtgtttttgcctgggcatgtgctgtcactttctaattttccaagatatacaattatttttgaatgtgctagttattaatgcttggcttccaaaagggagaaaaaaagaaaaataaaaaggttgtg

SEQ ID NO: 11220 - DNA, 295 bp, Homo sapiens
cacaggtttaaatggtttctgtttccctggtttgttctggctgtctgacagatatgttacaagcaatgctgtaatttctgaaataaagatgaaatgtatacatggtagtatctgttttatagtcataatgacagtaaataaatggaaaaatgtagttttacatgccttggtcttagaggatctatgcaagtttctagtaatcagttaaatcttttaggactgctttcaattcatctgttaaattgcctgaaaaggaatagcaggttaacgagtttgtaatccccaggagcttccc

SEQ ID NO: 11221 - DNA, 166 bp, Homo sapiens
tctgatagggataattttgtcaactccacctttctttctctctaatcctctttcatagcatgtgtatttgtgtctagatttagtttgggatggggagggaggacatagtactattacatgatatcatcgtggctctgaaggtatctcaaatcctgactatgccaca

SEQ ID NO: 11222 - DNA, 245 bp, Homo sapiens
gggtatagaaaataataaaaatgatacagcagattttaaaatttgaatttacagagacaaaaaattaagtgattgaaatttaaaacttagtgggtatattaagcattaggcatggttaatgagagaattaatgaactggaagacagggctggagaaattatgcagaatgcagcacatgagatgaaaaatataaaaggggcataacaagatacaaaagacagaattaaaaagtctcacatttgtct

SEQ ID NO: 11223 - DNA, 375 bp, Homo sapiens
gtaaaggggtgcttcttgccactaccacttatgtagagttgcatatatacattgaaagggtattcagtaccaccattcattcagtcaagctaaatacaggccagtagaagcagtattgttaatgcatgtttttgccttcattggcccaaggcctacttaacatttttgacacccatcacagcaatttatctttcagagataaaaaaaaaaatagcagattattatcacatatttttaaaaagaacattagaatttttggtaaaataagtagtaagacagtatcttgactctgctgcatacttgcttttgctggatgactaaatgagggtgaaaaatttaaggttggtttatgactaagaaggtattaaatgatag

SEQ ID NO: 11224 - DNA, 357 bp, Homo sapiens
tttatcattgcactggatgtacagttccattcagtctgtctttttattacaggtaaagatggaataattaccatccattgatatgaccatagaccagaacaaactaaaaagaagaagaaagataaaagattgtacaattgctctctggtgtcaacaataatcattggagaacatactattttggggcctggtatttaatagctacatggacaagaatgaaataaagtctacttatttctatttcacattgttgggtcatataatagcatgacctagggttaatagggaccttagattaatctatggctccatgataattcacctaaatcaatctactgactcacaaaaaacaaagca

SEQ ID NO: 11225 - DNA, 696 bp, Homo sapiens
  misc_feature (7)..(7): n is a, c, g, or t
  misc_feature (40)..(40): n is a, c, g, or t
gatcctnatgatatttggcagctgtcctccagtcttaaanggtttgatgacaaatacaccttgaagctgaccttcatcagtgggagaacaaagcagcagcgggaagccgagttcacaaagtccattgctaagttttttgaccacagtgggacactggtcatggatgcatatgagcctgaaatatccaggctccatgacagtcttgccatagaaagaaaaataaagtagccaattctaaaagtaaaaaaaaaaaaaaaaaaaaaaaaacaaaacttgttgtgggccgggcgtggggccctttggaaaaaaagcttttttaagaaccactgtggtgttgtgggagcggcgggggccccagaatagtggtatagagtgaaacagtgggtcaattagcgtgtgtttcctagaggaaaatctcgggggtaaatgaaaacaagaggtgggggtggggaaattatctcataaacacataataaaaaaaggcgccgcgggggggtgcgaaccaccgcagagagagtttgtttttctgagaaccaaaaatctctcccaaaatattgcaggaggctcctcagagaagcgggctacatctctacggggggaggatctcttatctacagcacggggaggggtctacaagagcgcgaaacatgtctagcaaattcttaataaaatctttccccccccgcggccctcggg

SEQ ID NO: 11226 - DNA, 297 bp, Homo sapiens
  misc_feature (7)..(7): n is a, c, g, or t
  misc_feature (40)..(40): n is a, c, g, or t
gatcctnatgatatttggcagctgtcctccagtcttaaanggtttgatgacaaatacaccttgaagctgaccttcatcagtgggagaacaaagcagcagcgggaagccgagttcacaaagtccattgctaagttttttgaccacagtgggacactggtcatggatgcatatgagcctgaaatatccaggctccatgacagtcttgccatagaaagaaaaataaagtagccaattctaaaagtagccctctttctcctggatcttgctgaattagtggcttggggggtgggggagata

SEQ ID NO: 11227 - DNA, 185 bp, Homo sapiens
agaaaaggaagccataaaaacatgatcagtacagtctccaattaaaagaaaaaatcatgacaaaatacttgaaaatgttacagtggttatctagtggtagggcttatagcttattgaaattccttgccttttgtcactctgaattttataaatggtctataatgaacatgtgttatatctatgat

SEQ ID NO: 11228 - DNA, 295 bp, Homo sapiens
agtcttctgtttccactagggcttcagcattgccgaggagatccttccagcttccccgactgctcctttccttattctcaggaagactgacctgacccttctccagtctcccagcctctgaatgctgcccccaccccttcccactccatgtagataaccccacctcccacttctctggagtatggaagaggtcagagggatcacccccgtcttccccaacaacaagcctacccatgatagacagcagctgcaagggcctgccctcccttctccacttggcacggagcagttcccc

SEQ ID NO: 11229 - DNA, 390 bp, Homo sapiens
gaaaatttttctcttagggaactagctttcagtcctttagtaaatgcaaggttaagattcaaaccctaatttgtctgattctaaagaccacgcttattcccttgtacttgccttctaatttatactcaaaccctatgaatttccttaaaaatatctcttactccttttttcctcaaacttaccaacactgtcctactacagtgccccattatttcatctggtttcccttttgcctttatcctcaactttgccactagaattatcttcctaaaaactcaaagttacacatatcattctatattcaaaagctttaacactttctcatgccaacagaataaatttctaactccttcacattttatttgaggcccctgccatgtggccctgacc

SEQ ID NO: 11230 - DNA, 850 bp, Homo sapiens
ctcagccacctgctcagaaaataaacctctgggtaggcttgcttggtccacacgcccacccttctgaccaaacacgactgcagagggatggacaccacatgggggccgtgcgcagcatgtggctgagcttgtatttgggatgtgacccacagccctattggctcagcatgcgagagagcagggatggtgctccccaaggaaggactggtgggcaggacggagcagcgcatgtccactagggttgaaagtgctctgcacggcaccagttgcctggtacccatttcataaactgtggccaccatgattgcttcagctcaataagtggtggttagtattaacaattacttttttcacttattagttgattacttatttattgaggtgcttttgtataaaagattcaagctttctgaaatcgaagttaaaattttgtaaacatatcccacgccattgaacctttgtcagtcatgtcaataaatcacgcccttagatttaggttgagctccctctaccctattggcaacttctgcccacttgaacaccactccaaggtcatctgatggcacattagtcatggagttatttatttttcctccagattataaagtccttgagggcatatgctcttgactggcttaagagtactgcatgcctctgtttcccatgaaagctaaagctagggtaggcccatttgctaaaatgaagtatggctcagtgtggcggtgcacacctatagtcccagctgctcaggaggcaaaggtgggaggatcgcttgagcccatgagttggaagctgcagtgagctatgatcgtactgctacactccagcctgggtaactgggtgagaccaa

SEQ ID NO: 11231 - DNA, 408 bp, Homo sapiens
tctcgacagtggggaggctgagacaggagaattccttgaacccaggaggtggaagttgcagtgagctaagatcacgccactgcactccagcctgggtgacagaagaagactctgtctcaaaaaaatatatatcatatttggcccagatctatgttttttgcctccaacaagttttcatgaggttaagttaaatgtgggaatttatttcagacagtctgcaaagtggatagctcactagagcaaacatacaatcacctgcaggctgactgtagtcaaaataatctactgtcactctgaataggttttctcacataacatctacaaaaacccagcataccattgtcacacccacatggtgccttctgatatgtgacattagaaaacctcaatctcctaaaaaaaatcata

SEQ ID NO: 11232 - DNA, 349 bp, Homo sapiens
gctcaaaggaactaagacaaaggtcatggagaccatagggtgagtctcaagacttcccccagctctacttggctggtctcctgctggtattttccgtctgtagagaggaaaaagaactcccattttatcttgcttacctgcacttatgaaaagtcaaactgagtcatgttgagagccagggaacataggagtcggttcttcagcaggagcactcagctagttgaaggcaatgtggagtgatgggaagagagcagtgatgcagtgatgctgccatcaactcctttactatggaatccattgtaccagctgccatacacctggctacttctacaccttatctctaatcact

SEQ ID NO: 11233 - DNA, 2496 bp, Homo sapiens
tgacagcagttggtaaactgcttttagggatactggctgacttcaagtggattaataccttgtatctttatgttgctaccttaatcatcatgggcctagccttgtgtgcaattccatttgccaaaagctatgtcacattggcgttgctttctgggatcctagggtttcttactggtaattggtccatctttccatatgtgaccacgaagactgtgggaattgaaaaattagcccatgcctatgggatattaatgttctttgctggacttggaaatagcctaggaccacccatcgttggttggttttatgactggacccagacctatgatattgcattttattttagtggcttctgcgtcctgctgggaggttttattctgctgctggcagccttgccctcttgggatacatgcaacaagcaactccccaagccagctccaacaactttcttgtacaaagttgcctctaatgtttagaagaatattggaagacactatttttgctattttataccatatagcaacgatattttaacagattctcaagcaaattttctagagtcaagactattttctcatagcaaaatttcacaatgactgactctgaatgaattatttttttttatatatcctattttttatgtagtgtatgcgtagcctctatctcgtatctttttctatttctcctccccacaccatcaatgggactattctgttttgctgttattcactagttcttaacattgtaaaaagtttgaccagcctcagaaggctttctctgtgtaaagaagtataatttctctgccgactccatttaatccactgcaaggcacctagagagactgctcctattttaaaagtgatgcaagcatcatgataagatatgtgtgaagcccactaggaaataaatcattctcttctctatgtttgacttgctagtaaacagaagacttcaagccagccaggaaattaaagtggcgactaaaacagccttaagaattgcagtggagcaaattggtcattttttaaaaaaatatattttaacctacagtcaccagttttcattattctatttacctcactgaagtactcgcatgttgtttggtacccactgagcaactgtttcagttcctaaggtatttgctgagatgtgggtgaactccaaatggagaagtagtcactgtagactttcttcatggttgaccactccaaccttgctcacttttgcttcttggccatccactcagctgatgtttcctgggaagtgctaattttacctgtttccaaattggaaacacatttctcaatcattccgttctggcaaatgggaaacatccatttgctttgggcacagtggggatgggctgcaagttcttgcatatcctcccagtgaagcatttatttgctactatcagattttaccactatcaaatataattcaagggcagaattaaacgtgagtgtgtgtgtgtgtgtgtgtgtgtgtgctatgcatgctctaagtctgcatgggatatgggaatggaaaagggcaataagaaattaatacccttatgcagttgcatttaaccttaagaaaaatgtccttgggataaactccaatgtttaatacattgattttttttctaaagaaatgggttttaaactttggtatgcatcagaattccctatagatctttttgaaaatataggtacctgggtatcacacatagaacttttaattctgctggtgtaggctgttgcccaaacatctataattttactgagctcttcaagtgattctgataacacagcctggattgagaatttttataagattggcaatggaaaaacatttattcttttaaataataatttttttaaaacccaagaggtcaggggattttataaaccaatagccaagtgttctttaaataggaggcacccttcccattgtgccaaaatcatcttttcatttattttgaaatttgtatgattattttatacttgtatgttgcctttcttcgaaggcgcctgaagcactttataaacacaaatcctcacaatacctctgtgaggtaggtaaatagtacttttctatgtagtaaacctggaatatggagaatttcataacagttcattctacttaataatgcaataatggagctccaagttgtcttggacttctacaccacactcagacttctggaaagttttctgtacctcattctttagtccctgtcaaggttagtaaataaaataagtgacataaaaaaaaaaaaaactaaactacttgttgtgttgaaagttcctttttgccagttatgttcaggaaacccaataacctgaaaaagtttgactttgatgtgacatcttcatattcatcaatgctgataattgtccaaaggcatcttcactatgtctgctaaataacatccaatgtgggcgttatctgttgtctaggggatgaattttaagttacaataaaatatttttctttgttttgcaaaaaaaaaaa

SEQ ID NO: 11234 - DNA, 928 bp, Homo sapiens
tccttcccccaaccacccgcgcagtcacaaccggttcagactggccggggtgccccgcaaagagagacaagggagaaaaagacagcagggaaaaccccggggaggagaaggcgaaagagaaggtggagctcagagaagggggccggctccccagctccatgtggccgccgccgctgcgggtctgtgggggcagagggcggcggctcccggggcagcgcgtagcgggaccgattgcctaatactccggcaggggccggggccgcagctggctcggataaatagccgcccggctggcccggagctgcaggggagagcggcggccgcgatccccaccacaccaccagcccggccgcacggggcactgagccgggtgctgagcaccggaggccccgccgaggccgggactcaggacctgcagagaaacgcctcctgattttgtcttacaatggaacttaaaaagtcgcctgacggtggatggggctgggtgattgtgtttgtctccttccttactcagtttttgtgttacggatccccactagctgttggagtcctgtacatagaatggctggatgcctttggtgaaggaaaaggaaaaacagcctgggttggatccctggcaagtggagttggcttgcttgcaagtcctgtctgcagtctctgtgtctcatcttttggagcaagacctgtcacaatcttcagtggcttcatggtggctggaggcctgatgttgagcagttttgctcccaatatctactttctgtttttttcctatggcattgttgtaggtcttggatgtggtttattatacactgcaacagtgaccattacgtgccagtattttgacgatcgccgaggcctagcgcttggcctgatttcaacagatttttgatctatggcaaatttctcaaccattccagccctaggtcac

SEQ ID NO: 11235 - DNA, 2674 bp, Homo sapiens
gagacggagttttgcactgtcgcccaggctggagtgcaattgcgtgatctcggctcaccgcaagctccgccttctgggttcatgccattctcctgcctcagcctcctgagtagctgggactaaaggcacctgccaccacgcccggctaatgttttttgttgttgttgtttagtagagacggggtttcaccgtgttagccaggatggtctccatctcctgacctcgtgatccgcccgcctcggcctcccaaagtgctgggtttacaggcgtgagccaccgcacccagcctgcctgcttattcttatccaaatatttgagagattctcttcttctaactcccagtaaaccacgctggaagtagtggagtaatatatatactaattataactatatataaaactgatataattagggtatgggatggatgttcatactatttccatgaaacttactttttttcttactgccttttcaggttggttttatgactggacccagacctatgatattgcattttattttagtggcttctgcgtcctgctgggaggttttattctgctgctggcagccttgccctcttgggatacatgcaacaagcaactccccaagccagctccaacaactttcttgtacaaagttgcctctaatgtttagaagaatattggaagacactatttttgctattttataccatatagcaacgatattttaacagattctcaagcaaattttctagagtcaagactattttctcatagcaaaatttcacaatgactgactctgaatgaattatttttttttatatatcctattttttatgtagtgtatgcgtagcctctatctcgtatctttttctatttctcctccccacaccatcaatgggactattctgttttgctgttattcactagttcttaacattgtaaaaagtttgaccagcctcagaaggctttctctgtgtaaagaagtataatttctctgccgactccatttaatccactgcaaggcacctagagagactgctcctattttaaaagtgatgcaagcatcatgataagatatgtgtgaagcccactaggaaataaatcattctcttctctatgtttgacttgctagtaaacagaagacttcaagccagccaggaaattaaagtggcgactaaaacagccttaagaattgcagtggagcaaattggtcattttttaaaaaaatatattttaacctacagtcaccagttttcattattctatttacctcactgaagtactcgcatgttgtttggtacccactgagcaactgtttcagttcctaaggtatttgctgagatgtgggtgaactccaaatggagaagtagtcactgtagactttcttcatggttgaccactccaaccttgctcacttttgcttcttggccatccactcagctgatgtttcctgggaagtgctaattttacctgtttccaaattggaaacacatttctcaatcattccgttctggcaaatgggaaacatccatttgctttgggcacagtggggatgggctgcaagttcttgcatatcctcccagtgaagcatttatttgctactatcagattttaccactatcaaatataattcaagggcagaattaaacgtgagtgtgtgtgtgtgtgtgtgtgtgtgtgctatgcatgctctaagtctgcatgggatatgggaatggaaaagggcaataagaaattaatacccttatgcagttgcatttaaccttaagaaaaatgtccttgggataaactccaatgtttaatacattgattttttttctaaagaaatgggttttaaactttggtatgcatcagaattccctatagatctttttgaaaatataggtacctgggtatcacacatagaacttttaattctgctggtgtaggctgttgcccaaacatctataattttactgagctcttcaagtgattctgataacacagcctggattgagaatttttataagattggcaatggaaaaacatttattcttttaaataataatttttttaaaacccaagaggtcaggggattttataaaccaatagccaagtgttctttaaataggaggcacccttcccattgtgccaaaatcatcttttcatttattttgaaatttgtatgattattttatacttgtatgttgcctttcttcgaaggcgcctgaagcactttataaacacaaatcctcacaatacctctgtgaggtaggtaaatagtacttttctatgtagtaaacctggaatatggagaatttcataacagttcattctacttaataatgcaataatggagctccaagttgtcttggacttctacaccacactcagacttctggaaagttttctgtacctcattctttagtccctgtcaaggttagtaaataaaataagtgacataaaaaaaaaaaaaactaaactacttgttgtgttgaaagttcctttttgccagttatgttcaggaaacccaataacctgaaaaagtttgactttgatgtgacatcttcatattcatcaatgctgataattgtccaaaggcatcttcactatgtctgctaaataacatccaatgtgggcgttatctgttgtctaggggatgaattttaagttacaataaaatatttttctttgttttgcaaaaaaaaaaa

SEQ ID NO: 11236 - DNA, 2924 bp, Homo sapiens
tccttcccccaaccacccgcgcagtcacaaccggttcagactggccggggtgccccgcaaagagagacaagggagaaaaagacagcagggaaaaccccggggaggagaaggcgaaagagaaggtggagctcagagaagggggccggctccccagctccatgtggccgccgccgctgcgggtctgtgggggcagagggcggcggctcccggggcagcgcgtagcgggaccgattgcctaatactccggcaggggccggggccgcagctggctcggataaatagccgcccggctggcccggagctgcaggggagagcggcggccgcgatccccaccacaccaccagcccggccgcacggggcactgagccgggtgctgagcaccggaggccccgccgaggccgggactcaggtaacctgctctggcttcagcagcgcccagaggctttccagagagctgataaccacgaacaaacttggctgtcaaaagcaaatcaatgctttaccttgttttctgggtgcctagtctatccaacacaaactatccccgaagtttagtcaggatttacgctaaatatattacttatatagacctgcagagaaacgcctcctgattttgtcttacaatggaacttaaaaagtcgcctgacggtggatggggctgggtgattgtgtttgtctccttccttactcagtttttgtgttacggatccccactagctgttggagtcctgtacatagaatggctggatgcctttggtgaaggaaaaggaaaaacagcctgggttggatccctggcaagtggagttggcttgcttgcaacttgccctcttgggatacatgcaacaagcaactccccaagccagctccaacaactttcttgtacaaagttgcctctaatgtttagaagaatattggaagacactatttttgctattttataccatatagcaacgatattttaacagattctcaagcaaattttctagagtcaagactattttctcatagcaaaatttcacaatgactgactctgaatgaattatttttttttatatatcctattttttatgtagtgtatgcgtagcctctatctcgtatctttttctatttctcctccccacaccatcaatgggactattctgttttgctgttattcactagttcttaacattgtaaaaagtttgaccagcctcagaaggctttctctgtgtaaagaagtataatttctctgccgactccatttaatccactgcaaggcacctagagagactgctcctattttaaaagtgatgcaagcatcatgataagatatgtgtgaagcccactaggaaataaatcattctcttctctatgtttgacttgctagtaaacagaagacttcaagccagccaggaaattaaagtggcgactaaaacagccttaagaattgcagtggagcaaattggtcattttttaaaaaaatatattttaacctacagtcaccagttttcattattctatttacctcactgaagtactcgcatgttgtttggtacccactgagcaactgtttcagttcctaaggtatttgctgagatgtgggtgaactccaaatggagaagtagtcactgtagactttcttcatggttgaccactccaaccttgctcacttttgcttcttggccatccactcagctgatgtttcctgggaagtgctaattttacctgtttccaaattggaaacacatttctcaatcattccgttctggcaaatgggaaacatccatttgctttgggcacagtggggatgggctgcaagttcttgcatatcctcccagtgaagcatttatttgctactatcagattttaccactatcaaatataattcaagggcagaattaaacgtgagtgtgtgtgtgtgtgtgtgtgtgtgtgctatgcatgctctaagtctgcatgggatatgggaatggaaaagggcaataagaaattaatacccttatgcagttgcatttaaccttaagaaaaatgtccttgggataaactccaatgtttaatacattgattttttttctaaagaaatgggttttaaactttggtatgcatcagaattccctatagatctttttgaaaatataggtacctgggtatcacacatagaacttttaattctgctggtgtaggctgttgcccaaacatctataattttactgagctcttcaagtgattctgataacacagcctggattgagaatttttataagattggcaatggaaaaacatttattcttttaaataataatttttttaaaacccaagaggtcaggggattttataaaccaatagccaagtgttctttaaataggaggcacccttcccattgtgccaaaatcatcttttcatttattttgaaatttgtatgattattttatacttgtatgttgcctttcttcgaaggcgcctgaagcactttataaacacaaatcctcacaatacctctgtgaggtaggtaaatagtacttttctatgtagtaaacctggaatatggagaatttcataacagttcattctacttaataatgcaataatggagctccaagttgtcttggacttctacaccacactcagacttctggaaagttttctgtacctcattctttagtccctgtcaaggttagtaaataaaataagtgacataaaaaaaaaaaaaactaaactacttgttgtgttgaaagttcctttttgccagttatgttcaggaaacccaataacctgaaaaagtttgactttgatgtgacatcttcatattcatcaatgctgataattgtccaaaggcatcttcactatgtctgctaaataacatccaatgtgggcgttatctgttgtctaggggatgaattttaagttacaataaaatatttttctttgttttgcaaaaaaaaaaa

SEQ ID NO: 11237 - DNA, 2616 bp, Homo sapiens
tccttcccccaaccacccgcgcagtcacaaccggttcagactggccggggtgccccgcaaagagagacaagggagaaaaagacagcagggaaaaccccggggaggagaaggcgaaagagaaggtggagctcagagaagggggccggctccccagctccatgtggccgccgccgctgcgggtctgtgggggcagagggcggcggctcccggggcagcgcgtagcgggaccgattgcctaatactccggcaggggccggggccgcagctggctcggataaatagccgcccggctggcccggagctgcaggggagagcggcggccgcgatccccaccacaccaccagcccggccgcacggggcactgagccgggtgctgagcaccggaggccccgccgaggccgggactcagctgttggagtcctgtacatagaatggctggatgcctttggtgaaggaaaaggaaaaacagcctgggttggatccctggcaagtggagttggcttgcttgcaacttgccctcttgggatacatgcaacaagcaactccccaagccagctccaacaactttcttgtacaaagttgcctctaatgtttagaagaatattggaagacactatttttgctattttataccatatagcaacgatattttaacagattctcaagcaaattttctagagtcaagactattttctcatagcaaaatttcacaatgactgactctgaatgaattatttttttttatatatcctattttttatgtagtgtatgcgtagcctctatctcgtatctttttctatttctcctccccacaccatcaatgggactattctgttttgctgttattcactagttcttaacattgtaaaaagtttgaccagcctcagaaggctttctctgtgtaaagaagtataatttctctgccgactccatttaatccactgcaaggcacctagagagactgctcctattttaaaagtgatgcaagcatcatgataagatatgtgtgaagcccactaggaaataaatcattctcttctctatgtttgacttgctagtaaacagaagacttcaagccagccaggaaattaaagtggcgactaaaacagccttaagaattgcagtggagcaaattggtcattttttaaaaaaatatattttaacctacagtcaccagttttcattattctatttacctcactgaagtactcgcatgttgtttggtacccactgagcaactgtttcagttcctaaggtatttgctgagatgtgggtgaactccaaatggagaagtagtcactgtagactttcttcatggttgaccactccaaccttgctcacttttgcttcttggccatccactcagctgatgtttcctgggaagtgctaattttacctgtttccaaattggaaacacatttctcaatcattccgttctggcaaatgggaaacatccatttgctttgggcacagtggggatgggctgcaagttcttgcatatcctcccagtgaagcatttatttgctactatcagattttaccactatcaaatataattcaagggcagaattaaacgtgagtgtgtgtgtgtgtgtgtgtgtgtgtgctatgcatgctctaagtctgcatgggatatgggaatggaaaagggcaataagaaattaatacccttatgcagttgcatttaaccttaagaaaaatgtccttgggataaactccaatgtttaatacattgattttttttctaaagaaatgggttttaaactttggtatgcatcagaattccctatagatctttttgaaaatataggtacctgggtatcacacatagaacttttaattctgctggtgtaggctgttgcccaaacatctataattttactgagctcttcaagtgattctgataacacagcctggattgagaatttttataagattggcaatggaaaaacatttattcttttaaataataatttttttaaaacccaagaggtcaggggattttataaaccaatagccaagtgttctttaaataggaggcacccttcccattgtgccaaaatcatcttttcatttattttgaaatttgtatgattattttatacttgtatgttgcctttcttcgaaggcgcctgaagcactttataaacacaaatcctcacaatacctctgtgaggtaggtaaatagtacttttctatgtagtaaacctggaatatggagaatttcataacagttcattctacttaataatgcaataatggagctccaagttgtcttggacttctacaccacactcagacttctggaaagttttctgtacctcattctttagtccctgtcaaggttagtaaataaaataagtgacataaaaaaaaaaaaaactaaactacttgttgtgttgaaagttcctttttgccagttatgttcaggaaacccaataacctgaaaaagtttgactttgatgtgacatcttcatattcatcaatgctgataattgtccaaaggcatcttcactatgtctgctaaataacatccaatgtgggcgttatctgttgtctaggggatgaattttaagttacaataaaatatttttctttgttttgcaaaaaaaaaaa

SEQ ID NO: 11238 - DNA, 2746 bp, Homo sapiens
tccttcccccaaccacccgcgcagtcacaaccggttcagactggccggggtgccccgcaaagagagacaagggagaaaaagacagcagggaaaaccccggggaggagaaggcgaaagagaaggtggagctcagagaagggggccggctccccagctccatgtggccgccgccgctgcgggtctgtgggggcagagggcggcggctcccggggcagcgcgtagcgggaccgattgcctaatactccggcaggggccggggccgcagctggctcggataaatagccgcccggctggcccggagctgcaggggagagcggcggccgcgatccccaccacaccaccagcccggccgcacggggcactgagccgggtgctgagcaccggaggccccgccgaggccgggactcaggacctgcagagaaacgcctcctgattttgtcttacaatggaacttaaaaagtcgcctgacggtggatggggctgggtgattgtgtttgtctccttccttactcagtttttgtgttacggatccccactagctgttggagtcctgtacatagaatggctggatgcctttggtgaaggaaaaggaaaaacagcctgggttggatccctggcaagtggagttggcttgcttgcaacttgccctcttgggatacatgcaacaagcaactccccaagccagctccaacaactttcttgtacaaagttgcctctaatgtttagaagaatattggaagacactatttttgctattttataccatatagcaacgatattttaacagattctcaagcaaattttctagagtcaagactattttctcatagcaaaatttcacaatgactgactctgaatgaattatttttttttatatatcctattttttatgtagtgtatgcgtagcctctatctcgtatctttttctatttctcctccccacaccatcaatgggactattctgttttgctgttattcactagttcttaacattgtaaaaagtttgaccagcctcagaaggctttctctgtgtaaagaagtataatttctctgccgactccatttaatccactgcaaggcacctagagagactgctcctattttaaaagtgatgcaagcatcatgataagatatgtgtgaagcccactaggaaataaatcattctcttctctatgtttgacttgctagtaaacagaagacttcaagccagccaggaaattaaagtggcgactaaaacagccttaagaattgcagtggagcaaattggtcattttttaaaaaaatatattttaacctacagtcaccagttttcattattctatttacctcactgaagtactcgcatgttgtttggtacccactgagcaactgtttcagttcctaaggtatttgctgagatgtgggtgaactccaaatggagaagtagtcactgtagactttcttcatggttgaccactccaaccttgctcacttttgcttcttggccatccactcagctgatgtttcctgggaagtgctaattttacctgtttccaaattggaaacacatttctcaatcattccgttctggcaaatgggaaacatccatttgctttgggcacagtggggatgggctgcaagttcttgcatatcctcccagtgaagcatttatttgctactatcagattttaccactatcaaatataattcaagggcagaattaaacgtgagtgtgtgtgtgtgtgtgtgtgtgtgtgctatgcatgctctaagtctgcatgggatatgggaatggaaaagggcaataagaaattaatacccttatgcagttgcatttaaccttaagaaaaatgtccttgggataaactccaatgtttaatacattgattttttttctaaagaaatgggttttaaactttggtatgcatcagaattccctatagatctttttgaaaatataggtacctgggtatcacacatagaacttttaattctgctggtgtaggctgttgcccaaacatctataattttactgagctcttcaagtgattctgataacacagcctggattgagaatttttataagattggcaatggaaaaacatttattcttttaaataataatttttttaaaacccaagaggtcaggggattttataaaccaatagccaagtgttctttaaataggaggcacccttcccattgtgccaaaatcatcttttcatttattttgaaatttgtatgattattttatacttgtatgttgcctttcttcgaaggcgcctgaagcactttataaacacaaatcctcacaatacctctgtgaggtaggtaaatagtacttttctatgtagtaaacctggaatatggagaatttcataacagttcattctacttaataatgcaataatggagctccaagttgtcttggacttctacaccacactcagacttctggaaagttttctgtacctcattctttagtccctgtcaaggttagtaaataaaataagtgacataaaaaaaaaaaaaactaaactacttgttgtgttgaaagttcctttttgccagttatgttcaggaaacccaataacctgaaaaagtttgactttgatgtgacatcttcatattcatcaatgctgataattgtccaaaggcatcttcactatgtctgctaaataacatccaatgtgggcgttatctgttgtctaggggatgaattttaagttacaataaaatatttttctttgttttgcaaaaaaaaaaa

SEQ ID NO: 11239 - DNA, 2619 bp, Homo sapiens
gagacggagttttgcactgtcgcccaggctggagtgcaattgcgtgatctcggctcaccgcaagctccgccttctgggttcatgccattctcctgcctcagcctcctgagtagctgggactaaaggcacctgccaccacgcccggctaatgttttttgttgttgttgtttagtagagacggggtttcaccgtgttagccaggatggtctccatctcctgacctcgtgatccgcccgcctcggcctcccaaagtgctgggtttacaggcgtgagccaccgcacccagcctgcctgcttattcttatccaaatatttgagagattctcttcttctaactcccagtaaaccacgctggaagtagtggagtaatatatatactaattataactatatataaaactgatataattagggtatgggatggatgttcatactatttccatgaaacttactttttttcttactgccttttcaggttggttttatgactggacccagacctatgatattgcattttattttagtggcttctgcgtcctgctgggaggttttattctgctgctggcagccttgccctcttgggatacatgcaacaagcaactccccaagccagctccaacaactttcttgtacaaagttgcctctaatgtttagaagaatattggaagacactatttttgctattttataccatatagcaacgatattttaacagattctcaagcaaattttctagagtcaagactattttctcatagctttatgtagtgtatgcgtagcctctatctcgtatctttttctatttctcctccccacaccatcaatgggactattctgttttgctgttattcactagttcttaacattgtaaaaagtttgaccagcctcagaaggctttctctgtgtaaagaagtataatttctctgccgactccatttaatccactgcaaggcacctagagagactgctcctattttaaaagtgatgcaagcatcatgataagatatgtgtgaagcccactaggaaataaatcattctcttctctatgtttgacttgctagtaaacagaagacttcaagccagccaggaaattaaagtggcgactaaaacagccttaagaattgcagtggagcaaattggtcattttttaaaaaaatatattttaacctacagtcaccagttttcattattctatttacctcactgaagtactcgcatgttgtttggtacccactgagcaactgtttcagttcctaaggtatttgctgagatgtgggtgaactccaaatggagaagtagtcactgtagactttcttcatggttgaccactccaaccttgctcacttttgcttcttggccatccactcagctgatgtttcctgggaagtgctaattttacctgtttccaaattggaaacacatttctcaatcattccgttctggcaaatgggaaacatccatttgctttgggcacagtggggatgggctgcaagttcttgcatatcctcccagtgaagcatttatttgctactatcagattttaccactatcaaatataattcaagggcagaattaaacgtgagtgtgtgtgtgtgtgtgtgtgtgtgtgctatgcatgctctaagtctgcatgggatatgggaatggaaaagggcaataagaaattaatacccttatgcagttgcatttaaccttaagaaaaatgtccttgggataaactccaatgtttaatacattgattttttttctaaagaaatgggttttaaactttggtatgcatcagaattccctatagatctttttgaaaatataggtacctgggtatcacacatagaacttttaattctgctggtgtaggctgttgcccaaacatctataattttactgagctcttcaagtgattctgataacacagcctggattgagaatttttataagattggcaatggaaaaacatttattcttttaaataataatttttttaaaacccaagaggtcaggggattttataaaccaatagccaagtgttctttaaataggaggcacccttcccattgtgccaaaatcatcttttcatttattttgaaatttgtatgattattttatacttgtatgttgcctttcttcgaaggcgcctgaagcactttataaacacaaatcctcacaatacctctgtgaggtaggtaaatagtacttttctatgtagtaaacctggaatatggagaatttcataacagttcattctacttaataatgcaataatggagctccaagttgtcttggacttctacaccacactcagacttctggaaagttttctgtacctcattctttagtccctgtcaaggttagtaaataaaataagtgacataaaaaaaaaaaaaactaaactacttgttgtgttgaaagttcctttttgccagttatgttcaggaaacccaataacctgaaaaagtttgactttgatgtgacatcttcatattcatcaatgctgataattgtccaaaggcatcttcactatgtctgctaaataacatccaatgtgggcgttatctgttgtctaggggatgaattttaagttacaataaaatatttttctttgttttgcaaaaaaaaaaa

SEQ ID NO: 11240 - DNA, 2295 bp, Homo sapiens
tccttcccccaaccacccgcgcagtcacaaccggttcagactggccggggtgccccgcaaagagagacaagggagaaaaagacagcagggaaaaccccggggaggagaaggcgaaagagaaggtggagctcagagaagggggccggctccccagctccatgtggccgccgccgctgcgggtctgtgggggcagagggcggcggctcccggggcagcgcgtagcgggaccgattgcctaatactccggcaggggccggggccgcagctggctcggataaatagccgcccggctggcccggagctgcaggggagagcggcggccgcgatccccaccacaccaccagcccggccgcacggggcactgagccgggtgctgagcaccggaggccccgccgaggccgggactcaggacctgcagagaaacgcctcctgattttgtcttacaatggaacttaaaaagtcgcctgacggtggatggggctgggtgattgtgtttgtctccttccttactcagtttttgtgttacggatccccactagctgttggagtcctgtacatagaatggctggatgcctttggtgaaggaaaaggaaaaacagcctgggttggatccctggcaagtggagttggcttgcttgcaatgctcctattttaaaagtgatgcaagcatcatgataagatatgtgtgaagcccactaggaaataaatcattctcttctctatgtttgacttgctagtaaacagaagacttcaagccagccaggaaattaaagtggcgactaaaacagccttaagaattgcagtggagcaaattggtcattttttaaaaaaatatattttaacctacagtcaccagttttcattattctatttacctcactgaagtactcgcatgttgtttggtacccactgagcaactgtttcagttcctaaggtatttgctgagatgtgggtgaactccaaatggagaagtagtcactgtagactttcttcatggttgaccactccaaccttgctcacttttgcttcttggccatccactcagctgatgtttcctgggaagtgctaattttacctgtttccaaattggaaacacatttctcaatcattccgttctggcaaatgggaaacatccatttgctttgggcacagtggggatgggctgcaagttcttgcatatcctcccagtgaagcatttatttgctactatcagattttaccactatcaaatataattcaagggcagaattaaacgtgagtgtgtgtgtgtgtgtgtgtgtgtgtgctatgcatgctctaagtctgcatgggatatgggaatggaaaagggcaataagaaattaatacccttatgcagttgcatttaaccttaagaaaaatgtccttgggataaactccaatgtttaatacattgattttttttctaaagaaatgggttttaaactttggtatgcatcagaattccctatagatctttttgaaaatataggtacctgggtatcacacatagaacttttaattctgctggtgtaggctgttgcccaaacatctataattttactgagctcttcaagtgattctgataacacagcctggattgagaatttttataagattggcaatggaaaaacatttattcttttaaataataatttttttaaaacccaagaggtcaggggattttataaaccaatagccaagtgttctttaaataggaggcacccttcccattgtgccaaaatcatcttttcatttattttgaaatttgtatgattattttatacttgtatgttgcctttcttcgaaggcgcctgaagcactttataaacacaaatcctcacaatacctctgtgaggtaggtaaatagtacttttctatgtagtaaacctggaatatggagaatttcataacagttcattctacttaataatgcaataatggagctccaagttgtcttggacttctacaccacactcagacttctggaaagttttctgtacctcattctttagtccctgtcaaggttagtaaataaaataagtgacataaaaaaaaaaaaaactaaactacttgttgtgttgaaagttcctttttgccagttatgttcaggaaacccaataacctgaaaaagtttgactttgatgtgacatcttcatattcatcaatgctgataattgtccaaaggcatcttcactatgtctgctaaataacatccaatgtgggcgttatctgttgtctaggggatgaattttaagttacaataaaatatttttctttgttttgcaaaaaaaaaaa

SEQ ID NO: 11241 - DNA, 798 bp, Homo sapiens
tccttcccccaaccacccgcgcagtcacaaccggttcagactggccggggtgccccgcaaagagagacaagggagaaaaagacagcagggaaaaccccggggaggagaaggcgaaagagaaggtggagctcagagaagggggccggctccccagctccatgtggccgccgccgctgcgggtctgtgggggcagagggcggcggctcccggggcagcgcgtagcgggaccgattgcctaatactccggcaggggccggggccgcagctggctcggataaatagccgcccggctggcccggagctgcaggggagagcggcggccgcgatccccaccacaccaccagcccggccgcacggggcactgagccgggtgctgagcaccggaggccccgccgaggccgggactcagctgttggagtcctgtacatagaatggctggatgcctttggtgaaggaaaaggaaaaacagcctgggttggatccctggcaagtggagttggcttgcttgcaagtcctgtctgcagtctctgtgtctcatcttttggagcaagacctgtcacaatcttcagtggcttcatggtggctggaggcctgatgttgagcagttttgctcccaatatctactttctgtttttttcctatggcattgttgtaggtcttggatgtggtttattatacactgcaacagtgaccattacgtgccagtattttgacgatcgccgaggcctagcgcttggcctgatttcaacagatttttgatctatggcaaatttctcaaccattccagccctaggtcac

SEQ ID NO: 11242 - DNA, 341 bp, Homo sapiens
tttaccttgttttctgggtgcctagtctatccaacacaaactatccccgaagtttagtcaggatttacgctaaatatattacttatatagtaagttattcgatataacatttttggtcaattttctaggctacagttttgatgtgttttttaaaaatcttgaattaactgaataacagttcatattgaaggtggattctcccattccctgcacccaggattttccgttgttccatcaaattctgtaaatcggtatgccctaacagtttcttatatttgagttggcttcagcttcgagaaattcttcaggcaggtttaggcagagggctgaggaagctagag

SEQ ID NO: 11243 - DNA, 337 bp, Homo sapiens
cggccgcgatccccaccacaccaccagcccggccgcacggggcactgagccgggtgctgagcaccggaggccccgccgaggccgggactcaggtaaagggctggagcttgcggggagggttccaaaggtgggcagcagcccctgctgcccagcgtcctagaggcaagaagtaactccgactcggagcagtaggagggggcggtggagcagcatggaaccgggcttttgtctggggtgtgtgccgggggcttcgagtgtccacggtgcgcccgcccctcgccgccccctttttgatggggtgcttctacaaagtgggcaagttttcccgggaatccga

SEQ ID NO: 11244 - DNA, 433 bp, Homo sapiens
tcaatcactttgtcctctcctacccactcacatccttaccttgagcttaattgagagaaaaagatgaaagcataaaactttgtggagtgaaaaattaggcaaccaaaatagcatcttatgaagggtaactcatggtggatgtgacaaagaaaagatgataaacctataaagggctaccatcctaatatttcagaacaggcttcccggtgataagcgattatatttcaaagagataagatgtgatgcatattctctttatcatgaaaatgtgaaactgtatcttcttgaaactgaaaataaagatgtatactgactatatggctatgtaatggttattaattatacagttttattttgcttatgagtctgaaaaatatgtgtacaagtgaaaataaattgataagaatgcaagttattttacgtaaaaaaaaga

SEQ ID NO: 11245 - DNA, 467 bp, Homo sapiens
aatagagtctccaaaacaaggtttagtattcatggtgataccaggcatctggtcattttctccaatttaatgaaaattacttggtgtaatgtttactctaggtcctgagataaatagattttgtagctcagttgtcctcagttcttgtttaacttttttttttattagaaatatctgctaaatatagtcagatgcctttttggctcattgatatgatgtttttctccttgagtttgttaatgtgacaagttgtactgtagtcattaaggcaggtatgttagaatgaaccagaatgttcgatgagcaagaatgaacaaatagaccaatggaacaaaataaagagccctgaagtagatctctctctatatatatatgtggttgtctaatttgtgataaagtttcctcggccatgtggttgggaaatggtggtcttttcaataaaaagcactggatcagttgtgtatctg

SEQ ID NO: 11246 - DNA, 425 bp, Homo sapiens
gccgcgacggtattgaaggagttgccagcaaggaagtgtggatttattggtaattgttttattgttgttgctttggttaaaatcctgtcttaagaaacattgttttactcttcagttttcataatcattcttcttatgtatgattgaacatctacaaatttcctcctctgatcttccgatcaaatggtaaaattgccatcttttcagaacagttatcaggattcgacatcggaaattgattttcaacctttggcattttctgagtgacttagggtagggagagacctccctctaacacccgggtttgtgtgggctgcagaaagctgctggtctaatcctagatgcagacattgaccaggctgtgcctgggtttgggttttgtagggtcagaaatatgtttaagagttttttccgttcataaagag

SEQ ID NO: 11247 - DNA, 193 bp, Homo sapiens
agtcaccaagtccttagaatttatcctgctctactgcatgtttcttcctcaaaccgtccttcacctctgtactgcagcccctttagaaattagcttgagaggccagatgtggtggctcaaacctgtaatcccagcactttgggaggccgagacgggcagatcacctgaggtcaggagtttgagaccagcctgg

SEQ ID NO: 11248 - DNA, 1028 bp, Homo sapiens
  misc_feature (418)..(418): n is a, c, g, or t
  misc_feature (422)..(422): n is a, c, g, or t
  misc_feature (426)..(428): n is a, c, g, or t
  misc_feature (430)..(430): n is a, c, g, or t
  misc_feature (432)..(432): n is a, c, g, or t
  misc_feature (437)..(437): n is a, c, g, or t
  misc_feature (439)..(439): n is a, c, g, or t
  misc_feature (441)..(443): n is a, c, g, or t
  misc_feature (1018)..(1019): n is a, c, g, or t
gcttggtaaatgggtaatgcccttgattccttgactgtaggacatagctgatctaaagtactctgtcagttttaccttcacccatgactgtcattagttgtcaaagttgaaaagtactttagctgtgagaaatccttgtatgtttttattataagaggtataatcatcctcaaagcctgtttttattacatgatgtggactgattattttttctatcacagtgttaacagatggattttattgtaaatacaaagaaaacatattgattattgtagtattcttatgtcacctggccttttgcgtgagattatttattatttctagcaaggctttcttcctttcttattgcccagagactgactgatacatcttttgttatttttacacataaattaaacatagccttttggacaaattnactnaatnnnantntatanantnnnattgagtaaatttttatcagaattttaaaaataaaagagcttagactcagtagaactcagtagaagcttcactatttactccagcgtgtgtaaattgtacttactctattctcagagtatatttactgtccttaccattgattctttccctttgctaatttttttttttgttaatggtagctgcgactttaggtggggtatattttcttctcctaagagaatagacagtttttccagattcatcatcattgactgtcaagaaaggacccttcagcaaggctgtaccctcaatgcagttgatggcctgtcttcacggatttacagacttggcctgatgcccatgtaaattcaagctttggcttgtggtaacaaccacaagaagacaagcatctgtggtgcggaggcaagcaggctaactaggagttgacaagctaagaaagtgaaactgttctttcttagttaactgtctttctctggagctctgttattttgagtataatatttccacgacacttagtaaatgcaagctaaaatgtaataataataaattgtattggagaaacctaaaaaaaaanntttttaaaa

SEQ ID NO: 11249 - DNA, 831 bp, Homo sapiens
  misc_feature (216)..(216): n is a, c, g, or t
  misc_feature (233)..(233): n is a, c, g, or t
  misc_feature (236)..(236): n is a, c, g, or t
  misc_feature (260)..(260): n is a, c, g, or t
  misc_feature (821)..(822): n is a, c, g, or t
ttgggagacccagtggttaccaaatccctaacagagaaagcagtaaaatggtccacagcaggttgaacggtcatagagaacatctcattaaactacattatatttttgagaataacaccatttctgccctaattggttaattaatatcacatctcctgtgataaacgtgccattgaaagttttttttattggtacttttctaggtgtcgcacctcnttcttttgtagccattnagncaggaacaacactgtatcaacttncaacagcaggagaagctgtttcctggaactcaatatttattctgatgatcttggctgttctttctattctgccagccatcttccaaaaaaaactaaagcagaaatttgagtaaaaataatcatctgatttttagttttgctgtcatcaccatctcaggattaacagctgcgactttaggtggggtatattttcttctcctaagagaatagacagtttttccagattcatcatcattgactgtcaagaaaggacccttcagcaaggctgtaccctcaatgcagttgatggcctgtcttcacggatttacagacttggcctgatgcccatgtaaattcaagctttggcttgtggtaacaaccacaagaagacaagcatctgtggtgcggaggcaagcaggctaactaggagttgacaagctaagaaagtgaaactgttctttcttagttaactgtctttctctggagctctgttattttgagtataatatttccacgacacttagtaaatgcaagctaaaatgtaataataataaattgtattggagaaacctaaaaaaaaanntttttaaaa

SEQ ID NO: 11250 - DNA, 391 bp, Homo sapiens
ggtcacttgactggaattagaattctcttttgatgagtcttttttatattctgtctgggattgtatgtaaacttatctttcctttctaaagaacctcaacatgctaaaatttaaatgcagggttccaattcaaataaagcgtaaggaataaaaccgtttcccttttaaaaaatgtgtgaaattttaagtgggcttttttggggtttttgttttttcctaagttacttttcaaagtggaatacctttatacggacacgtgtaatcaaacatcattatttatatttacattctctttggaaaccatgggattctcaaggcccaaagccaagtgcccaagaaccctgaccgaaagtgtgtggttgcctattgagggagcaattgctatattata

SEQ ID NO: 11251 - DNA, 456 bp, Homo sapiens
agcattttctcttagacaaagtatataaagcctcttactcttggaatgaccttcattagtttctttcctgtttggtgagcttcatatttgcagagatcttgaaaattagtaagggcatataagaaagaaaaatatctcaaaattatggacagaattacaatataatctgacaggccaaagtcacactaatatttagggaacaagctgccttgattatttattcccttcgacttttaaatactcttcaattttacactaataaaacattttttggaagatagtatttgccttgtattttataagtaatgtagaacaagaaggaaagaaaaatgagggggttattttttcactgtacagggtcagtgtgatcagtcacatttatagggcagaagcaatatagagactataaaatgtaacagtgtttcactctatctgcataattactcagttactccc

SEQ ID NO: 11252 - DNA, 454 bp, Homo sapiens
ctctatgttcctgaatactttacttctctcacgcttccactccaaggcgcatacccaggctcatccattcacctcacgtacaaaatgaagagggcaattttctgtagtaaagatatatgggagaagccaacctcaagttcacatctgttaaagcatttctctgttggcaacatttttacaagcctctcaaagctatatgcttaattaaaataaaagggtgatatacatcattgcaccaagtctttgctgatatagaggaaggaaggggaaaaatgagcgcattagttctcttttattaaaagagttatttcagcatgacatctcaactaaagactagccattagcaaaattaaaaattaggtgatgttgattttgggaaatgtacacatttaatgccttcctctttcctccggctgcatctcctgtcccggctccaagctgcttactttcctcc

SEQ ID NO: 11253 - DNA, 262 bp, Homo sapiens
ctagagtgcagtggtacaatcatacttcactgcagcctccaaatcctgggctcaagtgatcctcccgcctcagcgtcccaagtagctgggaatacaggtacacatcaccgcacctgaatatttttttgtttttgtagagctgagctttcactgtgttactcaggctggtctcaaatcccgaccttaagcagtcctcctgccttggcctcccaaaccactgggattacaggtgtgagccaccacacctggcctcaatctgttt

SEQ ID NO: 11254 - DNA, 358 bp, Homo sapiens
aaataaatgtctttgttatctcgcttctatctccgtgcatatttgtttcatatattttattcatattttggttgtttcaggcaggaaggtaaatccagtccttgttaactccattttgaccagaatgtaacaaaaacaggtggcacaagtaggttgaataaaagacaacatttttgcttccaacaagaaacacccttgaaatataaagcacaaataggttgaaagaaaatggatggggaaagatacatcatgccaacaggaatcaaaacaagtctggagtggttacattagtaccaaagtagatttcagaacaaagcacattgccaggaataaagtgcatcattttaaaagtgtcgaa

SEQ ID NO: 11255 - DNA, 710 bp, Homo sapiens
ttccctgcctcttccagctcctagagaccacctccatctgtggcttgtggcgcctttcgccatctgcaagggcagcagcgtagcagcttccactttcctctctctgcttcctttgtcacgctgccctcttctcgctctctacctcctgccttcctcctacgaggacccttgtgatgacatgggcccacccaggttatccaggataatctctcatttcaggacccttaattcagtcacttctgcaaagtcccttttgccatgtaaggtagcatgttcacaggctctgggggttaggatgtcaacatctttgggggattattcttcagcctaccacacagcacataataaaatccatgggcagaggggatagcagcagtaaggtgtccctcaaacatgagttaaaatgactctgacgatagaatctgggtgagatggtgggatgctcccgaaataaactccaaggcaggtggccaagttcagtgacgacatagctgcgtagcttatctgagaaaggatgtctctgatggggggccagccggaagacgtctttcctggaagaggagggaggtggggcagtcttgggagaagtgagactttgggtcccacggccagctcctgccacattctcagtggatttcaggttgggaggagggataccattacagttgtacagttctggaagacggtccaggcccacatccccttctctg

SEQ ID NO: 11256 - DNA, 309 bp, Homo sapiens
cttttctacattacggtttcatgtgaccaaattatggccatagtatttcagatttattcatccactaagtatttattaagtacctattctgtgctaggtatcaggtgctggggctatagcagtaaggaaagtaagtggacaaaaggattccacacctgtcacaggcgctgccccactccctgagtcaggtgagatgagctccggaaggcaggtgggtaatggatgatgctcacctagtgttccttgggccatgaagatcaaatatttcagccccataggatgtgtaagcttgatttctggtcatctctc

SEQ ID NO: 11257 - DNA, 915 bp, Homo sapiens
gcacacatggccccttctctggaagcctctatatttaaacacgtgtggccccccgtctggaagcctttatactgaaacacacgtgaccggctgtctggaaagtgagctgggcgccgtcactgatgatgtcttttctgtgggacacagtcaggcacaccccttgcccttctgagcctgggacgagacagagctgacaggcggagcccaaaggtgtgccgagcaccagtgctgccaggggtgagagtcacatgcagctgtggctgccgtggacgcctgcttttttgccctctgcagtttgcctaacccctgcagtttgcaggcagccctgggcctctggacagagcagccctggttccctgtcagggtgagtgatccagaagaatctggcagcccgagccccgcgggtaaggagcagtcagcaccgtcaggaaccccgcggagggagcagccgtgcaggctggtgggcactgctttccagggaggcccacatctgtcactccagaagcacccaagtttactctgccacgtgaggacgctcatccctcggtcacatgaacctagaccttgcttcctttggaagctgcagtcgggtgtcctgaggcaaggtggccccacttccagctgctgtgcctggcacggcctctgaggcagatgggccgcccagcttgggtgcagtcggtcctctgttccctgcacctgtcgtggcctagactccaaaaaataaaaaattaggtgtggtggcacactcctgtcatcccagctattttgggaggtagaggcaggaggctcaggagttgggggctgcagtgagctgtgattgctccactgccctctagtttgtgcgacagagggagactttgcctcaaagaaacaaatgaaaaagagctgggagctcacagccctgccttaagagct

SEQ ID NO: 11258 - DNA, 368 bp, Homo sapiens
attcatgggtcaatcagccctgcttgaggcaaggcctgggttcagtggataaggttgcattttctgaagctcttagctggtgaggttcccccaaaattttcctttaaaaaacaaaaaagaggaatctatgtaatgtgagtctcccatcagtgctcatgcttttcttattcagctgagtttattattcaacattcacaaatttcatagtttgtggctatcattccccataaataattgaggctgtcatataattgatgagcttttacatttcaccattaacttactctctgatttctaaaccatcaggaatgtgcactttttctttcccaacacagtagttgatttgcttatgtttaatttcataaatc

SEQ ID NO: 11259 - DNA, 470 bp, Homo sapiens
ttggctcatgcaatgtgtcaagcaatgtatttgagattggaaaaagaaattagtagccatctgaaatcctggaaaccttgtctaacaccactatggtagatataagcagaaaaaagcttccccctgcctttttttttttaattgaaaacatgggaccttaatctagtgggggtaaaggaagaaaatgagggaagccagcaaagcaaacttcatggaatagctgccttctgagctttattttgagtaaatagtacattctactggtatagagtttttggaggaattttatgctttctgtgcccttaatttcttccttccttgcttgcttcctttctttttctttagtttttttctctctcttttttatcttcctcccttcctctcttcctcctcccttcccccactccttcctttttattctttgtctcattttctttcttttctccctttctcttttcctacctccctca

SEQ ID NO: 11260 - DNA, 167 bp, Homo sapiens
tattttttgttctctctattgtttttcttttccttgatgttccaaaactccttattttgttgtctttctcctggaaaagcctccttcagctatctttttaggggtatttgctgatgacaaattatcttagattttttttatatgagaatgtcttcatttgctcttca

SEQ ID NO: 11261 - DNA, 443 bp, Homo sapiens
cattatataaaccacagaatccaaaaaggacaatattgataaaaatttaacattttcatttgtaggatataccataaatagagttaaaatacaaatgaaaaactaaaaatctgtattatatgtcttaaaagattatattgtgaaatattaaaagttcttttagctgggcacagtggctcacacctgtaatcccagcactttgggaggccaaggcgggctgattgcttgagcccaggagttcggaccatcctaggcaacaccatgagaccccgtctctaccaaaataacaaatattagccagggacagtggcgcacgtctgtggtgccagctactcaggaggctgtggcaggaggatttttgagcctgggaggcagaggttgcagtgagctgagatcgtgcccctgaacttgagcctgggtgacacagtgagactctgtctcaa

SEQ ID NO: 11262 - DNA, 369 bp, Homo sapiens
cttggagccacagtaaggtataaaaagcgcaaagcccaaaatgcaggcggaaagatctcagagagggaacaagtgggttcccaaactgagccacatgtcagagtcaagaaagaaaatgcctctgcaagcaggcttgaatcaggccaacccaataaaggtgcgcagagtctcagtggaagtctttgagaagccaccgagtagagactcagtggaaatctgcccttccattgtgtcaagtcacaagcagtaaagagtctcaaggaggggcaactgttccaattcccagagttgctgagctcacagctaacggtggcatggaggagacgccatccaaagaatgttaaacattaagcctagtgcatcctcttc

SEQ ID NO: 11263 - DNA, 542 bp, Homo sapiens
ctggggacaggaagacacatagttcattttatagaaataaaagatacagtggcaaggaaacattttcatcccatttaacatatggcatttaatttggtaatagtcccgggcaagcacagggaaaggaaggagaaaggagggggtattgctgtctataccaaggcacagaactgctgctcacacttcagtgatccctgcagatgggaagtatgtgttcatggttattgtagaaacctccagaatctttctttgttacagctttaatagaattgttcctaagaggcgactcagaaaacatacagattgaatgccaagttgtggaagtcacttttcagcttgtgtctaacaacccagcattctcagcaaagcagtttcctcatgagaagagtggaggagaccttttttttaaaaaaattatttattgtatgttgttcgtatcctatacaccacacatgacttttactgtattggaaatgtattatttcagtggtaaatactgcatatcttactgaaaaattaaaaccttttaaaaaacaaaaaaa

SEQ ID NO: 11264 - DNA, 229 bp, Homo sapiens
gctcttgctaattttctaaccacagagttcttaagcctaatctctttaattagtggttagtcaccattgcatttcagtttgtgtagatttatttctgaggggaagcaaaacttcacgtgttggcttagtgtgtctattaccctgaattctagcgagaaagagcccagtgtcttccgctgcacacacctgggattcatcttaataggggtgggcaaactatagcctgcag

SEQ ID NO: 11265 - DNA, 736 bp, Homo sapiens
ggggaggaccccccaaaaagcagagcggggcctccagggccatcttctctatggcttgtgaaaactgagcccagtattcccaagtttatgatggattctcagatttctaccattttcagctaaattcacttacaagaaagtttaaaatcttgtttgtaatgatctattcactcaaaatactgaagtgaggaattcgataactgctaatatctggaattctaagatatttaaatctagcctggttctaaaagagtgtcaataaatagtaactacaacacttttatattgacttaaatacattttattggttaaactgcataaatacatatttgctaagcattggtctttcagtggtcagaatggatattttcctacaattttgatgcaataggaagcaaataaataccacttgctgcaaggctattgccattcgtgagaatgtttctgcagccctcaagcctggatacagattttataaatggaaatggtttatttggtaaatattctctgcttcttaccttctgcattggagcataaagaaatctgtttagtttctaataaccagaaattatacacatgcttgcatcaaatgtgtattggccaaacctcgtgggcaaatgtgtagggagatcacttgagttgggcattttgaggagaaagagcctccactgccatccctgggcattctctgcctcaattctcagctgtggagctcagccctctgctgggaaatcat

SEQ ID NO: 11266 - DNA, 323 bp, Homo sapiens
attgatttgaaaaactgctaatgttagtaattccttgtaatatatatgacaggtattccccccaacccccagtttgtcctttgtcttttaatttttgggtagtcaaatctatcagttgtttcgtttatatggaatgagcatgacagtgtgtaatagtatgatctctggaatcagacatgcctggattctaatcctgacttgactacctttttttccctttttctttttttttttttttttgagatagagtctcactcttgtcgcccaggctcgagtgcagtggcacggtctctgctcactgcatcctccgcctcccaggttcg

SEQ ID NO: 11267 - DNA, 1205 bp, Homo sapiens
tgacattgcttttggtgttttagacatgaagtccttgcccatgcctatgtcctgaatggtaatgcctaggttttcttctcgggtttttatggttttacgtctaacgtttaggtctttaatccatcttgaattaatttttgtataaggtgtaaggaaggcatcatctttgagatgaatgtgaatgatcgtggaatattccttctgtgacagactttatttttgagacaggatctcactctgtcatccatgctgctgtgcagtggtgcaatcacagctcagtgcagccttgaactcctgggctcaaggaacactcctagcctccccagcagctgggactacaggtacaggcgctgccatgcccggttattctggcttcaagcaattctcccacctcagcctcccaaagtgctggacttacaggcaggagccactgcgcccccggcccttgtgacagacttttaatgaaaccattatatttacttctttgacagcctgttactatgtcaattcctccagccactacaaaacctgtcctcatggtttagagcattggcagtcactccctaaattggagtggagtaggaaggcagtctgtaggaggggcttatggactccttaagggcataggctgttggagtccctgctgagagatctctgccctaccttgtggaactggagtgaaacaacgggggcgttgcttccagccatctgggagagaggatccagagcttcccctcagagagctgggatgttgtcagcaggcatcagacagagcaaaaagccatttttctttattctattcctgatacaaagcaactgagatatgcgtttctctttggaattgaggaagggagaataatggagcttttgcggtgatggacagggaaaaagtgggggagcagttaattatccatcttgacaggtgtagacacaggctgggaagctgggtgtgtcttaatccctgctcctgaaccaccgtggggagcaggaagcctacagtttccttatatcagcaaatgcatcatgttgaaacaattttactgcttgctttctgaatttaaatatagattttccctgagaagggctcaagcatgcagatggtaagaaaaacaacagtctagaaagatatcttcaagttccttctcctggttggtggaaatagagcaattcttttccaaaatataatttttagagttttaaagtaa

SEQ ID NO: 11268 - DNA, 704 bp, Homo sapiens
catttcttatggatgatgggagaagatggaattaaccccaggctgatattagttgacaacaaatatcagagtgcttgctctgtgctctagttaatttgtcagatttcacagggatttttggtacaagaaagctttgtggaatatatgcattctatgcgccaggcttagtgcaaggtattattagagaaaaaagacttaaaatagaaggtactctatagctatattagatcaggtcagcacttgggaaagttagcttatagacccagttttgccattaaatacagaacttcataaggttctatggcttctctgggcctcagcttcttcatcaataaaatgggcagaggtgaaccagacgacctctaaggttcctttagattctaaaatgatgtaatttttaaaacctttgaaatgtttattcaggtcttctctccttgaggtgttcttgggaccggagatattccatttgaaaccctgagacaaccatacctcaagctcagagtgcttaagaattttctgccaggtgcggtggctcacaccagtaatcccagcatttggggaggccaaggcgggcggatcacgaagtcaggagatcgagaccatcctggctaacatggtgaaaccccgtctctactaaaaatacaaaaaattagccgggcgtggtggcgggtgcctatagtcccagctacttgggaggctgaggc

SEQ ID NO: 11269 - DNA, 863 bp, Homo sapiens
ctgaggtcaggagctcgagaccagcctggccaacatagtgaaaccccatctctactaaaaatacaaaaattagctgggcgtggtggcaggcgcctgtaatcccagctactcgggaggctgaggcaggagaatcgcttgaacctgggaggcagaggttgcagtgagttgagatcacgcccattgtactccagcctgagggacaagagcgagactttatctcaaaataaataaataaataaataaataaataaagtgatgttttcttctctctctttttttttttggttagaaagctttaaacagatccacaaacatgtacaaacacatggatatacacactttaattataattagtttaatttttttgggttcaatttcagatgcaaacatggaccaaggcatagatgttgcaaacattatgaagataattgcatctcttattgcattaaaggtttcatcagaatgtttagcgtggggtacttgatccagtgctgcctccgaatcccttctgcatttaggcatctgtttacacagccatctcggctactttctctcttctacaataaagaaaacttccagcttggagcttttcttggctcttttgttagtatatacaaggtaaggcttttagaagaggaaagaaaaatgggaaataaataacattgctattgttagaatgagagatggccttagttcacttattttttaatgcttctttctggaatattcatacatatcttgacataaccaaatctatacaatatattgggaagtgagggtacagaaatttcttcttttaaaatattatttaatatactcgagtgtgtagacatgtttgcatttacatatggtattacacattg

SEQ ID NO: 11270 - DNA, 785 bp, Homo sapiens
tgctggccgggcgagaggctggcggctgggctctcgcgcccctccctgcagggctcaggctctccccctcctgtcttctccgcgctgttcctcgtcatggcggccctcagcaagtccatccctcataactgctatgagatcggccacacttggcacccttcctgccgggtctccttcctgcagatcaccgggggcgccctggaggagtccctgaagatctatgctcctctgtacttgattgcagcaattctccggaaacggaaattagactattatttacacaaactactccctgagatcctacaatccgcttcatttctaactgctaatggggccttgtatatggctttcttttgcattttaaggttggtactcataatcaccatagatagccacagaaacactattcagaatgggtgtagcaagaggaaccatcacaacattaagaaatggagaagtccttttgttttgcatcacagctgccatgtacatgttctttttcaggtgcaaggatggcttgaaaggatttacattttctgcacttaggttcattgtagggaaggaagaaattcccacacattctttttcaccagaggcagcatatgcaaaagtggaacaaaagagagagcaacatgaggaaaaacccagaagaatgaatatgattggtctagtcaggaaatttgtggattcaatatgcaaacatggaccaaggcatagatgttgcaaacattatgaagataattgcatctcttattgcattaaagtaagtatatgaaagtatgtac

SEQ ID NO: 11271 - DNA, 3317 bp, Homo sapiens
tgctggccgggcgagaggctggcggctgggctctcgcgcccctccctgcagggctcaggctctccccctcctgtcttctccgcgctgttcctcgtcatggcggccctcagcaagtccatccctcataactgctatgagatcggccacagaaacactattcagaatgggtgtagcaagaggaaccatcacaacattaagaaatggagaagtccttttgttttgcatcacagctgccatgtacatgttctttttcaggtgcaaggatggcttgaaaggatttacattttctgcacttaggttcattgtagggaaggaagaaattcccacacattctttttcaccagaggcagcatatgcaaaagtggaacaaaagagagagcaacatgaggaaaaacccagaagaatgaatatgattggtctagtcaggaaatttgtggattcaatatgcaaacatggaccaaggcatagatgttgcaaacattatgaagataattgcatctcttattgcattaaaggtttcatcagaatgtttagcgtggggtacttgatccagtgctgcctccgaatcccttctgcatttaggcatctgtttacacagccatctcggctactttctctcttctacaataaagaaaacttccagcttggagcttttcttggctcttttgttagtatatacaagggtactagttgcttcctgcgctggatcagaaacttagatgatgaactacatgctattatagctggatttttggcaggtatatcaatgatgttttataaaagcacaacaatttccatgtatttagcgtccaaattggtagagacaatgtatttcaaaggcattgaagcagggaaggttccctattttcctcatgcagatactatcatctattccatctctacagcaatttgcttccaggcagctgtcatggaagttcagactttgagaccatcttactggaagttccttttaagactcaccaagggcaaatttgctgtcatgaaccgaaaagtccttgatgtttttggtactggtgcatctaaacactttcaggatttcatccccaggttggatccaagatacacaactgtaacaccagagttgcccacagagttttcctgaagatgactgtaacttattaatgtgactaaatgtttcatcttgaagagttaattatgttgaacacaaaggagggggcccaagctcgaacttcagtgttatttcagttagagatactcttttcatttgttttgtttttcttatgaatcagaaattcagaagctttttaggaagatgttgcttaataattaagcttcctccatagccagaataagattctggatcactgtagtgactgacattatatattattgatcaaattatgtccacaagcaatattatataatctacgtagaagtgtaataacaaacaagagtacacttaaaattactttaaaagatgtctttagttcattccaatataattcttgattaaaattaggattatttctacattttaggatttacaaaggatcacgggtacatggatttggtctatatatttttttaaagttttgaattggtatctgtagtagtggaatgttatagatttgaagtaactctccacggacagtgctgctttcgtgtagagcaatttaattggagaagtggccattcttacttcagggatgcaaagatgggtctcataccatttggataaatgtcgtggtatccatgctttttttcaactaataacatcatctctcttcatgaccagttaattgggctatttggcagcccagtgaacctatgtactaatggcaagttaggggcaaatggaaatggacacatccgataaagttgaaatgtatgttttaatctttcacagaagtattacacttgaatatttaaaaacaaaacttttaaacttcctataggtttatgatgtttgttttcatttatatggacataatccttcatagctcagtttatatgccattgttgtattagaagggatcaaaatcctatggaacaaagtagtcttggcaagttggcagtttgtgtcctctcagctgtttaacttatgtaatggatgttttgcacctgaaaacactataaaaatccagtggttgtttaaaaagtccatttgtcactaattccattcaggttctccaaccttcttcttgaatatcattgtcaccatttttactgttagaataaagaggtgacaccataaagtcctgctgataatgagagtagttcaggacagctgtgattgaaatatggtcgctatttacagtttttcagggaaaagttatacttttctatgttaataaagagctgaagtggtctacagttaatgtgacatgtagggatgatgatatttttaaaatacattttgttgctaaaaagtttttaggccagtgcaaattatgcagtagaacttgtgttgcaaaaggaattataacccatactttaaaaatgcttaatccctcatattcaatttcatcaagccttgtatacttctgcttaaatgtaattcaatccttggttgttatggcaaacagaaacccaacaaaaagacagactctggtactatggtaacagagccactttatcatttggtcaaaatttggcattatgattagctttgtagaactgacctgtttatttggcaatgctgttaaaggatcattttggtttcagacttcaaagttgattaataaatttaatcttaactttttattcactggaatcaaaatgatggttggtactgtgtttactgtttaaaatgaagtactaaagccctgagaactgcacctcattttctttatccagaaattgtgcttatatattttcctgtcaggtttaaaaagatgttttaattcataaattattgttttcattgacattaaaagactgtgatattgaaagatgaattacgaaatttgctgagattgtttagtaaaattttgctggtcaaaaaggtgtatttctacaatttaccttttcatttttataaattgcagtcatttttttaaattttatgtaaaatgtaaaatgaaatagctatcatgaagcagaatacaatgatgaatgtataggttgagtgaataaccaatttgcagtggtggattgagaagtccagtttgatttcattgggacagactgcaaagtgtagttgtttgagcaaacacaaagaaactttgtgtttttgaagacaatcagaatgattacctttctacctctaactaatcaggtattgattgacaactttttggcattataaataaagtaaaatagatctctgcattcca

SEQ ID NO: 11272 - DNA, 3232 bp, Homo sapiens
tgctggccgggcgagaggctggcggctgggctctcgcgcccctccctgcagggctcaggctctccccctcctgtcttctccgcgctgttcctcgtcatggcggccctcagcaagtccatccctcataactgctatgagatcggccacacttggcacccttcctgccgggtctccttcctgcagatcaccgggggcgccctggaggagtccctgaagatctatgctcctctgtacttgattgcagcaattctccggaaacggaaattagactattatttacacaaactactccctgagatcctacaatccgcttcatttctaactgctaatggggccttgtatatggctttcttttgcattttaaggaagatacttggaaaattctactcatggactcctggctttggtgccgctctgccagcatcttatgtggccattctcattgaaagaaaaagcaggagagggctgctcacaatttatatggccaacttggtccttttgttttgcatcacagctgccatgtacatgttctttttcaggtgcaaggatggcttgaaaggatttacattttctgcacttaggttcattgtagggaaggaagaaattcccacacattctttttcaccagaggcagcatatgcaaaagtggaacaaaagagagagcaacatgaggaaaaacccagaagaatgaatatgattggtctagtcaggaaatttgtggattcaatatgcaaacatggaccaaggcatagatgttgcaaacattatgaagataattgcatctcttattgcattaaaggtttcatcagaatgtttagcgtggggtacttgatccagtgctgcctccgaatcccttctgcatttaggcatctgtttacacagccatctcggctactttctctcttctacaataaagaaaacttccagcttggagcttttcttggctcttttgttagtatatacaagggtactagttgcttcctgcgctggatcagaaacttagatgatgaactacatgctattatagctggatttttggcaggtatatcaatgatgttttataaaagcacaacaatttccatgtatttagcgtccaaattggtagagacaatgtatttcaaaggcattgaagcagggaaggttccctattttcctcatgcagatactatcatctattccatctctacagcaatttgcttccaggcagctgtcatggaagttcagactttgagaccatcttactggaagttccttttaagactcaccaagggcaaatttgctgtcatgaaccgaaaagtccttgatgtttttggtactggtgcatctaaacactttcaggatttcatccccaggttggatccaagatacacaactgtaacaccagagttgcccacagagttttcctgaagatgactgtaacttattaatgtgactaaatgtttcatcttgaagagttaattatgttgaacacaaaggagggggcccaagctcgaacttcagtgttatttcagttagagatactcttttcatttgttttgtttttcttatgaatcagaaattcagaagctttttaggaagatgttgcttaataattaagcttcctccatagccagaataagattctggatcactgtagtgactgacattatatattattgatcaaattatgtccacaagcaatattatataatctacgtagaagtgtaataacaaacaagagtacacttaaaattactttaaaagatgtctttagttcattccaatataattcttgattaaaattaggattatttctacattttaggatttacaaaggatcacgggtacatggatttggtctatatatttttttaaagttttgaattggtatctgtagtagtggaatgttatagatttgaagtaactctccacggacagtgctgctttcgtgtagagcaatttaattggagaagtggccattcttacttcagggatgcaaagatgggtctcataccatttggataaatgtcgtggtatccatgctttttttcaactaataacatcatctctcttcatgaccagttaattgggctatttggcagcccagtgaacctatgtactaatggcaagttaggggcaaatggaaatggacacatccgataaagttgaaatgtatgttttaatctttcacagaagtattacacttgaatatttaaaaacaaaacttttaaacttcctataggtttatgatgtttgttttcatttatatggacataatccttcatagctcagtttatatgccattgttgtattagaagggatcaaaatcctatggaacaaagtagtcttggcaagttggcagtttgtgtcctctcagctgtttaacttatgtaatggatgttttgcacctgaaaacactataaaaatccagtggttgtttaaaaagtccatttgtcactaattccattcaggttctccaaccttcttcttgaatatcattgtcaccatttttactgttagaataaagaggtgacaccataaagtcctgctgataatgagagtagttcaggacagctgtgattgaaatatggtcgctatttacagtttttcagggaaaagttatacttttctatgttaataaagagctgaagtggtctacagttaatgtgacatgtagggatgatgatatttttaaaatacattttgttgctaaaaagtttttaggccagtgcaaattatgcagtagaacttgtgttgcaaaaggaattataacccatactttaaaaatgcttaatccctcatattcaatttcatcaagccttgtatacttctgcttaaatgtaattcaatccttggttgttatggcaaacagaaacccaacaaaaagacagactctggtactatggtaacagagccactttatcatttggtcaaaatttggcattatgattagctttgtagaactgacctgtttatttggcaatgctgttaaaggatcattttggtttcagacttcaaagttgattaataaatttaatcttaactttttattcactggaatcaaaatgatggttggtactgtgtttactgtttaaaatgaagtactaaagccctgagaactgcacctcattttctttatccagaaattgtgcttatatattttcctgtcaggtttaaaaagatgttttaattcataaattattgttttcattgacattaaaagactgtgatattgaaagatgaattacgaaat

SEQ ID NO: 11273 - DNA, 3667 bp, Homo sapiens
tgctggccgggcgagaggctggcggctgggctctcgcgcccctccctgcagggctcaggctctccccctcctgtcttctccgcgctgttcctcgtcatggcggccctcagcaagtccatccctcataactgctatgagatcggccacacttggcacccttcctgccgggtctccttcctgcagatcaccgggggcgccctggaggagtccctgaagatctatgctcctctgtacttgattgcagcaattctccggaaacggaaattagactattatttacacaaactactccctgagatcctacaatccgcttcatttctaactgctaatggggccttgtatatggctttcttttgcattttaaggaagatacttggaaaattctactcatggactcctggctttggtgccgctctgccagcatcttatgtggccattctcattgaaagaaaaagcaggagagggctgctcacaatttatatggccaacttggccacagaaacactattcagaatgggtgtagcaagaggaaccatcacaacattaagaaatggagaagtccttttgttttgcatcacagctgccatgtacatgttctttttcaggtgcaaggatggcttgaaaggatttacattttctgcacttaggttcattgtagggaaggaagaaattcccacacattctttttcaccagaggcagcatatgcaaaagtggaacaaaagagagagcaacatgaggaaaaacccagaagaatgaatatgattggtctagtcaggaaatttgtggattcaatatgcaaacatggaccaaggcatagatgttgcaaacattatgaagataattgcatctcttattgcattaaaggtttcatcagaatgtttagcgtggggtacttgatccagtgctgcctccgaatcccttctgcatttaggcatctgtttacacagccatctcggctactttctctcttctacaataaagaaaacttccagcttggagcttttcttggctcttttgttagtatatacaagggtactagttgcttcctgcgctggatcagaaacttagatgatgaactacatgctattatagctggatttttggcaggtatatcaatgatgttttataaaagcacaacaatttccatgtatttagcgtccaaattggtagagacaatgtatttcaaaggcattgaagcagggaaggttccctattttcctcatgcagatactatcatctattccatctctacagcaatttgcttccaggcagctgtcatggaagttcagactttgagaccatcttactggaagttccttttaagactcaccaagggcaaatttgctgtcatgaaccgaaaagtccttgatgtttttggtactggtgcatctaaacactttcaggatttcatccccaggttggatccaagatacacaactgtaacaccagagttgcccacagagttttcctgaagatgactgtaacttattaatgtgactaaatgtttcatcttgaagagttaattatgttgaacacaaaggagggggcccaagctcgaacttcagtgttatttcagttagagatactcttttcatttgttttgtttttcttatgaatcagaaattcagaagctttttaggaagatgttgcttaataattaagcttcctccatagccagaataagattctggatcactgtagtgactgacattatatattattgatcaaattatgtccacaagcaatattatataatctacgtagaagtgtaataacaaacaagagtacacttaaaattactttaaaagatgtctttagttcattccaatataattcttgattaaaattaggattatttctacattttaggatttacaaaggatcacgggtacatggatttggtctatatatttttttaaagttttgaattggtatctgtagtagtggaatgttatagatttgaagtaactctccacggacagtgctgctttcgtgtagagcaatttaattggagaagtggccattcttacttcagggatgcaaagatgggtctcataccatttggataaatgtcgtggtatccatgctttttttcaactaataacatcatctctcttcatgaccagttaattgggctatttggcagcccagtgaacctatgtactaatggcaagttaggggcaaatggaaatggacacatccgataaagttgaaatgtatgttttaatctttcacagaagtattacacttgaatatttaaaaacaaaacttttaaacttcctataggtttatgatgtttgttttcatttatatggacataatccttcatagctcagtttatatgccattgttgtattagaagggatcaaaatcctatggaacaaagtagtcttggcaagttggcagtttgtgtcctctcagctgtttaacttatgtaatggatgttttgcacctgaaaacactataaaaatccagtggttgtttaaaaagtccatttgtcactaattccattcaggttctccaaccttcttcttgaatatcattgtcaccatttttactgttagaataaagaggtgacaccataaagtcctgctgataatgagagtagttcaggacagctgtgattgaaatatggtcgctatttacagtttttcagggaaaagttatacttttctatgttaataaagagctgaagtggtctacagttaatgtgacatgtagggatgatgatatttttaaaatacattttgttgctaaaaagtttttaggccagtgcaaattatgcagtagaacttgtgttgcaaaaggaattataacccatactttaaaaatgcttaatccctcatattcaatttcatcaagccttgtatacttctgcttaaatgtaattcaatccttggttgttatggcaaacagaaacccaacaaaaagacagactctggtactatggtaacagagccactttatcatttggtcaaaatttggcattatgattagctttgtagaactgacctgtttatttggcaatgctgttaaaggatcattttggtttcagacttcaaagttgattaataaatttaatcttaactttttattcactggaatcaaaatgatggttggtactgtgtttactgtttaaaatgaagtactaaagccctgagaactgcacctcattttctttatccagaaattgtgcttatatattttcctgtcaggtttaaaaagatgttttaattcataaattattgttttcattgacattaaaagactgtgatattgaaagatgaattacgaaatttgctgagattgtttagtaaaattttgctggtcaaaaaggtgtatttctacaatttaccttttcatttttataaattgcagtcatttttttaaattttatgtaaaatgtaaaatgaaatagctatcatgaagcagaatacaatgatgaatgtataggttgagtgaataaccaatttgcagtggtggattgagaagtccagtttgatttcattgggacagactgcaaagtgtagttgtttgagcaaacacaaagaaactttgtgtttttgaagacaatcagaatgattacctttctacctctaactaatcaggtattgattgacaactttttggcattataaataaagtaaaatagatctctgcattcca

SEQ ID NO: 11274 - DNA, 3543 bp, Homo sapiens
tgctggccgggcgagaggctggcggctgggctctcgcgcccctccctgcagggctcaggctctccccctcctgtcttctccgcgctgttcctcgtcatggcggccctcagcaagtccatccctcataactgctatgagatcggccacagaaacactattcagaatgggtgtagcaagaggaaccatcacaacattaagaaatggagaagtccttttgttttgcatcacagctgccatgtacatgttctttttcaggtgcaaggatggcttgaaaggatttacattttctgcacttaggttcattgtagggaaggaagaaattcccacacattctttttcaccagaggcagcatatgcaaaagtggaacaaaagagagagcaacatgaggaaaaacccagaagaatgaatatgattggtctagtcaggaaatttgtggattcaatatgcaaacatggaccaaggcatagatgttgcaaacattatgaagataattgcatctcttattgcattaaaggtttcatcagaatgtttagcgtggggtacttgatccagtgctgcctccgaatcccttctgcatttaggcatctgtttacacagccatctcggctactttctctcttctacaataaagaaaacttccagcttggagcttttcttggctcttttgttagtatatacaagggtactagttgcttcctgcgctggatcagaaacttagatgatgaactacatgctattatagctggatttttggcaggtatatcaatgatgttttataaaagcacaacaatttccatgtatttagcgtccaaattggtagagacaatgtatttcaaaggcattgaagcagggaaggttccctattttcctcatgcagatactatcatctattccatctctacagcaatttgcttccaggcagctgtcatggaagttcagactttgagaccatcttactggaagttccttttaagactcaccaagggcaaatttgctgtcatgaaccgaaaagtccttgatgtttttggtactggtgcatctaaacactttcaggatttcatccccaggttggatccaagatacacaactgtaacaccagagttgcccacagagttttcctgaagatgactgtaacttattaatgtgactaaatgtttcatcttgaagagttaattatgttgaacacaaaggagggggcccaagctcgaacttcagtgttatttcagttagagatactcttttcatttgttttgtttttcttatgaatcagaaattcagaagctttttaggaagatgttgcttaataattaagcttcctccatagccagaataagattctggatcactgtagtgactgacattatatattattgatcaaattatgtccacaagcaatattatataatctacgtagaagtgtaataacaaacaagagtacacttaaaattactttaaaagatgtctttagttcattccaatataattcttgattaaaattaggattatttctacattttaggatttacaaaggatcacgggtacatggatttggtctatatatttttttaaagttttgaattggtatctgtagtagtggaatgttatagatttgaagtaactctccacggacagtgctgctttcgtgtagagcaatttaattggagaagtggccattcttacttcagggatgcaaagatgggtctcataccatttggataaatgtcgtggtatccatgctttttttcaactaataacatcatctctcttcatgaccagttaattgggctatttggcagcccagtgaacctatgtactaatggcaagttaggggcaaatggaaatggacacatccgataaagttgaaatgtatgttttaatctttcacagaagtattacacttgaatatttaaaaacaaaacttttaaacttcctataggtttatgatgtttgttttcatttatatggacataatccttcatagctcagtttatatgccattgttgtattagaagggatcaaaatcctatggaacaaagtagtcttggcaagttggcagtttgtgtcctctcagctgtttaacttatgtaatggatgttttgcacctgaaaacactataaaaatccagtggttgtttaaaaagtccatttgtcactaattccattcaggttctccaaccttcttcttgaatatcattgtcaccatttttactgttagaataaagaggtgacaccataaagtcctgctgataatgagagtagttcaggacagctgtgattgaaatatggtcgctatttacagtttttcagggaaaagttatacttttctatgttaataaagagctgaagtggtctacagttaatgtgacatgtagggatgatgatatttttaaaatacattttgttgctaaaaagtttttaggccagtgcaaattatgcagtagaacttgtgttgcaaaaggaattataacccatactttaaaaatgcttaatccctcatattcaatttcatcaagccttgtatacttctgcttaaatgtaattcaatccttggttgttatggcaaacagaaacccaacaaaaagacagactctggtactatggtaacagagccactttatcatttggtcaaaatttggcattatgattagctttgtagaactgacctgtttatttggcaatgctgttaaaggatcattttggtttcagacttcaaagttgattaataaatttaatcttaactttttattcactggaatcaaaatgatggttggtactgtgtttactgtttaaaatgaagtactaaagccctgagaactgcacctcattttctttatccagaaattgtgcttatatattttcctgtcaggtttaaaaagatgttttaattcataaattattgttttcattgacattaaaagactgtgatattgaaagatgaattacgaaatttgctgagattgtttagtaaaattttgctggtcaaaaaggtgtatttctacaatttaccttttcatttttataaattgcagtcatttttttaaattttatgtaaaatgtaaaatgaaatagctatcatgaagcagaatacaatgatgaatgtataggttgagtgaataaccaatttgcagtggtggattgagaagtccagtttgatttcattgggacagactgcaaagtgtagttgtttgagcaaacacaaagaaactttgtgtttttgaagacaatcagaatgattacctttctacctctaactaatcaggtattgattgacaactttttggcattataaataaagtaaaatagatctctgcattccaaaatatgttttttagtttatttatatcctgaagaaatggtaagttttcactggaactgattacagtaaacaataatatgtccccttagtctttctgacatttttatatagattgagattgaaaaaccgtgcatttggggcagtggtattatggtcatttcgttgctattttctgttttaataaaatcctagaactagtagcaaccgagtaaagattgagtttgcaa

SEQ ID NO: 11275 - DNA, 3328 bp, Homo sapiens
tgctggccgggcgagaggctggcggctgggctctcgcgcccctccctgcagggctcaggctctccccctcctgtcttctccgcgctgttcctcgtcatggcggccctcagcaagtccatccctcataactgctatgagatcggccacacttggcacccttcctgccgggtctccttcctgcagatcaccgggggcgccctggaggagtccctgaagatctatgctcctctgtacttgattgcagcaattctccggaaacggaaattagactattatttacacaaactactccctgagatcctacaatccgcttcatttctaactgctaatggggccttgtatatggctttcttttgcattttaaggaagatacttggaaaattctactcatggactcctggctttggtgccgctctgccagcatcttatgtggccattctcattgaaagaaaaagcaggagagggctgctcacaatttatatggccaacttggccacagaaacactattcagaatgggtgtagcaagaggaaccatcacaacattaagaaatggagaagtccttttgttttgcatcacagctgccatgtacatgttctttttcaggtgcaaggatggcttgaaaggatttacattttctgcacttaggttcattgtagggaaggaagaaattcccacacattctttttcaccagaggcagcatatgcaaaagtggaacaaaagagagagcaacatgaggaaaaacccagaagaatgaatatgattggtctagtcaggaaatttgtggattcaatatgcaaacatggaccaaggcatagatgttgcaaacattatgaagataattgcatctcttattgcattaaaggtttcatcagaatgtttagcgtggggtacttgatccagtgctgcctccgaatcccttctgcatttaggcatctgtttacacagccatctcggctactttctctcttctacaataaagaaaacttccagcttggagcttttcttggctcttttgttagtatatacaagggtactagttgcttcctgcgctggatcagaaacttagatgatgaactacatgctattatagctggatttttggcaggtatatcaatgatgttttataaaagcacaacaatttccatgtatttagcgtccaaattggtagagacaatgtatttcaaaggcattgaagcagggaaggttccctattttcctcatgcagatactatcatctattccatctctacagcaatttgcttccaggcagctgtcatggaagttcagactttgagaccatcttactggaagttccttttaagactcaccaagggcaaatttgctgtcatgaaccgaaaagtccttgatgtttttggtactggtgcatctaaacactttcaggatttcatccccaggttggatccaagatacacaactgtaacaccagagttgcccacagagttttcctgaagatgactgtaacttattaatgtgactaaatgtttcatcttgaagagttaattatgttgaacacaaaggagggggcccaagctcgaacttcagtgttatttcagttagagatactcttttcatttgttttgtttttcttatgaatcagaaattcagaagctttttaggaagatgttgcttaataattaagcttcctccatagccagaataagattctggatcactgtagtgactgacattatatattattgatcaaattatgtccacaagcaatattatataatctacgtagaagtgtaataacaaacaagagtacacttaaaattactttaaaagatgtctttagttcattccaatataattcttgattaaaattaggattatttctacattttaggatttacaaaggatcacgggtacatggatttggtctatatatttttttaaagttttgaattggtatctgtagtagtggaatgttatagatttgaagtaactctccacggacagtgctgctttcgtgtagagcaatttaattggagaagtggccattcttacttcagggatgcaaagatgggtctcataccatttggataaatgtcgtggtatccatgctttttttcaactaataacatcatctctcttcatgaccagttaattgggctatttggcagcccagtgaacctatgtataattccattcaggttctccaaccttcttcttgaatatcattgtcaccatttttactgttagaataaagaggtgacaccataaagtcctgctgataatgagagtagttcaggacagctgtgattgaaatatggtcgctatttacagtttttcagggaaaagttatacttttctatgttaataaagagctgaagtggtctacagttaatgtgacatgtagggatgatgatatttttaaaatacattttgttgctaaaaagtttttaggccagtgcaaattatgcagtagaacttgtgttgcaaaaggaattataacccatactttaaaaatgcttaatccctcatattcaatttcatcaagccttgtatacttctgcttaaatgtaattcaatccttggttgttatggcaaacagaaacccaacaaaaagacagactctggtactatggtaacagagccactttatcatttggtcaaaatttggcattatgattagctttgtagaactgacctgtttatttggcaatgctgttaaaggatcattttggtttcagacttcaaagttgattaataaatttaatcttaactttttattcactggaatcaaaatgatggttggtactgtgtttactgtttaaaatgaagtactaaagccctgagaactgcacctcattttctttatccagaaattgtgcttatatattttcctgtcaggtttaaaaagatgttttaattcataaattattgttttcattgacattaaaagactgtgatattgaaagatgaattacgaaatttgctgagattgtttagtaaaattttgctggtcaaaaaggtgtatttctacaatttaccttttcatttttataaattgcagtcatttttttaaattttatgtaaaatgtaaaatgaaatagctatcatgaagcagaatacaatgatgaatgtataggttgagtgaataaccaatttgcagtggtggattgagaagtccagtttgatttcattgggacagactgcaaagtgtagttgtttgagcaaacacaaagaaactttgtgtttttgaagacaatcagaatgattacctttctacctctaactaatcaggtattgattgacaactttttggcattataaataaagtaaaatagatctctgcattcca

SEQ ID NO: 11276 - DNA, 3102 bp, Homo sapiens
tgctggccgggcgagaggctggcggctgggctctcgcgcccctccctgcagggctcaggctctccccctcctgtcttctccgcgctgttcctcgtcatggcggccctcagcaagtccatccctcataactgctatgagatcggccacacttggcacccttcctgccgggtctccttcctgcagatcaccgggggcgccctggaggagtccctgaagatctatgctcctctgtacttgattgcagcaattctccggaaacggaaattagactattatttacacaaactactccctgagatcctacaatccgcttcatttctaactgctaatggggccttgtatatggctttcttttgcattttaaggaagatacttggaaaattctactcatggactcctggctttggtgccgctctgccagcatcttatgtggccattctcattgaaagaaaaagcaggagagggctgctcacaatttatatggccaacttggccacagaaacactattcagaatgggtgtagcaagaggaaccatcacaacattaagaaatggagaagtccttttgttttgcatcacagctgccatgtacatgttctttttcaggtgcaaggatggcttgaaaggatttacattttctgcacttaggttcattgtagggaaggaagaaattcccacacattctttttcaccagaggcagcatatgcaaaagtggaacaaaagagagagcaacatgaggaaaaacccagaagaatgaatatgattggtctagtcaggaaatttgtggattcaatatgcaaacatggaccaaggcatagatgttgcaaacattatgaagataattgcatctcttattgcattaaaggtttcatcagaatgtttagcgtggggtacttgatccagtgctgcctccgaatcccttctgcatttaggcatctgtttacacagccatctcggctactttctctcttctacaataaagaaaacttccagcttggagcttttcttggctcttttgttagtatatacaagggtactagttgcttcctgcgctggatcagaaacttagatgatgaactacatgctattatagctggatttttggcaggtatatcaatgatgttttataaaagcacaacaatttccatgtatttagcgtccaaattggtagagacaatgtatttcaaaggcattgaagcagggaaggttccctattttcctcatgcagatactatcatctattccatctctacagcaatttgcttccaggcagctgtcatggaagttcagactttgagaccatcttactggaagttccttttaagactcaccaagggcaaatttgctgtcatgaaccgaaaagtccttgatgtttttggtactggtgcatctaaacactttcaggatttcatccccaggttggatccaagatacacaactgtaacaccagagttgcccacagagttttcctgaagatgactgtaacttattaatgtgactaaatgtttcatcttgaagagttaattatgttgaacacaaaggagggggcccaagctcgaacttcagtgttatttcagttagagatactcttttcatttgttttgtttttcttatgaatcagaaattcagaagctttttaggaagatgttgcttaataattaagcttcctccatagccagaataagattctggatcactgtagtgactgacattatatattattgatcaaattatgtccacaagcaatattatataatctacgtagaagtgtaataacaaacaagagtacacttaaaattactttaaaagatgtctttagttcattccaatataattcttgattaaaattaggattatttctacattttaggatttacaaaggatcacgggtacatggatttggtctatatatttttttaaagttttgaattggtatctgtagtagtggaatgttatagatttgaagtaactctccacggacagtgctgctttcgtgtagagcaatttaattggagaagtggccattcttacttcagggatgcaaagatgggtctcataccatttggataaatgtcgtggtatccatgctttttttcaactaataacatcatctctcttcatgaccagttaattgggctatttggcagcccagtgaacctatgtactaatggcaagttaggggcaaatggaaatggacacatccgataaagttgaaatgtatgttttaatctttcacagaagtattacacttgaatatttaaaaacaaaacttttaaacttcctataggtttatgatgtttgttttcatttatatggacataatccttcatagctcagtttatatgccattgttgtattagaagggatcaaaatcctatggaacaaagtagtcttggcaagttggcagtttgtgtcctctcagctgtttaacttatgtaatggatgttttgcacctgaaaacactataaaaatccagtggttgtttaaaaagtccatttgtcactaattccattcaggttctccaaccttcttcttgaatatcattgtcaccatttttactgttagaataaagaggtgacaccataaagtcctgctgataatgagagtagttcaggacagctgtgattgaaatatggtcgctatttacagtttttcagggaaaagttatacttttctatgttaataaagagctgaagtggtctacagttaatgtgacatgtagggatgatgatatttttaaaatacattttgttgctaaaaagtttttaggccagtgcaaattatgcagtagaacttgtgttgcaaaaggaattataacccatactttaaaaatgcttaatccctcatattcaatttcatcaagccttgtatacttctgcttaaatgtaattcaatccttggttgttatggcaaacagaaacccaacaaaaagacagactctggtactatggtaacagagccactttatcatttggtcaaaatttggcattatgattagctttgtagaactgacctgtttatttggcaatgctgttaaaggatcattttggtttcagacttcaaagttgattaataaatttaatcttaactttttattcactg

SEQ ID NO: 11277 - DNA, 346 bp, Homo sapiens
gcagtggaaaaatgtagtcactctcccatttgtaatgaactgtaagtatattctcacaaatggatgcattttggagtaaaatatggtaactgacagttccttcttaattttcattgtagtatcattggaatctgaccaacatcctggaatttttattgctaacttttaaggaaaaaaaatgaaggccgggcacggtggcttatgcctgtaataccagcactttgggaggccaaggcgggcggatcacgaggtcaaaagatcaagaccatcctggccaacatggtgaaaccccgtctctactaaatacaaaaattagctgggcatggtggtgcgtgcctgtagtccc

SEQ ID NO: 11278 - DNA, 634 bp, Homo sapiens
ttttcttttaaagtagttagaaacttaagatcaaattctgtggttttggctgggaggaactgcagttgatgatcaaactgtttaacctttccctaggacacagctagaatatgtttccaagcctccccaacacgtgtgactgtgtataattgagttctaaccacaggaaggtgagcagaagtgaggtgtaaccatttccagatctggctcataagggtctcccacgttctcactgtcctctatgctctttctctgtgcacagcttgatgcagatgagcaggtaaccatggaagtcgtgagctgaggctgcagagtctagagccagagtgtggaataaacttgggtctcaaatcacccctggagcaaagcacccatctaatcaggaacttctactttcaactttacatgcgtgagaaatgaacttctatcatgttagagtgagtatacagtttttgtgtctgtgttttagtagctagtgtcaccataacaaatataattcacaacaggatattcacttttcaaaatcaagttgggtacagtttgaccaattggctacatgattaggaaaatatcttgatcaaatagttttcttctaaacacttacatcactattctgtactcacactgtaaagtt

SEQ ID NO: 11279 - DNA, 624 bp, Homo sapiens
tgctggtgtagggaaaggaatgggaatgttgaggggatgggaagaggcatcaagaacaggaatataattttcctacagtgctgttctgctgagactacagagtacctcagggagtcatgcatcctcttcctgttgctttactgaatcttaaagagcaatacagtactaatgatgccattctagcaactggagcagcttcaggggagagagcacattaagggtgctgggatggtaatggttgggaggaagctgaatggtagtaagagagacattctgtcctgagaactctgatccggcttgatgcagatgagcaggtaaccatggaagtcgtgagctgaggctgcagagtctagagccagagtgtggaataaacttgggtctcaaatcacccctggagcaaagcacccatctaatcaggaacttctactttcaactttacatgcgtgagaaatgaacttctatcatgttagagaaatccttacacggcgcccttgagagctttcatactgcaagtcatccattttcctcccctcaaacctggcatcggagtttattgaaacaaagcaaaataaaacaagatgcgtccgtttcttttttttcttctttcccctttcctcgccaaac

SEQ ID NO: 11280 - DNA, 576 bp, Homo sapiens
  misc_feature (74)..(74): n is a, c, g, or t
aatttcctccatctgctggtctgtctcagctggaaatctccatcatcagtcagtggactgatggatcatggcantaaaactcctcagtagaaggcagctgcattatctaagcgggggaacatgttaaacaggtaccattataaaaggaatgacttcaggtaaaatagaacaatgaagaggctgtcgttttgaagtcaaatctgaatttctcacctggctctattactttcttactgtgtaatgctgggcttgatgcagatgagcaggtaaccatggaagtcgtgagctgaggctgcagagtctagagccagagtgtggaataaacttgggtctcaaatcacccctggagcaaagcacccatctaatcaggaacttctactttcaactttacatgcgtgagaaatgaacttctatcatgttagagaaatccttacacggcgcccttgagagctttcatactgcaagtcatccattttcctcccctcaaacctggcatcggagtttattgaaacaaagcaaaataaaacaagatgcgtccgtttcttttttttcttctttcccctttcctcgccaaac

SEQ ID NO: 11281 - DNA, 458 bp, Homo sapiens
  misc_feature (74)..(74): n is a, c, g, or t
aatttcctccatctgctggtctgtctcagctggaaatctccatcatcagtcagtggactgatggatcatggcantaaaactcctcagtagaaggcagctgcattatctaagcgggggaacatgttaaacgcttgatgcagatgagcaggtaaccatggaagtcgtgagctgaggctgcagagtctagagccagagtgtggaataaacttgggtctcaaatcacccctggagcaaagcacccatctaatcaggaacttctactttcaactttacatgcgtgagaaatgaacttctatcatgttagagaaatccttacacggcgcccttgagagctttcatactgcaagtcatccattttcctcccctcaaacctggcatcggagtttattgaaacaaagcaaaataaaacaagatgcgtccgtttcttttttttcttctttcccctttcctcgccaaac

SEQ ID NO: 11282 - DNA, 395 bp, Homo sapiens
gatatgtgtaagtgttgagcatttgaaatatgtgtgaccaaggaactgaattttgaattttattgcatttccatgactttagatttaaatagccaggctagtggctaccaaattgtacatagagccctcgcacctcttatttgctcctttgttaatttctgtctgccacataaggatgaaacttgcctatgcattagtttcctcattttacagtaagggaaacacccctggtacaaagtaaatactcaatgctcattaatcaccatcatcatcaccattattataacattatcattattagtctccatgagatcgatgactttatgtttgttcactcctgaatcccattacattctttagcacatagcaggtgttcaataaatatattatgaatg

SEQ ID NO: 11283 - DNA, 415 bp, Homo sapiens
ttgcccagtggctattccagggccttgcttggacagttgaatacttctccatcacaatgtgttactgtgattcctagccaccccaatcagcctgcccggcctgagacactctctccactcggtcagtcaaacctagactccagagtctattcatagtaaatactacagctaaggcaaaatgcacagcaatcctagttcaaggaaacccccctaggaaagaatcagcagtgtggacaaagattaatattcaaagatattcactacagcaaaatatatacaccaaaaggctgggaacacctcaatgtccaacaatatgggaatggttacattatggcatggctctatgataaacttacgcaattattaaaaaaaaaaattttttttttttgagatgaagtctcgctctgttgcccag

SEQ ID NO: 11284 - DNA, 248 bp, Homo sapiens
tattattcttgggctaaattgataagctatttagatcactgcagaaacttgtctctgtctattcaatatcaaatgcacaaaattacagttttgggcttaagaggctaacacaaatgacatagtaggtgcctgtgctctgtttggagaattctagatttcaaattaactctgtataacaagggagaaacaaaaaagaaaaagaagcataatgaagagaaaccaatgtaattttaaatattctaggagaa

SEQ ID NO: 11285 - DNA, 355 bp, Homo sapiens
  misc_feature (6)..(7): n is a, c, g, or t
  misc_feature (9)..(9): n is a, c, g, or t
  misc_feature (12)..(12): n is a, c, g, or t
tcagcnntntanttttaaatttaggtaatctcacttttttcatcagagtttgtttgatatgattctactttccacatgtttcttattcgctgttttgtcttttaaggcagggaaagtgagtcaaaagcaaatcatgtttcatgtgaatattggactttggccacttctttccccctacacaaagaaaataaaggtgcaagttacctataattattaacagtaatagtttgagagaactgatatgttaaagaagtaatcattaatcttgctaatcgttggtatgttgagaagtatttggcctttggtgttggtgttttcttgtatgtgtctatgtgtgtgtgtgtgtgtgtgtgtg

SEQ ID NO: 11286 - DNA, 942 bp, Homo sapiens
gtgccatgcagcttttaaatgacaggcacgtgctcacaggcttctgttcagagagaacctgtgagctgtcctgtggcctttcctgtttacggtgcagccatcccaaatatgatgcccccaaatccgagtctggctagaaggaagtgtcatacaaaggccatgccattctccctgacaaaagacatgagtttcttgcaagagcactaagaagttttaagaggtggactcgaagagaggagaatgaattggaaagccagcacgaatgtggctcttactcctctgtgaaatatttgcaggaacgagcctggagaccagcaggttcaggatggaaagctggaaagaattctttcctaaaacttaagttttagagaaaaataggcagccagtcccaaccacccaaaggcgtccaaagccatgtttgttctgggaaggccaaggcatgggaggatgttaacttgggctatcagcaggattgaagggcagggtgaccttggtacgctctcagggcctgtgtttccaagtcgacaaactgttctgagcttttccatgaaacgagtgaagcccttttcatacctccttcgtgttccagaattcttgccatcgatgttccaaaggatctgtgatagatttatgtctagccttaaatgggacgagttgtaacattcagaattattttatctttctgagacctgctattattgtgagaccctagacatgctttgctggggttagggtgagggtactcctaacgagggaaggaatcttccatttgtgcctgcccaaagcgttctagaactgaccggacctgagaggctgtctcattagaactaagagaaggtattgttgatgatgtcttatatccatggaagaattccctgggcattccctctgatgctgcctgggatacctacattgctcaaagtacagtttctttatgaatag

SEQ ID NO: 11287 - DNA, 549 bp, Homo sapiens
gctctgtgtctagagctgccagttgcccgggaaaggagcagctacgttgccaatcttcacgtgcagttggctccatctgtccttgtgacatttgatttggggccaatgtttaaaacactctttgttttctcccccaagtgatctctccctaatcaagagccacatggcctctctctgtggccatttcagccactcaggaggaagaatgaatgcctaaatctttgaggtacacccccaaccccaagttccttctagaatctacagtaggccgggcacagtggctcacgcctgtaatcccaacactttgggaggtcaaggcgggtggatcacttgggttcaggagttcgagaccagcctgggcaacatggcgaaatcccatttctacaaaaaatacaaaaaattagccagatatggtggtgcacacctgtagtctcggctactcaggaggctgaggcatgagaattgcttgaacctgggaggcggaggttgcagtgagccgagatcatgccactgcactccagcctgggcgacagagtgagaccctgtctc

SEQ ID NO: 11288 - DNA, 353 bp, Homo sapiens
  misc_feature (253)..(253): n is a, c, g, or t
  misc_feature (316)..(316): n is a, c, g, or t
ttccacagtatgaaaaccatgtggcccatggttcacagtatgaattacagcctccttttgtcaaatacctttactttcactgtatcctttactctgggcaaaaacatgtgaaacgttcaagacagctctaaagatttttcataattagaaattagtggctgggtgcagtggctcatgcctgtaatcccagcactttgggaggtcaaggcaggcacactgctggagcccaggggtttgagaccagcctgggccngacatggcgaggataccgcagtgacaaaaaccacaacaattagccagggtgcagtgccacgcncctgttaggtcccagcttacttggggagggcttgagg

SEQ ID NO: 11289 - DNA, 269 bp, Homo sapiens
gggtcctgccaccaaccctggataatttttgtagttttagtagagagtttagtttcactgttagatatgagttctaaatttctcttcaaagaatcaatatgtcagtatgttcaattatttgccttctacttggcgataaacttaacttcctcgtaaagcaatctttcaattaccttctctgccctgactcattccaattacctactctaccccaactcattccaattatctgctccaccctgactcattccaattacctgctcattctc

SEQ ID NO: 11290 - DNA, 1176 bp, Homo sapiens
tggtaggcagtgggcatcgccaggtaaagtagagtggctgcccacggcccggggtggacacagggcagagagttgggcagggtgggggatgttctccaaaacacttgagtgtggcttaaaaagttcatgcaaccctgatagtttgaggcaaaggctggtttctttgccaaacgttagatttaataaaagaggaggtgtttggattgtttaacgttcagacttccttatttcccttacttcactattttcaaaattgtgacgtttaccttgccagttcatgcaggactttacagaagaactcgaaattcaaattctgagctgccaccaagtttttacaattaaaccattttaaaactattgttctgaggtagtggttaatttcccttctttttctttctttcttctccttttttttcttttttttatgatttaaaacttactagttagaaacttttttttttgcctcaccagcttcaggaaattttcttttgaattgttagaaaaacaaacaaacaaacacacagacgcacgcacacgcacgtatattcttccaccctgtagtataaagaaaacatttttaaatccgaaaatgaaatatgttacctttttccttccaaaagtagactgtgagtgatgtttgtgtggtgtcctttgcccccatttcttactgtagttttatggtataaaatcctcagtatttgcttaattttttttgtcattgaggaaaactaacagtaaaatgagttaacctgaaaatgcccttttcagttcagcattcagagtgaggaaagaggtatatatgcagttaaggtgagaacggaaccgtagcttccgccggcggacttgtgagcacgtcagaaagcgaatgtgcctcactagaacgcacggtggcggcaggagtggccggcagtgcccggcacgcagtcacgggaggtgggtcgagtcctggtttatgtgagtcctgtgaggtgagagagtgggagaaaacgcctcactcaacttaatgcctttgtttgtttgttttaaccaagagtttacttgtaatttagtattgccggaaaattgttcaggtaaaaagtgcctagtataaataggtacacagtcaggtcagatatgttaattgcatctcacttgatttaatgaaaatttaccatttgttttgaggtcagtaccatt

SEQ ID NO: 11291 - DNA, 228 bp, Homo sapiens
aaaaagaaaattagctaaagcaactaaaatatccaagaacaattagaaaactacataaaatagtttatatatttaagttttaaattgaatggctaagcagtttttaagttataaatccaaagccactattcgagagaggaggaaaagggtgcagtgtttgaaatacggcaggcaacatggacccaaaacaaattaccagcaccataaaggagctcctggatctccatc

SEQ ID NO: 11292 - DNA, 233 bp, Homo sapiens
cactatagtctcgaacttctgggctcaagcaatcctcctgtctcagcttcctgaatagctgggactccagccatgaagtacaatcaagaagaaattgaaaaacagtcagagttagatgatgagcttcatcgtttgtcatgcaggatttttatcccctgaagaacctgctagagaagtccaccttcacccttaaccactggtgcctcaacttaatacttttaaaattcatttgt

SEQ ID NO: 11293 - DNA, 395 bp, Homo sapiens
cacacaaatttaaatctatttctacatctatctttatatattttttaatctaacttttattttagatacagggcatacatgtacaggttttgtacatgggcatattgcatccaggtggtaagcctagtacccggtaggtagtttttcaacccacactccccttcctccctccactctctagtagtctgcagtgtctgttattctcatgtttttgtccatgtgtgctcagtgtatagctcccacttataaatgagaatatgcagtgtctggctttcttttcctgcattaattcactcaggattgtggtctccagctcttctatgtctctgtgaaggacatgatttcatcctcctatatggttgcatagtattctgtggtgtatatatataacacac

SEQ ID NO: 11294 - DNA, 100 bp, Homo sapiens
tttccttgtggtatctgcacccagccagccaccacctttcctcccacaaccgtgaacctctcagcctgtgtggacaggcgtagctttggctatacatgac

SEQ ID NO: 11295 - DNA, 320 bp, Homo sapiens
cttaagtattcttttcaagctttgtgttacttcttgaagaacttgaaacaattttaagaaagacaagtgaacagttaaatgaattgtaatacaactacctagtgataactgctgttaatatcctgtgcacatatataaatatatggtgaatttgtgtttttagttatatccagaattgtttgttaatatacatggacatacctacatattattctataagcaatttatgcaactgtcttactgttgttggacattcagaagttttttctaatttttcactcttagaaataaagttttagtgagagtcgcaatgcttaaat

SEQ ID NO: 11296 - DNA, 444 bp, Homo sapiens
cctgtttttgttcactgccatttctagcacttgtttagccctgtggtcagtagatatttgtagctaataatatagaatagtgtaaagttagactagataacctaaggactttccagccccgcaactctgttaatgttttgattctggaaaaataagctggggaacaagacaaaaataaactctgaacaggattcataataagcagaatgcaaaagtcataggacttttgactgcaaaagtcataggagcagacatatgcagttttgacatatgactgcaaaagtcataggagcagaaagctttgattattatcaaaaacaatgaaggtgtcaaaggcctggaacaaagtttgctgtgggtaggtaagaaagagaagcttgataatcgttttatccattgtaccttagccggattgacttgcagaaggtaagccatggtgaaaaa

SEQ ID NO: 11297 - DNA, 402 bp, Homo sapiens
ccattaaccacagaataaggttgaaattccttaaaatggaatttgagtttcttcataagctcctgtctgccacccagcctcatcagacactcctctgtcatcttatgctccagtcttaccaacttttgcatgtcttattccctctgcgtgtataattctttctcctcttgatttatacagcaaatcttcctcatccttcaaggcctagtgcaagtctacttggtactgtccctaagttcgaagacatctaagtgtacactcttcaccagagaactgcccgagctctgcccagcctcttacactgttaatgaatgcatcctttttgaaatgctctcctttgtctgacacaacacgagccaggctttcctcccacctctacagccgcttctcttcagtctactc

SEQ ID NO: 11298 - DNA, 2909 bp, Homo sapiens
tgcctcatgtaggtagagagctttgggtggctttgcccttagagggcaggggatcccctcccaccctggcacagaaagtccaagctaatactgagagctatgtctagtcaaattcatccccatagttactgtggggcgtcaaagccagggcccctaaattcactgtcatgatccagaagaaggtgttcagagttcaagcccagctccttgacatggcatctggctcctgggaaagtaactgatgtggaagtgtgaccagtgttaggcctaaggggtcctgggcttccccaggaaccagagaactcagtccatgcagggccagttagttttaaagactgcatatcagcacttataacggtcctaggattaggctaagaggtagaacactggttatccactaggatgaccaaccatcttagtttgcctgggattgaggggtttcctaggacatgggacttgcagttttaagaccagaaaactcctgggcgaactgggatgagttggtcaccctcttctcaaccctggctgcacgttagactctcttgaggagcctctcatttagagtctaatttaattgattcaggtagttgtattttttttaacgctctgaggttgattccaacaagctaccacagttgagaactactaggctgtagacagtgtttccaataaccattgaagatgtttggtttttgagcagaagtggaccgagacgtccctgaaaggggtgtatgactctgtgtgttggtctttcgccttagcaagagggatatcaagctggcagttgcctactattgctattatctgtccccaccgccaggccttctttctcattggtgaggaccaagctttctcttttcccggcatgctccgataccctctccctgaagacaggaggtcagtggaattgcctcattttgattggtggaatcatgatttacacagttgtagatgaagctggcatgagacttgatacaggactgccatctctaggtctgggacatgtgccccggagactggtggtctagaggctaactgtgagactgtgtgtgctttggctttgcccggtggggtgtgggagcttggagaccaggtgcttctgggactgtcctctctgcaggcctccaggatcatgtggtatgtcagcaccaggggcgtagccccacgggtcaactttgagggggccctcttctctggctatgcacctgacgggggcctctttatgcctgaagagctcccacagttggacagagagaccctgtgccagtggagcacactctcctatcctggcctggtgaaggagctgtgtgccctcttcattggctctgagctccttccaaaagatgaattaaatgatctgatcgaccgagccttcagcagattccgtcacagagaagtggtccatctgtccaggttgaggaatgggctgaacgtgttggagctgtggcatggcgtcacatatgcatttaaggacctgtccctgtcctgcacaacacagttcctgcagtacttcctggagaagagggagaagcacgtcactgtggttgtaggaacatctggggacacaggaagtgctgccattgagagtgttcaaggggcaaagaacatggacattatcgttctgctgcccaaaggtcactgcacaaagattcaggagctccagatgacaacggtgctgaagcagaacgtacatgtgtttggagtggagggaaacagcgatgagctcgatgagccgatcaagactgtgtttgccgatgtggcttttgtcaagataggcctgcccatccgtctggtcgtggcagtgaaccgcaatgacatcatccacaggactgtccagcagggagacttctctctctctgaggctgttaaatcaaccttggcatcagctatggacattcaggtgccctacaacatggagagggtgttctggctgctctctggctctgacagccaggtgacaagagccctcatggagcagtttgaaaggacccaaagtgtgaatctgcccaaggaactgcacagcaagctttcagaggcagtgacatccgtgtcagtgtcggatgaagccatcacccagaccatgggccgctgctgggatgagaaccagtacttgctgtgcccccactcagcggtggccgtgaactaccattaccagcagatagacaggcagcagcccagcactccccggtgctgcctcgcccctgcctctgcagccaagttcccggaagctgtcctggctgctggcctgacccctgagactcccgcggagatcgtagccctggagcacaaggagacacgctgcaccctgatgcggagaggtgacaactggatgctgatgcttcgggacaccattgaggaccttagccgacagtggaggagtcatgccctcaacacctcccagtagcctggctggaggtggctttctttaggcttcagatcccaggaagatgcaccttctgagctgccttgtgcaccctccccattaagcgtaggttaggaggtttccgggaggctgctcagctggatctggagccagctggctttgctccgttccctggctagtctgtgcctggtcaccagggaggctgagtgaggggctgtgaacagttgccggaagcaccccctccctccccggcccgtgcagcagtgtctgagctgtagtgaaagtttcagggcctgcaaaagaagaggcttgggcacaggactgaccatggctccaggggtttaggacccccagacctgtgaaggtgggagcagctcaccaccttcacgcaggctttgtatgttctctgagccttagttgattttggcccccaaaccaaatccaaaggttctggcccaccttgtcagaggcttccaccctgctcacatgttgggaatccctggaataaaatgcttgttcagtgtga

SEQ ID NO: 11299 - DNA, 1945 bp, Homo sapiens
ttcccactgcgaagctgagaaccctagctccggccccgaccggaagccccaccgcaccgtcagggacgcggactcgggagtgcgcacattcgcagcccgggcagccctgctgcgcaccgggcctcgcgccccgcgccccgcgcgcccgcgccccgcgcctccaggatcatgtggtatgtcagcaccaggggcgtagccccacgggtcaactttgagggggccctcttctctggctatgcacctgacgggggcctctttatgcctgaagagctcccacagttggacagagagaccctgtgccagtggagcacactctcctatcctggcctggtgaaggagctgtgtgccctcttcattggctctgagctccttccaaaagatgaattaaatgatctgatcgaccgagccttcagcagattccgtcacagagaagtggtccatctgtccaggttgaggaatgggctgaacgtgttggagctgtggcatggcgtcacatatgcatttaaggacctgtccctgtcctgcacaacacagttcctgcagtacttcctggagaagagggagaagcacgtcactgtggttgtaggaacatctggggacacaggaagtgctgccattgagagtgttcaaggggcaaagaacatggacattatcgttctgctgcccaaaggtcactgcacaaagattcaggagctccagatgacaacggtgctgaagcagaacgtacatgtgtttggagtggagggaaacagcgatgagctcgatgagccgatcaagactgtgtttgccgatgtggcttttgtcaagataggcctgcccatccgtctggtcgtggcagtgaaccgcaatgacatcatccacaggactgtccagcagggagacttctctctctctgaggctgttaaatcaaccttggcatcagctatggacattcaggtgccctacaacatggagagggtgttctggctgctctctggctctgacagccaggtgacaagagccctcatggagcagtttgaaaggacccaaagtgtgaatctgcccaaggaactgcacagcaagctttcagaggcagtgacatccgtgtcagtgtcggatgaagccatcacccagaccatgggccgctgctgggatgagaaccagtacttgctgtgcccccactcagcggtggccgtgaactaccattaccagcagatagacaggcagcagcccagcactccccggtgctgcctcgcccctgcctctgcagccaagttcccggaagctgtcctggctgctggcctgacccctgagactcccgcggagatcgtagccctggagcacaaggagacacgctgcaccctgatgcggagaggtgacaactggatgctgatgcttcgggacaccattgaggaccttagccgacagtggaggagtcatgccctcaacacctcccagtagcctggctggaggtggctttctttaggcttcagatcccaggaagatgcaccttctgagctgccttgtgcaccctccccattaagcgtaggttaggaggtttccgggaggctgctcagctggatctggagccagctggctttgctccgttccctggctagtctgtgcctggtcaccagggaggctgagtgaggggctgtgaacagttgccggaagcaccccctccctccccggcccgtgcagcagtgtctgagctgtagtgaaagtttcagggcctgcaaaagaagaggcttgggcacaggactgaccatggctccaggggtttaggacccccagacctgtgaaggtgggagcagctcaccaccttcacgcaggctttgtatgttctctgagccttagttgattttggcccccaaaccaaatccaaaggttctggcccaccttgtcagaggcttccaccctgctcacatgttgggaatccctggaataaaatgcttgttcagtgtga

SEQ ID NO: 11300 - DNA, 3092 bp, Homo sapiens
tgcctcatgtaggtagagagctttgggtggctttgcccttagagggcaggggatcccctcccaccctggcacagaaagtccaagctaatactgagagctatgtctagtcaaattcatccccatagttactgtggggcgtcaaagccagggcccctaaattcactgtcatgatccagaagaaggtgttcagagttcaagcccagctccttgacatggcatctggctcctgggaaagtaactgatgtggaagtgtgaccagtgttaggcctaaggggtcctgggcttccccaggaaccagagaactcagtccatgcagggccagttagttttaaagactgcatatcagcacttataacggtcctaggattaggctaagaggtagaacactggttatccactaggatgaccaaccatcttagtttgcctgggattgaggggtttcctaggacatgggacttgcagttttaagaccagaaaactcctgggcgaactgggatgagttggtcaccctcttctcaaccctggctgcacgttagactctcttgaggagcctctcatttagagtctaatttaattgattcaggtagttgtattttttttaacgctctgaggttgattccaacaagctaccacagttgagaactactaggctgtagacagtgtttccaataaccattgaagatgtttggtttttgagcagaagtggaccgagacgtccctgaaaggggtgtatgactctgtgtgttggtctttcgccttagcaagagggatatcaagctggcagttgcctactattgctattatctgtccccaccgccaggccttctttctcattggtgaggaccaagctttctcttttcccggcatgctccgataccctctccctgaagacaggaggtcagtggaattgcctcattttgattggtggaatcatgatttacacagttgtagatgaagctggcatgagacttgatacaggactgccatctctaggtctgggacatgtgccccggagactggtggtctagaggctaactgtgagactgtgtgtgctttggctttgcccggtggggtgtgggagcttggagaccaggtgcttctgggactgtcctctctgcaggcctccaggatcatgtggtatgtcagcaccaggggcgtagccccacgggtcaactttgagggggccctcttctctggctatgcacctgacgggggcctctttatgcctgaagagctcccacagttggacagagagaccctgtgccagtggagcacactctcctatcctggcctggtgaaggagctgtgtgccctcttcattggctctgagctccttccaaaagatgaattaaatgatctgatcgaccgagccttcagcagattccgtcacagagaagtggtccatctgtccaggttgaggaatgggctgaacgtgttggagctgtggcatggcgtcacatatgcatttaaggacctgtccctgtcctgcacaacacagttcctgcagtacttcctggagaagagggagaagcacgtcactgtggttgtaggaacatctggggacacaggaagtgctgccattgagagtgttcaaggggcaaagaacatggacattatcgttctgctgcccaaaggtcactgcacaaagattcaggagctccagatgacaacggtgctgaagcagaacgtacatgtgtttggagtggagggaaacagcgatgagctcgatgagccgatcaagactgtgtttgccgatgtggcttttgtcaagaagcacaatctgatgagcctgaattcgatcaactggtcccgggtcctggtgcagatggcccatcacttctttgcttacttccagtgtacgccatccttggacacacatcccctacccctggtggaggtggttgtgccaacaggggctgccggtaaccttgcagctgggtacattgctcaaaagataggcctgcccatccgtctggtcgtggcagtgaaccgcaatgacatcatccacaggactgtccagcagggagacttctctctctctgaggctgttaaatcaaccttggcatcagctatggacattcaggtgccctacaacatggagagggtgttctggctgctctctggctctgacagccaggtgacaagagccctcatggagcagtttgaaaggacccaaagtgtgaatctgcccaaggaactgcacagcaagctttcagaggcagtgacatccgtgtcagtgtcggatgaagccatcacccagaccatgggccgctgctgggatgagaaccagtacttgctgtgcccccactcagcggtggccgtgaactaccattaccagcagatagacaggcagcagcccagcactccccggtgctgcctcgcccctgcctctgcagccaagttcccggaagctgtcctggctgctggcctgacccctgagactcccgcggagatcgtagccctggagcacaaggagacacgctgcaccctgatgcggagaggtgacaactggatgctgatgcttcgggacaccattgaggaccttagccgacagtggaggagtcatgccctcaacacctcccagtagcctggctggaggtggctttctttaggcttcagatcccaggaagatgcaccttctgagctgccttgtgcaccctccccattaagcgtaggttaggaggtttccgggaggctgctcagctggatctggagccagctggctttgctccgttccctggctagtctgtgcctggtcaccagggaggctgagtgaggggctgtgaacagttgccggaagcaccccctccctccccggcccgtgcagcagtgtctgagctgtagtgaaagtttcagggcctgcaaaagaagaggcttgggcacaggactgaccatggctccaggggtttaggacccccagacctgtgaaggtgggagcagctcaccaccttcacgcaggctttgtatgttctctgagccttagttgattttggcccccaaaccaaatccaaaggttctggcccaccttgtcagaggcttccaccctgctcacatgttgggaatccctggaataaaatgcttgttcagtgtga

SEQ ID NO: 11301 - DNA, 2128 bp, Homo sapiens
ttcccactgcgaagctgagaaccctagctccggccccgaccggaagccccaccgcaccgtcagggacgcggactcgggagtgcgcacattcgcagcccgggcagccctgctgcgcaccgggcctcgcgccccgcgccccgcgcgcccgcgccccgcgcctccaggatcatgtggtatgtcagcaccaggggcgtagccccacgggtcaactttgagggggccctcttctctggctatgcacctgacgggggcctctttatgcctgaagagctcccacagttggacagagagaccctgtgccagtggagcacactctcctatcctggcctggtgaaggagctgtgtgccctcttcattggctctgagctccttccaaaagatgaattaaatgatctgatcgaccgagccttcagcagattccgtcacagagaagtggtccatctgtccaggttgaggaatgggctgaacgtgttggagctgtggcatggcgtcacatatgcatttaaggacctgtccctgtcctgcacaacacagttcctgcagtacttcctggagaagagggagaagcacgtcactgtggttgtaggaacatctggggacacaggaagtgctgccattgagagtgttcaaggggcaaagaacatggacattatcgttctgctgcccaaaggtcactgcacaaagattcaggagctccagatgacaacggtgctgaagcagaacgtacatgtgtttggagtggagggaaacagcgatgagctcgatgagccgatcaagactgtgtttgccgatgtggcttttgtcaagaagcacaatctgatgagcctgaattcgatcaactggtcccgggtcctggtgcagatggcccatcacttctttgcttacttccagtgtacgccatccttggacacacatcccctacccctggtggaggtggttgtgccaacaggggctgccggtaaccttgcagctgggtacattgctcaaaagataggcctgcccatccgtctggtcgtggcagtgaaccgcaatgacatcatccacaggactgtccagcagggagacttctctctctctgaggctgttaaatcaaccttggcatcagctatggacattcaggtgccctacaacatggagagggtgttctggctgctctctggctctgacagccaggtgacaagagccctcatggagcagtttgaaaggacccaaagtgtgaatctgcccaaggaactgcacagcaagctttcagaggcagtgacatccgtgtcagtgtcggatgaagccatcacccagaccatgggccgctgctgggatgagaaccagtacttgctgtgcccccactcagcggtggccgtgaactaccattaccagcagatagacaggcagcagcccagcactccccggtgctgcctcgcccctgcctctgcagccaagttcccggaagctgtcctggctgctggcctgacccctgagactcccgcggagatcgtagccctggagcacaaggagacacgctgcaccctgatgcggagaggtgacaactggatgctgatgcttcgggacaccattgaggaccttagccgacagtggaggagtcatgccctcaacacctcccagtagcctggctggaggtggctttctttaggcttcagatcccaggaagatgcaccttctgagctgccttgtgcaccctccccattaagcgtaggttaggaggtttccgggaggctgctcagctggatctggagccagctggctttgctccgttccctggctagtctgtgcctggtcaccagggaggctgagtgaggggctgtgaacagttgccggaagcaccccctccctccccggcccgtgcagcagtgtctgagctgtagtgaaagtttcagggcctgcaaaagaagaggcttgggcacaggactgaccatggctccaggggtttaggacccccagacctgtgaaggtgggagcagctcaccaccttcacgcaggctttgtatgttctctgagccttagttgattttggcccccaaaccaaatccaaaggttctggcccaccttgtcagaggcttccaccctgctcacatgttgggaatccctggaataaaatgcttgttcagtgtga

SEQ ID NO: 11302 - DNA, 2940 bp, Homo sapiens
tgcctcatgtaggtagagagctttgggtggctttgcccttagagggcaggggatcccctcccaccctggcacagaaagtccaagctaatactgagagctatgtctagtcaaattcatccccatagttactgtggggcgtcaaagccagggcccctaaattcactgtcatgatccagaagaaggtgttcagagttcaagcccagctccttgacatggcatctggctcctgggaaagtaactgatgtggaagtgtgaccagtgttaggcctaaggggtcctgggcttccccaggaaccagagaactcagtccatgcagggccagttagttttaaagactgcatatcagcacttataacggtcctaggattaggctaagaggtagaacactggttatccactaggatgaccaaccatcttagtttgcctgggattgaggggtttcctaggacatgggacttgcagttttaagaccagaaaactcctgggcgaactgggatgagttggtcaccctcttctcaaccctggctgcacgttagactctcttgaggagcctctcatttagagtctaatttaattgattcaggtagttgtattttttttaacgctctgaggttgattccaacaagctaccacagttgagaactactaggctgtagacagtgtttccaataaccattgaagatgtttggtttttgagcagaagtggaccgagacgtccctgaaaggggtgtatgactctgtgtgttggtctttcgccttagcaagagggatatcaagctggcagttgcctactattgctattatctgtccccaccgccaggccttctttctcattggtgaggaccaagctttctcttttcccggcatgctccgataccctctccctgaagacaggaggtcagtggaattgcctcattttgattggtggaatcatgatttacacagttgtagatgaagctggcatgagacttgatacaggactgccatctctaggtctgggacatgtgccccggagactggtggtctagaggctaactgtgagactgtgtgtgctttggctttgcccggtggggtgtgggagcttggagaccaggtgcttctgggactgtcctctctgcaggcctccaggatcatgtggtatgtcagcaccaggggcgtagccccacgggtcaactttgagggggccctcttctctggctatgcacctgacgggggcctctttatgcctgaagagctcccacagttggacagagagaccctgtgccagtggagcacactctcctatcctggcctggtgaaggagctgtgtgccctcttcattggctctgagctccttccaaaagatgaattaaatgatctgatcgaccgagccttcagcagattccgtcacagagaagtggtccatctgtccaggttgaggaatgggctgaacgtgttggagctgtggcatggcgtcacatatgcatttaaggacctgtccctgtcctgcacaacacagttcctgcagtacttcctggagaagagggagaagcacgtcactgtggttgtaggaacatctggggacacaggaagtgctgccattgagagtgttcaaggggcaaagaacatggacattatcgttctgctgcccaaaggtcactgcacaaagattcaggagctccagatgacaacggtgctgaagcagaacgtacatgtgtttggagtggagggaaacagcgatgagctcgatgagccgatcaagactgtgtttgccgatgtggcttttgtcaagaagcacaatctgatgagcctgaattcgatcaactggtcccgggtcctggtgcagatggcccatcacttctttgcttacttccagtgtacgccatccttggacacacatcccctacccctggtggaggtggttgtgccaacaggggctgccggtaaccttgcagctgggtacattgctcaaaagataggcctgcccatccgtctggtcgtggcagtgaaccgcaatgacatcatccacaggactgtccagcagggagacttctctctctctgaggctgttaaatcaaccttggcatcagctatggacattcaggtgccctacaacatggagagggtgttctggctgctctctggctctgacagccaggtgacaagagccctcatggagcagtttgaaaggacccaaagtgtgaatctgcccaaggaactgcacagcaagcactccccggtgctgcctcgcccctgcctctgcagccaagttcccggaagctgtcctggctgctggcctgacccctgagactcccgcggagatcgtagccctggagcacaaggagacacgctgcaccctgatgcggagaggtgacaactggatgctgatgcttcgggacaccattgaggaccttagccgacagtggaggagtcatgccctcaacacctcccagtagcctggctggaggtggctttctttaggcttcagatcccaggaagatgcaccttctgagctgccttgtgcaccctccccattaagcgtaggttaggaggtttccgggaggctgctcagctggatctggagccagctggctttgctccgttccctggctagtctgtgcctggtcaccagggaggctgagtgaggggctgtgaacagttgccggaagcaccccctccctccccggcccgtgcagcagtgtctgagctgtagtgaaagtttcagggcctgcaaaagaagaggcttgggcacaggactgaccatggctccaggggtttaggacccccagacctgtgaaggtgggagcagctcaccaccttcacgcaggctttgtatgttctctgagccttagttgattttggcccccaaaccaaatccaaaggttctggcccaccttgtcagaggcttccaccctgctcacatgttgggaatccctggaataaaatgcttgttcagtgtga

SEQ ID NO: 11303 - DNA, 3097 bp, Homo sapiens
tgcctcatgtaggtagagagctttgggtggctttgcccttagagggcaggggatcccctcccaccctggcacagaaagtccaagctaatactgagagctatgtctagtcaaattcatccccatagttactgtggggcgtcaaagccagggcccctaaattcactgtcatgatccagaagaaggtgttcagagttcaagcccagctccttgacatggcatctggctcctgggaaagtaactgatgtggaagtgtgaccagtgttaggcctaaggggtcctgggcttccccaggaaccagagaactcagtccatgcagggccagttagttttaaagactgcatatcagcacttataacggtcctaggattaggctaagaggtagaacactggttatccactaggatgaccaaccatcttagtttgcctgggattgaggggtttcctaggacatgggacttgcagttttaagaccagaaaactcctgggcgaactgggatgagttggtcaccctcttctcaaccctggctgcacgttagactctcttgaggagcctctcatttagagtctaatttaattgattcaggtagttgtattttttttaacgctctgaggttgattccaacaagctaccacagttgagaactactaggctgtagacagtgtttccaataaccattgaagatgtttggtttttgagcagaagtggaccgagacgtccctgaaaggggtgtatgactctgtgtgttggtctttcgccttagcaagagggatatcaagctggcagttgcctactattgctattatctgtccccaccgccaggccttctttctcattggtgaggaccaagctttctcttttcccggcatgctccgataccctctccctgaagacaggaggtcagtggaattgcctcattttgattggtggaatcatgatttacacagttgtagatgaagctggcatgagacttgatacaggactgccatctctaggtctgggacatgtgccccggagactggtggtctagaggctaactgtgagactgtgtgtgctttggctttgcccggtggggtgtgggagcttggagaccaggtgcttctgggactgtcctctctgcaggcctccaggatcatgtggtatgtcagcaccaggggcgtagccccacgggtcaactttgagggggccctcttctctggctatgcacctgacgggggcctctttatgcctgaagagctcccacagttggacagagagaccctgtgccagtggagcacactctcctatcctggcctggtgaaggagctgtgtgccctcttcattggctctgagctccttccaaaagatgaattaaatgatctgatcgaccgagccttcagcagattccgtcacagagaagtggtccatctgtccaggttgaggaatgggctgaacgtgttggagctgtggcatggcgtcacatatgcatttaaggacctgtccctgtcctgcacaacacagttcctgcagtacttcctggagaagagggagaagcacgtcactgtggttgtaggaacatctggggacacaggaagtgctgccattgagagtgttcaaggggcaaagaacatggacattatcgttctgctgcccaaaggtcactgcacaaagattcaggagctccagatgacaacggtgctgaagcagaacgtacatgtgtttggagtggagggaaacagcgatgagctcgatgagccgatcaagactgtgtttgccgatgtggcttttgtcaagaagcacaatctgatgagcctgaattcgatcaactggtcccgggtcctggtgcagatggcccatcacttctttgcttacttccagtgtacgccatccttggacacacatcccctacccctggtggaggtggttgtgccaacaggggctgccggtaaccttgcagctgggtacattgctcaaaagataggcctgcccatccgtctggtcgtggcagtgaaccgcaatgacatcatccacaggactgtccagcagggagacttctctctctctgaggctgttaaatcaaccttggcatcagctatggacattcaggtgccctacaacatggagagggtgttctggctgctctctggctctgacagccaggtgacaagagccctcatggagcagtttgaaaggacccaaagtgtgaatctgcccaaggaactgcacagcaaggggccctcttcttctccaagcagtgggagagacaggactacgaaaaaatggctgtaatggagtgtgatgggtgctgtgtggaactgtgccttggaaactgtgggcccagaagagggagcgtgacagatatcccagggacagccatggtcagaggtggtggctgagctggcctccaaccaggaggagcagtttgccagttcccggaagctgtcctggctgctggcctgacccctgagactcccgcggagatcgtagccctggagcacaaggagacacgctgcaccctgatgcggagaggtgacaactggatgctgatgcttcgggacaccattgaggaccttagccgacagtggaggagtcatgccctcaacacctcccagtagcctggctggaggtggctttctttaggcttcagatcccaggaagatgcaccttctgagctgccttgtgcaccctccccattaagcgtaggttaggaggtttccgggaggctgctcagctggatctggagccagctggctttgctccgttccctggctagtctgtgcctggtcaccagggaggctgagtgaggggctgtgaacagttgccggaagcaccccctccctccccggcccgtgcagcagtgtctgagctgtagtgaaagtttcagggcctgcaaaagaagaggcttgggcacaggactgaccatggctccaggggtttaggacccccagacctgtgaaggtgggagcagctcaccaccttcacgcaggctttgtatgttctctgagccttagttgattttggcccccaaaccaaatccaaaggttctggcccaccttgtcagaggcttccaccctgctcacatgttgggaatccctggaataaaatgcttgttcagtgtga

SEQ ID NO: 11304 - DNA, 3114 bp, Homo sapiens
tgcctcatgtaggtagagagctttgggtggctttgcccttagagggcaggggatcccctcccaccctggcacagaaagtccaagctaatactgagagctatgtctagtcaaattcatccccatagttactgtggggcgtcaaagccagggcccctaaattcactgtcatgatccagaagaaggtgttcagagttcaagcccagctccttgacatggcatctggctcctgggaaagtaactgatgtggaagtgtgaccagtgttaggcctaaggggtcctgggcttccccaggaaccagagaactcagtccatgcagggccagttagttttaaagactgcatatcagcacttataacggtcctaggattaggctaagaggtagaacactggttatccactaggatgaccaaccatcttagtttgcctgggattgaggggtttcctaggacatgggacttgcagttttaagaccagaaaactcctgggcgaactgggatgagttggtcaccctcttctcaaccctggctgcacgttagactctcttgaggagcctctcatttagagtctaatttaattgattcaggtagttgtattttttttaacgctctgaggttgattccaacaagctaccacagttgagaactactaggctgtagacagtgtttccaataaccattgaagatgtttggtttttgagcagaagtggaccgagacgtccctgaaaggggtgtatgactctgtgtgttggtctttcgccttagcaagagggatatcaagctggcagttgcctactattgctattatctgtccccaccgccaggccttctttctcattggtgaggaccaagctttctcttttcccggcatgctccgataccctctccctgaagacaggaggtcagtggaattgcctcattttgattggtggaatcatgatttacacagttgtagatgaagctggcatgagacttgatacaggactgccatctctaggtctgggacatgtgccccggagactggtggtctagaggctaactgtgagactgtgtgtgctttggctttgcccggtggggtgtgggagcttggagaccaggtgcttctgggactgtcctctctgcaggcctccaggatcatgtggtatgtcagcaccaggggcgtagccccacgggtcaactttgagggggccctcttctctggctatgcacctgacgggggcctctttatgcctgaagagctcccacagttggacagagagaccctgtgccagtggagcacactctcctatcctggcctggtgaaggagctgtgtgccctcttcattggctctgagctccttccaaaagatgaattaaatgatctgatcgaccgagccttcagcagattccgtcacagagaagtggtccatctgtccaggttgaggaatgggctgaacgtgttggagctgtggcatggcgtcacatatgcatttaaggacctgtccctgtcctgcacaacacagttcctgcagtacttcctggagaagagggagaagcacgtcactgtggttgtaggaacatctggggacacaggaagtgctgccattgagagtgttcaaggggcaaagaacatggacattatcgttctgctgcccaaaggtcactgcacaaagattcaggagctccagatgacaacggtgctgaagcagaacgtacatgtgtttggagtggagggaaacagcgatgagctcgatgagccgatcaagactgtgtttgccgatgtggcttttgtcaagaagcacaatctgatgagcctgaattcgatcaactggtcccgggtcctggtgcagatggcccatcacttctttgcttacttccagtgtacgccatccttggacacacatcccctacccctggtggaggtggttgtgccaacaggggctgccggtaaccttgcagctgggtacattgctcaaaagataggcctgcccatccgtctggtcgtggcagtgaaccgcaatgacatcatccacaggactgtccagcagggagacttctctctctctgaggctgttaaatcaaccttggcatcagctatggacattcaggtgccctacaacatggagagggtgttctggctgctctctggctctgacagccaggtgacaagagccctcatggagcagtttgaaaggacccaaagtgtgaatctgcccaaggaactgcacagcaagtgggagagacaggactacgaaaaaatggctgtaatggagtgtgatgggtgctgtgtggaactgtgccttggaaactgtgggcccagaagagggagcgtgacagatatcccagggacagccatggtcagaggtggtggctgagctggcctccaaccaggaggagcagtttgccagcactccccggtgctgcctcgcccctgcctctgcagccaagttcccggaagctgtcctggctgctggcctgacccctgagactcccgcggagatcgtagccctggagcacaaggagacacgctgcaccctgatgcggagaggtgacaactggatgctgatgcttcgggacaccattgaggaccttagccgacagtggaggagtcatgccctcaacacctcccagtagcctggctggaggtggctttctttaggcttcagatcccaggaagatgcaccttctgagctgccttgtgcaccctccccattaagcgtaggttaggaggtttccgggaggctgctcagctggatctggagccagctggctttgctccgttccctggctagtctgtgcctggtcaccagggaggctgagtgaggggctgtgaacagttgccggaagcaccccctccctccccggcccgtgcagcagtgtctgagctgtagtgaaagtttcagggcctgcaaaagaagaggcttgggcacaggactgaccatggctccaggggtttaggacccccagacctgtgaaggtgggagcagctcaccaccttcacgcaggctttgtatgttctctgagccttagttgattttggcccccaaaccaaatccaaaggttctggcccaccttgtcagaggcttccaccctgctcacatgttgggaatccctggaataaaatgcttgttcagtgtga

SEQ ID NO: 11305 - DNA, 2900 bp, Homo sapiens
tgcctcatgtaggtagagagctttgggtggctttgcccttagagggcaggggatcccctcccaccctggcacagaaagtccaagctaatactgagagctatgtctagtcaaattcatccccatagttactgtggggcgtcaaagccagggcccctaaattcactgtcatgatccagaagaaggtgttcagagttcaagcccagctccttgacatggcatctggctcctgggaaagtaactgatgtggaagtgtgaccagtgttaggcctaaggggtcctgggcttccccaggaaccagagaactcagtccatgcagggccagttagttttaaagactgcatatcagcacttataacggtcctaggattaggctaagaggtagaacactggttatccactaggatgaccaaccatcttagtttgcctgggattgaggggtttcctaggacatgggacttgcagttttaagaccagaaaactcctgggcgaactgggatgagttggtcaccctcttctcaaccctggctgcacgttagactctcttgaggagcctctcatttagagtctaatttaattgattcaggtagttgtattttttttaacgctctgaggttgattccaacaagctaccacagttgagaactactaggctgtagacagtgtttccaataaccattgaagatgtttggtttttgagcagaagtggaccgagacgtccctgaaaggggtgtatgactctgtgtgttggtctttcgccttagcaagagggatatcaagctggcagttgcctactattgctattatctgtccccaccgccaggccttctttctcattggtgaggaccaagctttctcttttcccggcatgctccgataccctctccctgaagacaggaggtcagtggaattgcctcattttgattggtggaatcatgatttacacagttgtagatgaagctggcatgagacttgatacaggactgccatctctaggtctgggacatgtgccccggagactggtggtctagaggctaactgtgagactgtgtgtgctttggctttgcccggtggggtgtgggagcttggagaccaggtgcttctgggactgtcctctctgcaggcctccaggatcatgtggtatgtcagcaccaggggcgtagccccacgggtcaactttgagggggccctcttctctggctatgcacctgacgggggcctctttatgcctgaagagctcccacagttggacagagagaccctgtgccagtggagcacactctcctatcctggcctggtgaaggagctgtgtgccctcttcattggctctgagctccttccaaaagatgaattaaatgatctgatcgaccgagccttcagcagattccgtcacagagaagtggtccatctgtccaggttgaggaatgggctgaacgtgttggagctgtggcatggcgtcacatatgcatttaaggacctgtccctgtcctgcacaacacagttcctgcagtacttcctggagaagagggagaagcacgtcactgtggttgtaggaacatctggggacacaggaagtgctgccattgagagtgttcaaggggcaaagaacatggacattatcgttctgctgcccaaaggtcactgcacaaagattcaggagctccagatgacaacggtgctgaagcagaacgtacatgtgtttggagtggagggaaacagcgatgagctcgatgagccgatcaagactgtgtttgccgatgtggcttttgtcaagaagcacaatctgatgagcctgaattcgatcaactggtcccgggtcctggtgcagatggcccatcacttctttgcttacttccagtgtacgccatccttggacacacatcccctacccctggtggaggtggttgtgccaacaggggctgccggtaaccttgcagctgggtacattgctcaaaagataggcctgcccatccgtctggtcgtggcagtgaaccgcaatgacatcatccacaggactgtccagcagggagacttctctctctctgaggctgttaaatcaaccttggcatcagctatggacattcaggtgccctacaacatggagagggtgttctggctgctctctggctctgacagccaggtgacaagagccctcatggagcagtttgaaaggacccaaagtgtgaatctgcccaaggaactgcacagcaagttcccggaagctgtcctggctgctggcctgacccctgagactcccgcggagatcgtagccctggagcacaaggagacacgctgcaccctgatgcggagaggtgacaactggatgctgatgcttcgggacaccattgaggaccttagccgacagtggaggagtcatgccctcaacacctcccagtagcctggctggaggtggctttctttaggcttcagatcccaggaagatgcaccttctgagctgccttgtgcaccctccccattaagcgtaggttaggaggtttccgggaggctgctcagctggatctggagccagctggctttgctccgttccctggctagtctgtgcctggtcaccagggaggctgagtgaggggctgtgaacagttgccggaagcaccccctccctccccggcccgtgcagcagtgtctgagctgtagtgaaagtttcagggcctgcaaaagaagaggcttgggcacaggactgaccatggctccaggggtttaggacccccagacctgtgaaggtgggagcagctcaccaccttcacgcaggctttgtatgttctctgagccttagttgattttggcccccaaaccaaatccaaaggttctggcccaccttgtcagaggcttccaccctgctcacatgttgggaatccctggaataaaatgcttgttcagtgtga

SEQ ID NO: 11306 - DNA, 1893 bp, Homo sapiens
ttcccactgcgaagctgagaaccctagctccggccccgaccggaagccccaccgcaccgtcagggacgcggactcgggagtgcgcacattcgcagcccgggcagccctgctgcgcaccgggcctcgcgccccgcgccccgcgcgcccgcgccccgcatctgatcgaccgagccttcagcagattccgtcacagagaagtggtccatctgtccaggttgaggaatgggctgaacgtgttggagctgtggcatggcgtcacatatgcatttaaggacctgtccctgtcctgcacaacacagttcctgcagtacttcctggagaagagggagaagcacgtcactgtggttgtaggaacatctggggacacaggaagtgctgccattgagagtgttcaaggggcaaagaacatggacattatcgttctgctgcccaaaggtcactgcacaaagattcaggagctccagatgacaacggtgctgaagcagaacgtacatgtgtttggagtggagggaaacagcgatgagctcgatgagccgatcaagactgtgtttgccgatgtggcttttgtcaagaagcacaatctgatgagcctgaattcgatcaactggtcccgggtcctggtgcagatggcccatcacttctttgcttacttccagtgtacgccatccttggacacacatcccctacccctggtggaggtggttgtgccaacaggggctgccggtaaccttgcagctgggtacattgctcaaaagataggcctgcccatccgtctggtcgtggcagtgaaccgcaatgacatcatccacaggactgtccagcagggagacttctctctctctgaggctgttaaatcaaccttggcatcagctatggacattcaggtgccctacaacatggagagggtgttctggctgctctctggctctgacagccaggtgacaagagccctcatggagcagtttgaaaggacccaaagtgtgaatctgcccaaggaactgcacagcaagctttcagaggcagtgacatccgtgtcagtgtcggatgaagccatcacccagaccatgggccgctgctgggatgagaaccagtacttgctgtgcccccactcagcggtggccgtgaactaccattaccagcagatagacaggcagcagcccagcactccccggtgctgcctcgcccctgcctctgcagccaagttcccggaagctgtcctggctgctggcctgacccctgagactcccgcggagatcgtagccctggagcacaaggagacacgctgcaccctgatgcggagaggtgacaactggatgctgatgcttcgggacaccattgaggaccttagccgacagtggaggagtcatgccctcaacacctcccagtagcctggctggaggtggctttctttaggcttcagatcccaggaagatgcaccttctgagctgccttgtgcaccctccccattaagcgtaggttaggaggtttccgggaggctgctcagctggatctggagccagctggctttgctccgttccctggctagtctgtgcctggtcaccagggaggctgagtgaggggctgtgaacagttgccggaagcaccccctccctccccggcccgtgcagcagtgtctgagctgtagtgaaagtttcagggcctgcaaaagaagaggcttgggcacaggactgaccatggctccaggggtttaggacccccagacctgtgaaggtgggagcagctcaccaccttcacgcaggctttgtatgttctctgagccttagttgattttggcccccaaaccaaatccaaaggttctggcccaccttgtcagaggcttccaccctgctcacatgttgggaatccctggaataaaatgcttgttcagtgtga

SEQ ID NO: 11307 - DNA, 3455 bp, Homo sapiens
tgcctcatgtaggtagagagctttgggtggctttgcccttagagggcaggggatcccctcccaccctggcacagaaagtccaagctaatactgagagctatgtctagtcaaattcatccccatagttactgtggggcgtcaaagccagggcccctaaattcactgtcatgatccagaagaaggtgttcagagttcaagcccagctccttgacatggcatctggctcctgggaaagtaactgatgtggaagtgtgaccagtgttaggcctaaggggtcctgggcttccccaggaaccagagaactcagtccatgcagggccagttagttttaaagactgcatatcagcacttataacggtcctaggattaggctaagaggtagaacactggttatccactaggatgaccaaccatcttagtttgcctgggattgaggggtttcctaggacatgggacttgcagttttaagaccagaaaactcctgggcgaactgggatgagttggtcaccctcttctcaaccctggctgcacgttagactctcttgaggagcctctcatttagagtctaatttaattgattcaggtagttgtattttttttaacgctctgaggttgattccaacaagctaccacagttgagaactactaggctgtagacagtgtttccaataaccattgaagatgtttggtttttgagcagaagtggaccgagacgtccctgaaaggggtgtatgactctgtgtgttggtctttcgccttagcaagagggatatcaagctggcagttgcctactattgctattatctgtccccaccgccaggccttctttctcattggtgaggaccaagctttctcttttcccggcatgctccgataccctctccctgaagacaggaggtcagtggaattgcctcattttgattggtggaatcatgatttacacagttgtagatgaagctggcatgagacttgatacaggactgccatctctaggtctgggacatgtgccccggagactggtggtctagaggctaactgtgagactgtgtgtgctttggctttgcccggtggggtgtgggagcttggagaccaggtgcttctgggactgtcctctctgcaggcctccaggatcatgtggtatgtcagcaccaggggcgtagccccacgggtcaactttgagggggccctcttctctggctatgcacctgacgggggcctctttatgcctgaagagctcccacagttggacagagagaccctgtgccagtggagcacactctcctatcctggcctggtgaaggagctgtgtgccctcttcattggctctgagctccttccaaaagatgaattaaatgatctgatcgaccgagccttcagcagattccgtcacagagaagtggtccatctgtccaggttgaggaatgggctgaacgtgttggagctgtggcatggcgtcacatatgcatttaaggacctgtccctgtcctgcacaacacagttcctgcagtacttcctggagaagagggagaagcacgtcactgtggttgtaggaacatctggggacacaggaagtgctgccattgagagtgttcaaggggcaaagaacatggacattatcgttctgctgcccaaaggtcactgcacaaagattcaggagctccagatgacaacggtgctgaagcagaacgtacatgtgtttggagtggagggaaacagcgatgagctcgatgagccgatcaagactgtgtttgccgatgtggcttttgtcaagaagcacaatctgatgagcctgaattcgatcaactggtcccgggtcctggtgcagatggcccatcacttctttgcttacttccagtgtacgccatccttggacacacatcccctacccctggtggaggtggttgtgccaacaggggctgccggtaaccttgcagctgggtacattgctcaaaagataggcctgcccatccgtctggtcgtggcagtgaaccgcaatgacatcatccacaggactgtccagcagggagacttctctctctctgaggctgttaaatcaaccttggcatcagctatggacattcaggtgccctacaacatggagagggtgttctggctgctctctggctctgacagccaggtgacaagagccctcatggagcagtttgaaaggacccaaagtgtgaatctgcccaaggaactgcacagcaagctttcagaggcagtgacatccgtgtcagtgtcggatgaagccatcacccagaccatgggccgctgctgggatgagaaccagtacttgctgtgcccccactcagcggtggccgtgaactaccattaccagcagatagacaggcagcagcccagcactccccggtgctgcctcgcccctgcctctgcagccaagttcccggaagctgtcctggctgctggcctgacccctgagactcccgcggagatcgtagccctggagcacaaggagacacgctgcaccctgatgcggagaggtgacaactggatgctgatgcttcgggacaccattgaggaccttagccgacagtggaggagtcatgccctcaacacctcccagtagcctggctggaggtggctttctttaggcttcagatcccaggaagatgcaccttctgagctgccttgtgcaccctccccattaagcgtaggttaggaggtttccgggaggctgctcagctggatctggagccagctggctttgctccgttccctggctagtctgtgcctggtcaccagggaggctgagtgaggggctgtgaacagttgccggaagcaccccctccctccccggcccgtgcagcagtgtctgagctgtagtgaaagtttcagggcctgcaaaagaagaggcttgggcacaggactgaccatggctccaggggtttaggacccccagacctgtgaaggtgggagcagctcaccaccttcacgcaggctttgtatgttctctgagccttagttgattttggcccccaaaccaaatccaaaggttctggcccaccttgtcagaggcttccaccctgctcacatgttgggaatccctggaataaaatgcttgttcagtgtgaaaaaaaaaaaaaaaaaaaaaaaaaaaaaaaaaaaaaaaaaaaaaaaaaaaaaaaaaaaaaaaaaaaaaaaaaaaaaagaaacgaacaaaaacaaaaaaaaaaaggggggggggccccacaaaaaaattatcccacggggaggagcaccaaagaaaggacgcgccacccacatggtttttatagcaacaaaagcgagcccccaataaagagggggcaaatattacacaaacacagacgcgggagcgcacatatataaacaaacacagttgtcacacaagcacacaacagcatcacatagaagttgctggagcaaccaaccacccacttagctgagcgacaaaaaaatgtggcaaccaacccact

SEQ ID NO: 11308 - DNA, 2726 bp, Homo sapiens
tgcctcatgtaggtagagagctttgggtggctttgcccttagagggcaggggatcccctcccaccctggcacagaaagtccaagctaatactgagagctatgtctagtcaaattcatccccatagttactgtggggcgtcaaagccagggcccctaaattcactgtcatgatccagaagaaggtgttcagagttcaagcccagctccttgacatggcatctggctcctgggaaagtaactgatgtggaagtgtgaccagtgttaggcctaaggggtcctgggcttccccaggaaccagagaactcagtccatgcagggccagttagttttaaagactgcatatcagcacttataacggtcctaggattaggctaagaggtagaacactggttatccactaggatgaccaaccatcttagtttgcctgggattgaggggtttcctaggacatgggacttgcagttttaagaccagaaaactcctgggcgaactgggatgagttggtcaccctcttctcaaccctggctgcacgttagactctcttgaggagcctctcatttagagtctaatttaattgattcaggtagttgtattttttttaacgctctgaggttgattccaacaagctaccacagttgagaactactaggctgtagacagtgtttccaataaccattgaagatgtttggtttttgagcagaagtggaccgagacgtccctgaaaggggtgtatgactctgtgtgttggtctttcgccttagcaagagggatatcaagctggcagttgcctactattgctattatctgtccccaccgccaggccttctttctcattggtgaggaccaagctttctcttttcccggcatgctccgataccctctccctgaagacaggaggtcagtggaattgcctcattttgattggtggaatcatgatttacacagttgtagatgaagctggcatgagacttgatacaggactgccatctctaggtctgggacatgtgccccggagactggtggtctagaggctaactgtgagactgtgtgtgctttggctttgcccggtggggtgtgggagcttggagaccaggtgcttctgggactgtcctctctgcaggcctccaggatcatgtggtatgtcagcaccaggggcgtagccccacgggtcaactttgagggggccctcttctctggctatgcacctgacgggggcctctttatgcctgaagagctcccacagttggacagagagaccctgtgccagtggagcacactctcctatcctggcctggtgaaggagctgtgtgccctcttcattggctctgagctccttccaaaagatgaattaaatgatctgatcgaccgagccttcagcagattccgtcacagagaagtggtccatctgtccaggttgaggaatgggctgaacgtgttggagctgtggcatggcgtcacatatgcatttaaggacctgtccctgtcctgcacaacacagttcctgcagtacttcctggagaagagggagaagcacgtcactgtggttgtaggaacatctggggacacaggaagtgctgccattgagagtgttcaaggggcaaagaacatggacattatcgttctgctgcccaaaggtcactgcacaaagattcaggagctccagatgacaacggtgctgaagcagaacgtacatgtgtttggagtggagggaaacagcgatgagctcgatgagccgatcaagactgtgtttgccgatgtggcttttgtcaagaagcacaatctgatgagcctgaattcgatcaactggtcccgggtcctggtgcagatggcccatcacttctttgcttacttccagtgtacgccatccttggacacacatcccctacccctggtggaggtggttgtgccaacaggggctgccggtaaccttgcagctgggtacattgctcaaaagataggcctgcccatccgtctggtcgtggcagtgaaccgcaatgacatcatccacaggactgtccagcagggagacttctctctctctgaggctgttaaatcaaccttggcatcagctatggacattcaggtgccctacaacatggagagggtgttctggctgctctctggctctgacagccaggtgacaagagccctcatggagcagtttgaaaggacccaaagtgtgaatctgcccaaggaactgcacagcaagctttcagaggcagtgacatccgtgtcagtgtcggatgaagccatcacccagaccatgggccgctgctgggatgagaaccagtacttgctgtgcccccactcagcggtggccgtgaactaccattaccagcagatagacaggcagcagcccagcactccccggtgctgcctcgcccctgcctctgcagccaaggctgagtgaggggctgtgaacagttgccggaagcaccccctccctccccggcccgtgcagcagtgtctgagctgtagtgaaagtttcagggcctgcaaaagaagaggcttgggcacaggactgaccatggctccaggggtttaggacccccagacctgtgaaggtgggagcagctcaccaccttcacgcaggctttgtatgttctctgagccttagttgattttggcccccaaaccaaatccaaaggttctggcccaccttgtcagaggcttccaccctgctcacatgttgggaatccctggaataaaatgcttgttcagtgtga

SEQ ID NO: 11309 - DNA, 2591 bp, Homo sapiens
tgcctcatgtaggtagagagctttgggtggctttgcccttagagggcaggggatcccctcccaccctggcacagaaagtccaagctaatactgagagctatgtctagtcaaattcatccccatagttactgtggggcgtcaaagccagggcccctaaattcactgtcatgatccagaagaaggtgttcagagttcaagcccagctccttgacatggcatctggctcctgggaaagtaactgatgtggaagtgtgaccagtgttaggcctaaggggtcctgggcttccccaggaaccagagaactcagtccatgcagggccagttagttttaaagactgcatatcagcacttataacggtcctaggattaggctaagaggtagaacactggttatccactaggatgaccaaccatcttagtttgcctgggattgaggggtttcctaggacatgggacttgcagttttaagaccagaaaactcctgggcgaactgggatgagttggtcaccctcttctcaaccctggctgcacgttagactctcttgaggagcctctcatttagagtctaatttaattgattcaggtagttgtattttttttaacgctctgaggttgattccaacaagctaccacagttgagaactactaggctgtagacagtgtttccaataaccattgaagatgtttggtttttgagcagaagtggaccgagacgtccctgaaaggggtgtatgactctgtgtgttggtctttcgccttagcaagagggatatcaagctggcagttgcctactattgctattatctgtccccaccgccaggccttctttctcattggtgaggaccaagctttctcttttcccggcatgctccgataccctctccctgaagacaggaggtcagtggaattgcctcattttgattggtggaatcatgatttacacagttgtagatgaagctggcatgagacttgatacaggactgccatctctaggtctgggacatgtgccccggagactggtggtctagaggctaactgtgagactgtgtgtgctttggctttgcccggtggggtgtgggagcttggagaccaggtgcttctgggactgtcctctctgcaggcctccaggatcatgtggtatgtcagcaccaggggcgtagccccacgggtcaactttgagggggccctcttctctggctatgcacctgacgggggcctctttatgcctgaagagctcccacagttggacagagagaccctgtgccagtggagcacactctcctatcctggcctggtgaaggagctgtgtgccctcttcattggctctgagctccttccaaaagatgaattaaatgatctgatcgaccgagccttcagcagattccgtcacagagaagtggtccatctgtccaggttgaggaatgggctgaacgtgttggagctgtggcatggcgtcacatatgcatttaaggacctgtccctgtcctgcacaacacagttcctgcagtacttcctggagaagagggagaagcacgtcactgtggttgtaggaacatctggggacacaggaagtgctgccattgagagtgttcaaggggcaaagaacatggacattatcgttctgctgcccaaaggtcactgcacaaagattcaggagctccagatgacaacggtgctgaagcagaacgtacatgtgtttggagtggagggaaacagcgatgagctcgatgagccgatcaagactgtgtttgccgatgtggcttttgtcaagaagcacaatctgatgagcctgaattcgatcaactggtcccgggtcctggtgcagatggcccatcacttctttgcttacttccagtgtacgccatccttggacacacatcccctacccctggtggaggtggttgtgccaacaggggctgccggtaaccttgcagctgggtacattgctcaaaagataggcctgcccatccgtctggtcgtggcagtgaaccgcaatgacatcatccacaggactgtccagcagggagacttctctctctctgaggctgttaaatcaaccttggcatcagctatggacattcaggtgccctacaacatggagagggtgttctggctgctctctggctctgacagccaggtgacaagagccctcatggagcagtttgaaaggacccaaagtgtgaatctgcccaaggaactgcacagcaagtcagtcactacccacacaccacagagaaaggaaagggtacagccacatagcagacttggggtttggaagtctggtcaagggaagaggacacctgtttcttgagtacctgctatgagcccaccacttttacggccactttacatggaataatttattgaatgaggagaggtaatagagaacatggtttagagtcaaatgagctcaatcccaagtgagctctgagacattgggctagtttcctaaactctgtgccttggttccttcgtttataaaatggggataataagaatgcctacctcatagagttgttgtgagatttaaatcaaataatatatgtgaagcactttgcatacttcctggtaatatatggcttgatacatta

SEQ ID NO: 11310 - DNA, 2502 bp, Homo sapiens
tgcctcatgtaggtagagagctttgggtggctttgcccttagagggcaggggatcccctcccaccctggcacagaaagtccaagctaatactgagagctatgtctagtcaaattcatccccatagttactgtggggcgtcaaagccagggcccctaaattcactgtcatgatccagaagaaggtgttcagagttcaagcccagctccttgacatggcatctggctcctgggaaagtaactgatgtggaagtgtgaccagtgttaggcctaaggggtcctgggcttccccaggaaccagagaactcagtccatgcagggccagttagttttaaagactgcatatcagcacttataacggtcctaggattaggctaagaggtagaacactggttatccactaggatgaccaaccatcttagtttgcctgggattgaggggtttcctaggacatgggacttgcagttttaagaccagaaaactcctgggcgaactgggatgagttggtcaccctcttctcaaccctggctgcacgttagactctcttgaggagcctctcatttagagtctaatttaattgattcaggtagttgtattttttttaacgctctgaggttgattccaacaagctaccacagttgagaactactaggctgtagacagtgtttccaataaccattgaagatgtttggtttttgagcagaagtggaccgagacgtccctgaaaggggtgtatgactctgtgtgttggtctttcgccttagcaagagggatatcaagctggcagttgcctactattgctattatctgtccccaccgccaggccttctttctcattggtgaggaccaagctttctcttttcccggcatgctccgataccctctccctgaagacaggaggtcagtggaattgcctcattttgattggtggaatcatgatttacacagttgtagatgaagctggcatgagacttgatacaggactgccatctctaggtctgggacatgtgccccggagactggtggtctagaggctaactgtgagactgtgtgtgctttggctttgcccggtggggtgtgggagcttggagaccaggtgcttctgggactgtcctctctgcaggcctccaggatcatgtggtatgtcagcaccaggggcgtagccccacgggtcaactttgagggggccctcttctctggctatgcacctgacgggggcctctttatgcctgaagagctcccacagttggacagagagaccctgtgccagtggagcacactctcctatcctggcctggtgaaggagctgtgtgccctcttcattggctctgagctccttccaaaagatgaattaaatgatctgatcgaccgagccttcagcagattccgtcacagagaagtggtccatctgtccaggttgaggaatgggctgaacgtgttggagctgtggcatggcgtcacatatgcatttaaggacctgtccctgtcctgcacaacacagttcctgcagtacttcctggagaagagggagaagcacgtcactgtggttgtaggaacatctggggacacaggaagtgctgccattgagagtgttcaaggggcaaagaacatggacattatcgttctgctgcccaaaggtcactgcacaaagattcaggagctccagatgacaacggtgctgaagcagaacgtacatgtgtttggagtggagggaaacagcgatgagctcgatgagccgatcaagactgtgtttgccgatgtggcttttgtcaagaagcacaatctgatgagcctgaattcgatcaactggtcccgggtcctggtgcagatggcccatcacttctttgcttacttccagtgtacgccatccttggacacacatcccctacccctggtggaggtggttgtgccaacaggggctgccggtaaccttgcagctgggtacattgctcaaaagataggcctgcccatccgtctggtcgtggcagtgaaccgcaatgacatcatccacaggactgtccagcagggagacttctctctctctgaggctgttaaatcaaccttggcatcagctatggacattcaggtgccctacaacatggagagggtgttctggctgctctctggctctgacagccaggtgacaagagccctcatggagcagtttgaaaggacccaaagtgtgaatctgcccaaggaactgcacagcaagagcagtgtctgagctgtagtgaaagtttcagggcctgcaaaagaagaggcttgggcacaggactgaccatggctccaggggtttaggacccccagacctgtgaaggtgggagcagctcaccaccttcacgcaggctttgtatgttctctgagccttagttgattttggcccccaaaccaaatccaaaggttctggcccaccttgtcagaggcttccaccctgctcacatgttgggaatccctggaataaaatgcttgttcagtgtgaacattagaaagtacagcaataaaaag

SEQ ID NO: 11311 - DNA, 2515 bp, Homo sapiens
tgcctcatgtaggtagagagctttgggtggctttgcccttagagggcaggggatcccctcccaccctggcacagaaagtccaagctaatactgagagctatgtctagtcaaattcatccccatagttactgtggggcgtcaaagccagggcccctaaattcactgtcatgatccagaagaaggtgttcagagttcaagcccagctccttgacatggcatctggctcctgggaaagtaactgatgtggaagtgtgaccagtgttaggcctaaggggtcctgggcttccccaggaaccagagaactcagtccatgcagggccagttagttttaaagactgcatatcagcacttataacggtcctaggattaggctaagaggtagaacactggttatccactaggatgaccaaccatcttagtttgcctgggattgaggggtttcctaggacatgggacttgcagttttaagaccagaaaactcctgggcgaactgggatgagttggtcaccctcttctcaaccctggctgcacgttagactctcttgaggagcctctcatttagagtctaatttaattgattcaggtagttgtattttttttaacgctctgaggttgattccaacaagctaccacagttgagaactactaggctgtagacagtgtttccaataaccattgaagatgtttggtttttgagcagaagtggaccgagacgtccctgaaaggggtgtatgactctgtgtgttggtctttcgccttagcaagagggatatcaagctggcagttgcctactattgctattatctgtccccaccgccaggccttctttctcattggtgaggaccaagctttctcttttcccggcatgctccgataccctctccctgaagacaggaggtcagtggaattgcctcattttgattggtggaatcatgatttacacagttgtagatgaagctggcatgagacttgatacaggactgccatctctaggtctgggacatgtgccccggagactggtggtctagaggctaactgtgagactgtgtgtgctttggctttgcccggtggggtgtgggagcttggagaccaggtgcttctgggactgtcctctctgcaggcctccaggatcatgtggtatgtcagcaccaggggcgtagccccacgggtcaactttgagggggccctcttctctggctatgcacctgacgggggcctctttatgcctgaagagctcccacagttggacagagagaccctgtgccagtggagcacactctcctatcctggcctggtgaaggagctgtgtgccctcttcattggctctgagctccttccaaaagatgaattaaatgatctgatcgaccgagccttcagcagattccgtcacagagaagtggtccatctgtccaggttgaggaatgggctgaacgtgttggagctgtggcatggcgtcacatatgcatttaaggacctgtccctgtcctgcacaacacagttcctgcagtacttcctggagaagagggagaagcacgtcactgtggttgtaggaacatctggggacacaggaagtgctgccattgagagtgttcaaggggcaaagaacatggacattatcgttctgctgcccaaaggtcactgcacaaagattcaggagctccagatgacaacggtgctgaagcagaacgtacatgtgtttggagtggagggaaacagcgatgagctcgatgagccgatcaagactgtgtttgccgatgtggcttttgtcaagaagcacaatctgatgagcctgaattcgatcaactggtcccgggtcctggtgcagatggcccatcacttctttgcttacttccagtgtacgccatccttggacacacatcccctacccctggtggaggtggttgtgccaacaggggctgccggtaaccttgcagctgggtacattgctcaaaagataggcctgcccatccgtctggtcgtggcagtgaaccgcaatgacatcatccacaggactgtccagcagggagacttctctctctctgaggctgttaaatcaaccttggcatcagctatggacattcaggtgccctacaacatggagagggtgttctggctgctctctggctctgacagccaggtgacaagagccctcatggagcagtttgaaaggacccaaagtgtgaatctgcccaaggaactgcacagcaaggaatctaattgggaaggattgtttttattttaatgcaacctggtgatggtacttattctgtgtttaaaaaaaaaaaaaggatttctgaagctgcctttaattttctctaccacattcccactgagtggccatccagactgtgcatacctccagtgaccagactctcagtacctcataccagctctcaccattacaaaagtctttacattgagctagaatcttctccttctagcttacacagtctgattctacatccgagtgtttccagtatttagagaatcctcatttaccaagttagtcttccca

SEQ ID NO: 11312 - DNA, 1277 bp, Homo sapiens
ttcccactgcgaagctgagaaccctagctccggccccgaccggaagccccaccgcaccgtcagggacgcggactcgggagtgcgcacattcgcagcccgggcagccctgctgcgcaccgggcctcgcgccccgcgccccgcgcgcccgcgccccgcatctgatcgaccgagccttcagcagattccgtcacagagaagtggtccatctgtccaggttgaggaatgggctgaacgtgttggagctgtggcatggcgtcacatatgcatttaaggacctgtccctgtcctgcacaacacagttcctgcagtacttcctggagaagagggagaagcacgtcactgtggttgtaggaacatctggggacacaggaagtgctgccattgagagtgttcaaggggcaaagaacatggacattatcgttctgctgcccaaaggtcactgcacaaagattcaggagctccagatgacaacggtgctgaagcagaacgtacatgtgtttggagtggagggaaacagcgatgagctcgatgagccgatcaagactgtgtttgccgatgtggcttttgtcaagaagcacaatctgatgagcctgaattcgatcaactggtcccgggtcctggtgcagatggcccatcacttctttgcttacttccagtgtacgccatccttggacacacatcccctacccctggtggaggtggttgtgccaacaggggctgccggtaaccttgcagctgggtacattgctcaaaagataggcctgcccatccgtctggtcgtggcagtgaaccgcaatgacatcatccacaggactgtccagcagggagacttctctctctctgaggctgttaaatcaaccttggcatcagctatggacattcaggtgccctacaacatggagagggtgttctggctgctctctggctctgacagccaggtgacaagagccctcatggagcagtttgaaaggacccaaagtgtgaatctgcccaaggaactgcacagcaagagcagtgtctgagctgtagtgaaagtttcagggcctgcaaaagaagaggcttgggcacaggactgaccatggctccaggggtttaggacccccagacctgtgaaggtgggagcagctcaccaccttcacgcaggctttgtatgttctctgagccttagttgattttggcccccaaaccaaatccaaaggttctggcccaccttgtcagaggcttccaccctgctcacatgttgggaatccctggaataaaatgcttgttcagtgtga

SEQ ID NO: 11313 - DNA, 544 bp, Homo sapiens
gtgttttttttttccacagtacattttaactgtgttcagtgcttataaaaaatgtcagactgatggtgttgagaatgaaagttgtaccaactgatgagttaagtttcttgatgttcattttatgaacttcattaactgaaaaatataacagaaaataatgctttacagttcattttatcatatcttaaaagttacattgattctagaaaaatagaacgtttagtgtctagctagatactaaggacatagttggtgttcgataattgcttattgattgattaaactagtaaagggatattaaccctaaatgttggatttagatgaggaaactactacttaaaggggaaaaaagatttcccttggctttgttattctcatagcctctttccactgcacaattgatgataaggtgttgcccagacagacctgatttaagaattggtatttaactttatcccattgattataaagtgagtcagcaagatttaagtgttgaatagattcaagatacagtcacctttgagtcaggtggaaacgtaaaaaa

SEQ ID NO: 11314 - DNA, 450 bp, Homo sapiens
aaaatgtcagtagtgttgctgttgaaaaatcctaacctaattcaatcttacacctctatttcaaacctgcctataattttacttctatatgtatgtgttaatcatctgtagtagaatacaagcctttgaaatactaggaccacatctcatgcataattttatttcttcaaaaggcctagcacaaaggctggtatatgcatgggcactcaaaaatattaaaaaacctatgtgacatagaatatctaggtcactatttgttgaataaacatacaagaagacactaaccaataaagctacattaagttcaacatatacttttttctttttttatttattattattatactttaagttgtagggtacatgtgcacaatgtgcaggtttgttacatacgtatacatgtgccatgctggtgtgctgtacccactaactcgtcatctagcattaagt

SEQ ID NO: 11315 - DNA, 465 bp, Homo sapiens
gaaatcctgacctcaggtgatccacctgcctcggcctcccaaagtgctgggattacaggtgaagttttagtacagcgtggtgaccttggaaagcctgttctgcttctgacaaaagtggcctgagcctgtgggtacacagtgttattgggactagctgtgcataaaagatcctcctccagatccagcttcaacaggaccttgaagcagctgggaaatcaaagcttcaaatcgtaaagtaacatgtggaggcgacacaaatattatttgctgggagtgagagaggtactcacatgctcttttcacttattgtccagaagaagaacatcatgatggaagatacctttcactggagtcagtgactcttagctactgaataccttacccaataggtcaatgctgaatgttatcaatgaagtccataacaaaccatagctgtggataataataatccttcttataagacat

SEQ ID NO: 11316 - DNA, 934 bp, Homo sapiens
aacactatgctgttgccctggctggtctcgaactcccaggctcaggtggtcctcccaccttgacctcccaaagtgctgggattacgggtgtgagccactgtgtctggccctgtacctgacattttccatgataaaaagttaaaataaaaatgagacaggctataaaaatgacatttcacaggtcactagtgaaaatggcatgtgggtattaagggcttcgcacggagcctgtgggaagggctcctttccttgcaaggagtaaggtgtggtttctcccttttacaggtcaggaaaccactgttccccacagacttaggtacttgcccaaggtcatgtagtagttagtgagggagccaggctttatttatttatttacttgagagacggtgtcttgctctgtcactcaggctggagtgcagtggcacaatcacagtccactgcagccttgtactcctggactcaagggatctttccaccccagccttctgagcagctgggactgcaggtgcacaccaccacacctggctaattttttaaattttttgtagggatggagtatccctatgttgcccaggctggtctcgaactcctggcctcaagtgatcctcctttgtcagccataagagccaccttacccggtctgagagccaggctttaaatgtagttccagctgctttgaagcccagctctcacattccagctgtacttcctcttaagggacattgccagagctaaggtcagtctttgattcatgggcagacatcccctccacagatgctgctggggtgtgtagcagtaccatgggggacagctaagcgttggctcctggcagcaggaggaatgaggtcacttgggagagggggtgacatcagggtggactcaccccacaccactgctcgggagacctgtatttccagcagtaactcccagggcc

SEQ ID NO: 11317 - DNA, 2644 bp, Homo sapiens
cccccgtttcctgtagcccgcgccgtgccgcgctacgcccgccgggagccgggcagagcggccaagatgtcgcagcccaagaaaagaaagcttgagtcggggggcggcggcgaaggaggggagggaactgaagaggaagatggcgcggagcgggaggcggccctggagcgaccccggaggactaagcgggaacgggaccagctgtactacgagtgctactcggacgtttcggtccacgaggagatgatcgcggaccgcgtccgcaccgatgcctaccgcctgggtatccttcggaactgggcagcactgcgaggcaagacggtactggacgtgggcgcgggcaccggcattctgagcatcttctgtgcccaggccggggcccggcgcgtgtacgcggtagaggccagcgccatctggcaacaggcccgggaggtggtgcggttcaacgggctggaggaccgggtgcacgtcctgccgggaccagtggagactgtagagttgccggaacaggtggatgccatcgtgagcgagtggatgggctacggactcctgcacgagtccatgctgagctccgtcctccacgcgcgaaccaagtggctgaaggagggcggtcttctcctgccggcctccgccgagctcttcatagcccccatcagcgaccagatgctggaatggcgcctgggcttctggagccaggtgaagcagcactatggtgtggacatgagctgcctggagggcttcgccacgcgctgtctcatgggccactcggagatcgttgtgcagggattgtccggcgaggacgtgctggcccggccgcagcgctttgctcagctagagctctcccgcgccggcttggagcaggagctggaggccggagtgggcgggcgcttccgctgcagctgctatggctcggcgcccatgcatggctttgccatctggttccaggtgaccttccctggaggggagtcggagaaacccctggtgctgtccacctcgccttttcacccggccactcactggaaacaggcgctcctctacctgaacgagccggtgcaagtggagcaagacacggacgtttcaggagagatcacgctgctgccctcccgggacaacccccgtcgcctgcgcgtgctgctgcgctacaaagtgggagaccaggaggagaagaccaaagactttgccatggaggactgagcgttgccttttctcccagctacctcccaaagcagcctgacctgcgtgggagaggcgtagcgaggtcggaggggaaagggagatcccacgtgcaagtagggggaatatctcccccttttccctcatagcctctagggagggagagtgacttcattctccatttgaagagattcttctggtgatgtttacttaaaaagtgatccccctcaacaacggatacagcgtgcttattattgggcatttagcctcaaaagcatgtagtaccaagcacttgtatttccgtatattttgtttcgcgggggagtgagggggaagaacacggatgaaaatgtcagtttttgaagggtccatgcacatccctgacacctcacaccttatctaagtctgaagctggggagaaaggggttcatttagacttcatacatttccagtacgactttagtatctctccagagccatattttctcagtccgaattaattccccctccctaggtgcctgtaggctatggtacttcttcctcattgttttctaggtaaacttcactactggtaattaaggggaaggatatgaggaagcagtttaaatagccctgttctcattactctgaccacatacatcatagggtgctaaagttgatgaacacattaatccgttaagtaaaatggactttgtaattgtacagcatacctaagaaactcagaaggtgcatttaagagagagacctgaaagaaatagtatggatttttaaaaattcttgtctctactattataaccaaaaaatatttcttgtatgtcccataaaaatatttgtgtaattcttatgaaacaggctggtagaggaggtttctgagcctagcccaagggcttattcatcaccatgggtaaattatttaaactcacttaattaaggaaaatattttcccagctagaaaagtatactcattctcatttaaactctctcatttggagggatcatgtgagttggcctacttacaagtagtgaaagttcccttttcagttttgttttgttttgttttgtttttctctttcactcagccaaatgtgaaagttgtgaatttaggaaaatcacttgtaatgaagtgtgaatcttgttatcaaatttatttctctgatgtttccttccttatccttgtagccaataaaacattgacattctcacgttttatagatgaggtaaaaagtcttgtgtgctgtgagttataatgcttttgcctttttaatattattagttcttaagtgttacagccccttcagaatataacttcaggacaattcaaactatgcttaatgtatgattttcgagcttctgtatgctaagaaaataggtgtgaaaaactggtgttctgaaatagcctaacatttattgtaattctgaattttctgcccttttattcattgcatattaaagtattagagtataaaactaa

SEQ ID NO: 11318 - DNA, 2381 bp, Homo sapiens
cccccgtttcctgtagcccgcgccgtgccgcgctacgcccgccgggagccgggcagagcggccaagatgtcgcagcccaagaaaagaaagcttgagtcggggggcggcggcgaaggaggggagggaactgaagaggaagatggcgcggagcgggaggcggccctggagcgaccccggaggactaagcgggaacgggaccagctgtactacgagtgctactcggacgtttcggtccacgaggagatgatcgcggaccgcgtccgcaccgatgcctaccgcctgggtatccttcggaactgggcagcactgcgaggcaagacggtactggacgtgggcgcgggcaccggcattctgagcatcttctgtgcccaggccggggcccggcgcgtgtacgcggtagaggccagcgccatctggcaacaggcccgggaggtggtgcggttcaacgggctggaggaccgggtgcacgtcctgccgggaccagtggagactgtagagttgccggaacaggtggatgccatcgtgagcgagtggatgggctacggactcctgcacgagtccatgctgagctccgtcctccacgcgcgaaccaagtggctgaaggagggcggtcttctcctgccggcctccgccgagctcttcatagcccccatcagcgaccagatgctggaatggcgcctgggcttctggagccaggtgaagcagcactatggtgtggacatgagctgcctggagggcttcgccacgcgctgtctcatgggccactcggagatcgttgtgcagggattgtccggcgaggacgtgctggcccggccgcagcgctttgctcagctagagctctcccgcgccggcttggagcaggagctggaggccggagtgggcgggcgcttccgctgcagctgctatggctcggcgcccatgcatggctttgccatctggttccaggtgaccttccctggaggggagtcggagaaacccctggtgctgtccacctcgccttttcacccggccactcactggaaacaggcgctcctctacctgaacgagccggtgcaagtggagcaagacacggacgtttcaggagagatcacgctgctgccctcccgggacaacccccgtcgcctgcgcgtgctgctgcgctacaaagtgggagaccaggaggagaagaccaaagactttgccatggaggactgagcgttgccttttctcccagctacctcccaaagcagcctgacctgcgtgggagaggcgtagcgaggtcggaggggaaagggagatcccacgtgcaagtagggggaatatctcccccttttccctcatagcctctagggagggagagtgacttcattctccatttgaagagattcttctggtgatgtttacttaaaaagtgatccccctcaacaacggatacagcgtgcttattattgggcatttagcctcaaaagcatgtagtaccaagcacttgtatttccgtatattttgtttcgcgggggagtgagggggaagaacacggatgaaaatgtcagtttttgaagggtccatgcacatccctgacacctcacaccttatctaagtctgaagctggggagaaaggggttcatttagacttcatacatttccagtacgactttagtatctctccagagccatattttctcagtccgaattaattccccctccctaggtgcctgtaggctatggtacttcttcctcattgttttctaggtaaacttcactactggtaattaaggggaaggatatgaggaagcagtttaaatagccctgttctcattactctgaccacatacatcatagggtgctaaagttgatgaacacattaatccgttaagtaaaatggactttgtaattgtacagcatacctaagaaactcagaaggtgcatttaagagagagacctgaaagaaatagtatggatttttaaaaattcttgtctctactattataaccaaaaaatatttcttgtatgtcccataaaaatatttgtgtaattcttatgaaacaggctggtagaggaggtttctgagcctagcccaagggcttattcatcaccatgggtaaattatttaaactcacttaattaaggaaaatattttcccagctagaaaagtatactcattctcatttaaactctctcatttggagggatcatgtgagttggcctacttacaagtagtgaaagttcccttttcagttttgttttgttttgttttgtttttctctttcactcagccaaatgtgaaagttgtgaatttaggaaaatcacttgtaatgaagtgtgaatcttgttatcaaatttatttctctgatgtttccttccttatccttgtagccaataaaacattgacattctcacgtttt

SEQ ID NO: 11319 - DNA, 2724 bp, Homo sapiens
cccccgtttcctgtagcccgcgccgtgccgcgctacgcccgccgggagccgggcagagcggccaagatgtcgcagcccaagaaaagaaagcttgagtcggggggcggcggcgaaggaggggagggaactgaagaggaagatggcgcggagcgggaggcggccctggagcgaccccggaggactaagcgggaacgggaccagctgtactacgagtgctactcggacgtttcggtccacgaggagatgatcgcggaccgcgtccgcaccgatgcctaccgcctgggtatccttcggaactgggcagcactgcgaggcaagacggtactggacgtgggcgcgggcaccggcattctgagcatcttctgtgcccaggccggggcccggcgcgtgtacgcggtagaggccagcgccatctggcaacaggcccgggaggtggtgcggttcaacgggctggaggaccgggtgcacgtcctgccgggaccagtggagactgtagagttgccggaacaggtggatgccatcgtgagcgagtggatgggctacggactcctgcacgagtccatgctgagctccgtcctccacgcgcgaaccaagtggctgaaggagggcggtcttctcctgccggcctccgccgagctcttcatagcccccatcagcgaccagatgctggaatggcgcctgggcttctggagccaggtgaagcagcactatggtgtggacatgagctgcctggagggcttcgccacgcgctgtctcatgggccactcggagatcgttgtgcagggattgtccggcgaggacgtgctggcccggccgcagcgctttgctcagctagagctctcccgcgccggcttggagcaggagctggaggccggagtgggcgggcgcttccgctgcagctgctatggctcggcgcccatgcatggctttgccatctggttccaggtgaccttccctggaggggagtcggagaaacccctggtgctgtccacctcgccttttcacccggccactcactggaaacaggcgctcctctacctgaacgagccggtgcaagtggagcaagacacggacgtttcaggagagatcacgctgctgccctcccgggacaacccccgtcgcctgcgcgtgctgctgcgctacaaagtgggagaccaggaggagaagaccaaagactttgccatggaggactgagcgttgccttttctcccagctacctcccaaagcagcctgacctgcgtgggagaggcgtagcgaggtcggaggggaaagggagatcccacgtgcaagtagggggaatatctcccccttttccctcatagcctctagggagggagagtgacttcattctccatttgaagagattcttctggtgatgtttacttaaaaagtgatccccctcaacaacggatacagcgtgcttattattgggcatttagcctcaaaagcatgtagtaccaagcacttgtatttccgtatattttgtttcgcgggggagtgagggggaagaacacggatgaaaatgtcagtttttgaagggtccatgcacatccctgacacctcacaccttatctaagtctgaagctggggagaaaggggttcatttagacttcatacatttccagtacgactttagtatctctccagagccatattttctcagtccgaattaattccccctccctaggtgcctgtaggctatggtacttcttcctcattgttttctaggtaaacttcactactggtaattaaggggaaggatatgaggaagcagtttaaatagccctgttctcattactctgaccacatacatcatagggtgctaaagttgatgaacacattaatccgttaagtaaaatggactttgtaattgtacagcatacctaagaaactcagaaggtgcatttaagagagagacctgaaagaaatagtatggatttttaaaaattcttgtctctactattataaccaaaaaatatttcttgtatgtcccataaaaatatttgtgtaattcttatgaaacaggctggtagaggaggtttctgagcctagcccaagggcttattcatcaccatgggtaaattatttaaactcacttaattaaggaaaatattttcccagctagaaaagtatactcattctcatttaaactctctcatttggagggatcatgtgagttggcctacttacaagtagtgaaagttcccttttcagttttgttttgttttgttttgtttttctctttcactcagccaaatgtgaaagttgtgaatttaggaaaatcacttgtaatgaagtgtgaatcttgttatcaaatttatttctctgatgtttccttccttatccttgtagccaataaaacattgacattctcacgttttatagatgaggtaaaaagtcttgtgtgctgtgagttataatgcttttgcctttttaatattattagttcttaagtgttacagccccttcagaatataacttcaggacaattcaaactatgcttaatgtatgattttcgagcttctgtatgctaagaaaataggtgtgaaaaactggtgttctgaaatagcctaacatttattgtaattctgaattttctgcccttttattcattgcatattaaagtattagagtataaaactaaaaaaaaaaaaaacacaacaagtttgggggggcggcccacagattttaagcaaactggttgggggggccaaggaggatggc

SEQ ID NO: 11320 - DNA, 2395 bp, Homo sapiens
cccccgtttcctgtagcccgcgccgtgccgcgctacgcccgccgggagccgggcagagcggccaagatgtcgcagcccaagaaaagaaagcttgagtcggggggcggcggcgaaggaggggagggaactgaagaggaagatggcgcggagcgggaggcggccctggagcgaccccggaggactaagcgggaacgggaccagctgtactacgagtgctactcggacgtttcggtccacgaggagatgatcgcggaccgcgtccgcaccgatgcctaccgcctgggtatccttcggaactgggcagcactgcgaggcaagacggtactggacgtgggcgcgggcaccggcattctgagcatcttctgtgcccaggccggggcccggcgcgtgtacgcggtagaggccagcgccatctggcaacaggcccgggaggtggtgcggttcaacgggctggaggaccgggtgcacgtcctgccgggaccagtggagactgtagagttgccggaacaggtggatgccatcgtgagcgagtggatgggctacggactcctgcacgagtccatgctgagctccgtcctccacgcgcgaaccaagtggctgaaggagggcggtcttctcctgccggcctccgccgagctcttcatagcccccatcagcgaccagatgctggaatggcgcctgggcttctggagccaggtgaccttccctggaggggagtcggagaaacccctggtgctgtccacctcgccttttcacccggccactcactggaaacaggcgctcctctacctgaacgagccggtgcaagtggagcaagacacggacgtttcaggagagatcacgctgctgccctcccgggacaacccccgtcgcctgcgcgtgctgctgcgctacaaagtgggagaccaggaggagaagaccaaagactttgccatggaggactgagcgttgccttttctcccagctacctcccaaagcagcctgacctgcgtgggagaggcgtagcgaggtcggaggggaaagggagatcccacgtgcaagtagggggaatatctcccccttttccctcatagcctctagggagggagagtgacttcattctccatttgaagagattcttctggtgatgtttacttaaaaagtgatccccctcaacaacggatacagcgtgcttattattgggcatttagcctcaaaagcatgtagtaccaagcacttgtatttccgtatattttgtttcgcgggggagtgagggggaagaacacggatgaaaatgtcagtttttgaagggtccatgcacatccctgacacctcacaccttatctaagtctgaagctggggagaaaggggttcatttagacttcatacatttccagtacgactttagtatctctccagagccatattttctcagtccgaattaattccccctccctaggtgcctgtaggctatggtacttcttcctcattgttttctaggtaaacttcactactggtaattaaggggaaggatatgaggaagcagtttaaatagccctgttctcattactctgaccacatacatcatagggtgctaaagttgatgaacacattaatccgttaagtaaaatggactttgtaattgtacagcatacctaagaaactcagaaggtgcatttaagagagagacctgaaagaaatagtatggatttttaaaaattcttgtctctactattataaccaaaaaatatttcttgtatgtcccataaaaatatttgtgtaattcttatgaaacaggctggtagaggaggtttctgagcctagcccaagggcttattcatcaccatgggtaaattatttaaactcacttaattaaggaaaatattttcccagctagaaaagtatactcattctcatttaaactctctcatttggagggatcatgtgagttggcctacttacaagtagtgaaagttcccttttcagttttgttttgttttgttttgtttttctctttcactcagccaaatgtgaaagttgtgaatttaggaaaatcacttgtaatgaagtgtgaatcttgttatcaaatttatttctctgatgtttccttccttatccttgtagccaataaaacattgacattctcacgttttatagatgaggtaaaaagtcttgtgtgctgtgagttataatgcttttgcctttttaatattattagttcttaagtgttacagccccttcagaatataacttcaggacaattcaaactatgcttaatgtatgattttcgagcttctgtatgctaagaaaataggtgtgaaaaactggtgttctgaaatagcctaacatttattgtaattctgaattttctgcccttttattcattgcatattaaagtattagagtataaaactaa

SEQ ID NO: 11321 - DNA, 1618 bp, Homo sapiens
cccccgtttcctgtagcccgcgccgtgccgcgctacgcccgccgggagccgggcagagcggccaagatgtcgcagcccaagaaaagaaagcttgagtcggggggcggcggcgaaggaggggagggaactgaagaggagaagaccaaagactttgccatggaggactgagcgttgccttttctcccagctacctcccaaagcagcctgacctgcgtgggagaggcgtagcgaggtcggaggggaaagggagatcccacgtgcaagtagggggaatatctcccccttttccctcatagcctctagggagggagagtgacttcattctccatttgaagagattcttctggtgatgtttacttaaaaagtgatccccctcaacaacggatacagcgtgcttattattgggcatttagcctcaaaagcatgtagtaccaagcacttgtatttccgtatattttgtttcgcgggggagtgagggggaagaacacggatgaaaatgtcagtttttgaagggtccatgcacatccctgacacctcacaccttatctaagtctgaagctggggagaaaggggttcatttagacttcatacatttccagtacgactttagtatctctccagagccatattttctcagtccgaattaattccccctccctaggtgcctgtaggctatggtacttcttcctcattgttttctaggtaaacttcactactggtaattaaggggaaggatatgaggaagcagtttaaatagccctgttctcattactctgaccacatacatcatagggtgctaaagttgatgaacacattaatccgttaagtaaaatggactttgtaattgtacagcatacctaagaaactcagaaggtgcatttaagagagagacctgaaagaaatagtatggatttttaaaaattcttgtctctactattataaccaaaaaatatttcttgtatgtcccataaaaatatttgtgtaattcttatgaaacaggctggtagaggaggtttctgagcctagcccaagggcttattcatcaccatgggtaaattatttaaactcacttaattaaggaaaatattttcccagctagaaaagtatactcattctcatttaaactctctcatttggagggatcatgtgagttggcctacttacaagtagtgaaagttcccttttcagttttgttttgttttgttttgtttttctctttcactcagccaaatgtgaaagttgtgaatttaggaaaatcacttgtaatgaagtgtgaatcttgttatcaaatttatttctctgatgtttccttccttatccttgtagccaataaaacattgacattctcacgttttatagatgaggtaaaaagtcttgtgtgctgtgagttataatgcttttgcctttttaatattattagttcttaagtgttacagccccttcagaatataacttcaggacaattcaaactatgcttaatgtatgattttcgagcttctgtatgctaagaaaataggtgtgaaaaactggtgttctgaaatagcctaacatttattgtaattctgaattttctgcccttttattcattgcatattaaagtattagagtataaaactaa

SEQ ID NO: 11322 - DNA, 2405 bp, Homo sapiens
cccccgtttcctgtagcccgcgccgtgccgcgctacgcccgccgggagccgggcagagcggccaagatgtcgcagcccaagaaaagaaagcttgagtcggggggcggcggcgaaggaggggagggaactgaagaggaagatggcgcggagcgggaggcggccctggagcgaccccggaggactaagcgggaacgggaccagctgtactacgagtgctactcggacgtttcggtccacgaggagatgatcgcggaccgcgtccgcaccgatgcctaccgcctgggtatccttcggaactgggcagcactgcgaggcaagacggtactggacgtgggcgcgggcaccggcattctgagcatcttctgtgcccaggccggggcccggcgcgtgtacgcggtagaggccagcgccatctggcaacaggcccgggaggtggtgcggttcaacgggctggaggaccgggtgcacgtcctgccgggaccagtggagactgtagagttgccggaacaggtggatgccatcgtgagcgagtggatgggctacggactcctgcacgagtccatgctgagctccgtcctccacgcgcgaaccaagtggctgaaggagggcggtcttctcctgccggcctccgccgagctcttcatagcccccatcagcgaccagatgctggaatggcgcctgggcttctggagccaggtgaagcagcactatggtgtggacatgagctgcctggagggcttcgccacgcgctgtctcatgggccactcggagatcgttgtgcagggattgtccggcgaggacgtgctggcccggccgcagcgctttgctcagctagagctctcccgcgccggcttggagcaggagctggaggccggagtgggcgggcgcttccgctgcagctgctatggctcggcgcccatgcatggctttgccatctggttccaggtgaccttccctggaggggagtcggagaaacccctggtgctgtccacctcgccttttcacccggccactcactggaaacaggcgctcctctacctgaacgagccggtgcaagtggagcaagacacggacgtttcaggagagatcacgctgctgccctcccgggacaacccccgtcgcctgcgcgtgctgctgcgctacaaagtgggagaccaggaggagaagaccaaagactttgccatggaggactgagcgttgccttttctcccagctacctcccaaagcagcctgacctgcgtgggagaggcgtagcgaggtcggaggggaaagggagatcccacgtgcaagtagggggaatatctcccccttttccctcatagcctctagggagggagagtgacttcattctccatttgaagagattcttctggtgatgtttacttaaaaagtgatccccctcaacaacggatacagcgtgcttattattgggcatttagcctcaaaagcatgtagtaccaagcacttgtatttccgtatattttgtttcgcgggggagtgagggggaagaacacggatgaaaatgtcagtttttgaagggtccatgcacatccctgacacctcacaccttatctaagtctgaagctggggagaaaggggttcatttagacttcatacatttccagtacgactttagtatctctccagagccatattttctcagtccgaattaattccccctccctaggtgcctgtaggctatggtacttcttcctcattgttttctaggtaaacttcactactggtaattaaggggaaggatatgaggaagcagtttaaatagccctgttctcattactctgaccacatacatcatagggtgctaaagttgatgaacacattaatccgttaagtaaaatggactttgtaattgtacagcatacctaagaaactcagaaggtgcatttaagagagagacctgaaagaaatagtatggatttttaaaaattcttgtctctactattataaccaaaaaatatttcttgtatgtcccataaaaatatttgtgtaattcttatgaaacaggctggtagaggaggtttctgagcctagcccaagggcttattcatcaccatgggtaaattatttaaactcacttaattaaggaaaatattttcccagctagaaaagtatactcattctcatttaaactctctcatttggagggatcatgtgagttggcctacttacaagtagtgaaagttcccttttcagtttgtcgttgggtgtttctcttcactcagcaatgtgacgtgtgattggaaacctgtttgagggactcgtcacatattcctgttgctcttcctgtggcaaaatggcttcggtttaagaaactggggggaaaggggaaataagtagccaaatggaaattgttcgtaaaagaagggcaattgcctaaaaagagg

SEQ ID NO: 11323 - DNA, 329 bp, Homo sapiens
ttcagagaattatgttcactctcttgattgtggtgatggctttataggtatacatatgtcaaaatttactaaattgcagacttcaagtatgtccagcttattatatgtatcaattataactcaaaaaatacttgctcaaaaatgacaatatctaattatggctggatcacaagagataaacaagcagatggaaatccatggagtggtaatgagaaagaaagacctctcaagcgccaacatggctagaccacatgcagggatggatctggtgtgtactgcggtcttgaacttccctttctttagtgtcagcccacttcttccttctcccg

SEQ ID NO: 11324 - DNA, 511 bp, Homo sapiens
attcctagcatcttgccttgggtataaatgtgtattgaattgaatggatatggatgaatttttttttttttaagacagggtcttgctgtgtctctcaggctggagtgcagtggcacaatctcgactcactgcaacctctgcctcccaggttcaagtaattctcctgcctcagcctcccacgtagctgggactacaggcatgcgccaccacgcctggctaatttttgtatttttagtggagaacagggtttcaccatgttggccaggctggtctcgaactcctgagctcgagtgatcctcctgcctcagtctctcaaagttctggtattacaggcatgagctaccacctgggccttatgtgaataagtcttatgattaaaatttattcatattgggccgggcgtggtggctcacacctgtaaacccagcactttgggaggccgaggtaggtggatcacttgagatcaggagtttgagaccagtctggacaacagagtagacctcatttctgt

SEQ ID NO: 11325 - DNA, 937 bp, Homo sapiens
tgcgggcaggcgcgggaggtgcgacgggggggcggttggggttcaccgcctcgtgccgtactggcttctgggtggcccttaatgtcttgtgctctaaggtgctgaggggaaagacgcgggaggtctctggcctgacactatgaaggaagagagaaactacaacttcgacggtgtgagcaccaaccgcctgaaacagcagttgctggaagaagtccgcaagaagtgagtcggcgggcggcgcggtgtggggtcccgtccacacccctacgagccttcacctgcagagtctcagggctgaagccgctgagggtgctgtaagaccggcgccgtgattaacccctgggcacttcggtctgggttccaaaagtattccatgcgaaagattcacgtgcctctttgagtaagcctttggtattgttaagtaggcagctttccgggtaggatgtgctgcccttaaggatccaatcatatggcgtgtattttgcccatatactgtaatgccaaaagttgtgtttggttttgatgtctccataaatccaggttttctgcttaaaattccaaagattttatttagttatacggggttttttttttctttcatccctttaaggggaacttcataaaatgacatttagtaaaactgttactcctcctttatgctttttaaaaacagtattcgtacttcgtgttaaatttttgaaacatttaaagtattttttggacatactcccaactccatccacaagtcccgtgagaattggactctcctttgtgcctagatagggttctgggttttcctctattgtagctccagtcacagtattttaattgcctgtctatttcttgttttgctaccaaactacacgcgttctgaggacaggttctgtgtattctgaggaagtagagaataagagcaagtacttgaggacagtcctgc

SEQ ID NO: 11326 - DNA, 821 bp, Homo sapiens
tgcgggcaggcgcgggaggtgcgacgggggggcggttggggttcaccgcctcgtgccgtactggcttctgggtggcccttaatgtcttgtgctctaaggtgctgaggggaaagacgcgggaggtctctggcctgacactatgaaggaagagagaaactacaacttcgacggtgtgagcaccaaccgcctgaaacagcagttgctggaagaagtccgcaagaagtagtgaatggaaaacccgttatgagacacaacttgaattaaatgatgaactagaaaagcaaattgtttatctcaaggagaaagtggaaaaaatccatggaaactcttcagatagactatcttctattcgtgtctatgaacgaatgccagtggaatccttaaacacattacttaaacagctagaagaagaaaagaggactcttgaaagtcaagtgaaatactatgcacttaaactggaacaagaatcaaaggcttaccagaagatcaacaatgaacgccgtacatacctagctgaaatgtctcagggttctggtttacatcaagtttctaaaaggcaacaggtggatcaactgcctaggatgcaagagaatctagtgaaaactggaagatataatccagctaagcagaagacagtgagtgccaagagaggaccagtaaaaaagattacaagaccaaaccatcttccagaactccatccatgattccagaactggatggatttctatttcttcctttttttttccatttataatattcaagttataaagttaatggtcagcacatttcttcagggaataaaatagataagaactgccaaa

SEQ ID NO: 11327 - DNA, 2175 bp, Homo sapiens
acgcagcggctgtggagctcctcctgctgggaggctgccccaggacccagcacgtgcgcagcggccatggcttcctcaattatctgccaggagcactgccagatctcgggccaggcaaaaatagacatcttattagttggagatgtcactgtgggctacctggctgatactgtacagaaactatttgcaaacatagcagaagtcaccatcaccatcagtgacacgaaggaggcagcagcgcttttggatgattgcatattcaacatggttctcttgaaggtgccttcttcactaagtgccgaggagctggaagccatcaagttaattagatttggcaaaaagaaaaatacacattcactgtttgtttttataatccctgaaaattttaaaggttgtatttcagggcatggaatggatattgctttaactgaaccactgacaatggaaaaaatgagtaatgtggtaaaatactggacaacatgtccctcaaacactgttaagactgaaaacgcaactgggcctgaagaacttggattgcccctgcagaggtcctacagcgaacacctgggatattttcctactgatctatttgcctgctctgaatctttaaggaatggcaatgggcttgaattaaatgcttcgttgtcagagttcgagaaaaacaaaaagatctctcttcttcattcaagcaaggaaaacctaagaagggaaagaatcaaatattgctgtgagcagctgcgtactctcttgccgtatgtaaaagggagaaagaatgatgcggcttcagttcttgaggcaacagttgattatgtgaaatatatccgggagaaaatctctccagccgttatggcccagattacagaagcacttcagagcaacatgaggttttgtaagaaacaacaaacacccattgagctgtctctcccaggcactgtcatggcacagcgggaaaacagtgtgatgagcacttactcccctgagagagggctccaattcctggctaatacgtgctggaatgggtgctccactcctgatgcagagagctccttggatgaagctgtgagagttccatcaagctccgcctcagagaatgctattggtgatccatataaaactcacatttccagtgcagcgctgtctctgaattccttgcatactgtcagatattattctaaagtcaccccttcctacgatgcaactgctgtaacaaatcagaacatttcaattcatttaccttcagccatgcccccggtctcaaagcttctccctcggcactgcacttctgggttgggccagacgtgcactacacatcccaactgtctgcaacagttttgggcgtattaaaagcacatgtttgaaattcacactctcaaccacctactgggcgcagtttgacaatctaggaaaagtggaacaaagaatgattttgaaagctccacccaaagacctaatatcaaaagagttggcatggtttggcttctgataaatgcactcaaagcttctgcagatagaaagaccagcagcgaaaaagctggccacacactgtcactcatcttcatacacacttggatccccgccagccagagagctacaagaacaaatggcctcagtgacctacactctcttttctcaaaaaatattccacaatttatgaaaaaagcatgctataaggaagatccatgtagacacgataaaatgattagattgggaaggtgtgttgataccttgtgtcactgagtacagatattacaacttgattcttatttttagtatccctgtgaattactgtcactcatttctaggtggtcttttccttatttgacattttagagagtttccttcttcattcaccatccaaactaagatatgcagagagatgctgaaagaggggtttacctcctcacttgacaactaatgaataaattgatgtgtgcttttgcatttcacaatcccttgagtgaaacgatggctaataggtaaatatttctttctggaccttaagttacagactagcaggttttttgtttttcatctcttcctccctatgggtattagaaaggacagttgaaaataagggggaaaaaggtttgttttatatttcactgaattgttcttatatgtaagttttattattaaataaaatactcagttttcaccctgagcattgtaatccat

SEQ ID NO: 11328 - DNA, 1658 bp, Homo sapiens
  misc_feature (940)..(940): n is a, c, g, or t
tgcgggcaggcgcgggaggtgcgacgggggggcggttggggttcaccgcctcgtgccgtactggcttctgggtggcccttaatgtcttgtgctctaaggtgctgaggggaaagacgcgggaggtctctggcctgacactatgaaggaagagagaaactacaacttcgacggtgtgagcaccaaccgcctgaaacagcagttgctggaagaagtccgcaagaaggatgcagtgcaactctcaatatttgaactaagacacaagattacggaactggaagccaaactcaatactgacaatgaaggtagtgaatggaaaacccgttatgagacacaacttgaattaaatgatgaactagaaaagcaaattgtttatctcaaggagaaagtggaaaaaatccatggaaactcttcagatagactatcttctattcgtgtctatgaacgaatgccagtgaaagtatgaggtttgcagtccaggggtggtgcagtggctgtataatgccttcaggaatccaggcttcccctaagtttctactctgccatccatttgtgagtggcttttgtcctcgtgtttaaagatggctgcttcgccttctcagctgcttcacgttatcattcaaaaaaagacataggtgaaggagaaatggtaaaggtgaaagccggtcacgtctactccccttcaaagagctttctaagatgctgcacccagtaattccccttgacatttcattgggagttagaactgtatcatatgggcaccttcgtgtgcatgacaggctaggaaatatagtgttttactgaatatacaggaagaagagaagagtggattgtgagcgtacagttggctgtatctgccacacacaaagtcatttaaagtgaaggcatttcattttatgtattcattcaattcattcatacatattcgttcaacatgtattcngctgatattatttggaaaataaaaggtatagaaaaagaatatcataaaatcaaacatatccactgtagacagttctgtttttagtaatttttgtatgcatacatattgattaaaaagaacaaccaaataaataagtcagccaacaaacaaagtgaaaaaggattacagctagtttttattgttgtttaaaatataattataaccttaccgcatggacagttttgaatcctatgctaattggggtaattaagtcaattatttcatatgttatgttctcttcatgtgcatttttcaatgatatattatgttccattgtgttggaatgtgaatgttcaattacttttccctataactgggtattttaggttgtttctggttttaattttgagttgaaacccacagagtgtattatggcaaacaactccatattctagtatttataaatcttcagatctttgtccctttttgactttaaatgttttaatgaaaacaatttatagagttgagatcccttttattctcctccctgtcttctttttgtttccttttcataggcaaggactaccatgaatttggtatatattatttcagtttatttttaatatctctctacatgttgtatgtataaaaatgcatataaaaagtatcatactgtgcatatcattcttttactcattatttaattccattcatgttaataaagatctagtaaatttta

SEQ ID NO: 11329 - DNA, 1021 bp, Homo sapiens
tgcgggcaggcgcgggaggtgcgacgggggggcggttggggttcaccgcctcgtgccgtactggcttctgggtggcccttaatgtcttgtgctctaaggtgctgaggggaaagacgcgggaggtctctggcctgacactatgaaggaagagagaaactacaacttcgacggtgtgagcaccaaccgcctgaaacagcagttgctggaagaagtccgcaagaagtagtgaatggaaaacccgttatgagacacaacttgaattaaatgatgaactagaaaagcaaattgtttatctcaaggagaaagtggaaaaaatccatggaaactcttcagactgtacttctattacgtgtctatgcaaccgaactgccacgtgacacgtactgaggattacgcacgtccaacgggttggtgcagtggcctgtatacatgccttcagaggaatccaggcttcaccgctaagattaactactactgaccagtccaattatggtgagatggcatatagatcctcagtgtataaagaatggcatgactttcgacactatcctcaggcatgacttacacgattatcaattgcacaaacaaagacataggtgaacgggcagcacacattgcgacaaaaggtgtgcacaacgcaccggattcagcggatctaactcgcgccgaatacacaaatgaaaccttatccttcaaggtagttggcctgtgataaccccaacagaagaagtatccccgcacgtttgtgaacgagttaatcaatttggggggaagggttgaaagaaaaacgggtgttaagttccaattaaatatgtgggcgaacacacattaccgaaatagattgaccaattggaacaaggggctcgtatcgtgaaaaacgtggtaagaggcagcgttatataagagtgggaggattaattagacagggcacagaaaatgaaaggagaacgcaggtggccaattaaggagcgcaaggaggtaacatacgaagagtgaagcagagataatatcactgcgcaaa

SEQ ID NO: 11330 - DNA, 922 bp, Homo sapiens
tgcgggcaggcgcgggaggtgcgacgggggggcggttggggttcaccgcctcgtgccgtactggcttctgggtggcccttaatgtcttgtgctctaaggtgctgaggggaaagacgcgggaggtctctggcctgacactatgaaggaagagagaaactacaacttcgacggtgtgagcaccaaccgcctgaaacagcagttgctggaagaagtccgcaagaagtagtgaatggaaaacccgttatgagacacaacttgaattaaatgatgaactagaaaagcaaattgtttatctcaaggagaaagtggaaaaaatccatggaaactcttcagacgtatttcaaagagaagtttgaagactagcgcaaggtccaaataaactgttttgttcaagggatctgtttgaaggacaacaaataatttttgagtagctataggtggagcactaagttgccagctatattcacaggtgtcctgaagagcagagcatgtatagatattgctttttgaatcaccgccaaccttcagagaaagatatagacaaatactgtgtttttgctaataatgaattgaggagaaataagtccttttgcacgcttgttactttcaacccagacatgcctttatttccatatcttggaaagtcaggaatttttctaactcgaaaaattgttttcccatgtgctgtcatagagttatatcgccctcttgtggcatttagaaatagttgctagggctatgttaagcttagtgccttttcttaattgcaggtagaattttattactacctactggatataaaatattctgtctacctgcttcttgataactgaggctcagtcctagctcaacagagtgggtatcaccacccttgtggagagtagcaacaagtgctggtatgacttagtaaaataccttaggg

SEQ ID NO: 11331 - DNA, 439 bp, Homo sapiens
gtaaaaatacaataaactggttggaatatctgctttattagcatatttgtaccttcgctgtccttattcatgttctattcacatctcttcaaacagcctcctcttaaaagaagaattggaccctttaaaggtcagctgcttggagacattgggtttcagtgctgcaggtgtggctggaccagagaataggacatgcctcggacaaaaagcactctggcccgcctgcttacatgggtcctcaaccttggctgtgtgtcagactcacctgaagagctaaaagtaaaatactcagacatgtgcaccacccccaggattgtgatctcacatgtatttctttaagcctcccccaggaaattgtacagaaaagattgggacccactctgctggtttagtgtggcttcatctctcaaactgaatgaaacttcttccaactctcctc

SEQ ID NO: 11332 - DNA, 2665 bp, Homo sapiens
tgcgggcaggcgcgggaggtgcgacgggggggcggttggggttcaccgcctcgtgccgtactggcttctgggtggcccttaatgtcttgtgctctaaggtgctgaggggaaagacgcgggaggtctctggcctgacactatgaaggaagagagaaactacaacttcgacggtgtgagcaccaaccgcctgaaacagcagttgctggaagaagtccgcaagaagtagtgaatggaaaacccgttatgagacacaacttgaattaaatgatgaactagaaaagcaaattgtttatctcaaggagaaagtggaaaaaatccatggaaactcttcagatagactatcttctattcgtgtctatgaacgaatgccagtggaatccttaaacacattacttaaacagctagaagaagaaaagaggactcttgaaagtcaagtgaaatactatgcacttaaactggaacaagaatcaaaggcttaccagaagatcaacaatgaacgccgtacatacctagctgaaatgtctcagggttctggtttacatcaagtttctaaaaggcaacaggtggatcaactgcctaggatgcaagagaatctagtgaaaacgcaaaaatagacatcttattagttggagatgtcactgtgggctacctggctgatactgtacagaaactatttgcaaacatagcagaagtcaccatcaccatcagtgacacgaaggaggcagcagcgcttttggatgattgcatattcaacatggttctcttgaaggtgccttcttcactaagtgccgaggagctggaagccatcaagttaattagatttggcaaaaagaaaaatacacattcactgtttgtttttataatccctgaaaattttaaaggttgtatttcagggcatggaatggatattgctttaactgaaccactgacaatggaaaaaatgagtaatgtggtaaaatactggacaacatgtccctcaaacactgttaagactgaaaacgcaactgggcctgaagaacttggattgcccctgcagaggtcctacagcgaacacctgggatattttcctactgatctatttgcctgctctgaatctttaaggaatggcaatgggcttgaattaaatgcttcgttgtcagagttcgagaaaaacaaaaagatctctcttcttcattcaagcaaggaaaacctaagaagggaaagaatcaaatattgctgtgagcagctgcgtactctcttgccgtatgtaaaagggagaaagaatgatgcggcttcagttcttgaggcaacagttgattatgtgaaatatatccgggagaaaatctctccagccgttatggcccagattacagaagcacttcagagcaacatgaggttttgtaagaaacaacaaacacccattgagctgtctctcccaggcactgtcatggcacagcgggaaaacagtgtgatgagcacttactcccctgagagagggctccaattcctggctaatacgtgctggaatgggtgctccactcctgatgcagagagctccttggatgaagctgtgagagttccatcaagctccgcctcagagaatgctattggtgatccatataaaactcacatttccagtgcagcgctgtctctgaattccttgcatactgtcagatattattctaaagtcaccccttcctacgatgcaactgctgtaacaaatcagaacatttcaattcatttaccttcagccatgcccccggtctcaaagcttctccctcggcactgcacttctgggttgggccagacgtgcactacacatcccaactgtctgcaacagttttgggcgtattaaaagcacatgtttgaaattcacactctcaaccacctactgggcgcagtttgacaatctaggaaaagtggaacaaagaatgattttgaaagctccacccaaagacctaatatcaaaagagttggcatggtttggcttctgataaatgcactcaaagcttctgcagatagaaagaccagcagcgaaaaagctggccacacactgtcactcatcttcatacacacttggatccccgccagccagagagctacaagaacaaatggcctcagtgacctacactctcttttctcaaaaaatattccacaatttatgaaaaaagcatgctataaggaagatccatgtagacacgataaaatgattagattgggaaggtgtgttgataccttgtgtcactgagtacagatattacaacttgattcttatttttagtatccctgtgaattactgtcactcatttctaggtggtcttttccttatttgacattttagagagtttccttcttcattcaccatccaaactaagatatgcagagagatgctgaaagaggggtttacctcctcacttgacaactaatgaataaattgatgtgtgcttttgcatttcacaatcccttgagtgaaacgatggctaataggtaaatatttctttctggaccttaagttacagactagcaggttttttgtttttcatctcttcctccctatgggtattagaaaggacagttgaaaataagggggaaaaaggtttgttttatatttcactgaattgttcttatatgtaagttttattattaaataaaatactcagttttcaccctgagcattgtaatccat

SEQ ID NO: 11333 - DNA, 2624 bp, Homo sapiens
tgcgggcaggcgcgggaggtgcgacgggggggcggttggggttcaccgcctcgtgccgtactggcttctgggtggcccttaatgtcttgtgctctaaggtgctgaggggaaagacgcgggaggtctctggcctgacactatgaaggaagagagaaactacaacttcgacggtgtgagcaccaaccgcctgaaacagcagttgctggaagaagtccgcaagaagtagtgaatggaaaacccgttatgagacacaacttgaattaaatgatgaactagaaaagcaaattgtttatctcaaggagaaagtggaaaaaatccatggaaactcttcaggaatccttaaacacattacttaaacagctagaagaagaaaagaggactcttgaaagtcaagtgaaatactatgcacttaaactggaacaagaatcaaaggcttaccagaagatcaacaatgaacgccgtacatacctagctgaaatgtctcagggttctggtttacatcaagtttctaaaaggcaacaggtggatcaactgcctaggatgcaagagaatctagtgaaaacgcaaaaatagacatcttattagttggagatgtcactgtgggctacctggctgatactgtacagaaactatttgcaaacatagcagaagtcaccatcaccatcagtgacacgaaggaggcagcagcgcttttggatgattgcatattcaacatggttctcttgaaggtgccttcttcactaagtgccgaggagctggaagccatcaagttaattagatttggcaaaaagaaaaatacacattcactgtttgtttttataatccctgaaaattttaaaggttgtatttcagggcatggaatggatattgctttaactgaaccactgacaatggaaaaaatgagtaatgtggtaaaatactggacaacatgtccctcaaacactgttaagactgaaaacgcaactgggcctgaagaacttggattgcccctgcagaggtcctacagcgaacacctgggatattttcctactgatctatttgcctgctctgaatctttaaggaatggcaatgggcttgaattaaatgcttcgttgtcagagttcgagaaaaacaaaaagatctctcttcttcattcaagcaaggaaaacctaagaagggaaagaatcaaatattgctgtgagcagctgcgtactctcttgccgtatgtaaaagggagaaagaatgatgcggcttcagttcttgaggcaacagttgattatgtgaaatatatccgggagaaaatctctccagccgttatggcccagattacagaagcacttcagagcaacatgaggttttgtaagaaacaacaaacacccattgagctgtctctcccaggcactgtcatggcacagcgggaaaacagtgtgatgagcacttactcccctgagagagggctccaattcctggctaatacgtgctggaatgggtgctccactcctgatgcagagagctccttggatgaagctgtgagagttccatcaagctccgcctcagagaatgctattggtgatccatataaaactcacatttccagtgcagcgctgtctctgaattccttgcatactgtcagatattattctaaagtcaccccttcctacgatgcaactgctgtaacaaatcagaacatttcaattcatttaccttcagccatgcccccggtctcaaagcttctccctcggcactgcacttctgggttgggccagacgtgcactacacatcccaactgtctgcaacagttttgggcgtattaaaagcacatgtttgaaattcacactctcaaccacctactgggcgcagtttgacaatctaggaaaagtggaacaaagaatgattttgaaagctccacccaaagacctaatatcaaaagagttggcatggtttggcttctgataaatgcactcaaagcttctgcagatagaaagaccagcagcgaaaaagctggccacacactgtcactcatcttcatacacacttggatccccgccagccagagagctacaagaacaaatggcctcagtgacctacactctcttttctcaaaaaatattccacaatttatgaaaaaagcatgctataaggaagatccatgtagacacgataaaatgattagattgggaaggtgtgttgataccttgtgtcactgagtacagatattacaacttgattcttatttttagtatccctgtgaattactgtcactcatttctaggtggtcttttccttatttgacattttagagagtttccttcttcattcaccatccaaactaagatatgcagagagatgctgaaagaggggtttacctcctcacttgacaactaatgaataaattgatgtgtgcttttgcatttcacaatcccttgagtgaaacgatggctaataggtaaatatttctttctggaccttaagttacagactagcaggttttttgtttttcatctcttcctccctatgggtattagaaaggacagttgaaaataagggggaaaaaggtttgttttatatttcactgaattgttcttatatgtaagttttattattaaataaaatactcagttttcaccctgagcattgtaatccat

SEQ ID NO: 11334 - DNA, 2891 bp, Homo sapiens
tgcgggcaggcgcgggaggtgcgacgggggggcggttggggttcaccgcctcgtgccgtactggcttctgggtggcccttaatgtcttgtgctctaaggtgctgaggggaaagacgcgggaggtctctggcctgacactatgaaggaagagagaaactacaacttcgacggtgtgagcaccaaccgcctgaaacagcagttgctggaagaagtccgcaagaagtagtgaatggaaaacccgttatgagacacaacttgaattaaatgatgaactagaaaagcaaattgtttatctcaaggagaaagtggaaaaaatccatggaaactcttcagatagactatcttctattcgtgtctatgaacgaatgccagtggctgcagttttctagtatattaccattgatttatataatcagataaaagcagctccttgggaagatcaagaacattaagttatgaacagtccagtgaattggaagtgatggaatgagagagtctgttcttctgttttaaagatatctagttcattttggagtcagtaaaataagagggaaccttaaagttattgtagtacaattttatacttttcaaggatctctggaatccttaaacacattacttaaacagctagaagaagaaaagaggactcttgaaagtcaagtgaaatactatgcacttaaactggaacaagaatcaaaggcttaccagaagatcaacaatgaacgccgtacatacctagctgaaatgtctcagggttctggtttacatcaagtttctaaaaggcaacaggtggatcaactgcctaggatgcaagagaatctagtgaaaacgcaaaaatagacatcttattagttggagatgtcactgtgggctacctggctgatactgtacagaaactatttgcaaacatagcagaagtcaccatcaccatcagtgacacgaaggaggcagcagcgcttttggatgattgcatattcaacatggttctcttgaaggtgccttcttcactaagtgccgaggagctggaagccatcaagttaattagatttggcaaaaagaaaaatacacattcactgtttgtttttataatccctgaaaattttaaaggttgtatttcagggcatggaatggatattgctttaactgaaccactgacaatggaaaaaatgagtaatgtggtaaaatactggacaacatgtccctcaaacactgttaagactgaaaacgcaactgggcctgaagaacttggattgcccctgcagaggtcctacagcgaacacctgggatattttcctactgatctatttgcctgctctgaatctttaaggaatggcaatgggcttgaattaaatgcttcgttgtcagagttcgagaaaaacaaaaagatctctcttcttcattcaagcaaggaaaacctaagaagggaaagaatcaaatattgctgtgagcagctgcgtactctcttgccgtatgtaaaagggagaaagaatgatgcggcttcagttcttgaggcaacagttgattatgtgaaatatatccgggagaaaatctctccagccgttatggcccagattacagaagcacttcagagcaacatgaggttttgtaagaaacaacaaacacccattgagctgtctctcccaggcactgtcatggcacagcgggaaaacagtgtgatgagcacttactcccctgagagagggctccaattcctggctaatacgtgctggaatgggtgctccactcctgatgcagagagctccttggatgaagctgtgagagttccatcaagctccgcctcagagaatgctattggtgatccatataaaactcacatttccagtgcagcgctgtctctgaattccttgcatactgtcagatattattctaaagtcaccccttcctacgatgcaactgctgtaacaaatcagaacatttcaattcatttaccttcagccatgcccccggtctcaaagcttctccctcggcactgcacttctgggttgggccagacgtgcactacacatcccaactgtctgcaacagttttgggcgtattaaaagcacatgtttgaaattcacactctcaaccacctactgggcgcagtttgacaatctaggaaaagtggaacaaagaatgattttgaaagctccacccaaagacctaatatcaaaagagttggcatggtttggcttctgataaatgcactcaaagcttctgcagatagaaagaccagcagcgaaaaagctggccacacactgtcactcatcttcatacacacttggatccccgccagccagagagctacaagaacaaatggcctcagtgacctacactctcttttctcaaaaaatattccacaatttatgaaaaaagcatgctataaggaagatccatgtagacacgataaaatgattagattgggaaggtgtgttgataccttgtgtcactgagtacagatattacaacttgattcttatttttagtatccctgtgaattactgtcactcatttctaggtggtcttttccttatttgacattttagagagtttccttcttcattcaccatccaaactaagatatgcagagagatgctgaaagaggggtttacctcctcacttgacaactaatgaataaattgatgtgtgcttttgcatttcacaatcccttgagtgaaacgatggctaataggtaaatatttctttctggaccttaagttacagactagcaggttttttgtttttcatctcttcctccctatgggtattagaaaggacagttgaaaataagggggaaaaaggtttgttttatatttcactgaattgttcttatatgtaagttttattattaaataaaatactcagttttcaccctgagcattgtaatccat

SEQ ID NO: 11335 - DNA, 2840 bp, Homo sapiens
tgcgggcaggcgcgggaggtgcgacgggggggcggttggggttcaccgcctcgtgccgtactggcttctgggtggcccttaatgtcttgtgctctaaggtgctgaggggaaagacgcgggaggtctctggcctgacactatgaaggaagagagaaactacaacttcgacggtgtgagcaccaaccgcctgaaacagcagttgctggaagaagtccgcaagaaggatgcagtgcaactctcaatatttgaactaagacacaagattacggaactggaagccaaactcaatactgacaatgaaggtagtgaatggaaaacccgttatgagacacaacttgaattaaatgatgaactagaaaagcaaattgtttatctcaaggagaaagtggaaaaaatccatggaaactcttcagatagactatcttctattcgtgtctatgaacgaatgccagtgaaagtatgaggtttgcagtccaggggtggtgcagtggctgtataatgccttcaggaatccaggcttcccctaagtttctactctgccatccatttgaatccttaaacacattacttaaacagctagaagaagaaaagaggactcttgaaagtcaagtgaaatactatgcacttaaactggaacaagaatcaaaggcttaccagaagatcaacaatgaacgccgtacatacctagctgaaatgtctcagggttctggtttacatcaagtttctaaaaggcaacaggtggatcaactgcctaggatgcaagagaatctagtgaaaacgcaaaaatagacatcttattagttggagatgtcactgtgggctacctggctgatactgtacagaaactatttgcaaacatagcagaagtcaccatcaccatcagtgacacgaaggaggcagcagcgcttttggatgattgcatattcaacatggttctcttgaaggtgccttcttcactaagtgccgaggagctggaagccatcaagttaattagatttggcaaaaagaaaaatacacattcactgtttgtttttataatccctgaaaattttaaaggttgtatttcagggcatggaatggatattgctttaactgaaccactgacaatggaaaaaatgagtaatgtggtaaaatactggacaacatgtccctcaaacactgttaagactgaaaacgcaactgggcctgaagaacttggattgcccctgcagaggtcctacagcgaacacctgggatattttcctactgatctatttgcctgctctgaatctttaaggaatggcaatgggcttgaattaaatgcttcgttgtcagagttcgagaaaaacaaaaagatctctcttcttcattcaagcaaggaaaacctaagaagggaaagaatcaaatattgctgtgagcagctgcgtactctcttgccgtatgtaaaagggagaaagaatgatgcggcttcagttcttgaggcaacagttgattatgtgaaatatatccgggagaaaatctctccagccgttatggcccagattacagaagcacttcagagcaacatgaggttttgtaagaaacaacaaacacccattgagctgtctctcccaggcactgtcatggcacagcgggaaaacagtgtgatgagcacttactcccctgagagagggctccaattcctggctaatacgtgctggaatgggtgctccactcctgatgcagagagctccttggatgaagctgtgagagttccatcaagctccgcctcagagaatgctattggtgatccatataaaactcacatttccagtgcagcgctgtctctgaattccttgcatactgtcagatattattctaaagtcaccccttcctacgatgcaactgctgtaacaaatcagaacatttcaattcatttaccttcagccatgcccccggtctcaaagcttctccctcggcactgcacttctgggttgggccagacgtgcactacacatcccaactgtctgcaacagttttgggcgtattaaaagcacatgtttgaaattcacactctcaaccacctactgggcgcagtttgacaatctaggaaaagtggaacaaagaatgattttgaaagctccacccaaagacctaatatcaaaagagttggcatggtttggcttctgataaatgcactcaaagcttctgcagatagaaagaccagcagcgaaaaagctggccacacactgtcactcatcttcatacacacttggatccccgccagccagagagctacaagaacaaatggcctcagtgacctacactctcttttctcaaaaaatattccacaatttatgaaaaaagcatgctataaggaagatccatgtagacacgataaaatgattagattgggaaggtgtgttgataccttgtgtcactgagtacagatattacaacttgattcttatttttagtatccctgtgaattactgtcactcatttctaggtggtcttttccttatttgacattttagagagtttccttcttcattcaccatccaaactaagatatgcagagagatgctgaaagaggggtttacctcctcacttgacaactaatgaataaattgatgtgtgcttttgcatttcacaatcccttgagtgaaacgatggctaataggtaaatatttctttctggaccttaagttacagactagcaggttttttgtttttcatctcttcctccctatgggtattagaaaggacagttgaaaataagggggaaaaaggtttgttttatatttcactgaattgttcttatatgtaagttttattattaaataaaatactcagttttcaccctgagcattgtaatccat

SEQ ID NO: 11336 - DNA, 947 bp, Homo sapiens
tgcgggcaggcgcgggaggtgcgacgggggggcggttggggttcaccgcctcgtgccgtactggcttctgggtggcccttaatgtcttgtgctctaaggtgctgaggggaaagacgcgggaggtctctggcctgacactatgaaggaagagagaaactacaacttcgacggtgtgagcaccaaccgcctgaaacagcagttgctggaagaagtccgcaagaagtagtgaatggaaaacccgttatgagacacaacttgaattaaatgatgaactagaaaagcaaattgtttatctcaaggagaaagtggaaaaaatccatggaaactcttcagatagactatcttctattcgtgtctatgaacgaatgccagtggaatccttaaacacattacttaaacagctagaagaagaaaagaggactcttgaaagtcaagtgaaatactatgcacttaaactggaacaagaatcaaaggcttaccagaagatcaacaatgaacgccgtacatacctagctgaaatgtctcagggttctggtttacatcaagtttctaaaaggcaacaggtggatcaactgcctaggatgcaagagaatctagtgaaaaccctcctcttaaaagaagaattggaccctttaaaggtcagctgcttggagacattgggtttcagtgctgcaggtgtggctggaccagagaataggacatgcctcggacaaaaagcactctggcccgcctgcttacatgggtcctcaaccttggctgtgtgtcagactcacctgaagagctaaaagtaaaatactcagacatgtgcaccacccccaggattgtgatctcacatgtatttctttaagcctcccccaggaaattgtacagaaaagattgggacccactctgctggtttagtgtggcttcatctctcaaactgaatgaaacttcttccaactctcctc

SEQ ID NO: 11337 - DNA, 1104 bp, Homo sapiens
tgcgggcaggcgcgggaggtgcgacgggggggcggttggggttcaccgcctcgtgccgtactggcttctgggtggcccttaatgtcttgtgctctaaggtgctgaggggaaagacgcgggaggtctctggcctgacactatgaaggaagagagaaactacaacttcgacggtgtgagcaccaaccgcctgaaacagcagttgctggaagaagtccgcaagaagtagtgaatggaaaacccgttatgagacacaacttgaattaaatgatgaactagaaaagcaaattgtttatctcaaggagaaagtggaaaaaatccatggaaactcttcagatagactatcttctattcgtgtctatgaacgaatgccagtggaatccttaaacacattacttaaacagctagaagaagaaaagaggactcttgaaagtcaagtgaaatactatgcacttaaactggaacaagaatcaaaggcttaccagaagatcaacaatgaacgccgtacatacctagctgaaatgtctcagggttctggtttacatcaagtttctaaaaggcaacaggtggatcaactgcctaggatgcaagagaatctagtgaaaacggaatttatagctaaggaatacaaagcaaaatcaacaaaggcataaggcacatgggatgaattctcagaaaactaggctcaagcttccgaaagttttctccaagttagggtcacataagaaatacttaattcctccagcaaaaaattgcaacaacagcctcctcttaaaagaagaattggaccctttaaaggtcagctgcttggagacattgggtttcagtgctgcaggtgtggctggaccagagaataggacatgcctcggacaaaaagcactctggcccgcctgcttacatgggtcctcaaccttggctgtgtgtcagactcacctgaagagctaaaagtaaaatactcagacatgtgcaccacccccaggattgtgatctcacatgtatttctttaagcctcccccaggaaattgtacagaaaagattgggacccactctgctggtttagtgtggcttcatctctcaaactgaatgaaacttcttccaactctcctc

SEQ ID NO: 11338 - DNA, 236 bp, Homo sapiens
caaggtccgcatcaacagtaataagttgtgttagtagcatgcactcttaatatcatatgaggagaagggcactttacctctgtggtcttcctcctaaaacccgtaagcccagtcaagaaacccataactccatgagaaaaacatcaaccaaaaccatgttgaaaagacagtctacaaaacacttgaccagcagtcctcaaaactgtcaagaacaccaaaaacaaggaagctctgga

SEQ ID NO: 11339 - DNA, 442 bp, Homo sapiens
ctttaaatagctgccatgaaatgttgtcattagtttgctatctgcagggaaaacaaaatgaaacaggaatatacaaaatgagataagagtctctcttaccttacataaaccttatgtttgagggcagggggcaaacctttaaaaaaaaattatttatttatttagagacatggttttgccatgttggccaagttggcctcctgggctcaagtgatcctcccgcctctgcctctcaaaatgctgggattacacgcatgagtcaccactcccagctgaaaatttttaaaatttattgttagttcatatttgggaaacaaaaagctcacttttcagtctgagattttgcaaaagtggaagtgtagtgtaaaaaaatataaaacatacataccaatagccagcctaaaactgcttgttagcaacccaagctagtaattaaaaattt

SEQ ID NO: 11340 - DNA, 686 bp, Homo sapiens
ccagagtgagggctccacccttccctcatgcgtttatctaaccctaattatctctcaaagtctcccaaaggcctcaactccaaatgccagcacagtgagagttaaggcttcaacatataaattcggagggacgcaattcaattcatagcattagtgtttttttgttttgtttttacttttttttttaagagacagggtctcattctgtcacccagactggagtgcaatggtgcaatcatagctcactgcaggttgaactcctgggctcaagcagtcctcctgcctcatcctcctgtgtagctggggactgcaggcatgtgccacacccggctaattttttctttctttctttttttttttttttgtagagatggagtctcactatgttgccccaggccagcctcaaactcctgacctcaaacaatcctcctgcctcagaccccaaagtgctgggattaacaggtgtaaaccaccatgcctggcctacattagtggttttgaaatgcacctgtttcacttcaatatggccatttattcattcactttagtaaacacttaatgagtttctattgtttccagtgattgtgttgtgccctgagagaaaaagcagagaggcctgaattagcacctgctgccaattattcacagtcaacaatggacaaagggcttactttaaaaccaaaaaa

SEQ ID NO: 11341 - DNA, 226 bp, Homo sapiens
gacacacagacacacagggaagaaagccatgtgaagatggaggcagagattgcagagatgcagctacaaccaaggaacaacaaggattcccaggagctaccagaagctaggaagaggcaaagagggattcttctctagagccctcagagggagcatagccctgctgacaccttcattttggatttctagcctccaaaactgtgagataatacatttctgttgttgt

SEQ ID NO: 11342 - DNA, 456 bp, Homo sapiens
caaagacagccagggcttaaatcaggcctttctgatgtagaccatgctcttcactaccacagagttccatgctactttctctccctctccctcctctcctgtccctgctacacacacacacacacacacacacacacacacatgcacactcactcacacacactaggaggaacaaatgagatcattcacatgaaagcacttatgtttctgaaatttaagggactgtggtttttatctaggttgacctctcaagctaaaaactgggaaccagaataatggactgaaacttgggtttcacttccagaccagtgttgatcctctgaattgatgaaactgtatagatttccctcttgattgcccctgctaacatggatttcctttcactcaattcctaatgcaaatattgctgaccactgtttagatgtttacatgctgcattacattgatattttacta

SEQ ID NO: 11343 - DNA, 837 bp, Homo sapiens
ttgatctcagggtctgttcgacggaagcagcaaaaaatacaggctcccaacgtggctccactgtctcatgaagtgtcaaaaatttaaaaatacacctcactttctattcagcatcagctattgaaatggaattctccttttctattcccgttgtacatagccccacgccctgcctccggctttgtcctctgtacagagccccctgtcccctctgctgttccggacccttttcttgcagcagctcaaccccccgactcactcagatccccaggactgcagccgagccccgggcttcctttcttaccattctgtatgcttccaaggtgtgaccattcaaactaacagtattattaagattattaataaagatttctttcttcaaaccagcgaaaaaaaaaaaaacaaaaaacaacaaaaaaaacaaaaaaaaaaacaaaaaaaaaaaacaaagaagagggggcggcgcgccacaccaaggagattccccccggggggcgccaccggaagccagacccccacttttgttgagtcaaaaaggggtccccaaaggaggggcggccctataataaacagggggcccgcggcgccggcgggtgtataaaaacagcaggctcttgactgagaggaaaccacgctgcgccacctctgtaagaacacactcttgtgaggagaaggaccaccatactactgctgtgcgggggcgcgccacctcttgctgtcctgtctttccccttagaaggattttaacgcgcccagggaaaacgactaccacgtcaagagtacataggggtgaacacaacggaaattctcctgcgcagtaaaagttgcgctaaaggt

SEQ ID NO: 11344 - DNA, 1520 bp, Homo sapiens
tgccagggggccggcggggctgaggggtgcgggcagctttcatcccaggggctccactgggccccgtcaccctcctgtcgcgtcccctgcgtcccacctccctcctgcccggcagtcccgcccgtgcccccagcctggcgaggaagccgtccaacagtagccccggggccagctcccaacagaaagggctgacgtggctccaggactcaggggcgctccatgggaggacgaaggaagcccagccagccaggagccactcctcacacctccaagtgtggccaagtgggccctgaggccaaggacttacttgctcttcctggccatctctccctttctggaggaggcccggggcctgtgtacaccaaggctgacctcgtgctgcctgctgggacccagccctccctgccgctcccctgtgagcccagtccaccgtgggcgcccagggccagggacgggccagcgcccggctgcatcgcgaggttgggagtcacagtggctgtgggcctggacgggcacagccagagcaggggcccatgggaagggcaagggatggggaagcctgggccggccccttccctgctcccaaggcaggtgtccaggtggcgggagcagcaccaaggacagccaggcttacccggtgggaggagcaggagcagagcaggtggcagggaggaacccctggcgaggcagggagcactgaagtagggaagcagcaaaaaatacaggctcccaacgtggctccactgtctcatgaagtgtcaaaaatttaaaaatacacctcactttctattcagcatcagctattgaaatggaattctccttttctattcccgttgtacatagccccacgccctgcctccggctttgtcctctgtacagagccccctgtcccctctgctgttccggacccttttcttgcagcagctcaaccccccgactcactcagatccccaggactgcagccgagccccgggcttcctttcttaccattctgtatgcttccaaggtgtgaccattcaaactaacagtattattaagattattaataaagatttctttcttcaaaccagcgaaaaaaaaaaaaacaaaaaacaacaaaaaaaacaaaaaaaaaaacaaaaaaaaaaaacaaagaagagggggcggcgcgccacaccaaggagattccccccggggggcgccaccggaagccagacccccacttttgttgagtcaaaaaggggtccccaaaggaggggcggccctataataaacagggggcccgcggcgccggcgggtgtataaaaacagcaggctcttgactgagaggaaaccacgctgcgccacctctgtaagaacacactcttgtgaggagaaggaccaccatactactgctgtgcgggggcgcgccacctcttgctgtcctgtctttccccttagaaggattttaacgcgcccagggaaaacgactaccacgtcaagagtacataggggtgaacacaacggaaattctcctgcgcagtaaaagttgcgctaaaggt

SEQ ID NO: 11345 - DNA, 467 bp, Homo sapiens
ccagctgcccattcttttgctcatctgtttaatttttaataaatatcaatgatctgagaggcattgggtagcactgaggatgcaatccgatgtgaacaagacttcaggagctctgctttcattaggcttacatttggttaatggagataaacttgaagcatataaaccaataaataaacaagaaaatatcagggagtgacaattgctattaaggaaagaaacagggtgataggatagagagggaggagagagacttcttcagtcagatgatcataaaatgcaagtatgattaagtcatggcctcaacttttaaggaatgatgggctcaccttgctttcattcttgccacctcctcaatgaaaatgaaagatgtttttgggaaactgatagctaattttctttttcttagaatatttgatttagataatatgtatttaaaataaagttatcacgtaaaataatatatt

SEQ ID NO: 11346 - DNA, 452 bp, Homo sapiens
acaggagctgtttaaagatttggacacaggctactaaggatgctcagaggtcatctagactaatttggtcaaaaatcagtggtacctagagtgtgtggccacttcttctcaaatatctgctgtaactagttcttgaccagtttttcccaccaaaactccagaactgatcaggtgtagtggctcacgcctataataccagtgctttgggaggccaaggcaggagggtttcttgagaccaggagttcaagaccatcatgggcaacatggtgataccccatctttacaaaaataaaaatagaaaaattaggtgtagtggtgtgcctgtattcctagttactcaggaggctgaggcaaaacgattgcttgagcccagaagttcaaggttacagtgatttataatcatgttactgcactccagcctgggtgagagagtgagaccttgtctcagggga

SEQ ID NO: 11347 - DNA, 120 bp, Homo sapiens
cttatcaaatgtatcatttatcaaatttaccaaatttattcatctttttaaataactggcttttgagttccttgattttctcagttgattccctatttttaatttcattgatttctgctc

SEQ ID NO: 11348 - DNA, 515 bp, Homo sapiens
ttgtctttggcactatgtgtggactttctgttctcttcttcatctagcagacattcatctactgctaccgctttttaaaaaagttattttatttcatattatgttttaatctctgatggagctagcttcccattgttgcacttctttttcacagcttcctggctattcctgtttgcttacttttcctagagaaatttagagtcagcttgtctacttgcttctcttctatcctcctaacctttctaataaaaataataagactggtatttttaaaaatagtattttttgtttttgaaactcattttctgcagctgttaaatcttttgaaatatatcaatgttgatttttctagactttgtttttttctggctaatctctgtttcttctgtcttagctttaagttttctcaggatatcatgatgccttgcagtatttctctttagctcttatgcataaggtgatagcattttaagatctcttgggtgaagattaggcctgcaaatatgagttctttt

SEQ ID NO: 11349 - DNA, 366 bp, Homo sapiens
gaacagaattaagtcatctcagctgaggccatcctagaccagccagctgccagctgaccaacaaagctcagctcagagaagccaaaccacccagcttatttttaatgcctattaaaaaaagttttattgaagtataacggatgcacaataaactatatgtatgtaacatgtacagtctgctaagctttgatgtatgtgtgcacgcatgagaccatgaacgtgatgaacgtatgtatccattatccataaaaattttctgaagccccttggtaatccttcctgctggtccctactggtccccaaccccaggagaccacttccatgctgttaccacacgttagttttcattttctaaattttgtatgt

SEQ ID NO: 11350 - DNA, 759 bp, Homo sapiens
gctcacacctcccccctccctactttcagcagatgtttttttctttaaatgcaagaagagttaactaaatcagcctttatatataaaaaaaagtgttttaagtttctcatagccgatgatcaaaaataccttttcttttgtgaattcaacaggggcactgagaaaagatacattataatgcgtcaaaggctacaatctagccattctttgactttaccttaaaacatctgtacaaatattcctgctcagtgtaagaaatctacctaagcagtcctaaacaaactgaactctgtttactttataaaagaaacagactgccacacaggtctacctagtccacacatcttcatcttgccaggcaaagctaatatcttaggcctaaccttcagttttgcggggggatctatagccagccccaccaaggggctgtgcatcacttgggcagaccagttcccggcctattagagaataccactgacacaaaacaaaagaaaaagcacgtatctccttatcacttagaggcaaggctgatttaggcataaacaaattattggccaagggaaccacagtataagcagctccgggcatcacagccgatgtaccagttcaaaagagagaagataaagtatttccaacacaaactttgcagaccactaggtctaatgattaaaagggctgactacgtgtcttggtttgatagagatgggtttgcagagcctgggaaacacagggagaccctgtctctaccaaaaaaaaaga

SEQ ID NO: 11351 - DNA, 563 bp, Homo sapiens
gcggccgcctggtggtggtggaggacctgcactctggcgcccagcagcactggtccggccactctgcggagatctccacgctggccctcagccacagtgcccaggtcctggcctctgcctcgggccgaagcagcacgaccgcccattgtcagatccgcgtctgggacgtgtctggcggcctctgccagcatctcattttcccccatagcaccaccgtgctggccctggccttctcaccagatgacaggcttcttgtcacactgggggaccacgatggccgcaccctcgccctgtggggcacggccacctatgacctcgtgtcctccacccgcctcccggagccggtgcatggtgtggccttcaacccctgggacgccggcgagctcacctgtgtgggccagggcactgtcaccttctggctccttcagcagcgtggggcagacatcagccttcaggtgcgtcgagagccagtcccagaggcagtgggggctggagagctgacctcgctctgctacggggcacctcccctgctctattgtggcaccagctctggccaggtctgt

SEQ ID NO: 11352 - DNA, 774 bp, Homo sapiens
taagctgggcctgaggcaggtgactggacctctctgactgtgtttcttagggagaaaagtccaggtgcactgtcctgtagctaaggcttttggactaaatgggtttaagaatttagaatttttccaaatttttttttttttttttttagactaagtctcactctgtcacccagactggagtacagaggaacaatctcggctcactgcaacctccgcctcccaggttcaagcgattctcctgcctcagccttcctagtagctgggattacaggcataagccacatgcccggctaatttttgtatttttagtagagacagagtttcaccatattggccaggctggtctcgaactcctgacctcaagtgatccaccaacctcagcctcccaaagctctgggattataggcatgagccaccgtgcccagccgaatttttcagattttagaaaggattatgctgctagacacagtgacactcctggaagggtgggtgcaacaccccaaaagcaaacatatagtactttcataggaaaacatactgttagtcaccctaaggaagatagttttaaaggccataattagtatcacatcaattcaggtcagatttttgcagcagaaattagtctgctgcagacttagaagaacctttgggatttctgagcgttctgaattctagaacagcagagaaggggatgtgggcctggaccgtcttccagaactgtagggaggctgatgaggaagcagacatccagtgtcgtttatttctatgtttatt

SEQ ID NO: 11353 - DNA, 379 bp, Homo sapiens
tcttcttacttttgactgttgggcatatggaggagtaccttaaagaccttcagtacagagcgagactctgtctcaaaaaacaaaacaaaacaaaaacaaaaaacaaaaaacctctggggatagggcccatctatctgggtttggtatagtgtgggggtcctcaaatctgagcttatcaggaaaatttggaggatctgttcatatagactggttatttaccacgtgccatatttagtgaaagttaaattgttgtggattctcaagaccagattgtgaaaggcagctgcactcaatatcaaattaacaacctgacctatttcttgaaatgtaaaacttaatccagagatcctctgtttaaacaataaaaatgtttactcta

SEQ ID NO: 11354 - DNA, 96 bp, Homo sapiens
aactctaggcagatgattaatactctagtagtcacttgctcacacagctggatttctcttctgaccaaatcaatacctaaagctagaactttctgg

SEQ ID NO: 11355 - DNA, 381 bp, Homo sapiens
gaagattgcttttacattttttgacactggtcttctaatcttgtttctcttcataaatcttgtgcaccattgtgattgctaagaagaacacaatctatttagcaaatgtttttggcataaaaggaatgataattattacttgacttttatatccttatagagacctaagctaaatctctgacactgacaatattgactattagccagcttgttaacagtactagaaatgaatttggaagaagcaatttgataaattacacacccttttggcttttaccctccctttatatcagacttgtgactgactcagaatgatatttggggaggtgaaaaaaggtaaacatgtttgagaggaattagccatcagactagagtgtattc

SEQ ID NO: 11356 - DNA, 433 bp, Homo sapiens
cacccatgacagggatacacagagtaccgtccctgtttgcaaatgaggaacatgaggccagagaggtgaaactcccagctgagaccagccagctaaggtttccaagccaggatttgatcccaagattgccccacttgaagctgccctgcacagcccacggtggccaacacctgctggaggctgtacaccaggagaccgggacgtgactgcccagcagagtagggactcaagaaatgcttgtggacagaatacccttgaatgccctgatgccaagcgctggaaatccagagacgataaaacacagtcctggctgtcaggagacaaagtgacgcgcctcatcacatgcaggatgggctgtcccaagaagcccatggacggcctgaccacgccttgttgtgatacaaaagagagagagagggaggggacttcaagc

SEQ ID NO: 11357 - DNA, 446 bp, Homo sapiens
ggctgaccttgggtttaaatcccagttctgccacttactgtgtgaccttgggcatgtcatctaacttttaagtctccatttctttgtagtatgaatataatacctacagtgcagggttgcgaagatttaaaccaaatgtagtgaaagtacgtaggacatagagggcactttgcatggtcacaccttctccacttgctgtccaagccctgtgccctaggtgggaagagacaggcaagaaacgtaaaaccctctcctccaggaggtggagctgccatcgagatattttagaagtgaagatgccagaacagggtctagatagctcatggccctcaccttcaccccagtgcacacacaaacatcaccattcaccctcctattacattatcactcctctggggatttattctttggttaaacacttcacagtcagagcacagaatccctga

SEQ ID NO: 11358 - DNA, 790 bp, Homo sapiens
  misc_feature (457)..(457): n is a, c, g, or t
  misc_feature (464)..(464): n is a, c, g, or t
  misc_feature (511)..(511): n is a, c, g, or t
  misc_feature (517)..(518): n is a, c, g, or t
  misc_feature (533)..(535): n is a, c, g, or t
ggggaggtcgtgatggcggcgccggaggcggaggttctgtcctcagccgcagtccctgatttggagtggtatgagaagtccgaagaaactcacgcctcccagatagaactacttgagacaagctctacgcaggaacctctcaacgcttcggaggccttttgcccaagagactgcatggtaccagtggtgtttcctgggcctgtgagccaggaaggctgctgtcagtttacttgtgaacttctaaagcatatcatgtatcaacgccagcagctccctctgccctatgaacagcttaagcacttttaccgaaaaccttctccccaggcagaggagatgctgaagaagaaacctcgggccaccactgaggtgagcagcaggaaatgccaacaagccctggcagaactggagagtgtcctcagccacctggaggacttctttgcacggacactagtaccgngagttgntgattctccttgggggcatgccttaaggccccaaggagttctatganctcganntgtctctgctggccnnnacaggtggaccagagctgagcacagcagcttgtttgccgccgtctcttccgagccatattcatggctgatgcctttagcgagcttcaggctcctccactcatgggcaccgtcgtcatggcacaggaacaccgcaactgtggagaagatcggtttccgaccaagctcaatatcgagtgccaggcggggcataaactgactgggacccgtcatgggggagacttccatcgaaccacgcttgggaaaacacacattgg

SEQ ID NO: 11359 - DNA, 146 bp, Homo sapiens
acaaggcaaaaacagagggtgactctggacttaacaaaaggagtcctcaggctcaaacactagttaaccttgttcatcacacagagaaggaaatcacatgggtatttgaggccaaatagtaaaagagtatgcaattgcctggatgt

SEQ ID NO: 11360 - DNA, 331 bp, Homo sapiens
aacaggtaccattttctccagatacttccccttcatctgtcctgaaattattaattattgacttctacttaaataagatcttattttcatctgctggaaaactttttctgataaccatacatatcttcaatgtctacaatttgaatggagagccctttcaatgtggcgtttctgtttcttccataacctcacaacgatatgtggtggccccgcagtcattatggtcttgttaaataattagatttgtgtaaactatattttagagtcttccaaaacgcctctccttccaaaatggctaaaagggcaaagcgtcagtaattctgtagacatg

SEQ ID NO: 11361 - DNA, 1094 bp, Homo sapiens
atgaggaacatctgaatcacctttataaattagatccttataaaaatcattgagttttctcacattaaggaacactgtagtgcttatagcttgtgatgtccagggagggacttagttggatatatctataagcctccatgctagctttttaaaaataattgtataatagagaaaaaatatatgccaaatcttgtgaaaccaggttaaaaaattagtactatatgcaagacatgcttcccagaatattagggctagaaaggaacagtgtttttcaaagttccaaagcatagaagcttttagaaatgaactcttaatcaaaactccagtttgtaaaaccaataaaagcagaatcctggaacccacattacacatgcctttcctcttgagggtcccccaggagtgctagtctccacatggcacagatagaatgtgtgagacttacctgagggacacaggaaaggggtgccagatttggaactagaatgcaggagaccatggcgctcaccaccatgctggtggctctgccccgttcgtcctgaacacgacttagtcaggtatttggtcttttgagttaaacagaccctggtgatgagctctttgccttggacagattactttacccctctgattctcagctttctcactgggaaaagcagacctgcctcaggtctgattcaaggattagtcagccttagcatactttaagtacttcattattattattactactgctactactgcccaaaggccagaatccgtggagccttaaagacgcagaactcaaactgtttttggttaaatcatctttgtctcagtcatgggagtggtgtacaaatactccaatcagtttagattcatgcagcctttttatctgttgatgcttcttagccctaaagttgttaatcggtttgttttcttagaatttagaggaatttctaggttatttgaatactttagatactttaaaattttgaaagctttccagggatgttttcactggtgcctttaccttctttgagtccagttcccactaggaaatggcagcattcacatgattctgtgaccccagtgaagcaaaggacctagtattgagg

SEQ ID NO: 11362 - DNA, 916 bp, Homo sapiens
tcttttaatgttcgacactctcgttgaagatgtgaatatctgtctgcaggcatgcagcagtctacatgctctatcctcttccttgccagatgatcttttacagagatgtgttgatgtttgccgtgtccaactagtgcaccgtggaacttgtattcgacaagcatttggaaaactgttgaaatcaattcctttaggtgttttcctaagcgataacaatcacacagaaattcaagaaatttctttagcattaagaagtcacatgagtaaagcaccaagtaatacattccacccccaagatttctctgatgttattagttttattttgtatgggaactctcatagaacagggaaggacaattggttggaaagactgttctatagctgccagagactggataagcgtgaccagtcaacaattccacgcaatctcctgaagacagatgctatcctttggcagtgggccatatgggaagctgcacaattcactgttctttctaagctgagaaccccactgggcagagctcaagacaccttccagacaattgaaggtatcattcgaagtctcgcaggtcacacattaaaccctgatcaggatgttagtcagtggacaactgcagacagtgatgaaggccatggtaacaaccaacttagacttgttcttcttctgcagtatctggaaaatctggagaaattaatgtataatgcatacgagggatgtgctaatgccttaacttcacctcccaaggtcattagaacttttttgtataccaatcgccaaacttgtcaggactggctaacgcggattcgactctccatcatgagggtaggattgttggcaggccagcctgcagtgacagtgagacatggctttgacttgcttacagagatgaaaacaaccagcctatctcagggaaag

SEQ ID NO: 11363 - DNA, 1971 bp, Homo sapiens
atggctatgagttcttttttgatcaactcaaactatgtcgaccccaagttccctccatgcgaggaatattcacagagcgattacctacccagcgaccactcgcccgggtactacgccggcggccagaggcgagagagcagcttccagccggaggcgggcttcgggcggcgcgcggcgtgcaccgtgcagcgctacgcggcctgccgggaccctgggcccccgccgcctccgccaccacccccgccgcccccgccaccgcccggtctgtcccctcgggctcctgcgccgccacccgccggggccctcctcccggagcccggccagcgctgcgaggcggtcagcagcagccccccgccgcctccctgcgcccagaaccccctgcaccccagcccgtcccactccgcgtgcaaagagcccgtcgtctacccctggatgcgcaaagttcacgtgagcacggtaaaccccaattacgccggcggggagcccaagcgctctcggaccgcctacacgcgccagcaggtcttggagctggagaaggaatttcactacaaccgctacctgacacggcgccggagggtggagatcgcccacgcgctctgcctctccgagcgccagatcaagatctggttccagaaccggcgcatgaagtggaaaaaagaccacaagttgcccaacaccaagatccgctcgggtggtgcggcaggctcagccggagggccccctggccggcccaatggaggcccccgcgcgctctagtgcccccgcacgcgggagccacgaacctcggggtgggggtgggcagtgagtgcaggggatggggtggggggacaggagggggccctggggcctgggccccggaaaaatctatctgccctcccccacactttatatacgaataaacgcagaagagggggaggggaagctttatttatagaaatgacaatagagggccacggggaggccccccccagaagcaagattcaaatctcttgctttctttcttaaaaaaaagaaaaagaaaaagcaagaagaaggaagaaagaaaaagacagaaagagaaataggaggaggctgcagctcctcgttttcagctttggcgaagatggatccacgtttcatctttaatcacgccaggtccaggcccatctgtcttgtttcctctgccgaggagaagacgggcctcggtggcgaccattacctcgacacccgctaacaaatgaggcccggctcggccgcctccgcctctgctactgccgctgctggaagacagcctggatttccttctttgtcccccactcccgatacccagcgaaagcaccctctgactgccagatagtgcagtgttttggtcacggtaacacacacacactctccctcatctttcgtgcccattcactgagggccagaatgactgctcacccacttccaccgtggggttgggggtgggcaacagaggaggggagcaagtagggaagggggtggccttgacaactcaggagtgagcagggaaattgagtccaaggaaaaagagagactcagagacccgggagggccttcctctgaaaggccaagccaagccatgcttggcagggtgaggggccagttgagttctgggagctgggcactactctgccagtccagagttgtacagcagaagcctctctcctagactgaaaatgaatgtgaaactaggaaataaaatgtgcccctcccagtctgggaggaggatgttgcagagccctctcccatagtttattatgttgcatcgtttattattattattgataatattattattactatttttttgtgtcatgtgagtcctctctccttttctctttctgacattccaaaaccaggccccttcctacctctggggctgcttgagtctagaacccttcgtatgtgtgaatatctgtgtgctgtacagagtgacaatagaaataaatgtttggtttcttgtgaccagca

SEQ ID NO: 11364 - DNA, 1770 bp, Homo sapiens
atggctatgagttcttttttgatcaactcaaactatgtcgaccccaagttccctccatgcgaggaatattcacagagcgattacctacccagcgaccactcgcccgggtactacgccggcggccagaggcgagagagcagcttccagccggaggcgggcttcgggcggcgcgcggcgtgcaccgtgcagcgctacgcggcctgccgggaccctgggcccccgccgcctccgccaccacccccgccgcccccgccaccgcccggtctgtcccctcgggctcctgcgccgccacccgccggggccctcctcccggagcccggccagcgctgcgaggcggtcagcagcagccccccgccgcctccctgcgcccagaaccccctgcaccccagcccgtcccactccgcgtgcaaagagcccgtcgtctacccctggatgcgcaaagttcacgtgagcacggtaaaccccaattacgccggcggggagcccaagcgctctcggaccgcctacacgcgccagcaggtcttggagctggagaaggaatttcactacaaccgctacctgacacggcgccggagggtggagatcgcccacgcgctctgcctctccgagcgccagatcaagatctggttccagaaccggcgcatgaagtggaaaaaagaccacaagttgcccaacaccaagatccgctcgggtggtgcggcaggctcagccggagggccccctggccggcccaatggaggcccccgcgcgctctagtgcccccgcacgcgggagccacgaacctcggggtgggggtgggcagtgagtgcaggggatggggtggggggacaggagggggccctggggcctgggccccggaaaaatctatctgccctcccccacactttatatacgaataaacgcagaagagggggaggggaagctttatttatagaaatgacaatagagggccacggggaggccccccccagaagcaagattcaaatctcttgctttctttcttaaaaaaaagaaaaagaaaaagcaagaagaaggaagaaagaaaaagacagaaagagaaataggaggaggctgcagctcctcgttttcagctttggcgaagatggatccacgtttcatctttaatcacgccaggtccaggcccatctgtcttgtttcctctgccgaggagaagacgggcctcggtggcgaccattacctcgacacccgctaacaaatgaggcccggctcggccgcctccgcctctgctactgccgctgctggaagacagcctggatttccttctttgtcccccactcccgatacccagcgaaagcaccctctgactgccagatagtgcagtgttttggtcacggtaacacacacacactctccctcatctttcgtgcccattcactgagggccagaatgactgctcacccacttccaccgtggggttgggggtgggcaacagaggaggggagcaagtagggaagggggtggccttgacaactcaggagtgagcagggaaattgagtccaaggaaaaagagagactcagagacccgggagggccttcctctgaaaggccaagccaagccatgcttggcagggtgaggggccagttgagttctgggagctgggcactactctgccagtccagagttgtacagcagaagcctctctcctagactgaaaatgaatgtgaaactaggaaataaaatgtgcccctcccagaagcaagattcaaatctcttgctttctttcttaaaaaaaagaaaaagaaaaagca

SEQ ID NO: 11365 - DNA, 497 bp, Homo sapiens
tatccatattatattttatattccattccattatataccagagtatatttaccaattttcttgttggacattcaggtagtttccttatttttgcaattatgagaaggacagtaaaaaaaaattcatgaacacatgccagagtttttctagaagtgtctctgctaggccatagggtgggcagatgtttaccatatgagatagtgccaaattatttcccaaagtgtgtgcactgctagcaatacataagacattgtattgacacacatcctctcaaacttgattttctttaactcctgggagcagggactatgtttcccgttttttgaaacagaaatcatagtactaagatgaggtaggtacactatgaatccttgttcaatggaattaatttaaaatttaaaaaaaggttgaagagccatatccctttcataggaatgacagttcagaaattggggaaaaataaagaaggattaaaagtgagtgaatttcatgtagca

SEQ ID NO: 11366 - DNA, 357 bp, Homo sapiens
gcaaactaacaatttatcacaaagacaatgtgatgtattcatacaatagaatattattcagcaataataagaaatgtacaacagatacagcaataggaatgagtctcaaaaaccttctgcttagtgaaagaaccaaggccctaagagcaaataactgtgtgagtccatgcatgtgaagttctaaaacaggcaaactgggagagggggtgagtagaggaaattgcctgggagcgtccaggggatcattggggtaaaggaaatactctcagaaatgtaacaaattgatgcccacttcacactgtagatcaattcagtggaaatctctcgggtgattccagtgtgcaaccagtttgagaa

SEQ ID NO: 11367 - DNA, 599 bp, Homo sapiens
aggtaattatttgaagacttattgtacttccattatggcccttgctcatctacagtaccttctaggaggatatatttgccaatagtctctactgtagagccagctcttaggcagccatgttctgaaccatgtgactccaccctctagccacagtggaacaaactggaagttggcacctgacccaaaagaaaccaatctgtcacaatggctagcaatccacgtcatgtgaaaaacatgaatcgacccaatcagatttcctcagtttgaaactagaactaagaagtaacgagaaaaagatgagttagtgagaaccaaagctagaaggattctatgaggtttgtcatgacaagctaaagtcataaaggaacataaacacacggaaaagattcacagagagagaggaaggcagaagatttttgtttttgtttttgttttgtttttttaagaggtaatatgatttcttaggctttacaaagtctttctaggtccacttctataccttgtttgtttttataataactactatccccttttatcttgaggttatttaggtgaatctatattctttgcagttagaggcctattagagcactctttaa

SEQ ID NO: 11368 - DNA, 779 bp, Homo sapiens
ttttttcattctgtagcaataaacagggaatatgttatttattatataagctaattaatatcatggcatttaatgtctctgttcatcgataggctgactccagtttactcttaggagaatttcagattggttcctactcttagtcctgatacagattatcatgatggacaacttccttatttaaaaaatgtttttaagtggggagaaaatggggctataccttaacctacatactaaatgtttctttaaggttgtatgtacatagtataactgttagccaaacattctttaagtacttcagaaagttactgtttaaaggaattgtattgtgaagcccattataaatggaaataatcatcttcattttatcctactcggtagaaaaccagagccaaaggccagtggtccaaagttctagacctcactctaccactaattttctgtatgtctttagaaagttacacaattttgtgaatcttttctcatttttaaaatgagataaactcttaggtgccttttttttttttttaaataacttttacttctaaagttgggttacatatgccagattggtttaaaggtagtacaccaattccttctagaatggatgttctcaacctatagtaaataactgatgatccggcattttaagtgtgcagatagattcatcggcaggttccatgatggttgatctttctctgaccctttacgaatgttaagagattaatttgctaagtataaactgaatattattaaattttaatggtatttactattga

SEQ ID NO: 11369 - DNA, 369 bp, Homo sapiens
gtcacagttgctttgactatagagtccctatgtagaaatagaattatcctattctttttttggcaacctcactgatttacaatgaaattattggaatggtcaatagatacatccatatagcattttgacataagcaaaatgtaacttgactgaatagtaaaataatactgtaattttttatttccaatttcaaagattattttaaagaactgaggagatgatatattatgttgctatgcattggcaatttctggtaggaagttagggggaagatcaactcaaattctgaaactttactccattataaacttttctacatcctattagttccaaatatgcagaaagggattgtgcagatgataccattct

SEQ ID NO: 11370 - DNA, 1689 bp, Homo sapiens
tcacttaataatgttagaaaagaaccttgggttaaaccctggaaaagtgagcttgcagggccaaggagatctgttgaagaatgccaagaatgaagctatagaaaacatgaagcagatccagctggcatgcctgtcctgtggactgagtaaagcccccagcagcagtgctgaggccaagagcaagcgcagcctggaagccatagaggagaaggaaagtagtgaggagaatgggaagctgtgactctgggcattatcgacacgttcacccatcttatcaaggactctggtttctcattcttgttttctttctttaaatgttttataagttcacaaaatggtgccctatatggggtattggacatagatattttcacaatgtcagtatttcagtgtagttaatttatctaaattaaagcctttagtatcagtgttttaaattctgagacatgtgtcaacacccctgtgtggatgcctgtggaagagtgtgtgtgtgtgtgtgtgtgtgtgtgtgtgtgtgtgtggcagagagagagaaagagagagagagaaattctgttaaaatctattctgtgttgcattattcatttagtgagttattccttgatcattttgggacaattgttttaatctgaaattctaaagagcacttactgtaacctgttgctgtgtttaatttgacttctctgcctttgacatttaatttagtgatcttagcatagcttattattgaaggaagccaaatttatcaaagcatacatgttttggtagattaaatatagattagaaaaattcctaagaatcagagtagaaataaaagtgaatgaaagattaaacagatgatgagaatttctaaaaagattagcaaggtcatttcttcagtcagaaaactttaaaaaatatttattaaataaaatcaatttttaggaagttttctgtagtcatttactaaacatatgatttcactagaaaagctgatcataagtgaatttatacctacctgtgtggtactctgaaacacactgaaagctctgttgcaattaggattttgatgtgacaataatattgttgtataatttcgagatttgtaggaaggtctcattcttccaagctgagagtctagcactcattttctataacagatatggcagcttagaggtgttggctttgtttggatgtaatttagggtactaaatttaaatttaaagatattgttcaaacaatatcatatcatcacattgagctgatataaattctgtgggtccgataatatctttgtgataatttaagagctaaccagttaccacacatctatgatataaccctaacacacacagaaaagcatacatgcaaaaagaaatgactaattagggtacatttataattgcatctaggtaatttttaccctaatgtcttcataaagtacttgagtgtaatgtttgttacctccaacagaactaaatgttctatggttatgaaagaatatatttatttaaagcattgcttttattttgaaaagcttcttaattaatttgattaacaaatatgctaatttggggaaacctagagaagataattgttgaaattttgcaaatataaacatctcctatagcttctgtgttatttctgacttcttaacactattatgtttatgttgcacattactgaaagagtaaagatatgaaaaaaaca

SEQ ID NO: 11371 - DNA, 705 bp, Homo sapiens
gccagctggtcaggctcaggttgaggtacttggcttaacaagcaaagtcacttaataatgttagaaaagaaccttgggttaaaccctggaaaagtgagcttgcaggtctgggtctgtttccttattcagcaatgggcagtaagaacatagagtgatgtcactcagcacatgcctggcccataactgtcttctttgatgcctgtttttttctgtttgtagggccaaggagatctgttgaagaatgccaagaatgaagctatagaaaacatgaagcagatccagctggcatgcctgtcctgtggactgagtaaagcccccagcagcagtgctgaggccaagagcaagcgcagcctggaagccatagaggagaaggaaagtagtgaggagaatgggaagctgtgactctgggcattatcgacacgttcacccatcttatcaaggactctggtttctcattcttgttttctttctttaaatgttttataagttcacaaaatggtgccctatatggggtattggacatagatattttcacaatgtcagtatttcagtgtagttaatttatctaaattaaagcctttagtatcagtgttttaaattctgagacatgtgtcaacacccctgtgtggatgcctgtggaagagtgtgtgtgtgtgtgtgtgtgtgtgtgtgtgtgtgtgtggcagagagagagaaagagagaga

SEQ ID NO: 11372 - DNA, 4645 bp, Homo sapiens
gaattccgggcagcatcatcaaggcacatagattctctctttgaacaatgcagctgctgcaggggatggggaagggatggcactggcaattcaagactgcctttcctacttcttcagtgcctctttcaccaatatgaagttaaaaccaggatccttcaaaccaaaaatgtggtggaagaaagaaaaccgtgtctttcagcagcatgccatcggaaaagaaaattagcagtgcaaatgactgcatcagcttcatgcaagctggctgtgagttgaagaaagtccggccaaattctcgcatttacaaccgttttttcactctggacacagaccttcaagctcttcgctgggaaccttcaaagaaagacctcgagaaagccaagcttgatatttctgccataaaagagatcagactggggaaaaacacggaaacatttacaaacaatggccttgctgaccagatctgtgaggactgtgccttttccatactccacggggaaaactatgagtctctggacctagttgccaattcagcagatgtggcaaacatctgggtgtctgggttacggtacctggtttctcgaagtaagcagcctcttgattttatggagggcaaccagaacacaccacggttcatgtggttgaaaacagtgtttgaagcagcagatgttgatgggaatgggattatgttggaagacacctctgtagagttaataaaacaactcaaccctactctgaaggaagccaagatcaggttaaagtttaaagaaatccagaagagcaaggaaaaactaaccacccgcgtgaccgaagaggaattttgtgaagctttttgtgaactttgcaccaggccagaagtgtatttcttacttgtacagatatctaaaaacaaagaatatttggatgccaatgatctcatgctctttttagaagctgagcaaggagtcacccatatcaccgaggatatatgcttagacatcataaggagatacgaactttctgaagagggacgtcaaaaagggtttcttgcaattgatggctttacccagtatttattgtcatcagaatgtgacatttttgatcctgagcaaaagaaggttgcccaagatatgacccagccattatctcactactatatcaatgcctctcataacacctatctaatagaagaccagttcagggggccagctgacatcaatgggtacattagagctttgaaaatgggctgtcgaagcgttgaactcgatgtaagtgatggttcagataatgaaccaatcctttgtaatcgaaataacatgacaacccatgtttcctttcgaagtgtcatagaggtaataaataaatttgcctttgttgcttctgaatacccactcattctttgcttgggaaatcactgctccttgccgcagcagaaggtaatggctcaacagatgaaaaaggtctttggcaataaactctatactgaagcacctttgccctcagaatcctacctcccatcaccagaaaaattaaaaagaatgatcattgtgaaaggaaagaagttgccttctgatccagatgtgttagaaggagaagtaacagatgaagatgaagaagctcaaatgtctcgaaggatgtcggtagattacaatggtgagcagaagcaaatccgactctgtagggagctctctgatttggtgtctatttgtaaatctgttcaatacagggattttgaactatctatgaaaagccaaaactattgggaaatgtgttcatttagtgaaacagaggccagccgcattgcaaatgagtacccagaggattttgttaattataataagaagttcttatcaagaatctatccaagtgccatgaggatcgattccagtaacttgaatccacaggacttttggaattgtggctgtcagattgtagcaatgaattttcagactccgggtccaatgatggaccttcacacgggctggtttcttcaaaacgggggatgtggttatgttctaaggccgtctataatgcgagatgaagtttcttacttcagcgcaaatacaaagggcattctacctggggtgtctcctctagctcttcatatcaagatcatcagtggtcagaatttcccaaagcccaagggagcttgtgccaaaggggatgtcatagatccctatgtttgtatagagatacacggaattccagcggattgttcggaacaaagaactaaaactgtacagcaaaacagtgataatcctatttttgatgaaacttttgagttccaagtaaacctacctgagctggccatgatccgttttgttgttctggatgatgactacattggggatgagtttatagggcaatatacgataccatttgaatgtttgcagcctggatatcggcatgttcccctgcgttcttttgtgggtgacatcatggagcacgtaaccctttttgtccacatagcaataactaatcgaagtggaggaggaaaggcacagaagcgcagtctttcagtgagaatggggaagaaagttcgggaatataccatgctcaggaatatcggtcttaaaaccattgatgacatctttaaaatagcggttcatccattacgagaagccatagatatgagagaaaatatgcagaatgcaatcgtgtctattaaggaactatgtggactccctccaattgccagtctgaagcagtgcctgttaactctgtcatctcggctcatcaccagtgacaatactccttcagtctcacttgtgatgaaagacagctttccttacctggagcctctgggtgcaattccagatgtgcagaaaaagatgctgactgcttatgatctgatgattcaagagagccggtttctcatagaaatggcggacacagtccaggaaaagattgtacagtgtcagaaagcagggatggagttccatgaagaacttcataatttgggggcaaaagaaggcttgaagggaagaaaactcaacaaagcaactgagagctttgcttggaacattacagtattgaagggccaaggagatctgttgaagaatgccaagaatgaagctatagaaaacatgaagcagatccagctggcatgcctgtcctgtggactgagtaaagcccccagcagcagtgctgaggccaagagcaagcgcagcctggaagccatagaggagaaggaaagtagtgaggagaatgggaagctgtgactctgggcattatcgacacgttcacccatcttatcaaggactctggtttctcattcttgttttctttctttaaatgttttataagttcacaaaatggtgccctatatggggtattggacatagatattttcacaatgtcagtatttcagtgtagttaatttatctaaattaaagcctttagtatcagtgttttaaattctgagacatgtgtcaacacccctgtgtggatgcctgtggaagagtgtgtgtgtgtgtgtgtgtgtgtgtgtgtgtgtgtgtggcagagagagagaaagagagagagagaaattctgttaaaatctattctgtgttgcattattcatttagtgagttattccttgatcattttgggacaattgttttaatctgaaattctaaagagcacttactgtaacctgttgctgtgtttaatttgacttctctgcctttgacatttaatttagtgatcttagcatagcttattattgaaggaagccaaatttatcaaagcatacatgttttggtagattaaatatagattagaaaaattcctaagaatcagagtagaaataaaagtgaatgaaagattaaacagatgatgagaatttctaaaaagattagcaaggtcatttcttcagtcagaaaactttaaaaaatatttattaaataaaatcaatttttaggaagttttctgtagtcatttactaaacatatgatttcactagaaaagctgatcataagtgaatttatacctacctgtgtggtactctgaaacacactgaaagctctgttgcaattaggattttgatgtgacaataatattgttgtataatttcgagatttgtaggaaggtctcattcttccaagctgagagtctagcactcattttctataacagatatggcagcttagaggtgttggctttgtttggatgtaatttagggtactaaatttaaatttaaagatattgttcaaacaatatcatatcatcacattgagctgatataaattctgtgggtccgataatatctttgtgataatttaagagctaaccagttaccacacatctatgatataaccctaacacacacagaaaagcatacatgcaaaaagaaatgactaattagggtacatttataattgcatctaggtaatttttaccctaatgtcttcataaagtacttgagtgtaatgtttgttacctccaacagaactaaatgttctatggttatgaaagaatatatttatttaaagcattgcttttattttgaaaagcttcttaattaatttgattaacaaatatgctaatttggggaaacctagagaagataattgttgaaattttgcaaatataaacatctcctatagcttctgtgttatttctgacttcttaacactattatgtttatgttgcacattactgaaagagtaaagatatgaaaaaaaca

SEQ ID NO: 11373 - DNA, 2073 bp, Homo sapiens
gtgattctagaggatctcatgaatgtttgctggccctggggctgctgcaggccattaagctgtacctgcggaggcagcggctgctgcgggacctgcgccccttcccagcgccccccacccactggttccttgggcaccagaagtttattcaggatgataacatggagaagcttgaggaaattattgaaaaataccctcgtgccttccctttctggattgggccctttcaggcatttttctgtatctatgacccagactatgcaaagacacttctgagcagaacagatcccaagtcccagtacctgcagaaattctcacctccacttcttggaaaaggactagcggctctagacggacccaagtggttccagcatcgtcgcctactaactcctggattccattttaacatcctgaaagcatacattgaggtgatggctcattctgtgaaaatgatgctggataagtgggagaagatttgcagcactcaggacacaagcgtggaggtctatgagcacatcaactcgatgtctctggatataatcatgaaatgcgctttcagcaaggagaccaactgccagacaaacagcacccatgatccttatgcaaaagccatatttgaactcagcaaaatcatatttcaccgcttgtacagtttgttgtatcacagtgacataattttcaaactcagccctcagggctaccgcttccagaagttaagccgagtgttgaatcagtacacagatacaataatccaggaaagaaagaaatccctccaggctggggtaaagcaggataacactccgaagaggaagtaccaggattttctggatattgtcctttctgccaaggatgaaagtggtagcagcttctcagatattgatgtacactctgaagtgagcacattcctgttggcaggacatgacaccttggcagcaagcatctcctggatcctttactgcctggctctgaaccctgagcatcaagagagatgccgggaggaggtcaggggcatcctgggggatgggtcttctatcacttgggaccagctgggtgagatgtcgtacaccacaatgtgcatcaaggagacgtgccgattgattcctgcagtcccgtccatttccagagatctcagcaagccacttaccttcccagatggatgcacattgcctgcagggatcaccgtggttcttagtatttggggtcttcaccacaaccctgctgtctggaaaaacccaaaggtctttgaccccttgaggttctctcaggagaattctgatcagagacacccctatgcctacttaccattctcagctggatcaaggaactgcattgggcaggagtttgccatgattgagttaaaggtaaccattgccttgattctgctccacttcagagtgactccagaccccaccaggcctcttactttccccaaccattttatcctcaagcccaagaatgggatgtatttgcacctgaagaaactctctgaatgttagatctcagggtacaatgattaaacgtactttgtttttcgaagttaaatttacagctaatgatccaagcagatagaaagggatcaatgtatggtgggaggattggaggttggtgggataggggtctctgtgaagagatccaaaatcatttctaggtacacagtgtgtcagctagatctgtttctatataactttgggagattttcagatcttttctgttaaactttcactactattaatgctgtatacaccaatagactttcatatattttctgttgtttttaaaatagttttcagaattatgcaagtaataagtgcatgtatgctcactgtcaaaaattcccaacactagaaaatcatgtagaataaaaattttaaatctcacttcacttagccgacattccatgccctgaccaatcctactgcttttcctaaaaacagaataatttggtgtgcattctttcagactttttcctatacattttatatgtagaaatgtagcaatgtatttgtatagatgtgatcattcctatattgttattgatttttttcacttaataaaaattcaccttattcctta

SEQ ID NO: 11374 - DNA, 1436 bp, Homo sapiens
agttaggagtctgagactagcctgggcaacatagggagcccctgtctttacaaaaaaaaaaaaagagagagatagccaggcatggtgttgcatgcttgtattcctgcctacttgggggactgaggcaggaggatcacttgagctcagaagttcaaggttaccgtgagcaatgttcacgccactgctctccagcctgattgacaggccagaccctgactctaaacaaaaacaaaaaacaaatatttaagtaatttccaaacatagcagaaaatataagcatggtttatcactttgatatgacaccaacagctacttaagatagaatcatgaattcagtaaattgttgtgtggaaagctaaggtgccaacccaagccgcatcttcttaggtgctcctcactggtgtcatcagctacagcaggcagagcattgccaggagctagctcttcccttcaagaacaaaagtcttgtttaagagcacagtagcccacaacttgctctttctcctgcagtctcttttatttccctcctttcttagggatcaccgtggttcttagtatttggggtcttcaccacaaccctgctgtctggaaaaacccaaaggtctttgaccccttgaggttctctcaggagaattctgatcagagacacccctatgcctacttaccattctcagctggatcaaggaactgcattgggcaggagtttgccatgattgagttaaaggtaaccattgccttgattctgctccacttcagagtgactccagaccccaccaggcctcttactttccccaaccattttatcctcaagcccaagaatgggatgtatttgcacctgaagaaactctctgaatgttagatctcagggtacaatgattaaacgtactttgtttttcgaagttaaatttacagctaatgatccaagcagatagaaagggatcaatgtatggtgggaggattggaggttggtgggataggggtctctgtgaagagatccaaaatcatttctaggtacacagtgtgtcagctagatctgtttctatataactttgggagattttcagatcttttctgttaaactttcactactattaatgctgtatacaccaatagactttcatatattttctgttgtttttaaaatagttttcagaattatgcaagtaataagtgcatgtatgctcactgtcaaaaattcccaacactagaaaatcatgtagaataaaaattttaaatctcacttcacttagccgacattccatgccctgaccaatcctactgcttttcctaaaaacagaataatttggtgtgcattctttcagactttttcctatacattttatatgtagaaatgtagcaatgtatttgtatagatgtgatcattcctatattgttattgatttttttcacttaataaaaattcaccttattcctta

SEQ ID NO: 11375 - DNA, 1502 bp, Homo sapiens
caaaagcagttgggccgaacgaagcgtgcgcgctttggtaaccggctagaaatcccgcacgcgcgcctgcctcctctccccaggcctgagctgcccctcccactgcctttccttcttcccgcgagtcagaagcttcgcgagggcccagagaggcggtggggtgggcgaccctacgccagctccgggcgggagaaagcccaccctctcccgcgccccaggaaaccgccggcgttcggcgctgcgcagagccatggaattctcctggctggagacgcgctgggcgcggcccttttacctggcgttcgtgttctgcctggccctggggctgctgcaggccattaagctgtacctgcggaggcagcggctgctgcgggacctgcgccccttcccagcgccccccacccactggttccttgggcaccagaagtttattcaggatgataacatggagaagcttgaggaaattattgaaaaataccctcgtgccttccctttctggattgggccctttcaggcatttttctgtatctatgacccagactatgcaaagacacttctgagcagaacagatcccaagtcccagtacctgcagaaattctcacctccacttcttggaaaaggactagcggctctagacggacccaagtggttccagcatcgtcgcctactaactcctggattccattttaacatcctgaaagcatacattgaggtgatggctcattctgtgaaaatgatgctggataagtgggagaagatttgcagcactcaggacacaagcgtggaggtctatgagcacatcaactcgatgtctctggatataatcatgaaatgcgctttcagcaaggagaccaactgccagacaaacagcacccatgatccttatgcaaaagccatatttgaactcagcaaaatcatatttcaccgcttgtacagtttgttgtatcacagtgacataattttcaaactcagccctcagggctaccgcttccagaagttaagccgagtgttgaatcagtacacagatacaataatccaggaaagaaagaaatccctccaggctggggtaaagcaggataacactccgaagaggaagtaccaggattttctggatattgtcctttctgccaaggatgaaagtggtagcagcttctcagatattgatgtacactctgaagtgagcacattcctgttggcaggacatgacaccttggcagcaagcatctcctggatcctttactgcctggctctgaaccctgagcatcaagagagatgccgggaggaggtcaggggcatcctgggggatgggtcttctatcacttggtaagatctgcacccctaaattttcctgctagttttccccctgagattttgctttattttttgcgctggtaccttagtgaccctagtgcctcaggatatgtgtaggtgaaacagaagaagtaggctacttttctgttctttctaaagagagctccaaattattctcttgtctttcagga

SEQ ID NO: 11376 - DNA, 497 bp, Homo sapiens
cacttaccttcccagatggatgcacattgcctgcaggtctttacattcttttcctaagcagttcttagaggctatgggatcctggagaccacagtgacaaagattagtgagtctcttagcacttggagaagtcaaaagataatgctaacatgtgacttaggttttatcacctatgaggagctcagaggataatgctttggtcagacatgaatttcaatgactttcccaaaggcacatagccagttgcagcaaagctaagcccagaatccatgtctctggaatcccagcccagggtctcttccattgtgggacatcatttttatagataatctttgtttggctcagtttgagaccgagctgaaacatcatggaaaatagcaccagcatctttatctgaaagaccaagggggatctttggcctcatcatcataatatcacccttataaatattacacatttaatagttaatatagagccttcagacccattatctcatt

SEQ ID NO: 11377 - DNA, 2357 bp, Homo sapiens
caaaagcagttgggccgaacgaagcgtgcgcgctttggtaaccggctagaaatcccgcacgcgcgcctgcctcctctccccaggcctgagctgcccctcccactgcctttccttcttcccgcgagtcagaagcttcgcgagggcccagagaggcggtggggtgggcgaccctacgccagctccgggcgggagaaagcccaccctctcccgcgccccaggaaaccgccggcgttcggcgctgcgcagagccatggaattctcctggctggagacgcgctgggcgcggcccttttacctggcgttcgtgttctgcctggccctggggctgctgcaggccattaagctgtacctgcggaggcagcggctgctgcgggacctgcgccccttcccagcgccccccacccactggttccttgggcaccagaagtttattcaggatgataacatggagaagcttgaggaaattattgaaaaataccctcgtgccttccctttctggattgggccctttcaggcatttttctgtatctatgacccagactatgcaaagacacttctgagcagaacagatcccaagtcccagtacctgcagaaattctcacctccacttcttggaaaaggactagcggctctagacggacccaagtggttccagcatcgtcgcctactaactcctggattccattttaacatcctgaaagcatacattgaggtgatggctcattctgtgaaaatgatgctggataagtgggagaagatttgcagcactcaggacacaagcgtggaggtctatgagcacatcaactcgatgtctctggatataatcatgaaatgcgctttcagcaaggagaccaactgccagacaaacagcacccatgatccttatgcaaaagccatatttgaactcagcaaaatcatatttcaccgcttgtacagtttgttgtatcacagtgacataattttcaaactcagccctcagggctaccgcttccagaagttaagccgagtgttgaatcagtacacagatacaataatccaggaaagaaagaaatccctccaggctggggtaaagcaggataacactccgaagaggaagtaccaggattttctggatattgtcctttctgccaaggatgaaagtggtagcagcttctcagatattgatgtacactctgaagtgagcacattcctgttggcaggacatgacaccttggcagcaagcatctcctggatcctttactgcctggctctgaaccctgagcatcaagagagatgccgggaggaggtcaggggcatcctgggggatgggtcttctatcacttgggaccagctgggtgagatgtcgtacaccacaatgtgcatcaaggagacgtgccgattgattcctgcagtcccgtccatttccagagatctcagcaagccacttaccttcccagatggatgcacattgcctgcagggatcaccgtggttcttagtatttggggtcttcaccacaaccctgctgtctggaaaaacccaaaggtctttgaccccttgaggttctctcaggagaattctgatcagagacacccctatgcctacttaccattctcagctggatcaaggaactgcattgggcaggagtttgccatgattgagttaaaggtaaccattgccttgattctgctccacttcagagtgactccagaccccaccaggcctcttactttccccaaccattttatcctcaagcccaagaatgggatgtatttgcacctgaagaaactctctgaatgttagatctcagggtacaatgattaaacgtactttgtttttcgaagttaaatttacagctaatgatccaagcagatagaaagggatcaatgtatggtgggaggattggaggttggtgggataggggtctctgtgaagagatccaaaatcatttctaggtacacagtgtgtcagctagatctgtttctatataactttgggagattttcagatcttttctgttaaactttcactactattaatgctgtatacaccaatagactttcatatattttctgttgtttttaaaatagttttcagaattatgcaagtaataagtgcatgtatgctcactgtcaaaaattcccaacactagaaaatcatgtagaataaaaattttaaatctcacttcacttagccgacattccatgccctgaccaatcctactgcttttcctaaaaacagaataatttggtgtgcattctttcagactttttcctatacattttatatgtagaaatgtagcaatgtatttgtatagatgtgatcattcctatattgttattgatttttttcacttaataaaaattcaccttattcctta

SEQ ID NO: 11378 - DNA, 2217 bp, Homo sapiens
aaagtggtatcctgggcccaccagtttttctacactcacccactctggtttgaaccgttcactggcttccagaacatttgagcccaactatgtcaaagctgtgtgtagccacaggggtgaggtgttcttgggagagctgctcttcctgagaacaaagggctcaggctatgatgtggggaggaggcctggacctgtgtcctatgcctgggcagctgaagttcccaccctgcttatcaaggtgcctcctctgggaaccccctagtctctatttgacccaaccaacttcttcacttgcagaacctcaagccctaatatgtatgacttcttcctccagtggattgtttattcaggatgataacatggagaagcttgaggaaattattgaaaaataccctcgtgccttccctttctggattgggccctttcaggcatttttctgtatctatgacccagactatgcaaagacacttctgagcagaacagatcccaagtcccagtacctgcagaaattctcacctccacttcttgtaactcctggattccattttaacatcctgaaagcatacattgaggtgatggctcattctgtgaaaatgatgctggataagtgggagaagatttgcagcactcaggacacaagcgtggaggtctatgagcacatcaactcgatgtctctggatataatcatgaaatgcgctttcagcaaggagaccaactgccagacaaacagcacccatgatccttatgcaaaagccatatttgaactcagcaaaatcatatttcaccgcttgtacagtttgttgtatcacagtgacataattttcaaactcagccctcagggctaccgcttccagaagttaagccgagtgttgaatcagtacacagatacaataatccaggaaagaaagaaatccctccaggctggggtaaagcaggataacactccgaagaggaagtaccaggattttctggatattgtcctttctgccaaggatgaaagtggtagcagcttctcagatattgatgtacactctgaagtgagcacattcctgttggcaggacatgacaccttggcagcaagcatctcctggatcctttactgcctggctctgaaccctgagcatcaagagagatgccgggaggaggtcaggggcatcctgggggatgggtcttctatcacttgggaccagctgggtgagatgtcgtacaccacaatgtgcatcaaggagacgtgccgattgattcctgcagtcccgtccatttccagagatctcagcaagccacttaccttcccagatggatgcacattgcctgcagggatcaccgtggttcttagtatttggggtcttcaccacaaccctgctgtctggaaaaacccaaaggtctttgaccccttgaggttctctcaggagaattctgatcagagacacccctatgcctacttaccattctcagctggatcaaggaactgcattgggcaggagtttgccatgattgagttaaaggtaaccattgccttgattctgctccacttcagagtgactccagaccccaccaggcctcttactttccccaaccattttatcctcaagcccaagaatgggatgtatttgcacctgaagaaactctctgaatgttagatctcagggtacaatgattaaacgtactttgtttttcgaagttaaatttacagctaatgatccaagcagatagaaagggatcaatgtatggtgggaggattggaggttggtgggataggggtctctgtgaagagatccaaaatcatttctaggtacacagtgtgtcagctagatctgtttctatataactttgggagattttcagatcttttctgttaaactttcactactattaatgctgtatacaccaatagactttcatatattttctgttgtttttaaaatagttttcagaattatgcaagtaataagtgcatgtatgctcactgtcaaaaattcccaacactagaaaatcatgtagaataaaaattttaaatctcacttcacttagccgacattccatgccctgaccaatcctactgcttttcctaaaaacagaataatttggtgtgcattctttcagactttttcctatacattttatatgtagaaatgtagcaatgtatttgtatagatgtgatcattcctatattgttattgatttttttcacttaataaaaattcaccttattcctta

SEQ ID NO: 11379 - DNA, 1158 bp, Homo sapiens
  misc_feature (19)..(19): n is a, c, g, or t
ggctggtacggtcggaggngttaggatcctggatcctttactgcctggctctgaaccctgagcatcaagagagatgccgggaggaggtcaggggcatcctgggggatgggtcttctatcacttgggaccagctgggtgagatgtcgtacaccacaatgtgcatcaaggagacgtgccgattgattcctgcagtcccgtccatttccagagatctcagcaagccacttaccttcccagatggatgcacattgcctgcagggatcaccgtggttcttagtatttggggtcttcaccacaaccctgctgtctggaaaaacccaaaggtctttgaccccttgaggttctctcaggagaattctgatcagagacacccctatgcctacttaccattctcagctggatcaaggaactgcattgggcaggagtttgccatgattgagttaaaggtaaccattgccttgattctgctccacttcagagtgactccagaccccaccaggcctcttactttccccaaccattttatcctcaagcccaagaatgggatgtatttgcacctgaagaaactctctgaatgttagatctcagggtacaatgattaaacgtactttgtttttcgaagttaaatttacagctaatgatccaagcagatagaaagggatcaatgtatggtgggaggattggaggttggtgggataggggtctctgtgaagagatccaaaatcatttctaggtacacagtgtgtcagctagatctgtttctatataactttgggagattttcagatcttttctgttaaactttcactactattaatgctgtatacaccaatagactttcatatattttctgttgtttttaaaatagttttcagaattatgcaagtaataagtgcatgtatgctcactgtcaaaaattcccaacactagaaaatcatgtagaataaaaattttaaatctcacttcacttagccgacattccatgccctgaccaatcctactgcttttcctaaaaacagaataatttggtgtgcattctttcagactttttcctatacattttatatgtagaaatgtagcaatgtatttgtatagatgtgatcattcctatattgttattgatttttttcacttaataaaaattcaccttattcctta

SEQ ID NO: 11380 - DNA, 2479 bp, Homo sapiens
tgcggagctgccgccgcgcgccggtggggcgcgagcgtgtgcggggtccgggcgcgggcgcgggcgcgggcgcgggcgcgtgcgggctgcgagccgggaggcggcggcggcgacggcgacggcggcggcatggcggagagcgaggccgagacccccagcaccccgggggagttcgagagcaagtacttcgagttccatggcgtgcggctgccgcccttctgccgcgggaagatggaggagatcgccaacttcccggtgcggcccagcgacgtgtggatcgtcacctaccccaagtccggcaccagcttgctgcaggaggtggtctacttggtgagccagggcgctgaccccgatgagatcggcttgatgaacatcgacgagcagctcccggtcctggagtacccacagccgggcctggacatcatcaaggaactgacctctccccgcctcatcaagagccacctgccctaccgctttctgccctctgacctccacaatggagactccaaggtcatctatatggctcgcaaccccaaggatctggtggtgtcttattatcagttccaccgctctctgcggaccatgagctaccgaggcacctttcaagaattctgccggaggtttatgaatgataagctgggctacggctcctggtttgagcacgtgcaggagttctgggagcaccgcatggactcgaacgtgctttttctcaagtatgaagacatgcatcgggacctggtgacgatggtggagcagctggccagattcctgggggtgtcctgtgacaaggcccagctggaagccctgacggagcactgccaccagctggtggaccagtgctgcaacgctgaggccctgcccgtgggccggggaagagttgggctgtggaaggacatcttcaccgtctccatgaatgagaagtttgacttggtgtataaacagaagatgggaaagtgtgacctcacgtttgacttttatttataataacagaaacaacaacctgcatgctcacaatacccagacagtctactagccaaaagtcctgtatgcattcatttattccttgctggacaaactctggaagcagcgtgtgaaacagcgggggaagggaagagcggcgtgagcggagggagtgtgatgattcccaaccgaaagcagctgtctcgcctttagaacgtgcagcctctccatgtctgattacaaacagtctccacattgcagttccaatggcctggaccgtaaggataaagcctgtaatatatgcaactagaatgtctgccttttcaaccccgtattatttattgtattttatagagcttttcactggaaatctacataaatgtcagtaaaccaaataaaagttcatttccaaggggaatcaggagcgagccacacccgaatggtagaaagatctcagggttaactctttatttttgtagttttattatctaaggcacagccattctgttctcacttggttctgagatagtggtgagaacagaggatgagttgggtctgttggggggaatctggacacttgtttattctgacggagttcacttcttcagaaccttcctgaaatgagcagaaattgttcactaggtcttcagaatggacgtccttctgccagagacttccagcgggcggctccaaaggcccaatgcagaggagcccgcggagcatgtgctgagggaagtctgcctggtgaggctggcaggtgggagtctaatgcagtcaggagcatttgcatgcagtgggtggagagtcggccaccaaaggaccgagttgcgctcggaatttgagctgaattccacagccttactttgtttcctgaagtgatagcctactaatgctggcaagcagatgcttaatagtaaatttctaaaatccccgggtctttatcattcagtttgttctgtgcacctgaggcgctcagccgtgggaggaccattttgcgagtgtagccctgtttcactcggatcaggttggcacggccgcctgcgtgtctgtccacctcatccctccgtgtatctgagggagtaaaggtgaggtctttattgcttcactgcctaattttctcacccacattcgctgaagcgatggagagtcgggggccagtagccagccaaccccgtggggaccggggttgtctgtcatttatgtggctggaaagcacccaaagtggtggtcaggagggtcgctgctgtggaaggggtctccgttcttggtgctgtatttgaaacgggtgtagagagaagcttgtgtttttgtttgtaatggggagaagcgtggccaggcaggtggcacgtggcatcgcatggtgggctcggcagcaccttgcctgtgtttctgtgagggaggctgctttctgtgaaatttcatttatatttttctatttttagtactgtatggatgttactgagcactacacatgatccttctgtgcttgcttgcatctttaataaagacatgttcccgg

SEQ ID NO: 11381 - DNA, 999 bp, Homo sapiens
tgcggagctgccgccgcgcgccggtggggcgcgagcgtgtgcggggtccgggcgcgggcgcgggcgcgggcgcgggcgcgtgcgggctgcgagccgggaggcggcggcggcgacggcgacggcggcggcatggcggagagcgaggccgagacccccagcaccccgggggagttcgagagcaagtacttcgagttccatggcgtgcggctgccgcccttctgccgcgggaagatggaggagatcgccaacttcccggtgcggcccagcgacgtgtggatcgtcacctaccccaagtccggcaccagcttgctgcaggaggtggtctacttggtgagccagggcgctgaccccgatgagatcggcttgatgaacatcgacgagcagctcccggtcctggagtacccacagccgggcctggacatcatcaaggaactgacctctccccgcctcatcaagagccacctgccctaccgctttctgccctctgacctccacaatggagactccaaggtcatctatatggctcgcaaccccaaggatctggtggtgtcttattatcagttccaccgctctctgcggaccatgagctaccgaggcacctttcaagaattctgccggaggtttatgaatgataagctgggctacggctcctggtttgagcacgtgcaggagttctgggagcaccgcatggactcgaacgtgctttttctcaagtatgaagacatgcatcgggacctggtgacgatggtggagcagctggccagattcctgggggtgtcctgtgacaaggcccagctggaagccctgacggagcactgccaccagctggtggaccagtgctgcaacgctgaggccctgcccgtgggccgggcacattgcgtctttgctcggaagatcttcttgagttggtgagaatgcagggccgagtagccagctgcattgcttagatttgattcatgtcacagcataaattgtcttgattccaaatcctaaaccagg

SEQ ID NO: 11382 - DNA, 868 bp, Homo sapiens
tgcggagctgccgccgcgcgccggtggggcgcgagcgtgtgcggggtccgggcgcgggcgcgggcgcgggcgcgggcgcgtgcgggctgcgagccgggaggcggcggcggcgacggcgacggcggcggcatggcggagagcgaggccgagacccccagcaccccgggggagttcgagagcaagtacttcgagttccatggcgtgcggctgccgcccttctgccgcgggaagatggaggagatcgccaacttcccggtgcggcccagcgacgtgtggatcgtcacctaccccaagtccggaactgacctctccccgcctcatcaagagccacctgccctaccgctttctgccctctgacctccacaatggagactccaaggtcatctatatggctcgcaaccccaaggatctggtggtgtcttattatcagttccaccgctctctgcggaccatgagctaccgaggcacctttcaagaattctgccggaggtttatgaatgataagctgggctacggctcctggtttgagcacgtgcaggagttctgggagcaccgcatggactcgaacgtgctttttctcaagtatgaagacatgcatcgggacctggtgacgatggtggagcagctggccagattcctgggggtgtcctgtgacaaggcccagctggaagccctgacggagcactgccaccagctggtggaccagtgctgcaacgctgaggccctgcccgtgggccgggcacattgcgtctttgctcggaagatcttcttgagttggtgagaatgcagggccgagtagccagctgcattgcttagatttgattcatgtcacagcataaattgtcttgattccaaatcctaaaccagg

SEQ ID NO: 11383 - DNA, 2140 bp, Homo sapiens
tgcggagctgccgccgcgcgccggtggggcgcgagcgtgtgcggggtccgggcgcgggcgcgggcgcgggcgcgggcgcgtgcgggctgcgagccgggaggcggcggcggcgacggcgacggcggcggcatggcggagagcgaggccgagacccccagcaccccgggggagttcgagagcaagtacttcgagttccatggcgtgcggctgccgcccttctgccgcgggaagatggaggagatcgccaacttcccggtgcggcccagcgacgtgtggatcgtcacctaccccaagtccgtgggctacggctcctggtttgagcacgtgcaggagttctgggagcaccgcatggactcgaacgtgctttttctcaagtatgaagacatgcatcgggacctggtgacgatggtggagcagctggccagattcctgggggtgtcctgtgacaaggcccagctggaagccctgacggagcactgccaccagctggtggaccagtgctgcaacgctgaggccctgcccgtgggccggggaagagttgggctgtggaaggacatcttcaccgtctccatgaatgagaagtttgacttggtgtataaacagaagatgggaaagtgtgacctcacgtttgacttttatttataataacagaaacaacaacctgcatgctcacaatacccagacagtctactagccaaaagtcctgtatgcattcatttattccttgctggacaaactctggaagcagcgtgtgaaacagcgggggaagggaagagcggcgtgagcggagggagtgtgatgattcccaaccgaaagcagctgtctcgcctttagaacgtgcagcctctccatgtctgattacaaacagtctccacattgcagttccaatggcctggaccgtaaggataaagcctgtaatatatgcaactagaatgtctgccttttcaaccccgtattatttattgtattttatagagcttttcactggaaatctacataaatgtcagtaaaccaaataaaagttcatttccaaggggaatcaggagcgagccacacccgaatggtagaaagatctcagggttaactctttatttttgtagttttattatctaaggcacagccattctgttctcacttggttctgagatagtggtgagaacagaggatgagttgggtctgttggggggaatctggacacttgtttattctgacggagttcacttcttcagaaccttcctgaaatgagcagaaattgttcactaggtcttcagaatggacgtccttctgccagagacttccagcgggcggctccaaaggcccaatgcagaggagcccgcggagcatgtgctgagggaagtctgcctggtgaggctggcaggtgggagtctaatgcagtcaggagcatttgcatgcagtgggtggagagtcggccaccaaaggaccgagttgcgctcggaatttgagctgaattccacagccttactttgtttcctgaagtgatagcctactaatgctggcaagcagatgcttaatagtaaatttctaaaatccccgggtctttatcattcagtttgttctgtgcacctgaggcgctcagccgtgggaggaccattttgcgagtgtagccctgtttcactcggatcaggttggcacggccgcctgcgtgtctgtccacctcatccctccgtgtatctgagggagtaaaggtgaggtctttattgcttcactgcctaattttctcacccacattcgctgaagcgatggagagtcgggggccagtagccagccaaccccgtggggaccggggttgtctgtcatttatgtggctggaaagcacccaaagtggtggtcaggagggtcgctgctgtggaaggggtctccgttcttggtgctgtatttgaaacgggtgtagagagaagcttgtgtttttgtttgtaatggggagaagcgtggccaggcaggtggcacgtggcatcgcatggtgggctcggcagcaccttgcctgtgtttctgtgagggaggctgctttctgtgaaatttcatttatatttttctatttttagtactgtatggatgttactgagcactacacatgatccttctgtgcttgcttgcatctttaataaagacatgttcccgg

SEQ ID NO: 11384 - DNA, 2592 bp, Homo sapiens
tgcggagctgccgccgcgcgccggtggggcgcgagcgtgtgcggggtccgggcgcgggcgcgggcgcgggcgcgggcgcgtgcgggctgcgagccgggaggcggcggcggcgacggcgacggcggcggcatggcggagagcgaggccgagacccccagcaccccgggggagttcgagagcaagtacttcgagttccatggcgtgcggctgccgcccttctgccgcgggaagatggaggagatcgccaacttcccggtgcggcccagcgacgtgtggatcgtcacctaccccaagtccggcaccagcttgctgcaggaggtggtctacttggtgagccagggcgctgaccccgatgagatcggcttgatgaacatcgacgagcagctcccggtcctggagtacccacagccgggcctggacatcatcaaggaactgacctctccccgcctcatcaagagccacctgccctaccgctttctgccctctgacctccacaatggagactccaaggtcatctatatggctcgcaaccccaaggatctggtggtgtcttattatcagttccaccgctctctgcggaccatgagctaccgaggcacctttcaagaattctgccggaggtttatgaatgataagctgggctacggctcctggtttgagcacgtgcaggagttctgggagcaccgcatggactcgaacgtgctttttctcaagtatgaagacatgcatcgggacctggtgacgatggtggagcagctggccagattcctgggggtgtcctgtgacaaggcccagctggaagccctgacggagcactgccaccagctggtggaccagtgctgcaacgctgaggccctgcccgtgggccggggaagagttgggctgtggaaggacatcttcaccgtctccatgaatgagaagtttgacttggtgtataaacagaagatgggaaagtgtgacctcacgtttgacttttatttataataacagaaacaacaacctgcatgctcacaatacccagacagtctactagccaaaagtcctgtatgcattcatttattccttgctggacaaactctggaagcagcgtgtgaaacagcgggggaagggaagagcggcgtgagcggagggagtgtgatgattcccaaccgaaagcagctgtctcgcctttagaacgtgcagcctctccatgtctgattacaaacagtctccacattgcagttccaatggcctggaccgtaaggataaagcctgtaatatatgcaactagaatgtctgccttttcaaccccgtattatttattgtattttatagagcttttcactggaaatctacataaatgtcagtaaaccaaataaaagttcatttccaaggggaatcaggagcgagccacacccgaatggtagaaagatctcagggttaactctttatttttgtagttttattatctaaggcacagccattctgttctcacttggttctgagatagtggtgagaacagaggatgagttgggtctgttggggggaatctggacacttgtttattctgacggagttcacttcttcagaaccttcctgaaatgagcagaaattgttcactaggtcttcagaatggacgtccttctgccagagacttccagcgggcggctccaaaggcccaatgcagaggagcccgcggagcatgtgctgagggaagtctgcctggtgaggctggcaggtgggagtctaatgcagtcaggagcatttgcatgcagtgggtggagagtcggccaccaaaggaccgagttgcgctcggaatttgagctgaattccacagccttactttgtttcctgaagtgatagcctactaatgctggcaagcagatgcttaatagtaaatttctaaaatccccgggtctttatcattcagtttgttctgtgcacctgaggcgctcagccgtgggaggaccattttgcgagtgtagccctgtttcactcggatcaggttggcacggccgcctgcgtgtctgtccacctcatccctccgtgtatctgagggagtaaaggtgaggtctttattgcttcactgcctaattttctcacccacattcgctgaagcgatggagagtcgggggccagtagccagccaaccccgtggggaccggggttgtctgtcatttatgtggctggaaagcacccaaagtggtggtcaggagggtcgctgctgtggaaggggtctccgttcttggtgctgtatttgaaacgggtgtagagagaagcttgtgtttttgtttgtaatggggagaagcgtggccaggcaggtggcacgtggcatcgcatggtgggctcggcagcaccttgcctgtgtttctgtgagggaggctgctttctgtgaaatttcatttatatttttctatttttagtactgtatggatgttactgagcactacacatgatccttctgtgcttcagacaaggtagagccgagagacaaggtagagccgagagacaaggtagagccgagagacaaggtagagccgagagacaaggtagagccgagagacaaggtagagccgagagacaaggtagagccgagagacaaggtagagcgag

SEQ ID NO: 11385 - DNA, 996 bp, Homo sapiens
tgcggagctgccgccgcgcgccggtggggcgcgagcgtgtgcggggtccgggcgcgggcgcgggcgcgggcgcgggcgcgtgcgggctgcgagccgggaggcggcggcggcgacggcgacggcggcggcatggcggagagcgaggccgagacccccagcaccccgggggagttcgagagcaagtacttcgagttccatggcgtgcggctgccgcccttctgccgcgggaagatggaggagatcgccaacttcccggtgcggcccagcgacgtgtggatcgtcacctaccccaagtccggcaccagcttgctgcaggaggtggtctacttggtgagccagggcgctgaccccgatgagatcggcttgatgaacatcgacgagcagctcccggtcctggagtacccacagccgggcctggacatcatcaaggaactgacctctccccgcctcatcaagagccacctgccctaccgctttctgccctctgacctccacaatggagactccaaggtcatctatatggctcgcaaccccaaggatctggtggtgtcttattatcagttccaccgctctctgcggaccatgagctaccgaggcacctttcaagaattctgccggaggtttatgaatgataagctgggctacggctcctggtttgagcacgtgcaggagttctgggagcaccgcatggactcgaacgtgctttttctcaagtatgaagacatgcatcgggacctggtgacgatggtggagcagctggccagattcctgggggtgtcctgtgacaaggcccagctggaagccctgacggagcactgccaccagctggtggaccagtgctgcaacgctgaggccctgcccgtgggccgggaagagttgggctgtggggaccaggggcatcaaagggcctttgggaagggcacggcatgtgggggtggctgacctttagctcgatggtcctcctccttggggcaccgccacccgcggagccttgta

SEQ ID NO: 11386 - DNA, 164 bp, Homo sapiens
gatttagctgatgcacactcttcaccacctcccatacttcaatgcttttttcactttttttggttgaattactatatggtttgttattactcttacaaatgagctagccagggtagtatgattgcattttctttcctatacaaaccttttgttttccctgaagt

SEQ ID NO: 11387 - DNA, 390 bp, Homo sapiens
atcttgagttgtataaagatatttgagcaggtgtcttttacaaaacagcagaattctttactgaagctataaaataaggaaaagtgcataaatttatagttcaacaaactgtaaagataattcttgtaaaaaattttattccactaaaattactcatgattttcctttccaaagataaacactattaccatcttgatttatagtcctctagtctttttaagcatagatttatgcacaaatctagatgaagattgcatataaacatatgcattcatagcaccgccactcaagtcaagatatggtattccttactaattgcagtcccctacctcggtctattattctgacatgtgtggtttgaaataatgctttttaaactctttttcatca

SEQ ID NO: 11388 - DNA, 682 bp, Homo sapiens
ccaccgtgcctggccaggatttttaatctgtgtaattcggacagtgtgattgcctgtgttgaggaaacccagttactcagtgatagattgtttacacgtgagaccagctctcccatgtcaactgaatatctaaacacaagttacttctaacattcaaggaaacaagtcagtattttaaatagccaattcattgtataaaaatagaaactgatgttttcaaaggtgacttaaaatagtatttttatgaaaaataagtgtagacagttctagagagtagcaactcgtacattcatgtatgaggttctgtgtggaagtatgtcttcatacatacccatggcccggcctcagtgagcaagcgaggcgggcgctgttagctcagggctccttgtttgatctgcgcctttacccagtcccttcctgccatgatttcatagcgcattctagacatactttctctgtaaatatctcactctgtatctccaaaagataaagactttaagacacatgaccagaatgtcattttcacacctaaaactctcagagattccttaatatctctatccggtcagcattcaaacttctccaattgtctgagtttaagaatttgttcagggagtccagattcagggtgtctcatgtcccttttccccatagggtgctccttggagcttgtgtgttgagg

SEQ ID NO: 11389 - DNA, 317 bp, Homo sapiens
aaaacaaaaaaacactatctgtagatacactgacattacatgaaataagatacagtttctgatttttttcttttttaagttacaatctaatttaaaagtgtgtgttcaccagggaggcagtgcaggggctcactgaggcctgttaggtgtggccctcccctccctgggcaggtcagatctgagcaccttcagctgcagggccaccaagctccctgtgcaggtggagccatgggtgcctgcaccgtagctgggcaggtctcggcagccctccttgtccccgtgctcgtatttaaacttgcagccaatctcctcttctc

SEQ ID NO: 11390 - DNA, 462 bp, Homo sapiens
actgccttaaccactattgctactggaactgccttagccaccttggtatcgtggtttggcaaagtattggcctctaccaccatagggcccagagcttctgcctccaaagtttcctcccttcatgggtccaaaatttgaagactgattgttgtcattgccaaaatcattgtagcttttaccacctccaaaattgcttcaatcattaccaaatctattatagcaatccccactgccaccatatccatcaccaccaccatggctgccaccaaagccaccacgatcacagaacttgatgactgtatttgtgactaattgtataatagtttctgttctgtggaaagtaaagcattccaacacagggtttcagtgtagattgttttgttttgtacccatgctgttgattgctaaatgttttaataatctgatcatgatactgaataaatgtctttttttttttttaac

SEQ ID NO: 11391 - DNA, 642 bp, Homo sapiens
ttcatgaagcagagaaactcatgttttaagtcaaacttggtcctcatctttttcttttatcagtggaaatctaagttcaagtttaccttgtcctacactgcaaatgttatagaccatttttgtttgtcttttactgtgctaagtgcatggaacattaaaggaaccctaggaagagattcttcatatgtggctcagttgaagagaagtacttatgtagttctaagtatttttattagatagtgtgcaccaactctgtagaaacacagaattttgttggaaaaaggaacttagtttttgtaacatgttcattttactgctcaaaaaaacgaatgctgaaagatttaatgacttgcctacagttactggtagaaccaagtgaccgaagctctgtcttcaatattttgtgtctctgtgccatcctatcccccttatccatctttacacccccagcccccaattaaatataggcaattataatagttcagttgtgcctcttcagtatgggtctgagtcctgtcagtgtgggcatatctgtggtcttttaaaaaataaatctctcagtatttttcagagtaggctattagcaagaagtaggctataaacacaggaaaccagtgactgccccttttcatggaactgatg

SEQ ID NO: 11392 - DNA, 218 bp, Homo sapiens
cgggaggcagaggttgcagtgagccaagagagagccactgcactccagcctgggtgacagagtgagactccatctcaaaaaaaaaaaaaaaaaaaaaagaaaaagtaaaaagaagaggtgaggaagtgggggcagatggaaggccaatgtaaggacctgggcttttactctggggaaacattggaggattgttagtagagaatttaactgaggtttca

SEQ ID NO: 11393 - DNA, 322 bp, Homo sapiens
tacttaatgtcatatacatcttctcagtgaatagagagagacctgattccttttcatagctgcatattattccagtgtgtgagtgttatttatagttttccctgtgacctacaatgttgcaatgaataatctactaaataatttttcatatctcatatatttgtgagataaattcctagacgtagaccttttaggtcgaacagtgtgtgtgttgttacatttctaatgagcaccccattctcttctctgcgagaagtgtgatttgaagatgtgcagggaagaggaacgtgtaggaagcggcacatgcagagatcactgctgg

SEQ ID NO: 11394 - DNA, 848 bp, Homo sapiens
cttatattcagggatgacgtatctcatggaagaacagggctcaacgagccacttaaatgtcttcctatcaaatgttaaggttctagaaaccaaatggtgggtatattatccaacatatgccgtgaaagcagagccaatcctgggggaaagcttctctcctaatggtaaggtgtccatatcctctgccccaagaaccaagacaagtgatctgacaagtgtgaagactgcttttcaacatgaaaaagagttttcttaaactcaagcatgatattggctctactttgaatatcagttacgaaaattcataacgagctgaggtatcttcactaacattgcaaattaatttcttgtattcatcacaatgacatttatgtgtatttgaaaagtaatccatatggatgagcatatttttcattcactctacagacggaacatgcacgctggtttgcagatcccttgcagtgactctacagctcccaggaatctgaggttcacaaggtgaaacctaccaggccaaacaatttaaaattggttttgttttgaaaatccagtaagtatgatggcaatgtcttgcagaaattcctcttttagtattccagtctgtgggctctggcagaagtaatagtctgctgcaaacagatcactcttttttgtttgcaaagtcttcgtaccagctgaatcacagcttgcttttcacttttcgtaacaccttgcaacatcgcaaaatatttgctggagtttgtgaagggcggctgcagaattagtaaactgaaaggaggccttcctttactcccacccctcccttccagctatgtgtacaattaatgaccaatctgtttgggctaaaa

SEQ ID NO: 11395 - DNA, 482 bp, Homo sapiens
taaataatacagtctatgtttttgaaagtttgttcctgaagtttctttccttcatttaacattgtctaatctgctttctcaacaccaattcaacacaggagcatgggagagccaagttaaataagcacgataattctgctggaaactacatatagtctgttgcgtagaagcatacagtaaacattctgcaccgagcactgtgtttcatccccagcagatgacattccttatgactttatatcccatgggctaaattgattaatataatatcgaactactatttgtgtattttgcctaattgcccaactacataaatcattatgaggcaagaggggacggttttttttccttcttactcacaagcctgctgcttttctgaccttgccacggattagcgaggagtaaggttgtaaatgcagagctggcaaatgtcttccgaaggcaattactgtgaaactttgttctaacattatgaaatgcgg

SEQ ID NO: 11396 - DNA, 375 bp, Homo sapiens
tctttgggtactgataattttcaaagaaaaacttatacaaaagcagaattattattaagactatattgaataaatttgtttttgatgattcagaaagtttaacagaatctgaccctatcctagtcatcattaggaccactaattttcttgctgataatatattatgtaaaaagcaagggttacaaatagtacgtatagtatgatctgaattttgcaaaaactacatatataaatgtaaaacagaaatcggaaaggtatacattgaaatgtaaataatgattgtgtctaggcgttggggatcataattttaattttttatttattattttattttattattattttttaggggcagagtctcactctgttgcccag

SEQ ID NO: 11397 - DNA, 2566 bp, Homo sapiens
  misc_feature (200)..(200): n is a, c, g, or t
gtgtggtgacatgattgtggccgtaaatgggctgtcaaccgtgggcatgagccactctgcactagttcccatgttgaaggagcagaggaacaaagtcactctgaccgttatttgttggcctggcagccttgtatagattttggaaattggtttcaaatcttgcatcttccttttttagatttttgaaagaaaaccctttngtttcattgtgtttgtggtttaggagctgctgacactgctggtatacacagggccaaaacccactaagattgtccgtttatgtttatttaaatggtttcctaagttagttacatttcttttagcttggaaacagtcttccactaacctttgtgagtttatattttcagaattcagacttagttgttaaaatgttacctatggtaatgagcaaagctcacccaaactgtgccccagatggagtaaagaccttctggtgggtctttgttttcagtaactgaatcatagaacgagttctgtatccctcaggcctgatgtcagcaaagccagtaacaacagcgtgtactgccactgtcataaccaataccatgaatgaatatactttaaattttggtgataactgttccccatttttttttgaaccacagtctcactctcacccaggctggagtgcagtggcacaatctcagctcactgcaagctccgcctcctgggttcacgccattctcccacctcagcctcccgagtagctgggactacaggcgtgcgccaccatgcccagctaattttttgtacttttagtagagacggggtttcaccgtgttagccaggatggtctcgatctcctgaccttgtgatctgcccgcctcagcctcccaaagtgctgggattacaggtgtgagctgccgcacccggccgttcccattttttattggtgccaacatttcaaaacttcatactgtttataaactgattttctggtttatttctactgtaatctctcaatattcatagaagatgaagaaataagtctgacaacactaaagaaatttcttaatatactattattagaatagtagaggataaaagataatgttatccagttacaaaggaatttggatgataattataacttaatgttagagatggtaaagctgcacttacttgaacagcccaaaagcattaaaaatctatttccagaggaatgttttgctatgtagggaaattttgaagtagtttttgctaaaaaattatttctagagttgtgttattcttagcagtaatcttggctagaaatgtttttgtgatttatgcgattaaacgaaatgataaagataaaaccatattattaaatacctatatatcacagctaagtaggagaaagggagacctttttattttgttcaggtaggagtatttcttgtgtattttagaaacaattatttttcccattatttcttatgagattagttgtttcaagtaggagacagaaaagttctgttttgttggaaatgtaggttttagatgtatctttcagtcagctctcagtcactagactatttcatattttttgaaatgtttttgaaaattatgactagcccattttttgtcctttattcaacatacttatcctctgaacacataaataagtgaataagataaaaatatctttaccttattaatattatacatacttgaaaaaaatttcatttagaaacctagttcagaatctgagcaaatttacaagtgacctctgtaataaatggtattgataatcagagaatgtatttcagaatactacagtacaatatattatgaagcatgaccactttattttgaaacttagcaattgtattgctggggtttattgtatctgtagcatgtcactgattatttcagttagttttataatgatttttaaaaaacatatctatttggaataagatacagcaacaatcattgctactgacttgttcaaccccttagttacactgtatgatcaacatataacaagatacagtggaatggcccatacagtatattactgttgtgtgatgatggctttggaagcagttgattttgaaatgctttgatattctaattgacatggaacaagttttttccctgctccccaaatagaattttgtaaccaactttgctatttttttaaagtttgtaagaatgtgtcatttcttggggagtagccatccatcaacaaatatcctgactgctactttgttatatacaaaatacttacattgaacctggtggcataatgagtattttgaaagaagaaatttcttcactctcatttttatagaaatcttggaatcagcttaagctgtagcttttatgacaaaagacagtcatttttggtcagagtgatatttggtgacggaaacttgttcataatttattgttactatagaactatttggattttctcatttttagttctgatagttaaatattttggtttgttctgtgccttcagtttaaattatttcaggatttttcagatgtttaaataatggtgtgaatcattcaggatggaaataaaagtcatcctttctgtaaaaaaaaaaag

SEQ ID NO: 11398 - DNA, 319 bp, Homo sapiens
caggcacccgccaccacgcccggctaattttttcgtattttcagtagagacggagtttcactgttgttagccaggatggtctcgatctcctgacctcgtgatccgcctgcctcggcctcccaaagtgctgggattatgggcgtgagccactgtgcccagccaaggttaaaagatttgaattttaatgataaaattagggatcttgaagtaggactgtcaagaaaggaacttgtgattgtgggtaattgacctgtgttgatgacagcacaatgttactgggcagagtaggtgagaaaaatactgaatattatcaaggaag

SEQ ID NO: 11399 - DNA, 315 bp, Homo sapiens
atataataatgttagcagtttatcctagaatttgttacaactaataggtaagatgatgaaaacattggtctcctcctgaaattgtataataaataaaatagtctatacactaattagaatgtaattatatatagcaaccaaagtttatgtaatactttgggaccaacaacaatgatttgtataataataaaatatttcattataaaatttaaatatacattctagtagagtacaagaaaaaaatgtcagatcgagtgaaccatcatatgaaccaccaaatttagcctcacactaacagaagaggaagacttattt

SEQ ID NO: 11400 - DNA, 428 bp, Homo sapiens
gtgctgagtcatgtaggagtgtgtgcttttttgaatagtcatgctgaagtatttaagggtgaagagttatgctatctataatttactctctaaaatcataatcactctgtgattttccctgtatacacgttaataaatttgtatgccttttctccaattaaaaacaatactgtaatcccagcactttggaaggccgaggcaggcagatcacatgaggccaggagttcaagaccagcctggccaacatgataaaaccccatctctactaaaaatacaaaaattagccaggcgtgctggtgcacatctgtaatcccagctactcgggaggctgaggcacaagaactgcttgagcccaggaggcggaggttgtagtgagctgaggtcatgccactgcactccagcctgggcaacagagagagcctctgttt

SEQ ID NO: 11401 - DNA, 460 bp, Homo sapiens
accaaaaataaccatatgggccaggcacggtggctcacacctatcattccaacactttgggaggtcaaggtgggaagattgcttgagcctaggaatttgcgaccagcctgggaaacatggcaaaatcccatctccacaaaaaatacaaaaattagccgggtgtggtggcacatgcctgtagtcccagctactcagaaggctgaggtgggaggatcacctaagcccagggaggtcagggctgtggtgagccatgaccctgccagtgcactccagactgggtgacagagtgagaccgtttcaaaaaaataaataaaaaataaaaaatattctggttatatttattgtattgcacaaccatatgaatttttcatctactgttctgagtaaatttaattgtgtatccatatgcgataagcggtgtattccatcttaaattgaaatagtggcaaatgtaaaaata

SEQ ID NO: 11402 - DNA, 582 bp, Homo sapiens
ggaagctggtaagccttgccttttatacacagttctgaattttaactctgaggagaggagttttttggggtataattctgtgtcgtaagaggctgccctatgtgttgtaggatgtttagcagcatctccagcctcaacccactcgatgccagtagtatccagttgtgacagctaaaaatgtctccagatattgccaacagttgtcccaggatgagaaccactgctgcaaaggtcacacgatgtggttgggcagggtgagtatgggaccttgagctggggtaagacctgaggggcagagttgtgagagttatggggaacgtttccaatttcttctatggagaaatgggaagagatggtggatgaaggaaatggagtggcatggtgggaatggagtatgtaaattcctaaaagagaaggaaagaatcctaaaggctgaaataattttttaagacagtagataaaaagtcatgtagcatttaaggagacttattttttctagaaggttgatttatatgtttattgagagggaaggaaagttagttaatcagaaaagaagggggaggtggggatggtaaatgagtt

SEQ ID NO: 11403 - DNA, 779 bp, Homo sapiens
gtgtgtgtgtgtgtgtgtgtgtatacgatatttggggtaaatacttttcccagcttctttgacttttaattttgcttatactttattggaaatacagaacctttattttattattattattatactttaagttctgggatacatgggcagaacgtgcaggtttgttacataggtataaacgtgccatggtggtttgctgcacccatcaaaccaccatctacattaggtatttctcctaatgctatccctcccatagtccgccacccaccaacaggccctggtgtgtgatgttctgctccctgtgtccatgtgttctcatgagaacctttatattttatgtagtggagtaagttattttatcttttttttttcctgtgtaacttctgttacctcaggcttaggaattccttcctacccagaagttagaaaatattcatctatttttttttaaagtttcatttttaacattaaactcaccaaattagaagtaagatgtggccaggcacagtggctcacacctgtaatctcagtgctttgcgggggctaaggtggaaaaatcacttgaggctaggagttcaagacaagcctgggtaacacagtgagaccccacctctaccaaaaaatttaaaaattaggcaggcatggtagcatgtgtctgtagtcctagctgcttgggaggctgaggtgggaggatcacttcagcccagaagcttgaggctgtagttagctattatcatgctattgcattccagcctaggcaacagagcaagaaccctgtg

SEQ ID NO: 11404 - DNA, 547 bp, Homo sapiens
gtgcttgagtgtagggagtgaaaaatctaggtgtgtgaagctgtttgtgtcagtttgtgtgtgtgactgcaggtgtacatgtgtttgcaagtgtttgagaatgtgtctgtcctttacataccacttctgggcctcctcgcacctccccagtgaatctgtctcctccaagacacctagccttccttcagcaactcagcgtttctacctatattacggactttgtaacctttcaaataagcacagaacccttgctcccggaggagtcaatttagactcacttgcctggtctatcatcaagctcctcagctgaggcccacatggtggtgccaatgaggctggaccaacctgctctgacaaccaggctcccacagatctcaacgaaggcatcctaaagaggcctgcaattgagggtgggctctgagggatttcactctggctgcttcatgactccctgatactcaagtatattttcccaaagaccacggatgctgtgaggataaacactacatctgcaccaataaaaaatccatatattaaaatgttaata

SEQ ID NO: 11405 - DNA, 437 bp, Homo sapiens
gaacttaaaattaaatttgaagcactgtagagatcagttaaagtaaaggcccctgagtcaggcaacctaggcttgctccccagcttccctagttttagggtgaatttggccaaatgtttaacttctccacgtgtcaggctgtgtctgaaaaagaaaatgacaatagtactccatcttagagttttttaagataacttacctggtaccaagtaaatgcagaataaactctaaccactattatttaagtatttttaaagccatctaatagaaggatagaaaattatttgataagaattcaaccttgaggtagagaaaatggttaaaagactatttgaagtagttcatgttaccgaagatactattataaattaaggttgacagcatggatgcagagaaagtggcagactttagagaaaactttacatgccactcatttg

SEQ ID NO: 11406 - DNA, 488 bp, Homo sapiens
agtctggtaaagcccattttcttgaagtctttgttccttcacatgagaacggtgtgcttccaggatatgtcacttattatgttaaactacaatttaaaaccatagaatttgctcattcagcaagtgtttattgagtcctgatgtgccaggtactgggcaaagcaccggtcataaaaaggtgaaagaagtgtaaaacaaatagaaaaaaacataggggaaaattaccatgacattggtctgggcaagaagttccttccttccttccttccttccttccttccttccttccttccttccttccttccttccttccttcttccttccttcctccctccttccctccctgcctctctctctttctttctttctgaaaaggggtttattttcaacagacatttctttttataccgaggtgaaatgtcatcatcataataattttgcaatgttacataccctgttgagaccattaaaaaattaggttcatggta

SEQ ID NO: 11407 - DNA, 344 bp, Homo sapiens
gggttcggatctcgaacctggggccttgaagaggcccgcgcttggggtttttaggcaacagcaggcctccaagcagagtcctggtgtcccggaccgaatcactccccgagagacgggcaaggagatggaccgccagccaggaataatgggaacccttcgcttggcaaacgatagtttccaaacttaaggttgtggatgaaactttttggtgcggctgctgcaggagccccagccccggggtgctgctgacccgaggcaagggagccggcgcactcacgcttagccgctaaggagtctgcggtgtcggcgaaagctccggacatgattttggaaggtcgtaggtt

SEQ ID NO: 11408 - DNA, 438 bp, Homo sapiens
gtctttccagtaggagttgggaaataactttttttcctcttaaactcatgctgcacaattaaagaaaaatgttttttctctgaacctttccttcaaatacttggcagagattactgccagaagaatgagatgggcacagtggctgatgcctggtaatcccatcactttgggaggacacgatggtaagattgcttgagcccaggagttcgagactagcctgggcagcatagggagacccatctctacaatttttttttttaaagccaggcagggtggtatgtgtctgtggtcccagctactcaggaggctgaggtgggaagatcacatgagcctgggaggtcgaggctgtagtgagctgttatcatgccactgtactctatctagcctgggcaacagaggctagagcaactctgtctcaaaaataaaataaaataaaat

SEQ ID NO: 11409 - DNA, 903 bp, Homo sapiens
gcaccagaagaagggacaagcagttctgtatgaaggtggaaaaggctatggaaaaagccagctgttggctgaaataaactttctggcacagaaagaagggcatagctacccttcacaggtgctttggaaacccactttattgtgaggtcctatgccaggaccttctctctaaggacgtgttgctctttcatgtcctacaaaaggaggaagaggaaaacagcaagtgggaaaccctctcagccaatgccatgaaatccataatgtatagtatttctcctgccaactctgaggaaggccaggaactttatgtctgcacagtcaaggatgatgtgaacttggatacagtacttctcctaccctttttgaaagaaatagcagtaagccaactggatcaactgagcccagaggaacagttgctggtcaagtgtgctgcaatcattggtcactccttccatatagatttgctgcagcacctcctgcctggctgggataaaaataagctacttcaggtcttgagagctcttgtggatatacatgtgctctgctggtctgacaagagccaagagcttcctgctgagcccatattaatgccttcctctatcgacatcattgatggaaccaaagagaagaagacaaagttagatggtaggtatgatgaaaggaggtaggtatgatgaaggacgcgtccttcatcatacctaccaatgaatatcttcctattcccagtctaagagtttttccattatattctacaaatccatcatttccctaaagaaacaaacgaaaaaaatccttgcttttggctatagttcataaatgatttaatagatcatcatttcttcattgtaaatgtagtgttttaaccatacaatgtaggtgggtatgggtaggtatgatgaaaga

SEQ ID NO: 11410 - DNA, 1041 bp, Homo sapiens
gcaccagaagaagggacaagcagttctgtatgaaggtggaaaaggctatggaaaaagccagctgttggctgaaataaactttctggcacagaaagaagggcatagctacccttcacaggtgctttggaaacccactttattgtgaggtcctatgccaggaccttctctctaaggacgtgttgctctttcatgtcctacaaaaggaggaagaggaaaacagcaagtgggaaaccctctcagccaatgccatgaaatccataatgtatagtatttctcctgccaactctgaggaaggccaggaactttatgtctgcacagtcaaggatgatgtgaacttggatacagtacttctcctaccctttttgaaagaaatagcagtaagccaactggatcaactgagcccagaggaacagttgctggtcaagtgtgctgcaatcattggtcactccttccatatagatttgctgcagcacctcctgcctggctgggataaaaataagctacttcaggtcttgagagctcttgtggatatacatgtgctctgctggtctgacaagagccaagagcttcctgctgagcccatattaatgccttcctctatcgacatcattgatggaaccaaagagaagaagacaaagttagatggtgggtcagcctctcttctcaggctacaagaagaattatccctaccacaaactgaggtgttggaatttggagtgcctctgctacgggcagctgcttgggagctctggcccaaggaacaacagatagctctgcaccttgaatgtgcctgctttctccaagttttggcctgccgctgtgggagctgccatggaggagactttgtcccctttcatcattttgcagtttgttctactaagaattccaaggggacctctcgattctgtacttacagagatactggctcagtgctaacacaagtgatcacagaaaaattgcagctgccttctccccaagaacagaggaagagttcctagatcaagtgaagaggaagctggctcagaccagccctgagaaaga

SEQ ID NO: 11411 - DNA, 715 bp, Homo sapiens
acggagcccggcgaggcgtgcggcggccgcacaagccgcacggcgtccctggtgagcgggctgctcaacgagctgtacagctgcacagaggaggaggaggcggcgggcgggggccgcggggccgagggccgccggcggcgccgcgacagcctcgacagctccaccgaggcctcgggctccgacgtggtcctgggcggccgcagcggtgccggcgactcccgcgtgctgcaggagctgcaggagcgaccgagccagcggcatcagatgctgtacctgcggcagaaaggtgagggccgggcgcagcagggtcccgggggcttcctggagccgggttgtcctcgccgtctctgcccgcgctccagcgcgcacctgggctgctcggcggagcgctcagatactgtctctttggatctgacggtggtacccaccgtggcacagatttatgtccacacttagttcttaagttctccggagtaattgaatcaagcgtcagttgatggagtgggcagtttccccgctcttccctcctcccatctcccggtgtgttcgcggaggccccaggggagaggcagcccagattctaatttcacctgaacagctgttaggacagggttggaggttctgatacgtatacctgacctacctagagggcgccgccagaatcgaggcgagtcgtagggctgttctttcctttttttttttttgtttttttgtt

SEQ ID NO: 11412 - DNA, 7637 bp, Homo sapiens
  misc_feature (7175)..(7175): n is a, c, g, or t
acggagcccggcgaggcgtgcggcggccgcacaagccgcacggcgtccctggtgagcgggctgctcaacgagctgtacagctgcacagaggaggaggaggcggcgggcgggggccgcggggccgagggccgccggcggcgccgcgacagcctcgacagctccaccgaggcctcgggctccgacgtggtcctgggcggccgcagcggtgccggcgactcccgcgtgctgcaggagctgcaggagcgaccgagccagcggcatcagatgctgtacctgcggcagaaagacgctaatgaactgaagacgatccttcgagagctaaagtacagaattggcatccagtcggccaagttacttcggcatctgaagcagaaagataggcttctgcataaagtgcagaggaactgtgatattgtgactgcctgcttgcaggctgtgtcacagaagagaacatggcagaacagtatgctcaggagttgataccaagttgaaattcactcttgagccatctttaggtcaaaatggttttcagcagtggtacgatgctctcaaggcagttgccaggctatccacaggaataccaaaggaatggaggagaaaggtttggttgaccttggcagatcattatttgcacagtatagccattgactgggacaaaaccatgcgcttcactttcaatgaaaggagtaatcctgatgatgactccatgggaattcagatagtcaaggaccttcaccgcacaggctgtagttcttactgtggccaggaggctgagcaggacagggttgtgttgaagcgggtgctgctggcctatgcccgatggaacaaaactgttgggtactgccaaggctttaacatcctggctgcactaattctggaagtgatggaaggcaatgaaggggatgccctgaaaattatgatttaccttattgataaggtacttcccgaaagctatttcgtcaataatctccgggcattgtctgtggatatggctgtcttcagagaccttttaagaatgaagctgccggaattatctcagcacctggatactcttcagagaactgcaaacaaagaaagtggaggtggatatgagcccccacttacaaatgtcttcacgatgcagtggtttctgactctctttgccacatgcctccctaatcagaccgttttaaagatctgggattcagtcttctttgaaggttcagaaatcatcctaagggtgtcgctggctatctgggcaaaattaggagagcagatagaatgttgtgaaacagcagatgaattctacagcaccatggggcgccttacccaggagatgctagagaatgatcttctgcaaagccatgaactcatgcagactgtttattccatggctccgttccctttcccacaattggcagagttgagggaaaaatacacctacaacattacaccgttcccagccacagttaaacccacctcagtttctggacgacatagtaaggccagagacagtgatgaagagaatgacccagacgatgaggatgctgtcgttaatgcagtggggtgtcttggaccttttagtgggttcctggctcctgaactgcagaagtaccaaaaacaaattaaagagccaaatgaggagcagagtctgagatctaataacattgcagagctgagtccaggagcaatcaattcctgtcgaagtgaataccatgcagcttttaacagtatgatgatggaacgcatgaccacagatatcaatgcactgaagcggcagtactctcgaattaaaaagaagcaacagcagcaggttcatcaggtgtacatcagggcagacaaagggccagtgaccagcattctcccgtctcaggtaaacagttctccagttataaaccaccttcttttaggaaagaagatgaaaatgactaacagagctgccaagaatgctgtcatccacatccctggtcacacaggagggaaaatatctcctgtcccctacgaagaccttaagacgaagctcaactccccgtggcgaactcacatccgagtccacaaaaagaacatgccaaggaccaagagtcatccgggctgtggggacaccgtagggctgatagatgagcagaacgaggccagcaagaccaatgggctgggggcagcagaggcattcccctctggttgtacagcgacagctgggagagaaggcagcagccctgaaggcagtaccaggaggacgatcgaggggcagtctccggagccggtgttcggagatgctgatgtggatgtgtctgcagttcaggcgaagttgggagccctggaactgaaccagagggatgctgcagctgaaactgagctcagggtgcacccaccctgccagcggcactgcccagagccgccgagtgcacccgaagaaaacaaagccaccagcaaagctccccaaggcagcaactcaaaaacccccatctttagcccttttcccagcgtcaagcccctgcggaaatctgctactgccaggaacttgggattatatggccctacagaaagaaccccaactgtgcactttcctcaaatgagtaggagcttcagcaaacccggcggtggaaacagtggcactaaaaaacgatgatgtctccccgaaactttgtatctggactcaccttttcacagtagtataagggttgcagctgaatggctctaaaagagttttatttgtccagtgaaaatgaataggttcagggatgagcaacagcccataaaaaatgggaactggaagttttataataggagttagaacagggctgttttcccagctacttgctaactgacgaagtggattcttgtggcaaaataaatattgtggttttatagtgtgaagttttcccaatttttcattgtgagctgtttaaaaaagactatatctagattgttaactctcgtccatccttctgttctgggggccttcagagtccctgtgacagcacccccaaaccttccagttctctgggtgttactaatactcaagcatgcacataccagcttgctaggacagaaactgtaaaaagaaagtaagtttcttcgttacaaaaaacttcctgattttccttttcatgctttacggaggggattgtgtcgtgtgagatttcccacagtaccagtttcaaatttttttttattcttatgctaaatcataggagaaaaatctagatagcctttctttaactgtctatttctacctgcaaaatgaagaaaacctttcatctgttgaaatttcaatcgataacccagctgaagatcttatgcacaggacacacttggcatatgctttacgcagttgctccggacagcttgctcgcgccactgagcttttcctgaggtttgtgttcgcctctcaaggagagctttgatcctcagtggtacggatgacttgatgggctccatgcggagcctggcctgcatcccccaccacacagctcactcacccaccagctctagactgcagacgcacaaggcctctgctcagaagccagaacacagcacctgtgactctgttacttgaattttgtgctttttgattggagtcctttgttgagtactttgttaattgaacactgcctttctctggagaaggccccagtgctttctagctccctctcactcctgccctttctagctctctctcacccagcgggtcagggatagcacctcttgtctccactatgcagatgggaactctgagccacacagaggtgaagtagcacttcagttactcaaggtcagtactctcggtattccaagtgacttagccacatttccttcagtgcaataggtgggtttaatgctctttgtacacagatgtattggctacatagcgtgtaaaaaccaagactgggaagccattcactaaaatccctcctgactcaaaggacctgtctccagatggtacagagtcccttgatggcattttacaaaaccagctctgacttccttatcctgaacagggagtttattttaaaaatgcttcatgcacctgttatttggctgaacagaaggctcactcctcaatccccttctcctcgccatcattagaggaatagactcagccttcatgtttgtctctggaagacgattggcgatacttgcaggaatattgttgatgcagccaatattaatttgagctaatggattgttaattctgaaacgaaaactgtaactgtagagcaggcttttactatgagaggtactactttttataatagagaatgtggttgtgtgggctttttttgaacagaaaacacaacaatgacctataccgtgagaaaagccattttatcttcttcgtggtatttttacccccaaaggaactgaagatggaaaatatgactaataagttattgcagttttggtcttgaattctgtgccatctgaagttagcatccagcttcttaaaaagcagccacgcctacagcctgttttttgggaaggctgtaggtggagagatgggcttattttgcataccaccctcagggcccagagacccactgcattttccaaagttaagcaaatgacaccattttcttccatcagctaaactttacagataatagtgtttccacctcatatccttttctttgccccttctcaaatgagtcagaatagtcatgttccccttgagggatgtctgacttgaatggagaattgttctttcctctcttgaatcagctcactagctccctgatggtctgggttcaaggaaatggttaatgaggtagaggccacttatacaagtccttgggattgtaccattgctgtccacaaacttagtatcaacaacacatgctgtgccctgtgaacactctcctctcacctatttccagggttggtcttcctgagaaggggatggatgaggtaacacacagtttgggatacgtatctgttgaatgaatgaataagtgaaaggataatagtcctctgaggtaaaaatggccttgtcagaattttgaaaatccaacagattcctattaaagcactctgtgtaccaataacatgcatgcattgtaccaagtaatcacaatgtgaattggtcaatttatgagccttgcctactttagaaaataaagaaacctgcagtagcctctaccacacagcatgtacaaagaccagtatggacttgctatcttccctatgtattggacactgtatgcaaacaccagaagtacttaacaagtagtggtttcttgatttttagatatgtctgtagcctcttagcccttttgccgggaatcaactcattctgatgcctctgcacctcagttcctcttacaaaagcctccagatgatctaaatctagttagcaatgtcagcctgtggactgcagctgtttgggacattgtattcctttgtttgtctcttgttgttctgaaggattgtattgatcacaaagctatatgcataaagattctcattgttgtaactgttctgccattttctgagtgcaagcatggaacactgttgtgacagtcccttctcccttcttccttcttccttcacccccaaccccagaccccccttggtcacatgaaccagggaaacagcccaataagctctatctcccccagtctaatcgctgggttgcagggtggcctgtgacctgcccagcatttgcagactcgctggttcctgaatatgagtaagcacagagtttacctagagagtttacctaaaattaacctttagatctactatttatttttgtcttaataaaatgaacaataaatatagtttagctgcatggcattaaggattctgtatgaatagatgtatagttgctgccatctccccatataaaaactctctttacatcgtttctgagccactttctttgctgtctgcagcatttaaaatatattatttttcctaattagaaaagtcacaggttttagaaaattgggaaaacaaaaagagcataaagaatcatcaatactctgatatagatatagatctttccagtacgtttgtgtatgtgtgtacacgccattatctacaaaaaagttatgttgaacatggtagtttaagctgtctttctggtaaatgctcttatacaatatgatttttagtgactaatattccctaatgtgttcatgccagaattcacataaccagtaccttgtcaaataggaggtttctgattagatagtagtagagacagtatcctgttacatgtatgtacatagcccgaattattttcttaggatatgcgtatagaagtggagttgaagggtcaggaaatatgtccatttttaagatacatatatctccaaattgccattcttaaaggttggagttatacaagtagtgaatgagaatgcctgcttctctacatcctggaagaggcagcagtctctttccttttttttcctttctatgacttctagtgtggaagtgccaacagaagtgttttagaagcagtgataatgaacactcataacacccatacctcattcctgacttctaaaagaagcattaagtaagatgttgaggtttctggtaggtgcctattatttaggttaagaaaattccccttttattctttgcttgctaagagttttcttcatcaacaggtattgaatttcataaaaagaactttaattgtatcttttgagaagggaatagtacttgagacttggtatcctgaactcaaagaaatagccattactaggttttgtcaaagaataccagatattttagagttggaagttatgcagtaaaagcttatgtgcaaatgttcattgaagtattaaatgtactaatggaaacctgaaaacaatataaacatctgggaataggggagatgtttggatgaattatgattcatccccaggatggaaatgtgaaggccggtgagtatttggaccattgaagtgggagttatctgttatccacatcaggcagctcagagtaaagtcagcaagtctacagtcatagagccaccaggatacagtgatggatgggaggcctttgctggacagtggctgaaggcagaactgttggagtggttcttccacaaaggcagccagtgctcacctgaatggggactggtactgtaggtattgggtcagctttcatgccgttccctgctggccatctcccaatgctgaatgtctgactcagttcaggctgctgtaacaaagtaccatagnctgaggtggcttaaacacagacatttctttctcacagttctggaggctgagaagtcaaagatcaaagtgtctgcaaaattggtatctggtgaggaagggccctccttcctggtttgcagatggctaccttcctcactgtgtcctcacacaatggagaaagggagtatgttttggtctcttcctcttctgataagggcactaacctcatcatgagggtcccatcctcctggtgtcatctaaacctaattacctcccaatggccccgccttcaaataccatcacgttgaaggttgcttccttcctggtcgtttgctctggtgagaccaaatgacctgcaaagtgtcacttgattccattctctccatcccttccatcccaggcaatctttatctagctacaccaacctgtgccccaggggcttcaagagttgttgttgttttaacattaaaaaaccagaaagtt

SEQ ID NO: 11413 - DNA, 5448 bp, Homo sapiens
acggagcccggcgaggcgtgcggcggccgcacaagccgcacggcgtccctggtgagcgggctgctcaacgagctgtacagctgcacagaggaggaggaggcggcgggcgggggccgcggggccgagggccgccggcggcgccgcgacagcctcgacagctccaccgaggcctcgggctccgacgtggtcctgggcggccgcagcggtgccggcgactcccgcgtgctgcaggagctgcaggagcgaccgagccagcggcatcagatgctgtacctgcggcagaaagacgctaatgaactgaagacgatccttcgagagctaaagtacagaattggcatccagtcggccaagttacttcggcatctgaagcagaaagataggcttctgcataaagtgcagaggaactgtgatattgtgactgcctgcttgcaggctgtgtcacagaagagaacatggcagaacagtatgctcaggagttgataccaagttgaaattcactcttgagccatctttaggtcaaaatggttttcagcagtggtacgatgctctcaaggcagttgccaggctatccacaggaataccaaaggaatggaggagaaaggtttggttgaccttggcagatcattatttgcacagtatagccattgactgggacaaaaccatgcgcttcactttcaatgaaaggagtaatcctgatgatgactccatgggaattcagatagtcaaggaccttcaccgcacaggctgtagttcttactgtggccaggaggctgagcaggacagggttgtgttgaagcgggtgctgctggcctatgcccgatggaacaaaactgttgggtactgccaaggctttaacatcctggctgcactaattctggaagtgatggaaggcaatgaaggggatgccctgaaaattatgatttaccttattgataaggtacttcccgaaagctatttcgtcaataatctccgggcattgtctgtggatatggctgtcttcagagaccttttaagaatgaagctgccggaattatctcagcacctggatactcttcagagaactgcaaacaaagaaagtggaggtggatatgagcccccacttacaaatgtcttcacgatgcagtggtttctgactctctttgccacatgcctccctaatcagaccgttttaaagatctgggattcagtcttctttgaaggttcagaaatcatcctaagggtgtcgctggctatctgggcaaaattaggagagcagatagaatgttgtgaaacagcagatgaattctacagcaccatggggcgccttacccaggagatgctagagaatgatcttctgcaaagccatgaactcatgcagactgtttattccatggctccgttccctttcccacaattggcagagttgagggaaaaatacacctacaacattacaccgttcccagccacagttaaacccacctcagtttctggacgacatagtaaggccagagacagtgatgaagagaatgacccagacgatgaggatgctgtcgttaatgcagtggggtgtcttggaccttttagtgggttcctggctcctgaactgcagaagtaccaaaaacaaattaaagagccaaatgaggagcagagtctgagatctaataacattgcagagctgagtccaggagcaatcaattcctgtcgaagtgaataccatgcagcttttaacagtatgatgatggaacgcatgaccacagatatcaatgcactgaagcggcagtactctcgaattaaaaagaagcaacagcagcaggttcatcaggtgtacatcagggcagacaaagggccagtgaccagcattctcccgtctcaggtaaacagttctccagttataaaccaccttcttttaggaaagaagatgaaaatgactaacagagctgccaagaatgctgtcatccacatccctggtcacacaggagggaaaatatctcctgtcccctacgaagaccttaagacgaagctcaactccccgtggcgaactcacatccgagtccacaaaaagaacatgccaaggaccaagagtcatccgggctgtggggacaccgtagggctgatagatgagcagaacgaggccagcaagaccaatgggctgggggcagcagaggcattcccctctggttgtacagcgacagctgggagagaaggcagcagccctgaaggcagtaccaggaggacgatcgaggggcagtctccggagccggtgttcggagatgctgatgtggatgtgtctgcagttcaggcgaagttgggagccctggaactgaaccagagggatgctgcagctgaaactgagctcagggtgcacccaccctgccagcggcactgcccagagccgccgagtgcacccgaagaaaacaaagccaccagcaaagctccccaaggcagcaactcaaaaacccccatctttagcccttttcccagcgtcaagcccctgcggaaatctgctactgccaggaacttgggattatatggccctacagaaagaaccccaactgtgcactttcctcaaatgagtaggagcttcagcaaacccggcggtggaaacagtggcactaaaaaacgatgatgtctccccgaaactttgtatctggactcaccttttcacagtagtataagggttgcagctgaatggctctaaaagagttttatttgtccagtgaaaatgaataggttcagggatgagcaacagcccataaaaaatgggaactggaagttttataataggagttagaacagggctgttttcccagctacttgctaactgacgaagtggattcttgtggcaaaataaatattgtggttttatagtgtgaagttttcccaatttttcattgtgagctgtttaaaaaagactatatctagattgttaactctcgtccatccttctgttctgggggccttcagagtccctgtgacagcacccccaaaccttccagttctctgggtgttactaatactcaagcatgcacataccagcttgctaggacagaaactgtaaaaagaaagtaagtttcttcgttacaaaaaacttcctgattttccttttcatgctttacggaggggattgtgtcgtgtgagatttcccacagtaccagtttcaaatttttttttattcttatgctaaatcataggagaaaaatctagatagcctttctttaactgtctatttctacctgcaaaatgaagaaaacctttcatctgttgaaatttcaatcgataacccagctgaagatcttatgcacaggacacacttggcatatgctttacgcagttgctccggacagcttgctcgcgccactgagcttttcctgaggtttgtgttcgcctctcaaggagagctttgatcctcagtggtacggatgacttgatgggctccatgcggagcctggcctgcatcccccaccacacagctcactcacccaccagctctagactgcagacgcacaaggcctctgctcagaagccagaacacagcacctgtgactctgttacttgaattttgtgctttttgattggagtcctttgttgagtactttgttaattgaacactgcctttctctggagaaggccccagtgctttctagctccctctcactcctgccctttctagctctctctcacccagcgggtcagggatagcacctcttgtctccactatgcagatgggaactctgagccacacagaggtgaagtagcacttcagttactcaaggtcagtactctcggtattccaagtgacttagccacatttccttcagtgcaataggtgggtttaatgctctttgtacacagatgtattggctacatagcgtgtaaaaaccaagactgggaagccattcactaaaatccctcctgactcaaaggacctgtctccagatggtacagagtcccttgatggcattttacaaaaccagctctgacttccttatcctgaacagggagtttattttaaaaatgcttcatgcacctgttatttggctgaacagaaggctcactcctcaatccccttctcctcgccatcattagaggaatagactcagccttcatgtttgtctctggaagacgattggcgatacttgcaggaatattgttgatgcagccaatattaatttgagctaatggattgttaattctgaaacgaaaactgtaactgtagagcaggcttttactatgagaggtactactttttataatagagaatgtggttgtgtgggctttttttgaacagaaaacacaacaatgacctataccgtgagaaaagccattttatcttcttcgtggtatttttacccccaaaggaactgaagatggaaaatatgactaataagttattgcagttttggtcttgaattctgtgccatctgaagttagcatccagcttcttaaaaagcagccacgcctacagcctgttttttgggaaggctgtaggtggagagatgggcttattttgcataccaccctcagggcccagagacccactgcattttccaaagttaagcaaatgacaccattttcttccatcagctaaactttacagataatagtgtttccacctcatatccttttctttgccccttctcaaatgagtcagaatagtcatgttccccttgagggatgtctgacttgaatggagaattgttctttcctctcttgaatcagctcactagctccctgatggtctgggttcaaggaaatggttaatgaggtagaggccacttatacaagtccttgggattgtaccattgctgtccacaaacttagtatcaacaacacatgctgtgccctgtgaacactctcctctcacctatttccagggttggtcttcctgagaaggggatggatgaggtaacacacagtttgggatacgtatctgttgaatgaatgaataagtgaaaggataatagtcctctgaggtaaaaatggccttgtcagaattttgaaaatccaacagattcctattaaagcactctgtgtaccaataacatgcatgcattgtaccaagtaatcacaatgtgaattggtcaatttatgagccttgcctactttagaaaataaagaaacctgcagtagcctctaccacacagcatgtacaaagaccagtatggacttgctatcttccctatgtattggacactgtatgcaaacaccagaagtacttaacaagtagtggtttcttgatttttagatatgtctgtagcctcttagcccttttgccgggaatcaactcattctgatgcctctgcacctcagttcctcttacaaaagcctccagatgatctaaatctagttagcaatgtcagcctgtggactgcagctgtttgggacattgtattcctttgtttgtctcttgttgttctgaaggattgtattgatcacaaagctatatgcataaagattctcattgttgta

SEQ ID NO: 11414 - DNA, 7615 bp, Homo sapiens
  misc_feature (7153)..(7153): n is a, c, g, or t
acggagcccggcgaggcgtgcggcggccgcacaagccgcacggcgtccctggtgagcgggctgctcaacgagctgtacagctgcacagaggaggaggaggcggcgggcgggggccgcggggccgagggccgccggcggcgccgcgacagcctcgacagctccaccgaggcctcgggctccgacgtggtcctgggcggccgcagcggtgccggcgactcccgcgtgctgcaggagctgcaggagcgaccgagccagcggcatcagatgctgtacctgcggcagaaagacgctaatgaactgaagacgatccttcgagagctaaagtacagaattggcatccagtcggccaagttacttcggcatctgaagcagaaagataggcttctgcataaagtgcagaggaactgtgatattgtgactgcctgcttgcaggctgtgtcacagaagagaagagttgataccaagttgaaattcactcttgagccatctttaggtcaaaatggttttcagcagtggtacgatgctctcaaggcagttgccaggctatccacaggaataccaaaggaatggaggagaaaggtttggttgaccttggcagatcattatttgcacagtatagccattgactgggacaaaaccatgcgcttcactttcaatgaaaggagtaatcctgatgatgactccatgggaattcagatagtcaaggaccttcaccgcacaggctgtagttcttactgtggccaggaggctgagcaggacagggttgtgttgaagcgggtgctgctggcctatgcccgatggaacaaaactgttgggtactgccaaggctttaacatcctggctgcactaattctggaagtgatggaaggcaatgaaggggatgccctgaaaattatgatttaccttattgataaggtacttcccgaaagctatttcgtcaataatctccgggcattgtctgtggatatggctgtcttcagagaccttttaagaatgaagctgccggaattatctcagcacctggatactcttcagagaactgcaaacaaagaaagtggaggtggatatgagcccccacttacaaatgtcttcacgatgcagtggtttctgactctctttgccacatgcctccctaatcagaccgttttaaagatctgggattcagtcttctttgaaggttcagaaatcatcctaagggtgtcgctggctatctgggcaaaattaggagagcagatagaatgttgtgaaacagcagatgaattctacagcaccatggggcgccttacccaggagatgctagagaatgatcttctgcaaagccatgaactcatgcagactgtttattccatggctccgttccctttcccacaattggcagagttgagggaaaaatacacctacaacattacaccgttcccagccacagttaaacccacctcagtttctggacgacatagtaaggccagagacagtgatgaagagaatgacccagacgatgaggatgctgtcgttaatgcagtggggtgtcttggaccttttagtgggttcctggctcctgaactgcagaagtaccaaaaacaaattaaagagccaaatgaggagcagagtctgagatctaataacattgcagagctgagtccaggagcaatcaattcctgtcgaagtgaataccatgcagcttttaacagtatgatgatggaacgcatgaccacagatatcaatgcactgaagcggcagtactctcgaattaaaaagaagcaacagcagcaggttcatcaggtgtacatcagggcagacaaagggccagtgaccagcattctcccgtctcaggtaaacagttctccagttataaaccaccttcttttaggaaagaagatgaaaatgactaacagagctgccaagaatgctgtcatccacatccctggtcacacaggagggaaaatatctcctgtcccctacgaagaccttaagacgaagctcaactccccgtggcgaactcacatccgagtccacaaaaagaacatgccaaggaccaagagtcatccgggctgtggggacaccgtagggctgatagatgagcagaacgaggccagcaagaccaatgggctgggggcagcagaggcattcccctctggttgtacagcgacagctgggagagaaggcagcagccctgaaggcagtaccaggaggacgatcgaggggcagtctccggagccggtgttcggagatgctgatgtggatgtgtctgcagttcaggcgaagttgggagccctggaactgaaccagagggatgctgcagctgaaactgagctcagggtgcacccaccctgccagcggcactgcccagagccgccgagtgcacccgaagaaaacaaagccaccagcaaagctccccaaggcagcaactcaaaaacccccatctttagcccttttcccagcgtcaagcccctgcggaaatctgctactgccaggaacttgggattatatggccctacagaaagaaccccaactgtgcactttcctcaaatgagtaggagcttcagcaaacccggcggtggaaacagtggcactaaaaaacgatgatgtctccccgaaactttgtatctggactcaccttttcacagtagtataagggttgcagctgaatggctctaaaagagttttatttgtccagtgaaaatgaataggttcagggatgagcaacagcccataaaaaatgggaactggaagttttataataggagttagaacagggctgttttcccagctacttgctaactgacgaagtggattcttgtggcaaaataaatattgtggttttatagtgtgaagttttcccaatttttcattgtgagctgtttaaaaaagactatatctagattgttaactctcgtccatccttctgttctgggggccttcagagtccctgtgacagcacccccaaaccttccagttctctgggtgttactaatactcaagcatgcacataccagcttgctaggacagaaactgtaaaaagaaagtaagtttcttcgttacaaaaaacttcctgattttccttttcatgctttacggaggggattgtgtcgtgtgagatttcccacagtaccagtttcaaatttttttttattcttatgctaaatcataggagaaaaatctagatagcctttctttaactgtctatttctacctgcaaaatgaagaaaacctttcatctgttgaaatttcaatcgataacccagctgaagatcttatgcacaggacacacttggcatatgctttacgcagttgctccggacagcttgctcgcgccactgagcttttcctgaggtttgtgttcgcctctcaaggagagctttgatcctcagtggtacggatgacttgatgggctccatgcggagcctggcctgcatcccccaccacacagctcactcacccaccagctctagactgcagacgcacaaggcctctgctcagaagccagaacacagcacctgtgactctgttacttgaattttgtgctttttgattggagtcctttgttgagtactttgttaattgaacactgcctttctctggagaaggccccagtgctttctagctccctctcactcctgccctttctagctctctctcacccagcgggtcagggatagcacctcttgtctccactatgcagatgggaactctgagccacacagaggtgaagtagcacttcagttactcaaggtcagtactctcggtattccaagtgacttagccacatttccttcagtgcaataggtgggtttaatgctctttgtacacagatgtattggctacatagcgtgtaaaaaccaagactgggaagccattcactaaaatccctcctgactcaaaggacctgtctccagatggtacagagtcccttgatggcattttacaaaaccagctctgacttccttatcctgaacagggagtttattttaaaaatgcttcatgcacctgttatttggctgaacagaaggctcactcctcaatccccttctcctcgccatcattagaggaatagactcagccttcatgtttgtctctggaagacgattggcgatacttgcaggaatattgttgatgcagccaatattaatttgagctaatggattgttaattctgaaacgaaaactgtaactgtagagcaggcttttactatgagaggtactactttttataatagagaatgtggttgtgtgggctttttttgaacagaaaacacaacaatgacctataccgtgagaaaagccattttatcttcttcgtggtatttttacccccaaaggaactgaagatggaaaatatgactaataagttattgcagttttggtcttgaattctgtgccatctgaagttagcatccagcttcttaaaaagcagccacgcctacagcctgttttttgggaaggctgtaggtggagagatgggcttattttgcataccaccctcagggcccagagacccactgcattttccaaagttaagcaaatgacaccattttcttccatcagctaaactttacagataatagtgtttccacctcatatccttttctttgccccttctcaaatgagtcagaatagtcatgttccccttgagggatgtctgacttgaatggagaattgttctttcctctcttgaatcagctcactagctccctgatggtctgggttcaaggaaatggttaatgaggtagaggccacttatacaagtccttgggattgtaccattgctgtccacaaacttagtatcaacaacacatgctgtgccctgtgaacactctcctctcacctatttccagggttggtcttcctgagaaggggatggatgaggtaacacacagtttgggatacgtatctgttgaatgaatgaataagtgaaaggataatagtcctctgaggtaaaaatggccttgtcagaattttgaaaatccaacagattcctattaaagcactctgtgtaccaataacatgcatgcattgtaccaagtaatcacaatgtgaattggtcaatttatgagccttgcctactttagaaaataaagaaacctgcagtagcctctaccacacagcatgtacaaagaccagtatggacttgctatcttccctatgtattggacactgtatgcaaacaccagaagtacttaacaagtagtggtttcttgatttttagatatgtctgtagcctcttagcccttttgccgggaatcaactcattctgatgcctctgcacctcagttcctcttacaaaagcctccagatgatctaaatctagttagcaatgtcagcctgtggactgcagctgtttgggacattgtattcctttgtttgtctcttgttgttctgaaggattgtattgatcacaaagctatatgcataaagattctcattgttgtaactgttctgccattttctgagtgcaagcatggaacactgttgtgacagtcccttctcccttcttccttcttccttcacccccaaccccagaccccccttggtcacatgaaccagggaaacagcccaataagctctatctcccccagtctaatcgctgggttgcagggtggcctgtgacctgcccagcatttgcagactcgctggttcctgaatatgagtaagcacagagtttacctagagagtttacctaaaattaacctttagatctactatttatttttgtcttaataaaatgaacaataaatatagtttagctgcatggcattaaggattctgtatgaatagatgtatagttgctgccatctccccatataaaaactctctttacatcgtttctgagccactttctttgctgtctgcagcatttaaaatatattatttttcctaattagaaaagtcacaggttttagaaaattgggaaaacaaaaagagcataaagaatcatcaatactctgatatagatatagatctttccagtacgtttgtgtatgtgtgtacacgccattatctacaaaaaagttatgttgaacatggtagtttaagctgtctttctggtaaatgctcttatacaatatgatttttagtgactaatattccctaatgtgttcatgccagaattcacataaccagtaccttgtcaaataggaggtttctgattagatagtagtagagacagtatcctgttacatgtatgtacatagcccgaattattttcttaggatatgcgtatagaagtggagttgaagggtcaggaaatatgtccatttttaagatacatatatctccaaattgccattcttaaaggttggagttatacaagtagtgaatgagaatgcctgcttctctacatcctggaagaggcagcagtctctttccttttttttcctttctatgacttctagtgtggaagtgccaacagaagtgttttagaagcagtgataatgaacactcataacacccatacctcattcctgacttctaaaagaagcattaagtaagatgttgaggtttctggtaggtgcctattatttaggttaagaaaattccccttttattctttgcttgctaagagttttcttcatcaacaggtattgaatttcataaaaagaactttaattgtatcttttgagaagggaatagtacttgagacttggtatcctgaactcaaagaaatagccattactaggttttgtcaaagaataccagatattttagagttggaagttatgcagtaaaagcttatgtgcaaatgttcattgaagtattaaatgtactaatggaaacctgaaaacaatataaacatctgggaataggggagatgtttggatgaattatgattcatccccaggatggaaatgtgaaggccggtgagtatttggaccattgaagtgggagttatctgttatccacatcaggcagctcagagtaaagtcagcaagtctacagtcatagagccaccaggatacagtgatggatgggaggcctttgctggacagtggctgaaggcagaactgttggagtggttcttccacaaaggcagccagtgctcacctgaatggggactggtactgtaggtattgggtcagctttcatgccgttccctgctggccatctcccaatgctgaatgtctgactcagttcaggctgctgtaacaaagtaccatagnctgaggtggcttaaacacagacatttctttctcacagttctggaggctgagaagtcaaagatcaaagtgtctgcaaaattggtatctggtgaggaagggccctccttcctggtttgcagatggctaccttcctcactgtgtcctcacacaatggagaaagggagtatgttttggtctcttcctcttctgataagggcactaacctcatcatgagggtcccatcctcctggtgtcatctaaacctaattacctcccaatggccccgccttcaaataccatcacgttgaaggttgcttccttcctggtcgtttgctctggtgagaccaaatgacctgcaaagtgtcacttgattccattctctccatcccttccatcccaggcaatctttatctagctacaccaacctgtgccccaggggcttcaagagttgttgttgttttaacattaaaaaaccagaaagtt

SEQ ID NO: 11415 - DNA, 310 bp, Homo sapiens
tggactatctaaatattattcaaaagctttcctaactaaaatggaagttcctttcctgtttccaatgggagcagctttaaaaatgcagaaagcctgtgaaaatgtcagaacacgacaaatcataaactgataacgtgccatttactgtacctcacttattcctaaataaaattgtaataagaaaatatatattttaaaatatatattttaaaactcacagtttttgcatcaaaggtcacaatcaacagagtgaaagcaaccaatggaatagggggataccatattcgcacattacatatctgaaaagggg

SEQ ID NO: 11416 - DNA, 473 bp, Homo sapiens
cacacccagtcctgagggaggcagcagacagacatggatggagtgctggtgctcggtagagttgaagaggggatgggagccagatgtggctacagcactttcatctgtggggcccggcctcagacccacaacagtcccagccccaagaaagtgctgcatgcagccaggctcgatggctcacgcctgtaattctagtactttggaggccgaggcgggcagattgcctgagctcaggagtttgagaccagcctgggcaacacggtgaaaccccatctctactaaagtacaaaaaattagccaggcgtggcgcatgcgcctgtagtcccagctactcgggaggctgaggcaggagaatcgcttgaacccgggaggcagagtttgcagtgagctgagatcacgccactgcactccaacctggtgacagagcaagactccatttcaaaaaaaaaaaaaaaaaaaagagtgcagcatgc

SEQ ID NO: 11417 - DNA, 347 bp, Homo sapiens
ttatttaaaaaaatatgcctttgaagaactgtacaatgtgatgtacctattgtctgtattattttgaatgttcatgagagcttcttaaagcattttaaggttgaaaatttcatagactttaaaagatttataacatatattttatttactgctatattagatgggtttattaccagtaataaagaggtatatctaatatttactctgtggttctacagctgtttattctgttgcgattgccagaattcttgtgtattgataagcgctctttctggacagttgtctgaattactgcaccctttcccactgaaaacacccctcccagttccagtgcttcatggatgaac

SEQ ID NO: 11418 - DNA, 546 bp, Homo sapiens
ttggtgggtggggggatggagtttcactcttgttgcccaggttggagtgcaatggcacaatctcagctcactacaacctccgccttccaggttcaagcaattctcctacctcagcctcccaagtagctgggattacaggcatgcaccaccatgcctggctaatattttttttgtatttttagtagagatggggtttcaccatgttggccaggctggtctcgaacttctgacctcaggtgacccacccaccttggcctcccaaagtgctgggattacaagcgtgagccaccatggccggcctactttattttcttgtatagacagagaaattgaaatttagagagattaaataatttgaccaagatcatgaaactagaaaatattgaggaggccagaattaggtactctaaccccaaaatctacgttcttgaccccgtgctaagctttttcctcaaaccccgttcagttcatgtccttgccaaccccttacttgtgtcggcccctaatctacatctccctttcctcagctgtcttggccagttcttc

SEQ ID NO: 11419 - DNA, 421 bp, Homo sapiens
ccttttgaatatgaggaattcctagagcttgacaggctatactaaaaaagagctgcaagaattatatacagtattctacagtttgcatttcagtggttccctcttttgaggatgttacgtgccagtaaaattacagaaaaaaaaaaagcagtttgtcaatttttcttcaggtaaaggcattaaaaacatagccaccatttattttcactataatttcataaaaataaagcacctttataataacaaaagaagataaagaacgatcatagaataaaagacaatacttcctttcaaaaggagggttggtgctgggcacgttggctcccacccaaaatcccagcactttgggaggccaaggtgggaggatcgtttaaaagccaggtgtttgagactagcctaggcaacacagcgagatcgcgtc

SEQ ID NO: 11420 - DNA, 484 bp, Homo sapiens
gctgacctaccatggctgttttaacttctcctctgagtgcatcttccctgttttacattatgcaaaccactcccaaattttttaaaccagtttcccatggcttaagcaatgatcccagtaatatccctccaagcttcaagggggattcttacgcaggtttctctgccaagagcagcttctaccatgcacctttccaaataatagtcatgtactggctgggagcagtggctcacgcctgtaatcccagtaatttagaagaccaaggcaggcagatcacctgaggttaggagttcgagaccagcctggccaacatggtgaaaccctgtctctactaaaaatacaaaagttagccaagcacagtggtgggcgcctctaatcccagctactcaggaggctaaggcaggagaatcgcttgaacctaggcggtggaggttgtagtgagccactgcactccagcctgggtaacagagcaagactcagtctc

SEQ ID NO: 11421 - DNA, 318 bp, Homo sapiens
cccagagcttcctggcataagcttcccagggaccatttaacaaggatggcctcatctttccgggagcctggcagagcttccgtggaattcctggagtcaggtgtcaatgtacccatttgaggatgaggaaactgaggtttggatgaagaagtcaccccgtggccccacagcgaggaagcagcagagccagatgcaaatgcagcctctggactccccgtctggtgctcccctcggcccctgccctcctctcctgtcccacactccagccagcaccgagcacccagcctggcctgaacatgggtgattccaggggccctg

SEQ ID NO: 11422 - DNA, 344 bp, Homo sapiens
gaatattaagaagttactctgtgccaggaaggaactggagactaagatgcataggatacaccccctgcagagaaagacagcaaaatctcaagccaacatcagtcatcaagtgccacaagtgccattcaatcatttattcattcacattcacagcagtaaacagaacaaagatccaccatcacagagcttatattctagaagggaagacaggtacattactaaatatataatgttagatcagtactacaaagaaaaagtaagctggtgtaaaggctaaagaaggggtagttctattcagaaaaatgagaaggggaggaatatctcagggtggtctaagacagcct

SEQ ID NO: 11423 - DNA, 503 bp, Homo sapiens
gtcccagtttcactctgtcatccaaactggagtgcagtggtgcagtcttggctcactgcagcctcaacctcccaggttcaagtgatcctcccaccttagcctcccaagtatctgggactacagcaatatggagaaggcatcaagaatgtacttcattcacccgccaacagtataaagaactagaagctctgtttagccagaccatgttcccagacagaaatcttcaggagaaactagctttgaaactcaacctaccagagtcaacagtaaagaacccagtgtcatggtaaattggagaggatgtgagatgataacctggctgttttcactcaggagaagcctggaatgccttctccaagaacagaccacaatctcccctcttcccccactcccaggtttggtttaggaaccggcgattcaaattgaagcagcagcagcagcagcagcagcaatcagcaaagcaaccaaaccagataccttccatccaagaagaatgtgcccac

SEQ ID NO: 11424 - DNA, 197 bp, Homo sapiens
gacccactgagggagcctgctgacaccagggagtggcgatgaccctttcattatctgtaaaccaagctatccacagcatcaggagtcccagctgaattattcactgaatgcactttggccagggcaggagggatctttttaaattcagcttactctctctcccagatctgtggagccagcagagtggtcccagcctt

SEQ ID NO: 11425 - DNA, 478 bp, Homo sapiens
gaggggtcttctgttttccctagaatagtttacagtgaaaatgtatttaggttgtatatctataattaaatatagaattttgacagaatttatctcccctaacagaattttaaatagcgaagtttttactaacataaacatgcatttataaagaattcattccatggaggagaatgagagatgttaataagtacaaacaaattaattagaaagaatgaataagacctagtatttgaaagcacaacgggacgactataggcaataataattgtacatttaaaaataactaaaagggtgtaattggatttttgtaacataagggataagtgcctagggggatggatacctcattttctgtgacatgattattatgcattgcatgcctgtgtcaagacatctcatgtaccccataaatatatatgtctactatgtacccacaaaattttttaaaaaagaactcattctatctctgtgttat

SEQ ID NO: 11426 - DNA, 515 bp, Homo sapiens
gcttccagctcatatggtggattcaaagatttcctgactggcaattggttgaaagtttatctaaacacaggaatcaacagaagggagtttctgggttatgataagaggttgtagaggccgaggttcttattatgtaggtgaagcctccagtagcaggcttcagagagaatagactgtaaatgtttcttatcagacttaaaaaggtgccagactcttaattctctcctggatcaggaaaaagacctggaaagggaacagcattctttacagaatgtagattttccccacaggagacagctttgcagggccatttcaaaatatgtcaaagaaatatattttggggtaaaatactttgatttattttagggcctgctaactgtcatgttggtatcttattgcaaaaatggtctgttttgtcagcctaagggttctgttctaatgttaatgctggtcagctgtgcctgagtttcaaggggaggaatatataatgagacacctctgaccacccattccta

SEQ ID NO: 11427 - DNA, 305 bp, Homo sapiens
ttttttaattttctttttaattctcagcaaggcaagttacttctatggagggtgcacccttacagatggagcaatggtgagcgcacacttggacaagggaggggaaggggttcttatccgtgacgcacgtggcccctgctgctgtgtcgttcccctattggctagggctaggccgcacgggctaaactaattccgattgttcttagcctagtcttaaataagaggaaacaaataagtgaacaaatgtcattaaagcaactagttgattatttggggagaaagtatagttagaacccacatccgtg

SEQ ID NO: 11428 - DNA, 457 bp, Homo sapiens
gacctgatgggtgtctgggctgaggtagggaaaagtgccgagtcgcatggtgactcaaggtcaggagctggaatggggcccagagctctcaagcctctgctcacccgcttgggactggcccttggctccaggccagctccctgaatagttcccccaacccccacccttcccctccaggatttcagcttcataggccaatctgcttccttgttcagccactgcctccactgccctcccctcccctccctctgccaaggctacatggaagccctcccccaaactccctccaaggactcagcactggggcccagtgcagtcacccattagagctctccaaggccaggccagcttctgggcagactggccccccttcccagtgttgcccacattcacactctgacagaactcctcccctccttatgcaaaaggaaggaggctttgccagcgctaccttcct

SEQ ID NO: 11429 - DNA, 478 bp, Homo sapiens
attaatctaagcttctgctgtgtatggacctgtggctacattacaaaattcagttgtgaagctataaaatcaattagtctagacctcaaatcttatttcctatgaaaagcctcaaacttgtagctgtatgaacaagtgtttttggaattttttttttttgctagaatggagagaacacactggagatcacaaatgcatttattctttttcaccaactgtttcattggccttaaaaaatactaggctaaacttaagtggtaaagatctgaaataaaaagatgcatctttatgtctgaacagcaatttttcataggtctctaataacttgcatttccttatctatggataaggagatctgaaattgatctacattttctttagtaatgttttctctgtttattgaggacagatatcttcatctccttcatgcattatccttagtaacagatgtcagtaggatccagagccattttggaac

SEQ ID NO: 11430 - DNA, 637 bp, Homo sapiens
gctgggattacaggcatgagccatcacccccagcctgatttacacatattttctactgctctataggttatcttttcatttcctctgtggtaagaagcataaaagttttaaatttttatgaagtccaatttttttgtattgttttgtttgtttctcaagtttttggtattatatgtaagaaacttgccaaattcaagctcatttacctctgttttcttctgagagttttatagctttagtttttagttattttatcgattttgagttttttttgtatatgttttgaggttaagggtccaacttcattcttttgcatgtggctatcctgttgtctcaacactatttgtagaatatactgttctctttctcattgaattgctctggaactcttgtcaaaaatcaattgaccatcagacacataggtttatttcaggactcttaattctattccattgatgtctattcttacgcgagtaccacattgtctaaattattgttgcattgtagtaagttctgaaatcaagatgcatgagcctccaactttgttcctgtttttcaagattgttttggttattctgagtctcttgcatttccatatgaattttaggaccagtctgtcaatgtttgcaaaaaaaaa

SEQ ID NO: 11431 - DNA, 433 bp, Homo sapiens
gcccggaatccccgggatgaccactactactaaatccgcggccgtttggaccgtttttgagttttttttgtatatgttttgaggttaagggtccaacttcattcttttgcatgtggctatcctgttgtctcaacactatttgtagaatatactgttctctttctcattgaattgctctggaactcttgtcaaaaatcaattgaccatcagacacataggtttatttcaggactcttaattctattccattgatgtctattcttacgcgagtaccacattgtctaaattattgttgcattgtagtaagttctgaaatcaagatgcatgagcctccaactttgttcctgtttttcaagattgttttggttattctgagtctcttgcatttccatatgaattttaggaccagtctgtcaatgtttgcaaaaaaaaa

SEQ ID NO: 11432 - DNA, 309 bp, Homo sapiens
caaaccaattaaaaatggaaaggtctgagatgcacagagtgaaactccatctttgtcttgtattataacctttaccaggattatttctctactactgttcagcaatgaatgcctttgctcacttcctactaacagctgtagcatagaaaaaaaaaaagggcaggtcaagtactcaagaagccatgttaacttcccaaatagttatgcaatcagctttaatgaaacagtggtagattacaccaatgtgctaattataggactttgtcatagcataagatgcaacgaaacaacccatgccttggcttggaa

SEQ ID NO: 11433 - DNA, 438 bp, Homo sapiens
cttttgttctcaaccgtcttcatgctgaaaataacttctcaataccagcttaatgacactttaaaatcctttgaataataaaaacaagtttaagattgaatgtaaaagtctcctttgcaaacaaaacagaagtaaaaatttaaactgcaaaatttcaacaacgctgggattcccaaagagagtattaacaaaataaggcattaagcagagaaccaagagtgatgtcaatattcttattaacacatcctaaagtcagaatagtcttttttccatttaaaaacaaaacaatagttaaacaccatctgtaaaagtacagccagtcacttaaactaaatgtattatctgtaaattcacacaaaaagaaaacagtaattccagtcaaactgaaccacctgacttctcccatagtggcctttcttctcccacctccaagtcctc

SEQ ID NO: 11434 - DNA, 485 bp, Homo sapiens
agcgggtgcgctgcgcctgcctccgggaggagccgcatccacacaccctgcgctgccctgtcctgcgcgagtggagctctgaagaagctctgagcggagttgtgttcttccccaggtaaccgatttcccccttctgccgtggcttcgctgcgtccgcattggggcacgggcggctttggcatgattgtttgccagcccctggaaagggattaccgctctcagggagggcgagtcagcgtgtactggagttggtaagaggggaagaaatctgcatttctgtatccttgttagggagggtgagcatcatgctgtccttgtctaaaacatgttcttttttaaaaatctgtatcttacgtattattagggattccttccaaaacaggatttaccgttttggaaaattctactgtgcaggtgtttctgttaatgtggaagtttaatggatttaggaaaagagtaagaagatgtggtctaaagtgagaaaa

SEQ ID NO: 11435 - DNA, 4156 bp, Homo sapiens
agcgggtgcgctgcgcctgcctccgggaggagccgcatccacacaccctgcgctgccctgtcctgcgcgagtggagctctgaagaagctctgagcggagttgtgttcttccccaggtgcgtcctggctgagagttggagctctccagcaacatgcctgagcagagtaacgattaccgggtggccgtgtttggggctggcggtgttggcaagagctccctggtgttgaggtttgtgaaaggcacattccgggagagctacatcccgacggtggaagacacctaccggcaagtgatcagctgtgacaagagcatatgcacattgcagatcaccgacacgacggggagccaccagttcccggccatgcagcggctgtccatctccaaagggcacgccttcatcctggtgtactccattaccagccgacagtccttggaggagctcaagcccatctacgaacaaatctgcgagatcaaaggggacgtggagagcatccccatcatgctggtggggaacaagtgtgatgagagccccagccgcgaggtgcagagcagcgaggcggaggccttggcccgcacatggaagtgtgccttcatggagacctcagccaagctcaaccataacgtgaaggagcttttccaggagctgctcaacctggagaagcgcaggaccgtgagtctccagatcgacgggaaaaagagcaagcagcagaaaaggaaagagaagctcaaaggcaagtgcgtgatcatgtgaaggcccttcctgcgggaggagcagctgtgtgtccccggcacctcactcccccaaaatgacacccaccgtcgtcagggtagcatgtataatgcccacgtgttaaacattgcatttaatcgagatgcgtcctattgtccttaagagggcgtttcacaccaccaacagtaagccacccactctggagtcacagaatctgccaggcggttcaagtgaaaaccaacacactcagcatccctgggaactgagaggtgccagcaattgctgaaggtggcgatgaacacccgaaggtgggagggaggactggtacccacaaagcaacatgtaccgagaggactaaatgtcatctacgtgcatgtgagagcgtgttaacctagagttacctgcaccaaccccagacagaagccaatcacatctttgggggaggggaggggcaggaagaggtgagaagatcagatggtccaaagtggaccacacttggtccattttacacttttttaaaggggattaaaaaacacagcctctcccccaaagggtgtccgttcttaattcccacctggcctgttaggagccttgctaccctgaggggatgtgttcaccttacctagacctagttaggaagtatcattttaagctattagagtatttatcttcatgtgcagggataagtgcactaacagtgtgctgctctgtcggaagttcttcagtttttaagtgaggatatcgtgacagtattaaaacatcgcaataatgttcctgtgtgttatacatcgagggttttagaaatgtgattttcttcttttgacctgtgaggagtataacttctttcagccctcagattttaaatacaagcaaataaactcactatttttagacgtttttttcctccaaggtggttttcttctcttaaataactcgatctgtacccagctgggtagcagccagcaaaggccatcagacaaccagaagcacatccatttttgtagtgtcacaaacatgtatatgccacactttgcaccttaatgaaatactttgaaacagaagttattcactgtgtttttgatgatctatctgtattggaaatatgttcctggaaaatgcatttaaataatagtaaattctcttgcatgttccattatacgtgtcttctaagagctgttcaatacagtattcactctagaaacaattatctttttctcttaatgattttgtgtgcatctttaatctttcaagccaaattacagctatttcaggtttcctgtgttagcttggggataggatggtggctggagacaggcaggcttctctgccctgggaagagcccactcagcttaattgctctgccatcgtagagcctggttggacttggcttcctgaaaactcccactgatagtgcctgttagatctcctgtttgtttcagttggcagaacatttactggccccaactgtggcatcatcctctcagcagtcttcctgtcacccgcctggcaggcagaaggagctgcagtcccacgtgggcctgcctgggggggtgggggctgcatggctgttgggtggcagtgtcagcacagggagggcttaagttggggatgtttgaccaggccacctcctgcaactgctgtttctcctgtccctcctatgcagggcttgcagcagcagcagtgtggccatctccatcccccaaagcacacttgctctctcaatatgtcctagttttcttcagccttttctggttcagttcccttgtcctgatctcatcctctctggtctcccaataactcacccttgggatgtgtttagagcgtgggaggtgcctttgagaactgcttgactccatgatctcctagaacaaaaccgccctgactttacagggggaacactcatgctgagctgagaaagcagagaagtggcgtgggagccagctgggggtgaagagcatttgggccagtcccgtggcccccttcagattcctcaagcaggattgttctgttctaaaaagctgttgcacagcattcgcaatgagatctttagttggcggattttctggaacatttgtttttcaacttgtcccgacattttttttctgtttctattctgagagagagatgatcaagttttaatttgggtataggttaaatggaagaagaaacagaacttcatggccaaagtagacctatagattttgattgggttctttgttaacagtagaatgcgatctttgccactgactgtactattaataaggttttaatgtgagatattcctgcaaaccatcccatttctactgattgtaagtcagaatttcttttatccctttcaaatcagtttctacatgtttaagtgttcagggcttcatcagcatgagaagtttgtaattactgaaagtctgatttcattcaggacacatttttttccttcatattttttctgtgaatttataggctaggaaggctattgaagcctcaattatgggtcttcattttgagatcgttttctatgagctgaactgaggatatcaatggttatctcaaaatcgtcttttaggagatccccaattgactcagagtttgaggagttagtatcacagaattagatttttttaaagcatttgtacgtttccattcccaaatatgtagctgtggttcttgaaaacacatcctacattgcatatgggcatagcagtttttgacccaggcagaataagttaatatttaattaaatattgctttgaagatggcgctctgggcatgagcatggggctccatgacttcccttctatccccatgagcccctcctccatccagcgacaagccatgggcatgcatacaatgcagcaagaccaacacaagagcaatattgaattgttcattctatctaaaattacatgtatataaaatatataatttatcttcctgcatttttgaagtataaagtcataaattgtacatatctgtaagctagtatatttgtttcactgtttgtaatatttaagaaatgctcattctttgtagaacaaaaatgtattaaatattttaaaaattgctctgtgatacttaatttttttccccaaaatttgtaatgtgttgcttctacataagttctctggaaatatctacaactaataggacacatgtaaatccttgaagacacatcctggaattcataccccacaaggacagtgtgtatacaaagtatttgcagagcatgacttttatatgtgtgggatatcaatgtgtatatttatatttaaagtgtatttattgttacaagtctattctctattatattttatttactctgcggttataaaaatcacccttgcatacaagtttctagttgccagtgatgttctggaaataatgggagatattacaataaagctacagttatgacaccctggctggaag

SEQ ID NO: 11436 - DNA, 1932 bp, Homo sapiens
agcgggtgcgctgcgcctgcctccgggaggagccgcatccacacaccctgcgctgccctgtcctgcgcgagtggagctctgaagaagctctgagcggagttgtgttcttccccaggtgcgtcctggctgagagttggagctctccagcaacatgcctgagcagagtaacgattaccgggtggccgtgtttggggctggcggtgttggcaagagctccctggtgttgaggtttgtgaaaggcacattccgggagagctacatcccgacggtggaagacacctaccggcaagtgatcagctgtgacaagagcatatgcacattgcagatcaccgacacgacggggagccaccagttcccggccatgcagcggctgtccatctccaaagggcacgccttcatcctggtgtactccattaccagccgacagtccttggaggagctcaagcccatctacgaacaaatctgcgagatcaaaggggacgtggagagcatccccatcatgctggtggggaacaagtgtgatgagagccccagccgcgaggtgcagagcagcgaggcggaggccttggcccgcacatggaagtgtgccttcatggagacctcagccaagctcaaccataacgtgaaggagcttttccaggagctgctcaacctggagaagcgcaggaccgtgagtctccagatcgacgggaaaaagagcaagcagcagaaaaggaaagagaagctcaaaggcaagtgcgtgatcatgtgaaggcccttcctgcgggaggagcagctgtgtgtccccggcacctcactcccccaaaatgacacccaccgtcgtcagggtagcatgtataatgcccacgtgttaaacattgcatttaatcgagatgcgtcctattgtccttaagagggcgtttcacaccaccaacagtaagccacccactctggagtcacagaatctgccaggcggttcaagtgaaaaccaacacactcagcatccctgggaactgagaggtgccagcaattgctgaaggtggcgatgaacacccgaaggtgggagggaggactggtacccacaaagcaacatgtaccgagaggactaaatgtcatctacgtgcatgtgagagcgtgttaacctagagttacctgcaccaaccccagacagaagccaatcacatctttgggggaggggaggggcaggaagaggtgagaagatcagatggtccaaagtggaccacacttggtccattttacacttttttaaaggggattaaaaaacacagcctctcccccaaagggtgtccgttcttaattcccacctggcctgttaggagccttgctaccctgaggggatgtgttcaccttacctagacctagttaggaagtatcattttaagctattagagtatttatcttcatgtgcagggataagtgcactaacagtgtgctgctctgtcggaagttcttcagtttttaagtgaggatatcgtgacagtattaaaacatcgcaataatgttcctgtgtgttatacatcgagggttttagaaatgtgattttcttcttttgacctgtgaggagtataacttctttcagccctcagattttaaatacaagcaaataaactcactatttttagacgtttttttcctccaaggtggttttcttctcttaaataactcgatctgtacccagctgggtagcagccagcaaaggccatcagacaaccagaagcacatccatttttgtagtgtcacaaacatgtatatgccacactttgcaccttaatgaaatactttgaaacagaagttattcactgtgtttttgatgatctatctgtattggaaatatgttcctggaaaatgcatttaaataatagtaaattctcttgcatgttccattatacgtgtcttctaagagctgttcaatacagtattcactctagaaac

SEQ ID NO: 11437 - DNA, 640 bp, Homo sapiens
gccctgcagtcttgactgagcttctaatggttgatcagacccttgaatgttgagctctttccatactagacttgaatattctcctgcccatttgatttgttaattaggattcattggctgtttctctgctctcctcttttctctctgttcctgctggttcaagtttaacctccattttctttctcctctgggaagtttcccttatgcctcttgaacagggtcaagagcacttaggagctcagatttacactgtatatcatgagaaaagcattgaaagtttcaaagcaggagagtgacataattagctttatgttttaaagcggatttttgactttagattctggcaatacagtggtcctgtggtctaagacatctgactaaccttcctgctagcaacaattaaaaatgctgagtgcaataaaaaactagcccttaaatggaatgaatgagtcgactacttggtaaggatgctcagaggctaaaactgaatcaaagcaggaactcttagaagtaagcagtgtgttggctaggcgcagtggctcagcctgtaatcccaacactttgggaagccaaggcaggtggatcacttgagctcaggagtttgagacctgccggggcaacatggcaagaccccgtctct

SEQ ID NO: 11438 - DNA, 2819 bp, Homo sapiens
ccagggggacagcaatccacccagggaccccggagtggagatgacagtgttccggaaagtcagttccacacccccggtgcgctgcagctcccagcactctgtgtttggcttcaaccaggtctcggagctgctgccccgaatggaggactctgggccccttagagacatcaaggagctggtgcgggagcagggcagcaacaatgtgatcgtgacttctgccgaccgagagatgctgaagctcagctcgcaggagaaactgattggagaccttccccagacgcctccaggggctgtcccagacccctctcttgccagtacagactcttcagagccttctcccctggctggagatggagcgccctggagtgggagcagcatggctgacactcccatgagccccctgctgaaggggagcctcagccaggagctgagcaagagcttcctgaccctgacccggcctgaccgggccctggtgaggaccagcagtcgacgggaacaacgcaggggggcaggtggctatcagccccttgaccggcggggctcaggggagcccacgccccagaaagccggctcctcagactcctgcttcagcggcactgacagggagacattgagcagcttcaagagtgagaagaccaactccacccatctggacagccccccaggggggccagcccctgagggcagcgacacagacccaccctctgaggctgagctgcctgcctcaccagacgccggggtcccctcagatgacacgctgcgttcctttgacacggtcattggagcagggacgccaccgggcctggctgagccgctcctggtcgtgcggcccaaggacttggccctgctacggcctagcaaacggcagccacccctgcgaagacactctccacctggccgtgcccctcgacggcccctgcttgaaggtgggggcttctttgaggatgaagacactagtgagggcagtgaactgagcccggcctccagtctccgatcgcagcgccgctacagtactgacagctcctcttctacttcctgctactcccctgagagctcccggggtgcagcagggggaccccggaagcggagggccccccatggggctgaggagggaactgctgtgccccccaagcggccatatgggacccagcggacgcctagtaccgccagcgctaaaacacatgcccgtgtgctgagcatggatggggctgggggtgatgttctgaggcccccactggctggctgcaaggcagagctggaggcccaggttggggtggagcaggctgctagtgagcctgttgtgctgcctgctgaggcgcgaaggggacccgctgccaaccagcccggctggcggggggagctgcaggaggaaggtgctgtggggggagcggccgaggagactggcaggcgggaccgctcaagcagtgtgaggcggacccaggccattcggagacgccacaatgcaggcagcaaccccacccctccagcctctgtcatgggctcgccgcccagcagcctgcaggaagctcagcggggccgggctgcctcccactcccgggcgctgacgctgccctctgcgctgcatttcgcctcttcactgttgctcacccgggccggtgccaatgtgcatgaggcctgcacctttgatgacacttctgagggtgcagtgcactatttctacgatgagagcggtgtgcggcgttcctacacctttggcctggctggaggcggctacgagaaccctgtagggcagcaaggggagcagacagctaatggagcctgggaccgacactcgcattcctccagcttccactcggctgatgtccctgaggctacaggcggcctgaacctgctgcagccgaggcctgtggttctgcagggcatgcaggtgcgccgggtgcccctggagatcccggaggagcagacactgatggaagaagcgccaccccgggcccagcatagttacaagtactggcttctccctggccgctggacctctgtgcgctatgagcggcttgccctgctggctctgctggaccggacgcggggagtgctggagaacatcttcggcgtgggcctgagcagccttgtggccttcctgggctacctgctgctgctcaagggcttcttcactgacatctgggtcttccagttctgcctggtcatcgcctcctgccagtactccttgctgaagagcgtgcagcctgatgcggcgtcccccatgcacggccacaactgggtgatcgcgtacagccgtcctgtctacttctgcatctgctgtctgctcatctggctgctggacgccctgggctcagctcagcccttcccacctgtctccctctacggcctcacgctcttctctgcctccttcttcttctgtgcccgagacgtggccactgtgttcaccctgtgcttccccttcgtcttcctcctgggcctcctgccccaggtcaacacctgccccagacccaggagcccccctgaggctttgccttgcctgcatatttgtttcgctcttactcagtttgggaattcaaattgtcctgcagaggttcattcccctgaccctttccccacattggtaagagtagctgggttttctaagccactctctggaatctctttgtgttagggtctcgatttgaggacattcatttcttcagcagcccattagcaactgagagcccagggatgtcctacaggatagtttcatagtgacaggtggcacttggctaatagaatatggctgatattgtcattaatcattttgtaccttgacatgggttgtctaataaaactcggacccttcttgtgaaatc

SEQ ID NO: 11439 - DNA, 378 bp, Homo sapiens
cgtcgcaaagttataggtgttcacatcttcagaggacaagggtctggcatgggcacagtcccagagctgggcctttagggcaagatccatcttccccactgccccactggaaggtgaggcaagacgggcacgccctgactaggctgtccctgcaggacgcggggagtgctggagaacatcttcggcgtgggcctgagcagccttgtggccttcctgggctacctgctgctgctcaagggcttcttcactgacatctgggtcttccagttctgcctggtcatcgcctcctgccagtactccttgctgaaggtcaggccgggctctctgtgtttccttccccacccgacgattccgcaccaccacgacgattccggtccg

SEQ ID NO: 11440 - DNA, 2587 bp, Homo sapiens
ccagggggacagcaatccacccagggaccccggagtggagatgacagtgttccggaaagtcagttccacacccccggtgcgctgcagctcccagcactctgtgtttggcttcaaccaggtctcggagctgctgccccgaatggaggactctgggccccttagagacatcaaggagctggtgcgggagcagggcagcaacaatgtgatcgtgacttctgccgaccgagagatgctgaagctcagctcgcaggagaaactgattggagaccttccccagacgcctccaggggctgtcccagacccctctcttgccagtacagactcttcagagccttctcccctggctggagatggagcgccctggagtgggagcagcatggctgacactcccatgagccccctgctgaaggggagcctcagccaggagctgagcaagagcttcctgaccctgacccggcctgaccgggccctggtgaggaccagcagtcgacgggaacaacgcaggggggcaggtggctatcagccccttgaccggcggggctcaggggagcccacgccccagaaagccggctcctcagactcctgcttcagcggcactgacagggagacattgagcagcttcaagagtgagaagaccaactccacccatctggacagccccccaggggggccagcccctgagggcagcgacacagacccaccctctgaggctgagctgcctgcctcaccagacgccggggtcccctcagatgacacgctgcgttcctttgacacggtcattggagcagggacgccaccgggcctggctgagccgctcctggtcgtgcggcccaaggacttggccctgctacggcctagcaaacggcagccacccctgcgaagacactctccacctggccgtgcccctcgacggcccctgcttgaaggtgggggcttctttgaggatgaagacactagtgagggcagtgaactgagcccggcctccagtctccgatcgcagcgccgctacagtactgacagctcctcttctacttcctgctactcccctgagagctcccggggtgcagcagggggaccccggaagcggagggccccccatggggctgaggagggaactgctgtgccccccaagcggccatatgggacccagcggacgcctagtaccgccagcgctaaaacacatgcccgtgtgctgagcatggatggggctgggggtgatgttctgaggcccccactggctggctgcaaggcagagctggaggcccaggttggggtggagcaggctgctagtgagcctgttgtgctgcctgctgaggcgcgaaggggacccgctgccaaccagcccggctggcggggggagctgcaggaggaaggtgctgtggggggagcggccgaggagactggcaggcgggaccgctcaagcagtgtgaggcggacccaggccattcggagacgccacaatgcaggcagcaaccccacccctccagcctctgtcatgggctcgccgcccagcagcctgcaggaagctcagcggggccgggctgcctcccactcccgggcgctgacgctgccctctgcgctgcatttcgcctcttcactgttgctcacccgggccggtgccaatgtgcatgaggcctgcacctttgatgacacttctgagggtgcagtgcactatttctacgatgagagcggtgtgcggcgttcctacacctttggcctggctggaggcggctacgagaaccctgtagggcagcaaggggagcagacagctaatggagcctgggaccgacactcgcattcctccagcttccactcggctgatgtccctgaggctacaggcggcctgaacctgctgcagccgaggcctgtggttctgcagggcatgcaggtgcgccgggtgcccctggagatcccggaggtgaggagcagccggggaagggccgtgccagtggggcgtgacggggcgggcagatcactgagtccggcctgcatagagagcttgcccaggtgccccaggagggacgggcagtgctgagtgagcgctccaggggccctactgtgtctgtcctgatctttgatgttggcagagactctgggtctgaatggctggagaagtcatttatttgcttactacgaattcctttggagtacattcctaactctggaggggcccacagtgaacaggggccatgggtgttaatgatgatacttgcggaagtggcagtgttctgttagcaagcagggaccctgtgatgactgtgctgccctgcatacactgtgcacgtgtggctgctggggtgctctctgttaacacttcctgtctcagtatactcattaccagcgctctgtcactcttaagaatatcacagtttggacagtaaatttgtatacttaatctattaacaccagaagcgctaaaaatgcgtgaaacgccatcttagagcttaaagaatgatcataaaagggtacccggcacctgaccctcaaggccacagataggttgggcagcccccagaagctcccacctgcccgcttctggttcatttcttccttgtaaccatgtggggtggaagcgtggccggcccgc

SEQ ID NO: 11441 - DNA, 2496 bp, Homo sapiens
ccagggggacagcaatccacccagggaccccggagtggagatgacagtgttccggaaagtcagttccacacccccggtgcgctgcagctcccagcactctgtgtttggcttcaaccaggtctcggagctgctgccccgaatggaggactctgggccccttagagacatcaaggagctggtgcgggagcagggcagcaacaatgtgatcgtgacttctgccgaccgagagatgctgaagctcagctcgcaggagaaactgattggagaccttccccagacgcctccaggggctgtcccagacccctctcttgccagtacagactcttcagagccttctcccctggctggagatggagcgccctggagtgggagcagcatggctgacactcccatgagccccctgctgaaggggagcctcagccaggagctgagcaagagcttcctgaccctgacccggcctgaccgggccctggtgaggaccagcagtcgacgggaacaacgcaggggggcaggtggctatcagccccttgaccggcggggctcaggggagcccacgccccagaaagccggctcctcagactcctgcttcagcggcactgacagggagacattgagcagcttcaagagtgagaagaccaactccacccatctggacagccccccaggggggccagcccctgagggcagcgacacagacccaccctctgaggctgagctgcctgcctcaccagacgccggggtcccctcagatgacacgctgcgttcctttgacacggtcattggagcagggacgccaccgggcctggctgagccgctcctggtcgtgcggcccaaggacttggccctgctacggcctagcaaacggcagccacccctgcgaagacactctccacctggccgtgcccctcgacggcccctgcttgaaggtgggggcttctttgaggatgaagacactagtgagggcagtgaactgagcccggcctccagtctccgatcgcagcgccgctacagtactgacagctcctcttctacttcctgctactcccctgagagctcccggggtgcagcagggggaccccggaagcggagggccccccatggggctgaggagggaactgctgtgccccccaagcggccatatgggacccagcggacgcctagtaccgccagcgctaaaacacatgcccgtgtgctgagcatggatggggctgggggtgatgttctgaggcccccactggctggctgcaaggcagagctggaggcccaggttggggtggagcaggctgctagtgagcctgttgtgctgcctgctgaggcgcgaaggggacccgctgccaaccagcccggctggcggggggagctgcaggaggaaggtgctgtggggggagcggccgaggagactggcaggcgggaccgctcaagcagtgtgaggcggacccaggccattcggagacgccacaatgcaggcagcaaccccacccctccagcctctgtcatgggctcgccgcccagcagcctgcaggaagctcagcggggccgggctgcctcccactcccgggcgctgacgctgccctctgcgctgcatttcgcctcttcactgttgctcacccgggccggtgccaatgtgcatgaggcctgcacctttgatgacacttctgagggtgcagtgcactatttctacgatgagagcgggaccgacactcgcattcctccagcttccactcggctgatgtccctgaggctacaggcggcctgaacctgctgcagccgaggcctgtggttctgcagggcatgcaggtgcgccgggtgcccctggagatcccggaggtgaggagcagccggggaagggccgtgccagtggggcgtgacggggcgggcagatcactgagtccggcctgcatagagagcttgcccaggtgccccaggagggacgggcagtgctgagtgagcgctccaggggccctactgtgtctgtcctgatctttgatgttggcagagactctgggtctgaatggctggagaagtcatttatttgcttactacgaattcctttggagtacattcctaactctggaggggcccacagtgaacaggggccatgggtgttaatgatgatacttgcggaagtggcagtgttctgttagcaagcagggaccctgtgatgactgtgctgccctgcatacactgtgcacgtgtggctgctggggtgctctctgttaacacttcctgtctcagtatactcattaccagcgctctgtcactcttaagaatatcacagtttggacagtaaatttgtatacttaatctattaacaccagaagcgctaaaaatgcgtgaaacgccatcttagagcttaaagaatgatcataaaagggtacccggcacctgaccctcaaggccacagataggttgggcagcccccagaagctcccacctgcccgcttctggttcatttcttccttgtaaccatgtggggtggaagcgtggccggcccgc

SEQ ID NO: 11442 - DNA, 2728 bp, Homo sapiens
ccagggggacagcaatccacccagggaccccggagtggagatgacagtgttccggaaagtcagttccacacccccggtgcgctgcagctcccagcactctgtgtttggcttcaaccaggtctcggagctgctgccccgaatggaggactctgggccccttagagacatcaaggagctggtgcgggagcagggcagcaacaatgtgatcgtgacttctgccgaccgagagatgctgaagctcagctcgcaggagaaactgattggagaccttccccagacgcctccaggggctgtcccagacccctctcttgccagtacagactcttcagagccttctcccctggctggagatggagcgccctggagtgggagcagcatggctgacactcccatgagccccctgctgaaggggagcctcagccaggagctgagcaagagcttcctgaccctgacccggcctgaccgggccctggtgaggaccagcagtcgacgggaacaacgcaggggggcaggtggctatcagccccttgaccggcggggctcaggggagcccacgccccagaaagccggctcctcagactcctgcttcagcggcactgacagggagacattgagcagcttcaagagtgagaagaccaactccacccatctggacagccccccaggggggccagcccctgagggcagcgacacagacccaccctctgaggctgagctgcctgcctcaccagacgccggggtcccctcagatgacacgctgcgttcctttgacacggtcattggagcagggacgccaccgggcctggctgagccgctcctggtcgtgcggcccaaggacttggccctgctacggcctagcaaacggcagccacccctgcgaagacactctccacctggccgtgcccctcgacggcccctgcttgaaggtgggggcttctttgaggatgaagacactagtgagggcagtgaactgagcccggcctccagtctccgatcgcagcgccgctacagtactgacagctcctcttctacttcctgctactcccctgagagctcccggggtgcagcagggggaccccggaagcggagggccccccatggggctgaggagggaactgctgtgccccccaagcggccatatgggacccagcggacgcctagtaccgccagcgctaaaacacatgcccgtgtgctgagcatggatggggctgggggtgatgttctgaggcccccactggctggctgcaaggcagagctggaggcccaggttggggtggagcaggctgctagtgagcctgttgtgctgcctgctgaggcgcgaaggggacccgctgccaaccagcccggctggcggggggagctgcaggaggaaggtgctgtggggggagcggccgaggagactggcaggcgggaccgctcaagcagtgtgaggcggacccaggccattcggagacgccacaatgcaggcagcaaccccacccctccagcctctgtcatgggctcgccgcccagcagcctgcaggaagctcagcggggccgggctgcctcccactcccgggcgctgacgctgccctctgcgctgcatttcgcctcttcactgttgctcacccgggccggtgccaatgtgcatgaggcctgcacctttgatgacacttctgagggtgcagtgcactatttctacgatgagagcgggaccgacactcgcattcctccagcttccactcggctgatgtccctgaggctacaggcggcctgaacctgctgcagccgaggcctgtggttctgcagggcatgcaggtgcgccgggtgcccctggagatcccggaggagcagacactgatggaagaagcgccaccccgggcccagcatagttacaagtactggcttctccctggccgctggacctctgtgcgctatgagcggcttgccctgctggctctgctggaccggacgcggggagtgctggagaacatcttcggcgtgggcctgagcagccttgtggccttcctgggctacctgctgctgctcaagggcttcttcactgacatctgggtcttccagttctgcctggtcatcgcctcctgccagtactccttgctgaagagcgtgcagcctgatgcggcgtcccccatgcacggccacaactgggtgatcgcgtacagccgtcctgtctacttctgcatctgctgtctgctcatctggctgctggacgccctgggctcagctcagcccttcccacctgtctccctctacggcctcacgctcttctctgcctccttcttcttctgtgcccgagacgtggccactgtgttcaccctgtgcttccccttcgtcttcctcctgggcctcctgccccaggtcaacacctgccccagacccaggagcccccctgaggctttgccttgcctgcatatttgtttcgctcttactcagtttgggaattcaaattgtcctgcagaggttcattcccctgaccctttccccacattggtaagagtagctgggttttctaagccactctctggaatctctttgtgttagggtctcgatttgaggacattcatttcttcagcagcccattagcaactgagagcccagggatgtcctacaggatagtttcatagtgacaggtggcacttggctaatagaatatggctgatattgtcattaatcattttgtaccttgacatgggttgtctaataaaactcggacccttcttgtgaaatc

SEQ ID NO: 11443 - DNA, 328 bp, Homo sapiens
gtctgcactctttttgtttcttcttttgctcagtataacctgtgtaagggttgtccatgttacagcaatgtatcaataatttttttcattgtattactaatattcctttatatgaatacaccacaatttgtttagcccttctcttattgatggacgttagctgttgtgattaaagctgttgtgacattaatgtataaatctttttgtggacatatattgtcattgctcttggataaatacctaggagtaaaatttctctttcaaaaaaccacctttcaaagttgtacgttcccactagcaaagtatgaaagttgtggttgctccatat

SEQ ID NO: 11444 - DNA, 420 bp, Homo sapiens
ttgggatgcagtgctaaattccgtaatcgtgtgaggttatctgaggaattaaaggaattgaggtctattgctgaggtacagtgtctatttgtacagtagaaggattcattctaggaatggcactgagaagatgcagtcagaaaagaagaaatgccaagctgggtagacattcaagagattctgtggatttctgtggacataaaataccccttcatacaaaattaaaaatgcagttttctaattatgttgtctagacactattgaagtattccaatttcctttattattatatctcaatgattttagaaattatatgacaatttgggttacttgagtgcaaatacctacatatgtgtgtatataatgtgaggacagaagataaagggaatttgtttaattacactatatgtatgttctggc

SEQ ID NO: 11445 - DNA, 326 bp, Homo sapiens
aattcaatctggaatcagaaagcagtggattctggcaaatggtccttgtgccctccccactcatccttggtctggtcccctgttgcccatagccctttaccctgagcaccacccaacagactggggaccagccccctcgcctgcctgtgtctctccccaaacccctttagatggggagggaagaggaggagaggggaggggacctgccccctcctcaggcatctgggaaggccctgcccccatgggctttacccttccctgagggctctctccccgacacatttgttaaaatcaaacctgaataaaactacaagtttaatatgaaa

SEQ ID NO: 11446 - DNA, 442 bp, Homo sapiens
gttggaaacttaaaccccgttacgtagtacgtaacgggaggtgttgcctagtgggaggtgtttaggtcatgagggctctaccctcgtgaattgattaataccattattgtaggagtggtttcattattgtgggagtgggttatatctaaaagtaggttcagccccctattgccctctcttactcttgcccttctgccttccaccatgggacgatgcagtaataagcccctcaccagatatgaccccttgatcttacacttcctagcctccataactgtgagccaaataaatttctgtttagtcaccaaagggaaaggtactaattaagtgccttctttgtaccaagtaatatgtcaggtactttgcagttaaatgacacttaaatgctgtgaagttcataatgttaatgtcgacgcggcccgcaatttagtagtagtagtcg

SEQ ID NO: 11447 - DNA, 591 bp, Homo sapiens
gcggccgctactactactactaaattcgcggccggtcgaccccattaggtcctacgtaacgggaggtgttgcctagtgggaggtgtttaggtcatgagggctctaccctcgtgaattgattaataccattattgtaggagtggtttcattattgtgggagtgggttatatctaaaagtaggttcagccccctattgccctctcttactcttgcccttctgccttccaccatgggacgatgcagtaataagcccctcaccagatatgaccccttgatcttacacttcctagcctccataactgtgagccaaataaatttctgtttagtcaccaaagggaaaggtactaattaagtgccttctttgtaccaagtaatatgtcaggtactttgcagttaaatgacacttaaatgctgtgaagttcataatgttaacaggtagtaaagatggggattaaagagctgagagtataactgcaagtccaggcattgttacattacagctgactcatactaagtggaccatataggcagtggaatgtaggcaggaaatccctatcggtttaaaaatttcacccttttatggaaggaaca

SEQ ID NO: 11448 - DNA, 262 bp, Homo sapiens
tgagaggttcagacttcctcgtggggagagtttacagcagagaaatgacaagatcagggtcagcttttagaaccatccctccaggaggcgcggggaagcctggtgtgatagtctggagctccccagtggtgaggcggcaacactgtgcgacactcaccctgctcagtccagcagtaactcacctaaacctcactgcaaccctaggaggaacagagagaggttaaggaacttgcccaaggtcacacagctagccagttacaga

SEQ ID NO: 11449 - DNA, 1034 bp, Homo sapiens
atgattgttttccactctgcctcccttttaaagatgtcacaacctgccatttataatgcagagcggtttctcgctccatctctcctattttctaacctgttaacaaaaaccctcctgcagacagcaccttttggcatctgcctgcggaggtgtgggatttggccttgcacgttgggttttatgcagtgtttttctaagtattttaattatcttttccaattttatattggccctttagacctctcactactcaaaccttccatcacggttcatttattactgtctgctgaaaagatgatgtgttagaataaattctcattctcgtttttgaggagcagggcaaaaaaaaaagacttgtctctggcttttttcctattttatttcttgtttctttcttgaagtaacgaacaataatttgtgataaaagaatacagacaagacacctgattatccacatggcagtgtcactgcaggtcccatcacctgcaagctcgcttgctgggccgctagggagcacttggcagtggcagctcccttgtcctggggaaggccctgagaaatcagatactccgttggtactctgtgttctctcgggacatcattttccacttcagaactgtctgttctttttgttcagctacaagtaaacttttgggaacttggcttcccttcagtgattgctagcttttattgctacattgaaataataggtcttggcatttgaaatttgattttatgacaaaaggatatgtcaatcacctagaaaggaagagaaatttatacatgaaattgacataatgagcatacctaacaaatttattctagttaatacattctacttataaaagatatttatagatccttaaatatctaatttgcaattactttttagtgttagtctagcaggtgtatcaatgaaaacttagctgatgtttattaatatcacaaacatgacatttttgctataataatagcaaaatttaacccgttactctttaaccttgtactggaaattctaagcagtgcagcaaaaa

SEQ ID NO: 11450 - DNA, 284 bp, Homo sapiens
ctggatccaagaaactccagtccacctctggttgggatggaattgtgtgtgtgtgtgtgtgtgtgtgtgtgtgtgtggtggagggggcttggccctggaaggcactgcttctggagtgtgccctagttctcataaataaacccatgttgtttctgagacctagtcctcacattgtatattgattctagcacagaactcccagctccttatgctcaagtccctgtttgccttcctgtttagttccctaattctgtacagaatggagaaacccacctgcttatgct

SEQ ID NO: 11451 - DNA, 435 bp, Homo sapiens
gagcaggtgttaagactctgccttcaggccctgaggggtcagggtagtgggaccaccatcagtgcaggtgggaagaggctgaatgtagcaagccatcctgagaatagcaccagccatgagctgagagccaagaagtctggcagcaggcaagggagtggcactttttttttttttttgagtggtagcaaggtttattgtgaagagtgaaagaacaaagcttccacagcgtggaaggggacccgagcgggttgcccgggagtggtacttctttgcccattggtagatcaaaaggccattttgggcccaagcaacccctatacctgggctaagggagtgcatcatgtgggcagggccttattttggcctcacttgttcatttcatagcctcttggtcaaggcagggttggggctcagcatgacccaggagaaagggag

SEQ ID NO: 11452 - DNA, 448 bp, Homo sapiens
tttgtggaacaataacattattcattttacagtgaatttattctgattcctattttgaaataactggataaatggactttgcatagagcagtatcttccatatttttacttatagggacccctacataaaaataagttcccctctacatgataatgtgtatagttttgtcataatttcacagtactgtttatatacttaccataaatttaccacagactgatggatgtaatatacccagtgcatgaggatttaaagaaccttagtgataacttcacagttttataagctgggactcattattatagtagtggtttaaatacgtggagagggtcaggtgtggtggttcatgcctgtaatcctgctactttggaggttgaggtgggaggattgcttgaggccaggagttcgagactagcctgagcaatatagtgagaccttgtgtctaca

SEQ ID NO: 11453 - DNA, 353 bp, Homo sapiens
ttttttttggaatgaagtttcgctcttgttgcccaggctggagcgcaatggcgcgatctcggctcactgcaacctctgcctccccagttcaagcgattctcctgcttcagcctcctgagtatctgggattacaggcgcccaccaccacgcccggctaattttcgtttatttagtagagacggggtttcaccatgttgatcaggctggtcttagtcttctgacctcaggtgatccacccgcctcggcctcccaaagtgctgggattacaggtgtgagccaccacgcctggctgtgcaacatgtttctaagtgaacagtatgacttcagagagtcatactgttttaagagagtta

SEQ ID NO: 11454 - DNA, 984 bp, Homo sapiens
ctccgagttcccctggctctgaccgcgctggcctgggccggagagcccaggaggcgtgtctcagagaaaagatataagcggcccccggacgctaaagcggtgccagcggcggagtctccaactgggagagctgcagctgccgagaggaggagaacgctgaggtcggtcggaccaacggacgcgctgaccgctgccaactgcagctcgcgctgcctcctgctcgcgccgtgccactaaggtcactcccgcctccgagagcccagagccgagatggaaacggtccaggagctgatccccctggccaaggagatgatggcccagaagcgcaaggggaagatggtgaagctgtacgtgctgggcagcgtgctggccctcttcggcgtggtgctcggcctgatggagactgtgtgcagccccttcacggccgccagacgtctgcgggaccaggaggcagccgtggcggagctgcaggccgccctggagcgacaggctctccagaagcaagccctgcaggagaaaggcaagcagcaggacacggtcctcggcggccgggccctgtccaaccggcagcacgcctcctaggaactgtgggagaccagcggagtgggagggagacgcagtagacagagacagaccgagaaggaagggagagacagagggggcgcgcgcacaggagcctgactccgctgggagagtgcaggagcacgtgctgttttttatttggacttaacttcagagaaaccgctgacatctagaactgacctaccacaagcatccaccaaaggagtttgggattgagttttgctgctgtgcagcactgcattgtcatgacatttccaacactgtgtgaattatctaaatgcgtctaccattttgcactagggaggaaggataaatgctttttatgttattattattaattattacaatgaccaccattttgcattttgaaataaaaaactttttataccataaactcatgta

SEQ ID NO: 11455 - DNA, 797 bp, Homo sapiens
ctccgagttcccctggctctgaccgcgctggcctgggccggagagcccaggaggcgtgtctcagagaaaagatataagcggcccccggacgctaaagcggtgccagcggcggagtctccaactgggagagctgcagctgccgagaggaggagaacgctgaggtcggtcggaccaacggacgcgctgaccgctgccaactgcagctcgcgctgcctcctgctcgcgccgtgccactaaggtcactcccgcctccgagagcccagagccgagatggaaacggtccaggagctgatccccctggccaaggagatgatggcccagaagcgcaaggggaagatggtgaagctgtacgtgctgggcagcgtgctggccctcttcggcgtggtgctcggcctgatggagactgtgtgcacggagtgggagggagacgcagtagacagagacagaccgagaaggaagggagagacagagggggcgcgcgcacaggagcctgactccgctgggagagtgcaggagcacgtgctgttttttatttggacttaacttcagagaaaccgctgacatctagaactgacctaccacaagcatccaccaaaggagtttgggattgagttttgctgctgtgcagcactgcattgtcatgacatttccaacactgtgtgaattatctaaatgcgtctaccattttgcactagggaggaaggataaatgctttttatgttattattattaattattacaatgaccaccattttgcattttgaaataaaaaactttttataccataaactcatgta

SEQ ID NO: 11456 - DNA, 790 bp, Homo sapiens
gcggagtctccaactgggagagctgcagctgccgagaggaggagaacgctgaggtcggtcggaccaacggacgcgctgaccgctgccaactgcagctcgcgctgcctcctgctcgcgccgtgccactaaggtagtccgcctttctatgagccctccccaagattagctgggtgcggggtggtgggagccgttctttggtggctgaagcccctctcctgctgctcctcctgcaggtcactcccgcctccgagagcccagagccgagatggaaacggtccaggagctgatccccctggccaaggagatgatggcccagaagcgcaaggggaagatggtgaagctgtacgtgctgggcagcgtgctggccctcttcggcgtggtgctcggcctgatggagactgtgtgcagccccttcacggccgccagacgtctgcgggaccaggaggcagccgtggcggagctgcaggccgccctggagcgacaggctctccagaagcaagccctgcaggagaaaggcaagcagcaggacacggtcctcggcggccgggccctgtccaaccggcagcacgcctcctaggaactgtgggagaccagcggagtgggagggagacgcagtagacagagacagaccgagaaggaagggagagacagagggggcgcgcgcacaggagcctgactccgctgggagagtgcaggagcacgtgctgttttttatttggacttaacttcagagaaaccgctgacatctagaactgacctaccacaagcatccaccaaaggagtttgggat

SEQ ID NO: 11457 - DNA, 1626 bp, Homo sapiens
atgaccttctacagtgaggtgaaacaaatagagaagagaaggttgaaaagagaagtaacagtgacagcaaagaaaaccgggaaacaaaattaaatggtcctggtgaaaacgtcagtgaggatgaggctcagtcaagtaatcaacgtaagagagctaataagcacaagtgggtaccactccacttagatgttgtaagatcagagagtcaagaaagacctggatcccggaacagctcaagatgtcaacctgaagcaaataaaccaacacataacaataggagaaatgatacacgaagttggaagcgagatagagaaaaaagagatgatcaagatgacgtttccagtgtgagaagtgagggtggtaatatccgaggttcctttagaggtcgaggaagaggccgaggacggggaagaggacgaggcagaggaaatcctcgattgaactttgattattcatatggttatcaagaacatggtgaaaggactgatcaaccatttcaaacagaacttaataccagtatgatgtattactatgatgatggtacaggtgtacaggtgtatcctgtggaagaagcgttgcttaaagagtatattaagcgtcaaattgaatattacttcagtgtagaaaatttggaacgagacttctttcttcggggaaagatggatgaacaaggtttcttgcctatttccctgattgctggttttcagcgtgttcaggctctcactacaaaccttaatctcatcttagaggcactgaaggatagcacagaagtagaaattgtggatgagaaaatgagaaaaaagatagaaccagaaaaatggccaattccaggccctcctccacgcagtgtgccaccaacagacttctctcaactgattgattgtccagagtttgtaccaggccaagccttttgctcacatacagagtctgccccaaattctccaagaattggaagcccattgagcccaaagaaaaacagtgaaacaagtattcttcaagcaatgtctagaggtttgtctaccagtttgcctgacttggactcagaaccttggatagaagttaaaaaaagacatcagccagccccagtgaaattgagggaatcagtgtctgtccctgaagggtcattaaatcagctatgttcttcagaagaaccagaacaagaagaacttgattttttgtttgatgaagagattgaacaaataggacgaaaaaacacatttactgattggtctgataatgattcagattatgaaattgatgaccaagacttaaacaagattttgattgtaactcagacaccaccttatgtgaaaaaacatcgtggaggagatcgaacaggcacccacatgtctcgggcaaaaatcacatctgaacttgctaaagttatcaatgatggcttatattattatgaacaggatctatggatggaagaagatgaaaacaaacacacagccataaaggtaattgtttctggccaacatctttctactgatgctttgttttgattgtatgttgctgtttatattttctcaaacttgaggctctattttatgaaatgttgaatataaatacattgtatttaacttgaaaaattcctggaaatatacctgataattaccacctgag

SEQ ID NO: 11458 - DNA, 479 bp, Homo sapiens
gcggccgccactagcgctggggcgcggggagagccgtcgccggcgctggtgctgggacgcagcgtgccccaggcggctgtccccgtgaggcccctggcgctgcacctggcgcacaaggcgcgtgggcccgggggccctttcggcggggagccgccaccgccaccgccgccgccgtcgccgttgccgccgttgctgcgggatccgccggccgaggacgcccgggaagaggtggcagctggccctgcggaaaagcggcagccgccgctgctgccgcctaagggaaatccctggaccaaaaagcctccccagcacctgtccccagacacgacaggtccgccaccgcccccgctggaaaccctggaggcaggtctgtggttgctctgcgttgggcactggcagggtgcgggcaggggcgacttgcgggacttgccggcgcgtggcggcggtagcgggcaccaggcccgggtaacggcaggcct

SEQ ID NO: 11459 - DNA, 358 bp, Homo sapiens
ggagaggacggggccggcgggcggttggcgctccgttcggtgcggggaggggcgtcacgccgggcgctgcgcggcctcggcgggcggcggcagcggcggccacggccgccgggctctcgggttgtctgtccccagttggagccggccggtgtcccggcggagagacgggcagtcgggttccctggcctcggggccaccccggctggggcggctggggcagagggacgatgtctactcgcgccccgatgcccgccgcccattctcgggaggatccgcccgcggtgactgctgagagggagtcgctgttggccgcggcgaaccggccggccgagcagccgcccccgcccgaatgtgaggg

SEQ ID NO: 11460 - DNA, 2460 bp, Homo sapiens
gcggccgccactagcgctggggcgcggggagagccgtcgccggcgctggtgctgggacgcagcgtgccccaggcggctgtccccgtgaggcccctggcgctgcacctggcgcacaaggcgcgtgggcccgggggccctttcggcggggagccgccaccgccaccgccgccgccgtcgccgttgccgccgttgctgcgggatccgccggccgaggacgcccgggaagaggtggcagctggccctgcggaaaagcggcagccgccgctgctgccgcctaagggaaatccctggaccaaaaagcctccccagcacctgtccccagacacgacaggtccgccaccgcccccgctggaaaccctggaggcagaattcggttccctcaaaattataaaagcaggaaagctcaagacaaagaaatccaacaaggctagtgatttcagtgatatggagaattggccaacaccaagtgaattagtgaacactggatttcagagcgtcctcagccaaggaaataaaaagccacaaaatagaaaagaaaaagaagagaaggttgaaaagagaagtaacagtgacagcaaagaaaaccgggaaacaaaattaaatggtcctggtgaaaacgtcagtgaggatgaggctcagtcaagtaatcaacgtaagagagctaataagcacaagtgggtaccactccacttagatgttgtaagatcagagagtcaagaaagacctggatcccggaacagctcaagatgtcaacctgaagcaaataaaccaacacataacaataggagaaatgatacacgaagttggaagcgagatagagaaaaaagagatgatcaagatgacgtttccagtgtgagaagtgagggtggtaatatccgaggttcctttagaggtcgaggaagaggccgaggacggggaagaggacgaggcagaggaaatcctcgattgaactttgattattcatatggttatcaagaacatggtgaaaggactgatcaaccatttcaaacagaacttaataccagtatgatgtattactatgatgatggtacaggtgtacaggtgtatcctgtggaagaagcgttgcttaaagagtatattaagcgtcaaattgaatattacttcagtgtagaaaatttggaacgagacttctttcttcggggaaagatggatgaacaaggtttcttgcctatttccctgattgctggttttcagcgtgttcaggctctcactacaaaccttaatctcatcttagaggcactgaaggatagcacagaagtagaaattgtggatgagaaaatgagaaaaaagatagaaccagaaaaatggccaattccaggccctcctccacgcagtgtgccaccaacagacttctctcaactgattgattgtccagagtttgtaccaggccaagccttttgctcacatacagtcagggtgatgatcttctgaagctcttggatgtcatttgatcggaatatgcagtggaataggtgactcactgaaatgcctttataaatactggaacaaatcctgctgcaaaaatgaaagcgatcagactgtcttctgttcaagaatgtctattcccacctcttggtggaggaagttgggccaacactgcagtggagataaccacctttgcgataatgagagacagaccagaggactgctactctttttataggagctgcctatttctgtgtaattggcctgggctgcatgggctgcttttattcatggtgggaaagttaattattattattctggaaataccgcaagattatgttttctgtttccagggttatgtacttgtgtccagatgaataaagcagaaaaagaggggattgagtagcatttcccagattcttaagtactttgctattcgatttgcctttcagtgtagtgtacattgtaaaactcagatattgtcatgatgtttcacttggacataagacttattaatgtggtcacttaaggggtaaggaatttaagaactggatgaggttatttcttcctttactcttcaaaatgtatttttgatacatcagtatgagaggacgtcccatcaacaaagcatcgatgatggacagtctcacactatttttatcatatgtttctttgtcagccttctgcttctaatcccagtaagcaacttggacaggcattttaaaagctgaagaaaagtgacattattttagctagtggtttttaatttattttttgttaagatataatgggtgattatataagttagatttatttatgatatcaacttgggtccaagatgatagttttagctagcttatgaacattgggttcacaaggcattgggtaagttagataaaatagcatatactttctctgcagggtaggtaagataggtcagtcaagttggtaatgcctgtccattaaccatttatgcatactaataaaattataagaataaaatcaaaaaaagta

SEQ ID NO: 11461 - DNA, 2227 bp, Homo sapiens
gctctcgggccgcccctcttcgccgtctccacgcctccgcgggcagttaccagctttggctgctcgcgcctccccaactcgggtaaagctcctcggcctcggcgtgctgcgcctccgcggctgccctgcgccagaattcggttccctcaaaattataaaagcaggaaagctcaagacaaagaaatccaacaaggctagtgatttcagtgatatggagaattggccaacaccaagtgaattagtgaacactggatttcagagcgtcctcagccaaggaaataaaaagccacaaaatagaaaagaaaaagaagagaaggttgaaaagagaagtaacagtgacagcaaagaaaaccgggaaacaaaattaaatggtcctggtgaaaacgtcagtgaggatgaggctcagtcaagtaatcaacgtaagagagctaataagcacaagtgggtaccactccacttagatgttgtaagatcagagagtcaagaaagacctggatcccggaacagctcaagatgtcaacctgaagcaaataaaccaacacataacaataggagaaatgatacacgaagttggaagcgagatagagaaaaaagagatgatcaagatgacgtttccagtgtgagaagtgagggtggtaatatccgaggttcctttagaggtcgaggaagaggccgaggacggggaagaggacgaggcagaggaaatcctcgattgaactttgattattcatatggttatcaagaacatggtgaaaggactgatcaaccatttcaaacagaacttaataccagtatgatgtattactatgatgatggtacaggtgtacaggtgtatcctgtggaagaagcgttgcttaaagagtatattaagcgtcaaattgaatattacttcagtgtagaaaatttggaacgagacttctttcttcggggaaagatggatgaacaaggtttcttgcctatttccctgattgctggttttcagcgtgttcaggctctcactacaaaccttaatctcatcttagaggcactgaaggatagcacagaagtagaaattgtggatgagaaaatgagaaaaaagatagaaccagaaaaatggccaattccaggccctcctccacgcagtgtgccaccaacagacttctctcaactgattgattgtccagagtttgtaccaggccaagccttttgctcacatacagtcagggtgatgatcttctgaagctcttggatgtcatttgatcggaatatgcagtggaataggtgactcactgaaatgcctttataaatactggaacaaatcctgctgcaaaaatgaaagcgatcagactgtcttctgttcaagaatgtctattcccacctcttggtggaggaagttgggccaacactgcagtggagataaccacctttgcgataatgagagacagaccagaggactgctactctttttataggagctgcctatttctgtgtaattggcctgggctgcatgggctgcttttattcatggtgggaaagttaattattattattctggaaataccgcaagattatgttttctgtttccagggttatgtacttgtgtccagatgaataaagcagaaaaagaggggattgagtagcatttcccagattcttaagtactttgctattcgatttgcctttcagtgtagtgtacattgtaaaactcagatattgtcatgatgtttcacttggacataagacttattaatgtggtcacttaaggggtaaggaatttaagaactggatgaggttatttcttcctttactcttcaaaatgtatttttgatacatcagtatgagaggacgtcccatcaacaaagcatcgatgatggacagtctcacactatttttatcatatgtttctttgtcagccttctgcttctaatcccagtaagcaacttggacaggcattttaaaagctgaagaaaagtgacattattttagctagtggtttttaatttattttttgttaagatataatgggtgattatataagttagatttatttatgatatcaacttgggtccaagatgatagttttagctagcttatgaacattgggttcacaaggcattgggtaagttagataaaatagcatatactttctctgcagggtaggtaagataggtcagtcaagttggtaatgcctgtccattaaccatttatgcatactaataaaattataagaataaaatcaaaaaaagta

SEQ ID NO: 11462 - DNA, 2715 bp, Homo sapiens
gcggccgccactagcgctggggcgcggggagagccgtcgccggcgctggtgctgggacgcagcgtgccccaggcggctgtccccgtgaggcccctggcgctgcacctggcgcacaaggcgcgtgggcccgggggccctttcggcggggagccgccaccgccaccgccgccgccgtcgccgttgccgccgttgctgcgggatccgccggccgaggacgcccgggaagaggtggcagctggccctgcggaaaagcggcagccgccgctgctgccgcctaagggaaatccctggaccaaaaagcctccccagcacctgtccccagacacgacaggtccgccaccgcccccgctggaaaccctggaggcagaattcggttccctcaaaattataaaagcaggaaagctcaagacaaagaaatccaacaaggctagtgatttcagtgatatggagaattggccaacaccaagtgaattagtgaacactggatttcagagcgtcctcagccaaggaaataaaaagccacaaaatagaaaagaaaaagaagagaaggttgaaaagagaagtaacagtgacagcaaagaaaaccgggaaacaaaattaaatggtcctggtgaaaacgtcagtgaggatgaggctcagtcaagtaatcaacgtaagagagctaataagcacaagtgggtaccactccacttagatgttgtaagatcagagagtcaagaaagacctggatcccggaacagctcaagatgtcaacctgaagcaaataaaccaacacataacaataggagaaatgatacacgaagttggaagcgagatagagaaaaaagagatgatcaagatgacgtttccagtgtgagaagtgagggtggtaatatccgaggttcctttagaggtcgaggaagaggccgaggacggggaagaggacgaggcagaggaaatcctcgattgaactttgattattcatatggttatcaagaacatggtgaaaggactgatcaaccatttcaaacagaacttaataccagtatgatgtattactatgatgatggtacaggtgtacaggtgtatcctgtggaagaagcgttgcttaaagagtatattaagcgtcaaatttgatgcaaacactgaagaaaagggcctttttgtgggcagaaagtgcttgacatgtggctgtcaacttcataccactattactgtcttttttgtaacttttgctgccaagtcccttctgagacctgacagtggacatgcaactccatgtcaggataatcggcctccagtgtgctcatacaagtgagggaggagcagagctacttcagtgttgacaaaatttctgatcatgcagtgtagaatccagagcctctaagtgaatattacttcagtgtagaaaatttggaacgagacttctttcttcggggaaagatggatgaacaaggtttcttgcctatttccctgattgctggttttcagcgtgttcaggctctcactacaaaccttaatctcatcttagaggcactgaaggatagcacagaagtagaaattgtggatgagaaaatgagaaaaaagatagaaccagaaaaatggccaattccaggccctcctccacgcagtgtgccaccaacagacttctctcaactgattgattgtccagagtttgtaccaggccaagccttttgctcacatacagtcagggtgatgatcttctgaagctcttggatgtcatttgatcggaatatgcagtggaataggtgactcactgaaatgcctttataaatactggaacaaatcctgctgcaaaaatgaaagcgatcagactgtcttctgttcaagaatgtctattcccacctcttggtggaggaagttgggccaacactgcagtggagataaccacctttgcgataatgagagacagaccagaggactgctactctttttataggagctgcctatttctgtgtaattggcctgggctgcatgggctgcttttattcatggtgggaaagttaattattattattctggaaataccgcaagattatgttttctgtttccagggttatgtacttgtgtccagatgaataaagcagaaaaagaggggattgagtagcatttcccagattcttaagtactttgctattcgatttgcctttcagtgtagtgtacattgtaaaactcagatattgtcatgatgtttcacttggacataagacttattaatgtggtcacttaaggggtaaggaatttaagaactggatgaggttatttcttcctttactcttcaaaatgtatttttgatacatcagtatgagaggacgtcccatcaacaaagcatcgatgatggacagtctcacactatttttatcatatgtttctttgtcagccttctgcttctaatcccagtaagcaacttggacaggcattttaaaagctgaagaaaagtgacattattttagctagtggtttttaatttattttttgttaagatataatgggtgattatataagttagatttatttatgatatcaacttgggtccaagatgatagttttagctagcttatgaacattgggttcacaaggcattgggtaagttagataaaatagcatatactttctctgcagggtaggtaagataggtcagtcaagttggtaatgcctgtccattaaccatttatgcatactaataaaattataagaataaaatcaaaaaaagta

SEQ ID NO: 11463 - DNA, 2319 bp, Homo sapiens
gcggccgccactagcgctggggcgcggggagagccgtcgccggcgctggtgctgggacgcagcgtgccccaggcggctgtccccgtgaggcccctggcgctgcacctggcgcacaaggcgcgtgggcccgggggccctttcggcggggagccgccaccgccaccgccgccgccgtcgccgttgccgccgttgctgcgggatccgccggccgaggacgcccgggaagaggtggcagctggccctgcggaaaagcggcagccgccgctgctgccgcctaagggaaatccctggaccaaaaagcctccccagcacctgtccccagacacgacaggtccgccaccgcccccgctggaaaccctggaggcagaattcggttccctcaaaattataaaagcaggaaagctcaagacaaagaaatccaacaaggctagtgatttcagtgatatggagaattggccaacaccaagtgaattagtgaacactggatttcagagcgtcctcagccaaggaaataaaaagccacaaaatagaaaagaaaaagaagagaaggttgaaaagagaagtaacagtgacagcaaagaaaaccgggaaacaaaattaaatggtcctggtgaaaacgtcagtgaggatgaggctcagtcaagtaatcaacgtaagagaggttggaagcgagatagagaaaaaagagatgatcaagatgacgtttccagtgtgagaagtgagggtggtaatatccgaggttcctttagaggtcgaggaagaggccgaggacggggaagaggacgaggcagaggaaatcctcgattgaactttgattattcatatggttatcaagaacatggtgaaaggactgatcaaccatttcaaacagaacttaataccagtatgatgtattactatgatgatggtacaggtgtacaggtgtatcctgtggaagaagcgttgcttaaagagtatattaagcgtcaaattgaatattacttcagtgtagaaaatttggaacgagacttctttcttcggggaaagatggatgaacaaggtttcttgcctatttccctgattgctggttttcagcgtgttcaggctctcactacaaaccttaatctcatcttagaggcactgaaggatagcacagaagtagaaattgtggatgagaaaatgagaaaaaagatagaaccagaaaaatggccaattccaggccctcctccacgcagtgtgccaccaacagacttctctcaactgattgattgtccagagtttgtaccaggccaagccttttgctcacatacagtcagggtgatgatcttctgaagctcttggatgtcatttgatcggaatatgcagtggaataggtgactcactgaaatgcctttataaatactggaacaaatcctgctgcaaaaatgaaagcgatcagactgtcttctgttcaagaatgtctattcccacctcttggtggaggaagttgggccaacactgcagtggagataaccacctttgcgataatgagagacagaccagaggactgctactctttttataggagctgcctatttctgtgtaattggcctgggctgcatgggctgcttttattcatggtgggaaagttaattattattattctggaaataccgcaagattatgttttctgtttccagggttatgtacttgtgtccagatgaataaagcagaaaaagaggggattgagtagcatttcccagattcttaagtactttgctattcgatttgcctttcagtgtagtgtacattgtaaaactcagatattgtcatgatgtttcacttggacataagacttattaatgtggtcacttaaggggtaaggaatttaagaactggatgaggttatttcttcctttactcttcaaaatgtatttttgatacatcagtatgagaggacgtcccatcaacaaagcatcgatgatggacagtctcacactatttttatcatatgtttctttgtcagccttctgcttctaatcccagtaagcaacttggacaggcattttaaaagctgaagaaaagtgacattattttagctagtggtttttaatttattttttgttaagatataatgggtgattatataagttagatttatttatgatatcaacttgggtccaagatgatagttttagctagcttatgaacattgggttcacaaggcattgggtaagttagataaaatagcatatactttctctgcagggtaggtaagataggtcagtcaagttggtaatgcctgtccattaaccatttatgcatactaataaaattataagaataaaatcaaaaaaagta

SEQ ID NO: 11464 - DNA, 4268 bp, Homo sapiens
gcggccgccactagcgctggggcgcggggagagccgtcgccggcgctggtgctgggacgcagcgtgccccaggcggctgtccccgtgaggcccctggcgctgcacctggcgcacaaggcgcgtgggcccgggggccctttcggcggggagccgccaccgccaccgccgccgccgtcgccgttgccgccgttgctgcgggatccgccggccgaggacgcccgggaagaggtggcagctggccctgcggaaaagcggcagccgccgctgctgccgcctaagggaaatccctggaccaaaaagcctccccagcacctgtccccagacacgacaggtccgccaccgcccccgctggaaaccctggaggcagaattcggttccctcaaaattataaaagcaggaaagctcaagacaaagaaatccaacaaggctagtgatttcagtgatatggagaattggccaacaccaagtgaattagtgaacactggatttcagagcgtcctcagccaaggaaataaaaagccacaaaatagaaaagaaaaagaagagaaggttgaaaagagaagtaacagtgacagcaaagaaaaccgggaaacaaaattaaatggtcctggtgaaaacgtcagtgaggatgaggctcagtcaagtaatcaacgtaagagagctaataagcacaagtgggtaccactccacttagatgttgtaagatcagagagtcaagaaagacctggatcccggaacagctcaagatgtcaacctgaagcaaataaaccaacacataacaataggagaaatgatacacgaagttggaagcgagatagagaaaaaagagatgatcaagatgacgtttccagtgtgagaagtgagggtggtaatatccgaggttcctttagaggtcgaggaagaggccgaggacggggaagaggacgaggcagaggaaatcctcgattgaactttgattattcatatggttatcaagaacatggtgaaaggactgatcaaccatttcaaacagaacttaataccagtatgatgtattactatgatgatggtacaggtgtacaggtgtatcctgtggaagaagcgttgcttaaagagtatattaagcgtcaaattgaatattacttcagtgtagaaaatttggaacgagacttctttcttcggggaaagatggatgaacaaggtttcttgcctatttccctgattgctggttttcagcgtgttcaggctctcactacaaaccttaatctcatcttagaggcactgaaggatagcacagaagtagaaattgtggatgagaaaatgagaaaaaagatagaaccagaaaaatggccaattccaggccctcctccacgcagtgtgccaccaacagacttctctcaactgattgattgtccagagtttgtaccaggccaagccttttgctcacatacagagtctgccccaaattctccaagaattggaagcccattgagcccaaagaaaaacagtgaaacaagtattcttcaagcaatgtctagaggtttgtctaccagtttgcctgacttggactcagaaccttggatagaagttaaaaaaagacatcagccagccccagtgaaattgagggaatcagtgtctgtccctgaagggtcattaaatcagctatgttcttcagaagaaccagaacaagaagaacttgattttttgtttgatgaagagattgaacaaataggacgaaaaaacacatttactgattggtctgataatgattcagattatgaaattgatgaccaagacttaaacaagattttgattgtaactcagacaccaccttatgtgaaaaaacatcgtggaggagatcgaacaggcacccacatgtctcgggcaaaaatcacatctgaacttgctaaagttatcaatgatggcttatattattatgaacaggatctatggatggaagaagatgaaaacaaacacacagccataaagcaagaagttgagaactttaagaagctaaatctcattagtaaagagcagtttgaaaacctaacacctgaacttccttttgagccaaaccaagaagttcctgtagcaccttcacagtccaggcaaggaggtgttcaaggagtgcttcacattcccaagaaagatttgactgatgaattagctcagaagttatttgatgtttcagaaataacttcagcagcaatggttcattcgttgcctacagcagttccagaatctcctagaattcatcctacaagaacacccaaaacacctcgaacacctaggttacaagatcctaacaaaacaccaagattttatcctgttgttaaagaaccaaaagccattgatgtaaagagtccaagaaagagaaaaacaaggcatagcacaaatccccctctagagtgtcatgttggttgggtaatggattccagagaccatgggccaggaacatcctctgtcagcacttcaaatgcttcaccttcagaaggcgcaccactagcaggaagttatggatgtactcctcattcattcccaaagttccagcatccttctcatgaacttttgaaggaaaatggctttacccaacaagtgtaccacaagtatcgtcgaagatgcctaagtgagagaaaacgcttgggaattggtcagtcccaagaaatgaataccctctttcgtttctggtcctttttcctcagagatcacttcaataaaaaaatgtatgaggaatttagacaacttgcttgggaagatgcaaaagaaaattacaggtatgggttagaatgtctgttcaggttttatagttatggactggaaaaaaaattcaggcgagaaatttttcaggatttccaagaagaaaccaaaaaagactacgaatctggtcagctgtatggactagaaaagttttgggcttatttgaaatattctcaatctaagacacagtctattgacccaaaacttcaggaatacctctgtagttttaagaggttagaagacttccgtgttgatccccctattagtgatgaatttggaagaaaaagacattcctctacttctggtgaggagagtaatcgtcatagacttccacctaattcctctacaaagccaccaaatgctgctaaacctacatctaccagtgagcttcaggtaccaataaactctcccagaaggaatatttcaccggagtccagtgacaattcacattaaacagtgctgcctgtgtcctgtggtctcaagaaatggtgaaatgcctgagaaatagactcttatgaaagttctttgtccttgaagtcaacatttacatcagtatttatttggggaaaatcttctggtgtttaattgtgataataagaaagaagaaaaagaaagaaaagtggtagcattttttctaacaagataaattctaaaaatgttttccctgatttcacaaacaaggatagtcttggtgaccttttatagagatcttctagtaatgtattttgatctcagatttctttttcaaagccatggttttacaaaaacagcattccttaaatatatttaaaaaacaatacaaggaatgcctaacatttcagctcatacttcttaaagaagatatagtatgttgtattctcttcttagagctttcttaaagaatccacaatccaattaccccactgtcaattcatatttgaacttaccaaaacaaaggaggattacgtatatgttttttaaattcaaaaaagaatatgaaattatacctttagtatccctttgagacatatagtttaaagaaaactttttttaaaacaaaagtaggaatatatagtaagattgtagttacaatgagtatatgcacttttgatgctaggttttgcttttctccccccagtcatatctcatgatttccacagttgttgtattggtgtggagttttctgaattggctataagctgattacatattagaggtttatttttatgattctatataaacgtgcacgagtaatttaaaacctgcattgggattgattggaatattgtcctaaattaattaaatcttgcactgttttgaatgcatctgctatttatacatctgcaagtgggtatgtcataaggagtcagattatctttaatttaaaatgaatacttagttttacctttttgtttattttttgtttaattttgtttttataaatgttttcaagagttatagcaaattgatttctaatttttattgctattacaactgatgtaaatggtagtttcagtttttgtgagatttaaaaaaataaagcacttattctg

SEQ ID NO: 11465 - DNA, 2202 bp, Homo sapiens
  misc_feature (7)..(7): n is a, c, g, or t
aagagangcgaaacttaggctaggtacgaggctgggtggcgcgcctccccaactcgggtaaagctcctcggcctcggcgtgctgcgcctccgcggctgccctgcgccagaattcggttccctcaaaattataaaagcaggaaagctcaagacaaagaaatccaacaaggctagtgatttcagtgatatggagaattggccaacaccaagtgaattagtgaacactggatttcagagcgtcctcagccaaggaaataaaaagccacaaaatagaaaagaaaaagaagagaaggttgaaaagagaagtaacagtgacagcaaagaaaaccgggaaacaaaattaaatggtcctggtgaaaacgtcagtgaggatgaggctcagtcaagtaatcaacgtaagagagctaataagcacaagtgggtaccactccacttagatgttgtaagatcagagagtcaagaaagacctggatcccggaacagctcaagatgtcaacctgaagcaaataaaccaacacataacaataggagaaatgatacacgaagttggaagcgagatagagaaaaaagagatgatcaagatgacgtttccagtgtgagaagtgagggtggtaatatccgaggttcctttagaggtcgaggaagaggccgaggacggggaagaggacgaggcagaggaaatcctcgattgaactttgattattcatatggttatcaagaacatggtgaaaggactgatcaaccatttcaaacagaacttaataccagtatgatgtattactatgatgatggtacaggtgtacaggtgtatcctgtggaagaagcgttgcttaaagagtatattaagcgtcaaattgaatattacttcagtgtagaaaatttggaacgagacttctttcttcggggaaagatggatgaacaaggtttcttgcctatttccctgattgctggttttcagcgtgttcaggctctcactacaaaccttaatctcatcttagaggcactgaaggatagcacagaagtagaaattgtggatgagaaaatgagaaaaaagatagaaccagaaaaatggccaattccaggccctcctccacgcagtgtgccaccaacagacttctctcaactgattgattgtccagagtttgtaccaggccaagccttttgctcacatacagtcagggtgatgatcttctgaagctcttggatgtcatttgatcggaatatgcagtggaataggtgactcactgaaatgcctttataaatactggaacaaatcctgctgcaaaaatgaaagcgatcagactgtcttctgttcaagaatgtctattcccacctcttggtggaggaagttgggccaacactgcagtggagataaccacctttgcgataatgagagacagaccagaggactgctactctttttataggagctgcctatttctgtgtaattggcctgggctgcatgggctgcttttattcatggtgggaaagttaattattattattctggaaataccgcaagattatgttttctgtttccagggttatgtacttgtgtccagatgaataaagcagaaaaagaggggattgagtagcatttcccagattcttaagtactttgctattcgatttgcctttcagtgtagtgtacattgtaaaactcagatattgtcatgatgtttcacttggacataagacttattaatgtggtcacttaaggggtaaggaatttaagaactggatgaggttatttcttcctttactcttcaaaatgtatttttgatacatcagtatgagaggacgtcccatcaacaaagcatcgatgatggacagtctcacactatttttatcatatgtttctttgtcagccttctgcttctaatcccagtaagcaacttggacaggcattttaaaagctgaagaaaagtgacattattttagctagtggtttttaatttattttttgttaagatataatgggtgattatataagttagatttatttatgatatcaacttgggtccaagatgatagttttagctagcttatgaacattgggttcacaaggcattgggtaagttagataaaatagcatatactttctctgcagggtaggtaagataggtcagtcaagttggtaatgcctgtccattaaccatttatgcatactaataaaattataagaataaaatcaaaaaaagta

SEQ ID NO: 11466 - DNA, 2188 bp, Homo sapiens
atggtactgccggaatttagggatgcgcgcctccccaactcgggtaaagctcctcggcctcggcgtgctgcgcctccgcggctgccctgcgccagaattcggttccctcaaaattataaaagcaggaaagctcaagacaaagaaatccaacaaggctagtgatttcagtgatatggagaattggccaacaccaagtgaattagtgaacactggatttcagagcgtcctcagccaaggaaataaaaagccacaaaatagaaaagaaaaagaagagaaggttgaaaagagaagtaacagtgacagcaaagaaaaccgggaaacaaaattaaatggtcctggtgaaaacgtcagtgaggatgaggctcagtcaagtaatcaacgtaagagagctaataagcacaagtgggtaccactccacttagatgttgtaagatcagagagtcaagaaagacctggatcccggaacagctcaagatgtcaacctgaagcaaataaaccaacacataacaataggagaaatgatacacgaagttggaagcgagatagagaaaaaagagatgatcaagatgacgtttccagtgtgagaagtgagggtggtaatatccgaggttcctttagaggtcgaggaagaggccgaggacggggaagaggacgaggcagaggaaatcctcgattgaactttgattattcatatggttatcaagaacatggtgaaaggactgatcaaccatttcaaacagaacttaataccagtatgatgtattactatgatgatggtacaggtgtacaggtgtatcctgtggaagaagcgttgcttaaagagtatattaagcgtcaaattgaatattacttcagtgtagaaaatttggaacgagacttctttcttcggggaaagatggatgaacaaggtttcttgcctatttccctgattgctggttttcagcgtgttcaggctctcactacaaaccttaatctcatcttagaggcactgaaggatagcacagaagtagaaattgtggatgagaaaatgagaaaaaagatagaaccagaaaaatggccaattccaggccctcctccacgcagtgtgccaccaacagacttctctcaactgattgattgtccagagtttgtaccaggccaagccttttgctcacatacagtcagggtgatgatcttctgaagctcttggatgtcatttgatcggaatatgcagtggaataggtgactcactgaaatgcctttataaatactggaacaaatcctgctgcaaaaatgaaagcgatcagactgtcttctgttcaagaatgtctattcccacctcttggtggaggaagttgggccaacactgcagtggagataaccacctttgcgataatgagagacagaccagaggactgctactctttttataggagctgcctatttctgtgtaattggcctgggctgcatgggctgcttttattcatggtgggaaagttaattattattattctggaaataccgcaagattatgttttctgtttccagggttatgtacttgtgtccagatgaataaagcagaaaaagaggggattgagtagcatttcccagattcttaagtactttgctattcgatttgcctttcagtgtagtgtacattgtaaaactcagatattgtcatgatgtttcacttggacataagacttattaatgtggtcacttaaggggtaaggaatttaagaactggatgaggttatttcttcctttactcttcaaaatgtatttttgatacatcagtatgagaggacgtcccatcaacaaagcatcgatgatggacagtctcacactatttttatcatatgtttctttgtcagccttctgcttctaatcccagtaagcaacttggacaggcattttaaaagctgaagaaaagtgacattattttagctagtggtttttaatttattttttgttaagatataatgggtgattatataagttagatttatttatgatatcaacttgggtccaagatgatagttttagctagcttatgaacattgggttcacaaggcattgggtaagttagataaaatagcatatactttctctgcagggtaggtaagataggtcagtcaagttggtaatgcctgtccattaaccatttatgcatactaataaaattataagaataaaatcaaaaaaagta

SEQ ID NO: 11467 - DNA, 2406 bp, Homo sapiens
gacccagctttagggcctaagggcaaatcgagcgctcggtcctcccagcgccatgtgcgcggcccgcccaggcccttggccgccgtcgccgcgggggcaggccgcgagccagccgcgagccacagaggcctggtgcgcgccccgcccctgagcctgcagtcggggcggcctcagccagtgagccgggagtcgtccccttcgtcctccctcgcactcggagggcagctggggcggggcagaccctcgggccgggcggcacccgggcgggcgaatccgtcagctcccgcgggaggcccggcgagagaaggacccgaattcggttccctcaaaattataaaagcaggaaagctcaagacaaagaaatccaacaaggctagtgatttcagtgatatggagaattggccaacaccaagtgaattagtgaacactggatttcagagcgtcctcagccaaggaaataaaaagccacaaaatagaaaagaaaaagaagagaaggttgaaaagagaagtaacagtgacagcaaagaaaaccgggaaacaaaattaaatggtcctggtgaaaacgtcagtgaggatgaggctcagtcaagtaatcaacgtaagagagctaataagcacaagtgggtaccactccacttagatgttgtaagatcagagagtcaagaaagacctggatcccggaacagctcaagatgtcaacctgaagcaaataaaccaacacataacaataggagaaatgatacacgaagttggaagcgagatagagaaaaaagagatgatcaagatgacgtttccagtgtgagaagtgagggtggtaatatccgaggttcctttagaggtcgaggaagaggccgaggacggggaagaggacgaggcagaggaaatcctcgattgaactttgattattcatatggttatcaagaacatggtgaaaggactgatcaaccatttcaaacagaacttaataccagtatgatgtattactatgatgatggtacaggtgtacaggtgtatcctgtggaagaagcgttgcttaaagagtatattaagcgtcaaattgaatattacttcagtgtagaaaatttggaacgagacttctttcttcggggaaagatggatgaacaaggtttcttgcctatttccctgattgctggttttcagcgtgttcaggctctcactacaaaccttaatctcatcttagaggcactgaaggatagcacagaagtagaaattgtggatgagaaaatgagaaaaaagatagaaccagaaaaatggccaattccaggccctcctccacgcagtgtgccaccaacagacttctctcaactgattgattgtccagagtttgtaccaggccaagccttttgctcacatacagtcagggtgatgatcttctgaagctcttggatgtcatttgatcggaatatgcagtggaataggtgactcactgaaatgcctttataaatactggaacaaatcctgctgcaaaaatgaaagcgatcagactgtcttctgttcaagaatgtctattcccacctcttggtggaggaagttgggccaacactgcagtggagataaccacctttgcgataatgagagacagaccagaggactgctactctttttataggagctgcctatttctgtgtaattggcctgggctgcatgggctgcttttattcatggtgggaaagttaattattattattctggaaataccgcaagattatgttttctgtttccagggttatgtacttgtgtccagatgaataaagcagaaaaagaggggattgagtagcatttcccagattcttaagtactttgctattcgatttgcctttcagtgtagtgtacattgtaaaactcagatattgtcatgatgtttcacttggacataagacttattaatgtggtcacttaaggggtaaggaatttaagaactggatgaggttatttcttcctttactcttcaaaatgtatttttgatacatcagtatgagaggacgtcccatcaacaaagcatcgatgatggacagtctcacactatttttatcatatgtttctttgtcagccttctgcttctaatcccagtaagcaacttggacaggcattttaaaagctgaagaaaagtgacattattttagctagtggtttttaatttattttttgttaagatataatgggtgattatataagttagatttatttatgatatcaacttgggtccaagatgatagttttagctagcttatgaacattgggttcacaaggcattgggtaagttagataaaatagcatatactttctctgcagggtaggtaagataggtcagtcaagttggtaatgcctgtccattaaccatttatgcatactaataaaattataagaataaaatcaaaaaaagta

SEQ ID NO: 11468 - DNA, 2261 bp, Homo sapiens
ggagaggacggggccggcgggcggttggcgctccgttcggtgcggggaggggcgtcacgccgggcgtgctgccgcctaagggaaatccctggaccaaaaagcctccccagcacctgtccccagacacgacaggtccgccaccgcccccgctggaaaccctggaggcagaattcggttccctcaaaattataaaagcaggaaagctcaagacaaagaaatccaacaaggctagtgatttcagtgatatggagaattggccaacaccaagtgaattagtgaacactggatttcagagcgtcctcagccaaggaaataaaaagccacaaaatagaaaagaaaaagaagagaaggttgaaaagagaagtaacagtgacagcaaagaaaaccgggaaacaaaattaaatggtcctggtgaaaacgtcagtgaggatgaggctcagtcaagtaatcaacgtaagagagctaataagcacaagtgggtaccactccacttagatgttgtaagatcagagagtcaagaaagacctggatcccggaacagctcaagatgtcaacctgaagcaaataaaccaacacataacaataggagaaatgatacacgaagttggaagcgagatagagaaaaaagagatgatcaagatgacgtttccagtgtgagaagtgagggtggtaatatccgaggttcctttagaggtcgaggaagaggccgaggacggggaagaggacgaggcagaggaaatcctcgattgaactttgattattcatatggttatcaagaacatggtgaaaggactgatcaaccatttcaaacagaacttaataccagtatgatgtattactatgatgatggtacaggtgtacaggtgtatcctgtggaagaagcgttgcttaaagagtatattaagcgtcaaattgaatattacttcagtgtagaaaatttggaacgagacttctttcttcggggaaagatggatgaacaaggtttcttgcctatttccctgattgctggttttcagcgtgttcaggctctcactacaaaccttaatctcatcttagaggcactgaaggatagcacagaagtagaaattgtggatgagaaaatgagaaaaaagatagaaccagaaaaatggccaattccaggccctcctccacgcagtgtgccaccaacagacttctctcaactgattgattgtccagagtttgtaccaggccaagccttttgctcacatacagtcagggtgatgatcttctgaagctcttggatgtcatttgatcggaatatgcagtggaataggtgactcactgaaatgcctttataaatactggaacaaatcctgctgcaaaaatgaaagcgatcagactgtcttctgttcaagaatgtctattcccacctcttggtggaggaagttgggccaacactgcagtggagataaccacctttgcgataatgagagacagaccagaggactgctactctttttataggagctgcctatttctgtgtaattggcctgggctgcatgggctgcttttattcatggtgggaaagttaattattattattctggaaataccgcaagattatgttttctgtttccagggttatgtacttgtgtccagatgaataaagcagaaaaagaggggattgagtagcatttcccagattcttaagtactttgctattcgatttgcctttcagtgtagtgtacattgtaaaactcagatattgtcatgatgtttcacttggacataagacttattaatgtggtcacttaaggggtaaggaatttaagaactggatgaggttatttcttcctttactcttcaaaatgtatttttgatacatcagtatgagaggacgtcccatcaacaaagcatcgatgatggacagtctcacactatttttatcatatgtttctttgtcagccttctgcttctaatcccagtaagcaacttggacaggcattttaaaagctgaagaaaagtgacattattttagctagtggtttttaatttattttttgttaagatataatgggtgattatataagttagatttatttatgatatcaacttgggtccaagatgatagttttagctagcttatgaacattgggttcacaaggcattgggtaagttagataaaatagcatatactttctctgcagggtaggtaagataggtcagtcaagttggtaatgcctgtccattaaccatttatgcatactaataaaattataagaataaaatcaaaaaaagta

SEQ ID NO: 11469 - DNA, 1700 bp, Homo sapiens
cggcacgaggggaatttatagaccataatctaggtgctaggaagcttactctttctgggttgttactgttcctagatctttgaaaatttctttcacaaaggtactggatttaacacatttttcagtatatgttcatgtttttatctctaggacggggaagaggacgaggcagaggaaatcctcgattgaactttgattattcatatggttatcaagaacatggtgaaaggactgatcaaccatttcaaacagaacttaataccagtatgatgtattactatgatgatggtacaggtgtacaggtgtatcctgtggaagaagcgttgcttaaagagtatattaagcgtcaaattgaatattacttcagtgtagaaaatttggaacgagacttctttcttcggggaaagatggatgaacaaggtttcttgcctatttccctgattgctggttttcagcgtgttcaggctctcactacaaaccttaatctcatcttagaggcactgaaggatagcacagaagtagaaattgtggatgagaaaatgagaaaaaagatagaaccagaaaaatggccaattccaggccctcctccacgcagtgtgccaccaacagacttctctcaactgattgattgtccagagtttgtaccaggccaagccttttgctcacatacagtcagggtgatgatcttctgaagctcttggatgtcatttgatcggaatatgcagtggaataggtgactcactgaaatgcctttataaatactggaacaaatcctgctgcaaaaatgaaagcgatcagactgtcttctgttcaagaatgtctattcccacctcttggtggaggaagttgggccaacactgcagtggagataaccacctttgcgataatgagagacagaccagaggactgctactctttttataggagctgcctatttctgtgtaattggcctgggctgcatgggctgcttttattcatggtgggaaagttaattattattattctggaaataccgcaagattatgttttctgtttccagggttatgtacttgtgtccagatgaataaagcagaaaaagaggggattgagtagcatttcccagattcttaagtactttgctattcgatttgcctttcagtgtagtgtacattgtaaaactcagatattgtcatgatgtttcacttggacataagacttattaatgtggtcacttaaggggtaaggaatttaagaactggatgaggttatttcttcctttactcttcaaaatgtatttttgatacatcagtatgagaggacgtcccatcaacaaagcatcgatgatggacagtctcacactatttttatcatatgtttctttgtcagccttctgcttctaatcccagtaagcaacttggacaggcattttaaaagctgaagaaaagtgacattattttagctagtggtttttaatttattttttgttaagatataatgggtgattatataagttagatttatttatgatatcaacttgggtccaagatgatagttttagctagcttatgaacattgggttcacaaggcattgggtaagttagataaaatagcatatactttctctgcagggtaggtaagataggtcagtcaagttggtaatgcctgtccattaaccatttatgcatactaataaaattataagaataaaatcaaaaaaagta

SEQ ID NO: 11470 - DNA, 1952 bp, Homo sapiens
atgaccttctacagtgaggtgaaacaaatagagaagagaaggttgaaaagagaagtaacagtgacagcaaagaaaaccgggaaacaaaattaaatggtcctggtgaaaacgtcagtgaggatgaggctcagtcaagtaatcaacgtaagagagctaataagcacaagtgggtaccactccacttagatgttgtaagatcagagagtcaagaaagacctggatcccggaacagctcaagatgtcaacctgaagcaaataaaccaacacataacaataggagaaatgatacacgaagttggaagcgagatagagaaaaaagagatgatcaagatgacgtttccagtgtgagaagtgagggtggtaatatccgaggttcctttagaggtcgaggaagaggccgaggacggggaagaggacgaggcagaggaaatcctcgattgaactttgattattcatatggttatcaagaacatggtgaaaggactgatcaaccatttcaaacagaacttaataccagtatgatgtattactatgatgatggtacaggtgtacaggtgtatcctgtggaagaagcgttgcttaaagagtatattaagcgtcaaattgaatattacttcagtgtagaaaatttggaacgagacttctttcttcggggaaagatggatgaacaaggtttcttgcctatttccctgattgctggttttcagcgtgttcaggctctcactacaaaccttaatctcatcttagaggcactgaaggatagcacagaagtagaaattgtggatgagaaaatgagaaaaaagatagaaccagaaaaatggccaattccaggccctcctccacgcagtgtgccaccaacagacttctctcaactgattgattgtccagagtttgtaccaggccaagccttttgctcacatacagtcagggtgatgatcttctgaagctcttggatgtcatttgatcggaatatgcagtggaataggtgactcactgaaatgcctttataaatactggaacaaatcctgctgcaaaaatgaaagcgatcagactgtcttctgttcaagaatgtctattcccacctcttggtggaggaagttgggccaacactgcagtggagataaccacctttgcgataatgagagacagaccagaggactgctactctttttataggagctgcctatttctgtgtaattggcctgggctgcatgggctgcttttattcatggtgggaaagttaattattattattctggaaataccgcaagattatgttttctgtttccagggttatgtacttgtgtccagatgaataaagcagaaaaagaggggattgagtagcatttcccagattcttaagtactttgctattcgatttgcctttcagtgtagtgtacattgtaaaactcagatattgtcatgatgtttcacttggacataagacttattaatgtggtcacttaaggggtaaggaatttaagaactggatgaggttatttcttcctttactcttcaaaatgtatttttgatacatcagtatgagaggacgtcccatcaacaaagcatcgatgatggacagtctcacactatttttatcatatgtttctttgtcagccttctgcttctaatcccagtaagcaacttggacaggcattttaaaagctgaagaaaagtgacattattttagctagtggtttttaatttattttttgttaagatataatgggtgattatataagttagatttatttatgatatcaacttgggtccaagatgatagttttagctagcttatgaacattgggttcacaaggcattgggtaagttagataaaatagcatatactttctctgcagggtaggtaagataggtcagtcaagttggtaatgcctgtccattaaccatttatgcatactaataaaattataagaataaaatcaaaaaaagta

SEQ ID NO: 11471 - DNA, 2134 bp, Homo sapiens
gcggccgccactagcgctggggcgcggggagagccgtcgccggcgctggtgctgggacgcagcgtgccccaggcggctgtccccgtgaggcccctggcgctgcacctggcgcacaaggcgcgtgggcccgggggccctttcggcggggagccgccaccgccaccgccgccgccgtcgccgttgccgccgttgctgcgggatccgccggccgaggacgcccgggaagaggtggcagctggccctgcggaaaagcggcagccgccgctgctgccgcctaagggaaatccctggaccaaaaagcctccccagcacctgtccccagacacgacaggtccgccaccgcccccgctggaaaccctggaggcagaattcggttccctcaaaattataaaagcaggaaagctcaagacaaagaaatccaacaaggctagtgatttcagtgatatggagaattggccaacaccaagtgaattagtgaacactggatttcagagcgtcctcagccaaggaaataaaaagccacaaaatagaaaagaaaaagaagagaaggttgaaaagagaagtaacagtgacagcaaagaaaaccgggaaacaaaattaaatggtcctggtgaaaacgtcagtgaggatgaggctcagtcaagtaatcaacgtaagagagctaataagcacaagtgggtaccactccacttagatgttgtaagatcagagagtcaagaaagacctggatcccggaacagctcaagatgtcaacctgaagcaaataaaccaacacataacaataggagaaatgatacacgaagttggaagcgagatagagaaaaaagagatgatcaagatgacgtttccagtgtgagaagtgagggtggtaatatccgaggttcctttagaggtcgaggaagaggccgaggacggggaagaggacgaggcagaggaaatcctcgattgaactttgattattcatatggttatcaagaacatggtgaaaggactgatcaaccatttcaaacagaacttaataccagtatgatgtattactatgatgatggtacaggtgtacaggtgtatcctgtggaagaagcgttgcttaaagagtatattaagcgtcaaattgaatattacttcagtgtagaaaatttggaacgagacttctttcttcggggaaagatggatgaacaaggtttcttgcctatttccctgattgctggttttcagcgtgttcaggctctcactacaaaccttaatctcatcttagaggcactgaaggatagcacagaagtagaaattgtggatgagaaaatgagaaaaaagatagaaccagaaaaatggccaattccaggccctcctccacgcagtgtgccaccaacagacttctctcaactgattgattgtccagagtttgtaccaggccaagccttttgctcacatacagagtctgccccaaattctccaagaattggaagcccattgagcccaaagaaaaacagtgaaacaagtattcttcaagcaatgtctagaggtttgtctaccagtttgcctgacttggactcagaaccttggatagaagttaaaaaaagacatcagccagccccagtgaaattgagggaatcagtgtctgtccctgaagggtcattaaatcagctatgttcttcagaagaaccagaacaagaagaacttgattttttgtttgatgaagagattgaacaaataggacgaaaaaacacatttactgattggtctgataatgattcagattatgaaattgatgaccaagacttaaacaagattttgattgtaactcagacaccaccttatgtgaaaaaacatcgtggaggagatcgaacaggcacccacatgtctcgggcaaaaatcacatctgaacttgctaaagttatcaatgatggcttatattattatgaacaggatctatggatggaagaagatgaaaacaaacacacagccataaaggtaattgtttctggccaacatctttctactgatgctttgttttgattgtatgttgctgtttatattttctcaaacttgaggctctattttatgaaatgttgaatataaatacattgtatttaacttgaaaaattcctggaaatatacctgataattaccacctgag

SEQ ID NO: 11472 - DNA, 2024 bp, Homo sapiens
gcggccgccactagcgctggggcgcggggagagccgtcgccggcgctggtgctgggacgcagcgtgccccaggcggctgtccccgtgaggcccctggcgctgcacctggcgcacaaggcgcgtgggcccgggggccctttcggcggggagccgccaccgccaccgccgccgccgtcgccgttgccgccgttgctgcgggatccgccggccgaggacgcccgggaagaggtggcagctggccctgcggaaaagcggcagccgccgctgctgccgcctaagggaaatccctggaccaaaaagcctccccagcacctgtccccagacacgacaggtccgccaccgcccccgctggaaaccctggaggcagaattcggttccctcaaaattataaaagcaggaaagctcaagacaaagaaatccaacaaggctagtgatttcagtgatatggagaattggccaacaccaagtgaattagtgaacactggatttcagagcgtcctcagccaaggaaataaaaagccacaaaatagaaaagaaaaagaagagaaggttgaaaagagaagtaacagtgacagcaaagaaaaccgggaaacaaaattaaatggtcctggtgaaaacgtcagtgaggatgaggctcagtcaagtaatcaacgtaagagagctaataagcacaagtgggtaccactccacttagatgttgtaagatcagagagtcaagaaagacctggatcccggaacagctcaagatgtcaacctgaagcaaataaaccaacacataacaataggagaaatgatacacgaagttggaagcgagatagagaaaaaagagatgatcaagatgacgtttccagtgtgagaagtgagggtggtaatatccgaggttcctttagaggtcgaggaagaggccgaggacggggaagaggacgaggcagaggaaatcctcgattgaactttgattattcatatggttatcaagaacatggtgaaaggactgatcaaccatttcaaacagaacttaataccagtatgatgtattactatgatgatggtacaggtgtacaggtgtatcctgtggaagaagcgttgcttaaagagtatattaagcgtcaaattgaatattacttcagtgtagaaaatttggaacgagacttctttcttcggggaaagatggatgaacaaggtttcttgcctatttccctgattgctggttttcagcgtgttcaggctctcactacaaaccttaatctcatcttagaggcactgaaggatagcacagaagtagaaattgtggatgagaaaatgagaaaaaagatagaaccagaaaaatggccaattccaggccctcctccacgcagtgtgccaccaacagacttctctcaactgattgattgtccagagtttgtaccaggccaagccttttgctcacatacagagtctgccccaaattctccaagaattggaagcccattgagcccaaagaaaaacagtgaaacaagtattcttcaagcaatgtctagaggtttgtctaccagtttgcctgacttggactcagaaccttggatagaagttaaaaaaagacatcagccagccccagtgaaattgagggaatcagtgtctgtccctgaagggtcattaaatcagctatgttcttcagaagaaccagaacaagaagaacttgattttttgtttgatgaagagattgaacaaataggacgaaaaaacacatttactgattggtctgataatgattcagattatgaaattgatgaccaagacttaaacaagattttgattgtaactcagacaccaccttatgtgaaaaaacatcgtggaggagatcgaacaggcacccacatgtctcgggcaaaaatcacatctgaacttgctaaagttatcaatgatggcttatattattatgaacaggatctatggatggaagaagatgaaaacaaacacacagccataaaggtgacaatactgagaacgccctttctcgtatgaaagaataaaaacaagttactgtg

SEQ ID NO: 11473 - DNA, 336 bp, Homo sapiens
aagcagataaattatctcccgcttagcagtgcagtctggagatatggtgcccatgtggcccctgggaagaagtccagggagagggagtgctcactgccttccctcccttctccctccctccctcgccgccatcctcccttccacagcacttagaataaatgcaggactcacaggggctgaaagatcttcctctcccctagtgattgctgctcaccggtctttagactgctctgacatgtggatgacaatcggctgagccactgatagagaagttttcccttttaatcatgtccctgtcattgctaactgcagagtctcagctttgccatgcatgag

SEQ ID NO: 11474 - DNA, 366 bp, Homo sapiens
acggggcctctacctggcctgtgccatgtcgcctgcacacgtgaatacaaagaaaagggaataggaggccacgcgtggtagctgatgcctgtaatcctagcacattcggaggccaaggacgatggatcacgagaggtcaggagttcaagaccagcctggccaagatgctgaaaccccgcctctactaaaaaaaaaaaacacgaaaaaaaaattagccatgcgtggtggtgggcacctgtaatctcagctactcaggaggctgagggagataattgcttgaacccaggaggtggagggtgtagtgagctgagaatgcaccactgcactccagcctgagtgacagagcgggattccatctgaaaaaac

SEQ ID NO: 11475 - DNA, 448 bp, Homo sapiens
tagtatttattaattgtgaagcatctaactaatgcaaacacttaagacaactgcaaatttgatttttcaatgttcaagtttaatttcaacagttttcaaaatctgaaattgccttcctaaattcatctgcattgtatacatccataaagagcacacactgaaaagatacacttccttgtatcttaagaaagggggaggcctggtgcagtggctcacacctgtaatcccagtattttgggaggccgaggcaggtggatcacaaggtcaggagttcaagaccagcctggccaacacagtgaaaccccgtctctactaaaaacacaaaaattagccaggcatggtggtggctgcctgtaattccaactacttgggaggctgaagcaggagaatcacttgaacctgggagtggaggtttcggtgagctgagatcgtgccactgcactccagc

SEQ ID NO: 11476 - DNA, 565 bp, Homo sapiens
tttatctgccctcaagacatatcagcgtgaaaaatgtcatagatttgatgctggctggggagagagatggaaggagaatgctgcctctctgaaccattagcatatctttgtattttgtactcaaactaatctcataggtttgtttctctacctactagggtcagtttgtttttctgctgtaggaactaaatagctcaggattcgtagtatagaatcacagtatagtatcacagcttcccctttttctatgtcagaaaccatgatgtgtttcaaggctagctaaattactgtttgttaatgttaagcatttttcagaggtgagattgtagtttaagggttttggatacatatttcacatattttaagcattttattttgcttaagtctacttaaatgtttttaaacctttattgtgatatgtagcatccataaagaaaagtatacaaaaaacatacatacatattcacatacatccaggaattattatgaagcaaatacccagataccacaacctagttcaagaactagaacattatcagcatcccagaagccatccttcctccct

SEQ ID NO: 11477 - DNA, 457 bp, Homo sapiens
ctaaaacagatagcaatgcactgggggtccataaaaactagtgccaattaagaataaagaaattactcagtgctgcccaaaagtatacaaaaaggcactttatatactgttgacaaaagtagaaattagtacatgctaaatagaaaataacttggtaatatgtgacaacaggccttcagttatacttcctgcacttgtaatttcactttctatttctgggaatatcctaaagccacagttctcaaactttcgggcaccagagaccagaggcggagctcaggcagaaatgctcacttgtcgctcacctcctgctgtgcagcacagctcctaacaggccatggaccagtaccggtccatggtctgggagttgcggacccctatcctaaaggaaatcattagagattcacacaaaaaaatagaggacagtcatcatggtggtatggataacagaaaaaaa

SEQ ID NO: 11478 - DNA, 265 bp, Homo sapiens
taaatgcttattgggtgattatgagaaccaagatgttagatattacagagaaataaagaaacaacttttgctctcagagagattaagcctagcataaaaattttaaaatgcaatttttatattttattctactatgatcattttggtaatatatcagtgattttatctgtgtgttaataagcttttaaaacccatttaaaatttttactgttcaaataaaaaggccatattgtattatttccttttgtaggtttactaatacaaa

SEQ ID NO: 11479 - DNA, 555 bp, Homo sapiens
ttttttttttttgagaaggagtctcactctgttgcccaggctggaatgcagtggcacgatctcagctcactgcaatctccgcctcccgggttcatgccattctcctgcctcagccttccgaggagctgggactacaggcgcccgccaccacgcccagctaattttttgtatttctagtagagacggggtttcaccgtcttagccaggatggtcttgatctcctgacctcatgatctgcccacctcagcctcccaaagtgctgggattacaggtgtgagccaccgcacccagcccgcaaatcaggactttaagccttggtctttaattttagagtctaaaaatgaaacaactttacatgagaaatgtttagaaagaaatgaaacttcttctaggataaattacttgtttaaattctaaaagtcccaaggcagtagtttccaaactctgctttgcattagaatcacctcaggagtttaaaaaaatcctagtggccagggtgcaccccatattaatgacaccagcatgtctggcttggggccaggcagccacaaacct

SEQ ID NO: 11480 - DNA, 342 bp, Homo sapiens
actggaagaaacataaaaataattttcaaacctttaaacaggtcttttaaaataatacactcagacaaaaataaggagaaaagaataaaaaagaatgaagactttgtttccaactacatgaagtaactaaactttaaaattatcagtgtttctgaggaagaaaaaacatcaaaaagtttagaaaacctatttaagaaaacaattgatgaaaactttccaactctagcaatagaattagacatacatacacaggaagctcagcaaacaaaatacaacaaaatataaacaaaatatattgcaaaacagacatcataatggcacatgataatcagaatatctaaa

SEQ ID NO: 11481 - DNA, 326 bp, Homo sapiens
accatcaaaagccagcttgggaggcacatgtggggacagagaacccattagctggagcggggggttggtggggttacattgttagagctgagacctccaagaacaagaaggtgccatgtgaaagagggaagagggcaagtggatgttaccagcgctgttgtttgtaatagcaaaaaataaaaaccatccaaatgttcatcaacatggacttcagatactatatcgtggtattaacatattcatataagggaagaatgcccagcagtgccaacgaatggcagctgcctgcctcaatgcagatgggtcgccaatgcacactgtgcaag

SEQ ID NO: 11482 - DNA, 731 bp, Homo sapiens
gttgtatgttaattcataaacttggattataattagtttgtcgatttaaaatggtgtttgaggttgcttgaattatttttcaaacattatcataaaaatacccacccaccccctgggaagttcgcttcataaagaacttcagtgcaacccgtatgtaaaattaaaatacatttaaaataattggacaaaccaatttaaatgttgctacaaccccatttaatctgtaaattgcatgtgctgctgctttccatggtaatgttggtgtggaatatgtttggaaaaaaggcagtagtgtctgaagctgagttgctggcattgaaaaagcagagtgtctggaaggatggcttcctatttagcagtggtgttgttcctgtttataaatatttgtacttagtggctttgttgataaaatactttgcttggagtatcaaagaaatattaggtaacagaaatacttcttggtaattttgcgatgggatatctgtttctcttgcccacaaattaggcttcacctggatggaagcttgcttgtgatgtaaaataacttctgtgttattaaattttaaatttatatgatacagttttctgtgaaatgacaatattgtctttagaactttgattactgatgaaaagaagtgataccattttgtaaccctaaatccatttaaaaataaatggtacacatattttaacattatgataaataagttgaataaattggtattacttgg

SEQ ID NO: 11483 - DNA, 328 bp, Homo sapiens
gctcctgagttctccctggagccaggggtgtgcgaatgacagaggattgggatcctggtgcccccaaggggagaggcgcttcctccagggtgggcctgtcgtgccgtccatcctcactccgggagatgctcagggatggatggagagcccttcccgttctcccggttctgctgccacaggagccttctcagccgtgcacggcaccctggtcccactttgccagcctgagggcctctgggttcaattccccccacggtgggcgaggtccccttccccagcccagctcaggcctccagactgggatggggtgccgtcggcccagtgctgc

SEQ ID NO: 11484 - DNA, 671 bp, Homo sapiens
attcactattataattcaaataatcattttaataatatataactatgttttctactcagtaattaagtagtaatgctagttacaagattgaaaaagtattcttgaaaatcctcagtttatgaactgaagtttgatgttataacaagatacatattcaaaccaccaccctcaggtacagttaatgtagtagactgcactctgaaatatcgcttgagccggggaggcgaaggcgacagtgagccgagatcacgccactgcactccagcctgggtgacagagagagaaaccctgtctcaaaaaaaaaaaaaaaaaaagaaaaagaaaaaggaaacaagtttagagaggtgaagtgacttacccaagatcatgtaaccagcagctgcaggaacctagttttcgaactctgttctccatgtcttcttgttctttttaattatccaccatgtctattggcccgtgtgtttccaggattcttgatgtttcttctgagctccagggtcaggcagtatgattgaagtttctaagccaggtaagccttgtccagcatttgtccttgggggactttgtttgaattcatggatggcccaggccttgattctcagggaaagtgtgttatctgaaggtcagattgaaggttccaactaaatttactttgtccccttgtcccagca

SEQ ID NO: 11485 - DNA, 678 bp, Homo sapiens
agtcaccgttcacacttaccttggaagagctattacaaaacttctaacgccaaagccttattcagaataaggacattttaaaaacagtacttgatggagtgatgcaagcttgcagtcccagcagtatagtcaggagactgaggctggaggatcagagggctggagcccagggttcaaggccagcctaagcaacatagcaagaccccatctcaaaaataagtaaataataaataaaaataaaaagagcacattatcttttgatttaaattttatttatatcaaaatgacataaatttttgaactttattttttaattttaaaatttttaattattatggatacataatagttgtaagactttttgttttttaattaaagttttctaaggctgggcgcagtagctcatgtctgtagtcccagcactttgggaggctgaggcgaaagaagcacttgagcccaggaatttgagaccagcctgggcaacatagcaagaccccatctctacaaaaaaatttaaaaattagccaagtgtggtggcacgcacctgtggtcccagctacaagggacgctgaagtgagaggatcacttgagcctggaaggtagaggctgcagtgagctctgatcatgacaccgtactccagcctgggtgacagagtgagaccctgtctccaaaaaaaa

SEQ ID NO: 11486 - DNA, 579 bp, Homo sapiens
aatttgagttaatttttgcctctgatgagagatacacgtccaaattggctcttttgcatgtggagatccagttgtcccagtgccgccattattgaaatgactattctttcctctactgaatggtctaggaacaatatgttttcggcataaactgatatatataatagatgtatcctattctttttaatattataatttttgtccacttaaaaaaatactcttaataataaagcattcatgtatttaacaaatatgcaccaagagtcttcctgggcacacacagtgaataggacacagttcctgggctccaggagcctacattccagagagggagagacagtgaaggagcagggaaggaactcaacaaaacaacgggtgatgagagctctaagagcaaacagatcagacagaggtgggaatacgggactgggtaagcatgtgctttggatcagaaggggcgcagagtcctcccagaggaatcagagatcagctgcgccaagtctctgaggctggaaccagcttggcttgctggatgaactgggaaaaagaggtggggtgcgggggaggggtggggggggc

SEQ ID NO: 11487 - DNA, 599 bp, Homo sapiens
ctgcactccagcctgggcaacagagtgagaccctgtctcaaaaaagagtttgagtgctatgctaaggagactggagttgatcctataggcaaaaatgagccattgaagaaagttaagcaaggggtaagacatgactggatttacatgctagaaatatcactcttgaaacagtgtggaggaggaattaaggaatcagaattgtgggcagggagactagtaaggaagctattgcaaaaatctaagaggagggacaaagacaggtctgaactagaacaaccaagcagtggagataaaaaggaagagaccaaaaaacgagtgaaaaggtgggtggtgaaggtgagctgggagggccgttgccttctacctgcttgctatgaaattccagctggaactcagactggctccccacctggctgcatgcaaggaactgctctgatgcagggcactgggttcccaagccccacaggtttgcttcagatgatttctagggaaagggtagatcttcctgaccctccattctcttctcagctgattccaagtcccagatcaatgggatccccttcagcccaactgtttcctgtccttgggtctgacattgg

SEQ ID NO: 11488 - DNA, 377 bp, Homo sapiens
tgagactggcgtctcactctgttacccaggctggagtgcagaggcatgatcttggctcactgcaactgtactccagcctgggcatcagatcaagactctgtctccaaaaaaataataataataataattgtaggactgctctgatcctattacatgcttaagttaccgtgcatttacagagaacaatggtttgctgaaaacactgggaaaccatagattaagataattatgccttccaagtttatgaatatcaacattctagactttttaaaaaatgcccaaaagtatttaagcaataaacacctaaactgtaaggcagcttttgcttcaaatattatggcaaacacataaaatgagtgttacagttgttcttgttc

SEQ ID NO: 11489 - DNA, 1377 bp, Homo sapiens
gacaattctgccatcatgaaccatattccaaacctaaatatgtaagaacatagaaagattattttagcaggagaattttaacacacacacacactttattctgaaaatttagcaacaaaatgaaaggtgagttgtggtagttgatgtatcaacaaatagaaagaagaaagcctgtaatctgtttcagaatgctatttctggggctggtaacatcaaaaataatcaaattaagtgttaacttgctgactcgtaagattttctctaatttagaattggagaacatatatactcctattaccactttccatctttctcaaatatagtttttatagttttctgttggcttcatcatcgtattgaaagattattaatcacttacatatatgtagttttctgttaagtcctgttcagtatattacaaaattttgatctgtgtatgtaatatcaattaataagatggtgttagttaaatcagattacgtgttcattcattaagtcattgttaacacttcacagaatataaatcgtgttccatgagtatgaatttctctctgaattccacataattgtcttaaaattatgcaccatttatcgttaagagtgaaagattatgtgtcatttattgtagtggtagaagaaaataaaaccaaaacagaatccaatccaaaagcttaggtttttgttgctactacagtaattacatcttcatatactaaggacagcacattattactgtccaagaatggtgcctcggacaactggttgcttacactgttttcagagatgaaataggaacataagcaggaagatttttgtctaaatatgaagcaagaaaggcttaaatgtctttattcaggggattaggcatcataagtttttttttttagagaaattggttttcatgatatttcctatctccttttgtcactttgcttttgtcggtaaattttacaactaaatgaggattaccaggcataaaaagcagcagacaatcatgatgcaaactgaaaataatcaatcaaaactgacccagaacttaaatagatgttaaaattagcagaggaggacattaaaactgtttttatacatgtatctcatataatcaaaacattaaatagagacatgggagataaacaagaaaagccaaaatcaaactttcaaagacaaaaacatttgagatgaaaattacattggatgaactaaagcagattagaaactgcagaagaaaagattagcaaacttgaagatacaagaacagacactagctaaagtacaaaaagaaaaaaaaatcttaaaaagtgatttttaaaaagcatcagtgagcagtcaggcaacttcaaatggcctaataatatgcaggtaactggagttcccaaa

SEQ ID NO: 11490 - DNA, 487 bp, Homo sapiens
aaatgcacattatattattccatttatttgaaatccctagaatagacaattctatatacagagaacgtagattagtggttacttggggactagaacagggaggaaggcaggggtgatagttaaaggacacacgaggttttctagaggcaataaacatgctctaaaattgattgtggtgatagttacacaacactttgaagacactaaaaaaaccactgcattatatactttaaatgggtgaaggctattgtgggtgaattgtgttctatctgtatctcagggaagatgttataatgttttaaagtcaatacagcttttacctggtcctcttgggttcccgctcttggaacccagctacccattctctgaagatgccaaaattagccacaaggatctcccatatgtacacattacaacccacagcactagctgaaggcccagtggacagcctgcatcactgctagacaagtcagtgaatcagccctct

SEQ ID NO: 11491 - DNA, 5399 bp, Homo sapiens
  misc_feature (2885)..(2885): n is a, c, g, or t
  misc_feature (3281)..(3281): n is a, c, g, or t
  misc_feature (5320)..(5320): n is a, c, g, or t
gtggcttcctgggcattgccttccaccccagcttccagcacaaccgcaggctctacgtctactactcagtgggtatccgcagcagtgagtggatccgcatcagcgagttcagagtctccgaggatgacgagaacgccgtggaccacagctctgagaggataatcctggaggtcaaagaaccagcctcaaaccacaacgggggccagctgcttttcggggatgacgggtacctctacatcttcactggagatggcgggatggccggagacccctttgggacatttggaaatgcccaaaacaagtcggcgctgctgggcaaggtgctgcgcatcgacgtggaccgtaaggagcgcggcctgccctacggcatcccgcccgacaacccgttcgtgggcgaccccgcggcgcagcccgaggtctacgccctgggcgtgcgcaacatgtggcgctgctccttcgaccgtggcgacccctcctcgggcactggccgcgggcgcctcttctgcggcgacgtgggccagaacaagttcgaggaggtggacgtggtggagcgcggcggcaactatggctggcgcgcgcgcgaagggttcgagtgctacgaccgcagcctgtgcgccaacacctctctcaatgacttgctgccgattttcgcctacccgcacacggttggcaagtcggtcacagggggctacgtgtaccggggctgcgagtaccccaacctgaacggcctctacatttttggggatttcatgagcgggcgtctgatgtccctccaagagaacccagggacaggccagtggcagtacagtgagatctgcatgggccacggccagacctgtgagttcccaggcctcatcaacaactactacccgtacatcatctccttcggggaggacgaggccggggagctgtacttcatgtcgacaggggagccgagtgccacagctccacgcggagttgtctacaaaataattgacgcatccaggcgggcaccacctggcaaatgtcagatccagcctgctcaggtgaagatcagaagccgtctcatcccctttgtgcccaaagaaaagttcatcccgaagacacggagcaccccgcggcctacagcgcgggcgcccacgcgggcgccccgccgagggcgccccacggccgctccccccgcgccaaccccgcggccagcgcggcccacccagcagccagggagccggaggggcggcgggcggcggcgggggcggctgaactcggcgagccgggcgttccgggatggcgaggtgcgcctggtgcggcccgcgggcctgagctctggcagcgggcgcgtggaggtgttcgtgggcggacgctggggcaccgtgtgcgacgactcctggaacatcagcggcgccgccgtcgtgtgtcgccagctggggtttgcctacgccgtgcgcgccgtcaagagagccgagttcggccagggcggctcgctgcccattctgctggacgatgtgcgctgcgcgggctgggagcggaacctgctggagtgccagcacaacggcgtgggcacccacaactgcgagcacgacgaggatgcgggcgtcgtgtgcagccaccagaaccccgacctgtaggcaacacgccgctgccccaggccatcccgccggcgggggagcctggcaggggccgctccgccctgtgtgcgcccagcgggtgcacacgtgttctagagtgaagggggtgcgggtgtgtgctgtcctggggacatgtgtgaggcgctgcagtgcatgtgtgtcctctgcagacccaaggcaggagtgtgtgttgggggcggtgtgggctctggaagtgcatggtccatcatgggcgggaggagttcctttcttacctccaagcgtttcagacaccagcaggaacagcagccgggctgtgggaccctgaggagggagggcagccaggcttcgaggacggacatggcccctggctgtgctaacagaggcacagcttgcagactgagggcggtggggagaaccaggcttgtcctgcccacagctggaatggaaggtgcaagaacagccggagggtggcctgaggaatgtggcccggacagcatggcctggtgcccgcatcccccccaccccctggcagtcagaggcgctggagagaaccggaaggcatccagtggggaagggaaagccttctggaaggtgggagcagggtgagctgcaggcctggggccccactggaggggcaggctgcgtggaggagccagcacctgctcagggaggatggctgtgaggactggatgacctccaaggccgtatgctggagaagccactcagcagcatactcagtccttgtgggtgctcctgggatgggaccagcctcctccaaccctgaggcctgattctctcttgctcttggggcagaagccacccacactagctgggcagagctttcaccctggccctccagtgagtcggtgggcctccactactttcaaagctgtgtttgggccctggggccacctctgtcctttccatccccatccctgctcagtgtaaacccaggagacctgattcctccagccctacctcggggctgaccaggctgggggtccagtgaaactactgacactttttcacccagggctatgccaataatgtggctgtttacacaccactttcctgcctcctctctgacctgcacctgtgtgggagccggggtgggaaccaggagaaaggggtgaggcctcccgcttcccacctgcatcacaggtggaagctccttcactccagggatgctcggccctggctctgtgccaggccgcagaggggcacttagtatgactgcgctcagcctcggatgggagcacgggtgggggtgggtaagcagatgagtcaccaggcagtgangacaggatgtggcccatgtcgggggttggaagaggtctgggtggggcacccaaacccaacctatgggggggctttgggagggggtgatgctgtgccaagttctgggagctggcaccaggggtggctgggcaggccttggggcaggcatgagtctggcagggtctcctagctgctagtatagggtctcctagccactagtataggatcctgggctgcagcagaaagctttaggtcactgtcttggactcctcatactctgtgctttacagaatgggaaactgaggcacacagaggttagatatcttagggcaccaagccagggaagggagaagtcaagtttgaatacagcagcttagtttagagtccccgcaccctaaccactgccctccccagctncactatgcctgcagagagcggtgtgctggggctcctgcctggtgtgggagtgccagcctggctgggaagcagctgatggagatccctgggggctcctcttgcctggcaggtgcccccgctgctggcctcatgctcctctcgggcctccagtggcccaggggaggttgagtgggcatcttcctgggatgcaggggagttctgagctctgacgccgggcgtgttaggagatagcaggccgttaatgaccatcccagccgaattcctcactgtgcagatgaggaagtgagctcagggaggctgagtgtcccaggcctgttgccagatgaggccacgctgagactggagccagggaaggtgcagcaagccttgaggccctcaagaatgcagccgagccagggccctgcttgcctggccccagaagctgttttgctcagagctggattaggagggttggcaaagggagctctgggtgcggcctcaggccctccagtacttctctgggcagttcgggctttggccttcagtcttccaggccaggcgctcttcctccccagcctccaactcatcacctctcaggccccaaaccaggcctgggctaggctgcagcctgcctcctggggactcactccacagtccccaggtcagtggtccccaacctttttggcatcatggactggtttcatgtaagacaatttttccatggatgggggttggggggatggttttgggatgaaatgtcccacctcagatcatcaggcattagattctcataaggagttcacagcctagatccctcgcatgcacagttcatagtaggtttcatgttcctatgcggatctaatgccactgctgatctggcaggaggcagagctcaggtgggaatgcttgctccccacactaccctgccccactgccactcacctcctgctgtgtggcccggttcctaacaggccacccatcagtactggtccgtggcccagggtttggagacctctgccctaggtagtaataagagtggacagctgttatatgtaaatacttgttccccgatgctggaaagaaatagcactaaaacataaatttaattctttcagcaaggcaattttactttctgcagaaagggtgctcatcgcagatggaacaatagtgagaggacacctgaacaaaggagggaagcaattgttagcccttatgcagtttgtccctgctactgtgtcctatgtccattggcagaagccagaccgcacaatctaaactaaaacccgattggctgtttaaaatttttctaaataggtaaaagtaatggaaggataaaggaaaagaggaagttgcttacgaaaggacttagaaaagtaataatattcccaaataaggaaggggtataggctgtgagctgggacatgcctgtgagcacgtccagcacagatatcttggttaaagtataaggacatagaacgtactatgtgcctgtgagcacgtctaacagttacatagaatagggcttgacaaagagttattagcataaagcaaggaggtttgaaggaagttcgtctttaaaagaaaccattatttctaacacttacgatttattctttaacaagaagggaaactttcaagaggaacttttactttctacaacagctgacctctgctgagcgcttactacatgccaagcactgctctgaaagtttaacataccattcactcatgtaatcctcatattaatgcacatttactcacgtggaagccgagttccagggcatttgtcacttaccaaatgtcacatagccaaaatttgaatttgagcccaggtagtccagctctgggaccctgctgtgggccttcctgctgggccacctcaagggcattgaaagccagccccaccccactgggacacaagttcagagaagggcagagctggctgcctgtccagtgcttctttcactccaccacctacagctggccgctgagggagcattcacatgtgactctgtccccagggactccgatcttgccttaaagtcctccagggcctctgnggatgggggcacagccttcaccctcaccccctccctggattttatagcccacttaccatgcataacagacaagtcccat

SEQ ID NO: 11492 - DNA, 544 bp, Homo sapiens
tttaataatgtatgttccactttcaccctaagaatcagtcatagccagaggctatggcagaagttatagatgtgagtatacacccatctcatgttctttttttctttggttgttcccagtagcaaagaacacacacatacacatgcttcccacttgtttcagaagagaagcggtaaatggaaagtccctagttgtagggcatgccccctgaaatctcatcctttgatgggggatgataggaactacatggcagggaactaggaacccataaatcagtggcctgcaagtttccaagggtactgggtcatcttttatctagcagtggagtggcccagggaggaagcagtataatcatatctgaggagactgttattgctccatctgcttgcctcaagagaaggcaccaggcagcctctcataaccaggagagatggctcttatctttcacctccaggtgtgtctggctgtttcactttctactctatcgcaaccagacacttactcaaatgcaaaccaacacacaatctttatccaaactttgcac

SEQ ID NO: 11493 - DNA, 385 bp, Homo sapiens
ttaagttggcccactgacaaccctgtttgaaggacatgagagagaaacctttaagtgttgtcctagaatagaactagaagatggccggaaatagtaacagtgatctgcttagagtggattttcactcaagtccttagtaagtggattttggggaaaaaagcacctgggcttctggttctttttgataatatataaaattattcattatgaggttgcagttgtttgcaaaggagaggcactcaaatttgaaaggttattttaatgtgataatttggaagacttactcagatgttggtcattgaccactctgtgcatatatttctgcagagctctgtgaaggcaatgagtgtcacttccctctgctctaataaagcaataaataata

SEQ ID NO: 11494 - DNA, 1178 bp, Homo sapiens
  misc_feature (23)..(23): n is a, c, g, or t
taggctagtcgaggctggtgtgnaatcggccgagggtgggctggaacgcgccggaatctgaggtgtgagtagagcctgggggagagtggatccaggtgaagggggcagaggactgggagttttcgtcctcttgaataagaactcgacaacagagtgggaactttctgtcttgtgatccattgcctgtgtgtcgcactggagcacagaggacactcgatcgtgcggcgcgcagggcggggggccgccgctgcctccccgcgggatggctggcactgtgctcggagtcggtgcgggcgtgttcatcttagccctgctctgggtggcagtgctgctgctgtgtgtgctgctgtccagagcctccggggcggcgaggttctctgtcatttttttattcttcggtgctgtgatcatcacatcagttctgttgcttttcccgcgagctggtgaattcccagccccagaagtggaagttaagattgtggatgactttttcattggccgctatgtcctgctggctttccttagtgccatcttccttggaggcctcttcttggttttaatccattatgttctggagccgatctatgccaaaccactgcactcctactgaccactcttcaggaatacgaaaacctgttctctccttcattgtgatgacattgatgagcaggaaggcactattcagagccttgttttgacagccctcatgccttaaggttagaggagtatctgtccatcactaagacaaatctctggagtcctggcttccagaaacaggattgccaaattgtccctgtggggctagattcttaccagcttaagaaggatattgctatcttcttagtacccgtaccttaggatttccaactgttttgaaagggaaatagtaacagtgatctgcttagagtggattttcactcaagtccttagtaagtggattttggggaaaaaagcacctgggcttctggttctttttgataatatataaaattattcattatgaggttgcagttgtttgcaaaggagaggcactcaaatttgaaaggttattttaatgtgataatttggaagacttactcagatgttggtcattgaccactctgtgcatatatttctgcagagctctgtgaaggcaatgagtgtcacttccctctgctctaataaagcaataaataata

SEQ ID NO: 11495 - DNA, 1238 bp, Homo sapiens
gaagttggccgttgaaagagcaacgctgattagtgaatcttaaatcacctaaatgaaagcccacttgtgattcgccctaagtaaaccagagccccgtgggctggaacgcgccggaatctgaggtgtgagtagagcctgggggagagtggatccaggtgaagggggcagaggactgggagttttcgtcctcttgaataagaactcgacaacagagtgggaactttctgtcttgtgatccattgcctgtgtgtcgcactggagcacagaggacactcgatcgtgcggcgcgcagggcggggggccgccgctgcctccccgcgggatggctggcactgtgctcggagtcggtgcgggcgtgttcatcttagccctgctctgggtggcagtgctgctgctgtgtgtgctgctgtccagagcctccggggcggcgaggttctctgtcatttttttattcttcggtgctgtgatcatcacatcagttctgttgcttttcccgcgagctggtgaattcccagccccagaagtggaagttaagattgtggatgactttttcattggccgctatgtcctgctggctttccttagtgccatcttccttggaggcctcttcttggttttaatccattatgttctggagccgatctatgccaaaccactgcactcctactgaccactcttcaggaatacgaaaacctgttctctccttcattgtgatgacattgatgagcaggaaggcactattcagagccttgttttgacagccctcatgccttaaggttagaggagtatctgtccatcactaagacaaatctctggagtcctggcttccagaaacaggattgccaaattgtccctgtggggctagattcttaccagcttaagaaggatattgctatcttcttagtacccgtaccttaggatttccaactgttttgaaagggaaatagtaacagtgatctgcttagagtggattttcactcaagtccttagtaagtggattttggggaaaaaagcacctgggcttctggttctttttgataatatataaaattattcattatgaggttgcagttgtttgcaaaggagaggcactcaaatttgaaaggttattttaatgtgataatttggaagacttactcagatgttggtcattgaccactctgtgcatatatttctgcagagctctgtgaaggcaatgagtgtcacttccctctgctctaataaagcaataaataata

SEQ ID NO: 11496 - DNA, 1596 bp, Homo sapiens
  misc_feature (23)..(23): n is a, c, g, or t
taggctagtcgaggctggtgtgnaatcggccgagggtgggctggaacgcgccggaatctgaggtgtgagtagagcctgggggagagtggatccaggtgaagggggcagaggactgggagttttcgtcctcttgaataagaactcgacaacagagtgggaactttctgtcttgtgatccattgcctggtgagtcacagctcacaccatggatttaacctgagagcttcaacttctgctttggccctggagttcccatgccctggtgtcttctaccagttcttaggtagggttttgtatccagagagggttcagctttctcccgtgggctgggggaagaggtcaaagtagaactcaggtaccaaatttgaaaggaaacactcagaaaaaacttctgagcgcagagcggaaaacaccctctcagtccccaccaaagagaaaagctttgggttctaaatttccagtttccattaagggactctgggactggacatttctgaaaattaatgacctgtactgagtaatcctcctaacacactgatcatcaaaaaataacctgtaatgagtttaggctttctgtatttgtctgaatgctttcacgggagtgtgtgtcgcactggagcacagaggacactcgatcgtgcggcgcgcagggcggggggccgccgctgcctccccgcgggatggctggcactgtgctcggagtcggtgcgggcgtgttcatcttagccctgctctgggtggcagtgctgctgctgtgtgtgctgctgtccagagcctccggggcggcgaggttctctgtcatttttttattcttcggtgctgtgatcatcacatcagttctgttgcttttcccgcgagctggtgaattcccagccccagaagtggaagttaagattgtggatgactttttcattggccgctatgtcctgctggctttccttagtgccatcttccttggaggcctcttcttggttttaatccattatgttctggagccgatctatgccaaaccactgcactcctactgaccactcttcaggaatacgaaaacctgttctctccttcattgtgatgacattgatgagcaggaaggcactattcagagccttgttttgacagccctcatgccttaaggttagaggagtatctgtccatcactaagacaaatctctggagtcctggcttccagaaacaggattgccaaattgtccctgtggggctagattcttaccagcttaagaaggatattgctatcttcttagtacccgtaccttaggatttccaactgttttgaaagggaaatagtaacagtgatctgcttagagtggattttcactcaagtccttagtaagtggattttggggaaaaaagcacctgggcttctggttctttttgataatatataaaattattcattatgaggttgcagttgtttgcaaaggagaggcactcaaatttgaaaggttattttaatgtgataatttggaagacttactcagatgttggtcattgaccactctgtgcatatatttctgcagagctctgtgaaggcaatgagtgtcacttccctctgctctaataaagcaataaataata

SEQ ID NO: 11497 - DNA, 1275 bp, Homo sapiens
  misc_feature (23)..(23): n is a, c, g, or t
taggctagtcgaggctggtgtgnaatcggccgagggtgggctggaacgcgccggaatctgaggtgtgagtagagcctgggggagagtggatccaggtgaagggggcagaggactgggagttttcgtcctcttgaataagaactcgacaacagagtgggaactttctgtcttgtgatccattgcctggtgagtcacagctcacaccatggatttaacctgagagcttcaacttctgctttggccctggagttcccatgccctggtgtcttctaccagttcttagtgtgtcgcactggagcacagaggacactcgatcgtgcggcgcgcagggcggggggccgccgctgcctccccgcgggatggctggcactgtgctcggagtcggtgcgggcgtgttcatcttagccctgctctgggtggcagtgctgctgctgtgtgtgctgctgtccagagcctccggggcggcgaggttctctgtcatttttttattcttcggtgctgtgatcatcacatcagttctgttgcttttcccgcgagctggtgaattcccagccccagaagtggaagttaagattgtggatgactttttcattggccgctatgtcctgctggctttccttagtgccatcttccttggaggcctcttcttggttttaatccattatgttctggagccgatctatgccaaaccactgcactcctactgaccactcttcaggaatacgaaaacctgttctctccttcattgtgatgacattgatgagcaggaaggcactattcagagccttgttttgacagccctcatgccttaaggttagaggagtatctgtccatcactaagacaaatctctggagtcctggcttccagaaacaggattgccaaattgtccctgtggggctagattcttaccagcttaagaaggatattgctatcttcttagtacccgtaccttaggatttccaactgttttgaaagggaaatagtaacagtgatctgcttagagtggattttcactcaagtccttagtaagtggattttggggaaaaaagcacctgggcttctggttctttttgataatatataaaattattcattatgaggttgcagttgtttgcaaaggagaggcactcaaatttgaaaggttattttaatgtgataatttggaagacttactcagatgttggtcattgaccactctgtgcatatatttctgcagagctctgtgaaggcaatgagtgtcacttccctctgctctaataaagcaataaataata

SEQ ID NO: 11498 - DNA, 1192 bp, Homo sapiens
gaagttggccgttgaaagagcaacgctgattagtgaatcttaaatcacctaaatgaaagcccacttgtgattcgccctaagtaaaccagagccccgtgggctggaacgcgccggaatctgaggtgactgggagttttcgtcctcttgaataagaactcgacaacagagtgggaactttctgtcttgtgatccattgcctgtgtgtcgcactggagcacagaggacactcgatcgtgcggcgcgcagggcggggggccgccgctgcctccccgcgggatggctggcactgtgctcggagtcggtgcgggcgtgttcatcttagccctgctctgggtggcagtgctgctgctgtgtgtgctgctgtccagagcctccggggcggcgaggttctctgtcatttttttattcttcggtgctgtgatcatcacatcagttctgttgcttttcccgcgagctggtgaattcccagccccagaagtggaagttaagattgtggatgactttttcattggccgctatgtcctgctggctttccttagtgccatcttccttggaggcctcttcttggttttaatccattatgttctggagccgatctatgccaaaccactgcactcctactgaccactcttcaggaatacgaaaacctgttctctccttcattgtgatgacattgatgagcaggaaggcactattcagagccttgttttgacagccctcatgccttaaggttagaggagtatctgtccatcactaagacaaatctctggagtcctggcttccagaaacaggattgccaaattgtccctgtggggctagattcttaccagcttaagaaggatattgctatcttcttagtacccgtaccttaggatttccaactgttttgaaagggaaatagtaacagtgatctgcttagagtggattttcactcaagtccttagtaagtggattttggggaaaaaagcacctgggcttctggttctttttgataatatataaaattattcattatgaggttgcagttgtttgcaaaggagaggcactcaaatttgaaaggttattttaatgtgataatttggaagacttactcagatgttggtcattgaccactctgtgcatatatttctgcagagctctgtgaaggcaatgagtgtcacttccctctgctctaataaagcaataaataata

SEQ ID NO: 11499 - DNA, 1701 bp, Homo sapiens
gccctagagcctttggagggagcacagccctgctgacacctttattttggattgctggcctgtgagaaaataaatttctattttgagctgctaattaggaaactaatagataccccatcgcgcttatatctcacttacccattctgtaacatggctatagtaatacctttctcagaagcttcgctccgggattcaatgagatatgtttgtacggcacttagcacacagtgaatgttcaaaaataaactcgacaacagagtgggaactttctgtcttgtgatccattgcctggtgagtcacagctcacaccatggatttaacctgagagcttcaacttctgctttggccctggagttcccatgccctggtgtcttctaccagttcttaggtagggttttgtatccagagagggttcagctttctcccgtgggctgggggaagaggtcaaagtagaactcaggtaccaaatttgaaaggaaacactcagaaaaaacttctgagcgcagagcggaaaacaccctctcagtccccaccaaagagaaaagctttgggttctaaatttccagtttccattaagggactctgggactggacatttctgaaaattaatgacctgtactgagtaatcctcctaacacactgatcatcaaaaaataacctgtaatgagtttaggctttctgtatttgtctgaatgctttcacgggagtgtgtgtcgcactggagcacagaggacactcgatcgtgcggcgcgcagggcggggggccgccgctgcctccccgcgggatggctggcactgtgctcggagtcggtgcgggcgtgttcatcttagccctgctctgggtggcagtgctgctgctgtgtgtgctgctgtccagagcctccggggcggcgaggttctctgtcatttttttattcttcggtgctgtgatcatcacatcagttctgttgcttttcccgcgagctggtgaattcccagccccagaagtggaagttaagattgtggatgactttttcattggccgctatgtcctgctggctttccttagtgccatcttccttggaggcctcttcttggttttaatccattatgttctggagccgatctatgccaaaccactgcactcctactgaccactcttcaggaatacgaaaacctgttctctccttcattgtgatgacattgatgagcaggaaggcactattcagagccttgttttgacagccctcatgccttaaggttagaggagtatctgtccatcactaagacaaatctctggagtcctggcttccagaaacaggattgccaaattgtccctgtggggctagattcttaccagcttaagaaggatattgctatcttcttagtacccgtaccttaggatttccaactgttttgaaagggaaatagtaacagtgatctgcttagagtggattttcactcaagtccttagtaagtggattttggggaaaaaagcacctgggcttctggttctttttgataatatataaaattattcattatgaggttgcagttgtttgcaaaggagaggcactcaaatttgaaaggttattttaatgtgataatttggaagacttactcagatgttggtcattgaccactctgtgcatatatttctgcagagctctgtgaaggcaatgagtgtcacttccctctgctctaataaagcaataaataata

SEQ ID NO: 11500 - DNA, 1052 bp, Homo sapiens
  misc_feature (23)..(23): n is a, c, g, or t
taggctagtcgaggctggtgtgnaatcggccgagggtgggctggaacgcgccggaatctgaggtgtgagtagagcctgggggagagtggatccaggtgaagggggcagaggtgtacctgtgcagggatcagtccatttattcctattttctctgacagctggatgaaagggactgggagttttcgtcctcttgaataagaactcgacaacagagtgggaactttctgtcttgtgatccattgcctggttctctgtcatttttttattcttcggtgctgtgatcatcacatcagttctgttgcttttcccgcgagctggtgaattcccagccccagaagtggaagttaagattgtggatgactttttcattggccgctatgtcctgctggctttccttagtgccatcttccttggaggcctcttcttggttttaatccattatgttctggagccgatctatgccaaaccactgcactcctactgaccactcttcaggaatacgaaaacctgttctctccttcattgtgatgacattgatgagcaggaaggcactattcagagccttgttttgacagccctcatgccttaaggttagaggagtatctgtccatcactaagacaaatctctggagtcctggcttccagaaacaggattgccaaattgtccctgtggggctagattcttaccagcttaagaaggatattgctatcttcttagtacccgtaccttaggatttccaactgttttgaaagggaaatagtaacagtgatctgcttagagtggattttcactcaagtccttagtaagtggattttggggaaaaaagcacctgggcttctggttctttttgataatatataaaattattcattatgaggttgcagttgtttgcaaaggagaggcactcaaatttgaaaggttattttaatgtgataatttggaagacttactcagatgttggtcattgaccactctgtgcatatatttctgcagagctctgtgaaggcaatgagtgtcacttccctctgctctaataaagcaataaataata

SEQ ID NO: 11501 - DNA, 1550 bp, Homo sapiens
  misc_feature (23)..(23): n is a, c, g, or t
taggctagtcgaggctggtgtgnaatcggccgagggtgggctggaacgcgccggaatctgaggtgtgagtagagcctgggggagagtggatccaggtgaagggggcagaggactgggagttttcgtcctcttgaataagaactcgacaacagagtgggaactttctgtcttgtgatccattgcctgtgtgtcgcactggagcacagaggacactcgatcgtgcggcgcgcagggcggggggccgccgctgcctccccgcgggatggctggcactgtgctcggagtcggtgcgggcgtgttcatcttagccctgctctgggtggcagtgctgctgctgtgtgtgctgctgtccagagcctccggggcggcgaggttctctgtcatttttttattcttcggtgctgtgatcatcacatcagttctgttgcttttcccgcgagctggtgaattcccagccccagaagtggaagttaagattgtggatgactttttcattggccgctatgtcctgctggctttccttagtgccatcttccttggaggcctcttcttggttttaatccattatgttctggagccgatctatgccaaaccactgcactcctactgaccactcttcaggaatacgaaaacctgttctctccttcattgtgatgacattgatgagcaggaaggcactattcagagccttgttttgacagccctcatgccttaaggttagaggagtatctgtccatcactaagacaaatctctggagtcctggcttccagaaacaggattgccaaattgtccctgtggggctagattcttaccagcttaagaaggatattgctatcttcttagtacccgtaccttaggatttccaactgttttgaaagggaaatagtaacagtgatctgcttagagtggattttcactcaagtccttagtaagtggattttggggaaaaaagcacctgggcttctggttctttttgataatatataaaattattcattatgaggttgcagttgtttgcaaaggagaggcactcaaatttgaaaggttattttaatgtgataatttggaagacttactcagatgttggtcattgaccactctgtgcatatatttctgcagagctctgtgaaggcaatgagtgtcacttccctctgctctaataaagcaataaataatagctaaagggctgactttcacttcgaactcttggccacggctttttaatcaagttctttaggtttccttgggattagaggaaaggtatggaaatattgttttttgttttttgtcttgccatgtatctgtaggtttttttcttccatgatgtggtgggctgtgtgtgccttatttaattaccatgagtccattttggggtgtcttcacttttcatctttgtagccctttctccaaagctagtgaggaaggtatattctcaacatcagatataactctatacctgtctgatctcccagaccaaatgaaatttgcattaaatggaggggccctggtcaggttccactttggaagtctgatcctgactccctagagc

SEQ ID NO: 11502 - DNA, 1228 bp, Homo sapiens
  misc_feature (23)..(23): n is a, c, g, or t
taggctagtcgaggctggtgtgnaatcggccgagggtgggctggaacgcgccggaatctgaggtgtgagtagagcctgggggagagtggatccaggtgaagggggcagaggactgggagttttcgtcctcttgaataagaactcgacaacagagtgggaactttctgtcttgtgatccattgcctggtgagtcacagctcacaccatggatttaacctgagagcttcaacttctgctttggccctggagttcccatgccctggtgtcttctaccagttcttagtgtgtcgcactggagcacagaggacactcgatcgtgcggcgcgcagggcggggggccgccgctgcctccccgcgggatggctggcactgtgctcggagtcggtgcgggcgtgttcatcttagccctgctctgggtggcagtgctgctgctgtgtgtgctgctgtccagagcctccggggcggcgagttctgttgcttttcccgcgagctggtgaattcccagccccagaagtggaagttaagattgtggatgactttttcattggccgctatgtcctgctggctttccttagtgccatcttccttggaggcctcttcttggttttaatccattatgttctggagccgatctatgccaaaccactgcactcctactgaccactcttcaggaatacgaaaacctgttctctccttcattgtgatgacattgatgagcaggaaggcactattcagagccttgttttgacagccctcatgccttaaggttagaggagtatctgtccatcactaagacaaatctctggagtcctggcttccagaaacaggattgccaaattgtccctgtggggctagattcttaccagcttaagaaggatattgctatcttcttagtacccgtaccttaggatttccaactgttttgaaagggaaatagtaacagtgatctgcttagagtggattttcactcaagtccttagtaagtggattttggggaaaaaagcacctgggcttctggttctttttgataatatataaaattattcattatgaggttgcagttgtttgcaaaggagaggcactcaaatttgaaaggttattttaatgtgataatttggaagacttactcagatgttggtcattgaccactctgtgcatatatttctgcagagctctgtgaaggcaatgagtgtcacttccctctgctctaataaagcaataaataata

SEQ ID NO: 11503 - DNA, 1145 bp, Homo sapiens
gaagttggccgttgaaagagcaacgctgattagtgaatcttaaatcacctaaatgaaagcccacttgtgattcgccctaagtaaaccagagccccgtgggctggaacgcgccggaatctgaggtgactgggagttttcgtcctcttgaataagaactcgacaacagagtgggaactttctgtcttgtgatccattgcctgtgtgtcgcactggagcacagaggacactcgatcgtgcggcgcgcagggcggggggccgccgctgcctccccgcgggatggctggcactgtgctcggagtcggtgcgggcgtgttcatcttagccctgctctgggtggcagtgctgctgctgtgtgtgctgctgtccagagcctccggggcggcgagttctgttgcttttcccgcgagctggtgaattcccagccccagaagtggaagttaagattgtggatgactttttcattggccgctatgtcctgctggctttccttagtgccatcttccttggaggcctcttcttggttttaatccattatgttctggagccgatctatgccaaaccactgcactcctactgaccactcttcaggaatacgaaaacctgttctctccttcattgtgatgacattgatgagcaggaaggcactattcagagccttgttttgacagccctcatgccttaaggttagaggagtatctgtccatcactaagacaaatctctggagtcctggcttccagaaacaggattgccaaattgtccctgtggggctagattcttaccagcttaagaaggatattgctatcttcttagtacccgtaccttaggatttccaactgttttgaaagggaaatagtaacagtgatctgcttagagtggattttcactcaagtccttagtaagtggattttggggaaaaaagcacctgggcttctggttctttttgataatatataaaattattcattatgaggttgcagttgtttgcaaaggagaggcactcaaatttgaaaggttattttaatgtgataatttggaagacttactcagatgttggtcattgaccactctgtgcatatatttctgcagagctctgtgaaggcaatgagtgtcacttccctctgctctaataaagcaataaataata

SEQ ID NO: 11504 - DNA, 1699 bp, Homo sapiens
  misc_feature (23)..(23): n is a, c, g, or t
taggctagtcgaggctggtgtgnaatcggccgagggtgggctggaacgcgccggaatctgaggtgtgagtagagcctgggggagagtggatccaggtgaagggggcagaggtgtacctgtgcagggatcagtccatttattcctattttctctgacagctggatgaaagggtatgtagaaacaaccattaaatgaacacacacatctaaaaggtttgaacaaactctctcagagaaaaacctcacagcattgagcacagaaggaaaacattagccctgtagttgcttttgttgtcagctgctgaactgttcaaatttaaattattttttttcactccagtctacctgctttaaatgccacagatattaagtaaatggacttacccttgaaatcgggttggccaagccatcacttctcaaagaaggtttaatgatggcatgaacccgtttttatattttattgtattgtactcaataacaataatttagctattctaatatgggaaattatcacagatattattctcacatttaaataagataaaaatgactagatgttctctcttcctctatagcagcactctatactatacccagcccttcttttctatgcttagtaagaaaatgtatagtttgcttataaaattatgagctccattcttaaaagagcttgggaatatttatcttattactttaaagccataccatatataaatccaatgtctcacgaactcttaagctactaagggggattgaagggcaacatttctaatggcgccagccagcttcaactaccatttgccctctattctaactgttagagttggtccaagtcttctgggttatttgtgtaatatccagaatagcacaaattaaatttaaatagttgttttcttaagagcagtaccatcagctcagtcaactaagctagaaacttgtgtcatttctaacaccttctcccttgacacagctaagactggaggtcagaccctcatcatctcttatctggagaattgcaatagtttcctaactggtcacccaattcatatgcatcctgctgcccattacctttttaaaaattaaaaattatcacgaaaaatttaaaaacagaaaatagtacattgggtagtataatatctatgttccaccaatcagattaataaatattaacattttggcacaccagctcaagttttttattttaaagaaataaaacatcacagatttagttcagatcccttttatttccactcctaaccccattccctttccttcctccctctgcagaggcaaatagtcttttgaaattgtcatgtattgtttatgcccatgtttttatacttttgctgtatatacgttcgtcagaaacaatatatattactgtttagattgtatttaattttaaaaatacaagtagtatcatactgtgggttccattttgcaacttgtttttgtcactcaacattgtttttgagatatattcacatcaatacatatagatcaatttcattcattttaagtattcattatgaatatataatattgtatctgttccctgattgatggacatttaggttttttcctgatgttttgctattgtaaacaaagctgcaataaacaccttgtacatgtctctttatgcaagactgtgtctagaacagtggttccccaagaagatgttgctgcccgttttagggtgt

SEQ ID NO: 11505 - DNA, 679 bp, Homo sapiens
  misc_feature (23)..(23): n is a, c, g, or t
taggctagtcgaggctggtgtgnaatcggccgagggtgggctggaacgcgccggaatctgaggtgtgagtagagcctgggggagagtggatccaggtgaagggggcagaggactgggagttttcgtcctcttgaataagaactcgacaacagagtgggaactttctgtcttgtgatccattgcctggtgagtcacagctcacaccatggatttaacctgagagcttcaacttctgctttggccctggagttcccatgccctggtgtcttctaccagttcttagtgtgtcgcactggagcacagaggacactcgatcgtgcggcgcgcagggcggggggccgccgctgcctccccgcgggatggctggcactgtgctcggagtcggtgcgggcgtgttcatcttagccctgctctgggtggcagtgctgctgctgtgtgtgctgctgtccagagcctccggggcggcgaggaattgggaattaccaagaataaatgggaatgcacccagctggtacctgtctaggaagaaggactttgggatgaagaggttgttgacagcaggcctctggacattgttaagggactgaaacatagaatattggctccaaggaagagactgtccagacctaactgatcaaagaagaaattatagacagtgcttttaataatttgtcttttt

SEQ ID NO: 11506 - DNA, 345 bp, Homo sapiens
gtagaattttctaaagtattctgttctaaaaacaacagaagtggaggtggagaggggatgctttggtttttcttgattatgactttgggcagaagtaaaaataaaaactacacatttccattcttaggaattgggaattaccaagaataaatgggaatgcacccagctggtacctgtctaggaagaaggactttgggatgaagaggttgttgacagcaggcctctggacattgttaagggactgaaacatagaatattggctccaaggaagagactgtccagacctaactgatcaaagaagaaattatagacagtgcttttaataatttgtctttttaaccccag

SEQ ID NO: 11507 - DNA, 720 bp, Homo sapiens
gccctagagcctttggagggagcacagccctgctgacacctttattttggattgctggcctgtgagaaaataaatttctattttgagctgctaattaggaaactaatagataccccatcgcgcttatatctcacttacccattctgtaacatggctatagtaatacctttctcagaagcttcgctccgggattcaatgagatatgtttgtacggcacttagcacacagtgaatgttcaaaaatagtgatggctgttcctcttctttaaggactgggagttttcgtcctcttgaataagaactcgacaacagagtgggaactttctgtcttgtgatccattgcctggtgagtcacagctcacaccatggatttaacctgagagcttcaacttctgctttggccctggagttcccatgccctggtgtcttctaccagttcttaggtagggttttgtatccagagagggttcagctttctcccgtgggctgggggaagaggtcaaagtagaactcaggtaccaaatttgaaaggaaacactcagaaaaaacttctgagcgcagagcggaaaacaccctctcagtccccaccaaagagaaaagctttgggttctaaatttccagtttccattaagggactctgggactggacatttctgaaaattaatgacctgtactgagtaatcctcctaacacactgatcatcaaaaaataacctgtaatg

SEQ ID NO: 11508 - DNA, 946 bp, Homo sapiens
cggtggaaccaatccgtgcaacagagaagcggggcgaactgaggcgagtgaagtggactctgagggctaccgctaccgccactgctgcggcaggggcgtggagggcagagggccgcggaggccgcagttgcaaacatggctcagagcagagacggcggaaacccgttcgccgagcccagcgagcttgacaacccctttcagccaccaccagcctatgagcctccagcccctgccccattgcctccaccctcagctccctccttgcagccctcgagaaagctcagccccacagaacctaagaactatggctcatacagcactcaggcctcagctgcagcagccacagctgagctgctgaagaaacaggaggagctcaaccggaaggcagaggagttggaccgaagggagcgagagctgcagcatgctgccctggggggcacagctactcgacagaacaattggccccctctaccttctttttgtccagttcagccctgctttttccaggacatctccatggagatcccccaagaatttcagaagactgtatccaccatgtactacctctggatgtgcagcacgctggctcttctcctgaacttcctcgcctgcctggccagcttctgtgtggaaaccaacaatggcgcaggctttgggctttctatcctctgggtcctccttttcactccctgctcctttgtctgctggtaccgccccatgtataaggctttccggagtgacagttcattcaatttcttcgttctcttcattcttcggcacgatgtgctctgtccccggccctggctccccgtgggatcccggcggaccgcccggggccccccggcaccccactccggctcgtgggcccccccccgctgggcccaagttccgaggcccctcacgccgcgttaacccatggggttcccccccgccggcgggatatcgc

SEQ ID NO: 11509 - DNA, 837 bp, Homo sapiens
cggtggaaccaatccgtgcaacagagaagcggggcgaactgaggcgagtgaagtggactctgagggctaccgctaccgccactgctgcggcaggggcgtggagggcagagggccgcggaggccgcagttgcaaacatggctcagagcagagacggcggaaacccgttcgccgagcccagcgagcttgacaacccctttcagccaccaccagcctatgagcctccagcccctgccccattgcctccaccctcagctccctccttgcagccctcgagaaagctcagccccacagaacctaagaactatggctcatacagcactcaggcctcagctgcagcagccacagctgagctgctgaagaaacaggaggagctcaaccggaaggcagaggagttggaccgaagggagcgagagctgcagcatgctgccctggggggcacagctactcgacagaacaattggccccctctaccttctttttgtccagttcagccctgctttttccaggacatctccatggagatcccccaagaatttcagaagactgtatccaccatgtactacctctggatgtgtgagtagtgagaagccttttggaggaagttacaggtagatctcttaactgccctggggtccgctcaccaagaaccaaacacttcacctctatttagaactcaccagcctgctagcaaatgttcttgccctctccccactttttattgtccatatgcaggaatatattttgaattctttagatgtctttgggctgggtgcagtggtatacgcctgtaatcccagcactttgggaagctgaggtgggtggataacctgaggtca

SEQ ID NO: 11510 - DNA, 1028 bp, Homo sapiens
cggtggaaccaatccgtgcaacagagaagcggggcgaactgaggcgagtgaagtggactctgagggctaccgctaccgccactgctgcggcaggggcgtggagggcagagggccgcggaggccgcagttgcaaacatggctcagagcagagacggcggaaacccgttcgccgagcccagcgagcttgacaacccctttcaggacccagctgtgatccagcaccgacccagccggcagtatgccacgcgtgacgtctacaacccttttgagacccgggaggtgaccaccaccagcctatgagcctccagcccctgccccattgcctccaccctcagctccctccttgcagccctcgagaaagctcagccccacagaacctaagaactatggctcatacagcactcaggcctcagctgcagcagccacagctgagctgctgaagaaacaggaggagctcaaccggaaggcagaggagttggaccgaagggagcgagagctgcagcatgctgccctggggggcacagctactcgacagaacaattggccccctctaccttctttttgtccagttcagccctgctttttccaggacatctccatggagatcccccaagaatttcagaagactgtatccaccatgtactacctctggatgtgcagcacgctggctcttctcctgaacttcctcgcctgcctggccagcttctgtgtggaaaccaacaatggcgcaggctttgggctttctatcctctgggtcctccttttcactccctgctcctttgtctgctggtaccgccccatgtataaggctttccggagtgacagttcattcaatttcttcgttctcttcattcttcggcacgatgtgctctgtccccggccctggctccccgtgggatcccggcggaccgcccggggccccccggcaccccactccggctcgtgggcccccccccgctgggcccaagttccgaggcccctcacgccgcgttaacccatggggttcccccccgccggcgggatatcgc

SEQ ID NO: 11511 - DNA, 1032 bp, Homo sapiens
cggtggaaccaatccgtgcaacagagaagcggggcgaactgaggcgagtgaagtggactctgagggctaccgctaccgccactgctgcggcaggggcgtggagggcagagggccgcggaggccgcagttgcaaacatggctcagagcagagacggcggaaacccgttcgccgagcccagcgagcttgacaacccctttcagccaccaccagcctatgagcctccagcccctgccccattgcctccaccctcagctccctccttgcagccctcgagaaagctcagccccacagaacctaagaactatggctcatacagcactcaggtacaggaggtgtgcaggtgagggctggggagaagggccagtcctggggcccagggctcacatctccgtctgctcacactgggcaggcctcagctgcagcagccacagctgagctgctgaagaaacaggaggagctcaaccggaaggcagaggagttggaccgaagggagcgagagctgcagcatgctgccctggggggcacagctactcgacagaacaattggccccctctaccttctttttgtccagttcagccctgctttttccaggacatctccatggagatcccccaagaatttcagaagactgtatccaccatgtactacctctggatgtgcagcacgctggctcttctcctgaacttcctcgcctgcctggccagcttctgtgtggaaaccaacaatggcgcaggctttgggctttctatcctctgggtcctccttttcactccctgctcctttgtctgctggtaccgccccatgtataaggctttccggagtgacagttcattcaatttcttcgttctcttcattcttcggcacgatgtgctctgtccccggccctggctccccgtgggatcccggcggaccgcccggggccccccggcaccccactccggctcgtgggcccccccccgctgggcccaagttccgaggcccctcacgccgcgttaacccatggggttcccccccgccggcgggatatcgc

SEQ ID NO: 11512 - DNA, 353 bp, Homo sapiens
ccaccaccagcctatgagcctccagcccctgccccattgcctccaccctcagctccctccttgcagccctcgagaaagctcagccccacagaacctaagaactatggctcatacagcactcaggtacaggaggtgtgcaggtgagggctggggagaagggccagtcctggggcccagggctcacatctccgtctgctcacactgggcaggcctcagctgcagcagccacagctgagctgctgaagaaacaggaggagctcaaccggaaggcagaggagttggaccgaagggagcgagagctgcagcatgctgccctggggggcacagctagtaagtaatagagtggggaagag

SEQ ID NO: 11513 - DNA, 796 bp, Homo sapiens
tatggttttctttctctctcctctcctctccctttctttttttgacatttgactttacagttagaataccttttggggtagaacctcatgttactatttttgcaggtagtcaggtgtctcagcttcatttgttgaataattctcattctccgctgaattgattcagataccacatttttgtttattattgggtctctttcttgttttcagttctgtttttattgatctctttattttttcttctgatttttactgtttgagtatttatttgtataaatttatggtgattgtattttatacaaaaaatgcattcagaaagaaatgtagtctaagtcatttaatatgctttttgaaaaattactcatgtaaaattgagttcagtgagcttttaaaaattgattaaggtatgtattactgccagttatttgatctgtgttgacataatagataatggtttctcttgtcagaaggcaaaaaaatctgaggtggaaataagttaaaggagagaattgactgccttatagtccaaggacagattttcaaaccagctttcactcaggctcagacagcatcaagtttccctcttgccatttgccaccttgccttcctccctattagattcacctgttatacttgacccctgcgtggacccaagatggttgtgctgctggtttcttgtctagcagtagacagaacctgtgtcacagcattcccagtcacccctaaatcacgcatagggggatcaggcccccaccctggaaatggtattgagaccaagcctacacaaactacatag

SEQ ID NO: 11514 - DNA, 346 bp, Homo sapiens
gctatctactgcatatgtcaggtactatgctaggtatagatgctgagaacaaagatactctcattatttgtttccatatctagaagtgaaccactgactacttaagtgttttatctagacagtggccaccaaccacatgtgcatcgctggtttctgaccagtggaaacactatttgcatgaactaggatgtactctaagtataaaacacagtggattttggccgggcgcagtggctcacacctgtaatcccagcactttgggaggccgaagcaggtagatcccgaggtcaggagttcaagaccagcctggccaacatggtgaaaccccatctctactaaagataca

SEQ ID NO: 11515 - DNA, 455 bp, Homo sapiens
gagtatattttcctacttcattgtatgcatagtaatttttgattgcctgctagaaattttgaaatttttcttttttagaaaaaatactgtggaactatgttccaggatgcagttaattacttggatataatgtaatcttttcaaagattccttttaagtttgttggttgggaccagagcagtgttttgtcaaattattttaactactgaggcaaaactcttctcaatgtctaccctgtgacttgagaattatgagatgttctacccttactggtagaaacaaacactactatttctagctctgtgtgagcaactggtgctattccttttaatcctttcaggtggttctttcttgaggtttctttatgtgcatttgtgaatcagtgctctgctaaatactgaaggcaaaccctctgtggatctccacacttctctctttgtgcagctctattccct

SEQ ID NO: 11516 - DNA, 458 bp, Homo sapiens
gcaccgttaaacctcaaaaatcccaattgctttccttttttttttcaaggaaataattttgggtccacccaagagtttactggacattttctgatctatgtttttgtaaataattgcccccatcccctcattatgtagtagaacactgatttagcctttgtaactagtgtgatttttatgccatttagatcagctgtatagtcttgaaacattacttaccctttcagttttcagatttctaaaatggaaataatattggtacctaccttgtaaggtccttttgaatattaaaaagaaccaatgccttaaaataaaaaattaaggcattggctaattgtggtggctcttctctgtaatctcagcactttggaaggccaagacggcagggtcgcttgaagccaggagctcaagaccaacctgggcaacataacgagacactgtttctatgaaaaaaaaaa

SEQ ID NO: 11517 - DNA, 2419 bp, Homo sapiens
acgacttccattgatgtggacttagaaatggcaagagataccttcaagaagttaacaaaaaaggaatggatttcttccatgataactacgtgtctcgaggatgatctgctcagagctcttccatgccattctccacaccaagaagctttatcagttttcctcctgctcccagaatgtcctgtgatgcatgattctaagaactggaagaacctggtggttccatttgcaaaggctgtgtgtgaaatgagtaaacaatctttgcaagtcctaaagaagtgttgggcatttttgcaagaatcttctctgaatccgctgatccagatgcttaaagcagccatcatctctcagctgcttcatcagactaaaaccgaacaggatcactgtaatgttaaagctcttttaggaatgatgaaagaactgcataaggtaaacaaagctaactgtcgactaccagaaaatactttcaacataaatgaactctccaacttattaaacttttatatagatagaggaagacagctctttcgggataaccacctgatacctgcagaaacccccagtcctgttattttcagtgattttccatttatctttaattcgctatccaaaattaaattattgcaagctgattcacatataaagatgcagatgtcagaaaagaaagcatacatgcttatgcatgaaacaattctgcaaaaaaaggatgaatttcctccatcacccagatttatacttagagtcagacgaagtcgcctggttaaagatgctctgcgtcaattaagtcaagctgaagctactgacttctgcaaagtattagtggttgaatttattaatgaaatttgtcctgagtctggaggggttagttcagagttcttccactgtatgtttgaagagatgaccaagccagaatatggaatgttcatgtatcctgaaatgggttcctgcatgtggtttcctgccaagcctaaacctgagaagaaaagatatttcctctttggaatgctgtgtggactctccttattcaatttaaatgttgctaaccttcctttcccactggctctgtataaaaaacttctggaccaaaagccatcattggaagatttaaaagaactcagtcctcggttggggaagagtttgcaagaagttctagatgatgctgctgatgacattggagatgcgctctgcatacgcttttctatacactgggaccaaaatgatgttgacttaattccaaatgggatctccatacctgtggaccaaaccaacaagagagactatgtttctaagtatattgattacattttcaacgtctctgtaaaagcagtttatgaggaatttcagagaggattttatagagtctgtgagaaggagatacttagacatttctaccctgaagaactaatgacagcaatcattggaaatactgattatgactggaaacagtttgaacagaattcaaagtatgagcaaggataccaaaaatcacatcctactatacagttgttttggaaggctttccacaaactaaccttggatgaaaagaaaaaattcctctttttccttacaggacgtgataggctgcatgcaagaggcatacagaaaatggaaatagtatttcgctgtcctgaaactttcagtgaaagagatcacccaacatcaataacttgtcataatattctctccctccctaagtattctacaatggaaagaatggaggaagcacttcaagtagccatcaacaacaacagaggatttgtctcacccatgctcacacagtcataatcacctctgagagactcagggtgggctttctcacacttggatccttctgttcttccttacacctaaataatacaagagattaatgaatagtggttagaagtagttgagggagagattgggggaatggggagatgatgatgatggtcaaagggtgcaaaatctcacacaagactgaggcaggagaatagggtacagagatagggatctaaggatgacttggacacactccctggcactgaagagtctgaacactggcctgtgattggtccattccaggaccttcatttgcataaggtatcaaaccacatcagcctctgattggccatgggccagacctgcactctggccaatgattggttcattccaggacattcatttgcataaggagtcaaaccacaccagtcttggattggctgtgagccaattcacctcagtctctaattggctgtgagtcagtctttcatttacatagggtgtaaccatcaagaaacctctacagggtacttaagccccagaagattttgctaccagggctcttgagccacttgctctagcccactcccaccctgtggaatgtactttcacttttgctgcttcactgccttgtgctccaataaatccactccttcaccaccca

SEQ ID NO: 11518 - DNA, 2658 bp, Homo sapiens
acgacttccattgatgtggacttagaaatggcaagagataccttcaagaagttaacaaaaaaggaatggatttcttccatgataactacgtgtctcgaggatgatctgctcagagctcttccatgccattctccacaccaagaagctttatcagttttcctcctgctcccagaatgtcctgtgatgcatgattctaagaactggaagaacctggtggttccatttgcaaaggctgtgtgtgaaatgagtaaacaatctttgcaagtcctaaagaagtgttgggcatttttgcaagaatcttctctgaatccgctgatccagatgcttaaagcagccatcatctctcagctgcttcatcagactaaaaccgaacaggatcactgtaatgttaaagctcttttaggaatgatgaaagaactgcataaggtaaacaaagctaactgtcgactaccagaaaatactttcaacataaatgaactctccaacttattaaacttttatatagatagaggaagacagctctttcgggataaccacctgatacctgcagaaacccccagtcctgttattttcagtgattttccatttatctttaattcgctatccaaaattaaattattgcaagctgattcacatataaagatgcagatgtcagaaaagaaagcatacatgcttatgcatgaaacaattctgcaaaaaaaggatgaatttcctccatcacccagatttatacttagagtcagacgaagtcgcctggttaaagatgctctgcgtcaattaagtcaagctgaagctactgacttctgcaaagtattagtggttgaatttattaatgaaatttgtcctgagtctggaggggttagttcagagttcttccactgtatgtttgaagagatgaccaagccagaatatggaatgttcatgtatcctgaaatgggttcctgcatgtggtttcctgccaagcctaaacctgagaagaaaagatatttcctctttggaatgctgtgtggactctccttattcaatttaaatgttgctaaccttcctttcccactggctctgtataaaaaacttctggaccaaaagccatcattggaagatttaaaagaactcagtcctcggttggggaagagtttgcaagaagttctagatgatgctgctgatgacattggagatgcgctctgcatacgcttttctatacactgggaccaaaatgatgttgacttaattccaaatgggatctccatacctgtggaccaaaccaacaagagagactatgtttctaagtatattgattacattttcaacgtctctgtaaaagcagtttatgaggaatttcagagaggattttatagagtctgtgagaaggagatacttagacatttctaccctgaagaactaatgacagcaatcattggaaatactgattatgactggaaacagtttgaacagaattcaaagtatgagcaaggataccaaaaatcacatcctactatacagttgttttggaaggctttccacaaactaaccttggatgaaaagaaaaaattcctctttttccttacaggacgtgataggctgcatgcaagaggcatacagaaaatggaaatagtatttcgctgtcctgaaactttcagtgaaagagatcacccaacatcaataacttgtcataatattctctccctccctaagtattctacaatggaaagaatggaggaagcacttcaagtagccatcaacaacaacagaggatttgtctcacccatgctcacacagtcataatcacctctgagagactcagggtgggctttctcacacttggatccttctgttcttccttacacctaaataatacaagagattaatgaatagtggttagaagtagttgagggagagattgggggaatggggagatgatgatgatggtcaaagggtgcaaaatctcacacaagactgaggcaggagaatagggtacagagatagggatctaaggatgacttggacacactccctggcactgaagagtctgaacactggcctgtgattggtccattccaggaccttcatttgcataaggtatcaaaccacatcagcctctgattggccatgggccagacctgcactctggccaatgattggttcattccaggacattcatttgcataaggagtcaaaccacaccagtcttggattggctgtgagccaattcacctcagtctctaattggctgtgagtcagtctttcatttacatagggtgtaaccatcaagaaacctctacagggtacttaagccccagaagattttgctaccagggctcttgagccacttgctctagcccactcccaccctgtggaatgtactttcacttttgctgcttcactgccttgtgctccaataaatccactccttcaccacccaaaaaaaaaaaaaaaaaaaaaaaaaaaaaaaaaaaaaaagaaaaaaacacacaaagacaaaacaaaaaaaaaaaaaaaaaaaaaaagttgtggggcgcgagccgccgccgggcccacaaaaagaagcttataaaaacagtggtgggggggggccgggcccacccatatgtgaatagcaaggggccgaacgagcgggtacaagagacgcgggaacagacagggggggtgctccccaaaacg

SEQ ID NO: 11519 - DNA, 386 bp, Homo sapiens
aaatgtctatcatagactagaatgccttgcattttaataggtcctcatttcaaatcaaatttcgccggcattattcttgcaacagtcttgccaaatcagtagtactactcctcgttttatggatgagaggtatgggggtcagaaagttcagaaactgaattgtcagggtcgcatggctagcaagaagcaactcaaactctgactgtatgatggggttgtttttcttatgtggggcatatgtcctttcattccccaatagttcagcctgtcctgagaagctcacctctactgatccatacacccatggattttactgattttagtttagtcttggttatcaggtccttaggatgcaggttcccacatcagcatagcttgagtactcc

SEQ ID NO: 11520 - DNA, 424 bp, Homo sapiens
tactactactaaattcgcggccgcgtcgacttttactcagatatacccaggagattttcccactgtcattatttaaagaatgagtccccaatccccaggccacagactgacaggtcctggtccgtggcctgttaggaactgggctgcacaggtggaaatgagcaaaagccagcggtgattattatcacctgagctccgcctcttgtcagatgagccgcggcattagattctcatacaagagcgaagcctattgtgaactacgcatgcgtgggatctatgttgggtattccctgatgatctgaggtcgaacagtttcctctcgaaacaatccccaccccccaaccctgtccgtggaaaaattgtcttttccacaaaactggtccctggtggtcgacgcggccgcgaattagtagtagtaggcggc

SEQ ID NO: 11521 - DNA, 277 bp, Homo sapiens
ctataacctttgcttaaattgtagaaaagatggatttaatgagacaaatgaaaagtggtttaacataacacacagcagagcatatgctgttatgctttggtgtttgttccctagcccttgttcctcataatagattgtggaatgtttcaaaaatgctgtaacttttttttgctaattgtggtcttaacaaaaattgttcttgattttaaaaaaagatggataggattggttattgaactttgatattaaataaagttttagtgatagtatttcaaat

SEQ ID NO: 11522 - DNA, 777 bp, Homo sapiens
ggcgttggagagtgatggcggcatggcggtgcggcggcggctgcgaacaccttgaggacgggtcgcattatgttgcccaggctggacttgaacttctgggctcgagcaattctcccacctcagcctaccaagcagctgggactacaggtctgcaccactgcaccccacccattcaagtccacatccccagaaacgaggataatgcttggcacaaggtaggcatttaatacatatatgttgaatgtatgaataaatatactggctctttctcaaggccagagaagcctctcttcatcttcccaggacttccattacctactttttttctggagggcgggggggaataatttcaacctacagaaaagatgcagatgcaagaataatgaaaggaactcttagataccctttaaccaaattcaccaataatgttttagtttgtaaaatctaatttgaaataatttttttaaaaatttattttctcctcaaatttctttttctttttctttggcttaagaatcttcatgtttttatttatttatttatttattttttgtttttgtttttttgagacagagtctcactctgttgcccagcctggagtgcagtggcattatctagactcactgcaacctccacctcctgtgttcaagtgattcttgtgcctcagcctcctgagtagctgggattaccagtgcacgccaccacgccaggctactttttgtatttttagtagagacagggtttcgccatgttggccagcctggtctcgaactcctg

SEQ ID NO: 11523 - DNA, 1022 bp, Homo sapiens
acctaatgtaaatgacgagttaatgggtgcagcacaccaacatggcccatgtatacatatgtaacaaacctgcacgttgtgcacatgtacctgagaacttaaagtataaaaaaattattaaaaatcattgaaatgtacacttttaaaaaaaagagtgtattctatcaggattctgactagagtgctctagagtatgacataggatagggaatgtcttaacaagcttcaaaattctaggaacaatgaaactaggaaaaaagctttgaaaaatgccagggattcaactgcctccctggcctttccctgccaatcaatgtgccccagcagccaatttacacagcactgtgtgcaggcttgtaaatagaccttccagttctgctataatcaagaccttattgtccataactcaatttagagaaggtttagctgtctaccaactcttgtgcagagtttctgtgaagttttgttttgggttgcaagaatctggaaaacaaatgcagacatttttgaggaagattttgaaatttctatttacaaggtacccaaaatgggatgcaaacttgaatttggttgatcttctgaaatacatacctgtgttttaagatttgcttgagcaaacctttaaccatggaaatttgaaacaatgatttccaggttgaaataattccagttttgtcatataaataccacaaatgaatctgttttagcacagggtacaaatatcttttttccttttgtgcatttggcaatagtgtgttttggtaataaaacatagatctgcatattaatgaaacatagctctgcatattttgtctggggaaaattagcattctgtgaacaaagtcaacaatttctggcctcgcattagttttcctattataattaaaacttagttttggccaggcgtggtggctcatgcctgtaatccccgcaatttgggaggccaaagcaggcggatcacgaggccaggaggtcgagaccatcctggctaacatggtgaaaccccgtctctactaaaaata

SEQ ID NO: 11524 - DNA, 492 bp, Homo sapiens
ctatttttataaaatatgaagacattatttgcctttttcaactttgttgacatttgtactgatgatgcaaaagcaattagggataaaactgctggtggtgccttagcacgaatcaaggcagtaacagcaaacaactctggtagttgtattcttcagaagacaaaaccttagattttccttaagaatgtctgtgatgaaagagtaaaaatttgtcaggtgctgcagctcatgccctgtaatcccagcactctgggaggctgaggcgtgtggatcagttgaggtcaggagttcgagaccatcctggctaacatgctgaaaccccatctgtaataaaaatacaaaaattagccaggcatggtggcgggcacctgtaatcccagctactcaggaggcttaggcccaagaattacctgaacctgggacgtggaggttgcagtgagccaagatcgcaccactgtaccctagcctgggcaacagagtgactcttaaaaa

SEQ ID NO: 11525 - DNA, 396 bp, Homo sapiens
  misc_feature (34)..(34): n is a, c, g, or t
  misc_feature (43)..(43): n is a, c, g, or t
  misc_feature (65)..(65): n is a, c, g, or t
  misc_feature (84)..(84): n is a, c, g, or t
  misc_feature (104)..(104): n is a, c, g, or t
ggaaatggcagaaatcacctgtccttcctgcggnccgcacgcngggaggctgtataccggagctngttccctattcgggccatncttggctccccaagatatanggaagtttctagcatttgaagagagatgcagaagaacccattcattattgcatccagcacccagaaaagttcctaacacatacaccgagagtggtcagccagatgggcgggaaccagtatgctgtttctgctatccagtacaccttaccaagatttcacagaacctctgactaatacagcaatattgattttatctaaagggaattacttttaagaaaattttctcctaaatcgccctggaagatgctctcttgtttaaccaaatagtgttgattaaaaggttgaaatgaat

SEQ ID NO: 11526 - DNA, 506 bp, Homo sapiens
ctattattctttaactttttaagatataaaatattaatacagtgtagcagagatttaaaatttttaataggtattaccaaactgcttcatagcattggtcttttcagtagctatttgtattttctaaggcaatagcaatatacacagaaaatgggttttctttgtccttactatatcagtgcaatctaatacgtacattagttagtgagattgctttgggaaaaatagaaagaacattgagattctaaaacaggatgtctatgttcaaagtctggctgaatttcacttactacttgttgaacttgtacaacttattttaacctttccttgccttatttttaaaattttgcaaaatggtgttaatattacctatctataagaccctcggccaggtgcagtgcttatgcctgtaatcacagtacttgggagaccaaggagaggattgcttgagctcagaagtttaagaccagtctgacaacatagtgagaacctgtatctcaaaaaaa

SEQ ID NO: 11527 - DNA, 549 bp, Homo sapiens
atggtggatttgtttctgcttaaaattggatcaaaataactaaaaagaaaaatagaagataactaaagattatgattgctttataaattctactgaatgttgttgtttcacctatgaagccacagaatgataatggctataagcatctgaatctgtagtttattgtaaaatattaaccctcatcttttgtagcaaattcagaactattactgttccttcagtgtagaataacagagcttttcaaatatattagaccagtttcaggagtttttcattaaccttttagccttttacaccattatccatataagcagcagaattaactttgtagactattttaatttcgtgataatattatggaatatactttgattctaggattttaaaatcctatatttttgctatctgtatcaattaaaattcttgaaaagatactgtctttattcaccaacataattcttttgtgaaggcaggaggtaagtttctcatattggataatcaagctttgttctaatctaaagaaaaccagtcatttgaaaatgtaattaa

SEQ ID NO: 11528 - DNA, 406 bp, Homo sapiens
ccattctctgttaaactagcaaaatctttcaattagttcatcccatgccatgaacatgctgatgtactgtgttcttacatattcaatgtgtctctttgatcaatgcctttaactaattatgggtgagtggaaactcccttatatcacaccattttgtggcactcctggtgttagagataattatgggtagtggtgccaggagcagtatagctttctcttctatgctaaatctacttctaaatctctcaacctataataattcattatttaggagctgggttaatactgaggaatagcattctttgaatttgcgtttggatggggcaaggctaatcatatcaggatgtggttggtaccaattatggcacttggttttctagactgttaaaagacataacaaaatgat

SEQ ID NO: 11529 - DNA, 449 bp, Homo sapiens
actggaagagtttctgtttggggcaataaaaaatctttggaaatagtggagatggccataaaactttgtgaatattataaatgttattaaattatacagttaaaaatggataaaacggcaagttttatgttatgtatattttaccaaaaaaaaaataaacaactaccacgtgacttatcagccaaacacatacttttctgcaaacacacattatttgtgtactcatttattccttcatcctccttccttaaacagtctgctgcaattcaggcaaatgttttcacacacaaaggtttccttctcagaaacttcactgtcagtgtgaagctgaggcataagaacttgaaggaggaggggagggaagaacttgaaggaaggacctttaatgctaggtagcgttatagcatcttattttttgatagacaaaatagaatgcactaaacaaacac

SEQ ID NO: 11530 - DNA, 676 bp, Homo sapiens
agtctgctttttccccatacagtttttggtggggggggtccatggtccccccttgctggttcctccctcccccctttttttgtttttccatctgtgcctgttccttccacagcccaggcacacagaagcccaccttcttccccttaggaggagggatagtcaacacccctgctgtctctctgtcactcacacactgatttatggggtctgagctgggctgttcctgcaggatggacaggacccagcgccctcttctccccacaggctgtaaatagacttccaatcaccaggccagcccccacacaccctcactcattccagggaagcccaggtaggtggtgaacccgctgccacgtctatcagtcctcttgttttatgcaaagatttactgtaaagtagatttctttccctccctcccccattcttttattgtaaatattgtctctaaatgtgtaacatattataaagaatttataaggatttttaaagatgttttgctcatttacaaaagtgttgtaacagtgttggacaaagccttccaccccatgtccgcatggctcctttcactgtgtccttgacacacctctctggcaacaactaaaatttcctgcttctgaaaagtcctgtcttaaaagtacagtctatatcttggaaataaatagctttcctcaaggca

SEQ ID NO: 11531 - DNA, 841 bp, Homo sapiens
gagcgttcaacgatgatgccagtcagagaccattcgacattcagatcatacttagtagaacgagtgacatatagagatagatcgagacagacaaattagtcatcagagttaagtcgaggacggacaagagtagtatactatatgatagaggaacgtgacacttactgcaagtacggagtcgacgagatatacagactagacgtatatagtagagactcacgagatgtcgtcgacacatatatcgtgagcgtaagtgatgttattaagctcatgatctagagactaagatactagtatatatgacttcacagatgcgttagatattcatacgactcgtctagtagaatggtaccagcgagaataaatacgagtaagtaatatatatgtctataagaagatgttacatgaagatgaagaagaacccgcaaataattatagtcacggttgaggataatgaaaccagataagagtgagctggacctagtcaattctaattgaattcagtcacattcgtaaagatgagaccagagagagaatattaaccaggatggtcaatattacaagtgagacaataaagtagactgaggtcttttattgtaaatattgtctctaaatgtgtaacatattataaagaatttataaggatttttaaagatgttttgctcatttacaaaagtgttgtaacagtgttggacaaagccttccaccccatgtccgcatggctcctttcactgtgtccttgacacacctctctggcaacaactaaaatttcctgcttctgaaaagtcctgtcttaaaagtacagtctatatcttggaaataaatagctttcctcaaggca

SEQ ID NO: 11532 - DNA, 799 bp, Homo sapiens
  misc_feature (365)..(365): n is a, c, g, or t
gggctaataataataactctataccaatagagtcagtgtagtcagtaagaagatgtcatctaacctaagatggtcaagatgtgctacaatccatacggcgtgcaagctcataaaatgacaaagagcagacggatcggaatgatcatgtaacatagatcaatagtagatatagacgcgaatatagagggtagtagactaagtcagacaagatatagatatacaagatatcaattctagatagtgcgagaagtcagagagtataagcgtgtagaggattcaagcatctaatatagtagcgtactgacaatacatagaagaagactagtgagagagtcgaagtgagagagtctgtaggcaagagtagncatatggtgtatacaggagagctcagatattattatgaatcgaattgacattagaaaatctactatcaatagagtctatctgtataactgatgtatgagatatatataaaagtagtaaggaagatatgaaaatctaagaaatagaatgtaacgacaacagatatatcgaatagcgaagaatcttttattgtaaatattgtctctaaatgtgtaacatattataaagaatttataaggatttttaaagatgttttgctcatttacaaaagtgttgtaacagtgttggacaaagccttccaccccatgtccgcatggctcctttcactgtgtccttgacacacctctctggcaacaactaaaatttcctgcttctgaaaagtcctgtcttaaaagtacagtctatatcttggaaataaatagctttcctcaaggca

SEQ ID NO: 11533 - DNA, 490 bp, Homo sapiens
  misc_feature (439)..(439): n is a, c, g, or t
  misc_feature (442)..(442): n is a, c, g, or t
  misc_feature (465)..(465): n is a, c, g, or t
tgatgtatcccaacacagccgtagatgcatgtcggcaataaaagagatgggttcaaagatgaaaataagtaggctgggcgcagtggctcatacctgtaatcccagcactgtgggaagcagaggcaggcgtatcacttgaggtcaggagtttgagaccagcatggccaacatggcaaaaccctgtctctactaaaaatacaaaaattagcaggcatggtgttgggcgataacatcatgttatcccccacacaccctcactcattccagggaagcccaggtaggtggtgaacccgctgccacgtctatcagtcctcttgttttatgcaaagatttactgtaaagtagatttctttccctccctcccccattcttttattgtaaatattgtctctaaatgtgtaacatattataaagaatttataaggatttttaaagatgnttngctcatttacaaaagtgttgtancagtgttggcgctacatccgggacc

SEQ ID NO: 11534 - DNA, 881 bp, Homo sapiens
agtctgctttttccccatacagtttttggtggggggggtccatggtccccccttgctggttcctccctcccccctttttttgtttttccatctgtgcctgttccttccacagcccaggcacacagaagcccaccttcttccccttaggaggagggatagtcaacacccctgctgtctctctgtcactcacacactgatttatggggtctgagctgggctgttcctgcaggatggacaggacccagcgccctcttctccccacaggctgtaaatagacttccaatcaccaggccagcccccacacaccctcactcattccagggaagcccaggtaggtggtgaacccgctgccacgtctatcagtcctcttgttttatgcaaagatttactgtaaagtagatttctttccctccctcccccattcttttattgtaaatattgtctctaaatgtgtaacatattataaagaatttataaggatttttaaagatgttttgctcatttacaaaagtgttgtaacagtgttggacaaagccttccaccccatgtccgcatggctcctttcactgtgtccttgacacacctctctggcaacaactaaaatttcctgcttctgaaaagtcctgtcttaaaagtacagtctatatcttggaaataaatagctttcctcaaggcaaaagtcagctgtctcacttgttttggagggaaagggccagagtggggctgggagacaggagaggtacctggcccagggaaggagggcgatggggactggaccaaggggtggcaggacggaggcagactttttcctggtgacctttttgtaaagtagatttctttccctccctcccccattcttttattgtggacacgaatgttca

SEQ ID NO: 11535 - DNA, 573 bp, Homo sapiens
gcagctggcgccgtcacaccgtggtaggtggtgaacccgctgccacgtctatcagtcctcttgttttatgcaaagatttactgtaaagtagatttctttccctccctcccccattcttttattgtaaatattgtctctaaatgtgtaacatattataaagaatttataaggatttttaaagatgttttgctcatttacaaaagtgttgtaacagtgttggacaaagccttccaccccatgtccgcatggctcctttcactgtgtccttgacacacctctctggcaacaactaaaatttcctgcttctgaaaagtcctgtcttaaaagtacagtctatatcttggaaataaatagctttcctcaaggcaaaagtcagctgtctcacttgttttggagggaaagggccagagtggggctgggagacaggagaggtacctggcccagggaaggagggcgatggggactggaccaaggggtggcaggacggaggcagactttttcctggtgacctttttgtaaagtagatttctttccctccctcccccattcttttattgtggacacgaatgttca

SEQ ID NO: 11536 - DNA, 797 bp, Homo sapiens
ttccttggttgtgcagaaattttttagtttgatgtaaccccatttgtctatttttgcttttgttgcctgtgcttttgggtttatgtccaaaaaaacattgcctagcctaatatgatggaccttttctctgtgttctcttctagtactttcacagtgtcagatcttacatttaagtctttaatccattttgagttgatttttgtacatggtgttctttattgagtatattatctatttttattctgaaggctcaatgttttgcctgctgtgtatagaaagcaaagaactttaaatcttttttctgaagaaaaacaacctgcttaatgatggaacaaaaaatgtgtccctatcgaacagaaacctgggtaccatgtacttgctatatatactgttaaaaactactccccattcccccttgtacttttagtattatagcttaatcctttatgccccattagtttctataggttatttttctataaaaatttcttgcagatccaatgctattttcatagatgaattagctacttatttattcaacaatcatatgaattctgatatatgccagacactgctcttggtgctagggatacagcaatgaacaaaatagctggtccctaaacttttattcccatgaaggtttcatgctttttcttcttcctttgccagttcatttttgtcctccccaccagcccaggctcagccagtctctagttctccaacatgctttctgaatttagatgtggctactgttctgtgcctacttctgggctgggctaatgagggacctaaagaag

SEQ ID NO: 11537 - DNA, 904 bp, Homo sapiens
atgcccagatatccaataaccttctcactgtggctttccttaccaccctattttaaactgcagtttcccagggaattgcatgagtatccaaagcagagcgaagagccagtgtggtggccctctgtcagggaggctggtatagccaaacagagtgagtgaaggcagactggttagaagtaaggtcagagaggtagcaggaagggagtagaagtggcgagaacttgtagggccttgtgggtcattgccttgtttgcaatcaaatttaagttttccagggcctatgaaaacattgcgagaaagctctggaaagttatagctggttggccagggatctagagcagcgttttggagagaaataacttacagtcacggaaaggaaggccagaggaaggagcagaccaggtctcccccaactcaatagtggtggcgctgccttttcctgctagcactgtagaaacactggatgaggaccactgctgcccaaattcttctctcctccacctaagaattccccaggagagaacgaaacccagtttttgtttttgaaaagaaaattaccagtaattttgttttgttaatttttttgcattgaatattattcttatatatccactaatttttaagaaaatatacgtgtatattcaaaatttggtttcatttttaggcccaacctcaatatcttaaaataggatttagataagaaaaagtaagataaagatacttgcttgagtctggtggttttgtaactgttatttatgtctactttaatttgggggcatataataaagcaaacacattttctttctatgacatcctaaaaaataagacttgactcagtatactctgtgtttctaatgaacataaaagtgtgaatggttttattttgatttgtcttttatcgttg

SEQ ID NO: 11538 - DNA, 383 bp, Homo sapiens
tgagatagcatcttgctctgttgcataggctggggtacagtggtgtggtcttggctcacttcaacctccacctcctgggttcaggctattcttgtgcctcagctactcttagctgggattacaggcgtgcaccactatgcccagctaactttttgtacttttagtagagatagggtttcatcatgtcggccaggcttgccttgaaatcgtgagctcaagtgatccatgatccacccaccttggcctcccaaagtgctgggattacaggcatgcgctaccatgcccggcctaatttgagatattaataggtgccatacagaaaataaaacaggatgatatgatgaagtgtgacaagggaggggagttaatttacataggtatta

SEQ ID NO: 11539 - DNA, 4383 bp, Homo sapiens
gttcactccgatcagctgatcccaactgacaacaggagaggaggaagcccgggaggcaacgaaggaggagggtggcggagatggagatgaggatggatctgccggtgtcctgaggaatagcctctgcccccactggcgccctgcggccccccgacgccgccttgctgcggccgagcttctcagtggtatcccctgaaatactgacttcaggtcgaattatattgaaaagctcctgaccactttctttcattaccaaaactttgtagctgatgtccaaccgatgaacccaccaccgtgaacccatcagacctctctcagatagccataaaagacccttccaagtcaattttgaccacatctttgcttgcactttatggaggatgaaaccatcaaaccaaatcaacgttgctgctaatacaagagtcttagaggcagcaaattaaaaatttgaacatttgtttgtgaagaactataacaggacatgaaaggtgttcttttttaaagtgttcagaaccctgtggaagtttcgtgcagtcttcagactcaaatcttcgtcttcacccccggggcaagctcagtgactattatatggtgggtgtgtttccttaccagcgtgagtatgagtgcccagacttccccagcagagaagggcctgaatccggggctgatgtgccaggaaagttacgcttgcagcgggactgatgaagctatctttgagtgtgatgagtgctgcagtctgcagtgtctccgctgcgaggaggagctccatcggcaggagcgcctgagaaaccatgagcggataagactcaaacctggccatgtcccttactgtgacctctgcaagggtctcagtgggcatttaccaggtgttaggcagagggcaatagtgaggtgccagacctgcaaaattaacttgtgcctggagtgccagaagaggactcattctgggggtaacaaaaggagacaccctgttactgtgtacaatgtcagtaatctccaggagtcactggaggcagaagagatggatgaggagaccaagaggaagaagatgactgagaaggttgtgagtttcctcctagtagacgaaaatgaagaaattcaggtaacaaatgaagaagactttattagaaaattggactgcaaacctgatcagcatctgaaagtggtttccatttttggaaatactggtgatggaaagtctcatactctcaaccacactttcttttatggtcgtgaagtctttaaaacctccccgacccaggagtcctgcactgtgggagtgtgggcagcctatgacccagttcacaaagtagcagtgatcgatacggaagggctcctgggggccaccgtgaatctaagccagagaacacggctgctgcttaaggtcctggccatctcagacctcgtcatctatcgaactcatgcagaccggctgcataacgacctcttcaaattccttggggatgcctcagaagcttatctgaagcacttcaccaaggagctcaaggccaccactgctcgctgtggcctggatgtccctttatccacactgggccctgcagttatcatcttccatgagaccgtgcacacccagctactgggctctgatcatccctcagaggtgccagagaagctcatccaggaccggttccggaagctgggccgtttccctgaagcctttagttccattcactacaagggaacgaggacttacaaccctcccacggacttttctgggcttcggcgtgctttggagcagctactagagaataacaccacccgttctccccggcacccgggagtcatcttcaaagccctgaaggcactaagtgaccgcttcagcggtgagatccccgatgaccagatggcgcacagctccttttttccagatgagtatttcacctgctcctccttgtgcctcagctgtggggttggatgtaagaaaagcatgaatcatgggaaggaaggagtgcctcatgaagccaagagccgctgcagatactcccaccagtatgacaaccgagtgtatacctgcaaggcctgctatgagagaggcgaggaagtcagtgtagtgcccaaaacatctgcttccactgactccccctggatgggtctcgcaaaatatgcctggtctgggtatgtgatcgaatgtcctaactgtggcgtggtctatcgtagtcggcagtactggtttggaaaccaagatcctgtggatacggtggtgcggacagagattgtgcatgtgtggcctggaactgatgggtttctgaaggacaacaacaatgctgcccagcgcctgttggacgggatgaacttcatggctcagtcggtgtccgagcttagccttggacccaccaaggctgtgacttcctggctgacagaccagatcgcccctgcctactggaggcccaactcccagattctgagctgcaacaagtgtgcgacgtcctttaaagataacgacactaagcatcactgccgagcctgtggggagggcttctgtgacagctgttcatcaaagactcggccagtgcctgagcggggctggggccctgcgccagtgcgggtctgtgacaactgctacgaagccaggaacgtccagttagctgttaccgaggcacaagtggacgatgaaggtggaacgctcattgctcggaaggtgggcgaggccgtgcagaacactctgggagccgtggtgacagccattgacataccactaggtctggtaaaggacgcggccaggcctgcgtactgggtgcctgaccacgaaatcctccactgccacaactgccggaaggagttcagcatcaagctctccaagcaccactgccgggcctgcggacagggcttctgtgatgagtgctcccatgaccgccgggctgttccttctcgtggctgggaccatcccgtccgagtctgcttcaactgcaataaaaagcccggtgacctttaaccccagccccctctccgagtccttcacaattccttaggttctcagggttagaaacagtcttgcgaggtaggccctcctcccagtcacctgctgtggtgtgtgtcctctcctctccgcatccagggccactttccctcagtgggggtgagcctggcggcaggcccgaaggtgtggacccctcagggcaggggaccttgcaacttatcgcaaaggggaatgaacctgaatccgttgcatttatttcagttaaaaataatgaatatatatgtgtatatctctctctcatatatacatatgaaaggcactcggggcgtatcgaggctgctgctggctgtgaagacttcgcacagtctcctccgcacagggtgaggtggcagtggcagcacgtcttcctcatgagccgagccaggtccatggccaccacgtggctggccccttcctctgctgctcttggagccttggaagcctctcctgtccttggctcttccctccatgcctgtcagctgcctggggagtgagcctccctggtccttcctgcctgaaacagcctgaagggaattctccctaggtctcctgggagtcgagtcccaattcttggcttaagcctgttttagtcagagaccacccaacttagcgtgcaggtcaccggagtgggtggagggtcagaggtcgggtcttcggccctgagaagtagaaatgcaggggccgtgctgtccctggtcccccagggaacagcaaggaaggaactgagccttctccagcagggcttcctgtcccgatgcttctgtctccactcggctttcccaaaaggcggcacccagctcctcaatcgaagcatctgcctcccacccctcggccccctcaagcccaccatctgcttctgagtgtcgcactaggattttcattgcttattttaaagtgtcttaatcctttgttcccagacacacaacccctctagctctcggaggggcgatcatgagaaaccttccagggaaactgagcacaggatgaactgttagttgtttttaaaagtctatataaatatttcaacagatcgtaaagaaaaaatttatctctttggtccttgcaagagaagtcaaaggaacttttgtttctcctcaagagcctggacatctctgtctgtcatgactggaaagggcccgttgtgctgaaatcctatcatcatggtggatttgatcttcagtggccaaacacgaattaaagtataattcttaactgaactggtgggtgggttgagctttagggaagtatatggcggtcattcctggtgcgcctatcggtgtgacatgagccctggagtgtgtcgtccctctcagccctgctcctcctgcctcctggggtccagtgactgggaccctactctagaactgtgtaccatccaattcgccatcataaaggaatcttcctgc

SEQ ID NO: 11540 - DNA, 2627 bp, Homo sapiens
gcctttctcttctagctttgggatctcaggaggaggagaacccaagaaactgtggaatgatgtgaggcactaagtgaccgcttcagcggtgagatccccgatgaccagatggcgcacagctccttttttccagatgagtatttcacctgctcctccttgtgcctcagctgtggggttggatgtaagaaaagcatgaatcatgggaaggaaggagtgcctcatgaagccaagagccgctgcagatactcccaccagtatgacaaccgagtgtatacctgcaaggcctgctatgagagaggcgaggaagtcagtgtagtgcccaaaacatctgcttccactgactccccctggatgggtctcgcaaaatatgcctggtctgggtatgtgatcgaatgtcctaactgtggcgtggtctatcgtagtcggcagtactggtttggaaaccaagatcctgtggatacggtggtgcggacagagattgtgcatgtgtggcctggaactgatgggtttctgaaggacaacaacaatgctgcccagcgcctgttggacgggatgaacttcatggctcagtcggtgtccgagcttagccttggacccaccaaggctgtgacttcctggctgacagaccagatcgcccctgcctactggaggcccaactcccagattctgagctgcaacaagtgtgcgacgtcctttaaagataacgacactaagcatcactgccgagcctgtggggagggcttctgtgacagctgttcatcaaagactcggccagtgcctgagcggggctggggccctgcgccagtgcgggtctgtgacaactgctacgaagccaggaacgtccagttagctgttaccgaggcacaagtggacgatgaaggtggaacgctcattgctcggaaggtgggcgaggccgtgcagaacactctgggagccgtggtgacagccattgacataccactaggtctggtaaaggacgcggccaggcctgcgtactgggtgcctgaccacgaaatcctccactgccacaactgccggaaggagttcagcatcaagctctccaagcaccactgccgggcctgcggacagggcttctgtgatgagtgctcccatgaccgccgggctgttccttctcgtggctgggaccatcccgtccgagtctgcttcaactgcaataaaaagcccggtgacctttaaccccagccccctctccgagtccttcacaattccttaggttctcagggttagaaacagtcttgcgaggtaggccctcctcccagtcacctgctgtggtgtgtgtcctctcctctccgcatccagggccactttccctcagtgggggtgagcctggcggcaggcccgaaggtgtggacccctcagggcaggggaccttgcaacttatcgcaaaggggaatgaacctgaatccgttgcatttatttcagttaaaaataatgaatatatatgtgtatatctctctctcatatatacatatgaaaggcactcggggcgtatcgaggctgctgctggctgtgaagacttcgcacagtctcctccgcacagggtgaggtggcagtggcagcacgtcttcctcatgagccgagccaggtccatggccaccacgtggctggccccttcctctgctgctcttggagccttggaagcctctcctgtccttggctcttccctccatgcctgtcagctgcctggggagtgagcctccctggtccttcctgcctgaaacagcctgaagggaattctccctaggtctcctgggagtcgagtcccaattcttggcttaagcctgttttagtcagagaccacccaacttagcgtgcaggtcaccggagtgggtggagggtcagaggtcgggtcttcggccctgagaagtagaaatgcaggggccgtgctgtccctggtcccccagggaacagcaaggaaggaactgagccttctccagcagggcttcctgtcccgatgcttctgtctccactcggctttcccaaaaggcggcacccagctcctcaatcgaagcatctgcctcccacccctcggccccctcaagcccaccatctgcttctgagtgtcgcactaggattttcattgcttattttaaagtgtcttaatcctttgttcccagacacacaacccctctagctctcggaggggcgatcatgagaaaccttccagggaaactgagcacaggatgaactgttagttgtttttaaaagtctatataaatatttcaacagatcgtaaagaaaaaatttatctctttggtccttgcaagagaagtcaaaggaacttttgtttctcctcaagagcctggacatctctgtctgtcatgactggaaagggcccgttgtgctgaaatcctatcatcatggtggatttgatcttcagtggccaaacacgaattaaagtataattcttaactgaactggtgggtgggttgagctttagggaagtatatggcggtcattcctggtgcgcctatcggtgtgacatgagccctggagtgtgtcgtccctctcagccctgctcctcctgcctcctggggtccagtgactgggaccctactctagaactgtgtaccatccaattcgccatcataaaggaatcttcctgc

SEQ ID NO: 11541 - DNA, 2536 bp, Homo sapiens
agagttattgtcagggagttcagagtttaatagggaagtcagatacctaaatggatattgtacttagacacacagaaataggattcctagagatgtccaagtattagaagaactgagaggaaaggttcttaactcagcctgcggtgcggggccccctggaggaggtgtcatctcctgtattatatgggcttagtaagtcctgaattgaacagctacacatcaagtcttatggtcactttgaagagaataaagccagagggattcctggtgtgtctccgttcttccctgccagggagttagtggttctgagttggccacggtgagtgtgcaactcaccaaacatccctcttcctccttcctttcactcccttctcagagcatgatggaagcctgcgttttcatttcagactgatgggtttctgaaggacaacaacaatgctgcccagcgcctgttggacgggatgaacttcatggctcagtcggtgtccgagcttagccttggacccaccaaggctgtgacttcctggctgacagaccagatcgcccctgcctactggaggcccaactcccagattctgagctgcaacaagtgtgcgacgtcctttaaagataacgacactaagcatcactgccgagcctgtggggagggcttctgtgacagctgttcatcaaagactcggccagtgcctgagcggggctggggccctgcgccagtgcgggtctgtgacaactgctacgaagccaggaacgtccagttagctgttaccgaggcacaagtggacgatgaaggtggaacgctcattgctcggaaggtgggcgaggccgtgcagaacactctgggagccgtggtgacagccattgacataccactaggtctggtaaaggacgcggccaggcctgcgtactgggtgcctgaccacgaaatcctccactgccacaactgccggaaggagttcagcatcaagctctccaagcaccactgccgggcctgcggacagggcttctgtgatgagtgctcccatgaccgccgggctgttccttctcgtggctgggaccatcccgtccgagtctgcttcaactgcaataaaaagcccggtgacctttaaccccagccccctctccgagtccttcacaattccttaggttctcagggttagaaacagtcttgcgaggtaggccctcctcccagtcacctgctgtggtgtgtgtcctctcctctccgcatccagggccactttccctcagtgggggtgagcctggcggcaggcccgaaggtgtggacccctcagggcaggggaccttgcaacttatcgcaaaggggaatgaacctgaatccgttgcatttatttcagttaaaaataatgaatatatatgtgtatatctctctctcatatatacatatgaaaggcactcggggcgtatcgaggctgctgctggctgtgaagacttcgcacagtctcctccgcacagggtgaggtggcagtggcagcacgtcttcctcatgagccgagccaggtccatggccaccacgtggctggccccttcctctgctgctcttggagccttggaagcctctcctgtccttggctcttccctccatgcctgtcagctgcctggggagtgagcctccctggtccttcctgcctgaaacagcctgaagggaattctccctaggtctcctgggagtcgagtcccaattcttggcttaagcctgttttagtcagagaccacccaacttagcgtgcaggtcaccggagtgggtggagggtcagaggtcgggtcttcggccctgagaagtagaaatgcaggggccgtgctgtccctggtcccccagggaacagcaaggaaggaactgagccttctccagcagggcttcctgtcccgatgcttctgtctccactcggctttcccaaaaggcggcacccagctcctcaatcgaagcatctgcctcccacccctcggccccctcaagcccaccatctgcttctgagtgtcgcactaggattttcattgcttattttaaagtgtcttaatcctttgttcccagacacacaacccctctagctctcggaggggcgatcatgagaaaccttccagggaaactgagcacaggatgaactgttagttgtttttaaaagtctatataaatatttcaacagatcgtaaagaaaaaatttatctctttggtccttgcaagagaagtcaaaggaacttttgtttctcctcaagagcctggacatctctgtctgtcatgactggaaagggcccgttgtgctgaaatcctatcatcatggtggatttgatcttcagtggccaaacacgaattaaagtataattcttaactgaactggtgggtgggttgagctttagggaagtatatggcggtcattcctggtgcgcctatcggtgtgacatgagccctggagtgtgtcgtccctctcagccctgctcctcctgcctcctggggtccagtgactgggaccctactctagaactgtgtaccatccaattcgccatcataaaggaatcttcctgc

SEQ ID NO: 11542 - DNA, 1816 bp, Homo sapiens
cagagcctgggcttctgcatttttaaaaagctctgtcagcaattctgtgtgcagttgggattataagccagtaagcatccgaggatggcctcttgctagttgggcctcggggtattgggctttgggtgccctgaccattgttccctgccttaggtctggtaaaggacgcggccaggcctgcgtactgggtgcctgaccacgaaatcctccactgccacaactgccggaaggagttcagcatcaagctctccaagcaccactgccgggcctgcggacagggcttctgtgatgagtgctcccatgaccgccgggctgttccttctcgtggctgggaccatcccgtccgagtctgcttcaactgcaataaaaagcccggtgacctttaaccccagccccctctccgagtccttcacaattccttaggttctcagggttagaaacagtcttgcgaggtaggccctcctcccagtcacctgctgtggtgtgtgtcctctcctctccgcatccagggccactttccctcagtgggggtgagcctggcggcaggcccgaaggtgtggacccctcagggcaggggaccttgcaacttatcgcaaaggggaatgaacctgaatccgttgcatttatttcagttaaaaataatgaatatatatgtgtatatctctctctcatatatacatatgaaaggcactcggggcgtatcgaggctgctgctggctgtgaagacttcgcacagtctcctccgcacagggtgaggtggcagtggcagcacgtcttcctcatgagccgagccaggtccatggccaccacgtggctggccccttcctctgctgctcttggagccttggaagcctctcctgtccttggctcttccctccatgcctgtcagctgcctggggagtgagcctccctggtccttcctgcctgaaacagcctgaagggaattctccctaggtctcctgggagtcgagtcccaattcttggcttaagcctgttttagtcagagaccacccaacttagcgtgcaggtcaccggagtgggtggagggtcagaggtcgggtcttcggccctgagaagtagaaatgcaggggccgtgctgtccctggtcccccagggaacagcaaggaaggaactgagccttctccagcagggcttcctgtcccgatgcttctgtctccactcggctttcccaaaaggcggcacccagctcctcaatcgaagcatctgcctcccacccctcggccccctcaagcccaccatctgcttctgagtgtcgcactaggattttcattgcttattttaaagtgtcttaatcctttgttcccagacacacaacccctctagctctcggaggggcgatcatgagaaaccttccagggaaactgagcacaggatgaactgttagttgtttttaaaagtctatataaatatttcaacagatcgtaaagaaaaaatttatctctttggtccttgcaagagaagtcaaaggaacttttgtttctcctcaagagcctggacatctctgtctgtcatgactggaaagggcccgttgtgctgaaatcctatcatcatggtggatttgatcttcagtggccaaacacgaattaaagtataattcttaactgaactggtgggtgggttgagctttagggaagtatatggcggtcattcctggtgcgcctatcggtgtgacatgagccctggagtgtgtcgtccctctcagccctgctcctcctgcctcctggggtccagtgactgggaccctactctagaactgtgtaccatccaattcgccatcataaaggaatcttcctgc

SEQ ID NO: 11543 - DNA, 413 bp, Homo sapiens
tgagacagagtcttgctctgtcagccaggctggagtgcagtggcacaatcttggcttactgcaacctccacctcccgggctgcagcaattctcctgcctgagcctcctgagtagctgggattacagatgtgtgccaccatgcccagctaatttttgtatttttagtagagacagggtttcaccatgttggccaggctgatctcgaactcctgagatcgggcagattgcttgagcccaggagttcacaaccagcctgggctggtaaaaccccgtgtctattaaaaaaacaaacaaaaaacaaacaataagctagcagagtgtttcctgtttcaggcctgctatgagagaggcgaggaagtcagtgtagtgcccaaaacatctgcttccactgactccccctggatgggtctcgc

SEQ ID NO: 11544 - DNA, 541 bp, Homo sapiens
gcattcttagctgcagagttgcttctgggggaagggaatgcgcacatagcaactgaattctgaaaaggctgcagtgtttaccagagatggcttagaccagtcttctcctttgagaaggttctagttttcgctcctagaacctttctgccttactttaaaagaagggttataaaggagccccagaaggttgcagctaaaggactaacagatgtcatctaatttcagagtctgggctgacctgacccacagcacagacccttgcagtagttgcaggacagcacagtggtgtctgggatcagaatccagaagcgttctgctattggtccctgagttttccatttgggagaggacttagaggtgacagcatttcctttattactgtctacagctgttaccgaggcacaagtggacgatgaaggtggaacgctcattgctcggaaggtgggcgaggccgtgcagaacactctgggagccgtggtgacagccattgacataccactaggtgggcctggcagtgcttctcttgggggtagtggatgcg

SEQ ID NO: 11545 - DNA, 4474 bp, Homo sapiens
gttcactccgatcagctgatcccaactgacaacaggagaggaggaagcccgggaggcaacgaaggaggagggtggcggagatggagatgaggatggatctgccggtgtcctgaggaatagcctctgcccccactggcgccctgcggccccccgacgccgccttgctgcggccgagcttctcagtggtatcccctgaaatactgacttcaggtcgaattatattgaaaagctcctgaccactttctttcattaccaaaactttgtagctgatgtccaaccgatgaacccaccaccgtgaacccatcagacctctctcagatagccataaaagacccttccaagtcaattttgaccacatctttgcttgcactttatggaggatgaaaccatcaaaccaaatcaacgttgctgctaatacaagagtcttagaggcagcaaattaaaaatttgaacatttgtttgtgaagaactataacaggacatgaaaggtgttcttttttaaagtgttcagaaccctgtggaagtttcgtgcagtcttcagactcaaatcttcgtcttcacccccggggcaagctcagtgactattatatggtgggtgtgtttccttaccagcgtgagtatgagtgcccagacttccccagcagagaagggcctgaatccggggctgatgtgccaggaaagttacgcttgcagcgggactgatgaagctatctttgagtgtgatgagtgctgcagtctgcagtgtctccgctgcgaggaggagctccatcggcaggagcgcctgagaaaccatgagcggataagactcaaacctggccatgtcccttactgtgacctctgcaagggtctcagtgggcatttaccaggtgttaggcagagggcaatagtgaggtgccagacctgcaaaattaacttgtgcctggagtgccagaagaggactcattctgggggtaacaaaaggagacaccctgttactgtgtacaatgtcagtaatctccaggagtcactggaggcagaagagatggatgaggagaccaagaggaagaagatgactgagaaggttgtgagtttcctcctagtagacgaaaatgaagaaattcaggtaacaaatgaagaagactttattagaaaattggactgcaaacctgatcagcatctgaaagtggtttccatttttggaaatactggtgatggaaagtctcatactctcaaccacactttcttttatggtcgtgaagtctttaaaacctccccgacccaggagtcctgcactgtgggagtgtgggcagcctatgacccagttcacaaagtagcagtgatcgatacggaagggctcctgggggccaccgtgaatctaagccagagaacacggctgctgcttaaggtcctggccatctcagacctcgtcatctatcgaactcatgcagaccggctgcataacgacctcttcaaattccttggggatgcctcagaagcttatctgaagcacttcaccaaggagctcaaggccaccactgctcgctgtggcctggatgtccctttatccacactgggccctgcagttatcatcttccatgagaccgtgcacacccagctactgggctctgatcatccctcagaggtgccagagaagctcatccaggaccggttccggaagctgggccgtttccctgaagcctttagttccattcactacaagggaacgaggacttacaaccctcccacggacttttctgggcttcggcgtgctttggagcagctactagagaataacaccacccgttctccccggcacccgggagtcatcttcaaagccctgaaggcactaagtgaccgcttcagcggtgagatccccgatgaccagatggcgcacagctccttttttccagatgagtatttcacctgctcctccttgtgcctcagctgtggggttggatgtaagaaaagcatgaatcatgggaaggaaggagtgcctcatgaagccaagagccgctgcagatactcccaccagtatgacaaccgagtgtatacctgcaaggcctgctatgagagaggcgaggaagtcagtgtagtgcccaaaacatctgcttccactgactccccctggatgggtctcgcaaaatatgcctggtctgggtatgtgatcgaatgtcctaactgtggcgtggtctatcgtagtcggcagtactggtttggaaaccaagatcctgtggatacggtggtgcggacagagattgtgcatgtgtggcctggaactgatgggtttctgaaggacaacaacaatgctgcccagcgcctgttggacgggatgaacttcatggctcagtcggtgtccgagcttagccttggacccaccaaggctgtgacttcctggctgacagaccagatcgcccctgcctactggaggcccaactcccagattctgagctgcaacaagtgtgcgacgtcctttaaagataacgacactaagcatcactgccgagcctgtggggagggcttctgtgacagctgttcatcaaagactcggccagtgcctgagcggggctggggccctgcgccagtgcgggtctgtgacaactgctacgaagccaggaacgtccagttagctgttaccgaggcacaagtggacgatgaaggtggaacgctcattgctcggaaggtgggcgaggccgtgcagaacactctgggagccgtggtgacagccattgacataccactaggtctggtaaaggacgcggccaggcctgcgtactgggtgcctgaccacgaaatcctccactgccacaactgccggaaggagttcagcatcaagctctccaagcaccactgccgggcctgcggacagggcttctgtgatgagtgctcccatgaccgccgggctgttccttctcgtggctgggaccatcccgtccgagtctgcttcaactgcaataaaaagcccggtgacctttaaccccagccccctctccgagtccttcacaattccttaggttctcagggttagaaacagtcttgcgaggtaggccctcctcccagtcacctgctgtggtgtgtgtcctctcctctccgcatccagggccactttccctcagtgggggtgagcctggcggcaggcccgaaggtgtggacccctcagggcaggggaccttgcaacttatcgcaaaggggaatgaacctgaatccgttgcatttatttcagttaaaaataatgaatatatatgtgtatatctctctctcatatatacatatgaaaggcactcggggcgtatcgaggctgctgctggctgtgaagacttcgcacagtctcctccgcacagggtgaggtggcagtggcagcacgtcttcctcatgagccgagccaggtccatggccaccacgtggctggccccttcctctgctgctcttggagccttggaagcctctcctgtccttggctcttccctccatgcctgtcagctgcctggggagtgagcctccctggtccttcctgcctgaaacagcctgaagggaattctccctaggtctcctgggagtcgagtcccaattcttggcttaagcctgttttagtcagagaccacccaacttagcgtgcaggtcaccggagtgggtggagggtcagaggtcgggtcttcggccctgagaagtagaaatgcaggggccgtgctgtccctggtcccccagggaacagcaaggaaggaactgagccttctccagcagggcttcctgtcccgatgcttctgtctccactcggctttcccaaaaggcggcacccagctcctcaatcgaagcatctgcctcccacccctcggccccctcaagcccaccatctgcttctgagtgtcgcactaggattttcattgcttattttaaagtgtcttaatcctttgttcccagacacacaacccctctagctctcggaggggcgatcatgagaaaccttccagggaaactgagcacaggatgaactgttagttgtttttaaaagtctatataaatatttcaacagatcgtaaagaaaaaatttatctctttggtccttgcaagagaagtcaaaggaacttttgtttctcctcaagagcctggacatctctgtctgtcatgactggaaagggcccgttgtgctgaaatcctatcatcatggtggatttgatcttcagtggccaaacacgaattaaagtataattcttaactgaactggtgggtgggttgagctttagggaagtatatggcggtcattcctggtgcgcctatcggtgtgacatgagccctggagtgtgtcgtccctctcagccctgctcctcctgcctcctggggtccagtgactgggaccctactctagaactgtgtaccatccaattcgccatcataaaggaatcttcctgctgattttaaatgctttcttgattgaggaaggtatgttaaataaagagtagattttcccagtagcctaatactcaacacatgggattttacc

SEQ ID NO: 11546 - DNA, 4285 bp, Homo sapiens
gttcactccgatcagctgatcccaactgacaacaggagaggaggaagcccgggaggcaacgaaggaggagggtggcggagatggagatgaggatggatctgccggtgtcctgaggaatagcctctgcccccactggcgccctgcggccccccgacgccgccttgctgcggccgagcttctcagtggtatcccctgaaatactgacttcaggtcgaattatattgaaaagctcctgaccactttctttcattaccaaaactttgtagctgatgtccaaccgatgaacccaccaccgtgaacccatcagacctctctcagatagccataaaagacccttccaagtcaattttgaccacatctttgcttgcactttatggaggatgaaaccatcaaaccaaatcaacgttgctgctaatacaagagtcttagaggcagcaaattaaaaatttgaacatttgtttgtgaagaactataacaggacatgaaaggtgttcttttttaaagtgttcagaaccctgtggaagtttcgtgcagtcttcagactcaaatcttcgtcttcacccccggggcaagctcagtgactattatatggtgggtgtgtttccttaccagcgtgagtatgagtgcccagacttccccagcagagaagggcctgaatccggggctgatgtgccaggaaagttacgcttgcagcgggactgatgaagctatctttgagtgtgatgagtgctgcagtctgcagtgtctccgctgcgaggaggagctccatcggcaggagcgcctgagaaaccatgagcggataagactcaaacctggccatgtcccttactgtgacctctgcaagggtctcagtgggcatttaccaggtgttaggcagagggcaatagtgaggtgccagacctgcaaaattaacttgtgcctggagtgccagaagaggactcattctgggggtaacaaaaggagacaccctgttactgtgtacaatgtcagtaatctccaggagtcactggaggcagaagagatggatgaggagaccaagaggaagaagatgactgagaaggttgtgagtttcctcctagtagacgaaaatgaagaaattcaggtaacaaatgaagaagactttattagaaaattggactgcaaacctgatcagcatctgaaagtggtttccatttttggaaatactggtgatggaaagtctcatactctcaaccacactttcttttatggtcgtgaagtctttaaaacctccccgacccaggagtcctgcactgtgggagtgtgggcagcctatgacccagttcacaaagtagcagtgatcgatacggaagggctcctgggggccaccgtgaatctaagccagagaacacggctgctgcttaaggtcctggccatctcagacctcgtcatctatcgaactcatgcagaccggctgcataacgacctcttcaaattccttggggatgcctcagaagcttatctgaagcacttcaccaaggagctcaaggccaccactgctcgctgtggcctggatgtccctttatccacactgggccctgcagttatcatcttccatgagaccgtgcacacccagctactgggctctgatcatccctcagaggtgccagagaagctcatccaggaccggttccggaagctgggccgtttccctgaagcctttagttccattcactacaagggaacgaggacttacaaccctcccacggacttttctgggcttcggcgtgctttggagcagctactagagaataacaccacccgttctccccggcacccgggagtcatcttcaaagccctgaaggcactaagtgaccgcttcagcggtgagatccccgatgaccagatggcgcacagctccttttttccagatgagtatttcacctgctcctccttgtgcctcagctgtggggttggatgtaagaaaagcatgaatcatgggaaggaaggagtgcctcatgaagccaagagccgctgcagatactcccaccagtatgacaaccgagtgtatacctgcaaggtatgtgatcgaatgtcctaactgtggcgtggtctatcgtagtcggcagtactggtttggaaaccaagatcctgtggatacggtggtgcggacagagattgtgcatgtgtggcctggaactgatgggtttctgaaggacaacaacaatgctgcccagcgcctgttggacgggatgaacttcatggctcagtcggtgtccgagcttagccttggacccaccaaggctgtgacttcctggctgacagaccagatcgcccctgcctactggaggcccaactcccagattctgagctgcaacaagtgtgcgacgtcctttaaagataacgacactaagcatcactgccgagcctgtggggagggcttctgtgacagctgttcatcaaagactcggccagtgcctgagcggggctggggccctgcgccagtgcgggtctgtgacaactgctacgaagccaggaacgtccagttagctgttaccgaggcacaagtggacgatgaaggtggaacgctcattgctcggaaggtgggcgaggccgtgcagaacactctgggagccgtggtgacagccattgacataccactaggtctggtaaaggacgcggccaggcctgcgtactgggtgcctgaccacgaaatcctccactgccacaactgccggaaggagttcagcatcaagctctccaagcaccactgccgggcctgcggacagggcttctgtgatgagtgctcccatgaccgccgggctgttccttctcgtggctgggaccatcccgtccgagtctgcttcaactgcaataaaaagcccggtgacctttaaccccagccccctctccgagtccttcacaattccttaggttctcagggttagaaacagtcttgcgaggtaggccctcctcccagtcacctgctgtggtgtgtgtcctctcctctccgcatccagggccactttccctcagtgggggtgagcctggcggcaggcccgaaggtgtggacccctcagggcaggggaccttgcaacttatcgcaaaggggaatgaacctgaatccgttgcatttatttcagttaaaaataatgaatatatatgtgtatatctctctctcatatatacatatgaaaggcactcggggcgtatcgaggctgctgctggctgtgaagacttcgcacagtctcctccgcacagggtgaggtggcagtggcagcacgtcttcctcatgagccgagccaggtccatggccaccacgtggctggccccttcctctgctgctcttggagccttggaagcctctcctgtccttggctcttccctccatgcctgtcagctgcctggggagtgagcctccctggtccttcctgcctgaaacagcctgaagggaattctccctaggtctcctgggagtcgagtcccaattcttggcttaagcctgttttagtcagagaccacccaacttagcgtgcaggtcaccggagtgggtggagggtcagaggtcgggtcttcggccctgagaagtagaaatgcaggggccgtgctgtccctggtcccccagggaacagcaaggaaggaactgagccttctccagcagggcttcctgtcccgatgcttctgtctccactcggctttcccaaaaggcggcacccagctcctcaatcgaagcatctgcctcccacccctcggccccctcaagcccaccatctgcttctgagtgtcgcactaggattttcattgcttattttaaagtgtcttaatcctttgttcccagacacacaacccctctagctctcggaggggcgatcatgagaaaccttccagggaaactgagcacaggatgaactgttagttgtttttaaaagtctatataaatatttcaacagatcgtaaagaaaaaatttatctctttggtccttgcaagagaagtcaaaggaacttttgtttctcctcaagagcctggacatctctgtctgtcatgactggaaagggcccgttgtgctgaaatcctatcatcatggtggatttgatcttcagtggccaaacacgaattaaagtataattcttaactgaactggtgggtgggttgagctttagggaagtatatggcggtcattcctggtgcgcctatcggtgtgacatgagccctggagtgtgtcgtccctctcagccctgctcctcctgcctcctggggtccagtgactgggaccctactctagaactgtgtaccatccaattcgccatcataaaggaatcttcctgc

SEQ ID NO: 11547 - DNA, 333 bp, Homo sapiens
aatgtcactcactacccatgtgcctgtgtttctgcttgtatagatcatccctcagaggtgccagagaagctcatccaggaccggttccggaagctgggccgtttccctgaagcctttagttccattcactacaagggaacgaggacttacaaccctcccacggacttttctgggcttcggcgtgctttggagcagctactagagaataacaccacccgttctccccggcacccgggagtcatcttcaaagccctgaaggtcagttggcttgtgccccaagggcttctcattggggtgccagtgggtggtgagaacactcagttcgccagcttt

SEQ ID NO: 11548 - DNA, 326 bp, Homo sapiens
atttccgctgcacaacacgccgtgctttagcggaagatgaccgtttccactgcacaacactacaagtgtttactgccaggccggtgtgaaatatgttccagcacataatctatgtcaccaatgaaggtggtggttcagacttggtgcacgcaagctttcctgtcccacaagaacacagcatgctctcttctcgggttccattccaatcacataacaaacatgactgccttttttgtctcggcatcagaaagatcagaggaaaatttgcactcaacttagacaactctaagctcttataacctgcctatatctacaggtcagcttta

SEQ ID NO: 11549 - DNA, 3240 bp, Homo sapiens
agcggacatttaaactgctgcctgcctgtgcagcagctgaggaaccgtggatttcatattatagactaaaaccccattaaaactgctcaaaatccttcctgcagctgccaggcaacaacgaaagaagagaggtaaatcctattcttttccaatacaactgaagcactacattttagctctggctgctttacattgcagctcagtgttattagtagaaatatggatactgagacgagaacacagcactgcattgtccagccaggaaaatagcagatgtaaaaagcttcaatgcatcaactgtcgggaagagtcaacagtgctacaagcagaacgggcaactacagctcttttgtttaacgaaagagagaaaatgaaagaaagggaaaatttcagaagactaggacccatatgaacaaggagggtaactcgaagacaagcagacagatggacactttggatactgtgaaaagcaatcgcaggaggcagactgttgggggatgtgcgcatgttcgatagcatcttttttgctgaagtgatggcgtgccaaaagtattttcagtgggcataatcctcttcacataaatggcctgaccaaggaagaatgactacaagagagacaatgtgactgaattagaaaatgattgccaaagaatagtattaaggagaagaaaacatttttggtcaccaatctctcatataccactactggatatttacaacatgcttcagtggaggagaagacactgctgctttgcaaagatgacctggaatgccaaaaggtctctgttccgcactcatcttattggagtactttctctagtgtttctttttgctatgtttttgtttttcaatcatcatgactggctgccaggcagagctggattcaaagaaaaccctgtgacatacactttccgaggatttcggtcaacaaaaagtgagacaaaccacagctcccttcggaacatttggaaagaaacagtccctcaaaccctgaggcctcaaacagcaactaactctaataacacagacctgtcaccacaaggagttacaggcctggagaatacacttagtgccaatggaagtatttacaatgaaaaaggtactggacatccaaattcttaccatttcaaatatattattaatgagcctgaaaaatgccaagagaaaagtccttttttaatactactaatagctgcagagcctggacaaatagaagctagaagagctattcggcaaacttggggcaatgaaagtctagcacctggtattcaaatcacaagaatatttttgttgggcttaagtattaagctaaatggctaccttcaacgtgcaatactggaagaaagcagacaatatcatgatataattcaacaggaatacttagatacgtactataatttgaccattaaaacactaatgggcatgaactgggttgcaacatactgtccacatattccatatgttatgaaaactgacagtgacatgtttgtcaacactgaatatttaatcaataagttactgaagccagatctgcctcccagacataactatttcactggttacctaatgcgaggatatgcacccaatcgaaacaaagatagcaagtggtacatgccaccagacctctacccaagtgagcgttatcctgtcttctgttctggaactggttatgttttttctggagatctggcagaaaagatttttaaagtttctttaggtatccgccgtttgcacttggaagatgtatatgtagggatctgtcttgccaagttgagaattgatcctgtaccccctcccaatgagtttgtgttcaatcactggcgagtctcttattcgagctgtaaatacagccacctaattacctctcatcagttccagcctagtgaactgataaaatactggaaccatttacaacaaaataagcacaatgcctgtgccaacgcagcaaaagaaaaggcaggcaggtatcgccaccgtaaactacattagaaaagacaattttttttcaaatgtgcaatttgtaaatattgctaaaagcatgtatagttaggaactgattacatccgtaggacaagttttagttaaaactcatcacataaagaaattcaagaagtatttttttaatttctgaagaagttaattcttaaaactataacattatataacaaaaaaggtttcccaaaacaatctatttaaaaaactgtataaggagattctgtgtattaacatgcaataacaagcatgcataaatcaatggttcaagtcttctgttagggggccaataaaatgtatctgcatatgttttccacataaattttaattcaagaaatgacagtcaaaagatccttcattttagattaagcttttcattttaatatataatttaatgtaaataaaacatcactatcaattttaaggaaactttttaattgtgcaaaggataaattttttgacctattttagggttctaaatgcaataagatttagttgagttattccacaaacacattataaagttcagatgtttcatcaatgcagttctcacgaaagtatttactttttaaaaataactgagatattattttaaatttcttttattaatactttcttttattaatatatgggggaaaattattttgacatgacgtggtaaaatgtgaaaaactaatgtgtctcaggctcaagtttttatagttattaaatgtttcaaaatagacaagttttgtttcctcattgatgttaagaaccaaactcctatttcaatgagttattggattagaccaattactgcactcttaaacagcaccaccatttaatttcatgtatatctaacttcgaatatatctgtaaagataatcgaagcaaaagtaatcacttaaaggcacaaataggatgtactgttgaaaaagataaagagtgcaggtgcagtttcattcaacacatttttaagatgcatgtctgccaaaatgcaacatacgggaagtttatttcctgacagcaggtgtacacatgccaacacttaatcattttatggcacctatttctttcttggagtgccaagtttgcaaacctgcagtttttaatttggtagatgacaaatattctgaatcaccaattaaaaacctttttgggagggatggggaaaactacaaacgtttgacaaacacaattctaggatgaacaatgtatacaatgcacttttatgaagtttttaaaaataaaggaaaacaaaaaacttta

SEQ ID NO: 11550 - DNA, 3409 bp, Homo sapiens
cggcaaaaagacaacatacttagaaataaagttaaataaggaggtaaaagactcgtacactgaaaactataaaacattggtgaaagaaattaaagaaatgaataagtgaaagatggcccatgttcatggattagaagaactaatattgttaaagtgtccatactacccaaaatgatctacaaattagatgcaatccctatcaaaactccaatggcatatttacagggttagaaaaaacaattataaaattcacatgaacccacaaaagagctcaaatggccaaatcaattgtgagaaaaaaagaacaaagctggaggcatcacagttcttaatttcaaaatatattagaaagctatggcaatgagaacagtatgctactggcataaaaatagacatgtggaccgatggatcagaagagagaccccagtaggaaatttgcacatatacagtgatctgatctgcaacaagggtgccaagaatcaacagtgctacaagcagaacgggcaactacagctcttttgtttaacgaaagagagaaaatgaaagaaagggaaaatttcagaagactaggacccatatgaacaaggagggtaactcgaagacaagcagacagatggacactttggatactgtgaaaagcaatcgcaggaggcagactgttgggggatgtgcgcatgttcgatagcatcttttttgctgaagtgatggcgtgccaaaagtattttcagtgggcataatcctcttcacataaatggcctgaccaaggaagaatgactacaagagagacaatgtgactgaattagaaaatgattgccaaagaatagtattaaggagaagaaaacatttttggtcaccaatctctcatataccactactggatatttacaacatgcttcagtggaggagaagacactgctgctttgcaaagatgacctggaatgccaaaaggtctctgttccgcactcatcttattggagtactttctctagtgtttctttttgctatgtttttgtttttcaatcatcatgactggctgccaggcagagctggattcaaagaaaaccctgtgacatacactttccgaggatttcggtcaacaaaaagtgagacaaaccacagctcccttcggaacatttggaaagaaacagtccctcaaaccctgaggcctcaaacagcaactaactctaataacacagacctgtcaccacaaggagttacaggcctggagaatacacttagtgccaatggaagtatttacaatgaaaaaggtactggacatccaaattcttaccatttcaaatatattattaatgagcctgaaaaatgccaagagaaaagtccttttttaatactactaatagctgcagagcctggacaaatagaagctagaagagctattcggcaaacttggggcaatgaaagtctagcacctggtattcaaatcacaagaatatttttgttgggcttaagtattaagctaaatggctaccttcaacgtgcaatactggaagaaagcagacaatatcatgatataattcaacaggaatacttagatacgtactataatttgaccattaaaacactaatgggcatgaactgggttgcaacatactgtccacatattccatatgttatgaaaactgacagtgacatgtttgtcaacactgaatatttaatcaataagttactgaagccagatctgcctcccagacataactatttcactggttacctaatgcgaggatatgcacccaatcgaaacaaagatagcaagtggtacatgccaccagacctctacccaagtgagcgttatcctgtcttctgttctggaactggttatgttttttctggagatctggcagaaaagatttttaaagtttctttaggtatccgccgtttgcacttggaagatgtatatgtagggatctgtcttgccaagttgagaattgatcctgtaccccctcccaatgagtttgtgttcaatcactggcgagtctcttattcgagctgtaaatacagccacctaattacctctcatcagttccagcctagtgaactgataaaatactggaaccatttacaacaaaataagcacaatgcctgtgccaacgcagcaaaagaaaaggcaggcaggtatcgccaccgtaaactacattagaaaagacaattttttttcaaatgtgcaatttgtaaatattgctaaaagcatgtatagttaggaactgattacatccgtaggacaagttttagttaaaactcatcacataaagaaattcaagaagtatttttttaatttctgaagaagttaattcttaaaactataacattatataacaaaaaaggtttcccaaaacaatctatttaaaaaactgtataaggagattctgtgtattaacatgcaataacaagcatgcataaatcaatggttcaagtcttctgttagggggccaataaaatgtatctgcatatgttttccacataaattttaattcaagaaatgacagtcaaaagatccttcattttagattaagcttttcattttaatatataatttaatgtaaataaaacatcactatcaattttaaggaaactttttaattgtgcaaaggataaattttttgacctattttagggttctaaatgcaataagatttagttgagttattccacaaacacattataaagttcagatgtttcatcaatgcagttctcacgaaagtatttactttttaaaaataactgagatattattttaaatttcttttattaatactttcttttattaatatatgggggaaaattattttgacatgacgtggtaaaatgtgaaaaactaatgtgtctcaggctcaagtttttatagttattaaatgtttcaaaatagacaagttttgtttcctcattgatgttaagaaccaaactcctatttcaatgagttattggattagaccaattactgcactcttaaacagcaccaccatttaatttcatgtatatctaacttcgaatatatctgtaaagataatcgaagcaaaagtaatcacttaaaggcacaaataggatgtactgttgaaaaagataaagagtgcaggtgcagtttcattcaacacatttttaagatgcatgtctgccaaaatgcaacatacgggaagtttatttcctgacagcaggtgtacacatgccaacacttaatcattttatggcacctatttctttcttggagtgccaagtttgcaaacctgcagtttttaatttggtagatgacaaatattctgaatcaccaattaaaaacctttttgggagggatggggaaaactacaaacgtttgacaaacacaattctaggatgaacaatgtatacaatgcacttttatgaagtttttaaaaataaaggaaaacaaaaaacttta

SEQ ID NO: 11551 - DNA, 3756 bp, Homo sapiens
cggcaaaaagacaacatacttagaaataaagttaaataaggaggtaaaagactcgtacactgaaaactataaaacattggtgaaagaaattaaagaaatgaataagtgaaagatggcccatgttcatggattagaagaactaatattgttaaagtgtccatactacccaaaatgatctacaaattagatgcaatccctatcaaaactccaatggcatatttacagggttagaaaaaacaattataaaattcacatgaacccacaaaagagctcaaatggccaaatcaattgtgagaaaaaaagaacaaagctggaggcatcacagttcttaatttcaaaatatattagaaagctatggcaatgagaacagtatgctactggcataaaaatagacatgtggaccgatggatcagaagagagaccccagtaggaaatttgcacatatacagtgatctgatctgcaacaagggtgccaagaatcaacagtgctacaagcagaacgggcaactacagctcttttgtttaacgaaagagagaaaatgaaagaaagggaaaatttcagaagactaggacccatatgaacaaggagggtaactcgaagacaagcagacagatggacactttggatactgtgaaaagcaatcgcaggaggcagactgttgggggatgtgcgcatgttcgatagcatcttttttgctgaagtgatggcgtgccaaaagtattttcagtgggcataatcctcttcacataaatggcctgaccaaggaagaatgactacaagagagacaatgtgactgaattagaaaatgattgccaaagaatagtattaaggagaagaaaacatttttggtcaccaatctctcatataccactactggatatttacaacatgcttcagtggaggagaagacactgctgctttgcaaagatgacctggaatgccaaaaggtctctgttccgcactcatcttattggagtactttctctagtgtttctttttgctatgtttttgtttttcaatcatcatgactggctgccaggcagagctggattcaaagaaaaccctgtgacatacactttccgaggatttcggtcaacaaaaagtgagacaaaccacagctcccttcggaacatttggaaagaaacagtccctcaaaccctgaggcctcaaacagcaactaactctaataacacagacctgtcaccacaaggagttacaggcctggagaatacacttagtgccaatggaagtatttacaatgaaaaaggtactggacatccaaattcttaccatttcaaatatattattaatgagcctgaaaaatgccaagagaaaagtccttttttaatactactaatagctgcagagcctggacaaatagaagctagaagagctattcggcaaacttggggcaatgaaagtctagcacctggtattcaaatcacaagaatatttttgttgggcttaagtattaagctaaatggctaccttcaacgtgcaatactggaagaaagcagacaatatcatgatataattcaacaggaatacttagatacgtactataatttgaccattaaaacactaatgggcatgaactgggttgcaacatactgtccacatattccatatgttatgaaaactgacagtgacatgtttgtcaacactgaatatttaatcaataagttactgaagccagatctgcctcccagacataactatttcactggttacctaatgcgaggatatgcacccaatcgaaacaaagatagcaagtggtacatgccaccagacctctacccaagtgagcgttatcctgtcttctgttctggaactggttatgttttttctggagatctggcagaaaagatttttaaagtttctttaggtatccgccgtttgcacttggaagatgtatatgtagggatctgtcttgccaagttgagaattgatcctgtaccccctcccaatgagtttgtgttcaatcactggcgagtctcttattcgagctgtaaatacagccacctaattacctctcatcagttccagcctagtgaactgataaaatactggaaccatttacaacaaaataagcacaatgcctgtgccaacgcagcaaaagaaaaggcaggcaggtatcgccaccgtaaactacattagaaaagacaattttttttcaaatgtgcaatttgtaaatattgctaaaagcatgtatagttaggaactgattacatccgtaggacaagttttagttaaaactcatcacataaagaaattcaagaagtatttttttaatttctgaagaagttaattcttaaaactataacattatataacaaaaaaggtttcccaaaacaatctatttaaaaaactgtataaggagattctgtgtattaacatgcaataacaagcatgcataaatcaatggttcaagtcttctgttagggggccaataaaatgtatctgcatatgttttccacataaattttaattcaagaaatgacagtcaaaagatccttcattttagattaagcttttcattttaatatataatttaatgtaaataaaacatcactatcaattttaaggaaactttttaattgtgcaaaggataaattttttgacctattttagggttctaaatgcaataagatttagttgagttattccacaaacacattataaagttcagatgtttcatcaatgcagttctcacgaaagtatttactttttaaaaataactgagatattattttaaatttcttttattaatactttcttttattaatatatgggggaaaattattttgacatgacgtggtaaaatgtgaaaaactaatgtgtctcaggctcaagtttttatagttattaaatgtttcaaaatagacaagttttgtttcctcattgatgttaagaaccaaactcctatttcaatgagttattggattagaccaattactgcactcttaaacagcaccaccatttaatttcatgtatatctaacttcgaatatatctgtaaagataatcgaagcaaaagtaatcacttaaaggcacaaataggatgtactgttgaaaaagataaagagtgcaggtgcagtttcattcaacacatttttaagatgcatgtctgccaaaatgcaacatacgggaagtttatttcctgacagcaggtgtacacatgccaacacttaatcattttatggcacctatttctttcttggagtgccaagtttgcaaacctgcagtttttaatttggtagatgacaaatattctgaatcaccaattaaaaacctttttgggagggatggggaaaactacaaacgtttgacaaacacaattctaggatgaacaatgtatacaatgcacttttatgaagtttttaaaaataaaggaaaacaaaaaactttactgagtgttataagtattttcacaataattttgtttgactccatcatgaattttaaaatcaagaaataccaacctactaactaaaatagtgtttttattccatacaagtatgtaaatctgtcaatcttaatttagtcagaatgtttcttaattctaataacaatcatttttacctcttattctattattaagggataaatcaccagaagagaattgtaacatttgtgaaacttgaaaacactaaaactgtttaagtgcttatctccatttcaaatcagtagcctaagtgttctactctaaatcaagtgattctgagagctgatctatgtaacacaccccagctcttg

SEQ ID NO: 11552 - DNA, 994 bp, Homo sapiens
gtagagaaagtgtctgtgttgcccaggctggtctcaaactcctggccccaagagatcctcctgccctggcctcccaaagtgctgaaattataggcatgagccactattcccagccatctttttctaactttcattacttctgtcatagatcaacctgtaatacatacctgggagtcttttaaaggctaaacctttactattgtgttgaacccatcatcatctacaaaggattatctgctaaaaaactgaactggtatgaggtcagttttctagaccagaggtcacattcatacatgttttaagcttggccggcaatatggtgtctgtcctcgacaactcaactctgcattgaagcgcaatagcagccataaacagtaggtaaatgaatggccaaggtatgttccaacggaagtttacttacaaacatgtggagacttacatttggtcctcaggctgcagagtgccatatgtcctctagacatattcacgtgtaacaaaataacaaaaataaaggaaagtagacaagatcaaacaatactccagagatgcaatcatcaaaatttcaccaggggaaactctggaaatacaagtccacatttttcaacaaataaattgaaaagaaaaagagggccaggcatggtagctcacggctgtgatcccaaactgctgagatcacaagcgtgaggcaccacgctaagcctaatttagtgactaagagatatcttaaatatatataaaccttgtgtggataaacagaaaaaaggaaaacattcggtgatatttgaatactgattgtatactggatattgaattactggtagtattttgagatataacaatggaaatgtggttatattaaaagacttattactagctccatattgcttttgatttgggattttcgtctctatgtttacaagtgatttaggcctataattttcctctttggtactgttaatgtctggttttggtatcaaaataaataagcctcata

SEQ ID NO: 11553 - DNA, 458 bp, Homo sapiens
gtttaaaacgttcttcacagtatagctatacccaccttcacaggcttatctgtcagttcctctctactggtgccattcacctcatttgctgggtcttgaagaagccctagcatttcttgacaccaagcatttacatatgctgttcccactataccttggctatctaactgatgaactcctatgtggtttgaaggagccttttcaaagatcaccttctttgtaaaggttttcttaatgcccaattattttactccctgagattatactcctgtgttcttcatcaagcctttacaaactatattaaatttcttggacatttctcagtgttgcctgtaagattatgaacctgttaaattcagagacatctttcatccctgtattctcatatttgatatagaaatccgacacttaccatgagccctttaaatgtttattaaaagcaaaaataactaaaaatg

SEQ ID NO: 11554 - DNA, 371 bp, Homo sapiens
gccactgcactccagcctgtgtaacaggatgagactctgtctcaaaaaaaaaaaaaaccacctccgccccacataaaaaaacacttataggatttaaatcacaaaggaaaaaaatagaatagatactagtcgaactactcttttaaatagcttttttgaggtataattcacatgacataaaattttgcccattttaagtgtacaattgaataaatttgtaaagttatttaccattacagtcaagttttcagatatttgaaaagcttgtccctgagtgtttacagtcaatttacactcccatctgcaaccggagggtcaagtttctgtgcctatagttttgtgttttctagagtattatataaaaggaatcc

SEQ ID NO: 11555 - DNA, 1153 bp, Homo sapiens
ttagcagtgatccccatccttcggccacgctcacgcctgtaatccctatacttgggaggccgaggcaggcggaacacgaggtcaggagttagagaccagcctggccaatatggtgaaaccccgtttctactaaaaatacaaaaactactgggactgcaggcaagcaccaccatgcctggctaataaattttttttaagctctggggagagagagatttatgctgggtgtcttaaaggcttgggagtgtgttttctcatttgatttactcatttgctcttcagcgatttcgtagttacatttctttaaatcctaagttacaaaagtttgtctcataatttacataaaagctcttaatttcggacctatcttggagaaggctgggatttttaggaccttcccccacttaagattttccgcttaactaaccttgccagagggtgctacttcgcattttctttttgaatcattgtcgttcgaccgattaaaaatagagaaaaagtaaaatgttttatttattttagagatgttggaagttgttgtttttcctgtctaatgtcttgtatataattaggaagttgtccagaaacttgcgtctctgattttggtaaaaatcttcctgtcattcagctgtgtaggaacgaatctccaaaataaaattgtccatctttagcctgcaaaacaaattgtcgtagtgaacatatgctatattgttaattgctataacttgagtatctgatggtgggtggcctttgttcagtattgatttcctgtgcactgtaacctggcaactggatttttaatttttcttcctgtgttcagttagactttaactagaaggcagtagaaactggaagtgaaaaatttcttgagtgcaagccagtgttttattgctaaattaagattctcctgactaattggattttctcggtttaaaaatctacaagctatcatttttgggtcttgtggttagcgattgtctcttttcaggggaaaaaaaacctttgtaaatatcaactgttcagaaccaatctcgctgttaaacacctaagatcatatttacgtgagctcaaaaaatactctagtgagccgagatcacaccactgcactccagcctgggcgacagagcaagactctgtctccaaaaaaaaaaaa

SEQ ID NO: 11556 - DNA, 747 bp, Homo sapiens
cgctggaccagaaggtgtaaacgacccagagggtgctacttcgcattttctttttgaatcattgtcgttcgaccgattaaaaatagagaaaaagtaaaatgttttatttattttagagatgttggaagttgttgtttttcctgtctaatgtcttgtatataattaggaagttgtccagaaacttgcgtctctgattttggtaaaaatcttcctgtcattcagctgtgtaggaacgaatctccaaaataaaattgtccatctttagcctgcaaaacaaattgtcgtagtgaacatatgctatattgttaattgctataacttgagtatctgatggtgggtggcctttgttcagtattgatttcctgtgcactgtaacctggcaactggatttttaatttttcttcctgtgttcagttagactttaactagaaggcagtagaaactggaagtgaaaaatttcttgagtgcaagccagtgttttattgctaaattaagattctcctgactaattggattttctcggtttaaaaatctacaagctatcatttttgggtcttgtggttagcgattgtctcttttcaggggaaaaaaaacctttgtaaatatcaactgttcagaaccaatctcgctgttaaacacctaagatcatatttacgtgagctcaaaaaatactctagtgagccgagatcacaccactgcactccagcctgggcgacagagcaagactctgtctccaaaaaaaaaaaa

SEQ ID NO: 11557 - DNA, 419 bp, Homo sapiens
agtatctgatggtgggtggcctttgttcagtattgatttcctgtgcactgtaacctggcaactggatttttaatttttcttcctgtgttcagttagactttaactagaaggcagtagaaactggaagtgaaaaatttcttgagtgcaagccagtgttttattgctaaattaagattctcctgactaattggattttctcggtttaaaaatctacaagctatcatttttgggtcttgtggttagcgattgtctcttttcaggggaaaaaaaacctttgtaaatatcaactgttcagaaccaatctcgctgttaaacacctaagatcatatttacgtgagctcaaaaaatactctagtgagcatattttgctatggaaatagtgtattgaactttttactatttactgtgtggatcggcaa

SEQ ID NO: 11558 - DNA, 348 bp, Homo sapiens
gtgcagctgcaacctctacctcccgggctcaagcgatcctccttgcctcagtctcccgagtagctgggactgcaggcaagcaccaccatgcctggctaataaattttttttaagctctggggagagagagatttatgctgggtgtcttaaaggcttgggagtgtgttttctcatttgatttactcatttgctcttcagcgatttcgtagttacatttctttaaatcctaagttacaaaagtttgtctcataatttacataaaagctcttaatttcggacctatcttggagaaggctgggatttttaggaccttcccccacttaagattttccgcttaactaaccttgc

SEQ ID NO: 11559 - DNA, 229 bp, Homo sapiens
gtatttcactttttagccattcaaatatttattaattaccctgagaactacctccctttgctctcccctaccccctggcgaatgcaaaaggaagaaacagaattactttgaaagagaaattctaggtagaaagtatgagaaaagagcagaaaccaggaaagtgagagaagaagctagaagaaaggaaagaaaaaaaaaagtcgacgcggccgcgaatttagtagtagta

SEQ ID NO: 11560 - DNA, 515 bp, Homo sapiens
gtaaaaatcatagttagggttaagtccaagcagtgaggcctgacctgggctctgctctccttgttgagacactaacaggcagttgggaggaaaatctgcatttgactccaccctctttggggcaaaggagaagcaggtgacccgagggggggcaggccagaggagggcgactcgtgcacagggacccccacccttggaccccgctgtccttttctagttgtttacttggtggtggcagccagtctgaccttgtctgtggtctgactgttcctaagtgtgtaactttcagtattatctgtgacagatggttctgtggtgaaaaaggtttattatattccttatggctgccttgtacaaaatccgttagaaacgctaatgtaagatatcagatttctaacaagacaaaaacagcattatggagttaaaagatttttacaactgggtcttgattttgatgtgagctggtttttagctctcaaatgttgtcacttaaataaaaaccttctttgccttta

SEQ ID NO: 11561 - DNA, 554 bp, Homo sapiens
gtaaaaatcatagttagggttaagtccaagcagtgaggcctgacctgggctctgctctccttgttgagacactaacaggcagttgggaggaaaatctgcatttgactccaccctctttggggcaaaggagaagcaggtgacccgagggggggcaggccagaggagggcgactcgtgcacagggacccccacccttggaccccgctgtccttttctagttgtttacttggtggtggcagccagtctgaccttgtctgtggtctgactgttcctaagtgtgtaactttcagtattatctgtgacagatggttctgtggtgaaaaaggtttattatattccttatggctgccttgtacaaaatccgttagaaacgctaatgtaagatatcagatttctaacaagacaaaaacagcattatggagttaaaagatttttacaactgggtcttgattttgatgtgagctggtttttagctctcaaatgttgtcacttaaataaaaaccttctttgcctttaaaaaaaaaagtcgacgcggccgcgaatttagtagtagta

SEQ ID NO: 11562 - DNA, 336 bp, Homo sapiens
gaaaaaggtttattatattccttatggctgccttgtacaaaatccgttagaaacgctaatgtaagatatcagatttctaacaagacaaaaacagcattatggagttaaaagatttttacaactgggtcttgattttgatgtgagctggtttttagctctcaaatgttgtcacttaaataaaaaccttctttgcctttacaatgtgttttggtctgaactaagttgagaaacctttccctttctacatgttctccctggggtgggattgggggcagactggctcggagcagaggtggatgagggccagaccccaaaccacaaattacaaatctatag

SEQ ID NO: 11563 - DNA, 287 bp, Homo sapiens
ggcagagttgctctgggattgtgtatgacatattatgaaaccgataatcattggcaaagtaaagcattgctgtttacttcagtgggggctttttgacactatacaaaggaaggtgaaaataatgataccatgaattaattattagccacaatcaagatccatgcatctaaaaatacagtgtcccttttaagtccgagttcccagcaagagtctagagctgacttcaatcacttaggcttcataagaatcaactttttactcttaataaagaaatctccgtacagtcc

SEQ ID NO: 11564 - DNA, 425 bp, Homo sapiens
ccccaccttggcctcccaaagtactgggattacaggtctgagccaccgtgcctggcccacactctgactttttaagtgtaaggaaaacgcttttttacagaagactactaactaagtagtgtagaataattataaaagtagaaaaatccttgtctgggcatggtggctcacacctgtaatcccagcactttggtaggccaaggttacctgaggttaggagttcaagatcagcctggccaacatggtaaaacaccatttctacaaaaatacaaaaattagccaggcgtgatggtgggtgcctgtaatcccagctacttgggaggcggaggtgggagaatcacttgaacccgggaggtggaggttgtagtgagccgagatcacatcactgcactccggcgtgggcgacaaagcaagacaccatctca

SEQ ID NO: 11565 - DNA, 900 bp, Homo sapiens
  misc_feature (744)..(744): n is a, c, g, or t
aattactgcaaaccaggtggcttgaaacaacagaaatgtgttctctcactgttctggaggccagaagtctgaaatcaaggtgtcagcagggttggttcctgctggagactcaggggagaaaccgccggtgccatccccgccagcttttggtgcctgctggtctccctggccttccttggcttgtggctgcattgctccagtctctgcctctgtctgcacatggccttctctgggtctctgtgtgtatctttttctgttgcttacgaggatgcacttattgggtttagacctaatccagggtgatctcatctccattcttaccttaattatatatgtgaagaccctggttccaaataaggtacgttctgaggttgtgggtggatgtgaagtttgcagggaggaggagtcgggtagggggtactatgtgtaacccactacacttcctcaactgcatttgttggcttcccttcctgtctgctcctcagttcccaaatgcattgggatctttctctgacattttggcttttgcacactgtcacctctgcccagagcatctcaaacttgactgtatgttagaattacccgggagttgtattaaaaaatactgatgcccagccaagctcggtggctcacgtctataatctcagtgctttgagaggctaaggccggacgatcgcttgagctcaggagttggagaccagcctgactaacatggtgaaaacccatctctacaaaaacaattangccaggcatgctggtgcatgcctgtagtctcagctacttgggggcctgaggtgggcagattgcttggacccaggaggttgaggctgcagtgagccaagattgcaccactgcactccagcttgggtgacaaagttagatgccatttcaggaaaaaaa

SEQ ID NO: 11566 - DNA, 561 bp, Homo sapiens
attagaactggttgcacacacatacaaacttcctgtgatgaatttaagaacagatcattacagggttagaatagtgacagattcaacaaaggatctgtttgatagggcaccaagggaacattttactggttcccacaaaaattaataaatgttaaatatcatgtcccaagcaatttcccatgtttttttattggtcctaatcaacagaatgttttgtgttccttccacttcacgttcagagcccacgtcatgccacttcctaaaagaccattagaccatccccttttcctccatcctccactgtagccttagccagagaaaagatccagctcacttctggtccaaaaaatgtcaacgtttggaaaatggctcatctacactacagaacacagccagatgacactgctaaagggtactgtaagaaaacacaaggtccaaagtatgctgaattggtttcataagtctaactcattggccagtgactgaaaaaccaggatatcaggattttctgggggccaatagccatgacccttgagctttcatagttcatgaaccactttg

SEQ ID NO: 11567 - DNA, 455 bp, Homo sapiens
tctactaaaaatacaaaaactagccagccgtggtggctcacacctgtagtcccagctactccgaatgctgaagcacaagaatcgcttgaatccgggaggcggaggttgcagtgagccaagatcgcactactgcactccagcctgggtgactgagacactgtctcaaaaaaataaaaataaaaataaaaataaaatattaaaaagaaaatgcagaaaatgcaaagatttctaggagggatacccagaccaatatctgcacttcaaatcttagaagttaaacatttatcaagacatgattctgtacaccctccattcaagccaccagaaatctgagacagaatctcatgtgtctgagactcgaccactctgattttgaagtgaaattatttcaaatgcttaaatgggtagcactgagtgtttgtctgttatttttccaagcccagcacctattcccc

SEQ ID NO: 11568 - DNA, 449 bp, Homo sapiens
ggagctgaagaaaacgacctccctccctcctccccgctgggattccccgggctgagagcgtgagtgagaagcgcaaggcagtttctatcatgggatgactctccgctgggaacttcagggaaaccacaaccatcattactcaggccagacagctgccagaaaagcagcctagcctaagaactgaagctgaaatagaggtgggaggctgtattccattactaagcgcgggagcactcactcccaagtttgtccacatttcaagaatgttaaaaccctgtggtagaaatccctgattatttataacttaaactaccgtgtaaaagcagaaacttgacaaatgaagacataaaaagaactggtgacaggtaggctagtactagaatacaaagcattcatcacactcctcttttgtgggtccttccaaacctccatccccattccctactgga

SEQ ID NO: 11569 - DNA, 122 bp, Homo sapiens
attaatagaacgctagctagattaacaaagaagagatatccaaataagcacaatcagacagaacaaaagtgacattataactaatcccacagaaatacaaaagattctcagagactaatatg

SEQ ID NO: 11570 - DNA, 442 bp, Homo sapiens
gaactaattttccaaactgaaaacagttgtgaaaggcattctattttagcctttttttgtgaagtgggataagttcatgcttcccatctgtttcagttacattgagtgtggtagaattgaactttgtagagaagggaaacaggttggccaaattagtgacagcctcccagtcttctgctttgcatgacactcactctgaagatatctatttgcctagtcttatctacctctcaaatttaggcaagaatttggctcagaaatacaagactactaattactactaaactcttagtaatgcaatgtgtggatttggcccctcactatgtaactgagaagacaacattatggtatattgattccaatgagggttttctttgtcatttttctcctctctggaggtcatctgggtttttgatatggtgataatgactagcaagtgatt

SEQ ID NO: 11571 - DNA, 484 bp, Homo sapiens
tgtcatttgcaacaacatggatgaaaatgggggtcattaagtgaaataagccaggcacagaaagacaaacttcacatgttcttaacttacttgtgggagctaaaaatttagaacaactgaattcatggagacagatagtgtaatgatggttaccagaggctggaaagggtaataacagggagtaggggaaaagtggggatagttaatgggtacaaaaacaatagaaagaatgaataagacctagtatgtattagcacaacagagtgactatagtaaaaaataatttaattgtacattttaaaataactaaaagagtgtaattatttgtaacacaaaaggtaaatacttgaggggacagatacccattcaccctgatgtgattattatgcattgtaagcctgtatcaaaatatctcatggaacctataactatatacatctactatgtaccccattaaaaataaaacattaaaaaaataaatttt

SEQ ID NO: 11572 - DNA, 431 bp, Homo sapiens
catgctcactcacatccatcagtttctttggctacaggatcaacagacatattggggaagtagggcccttaaaagtagaaatagactccaccattccccctccatggactatcccagtttccttcaaaatctgaagcaagtgaaggtctcagatctgtttattattcaaggattccttgacaaaaggttccgcatccctatttgcagttcctgtaacgcctttgttttccatgtacaacacctaagattagacactgctataagaaaatgaaatggctgagtgtagtgtgatgagtcacccaccagattacttaaggatctatgtctgctgcctgaaccctgaaagctaggcagtgagtcagtggcccacccaaggagcaggtatccctgagaaccgaaacatcccagagtatatctgagagcataccaag

SEQ ID NO: 11573 - DNA, 346 bp, Homo sapiens
ctccagtatccaggatcccccaaaggaaatgaaagtaaaaaatctttaggttgaaaagtaattccagcttttagccttatctaccaggttgtctaacagtgagctgtctgagcacgcttgtgtgtgtagtgtcttctttctgcagcctagtgccacctcttgtcagaaaagtgatgttgaaaatagccaaccttttcaaacattgtggacaatatgaaagcacaatgcactctgattggaaggcactaactgtgattaggggcagacctcacagttccccatgaaccttaggcaattgcatcacgtggatatttaccatgttaaatcctgattttgaattaagatt

SEQ ID NO: 11574 - DNA, 2774 bp, Homo sapiens
  misc_feature (997)..(997): n is a, c, g, or t
  misc_feature (1142)..(1142): n is a, c, g, or t
tattttttatattagctttaggttcacagcaaaatagaacataaattacagagggttcccccgcacccctgggctcagcatccccacaagagcggccatttgttatagtcgcgaccgccctggagacagtgtcatcatcacccacaggccgcacgacctcagggtccaccgggtgctgtgcagtctatggttggatgaacgtatcctgatgtggacccaccgttgtggtatcatacagagtagtttcactgccccaggtcccccgtgttcctgctgcacatccctccgtccctccctctccccagcccctggcattcgctgatctttgtgctgtctgcacggttttgccctttcctggatgtcagagtcggaaccgtacagcgtgtagtccttggagacgggctgctttcactcagcagcatgcgtctatggtccttttttgtcttttcagggcctggtaatattctgttgtctggatggacgccgggtgtttaatccactcacctatgagtgtcttgggtcacttgtagttgtctctctgggcttctcttacggataaatgaagaataaacaaagccagccactggcccctgaactcggttctgcctctgacttgtcttgatgaggaggtgtccttgcgtggactcgtgctgtgtcatcatgctcctgctccgtgttcggagccacctgggctgtgacaggaggtcagtgttcagggatgatgcagtttctgttgaggcaacactgaaaatgccttgcttggaaactgcgtctcacagagcatggagcttgttaacaattttaaaaaactgatgatgctgatgggagagagggatgatgggagtctgtctggggtctttgaggccttgtccagagactgccccaggatcctgggtggctgtgcacagccagctgagccatgtgcctgccactgcatctgtactcctgggccagaaagcacctttgcttagcccacctgatttttctgtcagagacnagacgagtaatttctaacctgggcttgagacactaacagtgtattgggatttttttttttggacacacaatctctctctgtcactgaggctggagtgcagtggcacagtcatatagctcactgcagcctcaacctcccgggctcnaaccttcctcctgcctcagccccctgagtatctgaaaccacaggcaggtgccaacacacccagctatttttgtttttttattgttttgttaaaaaaaaattttttttaagagatggggtctccctgtgttgcccaggctggtctcacactcctgggctcaagcagtcctcatgtcagccttccagagtgctgaggttacaggtaatcttcagctgtttcacagtgtccctcttgtcagcctcccagagtgctgagatcacaggtaatcttcatctgtttcacagcgtccctcatgtcagcctcctagagtgctgaggtcacaggtagtcttcagctgtttcacagtgtccctcatgtcagcctcccagagtgctgaggtcacaggtaatcttcacctgtttcacagtgtccctcatgtcagcctcccagagtgctgaggtcacaggtaatcttcagctgtttcacagtgtccctcatgtcagcctcccagagtgctgaggtcacaggtagtcttcagctgtttcacagtgtccctcttgtcagcctcccagagcgctgaggttacaggtaatcttcagctgtttcacagcgtcaccagattctccaaacacaatttaattttattcacatagacagtgctacattgtcactggtgacaggcgctttgtggttgtttttggtgggtgaatattgcaccgattcaacaacaggagatcagtgtctgagggtcctgtgttgccacccgaggcacctgctttgaccagggatggagagtcccatgcccaggacgaaggtttgtgtgctggtggtgagctagctgggagacgtggcacgggccgcttgtccctggccaccgcctgctgccaagggctccactccagtcccttgcctgtcaatcagaagatgctcagaggagaggcttctgcatcatcttcatcttgacattccaagagcagtaccgggtcagcatccacaaaagcacactgtaaaactgggaactgtgtcttacccttcctgagtgaaaagggaaagtttatgcctcagcctgaggcaggtgggccccttgccatgcacacctttgtcctgcagccagggatccacttggctgggctcaacccttccccgtcagggacgactgcacagaaaggagcgcggatagcagcaaggcccgccacggggaaggcctgcttcctgtgggtccccctgtgtggctggcagggagtggtacggcgctgggagtccagaatcactgaggacacggaaagcttcagcttctttgagaaaactcagattttgtaaatgcgcatccagttgacagcacttacggtggaatccgtggagttggacttgtgagaggccttgccctgagggggttcttggctggtgtctgtcctggaggtggatgccttgatggctgtgtctcccgtgctcccctcacccaggtcctcatcctcaggactgtgagacgccgttggacgtggaggagcctgaggagctctggctctgtgggtatgtctgctggcatttgccagttgaaacctgaaggattggaaaatgtctgtataccaattccaattaacaacaggaataataagcccattgcatataagcagcacattctttaaaaaaaaa

SEQ ID NO: 11575 - DNA, 1021 bp, Homo sapiens
ttagtaaatgcgcatacagtgacagcacttacggtggaatccgtggagttggacttgtgagaggccttgccctgagggggttcttggctggtgtctgtcctggaggtggatgccttgatgagatgtgtctcccgaggcacctgctttgaccagggatggagagtcccatgcccaggacgaaggtttgtgtgctggtggtgagctagctgggagacgtggcacgggccgcttgtccctggccaccgcctgctgccaagggctccactccagtcccttgcctgtcaatcagaagatgctcagaggagaggcttctgcatcatcttcatcttgacattccaagagcagtaccgggtcagcatccacaaaagcacactgtaaaactgggaactgtgtcttacccttcctgagtgaaaagggaaagtttatgcctcagcctgaggcaggtgggccccttgccatgcacacctttgtcctgcagccagggatccacttggctgggctcaacccttccccgtcagggacgactgcacagaaaggagcgcggatagcagcaaggcccgccacggggaaggcctgcttcctgtgggtccccctgtgtggctggcagggagtggtacggcgctgggagtccagaatcactgaggacacggaaagcttcagcttctttgagaaaactcagattttgtaaatgcgcatccagttgacagcacttacggtggaatccgtggagttggacttgtgagaggccttgccctgagggggttcttggctggtgtctgtcctggaggtggatgccttgatggctgtgtctcccgtgctcccctcacccaggtcctcatcctcaggactgtgagacgccgttggacgtggaggagcctgaggagctctggctctgtgggtatgtctgctggcatttgccagttgaaacctgaaggattggaaaatgtctgtataccaattccaattaacaacaggaataataagcccattgcatataagcagcacattctttaaaaaaaaa

SEQ ID NO: 11576 - DNA, 447 bp, Homo sapiens
atagacgtgagacactgcacccggcgcaaatgagctatttgataccagaggttaaattttgaacgtctagacacatgttttaaagattttttaggattttatttcagcttgtaccctaaactttaggtcttagattaccaaagtacaattatacagatagttgacttttctttttcagtttttaagattcactgaaatactttttccgtcataaattgatgcattgtaagtatgccgttcagtgatttttagttaagtttgcttactaaaagtaatttgtgaaatgggccaggtgcggtggctctagcctgtaatcccagcactttgggaggccgaggcttgcagatcacctgaggtcaggtgatccacctgcctcggcctcccaaagttctgggattatagacgtgagacactgcacccggcgcaaatgagctatttgatccagca

SEQ ID NO: 11577 - DNA, 396 bp, Homo sapiens
atagacgtgagacactgcacccggcgcaaatgagctatttgataccagaggttaaattttgaacgtctagacacatgttttaaagattttttaggattttatttcagcttgtaccctaaactttaggtcttagattaccaaagtacaattatacagatagttgacttttctttttcagtttttaagattcactgaaatactttttccgtcataaattgatgcattgtaagtatgccgttcagtgatttttagttaagtttgcttactaaaagtaatttgtgaaatgggccaggtgcggtggctctagcctgtaatcccagcactttgggaggccgaggcttgcagatcacctgaggtcaggagtttgagaccagcctggccaacactgcgaaattc

SEQ ID NO: 11578 - DNA, 1159 bp, Homo sapiens
tgagtttaccaaaacaaaaaaaaaattataaaaagtgaaagaggaggagaaggaggagatcaatccctgcctttgaggacattatgtttaattaggaagacaagattggacagaaaatattaagtttagaacattgaaagatgaaattcagaataagtgcaggtcatttgtgttgctcttggataataatagctttcagaaggtgggtctccagccaggacttgatggaattcagattgagagagagaaaaaggatattctaagagaagcaaattgctttaactgagggatgtcatgaatcattcattcgtatgtcatccagtatttactgagcacctacgtgtataatttttggcataatgcaaaggatgggcaaagagactgggtttgtggcagtgtgaagaagggagaataatttcttcggaaggtaggccttgtcctgtggtttttctcaaatgtgccatgttgttgtagccacaacacatgtgctgtctctgtctagagtgcatttgccaatctctgcctcatcctgtgagattcagcccagaccagatgtcactgcccctacaaagtcctctttaagctgaggttgagcaagatcacccttaccaaaaggtaacactggcaatctctctgctaactgcaaggtgagtagaactgagttgagaaggcagcagaatcctctcccctgtttccctccatccttcccattgggcacacactggcaaaaaaaaaaaaaagaaaagaaaaacaaaaagcaagtgatgtctgaagataccatgttagtaagggaggtacttgttaaccagacaatcataaaatgtttatagtttgtaagcagtgcccagcatgagaagaagcagctagattcgtgagaaagaataacagactgggaagtcagcaaaggccgctctggcatagtggcgtggatgtggtgttctgaaggaggaaggagctgaagagcaggccagagcacggggtggaggcttgccaagtctggagtttggtgagccaggggaaagctcgtgcaggataaggagggacagaaatgcaatgccggaccttggagaaggccacacagaccatttggaggagctgggaatttattctgattacaccaggaagccattgatgcatgtacaataaattaaaaaaaaaa

SEQ ID NO: 11579 - DNA, 520 bp, Homo sapiens
agatgagctacttgccctgctgtgtgcacggatggctcacagtgggtgcaggcggcctgcgggcacagtccacgctgtgattagcagcagcagagcccctggatacctctgcccagagctccgcggggtcagccatgcaatggcaccatcggatgagctggcaagggcctcccagacaggcggaaagagggcttggcaactgcaccatgtgtatgtaagtcccagctgggtgtccctggtgtcagtttctcagtctgtaaaatgggcatcatttggctgttccatggattaaatgaggggatacgtgcaaagaactttaggttcctcagagagaaatccagataaagttagcaaaagaacaggagtggccccaaatcctgaaagcccttggcaccttcttcctgtactctagacagatgccatctccctggcaccatctgtgcccacacccacaaccccacccatctgtgagggggtgggggtggagggcattctaaaggttttttgggatcctccccag

SEQ ID NO: 11580 - DNA, 880 bp, Homo sapiens
aattaatttttaaaagaatttagtcatcttaatctcacaaatatatttctgtcctataaagaaaaacttcttttttttccaattctatacacttttattaatacacttacaaaaaataacattcaaacactgagaaaactaaataactttggaagcagagctcattgttttctgcttacatataagtgacaattctgggctgttggcacaaaatagtcaacattcataaaaccctgactactatatatcaaacataagttaaaatcataggcagtagtttatcaaatccacgtttcttagaaaaacttagtatttattttgcattgaaatttttagtttttccagaatacaattaatttaccttttctgattaccaccaaaaaaccaagtttattatttaaaaattcagataacaatgaaaagtataaagaaaaaaatccatcctgtatctcaaattagggaacccacactgtaatttgagcagagttttaacataaggaattaacattgatattgggattggagtaacaaaggtttgactagtaagaagtaaagagaactctagacaatataagaatggcaactatcaggagcaactacaacccctaggtctgagatagagccctcaggaagaggcccctctttttacggatgagatccagaccctgttggagagggtgtaaccatggtttactggatggcagagaagttgatgtggtgttttgctctctaaacttgctcaaaatctcctttcttgagggttggggaaagctgcttacagagaggtatctcactggaggcattctgctacaaaaccacccagtggatcaggtgtaaggggaagctgctggctataggaggctgccagggtagtacacta

SEQ ID NO: 11581 - DNA, 305 bp, Homo sapiens
gcagccgcctactactactaaattcgcggccgctcgaccatacagataaatctttgtggatctggatttggcaaagttttcttaaacatgatgcaaaacatacaagcaaagaaaaaagcataaattggactttataaaaatttaaaacctttatgcttcaaaggatactatccagaaagtcaacagacaactactgaatggagaaaatattttcaaatcacatattggataaggtacatccatcttgaatatttaaaaacaaaacctcctacaaaaaactcagtaataaaaaagataactcaatt

SEQ ID NO: 11582 - DNA, 343 bp, Homo sapiens
gaactcctgggctcaagtgatccttccacctcagcctcctgagtagctgggaccataggctcatgccaccatgcccagctaaattttttgttttttgtagagacagggtctggttgtgttgcccaggctgatcttgaactcctgggctcaagctatctttccaccttagcctcccagtgtactgatattataggtatgtgtgcctgcccatccttttaccttgtatttattttttaaatttttatttatttatctttttatttattttgagacagactcttgctctgtcacccaggccggagtgcagtggcatgatcccgactcacttaaacctccatctccc

SEQ ID NO: 11583 - DNA, 455 bp, Homo sapiens
ggtacactcaagcttccttgctctcccttgtggcaaaaatatttgaattattcaattataccctgaatttggaatgggaattgagggtgttaggaaagtaacgtgtagaataaaagttttttttgttgacaagaaaataaattccttgctgtgacttccaaaagtcacccattcagcctgcatggtaactgaaaacagtgtcagtctggccagaaaggcatcagtgaccaaccgaatcattctagaccattaccccctatccaccgggtgttgcttgtcagaggagaaatcattaggggacatagggatggtaggcatgctaggaagccgccttggacatttgtccattaataagcactttcaccaatgacctcggaagagagttttactaagtggtgacaaagtttttactttacaagccttaagaaactgttcccttgctactagcattcact

SEQ ID NO: 11584 - DNA, 437 bp, Homo sapiens
gccaagtgtctgtggtacaaaggtgaccagcagtgccttccccccaccccccggggcagccaggcagccgaggtgtgacgagcaggaagctgtgggcggtgtttctggaatgagtctcccgaagataagcaacgtgcctgctcggtggggttcacgggctggggacgcaagggggctagcggggggcctgctgtccagctggaggcagcacaaggtagcaggagcagcccagagttcaaggccaggcagcccaggatgaatcgggtcctgtgttagatggactcacagctcccctgaaactcatgtccaccaaaacctcggaacgtgaccttatttgaaaagagagagtttctgcagatgtaattagtgcgggatcttgaaatgagatcatcctggaattaaggaggtccctgcatccaatgactggtgcccccatg

SEQ ID NO: 11585 - DNA, 509 bp, Homo sapiens
tgggtgagcttgagagaggcttctgaaagtactaaacaggcctcaatacctcagcaataactaatgctaggaagttggtgagaagactaaataggaggactcctgccctttgactcttggaaaataaatttttaagctgattttttcacttcagatccatggtaatccacagcagggctagaccttgttttaaaattttataattataatttcatttcagttctttaaaagtttggttacaaaaagaagcatatgtccctaatattactgctgtgtagtaagcactctgaagaggtacttatgtaagttctagtatcagaattgccttcgatgtctgttaaataattatagtgagggctgggcgcagtggctcacgcctgtaatcccagcactttgggaggctgagcgggcagatcacgaggtcaagagattgagaccatcctggccaacatggtgaaaccccgtctctactaaaaatacaaaaattaggccgggcgtggtggcttacg

SEQ ID NO: 11586 - DNA, 342 bp, Homo sapiens
tgagacagtctcactctgtcgcccaggttggagtgcagtggcatgacccccactcactgcaaactctgcctcccaggtttaagcaattctcccacctcggcctcccaagtagctgggactacaagtgggcaccaccacgctggctaattttcatattttttgtagagcctgggtttcactatattgccctgactggtctcgaactgctggtctcaagtgacctgcccgcctctgccccccaaagtgctgggattacaggtgtgagccactgtgcatgtctgctacacactttaaaatgaccagatctcactcacagttatgaggacagtaccacaagggatg

SEQ ID NO: 11587 - DNA, 309 bp, Homo sapiens
ctgccaggacctgtgaggaccgagtttcagatactgtggacagcggagactccacaggggctctgcaggaggagacgggaggcgatagcccctgcaaagctctggctggtgattggcatcagacttctcaatgagaaactgtactctagatttaattagaacagtatcttcaaaatactcgggaaaaatgatttcaaacctggaattgtagacacagacagactagaattcaaattgaagggcaaaggaaaagtgtcttcagatagtgaaggactcagaggttaccagcctcatccctaataccctgac

SEQ ID NO: 11588 - DNA, 499 bp, Homo sapiens
actggatggtactgaaaaagttacagcagcatttcagaggggaaagttccccttcatcaatctgcataagtagctctgaaaagaaataaagtggccccactgcagaagtagttctgaaaaaaacacaagaaacacctcaaaagccaccggtgctttagtaaagcacctccgcttctgccatctccccacaatgaggaagctccagtaccctgtccacatttctaaatggcactcatcggattcttaatgagttgcaggctttcccaacggacttgtgtgacagagccacgctctttgctcatctgcgtaatccccacactgaagtggagttgttcatgaaaacttactaaataatcaaatttcatcctctcaagcaggatatgcagtggtactttgctacaaatacatttaccactacgaatttctcacttcaagcgatctcctgcccaggtgtgtgctctcagaaaattacatctctttctgaattacgctggcaaag

SEQ ID NO: 11589 - DNA, 546 bp, Homo sapiens
gtcctagaggtcagtaaaaaagaagaacttggtctaggggaagaattatgaatgagagactgcagcagagctagaagatggtgcccagcagaagagaattggaacagatagatccctgctcttttagagcttcaacgatgaagcctattgttctgtggtttgaggaatgctcatcattcaccatagctggttaacataatttattaagttgaatcaagtacaaaaggaaaaagttctttctaataggccagattccatgagtggaaattccttggagtcaaacagggagaaaatacgtctcagtgttaaagactttccagagacttcttccattccactttccacccctccttaaatcactcgccaaagaaatgctttgctggacactaaagtggccacaaatgtgttcataagaaaacatcagaatataaaattaatcattgtctcttttagttaacttttttggagtgtgtgtgcagggttaaaggacagatgctattaagatgataaacatcagccaggtgcggtggctcacgcctgtaatcc

SEQ ID NO: 11590 - DNA, 453 bp, Homo sapiens
agggaatgttatgttagcgctcccttctgtttccataatattagtgtgtcagtttttccattgttcactgcttcacatctcgaaatatacaatctctgtgtgccatcaaaatttgaggtaacttgtaagaacgtatataatacaataaaaaataaacatcaaaatcacagaaaatacatactagaataataggtaaagggtgatgaaagtgagaagcatgtataatcataattcttcatgagcgaaaatgctatacagaatctttttctttaaatcctttgaatgtacctctttttaaagaaaaacaccaactcaataataaaaatagctacacacaagtcttgactgcctttttaccaactgcagtgctatagcttcctgattgccactataaaagctcttcttaacttactgttttaagatgaaaataagatatgcttctttaaaaaaaaa

SEQ ID NO: 11591 - DNA, 442 bp, Homo sapiens
taagaagttgccttaaattggaaacactttatgccctcagtagaaatgtactgaatttataaaggagatacagtaggaagtgagtgttgtattgtacatgttccataaacaaaatattagatcagcaatccatgtataaaggactattattgaggattttggatgccgtcatttattatagccataaactttacaaatgacaaaactttatcatatatttcttcctgtttctcttctaaatataaggatgataagaatttcttttaaaatcagctgtagagtacaagtttctctcccttattttctacaggcccatttagccacacagtcttgactgcctttttaccaactgcagtgctatagcttcctgattgccactataaaagctcttcttaacttactgttttaagatgaaaataagatatgcttctttaaaaaaaaa

SEQ ID NO: 11592 - DNA, 490 bp, Homo sapiens
agggaatgttatgttagcgctcccttctgtttccataatattagtgtgtcagtttttccattgttcactgcttcacatctcgaaatatacaatctctgtgtgccatcaaaatttgaggtaacttgtaagaacgtatataatacaataaaaaataaacatcaaaatcacagaaaatacatactagaataataggtaaagggtgatgaaagtgagaagcatgtataatcataattcttcatgagcgaaaatgctatacagaatctttttctttaaatcctttgaatgtacctctttttaaagaaaaacaccaactcaataataaaaatagctacacacagtatatgctacccatcagaaagaatctataggttgaagccatggattgaagtttttttgtcaaaacagtcattgattgttacttaggtcccccagtcacattccatgaagtgaattttgctgcaagtcacaatatcacagtttttctgtttgc

SEQ ID NO: 11593 - DNA, 371 bp, Homo sapiens
taaaaaaaaattacacctatcctagaagatgtggagtggtatctcattgtggttttggttagcatttcccaaatgactaataacttggaccatcttttcacatgtttagtggccattagcacatcctctttggagaaatgtctattcatgtctccactcatttttcagtggggttgttttttgagttgtaggagttgtttaaatgttcctgatattaaactcttacatgatttgcaaatattttctctatttctgtaggttactgtttcactttcatgataatgtcctttgatgcacaaaatttcaaaattttgatgaagtccaatttatctattcttttctgttattgcttgtgcttttggtgtcataat

SEQ ID NO: 11594 - DNA, 458 bp, Homo sapiens
ccaatttgtgctgttaattggctcagtctttcattctatactgagcactcatatcctgccatccttataaaaagggaagttgggagaccacggttaagagttaatggaaaaaacagataaattggacttcatcagaattacaaactcttatgcatcaagaatgcctaccaaggtgaaaaaaatagcgtatagaatggaagaaaatattgcaaatcatataatctgataaaagtttaatgtccagagtatgtaaagagtgcctaaaactcaataacaggaagacaatctaatttttaaaatgagcgaaggatttcattagacatttctccaaagaagatatataaatggcaaataaatacatgaaaagatccttaacatcattagtcaatagagaaatgcaaatcgaaacctcaaggagagattacttcacacctactgggatggcaattaaaaaaaaa

SEQ ID NO: 11595 - DNA, 452 bp, Homo sapiens
cgcgagtgatcaagatgagggttactggctccagactgaggctgatgggtcaggcaaagggagcacttagctcccacatggactcatcgcacatgcaaggagtctctataaacggtctcaacaagggcagtgctgtccccaagaggcgttttggaattttgtggggatgtttttggttgtcacaatgattggagggccttggtagcacttaatgggtggggccaggggtcctagcgatcctgaccttcacggtaccatcctgcacaaaaacttctgctggcctggtgtattagtcggggttctcttagagggccagaactcaaaagagagagagagatatatatatatttatttattaagtattaacttacacacctgtaacaggttctgtttgcagctctcacaaggtcccacaatagactgtctgcaagctgaggagcaaggagagccag

SEQ ID NO: 11596 - DNA, 176 bp, Homo sapiens
attagtaaaatgggagaatagactggaaggattttaagatttgttttagccctaaagatgatgaatgcattcagaaatcctggagaaagagttttggaacagagaacttaaggctaagattcttcactgttgtcatgatgatattgaccctgtcaagatttcacagactgcagctt

SEQ ID NO: 11597 - DNA, 734 bp, Homo sapiens
gtgacttttccgacagggaaggaggtagagggtacaggacagagaccaactgcacatactttacagtgatgcccaggctaggccagtctaaaggaaacaccaacacaggaagggatgtgtgcaggattcacaagggttttttttacccctgggagaaactaagtggtgtggtttcgctgaatagattttgctaagtacttaagcactgcagatgctccagtaatatgcccataagttcctttccaatttcaattactgggaaaatatacatatggacaatagatggatgccacaataaaaggctggcagcctaaccctcacatgaatttttccctacctctatttagggtgacagtggagggcctctggtttgcttcgagaaggacaaatacattttacaaggagtcacttcttggggtcttggctgtgcacgccccaataagcctggtgtctatgttcgtgtttcaaggtttgttacttggattgagggagtgatgagaaataattaattggacgggagacagagtgacgcactgactcacctagaggctgggacgtgggtagggatttagcatgctggaaataactggcagtaatcaaacgaagacactgtccccagctaccagctacgccaaacctcggcattttttgtgttattttctgactgctggattctgtagtaaggtgacatagctatgacatttgttaaaaataaactctgtacttaactttga

SEQ ID NO: 11598 - DNA, 875 bp, Homo sapiens
gtgacttttccgacagggaaggaggtagagggtacaggacagagaccaactgcacatactttacagtgatgcccaggctaggccagtctaaaggaaacaccaacacaggaagggatgtgtgcaggattcacaagggttttttttacccctgggagaaactaagtggtgtggtttcgctgaatagattttgctaagtacttaagcactgcagatgctccagtaatatgcccataagttcctttccaatttcaattactgggaaaatatacatatggacaatagatggatgccacaataaaaggctggcagcctaaccctcacatgaatttttccctacctctatttagggtgacagtggagggcctctggtttgcttcgagaaggacaaatacattttacaaggagtcacttcttggggtcttggctgtgcacgccccaataagcctggtgtctatgttcgtgtttcaaggtttgttacttggattgagggagtgatgagaaataattaattggacgggagacagagtgacgcactgactcacctagaggctgggacgtgggtagggatttagcatgctggaaataactggcagtaatcaaacgaagacactgtccccagctaccagctacgccaaacctcggcattttttgtgttattttctgactgctggattctgtagtaaggtgacatagctatgacatttgttaaaaataaactctgtacttaactttgaaaaaaaaactctctctgtgtatctctctctctctggctctaactgaactaaagtgtatatcccaacttgcccattgagtcctgctgtgatttacatgaggccacttagaccgcttgagacttatcgctgtacattcttttc

SEQ ID NO: 11599 - DNA, 756 bp, Homo sapiens
gtgacttttccgacagggaaggaggtagagggtacaggacagagaccaactgcacatactttacagtgatgcccaggctaggccagtctaaaggaaacaccaacacaggaagggatgtgtgcaggattcacaagggttttttttacccctgggagaaactaagtggtgtggtttcgctgaatagattttgctaagtacttaagcactgcagatgctccagtaatatgcccataagttcctttccaatttcaattactgggaaaatatacatatggacaatagatggatgccacaataaaaggctggcagcctaaccctcacatgaatttttccctacctctatttagggtgacagtggagggcctctggtttgcttcgagaaggacaaatacattttacaaggagtcacttcttggggtcttggctgtgcacgccccaataagcctggtgtctatgttcgtgtttcaaggtttgttacttggattgagggagtgatgagaaataattaattggacgggagacagagtgacgcactgactcacctagaggctgggacgtgggtagggatttagcatgctggaaataactggcagtaatcaaacgaagacactgtccccagctaccagctacgccaaacctcggcattttttgtgttattttctgactgctggattctgtagtaaggtgacatagctatgacatttgttaaaaataaactctgtacttaactttgatttgagtaaattttggttttgg

SEQ ID NO: 11600 - DNA, 669 bp, Homo sapiens
ggttctggagccccacgaaaaatatcccctgataaataaacagtcggcggtcatcactaaaagtaatccagcctgttccatccccaattatgtgtccctaccggaccaatgtttcatcatgctgggaaaaaaccagggactttggggctggccttctcaaggaagccccagcttcttgtgattgagaataaagtgtgcaatcgctatgagtatctgaatggaagaatcaaatccactgagctctgtgctaggcatttggctggaggcactgacagttgcaagggtgacagtggagggcctctggtttgcttcgagaaggacaaatacattttacaaggagtcacttcttggggtcttggctgtgcacgccccaataagcctggtgtctatgttcgtgtttcaaggtttgttacttggattgagggagtgatgagaaataattaattggacgggagacagagtgacgcactgactcacctagaggctgggacgtgggtagggatttagcatgctggaaataactggcagtaatcaaacgaagacactgtccccagctaccagctacgccaaacctcggcattttttgtgttattttctgactgctggattctgtagtaaggtgacatagctatgacatttgttaaaaataaactctgtacttaactttga

SEQ ID NO: 11601 - DNA, 4620 bp, Homo sapiens
cgcctcggccatgactgcggagctgcagcaggacgacgcggccggcgcggcagacggccacggctcgagctgccaaatgctgttaaatcaactgagagaaatcacaggcattcaggacccttcctttctccatgaagctctgaaggccagtaatggtgacattactcaggcagtcagccttctcactgatgagagagttaaggagcccagtcaagacactgttgctacagaaccatctgaagtagaggggagtgctgccaacaaggaagtattagcaaaagttatagaccttactcatgataacaaagatgatcttcaggctgccattgctttgagtctactggagtctcccaaaattcaagctgatggaagagatcttaacaggatgcatgaagcaacctctgcagaaactaaacgctcaaagagaaaacgctgtgaagtctggggagaaaaccccaatcccaatgactggaggagagttgatggttggccagttgggctgaaaaatgttggcaatacatgttggtttagtgctgttattcagtctctctttcaattgcctgaatttcgaagacttgttctcagttatagtctgccacaaaatgtacttgaaaattgtcgaagtcatacagaaaagagaaatatcatgtttatgcaagagcttcagtatttgtttgctctaatgatgggatcaaatagaaaatttgtagacccgtctgcagccctggatctattaaagggagcattccgatcatctgaggaacagcagcaagatgtgagtgaattcacacacaagctcctggattggctagaggacgcattccagctagctgttaatgttaacagtcccaggaacaaatctgaaaatccaatggtgcagctgttctatggtactttcctgactgaaggggttcgtgaaggaaaacccttttgtaacaatgagaccttcggccagtatcctcttcaggtaaacggttatcgcaacttagacgagtgtttggaaggggccatggtggagggtgatgttgagcttcttccctccgatcactcggtgaagtatggacaagagcgttggtttacaaagctacctccagtgttgacctttgaactctcaagatttgagtttaatcagtcccttgggcagccagagaaaattcacaataagctggaatttcctcagattatttatatggacaggtacatgtacaggagcaaggagcttattcgaaataagagagagtgtattcgaaagttgaaggaggaaataaaaattctgcagcaaaaattggaaaggtatgtgaaatatggctcaggcccagctcggttcccgctcccggacatgctgaaatatgttattgaatttgctagtacaaaacctgcctcagaaagctgtccacctgaaagtgacacacatatgacattaccactttcttcagtgcactgctcggtttctgaccagacatccaaggaaagtacaagtacagaaagctcttctcaggatgttgaaagtaccttttcttctcctgaagattctttacccaagtctaaaccactgacatcttctcggtcttccatggaaatgccttcacagccagctccacgaacagtcacagatgaggagataaattttgttaagacctgtcttcagagatggaggagtgagattgaacaagatatacaagatttaaagacttgtattgcaagtactactcagactattgaacagatgtactgcgatcctctccttcgtcaggtgccttatcgcttgcatgcagttcttgttcatgaaggacaagcaaatgctggacactattgggcctatatctataatcaaccccgacagagctggctcaagtacaatgacatctctgttactgaatcttcctgggaagaagttgaaagagattcctatggaggcctgagaaatgttagtgcttactgtctgatgtacattaatgacaaactaccctacttcaatgcagaggcagccccaactgaatcagatcaaatgtcagaagtggaagccctatctgtggaactcaagcattacattcaggaggataactggcggtttgagcaggaagtagaggagtgggaagaagagcagtcttgcaaaatccctcaaatggagtcctccaccaactcctcatcacaggactactctacatcacaagagccttcagtagcctcttctcatggggttcgctgcttgtcatctgagcatgctgtgattgtaaaggagcaaactgcccaggctattgcaaacacagcccgtgcctatgagaagagcggtgtagaagcggcactgagtgaggtgatgctgagccctgccatgcaaggggtcatcctggccatagctaaagcccgtcagacctttgaccgagatgggtctgaagcagggctgattaaggcattccatgaagaatactccaggctctatcagcttgccaaagagacccccacctctcacagtgatcctcgacttcagcatgtccttgtctactttttccaaaatgaagcacccaaaagggtagtagaacgaacccttctggaacagtttgcagataaaaatcttagctatgatgaaagatcaatcagcattatgaaggtggctcaagcgaaactgaaggaaattggtccagatgacatgaatatggaagagtacaagaagtggcatgaagattatagtttgttccgaaaagtgtctgtgtatctcctaacaggcctagaactctatcaaaaaggaaagtaccaagaggcactttcctacctggtatatgcctaccagagcaatgctgccctgctgatgaaggggccccgccggggggtcaaagaatccgtgattgctttataccgaagaaaatgccttctggagctgaatgccaaagcagcttctctttttgaaacaaatgatgatcactccgtaactgagggcattaatgtgatgaatgaactgatcatcccctgcattcaccttatcattaataatgacatttccaaggatgatctggatgccattgaggtcatgagaaaccattggtgctcttaccttgggcaagatattgcagaaaatctgcagctgtgcctaggggagtttctacccagacttctagatccttctgcagaaatcatcgtcttgaaagagcctccaactattcgacccaattctccctatgacctatgtagccgatttgcagctgtcatggagtcaattcagggagtttcaactgtgacagtgaaataagctcccacatgttcaaggcccattctggttcctggctgcctgcctcttgcacagaagttcgttgtcatagtgctcaccttgggaaaaggattaggtgggcacataagattccgatcagaccccaaccatgctgcatgtgtaaagaaggattgaaaataaaattgcactttttaggtacaaaatcataaaagctgtttcactagaaaaggcagaaagcagtgtattaaggtgttgaattacgccagaagacctgaaatgccttgtacctacaacaatgcttaggcttttctaagcctcttgccacttttaaaattatccttcaggcataaatatttttgacagcagaatagaagaatgattcatgagaacctgaaccagatgaacagctactagttattttatcaaatacagatgacatttaaaaattcttaactacaagagattagaaatataaaccttgcctggctcttgccaggagataacaaaatgggttgctgatgaactgcacccttttacatgtgggtagaatataagctcacatggcagtgagatgttgaaaagtcaaaagagacctgtctctctcctttcttttctatctttaaaccagaaaacctcatactcagtcctcagtgaaagaaagtaaagtattaaggactttagacagaagagcattgtgtaacttgactgaagatcatccattaatagttattaggcatttaggtaaaattttctaatacctaaaaattgtcaaaaacagtcaatagggctactgctggcccaaagaccatttaggtccacctcctcttttttgctctttttttttttctgtgacagtttcactgtgtcgcccaggctggcgttcagtggtgcaatctcagctcactgcaaactctgtctcctgggctcaagtgattctcgtgcctcagcctcccgaatagctggaattacgggcatgcaccaccacacctggctaatttttgtatttttaatagagatggggtttcaccatattggccaggctgatctctaactcctggcctcaagtgatctatctgcctccctcagcctcccaaagtctgggattgcagacaagtcatcgtacccggccttcttttttgcccttaaaagtaagggatgtgggtttgtacaaaaaaaaaaaaaaaaaaaaaaaaaaccagcatacatatgcaaaactatatatatatgtatatgtagagaaaaatacttcccattgatcatttttaaaaggcttctgattggatattgtgttttaaccaaattttaaagattaatggaatcatgaaagggaaaaaaattgatacaactatgcagattttataaatgtgcaataaaagtatttgttttacctttggtgt

SEQ ID NO: 11602 - DNA, 3726 bp, Homo sapiens
gtgcatttctaaccagctatcaggaagttgctgaatttaaaatgttgtctctgtggagccagaagataggctttagatagtcatagtgatgtcttttttaaaaagtctctctctttgcctaggaaaacccttttgtaacaatgagaccttcggccagtatcctcttcaggtaaacggttatcgcaacttagacgagtgtttggaaggggccatggtggagggtgatgttgagcttcttccctccgatcactcggtgaagtatggacaagagcgttggtttacaaagctacctccagtgttgacctttgaactctcaagatttgagtttaatcagtcccttgggcagccagagaaaattcacaataagctggaatttcctcagattatttatatggacaggtacatgtacaggagcaaggagcttattcgaaataagagagagtgtattcgaaagttgaaggaggaaataaaaattctgcagcaaaaattggaaaggtatgtgaaatatggctcaggcccagctcggttcccgctcccggacatgctgaaatatgttattgaatttgctagtacaaaacctgcctcagaaagctgtccacctgaaagtgacacacatatgacattaccactttcttcagtgcactgctcggtttctgaccagacatccaaggaaagtacaagtacagaaagctcttctcaggatgttgaaagtaccttttcttctcctgaagattctttacccaagtctaaaccactgacatcttctcggtcttccatggaaatgccttcacagccagctccacgaacagtcacagatgaggagataaattttgttaagacctgtcttcagagatggaggagtgagattgaacaagatatacaagatttaaagacttgtattgcaagtactactcagactattgaacagatgtactgcgatcctctccttcgtcaggtgccttatcgcttgcatgcagttcttgttcatgaaggacaagcaaatgctggacactattgggcctatatctataatcaaccccgacagagctggctcaagtacaatgacatctctgttactgaatcttcctgggaagaagttgaaagagattcctatggaggcctgagaaatgttagtgcttactgtctgatgtacattaatgacaaactaccctacttcaatgcagaggcagccccaactgaatcagatcaaatgtcagaagtggaagccctatctgtggaactcaagcattacattcaggaggataactggcggtttgagcaggaagtagaggagtgggaagaagagcagtcttgcaaaatccctcaaatggagtcctccaccaactcctcatcacaggactactctacatcacaagagccttcagtagcctcttctcatggggttcgctgcttgtcatctgagcatgctgtgattgtaaaggagcaaactgcccaggctattgcaaacacagcccgtgcctatgagaagagcggtgtagaagcggcactgagtgaggcattccatgaagaatactccaggctctatcagcttgccaaagagacccccacctctcacagtgatcctcgacttcagcatgtccttgtctactttttccaaaatgaagcacccaaaagggtagtagaacgaacccttctggaacagtttgcagataaaaatcttagctatgatgaaagatcaatcagcattatgaaggtggctcaagcgaaactgaaggaaattggtccagatgacatgaatatggaagagtacaagaagtggcatgaagattatagtttgttccgaaaagtgtctgtgtatctcctaacaggcctagaactctatcaaaaaggaaagtaccaagaggcactttcctacctggtatatgcctaccagagcaatgctgccctgctgatgaaggggccccgccggggggtcaaagaatccgtgattgctttataccgaagaaaatgccttctggagctgaatgccaaagcagcttctctttttgaaacaaatgatgatcactccgtaactgagggcattaatgtgatgaatgaactgatcatcccctgcattcaccttatcattaataatgacatttccaaggatgatctggatgccattgaggtcatgagaaaccattggtgctcttaccttgggcaagatattgcagaaaatctgcagctgtgcctaggggagtttctacccagacttctagatccttctgcagaaatcatcgtcttgaaagagcctccaactattcgacccaattctccctatgacctatgtagccgatttgcagctgtcatggagtcaattcagggagtttcaactgtgacagtgaaataagctcccacatgttcaaggcccattctggttcctggctgcctgcctcttgcacagaagttcgttgtcatagtgctcaccttgggaaaaggattaggtgggcacataagattccgatcagaccccaaccatgctgcatgtgtaaagaaggattgaaaataaaattgcactttttaggtacaaaatcataaaagctgtttcactagaaaaggcagaaagcagtgtattaaggtgttgaattacgccagaagacctgaaatgccttgtacctacaacaatgcttaggcttttctaagcctcttgccacttttaaaattatccttcaggcataaatatttttgacagcagaatagaagaatgattcatgagaacctgaaccagatgaacagctactagttattttatcaaatacagatgacatttaaaaattcttaactacaagagattagaaatataaaccttgcctggctcttgccaggagataacaaaatgggttgctgatgaactgcacccttttacatgtgggtagaatataagctcacatggcagtgagatgttgaaaagtcaaaagagacctgtctctctcctttcttttctatctttaaaccagaaaacctcatactcagtcctcagtgaaagaaagtaaagtattaaggactttagacagaagagcattgtgtaacttgactgaagatcatccattaatagttattaggcatttaggtaaaattttctaatacctaaaaattgtcaaaaacagtcaatagggctactgctggcccaaagaccatttaggtccacctcctcttttttgctctttttttttttctgtgacagtttcactgtgtcgcccaggctggcgttcagtggtgcaatctcagctcactgcaaactctgtctcctgggctcaagtgattctcgtgcctcagcctcccgaatagctggaattacgggcatgcaccaccacacctggctaatttttgtatttttaatagagatggggtttcaccatattggccaggctgatctctaactcctggcctcaagtgatctatctgcctccctcagcctcccaaagtctgggattgcagacaagtcatcgtacccggccttcttttttgcccttaaaagtaagggatgtgggtttgtacaaaaaaaaaaaaaaaaaaaaaaaaaaccagcatacatatgcaaaactatatatatatgtatatgtagagaaaaatacttcccattgatcatttttaaaaggcttctgattggatattgtgttttaaccaaattttaaagattaatggaatcatgaaagggaaaaaaattgatacaactatgcagattttataaatgtgcaataaaagtatttgttttacctttggtgt

SEQ ID NO: 11603 - DNA, 1771 bp, Homo sapiens
ctaattctaccttttatctgtaggagctgaatgccaaagcagcttctctttttgaaacaaatgatgatcactccgtaactgagggcattaatgtgatgaatgaactgatcatcccctgcattcaccttatcattaataatgacatttccaaggatgatctggatgccattgaggtcatgagaaaccattggtgctcttaccttgggcaagatattgcagaaaatctgcagctgtgcctaggggagtttctacccagacttctagatccttctgcagaaatcatcgtcttgaaagagcctccaactattcgacccaattctccctatgacctatgtagccgatttgcagctgtcatggagtcaattcagggagtttcaactgtgacagtgaaataagctcccacatgttcaaggcccattctggttcctggctgcctgcctcttgcacagaagttcgttgtcatagtgctcaccttgggaaaaggattaggtgggcacataagattccgatcagaccccaaccatgctgcatgtgtaaagaaggattgaaaataaaattgcactttttaggtacaaaatcataaaagctgtttcactagaaaaggcagaaagcagtgtattaaggtgttgaattacgccagaagacctgaaatgccttgtacctacaacaatgcttaggcttttctaagcctcttgccacttttaaaattatccttcaggcataaatatttttgacagcagaatagaagaatgattcatgagaacctgaaccagatgaacagctactagttattttatcaaatacagatgacatttaaaaattcttaactacaagagattagaaatataaaccttgcctggctcttgccaggagataacaaaatgggttgctgatgaactgcacccttttacatgtgggtagaatataagctcacatggcagtgagatgttgaaaagtcaaaagagacctgtctctctcctttcttttctatctttaaaccagaaaacctcatactcagtcctcagtgaaagaaagtaaagtattaaggactttagacagaagagcattgtgtaacttgactgaagatcatccattaatagttattaggcatttaggtaaaattttctaatacctaaaaattgtcaaaaacagtcaatagggctactgctggcccaaagaccatttaggtccacctcctcttttttgctctttttttttttctgtgacagtttcactgtgtcgcccaggctggcgttcagtggtgcaatctcagctcactgcaaactctgtctcctgggctcaagtgattctcgtgcctcagcctcccgaatagctggaattacgggcatgcaccaccacacctggctaatttttgtatttttaatagagatggggtttcaccatattggccaggctgatctctaactcctggcctcaagtgatctatctgcctccctcagcctcccaaagtctgggattgcagacaagtcatcgtacccggccttcttttttgcccttaaaagtaagggatgtgggtttgtacaaaaaaaaaaaaaaaaaaaaaaaaaaccagcatacatatgcaaaactatatatatatgtatatgtagagaaaaatacttcccattgatcatttttaaaaggcttctgattggatattgtgttttaaccaaattttaaagattaatggaatcatgaaagggaaaaaaattgatacaactatgcagattttataaatgtgcaataaaagtatttgttttacctttggtgt

SEQ ID NO: 11604 - DNA, 1881 bp, Homo sapiens
cgcctcggccatgactgcggagctgcagcaggacgacgcggccggcgcggcagacggccacggctcgagctgccaaatgctgttaaatcaactgagagaaatcacaggcattcaggacccttcctttctccatgaagctctgaaggccagtaatggtgacattactcaggcagtcagccttctcactgatgagagagttaaggagcccagtcaagacactgttgctacagaaccatctgaagtagaggggagtgctgccaacaaggaagtattagcaaaagttatagaccttactcatgataacaaagatgatcttcaggctgccattgctttgagtctactggagtctcccaaaattcaagctgatggaagagatcttaacaggatgcatgaagcaacctctgcagaaactaaacgctcaaagagaaaacgctgtgaagtctggggagaaaaccccaatcccaatgactggaggagagttgatggttggccagttgggctgaaaaatgttggcaatacatgttggtttagtgctgttattcagtctctctttcaattgcctgaatttcgaagacttgttctcagttatagtctgccacaaaatgtacttgaaaattgtcgaagtcatacagaaaagagaaatatcatgtttatgcaagagcttcagtatttgtttgctctaatgatgggatcaaatagaaaatttgtagacccgtctgcagccctggatctattaaagggagcattccgatcatctgaggaacagcagcaagatgtgagtgaattcacacacaagctcctggattggctagaggacgcattccagctagctgttaatgttaacagtcccaggaacaaatctgaaaatccaatggtgcagctgttctatggtactttcctgactgaaggggttcgtgaaggaaaacccttttgtaacaatgagaccttcggccagtatcctcttcaggtaaacggttatcgcaacttagacgagtgtttggaaggggccatggtggagggtgatgttgagcttcttccctccgatcactcggtgaagtatggacaagagcgttggtttacaaagctacctccagtgttgacctttgaactctcaagatttgagtttaatcagtcccttgggcagccagagaaaattcacaataagctggaatttcctcagattatttatatggacaggtacatgtacaggagcaaggagcttattcgaaataagagagagtgtattcgaaagttgaaggaggaaataaaaattctgcagcaaaaattggaaaggtatgtgaaatatggctcaggcccagctcggttcccgctcccggacatgctgaaatatgttattgaatttgctagtacaaaacctgcctcagaaagctgtccacctgaaagtgacacacatatgacattaccactttcttcagtgcactgctcggtttctgaccagacatccaaggaaagtacaagtacagaaagctcttctcaggatgttgaaagtaccttttcttctcctgaagattctttacccaagtctaaaccactgacatcttctcggtcttccatggaaatgccttcacagccagctccacgaacagtcacagatgaggagataaattttgttaagacctgtcttcagagatggaggagtgagattgaacaagatatacaagatttaaagacttgtattgcaagtactactcagactattgaacagatgtactgcgatcctctccttcgtcaggtagaatgaaaattgatgggaaagtagtcaaggcatgtgctaatggtagatacaaaaatcaaatttgatagttttcttttaaacccaatgggaatccccctaagataaaagaataaacttaagatata

SEQ ID NO: 11605 - DNA, 405 bp, Homo sapiens
gactgttcagagaaatcatgagtagtagtatccgaagcaatgggaacaaatctccatcaagatttcacttttgtttgggtgttgtgggaagtcagagcatggaaactccctcctgtaatgaggcatttaatagacgcttcaagcacattagacctactgtccaccatagtctcataattctaccctagaattatgcctgaaagtactcagtgtgtcaccagggtaataaagttaatactcaaaactggttttaaattctatgattacttttgaaatttctattgtctttttctcccataggccagtaatggtgacattactcaggcagtcagccttctcactgatgagagagttaaggagcccagtcaagacactgttgctacagaaccatctgaagtagagggg

SEQ ID NO: 11606 - DNA, 4435 bp, Homo sapiens
cgcctcggccatgactgcggagctgcagcaggacgacgcggccggcgcggcagacggccacggctcgagctgccaaatgctgttaaatcaactgagagaaatcacaggcattcaggacccttcctttctccatgaagctctgaaggccagtaatggtgacattactcaggcagtcagccttctcactgatgagagagttaaggagcccagtcaagacactgttgctacagaaccatctgaagtagaggggagtgctgccaacaaggaagtattagcaaaagttatagaccttactcatgataacaaagatgatcttcaggctgccattgctttgagtctactggagtctcccaaaattcaagctgatggaagagatcttaacaggatgcatgaagcaacctctgcagaaactaaacgctcaaagagaaaacgctgtgaagtctggggagaaaaccccaatcccaatgactggaggagagttgatggttggccagttgggctgaaaaatgttggcaatacatgttggtttagtgctgttattcagtctctctttcaattgcctgaatttcgaagacttgttctcagttatagtctgccacaaaatgtacttgaaaattgtcgaagtcatacagaaaagagaaatatcatgtttatgcaagagcttcagtatttgtttgctctaatgatgggatcaaatagaaaatttgtagacccgtctgcagccctggatctattaaagggagcattccgatcatctgaggaacagcagcaagatgtgagtgaattcacacacaagctcctggattggctagaggacgcattccagctagctgttaatgttaacagtcccaggaacaaatctgaaaatccaatggtgcagctgttctatggtactttcctgactgaaggggttcgtgaaggaaaacccttttgtaacaatgagaccttcggccagtatcctcttcaggtaaacggttatcgcaacttagacgagtgtttggaaggggccatggtggagggtgatgttgagcttcttccctccgatcactcggtgaagtatggacaagagcgttggtttacaaagctacctccagtgttgacctttgaactctcaagatttgagtttaatcagtcccttgggcagccagagaaaattcacaataagctggaatttcctcagattatttatatggacaggtacatgtacaggagcaaggagcttattcgaaataagagagagtgtattcgaaagttgaaggaggaaataaaaattctgcagcaaaaattggaaaggtatgtgaaatatggctcaggcccagctcggttcccgctcccggacatgctgaaatatgttattgaatttgctagtacaaaacctgcctcagaaagctgtccacctgaaagtgacacacatatgacattaccactttcttcagtgcactgctcggtttctgaccagacatccaaggaaagtacaagtacagaaagctcttctcaggatgttgaaagtaccttttcttctcctgaagattctttacccaagtctaaaccactgacatcttctcggtcttccatggaaatgccttcacagccagctccacgaacagtcacagatgaggagataaattttgttaagacctgtcttcagagatggaggagtgagattgaacaagatatacaagatttaaagacttgtattgcaagtactactcagactattgaacagatgtactgcgatcctctccttcgtcaggtgccttatcgcttgcatgcagttcttgttcatgaaggacaagcaaatgctggacactattgggcctatatctataatcaaccccgacagagctggctcaagtacaatgacatctctgttactgaatcttcctgggaagaagttgaaagagattcctatggaggcctgagaaatgttagtgcttactgtctgatgtacattaatgacaaactaccctacttcaatgcagaggcagccccaactgaatcagatcaaatgtcagaagtggaagccctatctgtggaactcaagcattacattcaggaggataactggcggtttgagcaggaagtagaggagtgggaagaagagcagtcttgcaaaatccctcaaatggagtcctccaccaactcctcatcacaggactactctacatcacaagagccttcagtagcctcttctcatggggttcgctgcttgtcatctgagcatgctgtgattgtaaaggagcaaactgcccaggctattgcaaacacagcccgtgcctatgagaagagcggtgtagaagcggcactgagtgaggtgatgctgagccctgccatgcaaggggtcatcctggccatagctaaagcccgtcagacctttgaccgagatgggtctgaagcagggctgattaaggcattccatgaagaatactccaggctctatcagcttgccaaagagacccccacctctcacagtgatcctcgacttcagcatgtccttgtctactttttccaaaatgaagcacccaaaagggtagtagaacgaacccttctggaacagtttgcagataaaaatcttagctatgatgaaagatcaatcagcattatgaaggtggctcaagcgaaactgaaggaaattggtccagatgacatgaatatggaagagtacaagaagtggcatgaagattatagtttgttccgaaaagtgtctgtgtatctcctaacaggcctagaactctatcaaaaaggaaagtaccaagaggcactttcctacctggtatatgcctaccagagcaatgctgccctgctgatgaaggggccccgccggggggtcaaagaatccgtgattgctttataccgaagaaaatgccttctggagctgaatgccaaagcagcttctctttttgaaacaaatgatgatcactccgtaactgagggcattaatgtgatgaatgaactgatcatcccctgcattcaccttatcattaataatgacatttccaaggatgatctggatgccattgaggtcatgagaaaccattggtgctcttaccttgggcaagatattgcagaaaatctgcagctgtgcctaggggagtttctacccagacttctagatccttctgcagaaatcatcgtcttgaaagagcctccaactattcgacccaattctccctatgacctatgtagccgatttgcagctgtcatggagtcaattcagggagtttcaactgtgacagtgaaataagctcccacatgttcaaggcccattctggttcctggctgcctgcctcttgcacagaagttcgttgtcatagtgctcaccttgggaaaaggattaggtgggcacataagattccgatcagaccccaaccatgctgcatgtgtaaagaaggattgaaaataaaattgcactttttaggtacaaaatcataaaagctgtttcactagaaaaggcagaaagcagtgtattaaggtgttgaattacgccagaagacctgaaatgccttgtacctacaacaatgcttaggcttttctaagcctcttgccacttttaaaattatccttcaggcataaatatttttgacagcagaatagaagaatgattcatgagaacctgaaccagatgaacagctactagttattttatcaaatacagatgacatttaaaaattcttaactacaagagattagaaatataaaccttgcctggctcttgccaggagataacaaaatgggttgctgatgaactgcacccttttacatgtgggtagaatataagctcacatggcagtgagatgttgaaaagtcaaaagagacctgtctctctcctttcttttctatctttaaaccagaaaacctcatactcagtcctcagtgaaagaaagtaaagtattaaggactttagacagaagagcattgtgtaacttgactgaagatcatccattaatagttattaggcatttaggtaaaattttctaatacctaaaaattgtcaaaaacagtcaatagggctactgctggcccaaagaccatttaggtccacctcctcttttttgctctttttttttttctgtgacagtttcactgtgtcgcccaggctggcgttcagtggtgcaatctcagctcactgcaaactctgtctcctgggctcaagtgattctcgtgcctcagcctcccgaatagctggaattacgggcatgcaccaccacacctggctaatttttgtatttttaatagagatggggtttcaccatattggccaggctgatctctaactcctggcctcaagtgatctatctgcctccctcagcctcccaaagtctgggattgcagacaagtcatcgtacccggccttcttttttgcccttaaaagtaagggatgtgggtttgtacaaaagtcgacgcggccgcgaatttagtagtagtaggcggccgc

SEQ ID NO: 11607 - DNA, 3114 bp, Homo sapiens
  misc_feature (14)..(14): n is a, c, g, or t
  misc_feature (17)..(17): n is a, c, g, or t
  misc_feature (25)..(25): n is a, c, g, or t
tgcaggctgtacanccncgaagtanggatatcgtcgaacccacgccctccgatccaaggaaagtacaagtacagaaagctcttctcaggatgttgaaagtaccttttcttctcctgaagattctttacccaagtctaaaccactgacatcttctcggtcttccatggaaatgccttcacagccagctccacgaacagtcacagatgaggagataaattttgttaagacctgtcttcagagatggaggagtgagattgaacaagatatacaagatttaaagacttgtattgcaagtactactcagactattgaacagatgtactgcgatcctctccttcgtcaggtgccttatcgcttgcatgcagttcttgttcatgaaggacaagcaaatgctggacactattgggcctatatctataatcaaccccgacagagctggctcaagtacaatgacatctctgttactgaatcttcctgggaagaagttgaaagagattcctatggaggcctgagaaatgttagtgcttactgtctgatgtacattaatgacaaactaccctacttcaatgcagaggcagccccaactgaatcagatcaaatgtcagaagtggaagccctatctgtggaactcaagcattacattcaggaggataactggcggtttgagcaggaagtagaggagtgggaagaagagcagtcttgcaaaatccctcaaatggagtcctccaccaactcctcatcacaggactactctacatcacaagagccttcagtagcctcttctcatggggttcgctgcttgtcatctgagcatgctgtgattgtaaaggagcaaactgcccaggctattgcaaacacagcccgtgcctatgagaagagcggtgtagaagcggcactgagtgaggcattccatgaagaatactccaggctctatcagcttgccaaagagacccccacctctcacagtgatcctcgacttcagcatgtccttgtctactttttccaaaatgaagcacccaaaagggtagtagaacgaacccttctggaacagtttgcagataaaaatcttagctatgatgaaagatcaatcagcattatgaaggtggctcaagcgaaactgaaggaaattggtccagatgacatgaatatggaagagtacaagaagtggcatgaagattatagtttgttccgaaaagtgtctgtgtatctcctaacaggcctagaactctatcaaaaaggaaagtaccaagaggcactttcctacctggtatatgcctaccagagcaatgctgccctgctgatgaaggggccccgccggggggtcaaagaatccgtgattgctttataccgaagaaaatgccttctggagctgaatgccaaagcagcttctctttttgaaacaaatgatgatcactccgtaactgagggcattaatgtgatgaatgaactgatcatcccctgcattcaccttatcattaataatgacatttccaaggatgatctggatgccattgaggtcatgagaaaccattggtgctcttaccttgggcaagatattgcagaaaatctgcagctgtgcctaggggagtttctacccagacttctagatccttctgcagaaatcatcgtcttgaaagagcctccaactattcgacccaattctccctatgacctatgtagccgatttgcagctgtcatggagtcaattcagggagtttcaactgtgacagtgaaataagctcccacatgttcaaggcccattctggttcctggctgcctgcctcttgcacagaagttcgttgtcatagtgctcaccttgggaaaaggattaggtgggcacataagattccgatcagaccccaaccatgctgcatgtgtaaagaaggattgaaaataaaattgcactttttaggtacaaaatcataaaagctgtttcactagaaaaggcagaaagcagtgtattaaggtgttgaattacgccagaagacctgaaatgccttgtacctacaacaatgcttaggcttttctaagcctcttgccacttttaaaattatccttcaggcataaatatttttgacagcagaatagaagaatgattcatgagaacctgaaccagatgaacagctactagttattttatcaaatacagatgacatttaaaaattcttaactacaagagattagaaatataaaccttgcctggctcttgccaggagataacaaaatgggttgctgatgaactgcacccttttacatgtgggtagaatataagctcacatggcagtgagatgttgaaaagtcaaaagagacctgtctctctcctttcttttctatctttaaaccagaaaacctcatactcagtcctcagtgaaagaaagtaaagtattaaggactttagacagaagagcattgtgtaacttgactgaagatcatccattaatagttattaggcatttaggtaaaattttctaatacctaaaaattgtcaaaaacagtcaatagggctactgctggcccaaagaccatttaggtccacctcctcttttttgctctttttttttttctgtgacagtttcactgtgtcgcccaggctggcgttcagtggtgcaatctcagctcactgcaaactctgtctcctgggctcaagtgattctcgtgcctcagcctcccgaatagctggaattacgggcatgcaccaccacacctggctaatttttgtatttttaatagagatggggtttcaccatattggccaggctgatctctaactcctggcctcaagtgatctatctgcctccctcagcctcccaaagtctgggattgcagacaagtcatcgtacccggccttcttttttgcccttaaaagtaagggatgtgggtttgtacaaaaaaaaaaaaaaaaaaaaaaaaaaccagcatacatatgcaaaactatatatatatgtatatgtagagaaaaatacttcccattgatcatttttaaaaggcttctgattggatattgtgttttaaccaaattttaaagattaatggaatcatgaaagggaaaaaaattgatacaactatgcagattttataaatgtgcaataaaagtatttgttttacctttggtgt

SEQ ID NO: 11608 - DNA, 162 bp, Homo sapiens
aaagctggaaagaaacagaagtaagataaatagctagacgaccttggcgccaccacctggccctggtggttagaatgataataataatattaacccctgaccaaaacgactggtgttatccgtaaattccagacattgtgtgagaaagcaccgtaaaacttt

SEQ ID NO: 11609 - DNA, 1791 bp, Homo sapiens
tgcctccccttttcccaccccccgtcattcatctttcccgttgcctcctctcttcgcctcccgctaactcccgcctgtgtttccatcagcaatggtgccggaggccccagtgggccaggcccggaggtgcacgccagcaccccaggagcatttctcctcggaaacccagctgtgacttcacccccttctgtgctctccacccaagcacccacttcggctggtgtggaggttctgggggagccctcgctaaccagcattgctgtgtccacctggacagcagtggcctcgcatcccttcgcgggctggggtggcccaggagcgggtgggcaccattctccttcctcactggatggttaagcaggatcctaggagcctctttgcacagcgatccttccatgtgtagagtgcttagaaaccccatcaactgatctagtgagtcagactgtggaatctcccttcccactagctggaggtggaggtgggttattacagaagtcatactgggagagggttcagtttggatgatgctagttagatcatttgcatctctccaccattttcttctgcactcccattttctctgcagcttattcttgccatgcttaggtgacagaagtttgttaagtaccatccttgtgccctgcctcttattctcaaatcgttctggaaagcctcacttccttttctgtggagaaggtgcaaagctgttaaatgagctcagagtttacctagctaaggccactgcttcctgctttgtgaagcctggaaagtatgtgtggccacagggctcaggttcacacttctgctttgagaccaggatggggtgtaagccatagagtaaggttaacaaaaagaataaagctaatcatgtattacaaacagcagtgtgcccagacttgtggaaatgaagtcatgtcactcctctgctcagaaaccttcaatggttcaccattaccagtggaatgaagtcaattctcctcactataactgggtgtggtagtttaagcctataatctcagcccttttggaggccaaggtaagaggatcgcttgaggtcaggagttcgagaccagcttgtgcaacaaagtgagagcctgtctctacaaaaaatagtcatgcacacaaaattagctgggcatggtggcctgtgcctatagtcccaactacttagaggaggatcgcttgatctcaggaggttgaggctgcagtgaattatgattgtggcattgcactccagcctgggtggtagatcaaggctttgtttcatttgaaaaaaaagaaagaaagaaagaaagaaagaaatcctactacgagcgatcacaccatctggcctgaaaccacttccccagcttaggtccctctgttatcctgttggcctcctatgtattggtcaaggcaggcatctctgttctctgaacattcattgcactttcccacctctataccttgcctgtgccttagtgtcctcttttttccagttcacctgtgcgaatccgacccacctcccagagcctggctgaaacgtcactccctgcatccaacatctgatctgctgagatatgtctgatctatctctgctcgctgttctcccgttgtttttgcctctgccatagagctcacctcattttgccttgtatttttgttacctgtgagtgtgtctctccctattagactgtaagcctctcgagggtgaggcctagccttcttgtctttgtaacccacagcagctggtactgtgccttgcctattgtaggtgcccaataaacatttgctgaactgaaaaaaaataat

SEQ ID NO: 11610 - DNA, 2832 bp, Homo sapiens
tagaagcaggcaagttgggtaacggctctcggcaaagttcgagaagtgcctatggccatgagtgagctgggcactcggaagcccagcgatggcactgtttctcatctgctcaatgtggtggagagtgagcttcaggcagggagggaaaaaggcgaccctacggagaagcaacttcagatcatcctggaggatgcacctctctggcagagattcaaggaagtcactaatgagatgattgtgaccaagaatggcagacggatgtttccagtcctaaagattagtgtcacagggttggaccccaatgccatgtactccctcctgctggactttgtccctacggacagtcaccgctggaagtacgtcaacggggaatgggtgcccgctggcaagccagaggtctccagccacagctgcgtctacattcacccggactcccccaactttggggcccactggatgaaagctcccatctccttcagcaaagtgaagctgaccaacaagctcaatggaggcgggcagataatgttgaattctctgcataaatatgaaccccaggttcacatagtgcgtgttggaagtgcccatcgaatggtaacaaactgctccttccctgaaacccagttcatagccgtgactgcctatcagaatgaggagataacggctctcaaaatcaagtacaatccttttgccaaagccttcttggatgccaaggaaagaaatcacctaagagacgtaccggaggctatctctgagagccagcatgtgacctattctcacttgggaggctggatcttttccaatccagatggagtgtgcacagcaggaaactccaattaccagtatgccgctcctctgcctctgcctgctccccacacccaccatggctgtgagcactattcgggtctccgaggacaccggcaggctccctacccttctgcgtacatgcacagaaaccattctccctcagtgaatttgatagaaagctcaagcaataatctgcaagttttctcgggacctgacagctggacttccttatcctccacaccccatgccagcatcctgtctgtaccccacaccaacggaccaatcaatccagggcccagcccctacccgtgcctgtggaccatcagcaatggtgccggaggccccagtgggccaggcccggaggtgcacgccagcaccccaggagcatttctcctcggaaacccagctgtgacttcacccccttctgtgctctccacccaagcacccacttcggctggtgtggaggttctgggggagccctcgctaaccagcattgctgtgtccacctggacagcagtggcctcgcatcccttcgcgggctggggtggcccaggagcgggtgggcaccattctccttcctcactggatggttaagcaggatcctaggagcctctttgcacagcgatccttccatgtgtagagtgcttagaaaccccatcaactgatctagtgagtcagactgtggaatctcccttcccactagctggaggtggaggtgggttattacagaagtcatactgggagagggttcagtttggatgatgctagttagatcatttgcatctctccaccattttcttctgcactcccattttctctgcagcttattcttgccatgcttaggtgacagaagtttgttaagtaccatccttgtgccctgcctcttattctcaaatcgttctggaaagcctcacttccttttctgtggagaaggtgcaaagctgttaaatgagctcagagtttacctagctaaggccactgcttcctgctttgtgaagcctggaaagtatgtgtggccacagggctcaggttcacacttctgctttgagaccaggatggggtgtaagccatagagtaaggttaacaaaaagaataaagctaatcatgtattacaaacagcagtgtgcccagacttgtggaaatgaagtcatgtcactcctctgctcagaaaccttcaatggttcaccattaccagtggaatgaagtcaattctcctcactataactgggtgtggtagtttaagcctataatctcagcccttttggaggccaaggtaagaggatcgcttgaggtcaggagttcgagaccagcttgtgcaacaaagtgagagcctgtctctacaaaaaatagtcatgcacacaaaattagctgggcatggtggcctgtgcctatagtcccaactacttagaggaggatcgcttgatctcaggaggttgaggctgcagtgaattatgattgtggcattgcactccagcctgggtggtagatcaaggctttgtttcatttgaaaaaaaagaaagaaagaaagaaagaaagaaatcctactacgagcgatcacaccatctggcctgaaaccacttccccagcttaggtccctctgttatcctgttggcctcctatgtattggtcaaggcaggcatctctgttctctgaacattcattgcactttcccacctctataccttgcctgtgccttagtgtcctcttttttccagttcacctgtgcgaatccgacccacctcccagagcctggctgaaacgtcactccctgcatccaacatctgatctgctgagatatgtctgatctatctctgctcgctgttctcccgttgtttttgcctctgccatagagctcacctcattttgccttgtatttttgttacctgtgagtgtgtctctccctattagactgtaagcctctcgagggtgaggcctagccttcttgtctttgtaacccacagcagctggtactgtgccttgcctattgtaggtgcccaataaacatttgctgaactgaaaaaaaataat

SEQ ID NO: 11611 - DNA, 452 bp, Homo sapiens
gacaaggcctctgagtcacatctggaatgggattctctggggttgggtcccaaggaagaactgcagctttgggccacccgaaaaacacaatgctatctttctttcaggtccatgaggaggcaagttcaggccagcggatttcaacgtaacccaggggggccctcagctcagttgagatctgtcttctgtcatggggcggggggcagccccattcagtcaaaggccaactcagggggctgcagcctctaagcccctgcccttcaggctggctttgctaatctctcaagaacacctgatttacacttaaaaaaaatcattccgctctgcccctttggcctcaaaagtttcctcaccagaaattcaatgaagatgcaatttcctttcgcccctccatagcaggcaggcaaaatcctgccaggaaccctttccactgccttcagtcccacccagga

SEQ ID NO: 11612 - DNA, 1284 bp, Homo sapiens
  misc_feature (697)..(697): n is a, c, g, or t
agactctatactctaatttctcatttaaaagaaattggactcttacaaaataaacatgatatgaacccagaatttaacttactattttcttactgttatcccaaagacattacatgatattgaacactttgaggtaattatggtactgggggagcataattgttcctactaatagaaacaaaatactaaggatttttctagaaactctcaagagccattacctggctaaggatttttctagaaactgtcctttcaagagccatttacctggaataaaagtgatgtgtatgataaacagttggctatacagacccaagatgaaattcaaaatatgacttctgaaaattctgaattcaaaatcaagtttttgatactttaggatcagctagatgatcatcataaatttgtctcctttccacttcaattttttttcatcttcaccaatctacactatattcaagccaacttaccatttcccttactccgttttccctgcaacttccctaagctgttagtgttattgtactactcttctttatgccacttaggcttgaattcttggcccaatttctctcacttctgcatgaagtcaccaaatgccagtgattctgcttctaacatatttcagacatcatttctgtccattcccactaccagaaagaaactctgtgttagtttttcttttacctttattgantttttataatagcatttatggcgtgttgaattgtggccccccaaaaatatgtccaagtcttaaccctggtgcctataaatgtgaccttatttgggaaaagagtctcacagatgaaattaagttaaagatcttaccctggattaaccaggtagatgctaaatcgaataaaaaagtgtctgtacaggaagagaagaggagaatcacagagaagaaagccatgtgaagatggtaacagacactggagtctgtaaccccaagtgtaatgcgacgggttctccaccaggttacttaagggtgtatgtccactgcttgagccctgaagactgggtggtgagccaaggtcatggtgctcagccaaggaacaccatgtgctgtgttccctgagaacacaaacatttgggagagtacctggggacataccaagaaaaacactcatcacacacagagaagaaaagccagaaaattagcttaaaagcagcttgaagatgggtggggtaagggggtgtgtggggcaaatttccagagttgtcctgctaccacctaggaatgccctgtatgttaagtcctaataaactcacctactcatc

SEQ ID NO: 11613 - DNA, 484 bp, Homo sapiens
  misc_feature (395)..(395): n is a, c, g, or t
agccctagtgggaaggctggggagagccagcgggccgggccgagcccagtggcgcggtgtggcagaggcgatgatggtgccagtggagcgatgggaacccggccagccccgacaggagcaggcaagatggggccgagccgcaggacagggcgggacgacggcctcggcagggagggcacagagacccacaccccaccgtgacgctgagaaccaccccgtgcctgccaacacacacgtgggggccatggcaggggaccgctccccactgctcaccaggccggcgagccatccagcccaccccacgacacgcacacacagtttcgtccccgcacgcgtgtctctctctaccccctctctccctcccgagttctcctgctctcggggcaggcggggcntgcaacaaacaaagggcacaaccccaccagcacacgtgctgcacggggaacacggtcggccaaggaggaaggacacgttggcgcctctg

SEQ ID NO: 11614 - DNA, 3206 bp, Homo sapiens
agcggccctttttgcataatggtagttgatttttgcagaaggtttgtggccagatcgctatgtataatactgatgaagcatttttgttccagctctgtctcggaagacctaggctgtagacgtggggatttcagtaggaaacattatggatctgtggagctgcttatttccagtgatgctgatggagccatccaaagggctggaagattcagagtggaaaatggctcttcagatgagaatgcaactgccctgcctggtacttggcgaagaacagacgtgcacttagagaacccagaataccacaccagatggtatttcaaatattttttaggacaagtccatcagaactacattggaaacgatgccgagaagagccctttcttcttgtccgtgaccctttctgaccaaaacaatcaacgtgtccctcaataccgtgcaattctttggagaaaaacaggtacccagaaaatatgccttccctacagtcccacaaaaactctttctgtgaagtccatcttaagtgccatgaatctggacaaatttgagaaaggccccagggaaatttttcatcctgaaatacaaaaggacttgctggttcttgaagaacaagagggctctgtgaatttcaagtttggggttctttttgccaaagatgggcagctcactgatgatgagatgttcagcaatgaaattggaagcgagccttttcaaaaatttttaaatcttctgggtgacacaatcactctaaagggctggacgggctaccgtggcggtctggataccaaaaatgataccacagggatacattcagtttatactgtgtaccaagggcatgagatcatgtttcatgtttccaccatgttgccatattccaaagagaacaaacagcaggtggaaaggaaacgccacattggaaacgatatcgtcaccattgtgttccaagaaggagaggaatcttctcctgcctttaagccttccatgatccgctcccactttacacatatttttgccttagtgagatacaatcaacaaaatgacaattacaggctgaaaatattttcagaagagagcgtaccactctttggccctcccttgccaactccaccagtgtttacagaccaccaggaattcagggactttttgctagtgaaattaattaatggtgaaaaagccactttggaaaccccaacatttgcccagaaacgtcggcgtaccctggatatgttgattagatctttacaccaggatttgatgccagatttgcataagaacatgcttaatagacgatcttttagtgatgtcttaccagagtcacccaagtcagcgcggaagaaagaggaggcccgccaggcggagtttgttagaatagggcaggcactaaaactgaaatccattgtgagaggggatgctccatcaagcttggcagcttcagggatctgtaaaaaagagccgtgggagccccagtgtttctgcagtaatttccctcatgaagccgtgtgtgcagatccctggggccaggccttgctggtttccactgatgctggcgtcttgctagtggatgatgaccttccatcagtgcccgtgtttgacagaactctgccagtgaagcaaatgcatgtgcttgagaccctggaccttctggttctcagagcagacaaaggaaaagatgctcgcctctttgtcttcaggctaagtgctctgcaaaagggccttgaggggaagcaggctgggaagagcaggtctgactgcagagaaaacaagttggagaaaacaaaaggctgccacctgtatgctattaacactcaccacagcagagagctgaggattgtggttgcaattcggaataaactgcttctgatcacaagaaaacacaacaagccaagcggggtcaccagcacctcattgttatctcccctgtctgagtcacctgttgaagaattccagtacatcagggagatctgtctgtctgactctcccatggtgatgaccttagtggatgggccagctgaagagagtgacaatctcatctgtgtggcttatcgacaccaatttgatgtggtgaatgagagcacaggagaagccttcaggctgcaccacgtggaggccaacagggttaattttgttgcagctattgatgtgtacgaagatggagaagctggtttgctgttgtgttacaactacagttgcatctataaaaaggtttgcccctttaatggtggctcttttttggttcaaccttctgcgtcagatttccagttctgttggaaccaggctccctatgcaattgtctgtgctttcccgtatctcctggccttcaccaccgactccatggagatccgcctggtggtgaacgggaacctggtccacactgcagtcgtgccgcagctgcagctggtggcctccagggtgaaattcaatcaaaaaatctgtacaagattccacttagaaacctcgtgggcagaagcatcgaacgacctctgaagtcacccttagtctccaaggtcatcaccccacccactcccatcagtgtgggccttgctgccattccagtcacgcactccttgtccctgtctcgcatggagatcaaagaaatagcaagcaggacccgcagggaactactgggcctctcggatgaaggtggacccaagtcagaaggagcgccaaaggccaaatcaaaaccccggaagcggttagaagaaagccaaggaggccccaagccaggggcagtgaggtcatctagcagtgacaggatcccatcaggctccttggaaagtgcttctacttccgaagccaaccctgaggggcactcagccagctctgaccaggaccctgtggcagacagagagggcagcccggtctccggcagcagccccttccagctcacggctttctccgatgaagacattatagacttgaagtaacagagttgaatctcatttgccatctttagttttcttatggaggtttatactctttaaacagttctgatgtaatttctcaacaaaatgtggcttttagcctgtcagtgatctattggaccaaaccttctgcacactcggccagttccctctccaatgtccggtgccatctttcctgacctttgtttctttctgttcaggaaccatcagtccccttgtaataaaggtggtagatttcattgaggttttagattgaaactttgaataaatcaaaaatactcattctta

SEQ ID NO: 11615 - DNA, 3097 bp, Homo sapiens
aagggctggacaccacctgcagtgtcctctaccatctgtggctggcaggatcagttgcattctcactgttctaaacctttcttttccagtccatcagaactacattggaaacgatgccgagaagagccctttcttcttgtccgtgaccctttctgaccaaaacaatcaacgtgtccctcaataccgtgcaattctttggagaaaaacaggtacccagaaaatatgccttccctacagtcccacaaaaactctttctgtgaagtccatcttaagtgccatgaatctggacaaatttgagaaaggccccagggaaatttttcatcctgaaatacaaaaggacttgctggttcttgaagaacaagagggctctgtgaatttcaagtttggggttctttttgccaaagatgggcagctcactgatgatgagatgttcagcaatgaaattggaagcgagccttttcaaaaatttttaaatcttctgggtgacacaatcactctaaagggctggacgggctaccgtggcggtctggataccaaaaatgataccacagggatacattcagtttatactgtgtaccaagggcatgagatcatgtttcatgtttccaccatgttgccatattccaaagagaacaaacagcaggtggaaaggaaacgccacattggaaacgatatcgtcaccattgtgttccaagaaggagaggaatcttctcctgcctttaagccttccatgatccgctcccactttacacatatttttgccttagtgagatacaatcaacaaaatgacaattacaggctgaaaatattttcagaagagagcgtaccactctttggccctcccttgccaactccaccagtgtttacagaccaccaggaattcagggactttttgctagtgaaattaattaatggtgaaaaagccactttggaaaccccaacatttgcccagaaacgtcggcgtaccctggatatgttgattagatctttacaccaggatttgatgccagatttgcataagaacatgcttaatagacgatcttttagtgatgtcttaccagagtcacccaagtcagcgcggaagaaagaggaggcccgccaggcggagtttgttagaatagggcaggcactaaaactgaaatccattgtgagaggggatgctccatcaagcttggcagcttcagggatctgtaaaaaagagccgtgggagccccagtgtttctgcagtaatttccctcatgaagccgtgtgtgcagatccctggggccaggccttgctggtttccactgatgctggcgtcttgctagtggatgatgaccttccatcagtgcccgtgtttgacagaactctgccagtgaagcaaatgcatgtgcttgagaccctggaccttctggttctcagagcagacaaaggaaaagatgctcgcctctttgtcttcaggctaagtgctctgcaaaagggccttgaggggaagcaggctgggaagagcaggtctgactgcagagaaaacaagttggagaaaacaaaaggctgccacctgtatgctattaacactcaccacagcagagagctgaggattgtggttgcaattcggaataaactgcttctgatcacaagaaaacacaacaagccaagcggggtcaccagcacctcattgttatctcccctgtctgagtcacctgttgaagaattccagtacatcagggagatctgtctgtctgactctcccatggtgatgaccttagtggatgggccagctgaagagagtgacaatctcatctgtgtggcttatcgacaccaatttgatgtggtgaatgagagcacaggagaagccttcaggctgcaccacgtggaggccaacagggttaattttgttgcagctattgatgtgtacgaagatggagaagctggtttgctgttgtgttacaactacagttgcatctataaaaaggtttgcccctttaatggtggctcttttttggttcaaccttctgcgtcagatttccagttctgttggaaccaggctccctatgcaattgtctgtgctttcccgtatctcctggccttcaccaccgactccatggagatccgcctggtggtgaacgggaacctggtccacactgcagtcgtgccgcagctgcagctggtggcctccaggtcggatatatacttcacagcaactgcagctgtgaatgaggtctcatctggaggcagctccaagggggccagtgcccgaaattctcctcagacacccccgggccgagatactccagtatttccttcttccctgggggaaggtgaaattcaatcaaaaaatctgtacaagattccacttagaaacctcgtgggcagaagcatcgaacgacctctgaagtcacccttagtctccaaggtcatcaccccacccactcccatcagtgtgggccttgctgccattccagtcacgcactccttgtccctgtctcgcatggagatcaaagaaatagcaagcaggacccgcagggaactactgggcctctcggatgaaggtggacccaagtcagaaggagcgccaaaggccaaatcaaaaccccggaagcggttagaagaaagccaaggaggccccaagccaggggcagtgaggtcatctagcagtgacaggatcccatcaggctccttggaaagtgcttctacttccgaagccaaccctgaggggcactcagccagctctgaccaggaccctgtggcagacagagagggcagcccggtctccggcagcagccccttccagctcacggctttctccgatgaagacattatagacttgaagtaacagagttgaatctcatttgccatctttagttttcttatggaggtttatactctttaaacagttctgatgtaatttctcaacaaaatgtggcttttagcctgtcagtgatctattggaccaaaccttctgcacactcggccagttccctctccaatgtccggtgccatctttcctgacctttgtttctttctgttcaggaaccatcagtccccttgtaataaaggtggtagatttcattgaggttttagattgaaactttgaataaatcaaaaatactcattctta

SEQ ID NO: 11616 - DNA, 3579 bp, Homo sapiens
aaaagattttatcttcttttgttacaagaatgaacttgaaaacttaaaaggaaattaaaatataaatactacagagtcacataagcctagattcaagtcctggctctgctttttaccagatctttttcctgttatttaacttctgagcttcaatttcctggggctaaaatagtacttgcctcataaggactaaatgagaaaattcatgaaaagcatttattacagtgtctggtgtattgtaagtagtctagaagttcgttattatttttaactttcacttataaatattggaatattagctgaaaggaactctagagatctatttcaatctccttgttttacctctataggaacttaggttcaagggaatttacgttgcttgtccaaagtaaaacattttaaaaagtcttgttaaggatggtcttttgccctatgtggcatagaaatttcagttaaatcttaattacattcattacttttagtaaataaaaataagaatctagaagaatagccaaggttacctgaaacagatgttcctgatttctctctccctctcttatgagtatcactaggagccagttatataagtcaagtacatgtggtgttggttactttcatctgtttggtcattgatcactcatttggtgatttgtatcttctgagtgcaggccctttagggaaaacagctgtgattttctagaagctcctttttagcttctctgatgctgcagcttatcctgtccattctatttcagtgccatgaatctggacaaatttgagaaaggccccagggaaatttttcatcctgaaatacaaaaggacttgctggttcttgaagaacaagagggctctgtgaatttcaagtttggggttctttttgccaaagatgggcagctcactgatgatgagatgttcagcaatgaaattggaagcgagccttttcaaaaatttttaaatcttctgggtgacacaatcactctaaagggctggacgggctaccgtggcggtctggataccaaaaatgataccacagggatacattcagtttatactgtgtaccaagggcatgagatcatgtttcatgtttccaccatgttgccatattccaaagagaacaaacagcaggtggaaaggaaacgccacattggaaacgatatcgtcaccattgtgttccaagaaggagaggaatcttctcctgcctttaagccttccatgatccgctcccactttacacatatttttgccttagtgagatacaatcaacaaaatgacaattacaggctgaaaatattttcagaagagagcgtaccactctttggccctcccttgccaactccaccagtgtttacagaccaccaggaattcagggactttttgctagtgaaattaattaatggtgaaaaagccactttggaaaccccaacatttgcccagaaacgtcggcgtaccctggatatgttgattagatctttacaccaggatttgatgccagatttgcataagaacatgcttaatagacgatcttttagtgatgtcttaccagagtcacccaagtcagcgcggaagaaagaggaggcccgccaggcggagtttgttagaatagggcaggcactaaaactgaaatccattgtgagaggggatgctccatcaagcttggcagcttcagggatctgtaaaaaagagccgtgggagccccagtgtttctgcagtaatttccctcatgaagccgtgtgtgcagatccctggggccaggccttgctggtttccactgatgctggcgtcttgctagtggatgatgaccttccatcagtgcccgtgtttgacagaactctgccagtgaagcaaatgcatgtgcttgagaccctggaccttctggttctcagagcagacaaaggaaaagatgctcgcctctttgtcttcaggctaagtgctctgcaaaagggccttgaggggaagcaggctgggaagagcaggtctgactgcagagaaaacaagttggagaaaacaaaaggctgccacctgtatgctattaacactcaccacagcagagagctgaggattgtggttgcaattcggaataaactgcttctgatcacaagaaaacacaacaagccaagcggggtcaccagcacctcattgttatctcccctgtctgagtcacctgttgaagaattccagtacatcagggagatctgtctgtctgactctcccatggtgatgaccttagtggatgggccagctgaagagagtgacaatctcatctgtgtggcttatcgacaccaatttgatgtggtgaatgagagcacaggagaagccttcaggctgcaccacgtggaggccaacagggttaattttgttgcagctattgatgtgtacgaagatggagaagctggtttgctgttgtgttacaactacagttgcatctataaaaaggtttgcccctttaatggtggctcttttttggttcaaccttctgcgtcagatttccagttctgttggaaccaggctccctatgcaattgtctgtgctttcccgtatctcctggccttcaccaccgactccatggagatccgcctggtggtgaacgggaacctggtccacactgcagtcgtgccgcagctgcagctggtggcctccaggtcggatatatacttcacagcaactgcagctgtgaatgaggtctcatctggaggcagctccaagggggccagtgcccgaaattctcctcagacacccccgggccgagatactccagtatttccttcttccctgggggaaggtgaaattcaatcaaaaaatctgtacaagattccacttagaaacctcgtgggcagaagcatcgaacgacctctgaagtcacccttagtctccaaggtcatcaccccacccactcccatcagtgtgggccttgctgccattccagtcacgcactccttgtccctgtctcgcatggagatcaaagaaatagcaagcaggacccgcagggaactactgggcctctcggatgaaggtggacccaagtcagaaggagcgccaaaggccaaatcaaaaccccggaagcggttagaagaaagccaaggaggccccaagccaggggcagtgaggtcatctagcagtgacaggatcccatcaggctccttggaaagtgcttctacttccgaagccaaccctgaggggcactcagccagctctgaccaggaccctgtggcagacagagagggcagcccggtctccggcagcagccccttccagctcacggctttctccgatgaagacattatagacttgaagtaacagagttgaatctcatttgccatctttagttttcttatggaggtttatactctttaaacagttctgatgtaatttctcaacaaaatgtggcttttagcctgtcagtgatctattggaccaaaccttctgcacactcggccagttccctctccaatgtccggtgccatctttcctgacctttgtttctttctgttcaggaaccatcagtccccttgtaataaaggtggtagatttcattgaggttttagattgaaactttgaataaatcaaaaatactcattctta

SEQ ID NO: 11617 - DNA, 3218 bp, Homo sapiens
aagggctggacaccacctgcagtgtcctctaccatctgtggctggcaggatcagttgcattctcactgttctaaacctttcttttccagtccatcagaactacattggaaacgatgccgagaagagccctttcttcttgtccgtgaccctttctgaccaaaacaatcaacgtgtccctcaataccgtgcaattctttggagaaaaacaggtacccagaaaatatgccttccctacagtcccacaaaaactctttctgtgaagtccatcttaagtgccatgaatctggacaaatttgagaaaggccccagggaaatttttcatcctgaaatacaaaaggacttgctggttcttgaagaacaagagggctctgtgaatttcaagtttggggttctttttgccaaagatgggcagctcactgatgatgagatgttcagcaatgaaattggaagcgagccttttcaaaaatttttaaatcttctgggtgacacaatcactctaaagggctggacgggctaccgtggcggtctggataccaaaaatgataccacagggatacattcagtttatactgtgtaccaagggcatgagatcatgtttcatgtttccaccatgttgccatattccaaagagaacaaacagcaggtggaaaggaaacgccacattggaaacgatatcgtcaccattgtgttccaagaaggagaggaatcttctcctgcctttaagccttccatgatccgctcccactttacacatatttttgccttagtgagatacaatcaacaaaatgacaattacaggctgaaaatattttcagaagagagcgtaccactctttggccctcccttgccaactccaccagtgtttacagaccaccaggaattcagggactttttgctagtgaaattaattaatggtgaaaaagccactttggaaaccccaacatttgcccagaaacgtcggcgtaccctggatatgttgattagatctttacaccaggatttgatgccagatttgcataagaacatgcttaatagacgatcttttagtgatgtcttaccagagtcacccaagtcagcgcggaagaaagaggaggcccgccaggcggagtttgttagaatagggcaggcactaaaactgaaatccattgtgagaggggatgctccatcaagcttggcagcttcagggatctgtaaaaaagagccgtgggagccccagtgtttctgcagtaatttccctcatgaagccgtgtgtgcagatccctggggccaggccttgctggtttccactgatgctggcgtcttgctagtggatgatgaccttccatcagtgcccgtgtttgacagaactctgccagtgaagcaaatgcatgtgcttgagaccctggaccttctggttctcagagcagacaaaggaaaagatgctcgcctctttgtcttcaggctaagtgctctgcaaaagggccttgaggggaagcaggctgggaagagcaggtctgactgcagagaaaacaagttggagaaaacaaaaggctgccacctgtatgctattaacactcaccacagcagagagctgaggattgtggttgcaattcggaataaactgcttctgatcacaagaaaacacaacaagccaagcggggtcaccagcacctcattgttatctcccctgtctgagtcacctgttgaagaattccagtacatcagggagatctgtctgtctgactctcccatggtgatgaccttagtggatgggccagctgaagagagtgacaatctcatctgtgtggcttatcgacaccaatttgatgtggtgaatgagagcacaggagaagccttcaggctgcaccacgtggaggccaacagggttaattttgttgcagctattgatgtgtacgaagatggagaagctggtttgctgttgtgttacaactacagttgcatctataaaaaggtttgcccctttaatggtggctcttttttggttcaaccttctgcgtcagatttccagttctgttggaaccaggctccctatgcaattgtctgtgctttcccgtatctcctggccttcaccaccgactccatggagatccgcctggtggtgaacgggaacctggtccacactgcagtcgtgccgcagctgcagctggtggcctccaggtcggatatatacttcacagcaactgcagctgtgaatgaggtctcatctggaggcagctccaagggggccagtgcccgaaattctcctcagacacccccgggccgagatactccagtatttccttcttccctgggggaaggtgaaattcaatcaaaaaatctgtacaagattccacttagaaacctcgtgggcagaagcatcgaacgacctctgaagtcacccttagtctccaaggtcatcaccccacccactcccatcagtgtgggccttgctgccattccagtcacgcactccttgtccctgtctcgcatggagatcaaagaaatagcaagcaggacccgcagggaactactgggcctctcggatgaaggtggacccaagtcagaaggagcgccaaaggccaaatcaaaaccccggaagcggttagaagaaagccaaggaggccccaagccaggggcagtgaggtcatctagcagtgacaggatcccatcaggctccttggaaagtgcttctacttccgaagccaaccctgaggggcactcagccagctctgaccaggaccctgtggcagacagagagggcagcccggtctccggcagcagccccttccagctcacggctttctccgatgaagacattatagacttgaagtaacagagttgaatctcatttgccatctttagttttcttatggaggtttatactctttaaacagttctgatgtaatttctcaacaaaatgtggcttttagcctgtcagtgatctattggaccaaaccttctgcacactcggccagttccctctccaatgtccggtgccatctttcctgacctttgtttctttctgttcaggaaccatcagtccccttgtaataaaggtggtagatttcattgaggttttagattgaaactttgaataaatcaaaaatactcattcttatttactgcaaccttctcatattttatatacttagatggaaaattattttttcattacagttttgatttatgtcacataatgtgtttcttttataaagaaaagtcgttgctttttaacttta

SEQ ID NO: 11618 - DNA, 1292 bp, Homo sapiens
aacagtagtgggttttgaaagctaaaagaatagagtcatcaagcctagacattccccagcacatgcagtctttcactctatctggctttgcccgcaaaccccagaggcctctgctgtggttacctcatcgctttgaacacagcgcttttcataaattcttaccacatcactcatctttattgcacgcagttaagataaagcacagaattccccaagcagggcagctttttgcttttcttgtctagtcttttttcctgtgcagtcacgagtgcattttacctaatttacacatgaaaatgctcttagaaaacgcaaagccatcaggcaccctcaaatcagtgctcctggccagccctcccagtgggacattacagatcagtgtgtgacataacgtcttccttcatgctatgttaaggaacaagaaattactctcttgtaaataatgtgcacttttcttaaagttctgatgttctttttgaaatcacatttcaggtgaaattcaatcaaaaaatctgtacaagattccacttagaaacctcgtgggcagaagcatcgaacgacctctgaagtcacccttagtctccaaggtcatcaccccacccactcccatcagtgtgggccttgctgccattccagtcacgcactccttgtccctgtctcgcatggagatcaaagaaatagcaagcaggacccgcagggaactactgggcctctcggatgaaggtggacccaagtcagaaggagcgccaaaggccaaatcaaaaccccggaagcggttagaagaaagccaaggaggccccaagccaggggcagtgaggtcatctagcagtgacaggatcccatcaggctccttggaaagtgcttctacttccgaagccaaccctgaggggcactcagccagctctgaccaggaccctgtggcagacagagagggcagcccggtctccggcagcagccccttccagctcacggctttctccgatgaagacattatagacttgaagtaacagagttgaatctcatttgccatctttagttttcttatggaggtttatactctttaaacagttctgatgtaatttctcaacaaaatgtggcttttagcctgtcagtgatctattggaccaaaccttctgcacactcggccagttccctctccaatgtccggtgccatctttcctgacctttgtttctttctgttcaggaaccatcagtccccttgtaataaaggtggtagatttcattgaggttttagattgaaactttgaataaatcaaaaatactcattctta

SEQ ID NO: 11619 - DNA, 1002 bp, Homo sapiens
gggccagtggatgcaaggcctagaacaccaggcagcccggtaatgctctctcttcctttctagtcggatatatacttcacagcaactgcagctgtgaatgaggtctcatctggaggcagctccaagggggccagtgcccgaaattctcctcagacacccccgggccgagatactccagtatttccttcttccctgggggaaggtgaaattcaatcaaaaaatctgtacaagattccacttagaaacctcgtgggcagaagcatcgaacgacctctgaagtcacccttagtctccaaggtcatcaccccacccactcccatcagtgtgggccttgctgccattccagtcacgcactccttgtccctgtctcgcatggagatcaaagaaatagcaagcaggacccgcagggaactactgggcctctcggatgaaggtggacccaagtcagaaggagcgccaaaggccaaatcaaaaccccggaagcggttagaagaaagccaaggaggccccaagccaggggcagtgaggtcatctagcagtgacaggatcccatcaggctccttggaaagtgcttctacttccgaagccaaccctgaggggcactcagccagctctgaccaggaccctgtggcagacagagagggcagcccggtctccggcagcagccccttccagctcacggctttctccgatgaagacattatagacttgaagtaacagagttgaatctcatttgccatctttagttttcttatggaggtttatactctttaaacagttctgatgtaatttctcaacaaaatgtggcttttagcctgtcagtgatctattggaccaaaccttctgcacactcggccagttccctctccaatgtccggtgccatctttcctgacctttgtttctttctgttcaggaaccatcagtccccttgtaataaaggtggtagatttcattgaggttttagattgaaactttgaataaatcaaaaatactcattctta

SEQ ID NO: 11620 - DNA, 1701 bp, Homo sapiens
aagggctggacaccacctgcagtgtcctctaccatctgtggctggcaggatcagttgcattctcactgttctaaacctttcttttccagtccatcagaactacattggaaacgatgccgagaagagccctttcttcttgtccgtgaccctttctgaccaaaacaatcaacgtgtccctcaataccgtgcaattctttggagaaaaacaggtacccagaaaatatgccttccctacagtcccacaaaaactctttctgtgaagtccatcttaagtgccatgaatctggacaaatttgagaaaggccccagggaaatttttcatcctgaaatacaaaaggacttgctggttcttgaagaacaagagggctctgtgaatttcaagtttggggttctttttgccaaagatgggcagctcactgatgatgagatgttcagcaatgaaattggaagcgagccttttcaaaaatttttaaatcttctgggtgacacaatcactctaaagggctggacgggctaccgtggcggtctggataccaaaaatgataccacagggatacattcagtttatactgtgtaccaagggcatgagatcatgtttcatgtttccaccatgttgccatattccaaagagaacaaacagcaggtggaaaggaaacgccacattggaaacgatatcgtcaccattgtgttccaagaaggagaggaatcttctcctgcctttaagccttccatgatccgctcccactttacacatatttttgccttagtgagatacaatcaacaaaatgacaattacaggctgaaaatattttcagaagagagcgtaccactctttggccctcccttgccaactccaccagtgtttacagaccaccaggaattcagggactttttgctagtgaaattaattaatggtgaaaaagccactttggaaaccccaacatttgcccagaaacgtcggcgtaccctggatatgttgattagatctttacaccaggatttgatgccagatttgcataagaacatgcttaatagacgatcttttagtgatgtcttaccagagtcacccaagtcagcgcggaagaaagaggaggcccgccaggcggagtttgttagaatagggcaggcactaaaactgaaatccattgtgagaggggatgctccatcaagcttggcagcttcagggatctgtaaaaaagagccgtgggagccccagtgtttctgcagtaatttccctcatgaagccgtgtgtgcagatccctggggccaggccttgctggtttccactgatgctggcgtcttgctagtggatggttagtgagtagctgctcctacaaatgtctttttcatgtaacttgtagtacttctaagatgagtgaccaccaaccaactccctttgggccataaatgtgtgatctgcagagagtttagcgaagttttatttccttatgaaattaaacccttgtttccagggcaagcagaggaaatatactctgaaccaagcatgctggagggtgggccataggttctcttcccaaaatatatgatgggactgtggatatcaaatgacctgcaaaaagaatctccttttcagccaatacttattatcactccaacattttactttaaatcaacaaggatacattatttagaaccactgtctctgggacattccctctctcgaagtcttaaaaaaaaaaa

SEQ ID NO: 11621 - DNA, 2028 bp, Homo sapiens
aagggctggacaccacctgcagtgtcctctaccatctgtggctggcaggatcagttgcattctcactgttctaaacctttcttttccagtccatcagaactacattggaaacgatgccgagaagagccctttcttcttgtccgtgaccctttctgaccaaaacaatcaacgtgtccctcaataccgtgcaattctttggagaaaaacaggtacccagaaaatatgccttccctacagtcccacaaaaactctttctgtgaagtccatcttaagtgccatgaatctggacaaatttgagaaaggccccagggaaatttttcatcctgaaatacaaaaggacttgctggttcttgaagaacaagagggctctgtgaatttcaagtttggggttctttttgccaaagatgggcagctcactgatgatgagatgttcagcaatgaaattggaagcgagccttttcaaaaatttttaaatcttctgggtgacacaatcactctaaagggctggacgggctaccgtggcggtctggataccaaaaatgataccacagggatacattcagtttatactgtgtaccaagggcatgagatcatgtttcatgtttccaccatgttgccatattccaaagagaacaaacagcaggtggaaaggaaacgccacattggaaacgatatcgtcaccattgtgttccaagaaggagaggaatcttctcctgcctttaagccttccatgatccgctcccactttacacatatttttgccttagtgagatacaatcaacaaaatgacaattacaggctgaaaatattttcagaagagagcgtaccactctttggccctcccttgccaactccaccagtgtttacagaccaccaggaattcagggactttttgctagtgaaattaattaatggtgaaaaagccactttggaaaccccaacatttgcccagaaacgtcggcgtaccctggatatgttgattagatctttacaccaggatttgatgccagatttgcataagaacatgcttaatagacgatcttttagtgatgtcttaccagagtcacccaagtcagcgcggaagaaagaggaggcccgccaggcggagtttgttagaatagggcaggcactaaaactgaaatccattgtgagaggggatgctccatcaagcttggcagcttcagggatctgtaaaaaagagccgtgggagccccagtgtttctgcagtaatttccctcatgaagccgtgtgtgcagatccctggggccaggccttgctggtttccactgatgctggcgtcttgctagtggatgatgaccttccatcagtgcccgtgtttgacagaactctgccagtgaagcaaatgcatgtgcttgagaccctggaccttctggttctcagagcagacaaaggaaaagatgctcgcctctttgtcttcaggctaagtgctctgcaaaagggccttgaggggaagcaggctgggaagagcaggtctgactgcagagaaaacaagttggagaaaacaaaaggctgccacctgtatgctattaacactcaccacagcagagagctgaggattgtggttgcaattcggaataaactgcttctgatcacaagaaaacacaacaagccaagcggggtcaccagcacctcattgttatctcccctgtctgagtcacctgttgaagaattccagtacatcagggagatctgtctgtctgactctcccatggtgatgaccttagtggatgggccagctgaagagagtgacaatctcatctgtgtggcttatcgacaccaatttgatgtggtgaatgagagcacaggagaagccttcaggctgcaccacgtggaggccaacagggttaattttgttgcagctattgatgtgtacgaagatggagaagctggtttgctgttgtgttacaactcttcccagcagcaagcaccagccttccacggcaacacggtatcttcgtgcagctttcctgtttacactactgcttttttattaaatggtgttcagtt

SEQ ID NO: 11622 - DNA, 426 bp, Homo sapiens
ttagaccagccaaactgtagggcacacatcagctgaaggcagacacatgagtcagcctggtctctattgcctgagcctgagggcaccagcagaacattccagcatatcattagactactgaaccataataaatgttatttgtttaggctcccaaatttgggggtggtttgttacacaacacaaatcgatacaggagtgaaggaaagaaaattaagaaattcatgagcatttagggaaaggctcttcatgaactgtcacaacaaagtgctagtaaactttaggctcttatttagacttataataatttaatgtgaattatcatgtaaaagtagaaaagctaaaagaataggaaagaaaatagagaagagaaaaggaaaggggaaaaaagaacaaacgagaggaaaggagaggagaaaagaaaaaagg

SEQ ID NO: 11623 - DNA, 503 bp, Homo sapiens
tgaggtagatgcagcaatattcctggggtaagattctataatactcctgtattggcaagtggactggaccaacagacacaggcctcagccactgtcgctagggactgaaggagagttcatggattcttaccccctagtcatgaaagctattctggccagccttgaatccatttaattttgcccacgagaacctttcatgacaattaacaagacactagtttccccataaaagtccatttttaaatatatagtatgctaattagcagtgtctgttgaattgccctatcggatagcagccaccatgtgtgctgaccactcacgattcagacttaccttggaaaatatcacactgacgatacagtactttagaataaattgcatattgtatcaggctccgagactaatttgtactgaacccttgatatagattaccttttataacatcaccacctgtcatgaagcttatctgttttctgatttgaataaactttgtgttgtgcacc

SEQ ID NO: 11624 - DNA, 499 bp, Homo sapiens
aatattgggcaataaaataatctctagtgaaaacaaacaggccagatgtggtggctcatgcctgtaatcacaacactttgggaggccgaggtggccagatcatttgagatcaggagttcgagaccagcctggccaacatggtgagaccttgtctctactaaaaatacaaaaataagctagacattgtggcaggcacctgtaatctcagctacttgaggggctgaggcaggagaattgcttgaacctgggaggcgaaggctacagtgagctgagatcacaccactgcactctagcgtgggaaataaaccgagattcatgtcaacacaaacaaacagaaaaaaaatacaagataattattttgtaactcaagaaaaattttaaattctgactcaaaacccaaaaagtataatgaaaaggttgataaattcaatcacattaaaaaacaaataacttctgcatagaaagaaaacattaattaaagagaaaagacaaactgtga

SEQ ID NO: 11625 - DNA, 498 bp, Homo sapiens
  misc_feature (17)..(17): n is a, c, g, or t
  misc_feature (253)..(253): n is a, c, g, or t
  misc_feature (285)..(285): n is a, c, g, or t
  misc_feature (396)..(396): n is a, c, g, or t
gctttacatccccagangttctagagagagatggcaaggctggagaaagaaaaaatgtgttttttttctgtctgtatcctaatgacaagctacatgcaaaaggctgaagttgtgccttcatatacaaaaattaattcaaaatggatcagagacctaaagttaagagctaagattgtaaacaacttttttttttttttttttttttgagacagagtcttgctccatcgcccaggctggagtgcagtggcacgantctccgctcactgcaacctccgcctcccgggnttcccgccattctcctgcctcagcctcccgagtagctgggactacaggcacccgccaccacgcctggctaattttttgtatttttagtagagacggggtttcaccatgttnagccaggatggtctcaatctcctgacctcgtgatccgcccacctcggcctcccaaagttctggggcgtgatccactgtgccaggccaattgtaaacttctta

SEQ ID NO: 11626 - DNA, 296 bp, Homo sapiens
gtagagaaaggagaagagtaggaaataatatcagaaaggtaacaaggtggaggacacatcatgtagggcctagtaaggtcattttaagaactatgagtggggccaggtggagcactctgggaggctgaggtggggggattgcttgaggccaggagttcaagaccggcctggacaatatagtgagagtctgtcagcacaaaaaataaattagctaggcctggtgatgcatacttatagtgctagctacttgggaggctgaggtgagaggttctcttgagcccaggagttcaaggtta

SEQ ID NO: 11627 - DNA, 352 bp, Homo sapiens
ctacatgaatgttaacacggccctacagtattttcttttgagcttgatgtatttaaaaattgaatgaactaccatacagaagcagttttagaaaggaaacaaggaggccaaagtgggaagatggcttgagtccaggagttcgagaccagccagggcaacatggcaagactgtgtctctaccaacaaaacaaaacacacaaaaaattgctgagagtggtggtgtgtacctgtagtcctagctactcaggaggctgaggcagaagaatcacttaagcccagcagtttgagcctgtagcgagccatggttgtgccactgcactccagcccaggtgacaaagtgagactatctcaa

SEQ ID NO: 11628 - DNA, 350 bp, Homo sapiens
cacagtatctgctcccaaggtaacagctgggaacataagggtgatgtgttagtctgtctttgttgccataaaggaatacctaaggctgggtaatttataaagaaaagagatttaattggcacacagttctgcaggctgcagaagcagcatggtgctagcatctgcttctggtgaggtcctcaggaagcttacaatcatggcagaaggtgaactggtggccagtgcatgacatggcgagacaaggagcaaggttggggaggtgccaccctcttttaaaacaaccagatcctgtgtgaactcactgagcaagaattcactcatcagtaaaaggacagtgctaagccattcat

SEQ ID NO: 11629 - DNA, 1410 bp, Homo sapiens
cacatttcattgtaaacgactgggagtatctgagcaaattatttcttacgtgactttagagaaaacggctacctatctgaccccaaaacgacttgaggaaactgtttccacggtcctgctgcagaggggaagcacagtcgtcaagaagagagtggggtcaggatcaaaacacatttagtgtgacttagggaaagaaaacattttccctctttgaacctctctggatacagtcattttgcctctacttgaggatcaactgttcaacctcaatggcctttcaggacctcctgggtcacgctggtgacctgtggagattccagatccttcagactgtttttctctcaatctttgctgttgctacataccttcattttatgctgggagaacttcactgcattcatacctggccatcgctgctgggtccacatcctggacaatgacactgtctctgacaatgacactggggccctcagccaagatgcactcttgagaatctccatcccactggactcaaacatgaggccagagaagtgtcgtcgctttgttcatcctcagtggcagctccttcacctgaatgggaccttccccaacacaagtgacgcagacatggagccctgtgtggatggctgggtgtatgacagaatctccttctcatccaccatcgtgactgagtgggatctggtatgtgactctcaatcactgacttcagtggctaaatttgtattcatggctggaatgatggtgggaggcatcctaggcggtcatttatcagacaggtttgggagaaggttcgtgctcagatggtgttacctccaggttgccattgttggcacctgtgcagccttggctcccaccttcctcatttactgctcactacgcttcttgtctgggattgctgcaatgagcctcataacaaatactattatgttaatagccgagtgggcaacacacagattccaggccatgggaattacattgggaatgtgcccttctggtattgcatttatgaccctggcaggcctggcttttgccattcgagactggcatatcctccagctggtggtgtctgtaccatactttgtgatctttctgacctcaagattttgaaatccaccatgaaaaaagaactggaggcagcacaaaaaaaaaaaccttctctgtgtgaaatgctccacatgcccaacatatgtaaaaggatctccctcctgtcctttacgagatttgcaaactttatggcctattttggccttaatctccatgtccagcatctggggaacaatgttttcctgttgcagactctctttggtgcagtcatcctcctggccaactgtgttgcaccttgggcactgggggtcagggagagtctccagcagggggagggtgaattgtttgggactatttgttcttcag

SEQ ID NO: 11630 - DNA, 1534 bp, Homo sapiens
cacatttcattgtaaacgactgggagtatctgagcaaattatttcttacgtgactttagagaaaacggctacctatctgaccccaaaacgacttgaggaaactgtttccacggtcctgctgcagaggggaagcacagtcgtcaagaagagagtggggtcaggatcaaaacacatttagtgtgacttagggaaagaaaacattttccctctttgaacctctctggatacagtcattttgcctctacttgaggatcaactgttcaacctcaatggcctttcaggacctcctgggtcacgctggtgacctgtggagattccagatccttcagactgtttttctctcaatctttgctgttgctacataccttcattttatgctgggagaacttcactgcattcatacctggccatcgctgctgggtccacatcctggacaatgacactgtctctgacaatgacactggggccctcagccaagatgcactcttgagaatctccatcccactggactcaaacatgaggccagagaagtgtcgtcgctttgttcatcctcagtggcagctccttcacctgaatgggaccttccccaacacaagtgacgcagacatggagccctgtgtggatggctgggtgtatgacagaatctccttctcatccaccatcgtgactgagtgggatctggtatgtgactctcaatcactgacttcagtggctaaatttgtattcatggctggaatgatggtgggaggcatcctaggcggtcatttatcagacaggtttgggagaaggttcgtgctcagatggtgttacctccaggttgccattgttggcacctgtgcagccttggctcccaccttcctcatttactgctcactacgcttcttgtctgggattgctgcaatgagcctcataacaaatactattatgttaatagccgagtgggcaacacacagattccaggccatgggaattacattgggaatgtgcccttctggtattgcatttatgaccctggcaggcctggcttttgccattcgagactggcatatcctccagctggtggtgtctgtaccatactttgtgatctttctgacctcaagttggctgctagagtctgctcggtggctcattatcaacaataaaccagaggaaggcttaaaggaacttagaaaagctgcacacaggagtggaatgaagaatgccagagacaccctaaccctggagattttgaaatccaccatgaaaaaagaactggaggcagcacaaaaaaaaaaaccttctctgtgtgaaatgctccacatgcccaacatatgtaaaaggatctccctcctgtcctttacgagatttgcaaactttatggcctattttggccttaatctccatgtccagcatctggggaacaatgttttcctgttgcagactctctttggtgcagtcatcctcctggccaactgtgttgcaccttgggcactgggggtcagggagagtctccagcagggggagggtgaattgtttgggactatttgttcttcag

SEQ ID NO: 11631 - DNA, 1255 bp, Homo sapiens
cacatttcattgtaaacgactgggagtatctgagcaaattatttcttacgtgactttagagaaaacggctacctatctgaccccaaaacgacttgaggaaactgtttccacggtcctgctgcagaggggaagcacagtcgtcaagaagagagtggggtcaggatcaaaacacatttagtgtgacttagggaaagaaaacattttccctctttgaacctctctggatacagtcattttgcctctacttgaggatcaactgttcaacctcaatggcctttcaggacctcctgggtcacgctggtgacctgtggagattccagatccttcagactgtttttctctcaatctttgctgttgctacataccttcattttatgctgggagaacttcactgcattcatacctggccatcgctgctgggtccacatcctggacaatgacactgtctctgacaatgacactggggccctcagccaagatgcactcttgagaatctccatcccactggactcaaacatgaggccagagaagtgtcgtcgctttgttcatcctcagtggcagctccttcacctgaatgggaccttccccaacacaagtgacgcagacatggagccctgtgtggatggctgggtgtatgacagaatctccttctcatccaccatcgtgactgagtgggatctggtatgtgactctcaatcactgacttcagtggctaaatttgtattcatggctggaatgatggtgggaggcatcctaggcggtcatttatcagacagtagccgagtgggcaacacacagattccaggccatgggaattacattgggaatgtgcccttctggtattgcatttatgaccctggcaggcctggcttttgccattcgagactggcatatcctccagctggtggtgtctgtaccatactttgtgatctttctgacctcaagattttgaaatccaccatgaaaaaagaactggaggcagcacaaaaaaaaaaaccttctctgtgtgaaatgctccacatgcccaacatatgtaaaaggatctccctcctgtcctttacgagatttgcaaactttatggcctattttggccttaatctccatgtccagcatctggggaacaatgttttcctgttgcagactctctttggtgcagtcatcctcctggccaactgtgttgcaccttgggcactgggggtcagggagagtctccagcagggggagggtgaattgtttgggactatttgttcttcag

SEQ ID NO: 11632 - DNA, 546 bp, Homo sapiens
gattgagtccaacagactcaatcatacatgtcatacatgtttatgattaagagatattctttttgtgtgctagttgattttgccgagaaaaaatgaagaagaattcaagaatgagatgagggtaggtaagctctcagagcatttctgtctgccatttggttctatgcttatgtggctgctaatgtgactaattcagagtgttgtatttccacatctgtggactccaccatggaaaaggtgggctaccattggtccttatatggctttattagaaaaatagacattctatcgtttgtctgcccagtggccagagtcctggtgaacaacagagctcatgggaaaccagcctctctcagggcaccccgctatgaggatattgaaatatgttcaatcatttctcatctcccttggaatgtaattccctgccctatacaaaataggatattccaatgcgctatttgaatctagggattgaggatttgtagttgagttttggggtaaaggcttggctcattgccatggaagaataaaagttatttattaata

SEQ ID NO: 11633 - DNA, 500 bp, Homo sapiens
tataggtatccgaaaattacatagagtgcatggagcatactgaatacctcgctcttccttctgtgtctgcctccaggtgtcttcttcctgtagaagtccaaatgaaacaccttatttccaatcacagccacaacctgggggagaagaatcaaatcctccacagggattgtgatttctgcagatatgaataatccatgttcctaccagctgccaaaaaaacagcttttggaaacaagatgtactatttggcgcaaggttatagctacgtgacattttggcaagacaggcttttttatgaccacagaggaatttgaagaggcaggaacacaactgaaaaaaaatctcttccctttatggtatgtgaaggtgtggtttcaagcaaagaaatatggtagaagaagatggaggaaaatcataatgcaaggcaaatataaaaatggcacaaaacattagaaagtgctggaggatgccaaagttctgaatggaccaatgcttgaaaa

SEQ ID NO: 11634 - DNA, 204 bp, Homo sapiens
tgtagggagaagggactggcgatgctgtgttgaggcagatacgtggattctcagttccatcacctggagtatctaaaaggctaaggagtgggacatggcagcctgcacctgtgttccagctactcgggaggccaaagcaggaggatcatatgagccccggagtttgaggccagcccgggcaacttagtgagactttatctcaaa

SEQ ID NO: 11635 - DNA, 266 bp, Homo sapiens
ttaggagaaggtctctcctgtaagtgctcttgacacctctcggatgggaactgtattaactacaggagaaaaaaagtgggagattctaacattctgactttgctcagatatcttccttccctcaaagtacacatcctgagcacccactaatctggtcactgtgggactgggaactttcctctaatgagcttattatgtgaatcctgacacagagccaagagtcaagagtagccttcagctgccagaagacctgcaggttttcttta

SEQ ID NO: 11636 - DNA, 820 bp, Homo sapiens
gtcagtcccttcacccagaaatcagtagaatgttagcagttcagactcaaaccttgtgaaaaacaggtggtggaaaggaaatccctcacagcaactggcaccataatcaagacaatgtttacagaataaatggagttacctgctttcagccccaggtcgtagctattgtctgccctgctgatatgtgataataatttgtgatcctgttgtcttaaaatggggtcactcatctccagtagaattaagtccacagtgaagttgtccccccatccccaaagagataaacatatatgaatgaactcacgtgataacaactactgctgcctgggatcatgagagacctgaactgaactgataggatgtgaaaggtggctgagataatgagaatagacccatctgcagaggatcataaaaccagcaaagacaagatcttgtctaagatgccttcacaagctttgtccatgagaactcttaaggatttcaccagacctgttggctgctgctgtgatctctgcccaagaggagcctctgaccaacatccaaagggcttctggacccactggactcctctggaggtaccttggtctcccgatccatggctgtggttttttactccctttatcactgcctgtgtgtagaatgataattgcacaattgatagtgtgaagacctcttgataaatggtaaatctgagcatatgtatttggctgacatgtcattgtgaaacctcacagcttcagtcagtgtctctccaaggactaaacaatggaagactgtagaagatgctattcattaagatatcgcaagaatatggaagact

SEQ ID NO: 11637 - DNA, 447 bp, Homo sapiens
acttgaaaagactgggcgaaacaggtgccttttgttccagaccagttagtcgattggtgtggtttgtatgtggggttcctggagggtttacatgaatcctggtgattatccgcatacatatcccaggcctgagaagggcccagggtctcccagggataatggaatcagtctgctcatatttagtgcttcatgtggacatggtgtttccactgtttgggtatttagtcgtcatggtaaatgctgccacttccatttctgatgctttcgtaatgttaggatcactcagtattagtgccaggagggactcatgtttcatttagtctaactctcatgctaccaaataaagtcaacactggcactggaagaagtcatattattaggtgagcttctgaaattactgaagttattaagtcagtcaattgtttattaaaagaattggctaggagt

SEQ ID NO: 11638 - DNA, 461 bp, Homo sapiens
ctgcccgggctctctatccttgacaggctgccttgaagttgagcccagactgattttcttgcctcagaccccactaccgtgcctgggactcatgcacctttgactcccatggaagggaagtgcagtagtttcccaggtgcaattctggtgtcctcacccacattgaggatgtacaagaatcaggttcttagagattggagaaagaaggaagaatgggaacaagatttttcccaaaggactgtgaggtcccccacctaaccttgatgtgagacaagtgaggttaaccccaagcctggtgagaagcgttcccatcagacacttggaaatcctgaggactgtttcatgcagaaggatatggtttattcaggtttgactcgtgcttgagaaagctagagcctctggtggtgaatgattttaataactatttcctttccaccaacatatacagtacaaataataat

SEQ ID NO: 11639 - DNA, 283 bp, Homo sapiens
ctccgctgtgcagagggcggtgaagccaggagacggacagcacagctccctcgggctttgactctactcgaagctttgaaaaaaactattttgagccaaacacgttcatctctcctgattttaatatagaagcaaaagacttcaaagagctcttgttggggcattgctgatggcttcacttccggcaccccagggacgtgaatcccccgccttctggggaaaggttgagaaacatctagaattcagctctccagggaaggtggatttaccttagagtttgggg

SEQ ID NO: 11640 - DNA, 366 bp, Homo sapiens
gcccgccttggcctcccaaagtgctgcgattacaggcgtgagctaccacgcctggcccctggcccatcattttacaatttttaaacattttatagaaataattttaagtttacaaagcagcaaaaataaaatagtatgaagaacacttatataacttttgcctagattcacctgttgttaacattttatcccatttgttttagcatttgtactcttatctaaataaaattgtaaatgtgtatatatacacgttgtttacatacctgtctatagtgtgtacatatacatacattatttataagctatataatgcacacatataatcacaacatttaatatatattatgtattgatacagtacttgaa

SEQ ID NO: 11641 - DNA, 354 bp, Homo sapiens
ctcctgcaaagcaaggatgcagttcatttccagccctgagctgcactcaggagctgggcctcatgcccagtccccatccttagggcagtgcccgccctcaggctgacagcctttcctttccttgctccagtcgcttgggtgtgagtcctgcttctcccattttctctgtgctgggacctcaaggcaagccgactgcaagcccacctggcccaggccactgcagggccacccttcgcagggccaggctgtgaagcagttggaggcgaggcccggggctccaggctactgtgttgagattaatcttaccaactagaactttaaaaattgtgtttccagcctttatttgaaagtggg

SEQ ID NO: 11642 - DNA, 556 bp, Homo sapiens
ttgggaggcctggagagggaacgattggctaattgtgccgaattcccggtcgtttgtgcagtccggggagcgtgcgtgcagccaggacttggcttgttcgatctggggaccggcagcgacaggcacaacaacaacaaccgagtttggcacttccttcccagtataaataatgtacctaaaatggctgacatcattacaagcctaaacctctgttgtttcccactttcgtttctaggcttgaacagcacttggactaagtccagcaactgtaagcgtcttaattttaaaagcgtttctttacctcctttttccacggcccttcggtagtggcaggtgaacttcacctggagaggggacgaagggacagtccgcccgaagtaggtttgggctgtctcttaccattactagtaaaggccagtaatgactatgtggatgttagtgaaaaaccaattgttggcatttaaattgtatcagcgtctttgtgaggactcctgctgcgtgaaactaaacatgagaaatttgcccccgggtccctaataaaattctcctttatttt

SEQ ID NO: 11643 - DNA, 269 bp, Homo sapiens
tcctctgctctctgttcctggaaactacgagtccaactgccaaccccaggtggccccaagttgtggtgaaaagaacaggccttaaaggaaattgtttcagttcagccacttactagcccttcaatttaggggaaattaagaaatctctctgggtcgggcgtggtggctcacgcctgtaaccccagcactttgggaggccaatgtgggtggagagcttgaggttaggagtttgaaaccagcctggccaacatggtgaaactctgtctcta

SEQ ID NO: 11644 - DNA, 628 bp, Homo sapiens
  misc_feature (42)..(42): n is a, c, g, or t
  misc_feature (137)..(137): n is a, c, g, or t
ctgtgttatcaacaatcaaatataaaattattgcatcatatnacacttcaacttaaatactcatgtcaatagtagtttgaaagaataacatttcgcattttgtacttttttccgtgaatatcagtgaaaacggagtnactcgttttgttgtttttttaacttcctaataactttgacagttgggtaaatttaagtaaaccacacactgacctagggaatacaggactttctaaaatcaggcaccctaatcggccaacccaaaaaaaaggacaaaaagcttttctcagtagttcccacgaggacatttttaatttataatttgatattgaaattacaattatacaaactataattggaatgaaataagcagatacattcctattctaaattccttgattcacttaaaatgcatctactgcagtcctaatctatgcataactcttcattaggtgatacttatggcaagacctaagtgtgaccactctcaaattttagtgagtttctaataaattctgttctgaaggcacatgtctctgtcttaaatagactctgctctgggaatgagtggtagaaccaagtaagagttcccagagggacagtgttcccagagaaaagaattaaaaccatg

SEQ ID NO: 11645 - DNA, 890 bp, Homo sapiens
ggccagagttgcatttttcacatgagcaaaagttacatgcagaaaaagaacagaagttcgttgattgtaggatatgtaaccttgagaactttatcttatagccaacggtcacacattctgaaatgtcttaagtgatctggtcagtgctaaaggtagtaagaaaatctggttgctgaaaatttacactatctaatttcagttattcccccacaacagagtaacaggcaagcacattctcagcagccgttccaggcagagtatacacagaaatacttgttgaatttaattgggttgaataaaaatttgtccttttgaggaacaaagttagcatctcaaatacaaggtctgcaaatgatgtaggttcttcttagttggctaatgaactcctgactagttacagatgaaagggattaaaatgactttactgagcactcactttagtctgtttcattatctgaactaaggaagtctaagacaattaggattccttaaaaaaaactttcatcattgcacttcctgtttgatgagtaaacagcaaactcgttatggtctgcaaggtaccctattaaaacccgtaacatcccctggaaggaagtaacttggagaaagtcaagaaatctttctgacaggacaccgcaactccaaacaatcaacaactcattgtcatagtgcgacaatcttagccctgttgcaactgggcaaatagtccatttgcagagagaagcatcatcggggtagacaggaatgctgttattaaccattataagtatgacgcgaaggtcgtacatcaggctattacaccttttcattatacgctaacccctcacggcagggaagccacgcttatgactgcattagacagacaaagccttcagctctttaaaaaaagg

SEQ ID NO: 11646 - DNA, 712 bp, Homo sapiens
cctcatgtttgagtcagtgattataatagaagaatagtaaagctgtttatttattgtgtgtttaccgtgtgttctaattgttttgcatgtatcaactaattgaatcctcagaacaaccctgtgagtttggtactggtactgtctcaggggtagagctaccctcattagacagttaggacttgaacttagattctctgattgcaaaatttgtattaattctgccctactactactgtgttattcctgtcctgcatgggagaatatatagttcataacaagatcaaaatggctttttgtgtgtgtgtgtgtgtctaactagtatccagagagaaccttctgtagtgtataaaatgtggcaatcggggccaggcgcagtatccagaaagaaccttctgtagtgtataagatgtggcaatcagggctggagcggtgcctcacacctgtaatcccagcactctgggaggccgaggctgggggataagttgagagcaggagttcaagaccagcctggccaacatgatgaaacccccgtctctactaaaaatacaaaaaaattagccgggtgttgggacgtgcacctgtagtcccagcttcttgggaggctgaggcaggagaattgcttgaacctgggaactggaggatgcagtgagctgagaacgcaccactgcactctagcctgggtgacagagctagactccatctcaaaaaaaag

SEQ ID NO: 11647 - DNA, 701 bp, Homo sapiens
caatttccaggacactttattgtaatttccactttacatattaatttaatattttagtctaggcagaaatgtttatacttatacaacagtagtccaatcctctaatctcacaaaatgaaaaggagcagttttaaaagaacatcaattcaggtatttatgatatgggggacaaggggcacttgtcttagctggaaaaggggctgatgcctttcagtacgagtttcactgaaattttttctgtattatttttcttgttgatgctaagtactcaaataaaagcaattgcactttttctcattctgccctctcttggtctttacattctgtctagcatttaacgcaaaaagtcagtttacattcagttaacacataaaaaaaaaaaaaccatatgccccacctcccacacatccaaatggacagggattagaattaacctggcttttagctgtaacagtgctattttaaaatttttcaaccacacacttgaagggtaaaataatttaagatacaaaaccaaaggaaaccataacaattcctacacatttactatttaactgttctcaaatcatcaagtataacatggatttcttaaaaagtgaaatcgacacaaaagcgaatgcacgcttaatgtacaaactgaccgtggctctgtggggacagttctctttgaatgagctattatccagacggtggaatggaaa

SEQ ID NO: 11648 - DNA, 978 bp, Homo sapiens
attttgttctgtactaagaaaaattcttctgccttgggatgctattaatctataaccttacccccaaccccctgctctctgaaacatgtgctgtgtcaactcagggttaaatagattaagggcagtgcaagatgtgctttgttaaacagatgcttgatgacagcatgctccttaagagtcatcaccactccctaatctcaagtacccagggacacaaacagggcgaaggccgcagggacctctgcctaggaaaaccagagacctttgttctcgtgtttatctgctgaccttctctccactattatcctatgatcctgccacatccccctctctgagaaacacccaagaatgatcaataaatactaaaaaaaaaataaaataaaataatcatacaaggaccctaagataataaattctaaaacaggatttgaatccagccattctttttaaaaaaaaaaatacatatatttttaagatgaagtctcgcaatgtttcacaagctggtctcaaactcctgagttcaagtgatctgcctcccaaagtgctgggattacagggttgtgccactgtgccccgccagaatccaagcattctgactccagagcccaaagccataatgtcactctgcctttcagcactacacatccaaaatgactatcttctctcttctgaattccccttgcattttacctgtttaatagagtaaaaaggatgtaatatgtaggtatgtataggaatgtatacatatgtatgtaacatgtatgtgtctttcctagactctaagcctcttgagatcaaggtccacccacatgagattcatctttgtatctgctaggtatccagcatagtagatactggatcaaatgtttactgaatagatgaagctacatatcagtcttaagatttatttttgaaataaaagtagtttcttatagaaaaaaataaaaataaaaaaataaaattgcccaaatgattttt

SEQ ID NO: 11649 - DNA, 519 bp, Homo sapiens
tttttcactaagccttgaaaatttattttcaaagtgggttgaattttaggtcatttgtgcgggtatatctaatgaagagaaaaacaaagtgatggagaaggaatttctaataagatcttagtattcattagaaatataacctcttgctttcataattaataggatctgaagttaatttaataaaaatttgacttatatactaaaacaggcaagatttgaacctggctttattaagtttttattttagtttacatgtttgtttcaaacaagattaaaaattaagaattaaaaattgatgtttgtctggatttttacaaccaattattagatctatggcaggtatccagccatttaaaaataacagtgtaaagcaaagcctctaattttaaagaagaaaaggaatccgaaagagggatggctatagcaaccttgatgataaaggaaaatttgtgcagaaaagcctgcagtaaacagattttcttagacttaaggcatgtccttagtttatcatactcagaa

SEQ ID NO: 11650 - DNA, 504 bp, Homo sapiens
gtaaacaacagtaacaacaatgacaacaaagcctatggttatgtctataatcttttggtgcaaaaccttcttgtcttgtctttttctgcttatcaccaccctctttcttattttcaccaatctggagatgcatatacaaaaacattttaaaatccactttttggccaggtgcaatggctcatgcctgtaatcccaacactttgagaggccgaggcgggaggaatgcttgagcccaggagttcaagaccagtctgggcaacatagggaaaccctgtctctgcaaaaataaaaaaattagctgggcatggtggcacatgcttgtggtctgagctactgaccactgagctactgaagtgggaggattgcttggacctaggaggttgaggctgcagtgagctgagatcatgccattgcactccagcctgggtaacagagcaagaccctgtcacactcacacacacacacacacacacacactccacttcgtttctaatcatggtgtat

SEQ ID NO: 11651 - DNA, 348 bp, Homo sapiens
attctgagtttaaatgaaaggaagtccttttctaacatagttagaaaagagttctcttactcaacctctcactcttatctgaagtctcttttcaatattgttttgacttgtaatttattgtaagtttaagcaggtctcaaccattcagttatacctcttttcaagggataagattctgagtttaaatgaaaggaagtccttttctaacatagttagaaaagagttctcttactcaacctctcactcttatctgaagtctcttttcaatattgttttgacttgtaatttattgtaagtttaagcaggtcacaaagatttgaaaaaaaaaaatctgtattaaaaaaattc

SEQ ID NO: 11652 - DNA, 427 bp, Homo sapiens
acgctctgctgagggtatttcattgcataagcctagcctgattgcctgaaatctggcacgtaccctcttggagggggaggggtgagaggggaggaaaaggcttgaatgttggcatgcttcaaagcgctctctatactttccagaagctgatctaaggtaagacctggcttgtttgatgctgtccctcttcctttcctcttaagactctacctcttcacttcttgacttctctacctaagagaatacacagaaaagctccctcttcagactgattttcagaaccatagccctcaagtctgacaaatccagggcggattcagagaaaaccctatacatcccacccccaaccctgctgcctgtctccctcctggctctgtagggctccattcagtcgtccctgcagcccgtagccagagagcccctagaa

SEQ ID NO: 11653 - DNA, 547 bp, Homo sapiens
ctttttacatctagatacactttctaattttaagaatttacatctagataattttagcaaactacatctagctacactttctaattttaacatttttatttaacagtaaaatattcccaaggttaaaaacctttatttgctttcggagacaaaaaaacaaaaactatcttctaagaggttggagtttatcaatttacagtttaaaataaagttaaaattcggaacacagctcattcatttaattaacacatactttggttgtttttcactatgagcctttcagtcctactactgttggtctttttaatccatatgcagacattactctaacatttttaaaagccaatttttcaaattagttgcccacattgaaagatcagaagatcttacatgataatccagctttttttttgcacctcgagggacaaaaaatcatgcttagaaaacgagaaaaaaacagaccacgcatgacttttatttataaacagtacgccgtgctatttaaaaccaagggattaaggactcctaggactaagacactagttcc

SEQ ID NO: 11654 - DNA, 261 bp, Homo sapiens
cattgatgagcatttaggttgagtccatgcctttgttattgtaaatagtgatgcgatgcaatacacgtgcatgtgtctttataataaaatgacttatactccttttggtatatgccagtaatgggattgctgggtcaaatggcatttctgtctttaggtcactgaggaatcgccacagtcttccacaatgaatagaccccttttaataatgaataggacaattagacagaagttataactggcagaagatcaacaaggaaa

SEQ ID NO: 11655 - DNA, 356 bp, Homo sapiens
aaaagatttttttttttttttgagatgaagtcttgttctgtcacccaggctggagtgcagtggtgcaatcttggatcactacagcctctgcctcccggattcaagcgattctcctgcctcagcctcctgagtagctggggttacagacacatgccaccatgcccagctaatttttatatttttagtagagacggggtttcaccatattggccaggctggtgttgaactcctgatctcaagtgatccgcctgcctcagcctcccaaagtgctgggattataggcatgagccactgcgcccatgcctataggattttttaaacagtgcggcatagagtacctaccacaaatggagttt

SEQ ID NO: 11656 - DNA, 373 bp, Homo sapiens
ttaaaattctgagaaagattgtgtagaattgatagtaattctctcacgagtgattgatagaattcatctgtgaaatcatccagatctggggttttgtttgcaggaaggcttgtaactacaaatttaatttttataatagatataggactatttagattggctatttattcttaagctttggtagtttatgtcactcaatgaatttgtctttttaatataagttgtcaaattcataggtataaagttgttcacaagaataacttatctcttcatagtgtctgcagatctatagtcatgacttttatttgtattagtggtaatttatattggttctctttgcctccctccagccgctccagctgtcccacacctc

SEQ ID NO: 11657 - DNA, 237 bp, Homo sapiens
agttgctctgatttgcattataatgttttttctttaactcctgggagcagggactatgtttcccattttttgaaacagaaatcatagtactaagatgaggtaggtacactatgaatccttgttcaatggaattaatttaaaatttaaaaaaaggttgaagagccatatccctttcataggaatgacagttcagaaattggggaaaaatttagaaggattaaaagtgagtgaatttct

SEQ ID NO: 11658 - DNA, 1485 bp, Homo sapiens
tccctgggactgcgtcactggtgcgcgccgcgggtcagggcgcaatggcggcgctgggcggggatgggctgcgactgctgtcggtgtcgcggccggagcggccgcccgagtcggcggcgctgggcggcctgggccccgggctgtgctgctgggtgtcagtgttctcctgcctcagcctcgcctgctcctacgtgggcagcctctacgtctggaagagcgaactgcccagggaccatcccgcggtcatcaagcgacgcttcaccagcgtcctggtggtgtccagtctctcacccctgtgcgtgctgctctggagggaactcacaggcatccagccaggcacatccctgctcaccctgatgggcttcaggctggagggcattttcccagcggcgctgctgcccctgttgctgaccatgattcttttcctgggcccactgatgcagctctctatggattgcccttgtgacctggcagatgggctgaaggttgtcctggccccccgctcctgggcccgctgcctcacagacatgcgttggctgcggaaccaagtgatcgccccgctgacagaggagctggtgttccgggcctgtatgctgcccatgttagcaccgtgcatgggcctgggccctgctgtgttcacctgcccgctcttttttggagttgcccattttcaccatattattgagcagctgcgtttccgccagagcagcgtggggaacatcttcttgtctgctgcgttccagttctcctacacagctgtcttcggtgcctacactgctttcctcttcatccgcacaggacacctgattgggccggttctctgccattccttctgcaattacatgggtttcccagctgtttgcgcggccttggagcacccacagaggcggcccctgctggcaggctatgccctgggtgtgggactcttcctgcttctgctccagcccctcacggaccccaagctctacggcagccttcccctttgtgtgcttttggagcgggcaggggactcagaggctcccctgtgctcctgacctatgctcctggatacgctatgaactctcaccggctccccagccctccccaccaaggggtactgcaggggaagggctggctggggtccccgagatctcaggaatttttgtaggggattgaagccagagctagttgcgtcccagggaccaagagaaagaagcagatatccaaagggtgcagccccttttgaaaggggtgtttacgagcagctgtgagtgaggggacaaggggcaggtcccaggagccacacactcccttcctcactttggactgctgcttctcttagctcctctgcctctgaaaagctgctcggggttttttatttataaaacctctccccaccccccaccccccaacttcctgggttttctcattgtctttttgcatcagtactttgtattgggatattaaagagatttaacttgggtaacatggacttgggcctttggg

SEQ ID NO: 11659 - DNA, 561 bp, Homo sapiens
tccctgggactgcgtcactggtgcgcgccgcgggtcagggcgcaatggcggcgctgggcggggatgggctgcgactgctgtcggtgtcgcggccggagcggccgcccgagtcggcggcgctgggcggcctgggccccgggctgtgctgctgggtgtcagtgttctcctgcctcagcctcgcctgctcctacgtgggcagcctctacgtctggaagagcgaactgcccagggaccatcccgcggtcatcaagcgacgcttcaccagcgtcctggtggtgtccagtctctcacccctgtgcgtgctgctctggagggaactcacaggcatccagccaggcacatccctgctcaccctgatgggcttcaggctggagggcattttcccagcggcgctgctgcccctgttgctgaccatgattcttttcctgggcccactgatgcagctctctatggattgcccttgtgacctggcagatgggctgaaggttgtcctgggtcatctcaagacattgggtttatgttgggtccacacccccgtcctcagcagtattgatgcctaac

SEQ ID NO: 11660 - DNA, 1354 bp, Homo sapiens
tccctgggactgcgtcactggtgcgcgccgcgggtcagggcgcaatggcggcgctgggcggggatgggctgcgactgctgtcggtgtcgcggccggagcggccgcccgagtcggcggcgctgggcggcctgggccccgggctgtgctgctgggtgtcagtgttctcctgcctcagcctcgcctgctcctacgtgggcagcctctacgtctggaagagcgaactgcccagggaccatcccgcggtcatcaagcgacgcttcaccagcgtcctggtggtgtccagtctctcacccctgtgcgtgctgctctggagggaactcacaggcatccagccaggcacatccctgctcaccctgatgggcttcaggctggagggcattttcccagcggcgctgctgcccctgttgctgaccatgattcttttcctgggcccactgatgcagctctctatggattgcccttgtgacctggcagatgggctgaaggttgtcctggccccccgctcctgggcccgctgcctcacagacatgcgttggctgcggaaccaagtgatcgccccgctgacagaggagctggtgttccgggcctgtatgctgcccatgttagcaccgtgcatgggcctgggccctgctgtgttcacctgcccgctcttttttggagttgcccattttcaccatattattgagcagctgcgtttccgccagagcagcgtggggaacatcttcttgtctgctgcgttccagttctcctacacagctgtcttcggtgcctacactgctttcctcttcatccgcacaggacacctgattgggccggttctctgccattccttctgcaattacatgggtttcccagctgtttgcgcggccttggagcacccacagaggcggcccctgctggcaggctatgccctgggtgtgggactcttcctgcttctgctccagcccctcacggaccccaagctctacggcagccttcccctttgtgtgcttttggagcgggcaggggactcagaggctcccctgtgctcctgacctatgctcctggatacgctatgaactctcaccggctccccagccctccccaccaaggggtactgcaggggaagggctggctggggtccccgagatctcaggaatttttgtaggggattgaagccagagctagttgcgtcccagggaccaagagaaagaagcagatatccaaaggctgctcggggttttttatttataaaacctctccccaccccccaccccccaacttcctgggttttctcattgtctttttgcatcagtactttgtattgggatattaaagagatttaacttgggtaacatggacttgggcctttggg

SEQ ID NO: 11661 - DNA, 1024 bp, Homo sapiens
gtcactcacagcttgtcctgaattccctctgcagccccccgctcctgggcccgctgcctcacagacatgcgttggctgcggaaccaagtgatcgccccgctgacagaggagctggtgttccgggcctgtatgctgcccatgttagcaccgtgcatgggcctgggccctgctgtgttcacctgcccgctcttttttggagttgcccattttcaccatattattgagcagctgcgtttccgccagagcagcgtggggaacatcttcttgtctgctgcgttccagttctcctacacagctgtcttcggtgcctacactgctttcctcttcatccgcacaggacacctgattgggccggttctctgccattccttctgcaattacatgggtttcccagctgtttgcgcggccttggagcacccacagaggcggcccctgctggcaggctatgccctgggtgtgggactcttcctgcttctgctccagcccctcacggaccccaagctctacggcagccttcccctttgtgtgcttttggagcgggcaggggactcagaggctcccctgtgctcctgacctatgctcctggatacgctatgaactctcaccggctccccagccctccccaccaaggggtactgcaggggaagggctggctggggtccccgagatctcaggaatttttgtaggggattgaagccagagctagttgcgtcccagggaccaagagaaagaagcagatatccaaagggtgcagccccttttgaaaggggtgtttacgagcagctgtgagtgaggggacaaggggcaggtcccaggagccacacactcccttcctcactttggactgctgcttctcttagctcctctgcctctgaaaagctgctcggggttttttatttataaaacctctccccaccccccaccccccaacttcctgggttttctcattgtctttttgcatcagtactttgtattgggatattaaagagatttaacttgggtaacatggacttgggcctttggg

SEQ ID NO: 11662 - DNA, 367 bp, Homo sapiens
gtctggccagattagtcctggtgtgttttcagcatgagagctcagaagggggcttgaggtgaggggcagtcctagaagggaggctgggaggaatgactgtgatgtgattgtcacctttttcccagcccattttcaccatattattgagcagctgcgtttccgccagagcagcgtggggaacatcttcttgtctgctggtgagtcctggctagctggcctgggttagggtgtatgatgatgtcgctaatggccactctggagaaggaattgggaactgagggccacagtattggagaggccactgaccgtgggaagttggggtgcaggacagctgtaggtggtggggcaggcagctactgcccccggg

SEQ ID NO: 11663 - DNA, 341 bp, Homo sapiens
cagggagcatgggcaaaggtctgggcaaaagcggtgggttatggtgaaagtgttttcttgccctcagattcttttcctgggcccactgatgcagctctctatggattgcccttgtgacctggcagatgggctgaaggttgtcctgggtgagtcttaaaggctgaagggaaaagtaggcacaggcagtccaggacattggggcagggagtcagcgggctcagggtgtgatctggacacgtgaaatgtcatctctctgggtgtgttttctcatcagtaaaatggaaacatagagctaggtggcctctaagggttgattgccaacgtccaaggagttccctggg

SEQ ID NO: 11664 - DNA, 1721 bp, Homo sapiens
actggttctgccgtcgctagaggcgtacaggcccttcccgaccgtagcgagggtgctgctgcgctgggggaaggaaaacgccgctttgactgtgccttgttctcacagctggcgggaagcaagcgccttttcgaaagccagaggctcgagttacccctcttaccaccgtcatggcagtcccaggttgcaacaaggacagtgtcagagcaggctgtaaaaaatgtggctaccctggtcacctgacttttgaatgccgcaattttctccgagtagaccctaaaagggacatagttttggatgtcagcagtacaagtagtgaagatagcgatgaagagaatgaagaactgaataaattgcaggcattacaggaaaaaagaataaatgaagaagaggaaaagaagaaagaaaaaagcaaagaaaaaatcaaattgaaaaaaaaaaggaaaaggtcttactcatccagttccactgaagaggacacttcaaaacaaaagaaacaaaaatatcagaagaaagaaaagaaaaaagaaaaaaagagtaaatcaaaaaaagggaaacatcacaaaaaggaaaaaaagaagagaaaaaaggaaaagcattcttctacacctaatagttctgaattctccagaaagtaactgagactttggcttaagccgttaaatttaaaaatttgtttttaaaacgtgtttgcccttccttggaatttgctatatattatgctttgcaataaatcacagccttttccatatagacatttttcgtatttgggaccattatccctctggcaatatatttttaatgtgctgtaactgtaaagtattaaatcagtcttgttacttgatagccatgccccaagtatagctatttgtgtatactaaacacatcatttttggtatttgtgtctctgtgtgtttggctagtgttactacttcataagttcattgtaaaatggctttactgccatcaacatgggtcatctacctagcagttaatgagtattgctgaatcaggtgtccaccttccaatgatgaagcaaggtaaggggtaatgttttgctcttgacacagagaaatttaatagctttatgtactaaaatataatatcttttaaagatagtgaaattcttcagttttttaaatctctagggattttttttcaatgttgtagaagatgcagctgcttaatggtcttgactaggactttttaaatgaatggtgtctgcaggtagatgatcatgaaaatatctctaacaaagttttactcttctatgaaatgcagaatttctagtacctgcctcctttgtttttgtaataattaaaatacttcttgtataaagagattagttcagcctgttagtaagtctgcagagatgatgctgagttggttgtgatttttagaatagactcctgggttgttttacaaatgtgccatattggcatgtcttacagtgatacctcaaacacagaaatttttatttaggaagatagctaaatctttattagaactgatttttattgtattcagtataaattttatgaagcttgtttctatgagtactgtggaaaattttataaatgtgagcatatatatttattttgtctgacataatttgtagttttaaagcaagtttcacactgaacttaacgttttcataaatgaccagtttgggatgtttctctcttttactttagtggcaaactcaagagtaaaaagtgtca

SEQ ID NO: 11665 - DNA, 1702 bp, Homo sapiens
cgaatggatagtaatttgtttgcatggggtagtatagagaagagatattaggttcacgacgatctgggagagggtgggatcagttaacattgttttgcgtgcacctcaggcttcctggctatgtgggactaaatagtaccggcattgtgggcctgtgcatactggaacttgcaacgggaccaacacgtgtaattgaagagtcagtgggaaatctagtctcttgaacaaacaacgtagaatttggaatataacggacggcctatgtgtaatatagagatagggcggcggggggtattgaatcataagttattagactgggtttgacagtaagttgaataatataactccgtctacgggaatggagttatagtaggtaaacaaaaaatagtaaggcaaagataacatcttgctcaaaaaaaaaaggaaaaggtcttactcatccagttccactgaagaggacacttcaaaacaaaagaaacaaaaatatcagaagaaagaaaagaaaaaagaaaaaaagagtaaatcaaaaaaagggaaacatcacaaaaaggaaaaaaagaagagaaaaaaggaaaagcattcttctacacctaatagttctgaattctccagaaagtaactgagactttggcttaagccgttaaatttaaaaatttgtttttaaaacgtgtttgcccttccttggaatttgctatatattatgctttgcaataaatcacagccttttccatatagacatttttcgtatttgggaccattatccctctggcaatatatttttaatgtgctgtaactgtaaagtattaaatcagtcttgttacttgatagccatgccccaagtatagctatttgtgtatactaaacacatcatttttggtatttgtgtctctgtgtgtttggctagtgttactacttcataagttcattgtaaaatggctttactgccatcaacatgggtcatctacctagcagttaatgagtattgctgaatcaggtgtccaccttccaatgatgaagcaaggtaaggggtaatgttttgctcttgacacagagaaatttaatagctttatgtactaaaatataatatcttttaaagatagtgaaattcttcagttttttaaatctctagggattttttttcaatgttgtagaagatgcagctgcttaatggtcttgactaggactttttaaatgaatggtgtctgcaggtagatgatcatgaaaatatctctaacaaagttttactcttctatgaaatgcagaatttctagtacctgcctcctttgtttttgtaataattaaaatacttcttgtataaagagattagttcagcctgttagtaagtctgcagagatgatgctgagttggttgtgatttttagaatagactcctgggttgttttacaaatgtgccatattggcatgtcttacagtgatacctcaaacacagaaatttttatttaggaagatagctaaatctttattagaactgatttttattgtattcagtataaattttatgaagcttgtttctatgagtactgtggaaaattttataaatgtgagcatatatatttattttgtctgacataatttgtagttttaaagcaagtttcacactgaacttaacgttttcataaatgaccagtttgggatgtttctctcttttactttagtggcaaactcaagagtaaaaagtgtca

SEQ ID NO: 11666 - DNA, 821 bp, Homo sapiens
actggttctgccgtcgctagaggcgtacaggcccttcccgaccgtagcgagggtgctgctgcgctgggggaaggaaaacgccgctttgactgtgccttgttctcacagctggcgggaagcaagcgccttttcgaaagccagaggctcgagttacccctcttaccaccgtcatggcagtcccaggttgcaacaaggacagtgtcagagcaggctgtaaaaaatgtggctaccctggtcacctgacttttgaatgccgcaattttctccgagtagaccctaaaagggacatagttttggatgtcagcagtacaagtagtgaagatagcgatgaagagaatgaagaactgaataaattgcaggcattacaggaaaaaagaataaatgaagaagaggaaaagaagaaagaaaaaagcaaagaaaaaatcaaattgaaaaaaaaaaggaaaaggtattttttgaacaacattttaaaaaacaaagcaggcctatgagtttaggatggattataaaattttattttttgtgtataatagttaatttaatattttttcttcaacaactaagcttttcattgagcttaagtttaaactcttaatatatattttgtcttcatatacatgaaattgactaaaatatttgtattcttgtaatattaccatggctaataaattaacttattaatagaatttaatagaacttgtcatgctgtccaggtgcgatggctcatgcctataatcccagcactttgagaggtcaaggcaggagaatggcttgagcccagaagtttgagacaggcttgggcaacatagggagacctcatc

SEQ ID NO: 11667 - DNA, 271 bp, Homo sapiens
actggttctgccgtcgctagaggcgtacaggcccttcccgaccgtagcgagggtgctgctgcgctgggggaaggaaaacgccgctttgactgtgccttgttctcacagctggcgggaagcaagcgccttttcgaaagccagaggctcgagttacccctcttaccaccgtcatggcagtcccaggttgcaacaaggacagtgtcagagcaggctgtaaaaaatgtggctaccgtaagtattctaaaagatgacatgctttgcattattcata

SEQ ID NO: 11668 - DNA, 1868 bp, Homo sapiens
actggttctgccgtcgctagaggcgtacaggcccttcccgaccgtagcgagggtgctgctgcgctgggggaaggaaaacgccgctttgactgtgccttgttctcacagctggcgggaagcaagcgccttttcgaaagccagaggctcgagttacccctcttaccaccgtcatggcagtcccagttgttgaaattacctccaacattcatgtcagtgattcaccactctccatgaagagctgaactggcacaagtggcaacgtatgttactgatgtaattggcacaaaactgttttcttattatctccttcactgaagccctatagccaaggttgcaacaaggacagtgtcagagcaggctgtaaaaaatgtggctaccctggtcacctgacttttgaatgccgcaattttctccgagtagaccctaaaagggacatagttttggatgtcagcagtacaagtagtgaagatagcgatgaagagaatgaagaactgaataaattgcaggcattacaggaaaaaagaataaatgaagaagaggaaaagaagaaagaaaaaagcaaagaaaaaatcaaattgaaaaaaaaaaggaaaaggtcttactcatccagttccactgaagaggacacttcaaaacaaaagaaacaaaaatatcagaagaaagaaaagaaaaaagaaaaaaagagtaaatcaaaaaaagggaaacatcacaaaaaggaaaaaaagaagagaaaaaaggaaaagcattcttctacacctaatagttctgaattctccagaaagtaactgagactttggcttaagccgttaaatttaaaaatttgtttttaaaacgtgtttgcccttccttggaatttgctatatattatgctttgcaataaatcacagccttttccatatagacatttttcgtatttgggaccattatccctctggcaatatatttttaatgtgctgtaactgtaaagtattaaatcagtcttgttacttgatagccatgccccaagtatagctatttgtgtatactaaacacatcatttttggtatttgtgtctctgtgtgtttggctagtgttactacttcataagttcattgtaaaatggctttactgccatcaacatgggtcatctacctagcagttaatgagtattgctgaatcaggtgtccaccttccaatgatgaagcaaggtaaggggtaatgttttgctcttgacacagagaaatttaatagctttatgtactaaaatataatatcttttaaagatagtgaaattcttcagttttttaaatctctagggattttttttcaatgttgtagaagatgcagctgcttaatggtcttgactaggactttttaaatgaatggtgtctgcaggtagatgatcatgaaaatatctctaacaaagttttactcttctatgaaatgcagaatttctagtacctgcctcctttgtttttgtaataattaaaatacttcttgtataaagagattagttcagcctgttagtaagtctgcagagatgatgctgagttggttgtgatttttagaatagactcctgggttgttttacaaatgtgccatattggcatgtcttacagtgatacctcaaacacagaaatttttatttaggaagatagctaaatctttattagaactgatttttattgtattcagtataaattttatgaagcttgtttctatgagtactgtggaaaattttataaatgtgagcatatatatttattttgtctgacataatttgtagttttaaagcaagtttcacactgaacttaacgttttcataaatgaccagtttgggatgtttctctcttttactttagtggcaaactcaagagtaaaaagtgtca

SEQ ID NO: 11669 - DNA, 1747 bp, Homo sapiens
actggttctgccgtcgctagaggcgtacaggcccttcccgaccgtagcgagggtgctgctgcgctgggggaaggaaaacgccgctttgactgtgccttgttctcacagctggcgggaagcaagcgccttttcgaaagccagaggctcgagttacccctcttaccaccgtcatggcagtcccaggtaaggagcaattacagggcctctgcgttgcaacaaggacagtgtcagagcaggctgtaaaaaatgtggctaccctggtcacctgacttttgaatgccgcaattttctccgagtagaccctaaaagggacatagttttggatgtcagcagtacaagtagtgaagatagcgatgaagagaatgaagaactgaataaattgcaggcattacaggaaaaaagaataaatgaagaagaggaaaagaagaaagaaaaaagcaaagaaaaaatcaaattgaaaaaaaaaaggaaaaggtcttactcatccagttccactgaagaggacacttcaaaacaaaagaaacaaaaatatcagaagaaagaaaagaaaaaagaaaaaaagagtaaatcaaaaaaagggaaacatcacaaaaaggaaaaaaagaagagaaaaaaggaaaagcattcttctacacctaatagttctgaattctccagaaagtaactgagactttggcttaagccgttaaatttaaaaatttgtttttaaaacgtgtttgcccttccttggaatttgctatatattatgctttgcaataaatcacagccttttccatatagacatttttcgtatttgggaccattatccctctggcaatatatttttaatgtgctgtaactgtaaagtattaaatcagtcttgttacttgatagccatgccccaagtatagctatttgtgtatactaaacacatcatttttggtatttgtgtctctgtgtgtttggctagtgttactacttcataagttcattgtaaaatggctttactgccatcaacatgggtcatctacctagcagttaatgagtattgctgaatcaggtgtccaccttccaatgatgaagcaaggtaaggggtaatgttttgctcttgacacagagaaatttaatagctttatgtactaaaatataatatcttttaaagatagtgaaattcttcagttttttaaatctctagggattttttttcaatgttgtagaagatgcagctgcttaatggtcttgactaggactttttaaatgaatggtgtctgcaggtagatgatcatgaaaatatctctaacaaagttttactcttctatgaaatgcagaatttctagtacctgcctcctttgtttttgtaataattaaaatacttcttgtataaagagattagttcagcctgttagtaagtctgcagagatgatgctgagttggttgtgatttttagaatagactcctgggttgttttacaaatgtgccatattggcatgtcttacagtgatacctcaaacacagaaatttttatttaggaagatagctaaatctttattagaactgatttttattgtattcagtataaattttatgaagcttgtttctatgagtactgtggaaaattttataaatgtgagcatatatatttattttgtctgacataatttgtagttttaaagcaagtttcacactgaacttaacgttttcataaatgaccagtttgggatgtttctctcttttactttagtggcaaactcaagagtaaaaagtgtca

SEQ ID NO: 11670 - DNA, 1732 bp, Homo sapiens
atgccagccagtgtggatgttgtgaccacagagcaggattgtgcattggctttagagctactcctcagctgatggcccacttttgtttatataaataagagcttctgccccacctgcagacatgtttactaatgatcatagccaggattagaaccactttcaaacattggggccttcttaacaaaagtctttgataacttaagaaccaaaagcaagaggagaggaaaacagaggctgaggagagagaccaaaaaggggaaaagaaaaatcagaaaaggaacgagaagaagaaccagaaggggcaggaggaggtggagatgcccagcaaggagaagcaacagccccagaagccacaggcgcagaagcggggcgggcgggagtgccgggaataaatgaagaagaggaaaagaagaaagaaaaaagcaaagaaaaaatcaaattgaaaaaaaaaaggaaaaggtcttactcatccagttccactgaagaggacacttcaaaacaaaagaaacaaaaatatcagaagaaagaaaagaaaaaagaaaaaaagagtaaatcaaaaaaagggaaacatcacaaaaaggaaaaaaagaagagaaaaaaggaaaagcattcttctacacctaatagttctgaattctccagaaagtaactgagactttggcttaagccgttaaatttaaaaatttgtttttaaaacgtgtttgcccttccttggaatttgctatatattatgctttgcaataaatcacagccttttccatatagacatttttcgtatttgggaccattatccctctggcaatatatttttaatgtgctgtaactgtaaagtattaaatcagtcttgttacttgatagccatgccccaagtatagctatttgtgtatactaaacacatcatttttggtatttgtgtctctgtgtgtttggctagtgttactacttcataagttcattgtaaaatggctttactgccatcaacatgggtcatctacctagcagttaatgagtattgctgaatcaggtgtccaccttccaatgatgaagcaaggtaaggggtaatgttttgctcttgacacagagaaatttaatagctttatgtactaaaatataatatcttttaaagatagtgaaattcttcagttttttaaatctctagggattttttttcaatgttgtagaagatgcagctgcttaatggtcttgactaggactttttaaatgaatggtgtctgcaggtagatgatcatgaaaatatctctaacaaagttttactcttctatgaaatgcagaatttctagtacctgcctcctttgtttttgtaataattaaaatacttcttgtataaagagattagttcagcctgttagtaagtctgcagagatgatgctgagttggttgtgatttttagaatagactcctgggttgttttacaaatgtgccatattggcatgtcttacagtgatacctcaaacacagaaatttttatttaggaagatagctaaatctttattagaactgatttttattgtattcagtataaattttatgaagcttgtttctatgagtactgtggaaaattttataaatgtgagcatatatatttattttgtctgacataatttgtagttttaaagcaagtttcacactgaacttaacgttttcataaatgaccagtttgggatgtttctctcttttactttagtggcaaactcaagagtaaaaagtgtca

SEQ ID NO: 11671 - DNA, 1450 bp, Homo sapiens
cagcaaaaattctaaattcatcgttttaagggaatgcaaatatatgaagcattttttaagtttatgtttatactccctaccttactccaagaagaatttaaggcagttcaaatcccacttaaatttatctatcagtcataaatgcaattctcagtcagtatgtattattatccataggtcttactcatccagttccactgaagaggacacttcaaaacaaaagaaacaaaaatatcagaagaaagaaaagaaaaaagaaaaaaagagtaaatcaaaaaaagggaaacatcacaaaaaggaaaaaaagaagagaaaaaaggaaaagcattcttctacacctaatagttctgaattctccagaaagtaactgagactttggcttaagccgttaaatttaaaaatttgtttttaaaacgtgtttgcccttccttggaatttgctatatattatgctttgcaataaatcacagccttttccatatagacatttttcgtatttgggaccattatccctctggcaatatatttttaatgtgctgtaactgtaaagtattaaatcagtcttgttacttgatagccatgccccaagtatagctatttgtgtatactaaacacatcatttttggtatttgtgtctctgtgtgtttggctagtgttactacttcataagttcattgtaaaatggctttactgccatcaacatgggtcatctacctagcagttaatgagtattgctgaatcaggtgtccaccttccaatgatgaagcaaggtaaggggtaatgttttgctcttgacacagagaaatttaatagctttatgtactaaaatataatatcttttaaagatagtgaaattcttcagttttttaaatctctagggattttttttcaatgttgtagaagatgcagctgcttaatggtcttgactaggactttttaaatgaatggtgtctgcaggtagatgatcatgaaaatatctctaacaaagttttactcttctatgaaatgcagaatttctagtacctgcctcctttgtttttgtaataattaaaatacttcttgtataaagagattagttcagcctgttagtaagtctgcagagatgatgctgagttggttgtgatttttagaatagactcctgggttgttttacaaatgtgccatattggcatgtcttacagtgatacctcaaacacagaaatttttatttaggaagatagctaaatctttattagaactgatttttattgtattcagtataaattttatgaagcttgtttctatgagtactgtggaaaattttataaatgtgagcatatatatttattttgtctgacataatttgtagttttaaagcaagtttcacactgaacttaacgttttcataaatgaccagtttgggatgtttctctcttttactttagtggcaaactcaagagtaaaaagtgtca

SEQ ID NO: 11672 - DNA, 477 bp, Homo sapiens
tcagaggatccccttatttccttctttatgctaccctggtcacctgacttttgaatgccgcaattttctccgagtagaccctaaaagggacatagttttggatgtcagcagtacaagtagtgaagatagcgatgaagagaatgaagaactgaataaattgcaggcattacaggaaaaaagaataaatgaagaagaggaaaagaagaaagaaaaaagcaaagaaaaaatcaaattgaaaaaaaaaaggaaaaggtcttactcatccagttccactgaagaggacacttcaaaacaaaagaaacaaaaatatcagaagaaagaaaagaaaaaagaaaaaaaggaaaataagcttattttccttctttatggcaatacggtctttcttcagtggtcccatgaatgctttcttctcctccatggtctggaagcggccatggccaaacttggaggtggtgtcaatgaacttaaggtcaatct

SEQ ID NO: 11673 - DNA, 1798 bp, Homo sapiens
actggttctgccgtcgctagaggcgtacaggcccttcccgaccgtagcgagggtgctgctgcgctgggggaaggaaaacgccgctttgactgtgccttgttctcacagctggcgggaagcaagcgccttttcgaaagccagaggctcgagttacccctcttaccaccgtcatggcagtcccagttgttgaaattacctccaacattcatgtcagtgattcaccactctccatgaagagctgaactggcacaagtggcaacgttgcaacaaggacagtgtcagagcaggctgtaaaaaatgtggctaccctggtcacctgacttttgaatgccgcaattttctccgagtagaccctaaaagggacatagttttggatgtcagcagtacaagtagtgaagatagcgatgaagagaatgaagaactgaataaattgcaggcattacaggaaaaaagaataaatgaagaagaggaaaagaagaaagaaaaaagcaaagaaaaaatcaaattgaaaaaaaaaaggaaaaggtcttactcatccagttccactgaagaggacacttcaaaacaaaagaaacaaaaatatcagaagaaagaaaagaaaaaagaaaaaaagagtaaatcaaaaaaagggaaacatcacaaaaaggaaaaaaagaagagaaaaaaggaaaagcattcttctacacctaatagttctgaattctccagaaagtaactgagactttggcttaagccgttaaatttaaaaatttgtttttaaaacgtgtttgcccttccttggaatttgctatatattatgctttgcaataaatcacagccttttccatatagacatttttcgtatttgggaccattatccctctggcaatatatttttaatgtgctgtaactgtaaagtattaaatcagtcttgttacttgatagccatgccccaagtatagctatttgtgtatactaaacacatcatttttggtatttgtgtctctgtgtgtttggctagtgttactacttcataagttcattgtaaaatggctttactgccatcaacatgggtcatctacctagcagttaatgagtattgctgaatcaggtgtccaccttccaatgatgaagcaaggtaaggggtaatgttttgctcttgacacagagaaatttaatagctttatgtactaaaatataatatcttttaaagatagtgaaattcttcagttttttaaatctctagggattttttttcaatgttgtagaagatgcagctgcttaatggtcttgactaggactttttaaatgaatggtgtctgcaggtagatgatcatgaaaatatctctaacaaagttttactcttctatgaaatgcagaatttctagtacctgcctcctttgtttttgtaataattaaaatacttcttgtataaagagattagttcagcctgttagtaagtctgcagagatgatgctgagttggttgtgatttttagaatagactcctgggttgttttacaaatgtgccatattggcatgtcttacagtgatacctcaaacacagaaatttttatttaggaagatagctaaatctttattagaactgatttttattgtattcagtataaattttatgaagcttgtttctatgagtactgtggaaaattttataaatgtgagcatatatatttattttgtctgacataatttgtagttttaaagcaagtttcacactgaacttaacgttttcataaatgaccagtttgggatgtttctctcttttactttagtggcaaactcaagagtaaaaagtgtca

SEQ ID NO: 11674 - DNA, 689 bp, Homo sapiens
actggttctgccgtcgctagaggcgtacaggcccttcccgaccgtagcgagggtgctgctgcgctgggggaaggaaaacgccgctttgactgtgccttgttctcacagctggcgggaagcaagcgccttttcgaaagccagaggctcgagttacccctcttaccaccgtcatggcagtcccaggttgcaacaaggacagtgtcagagcaggctgtaaaaaatgtggctaccctggtcacctgacttttgaatgccgcaattttctccgagtagaccctaaaagggacatagttttggatgtcagcagtacaagtagtgaagatagcgatgaagagaatgaagaactgaataaattgcaggcattacaggaaaaaagaataaatgaagaagaggaaaagaagaaagaaaaaagcaaagaaaaaatcaaattgaaaaaaaaaaggaaaagggcttactcattcaagttccacctgaagcagcgacaccttctaaagacacaaagcaaacaaaaattattcataaggactagcatcttatcacaacgacaaaaatggagtgaaatctaaaacaaagcggtaaaccattcacacaaactgggaacaatacaaggaaccaggaataagaagggagaaaggcaatctctcttctaacacccttacatacgttttctgtaatctcttcccacgaaa

SEQ ID NO: 11675 - DNA, 394 bp, Homo sapiens
tgagcttctcttcagtaggacttgttctccgtggaagtaatgcatgccttatggagccacctatctagaggggtcttacttttgactctgccaggaatctataggtttacttggctcactcatattctggcagctgatgctggaagactcaaaacagctgagggctatcataactgggaatccttgggtatttctccctatctccaagagccctccccacaactcctcacagcatcatagctttgaagtagctgaactgacttcttacatgtaggatcaggattcctatggtgtatgtcaagagtgagagctaggtgaaagctctatcctttttataaagtcacctcagaagtcacatagcatcacttccaccaaatgaattggttggaactgt

SEQ ID NO: 11676 - DNA, 397 bp, Homo sapiens
tccaagtacagttgtcccttggtatccatgggaaattagttccagaacctccctctgatgacagaattcaaggatgttccagtccctggaacatggtatagtatttgcatataacctatgtgcatcctcccgtacacttgaatctctacactataatacctaatacaatgtaaatcattgttatactgtatgcttggggaataatgacaagaaaaaattgtacatgttcagtacagatgcagttaaataatttttctattcctggttggttgaattcatggatgtagaacccatagatatggagggctgacttgactgtatagtgcattggcttttcaaacagtaaatctgcaaaatctaacttgggtctgttatgcacaggattgccaaaaaaaaa

SEQ ID NO: 11677 - DNA, 1262 bp, Homo sapiens
tcatcttcaccatttgcaagggctcagttgggcagcattacatacaggcacattgttcgacctccagaattttttcacgctgcagaacggaaactctgtatccatttacatttttaactggttgaagatggaaaaagaaggctattttggggacacatgaaaatgacatgaaattcacatttcagtgtccagagatgaaattttattgactaaagcccagcccttcctgaatttatatacgacatgtgagatcatatccagctgtttagacacacacacaattaggtgattttaactgtgcttctctgagctacacccatcccttgttgcttaactgtaaaaatgtttatttaatttctacttgcaacaactcatgtatatggggcttctgttctgctggaagctctggatcctgtggcgtggggatgccgtcacagacttcacagtctgatagaggaggcagctgatataagtgccacctccatatgtcaagctgcatgtcagatggtacgctgggactagttgattctctgtgacttgccgcaaaagttccttgccacagtaatcccttgtttcccaagggtgatgtagatcatcctatgtgacagtaacaataggctaaaaacagccaaaggacttgaaagcgcttttttttcccatttttttttcctagagtgactgaataatgagggcaaaatgggtgtcagtgggcatgaaatgaatgaatgccatttgcaccaacctgttttagatgaggagggtgggacctggtgaggagtgaccactgggtgagcattctgtgtcaatggatttccagctcacattggcagcgatttgtacattatttcatcccattcctgtgtgatccatctgaaaagccgcgagacagagggacacacattcattttggtgtcaaagatctgggcttcagtcccagttcggccacatactagctgtgtggtcttgggcaggtttgctctctgggcctctgtcctgctctgtaaagcaggattcacaatagtgaccttgtcctttggaggaagtaggaggtgaagtccctgggcccagctcagcgtccacagcaaactcctatcaggcctgatcaccctggtgtgaacattaacccagaactagcttacttacttgctctgccaagaagcaagagttctgggttggtctgaactactctttggaaaaactacttttggcagatttcaaaccagttcctaaaatttccatgtattacatttagattaaagagg

SEQ ID NO: 11678 - DNA, 1502 bp, Homo sapiens
aggaatttaaaacaatactgaaactgatgggctttttaccatgaccatgagctggcgattctgatttaaacataatccaacacctcccccaacaaccttttgtctaattctgaacaattgctgcattattcttgacttttaataatatatgtaagcttcaaattcacacagactaattaccttttcataaacattacattctctatggaagttaattcaaataactcatattaatagttgcaaagccagcccctgacacccgtggactcagctacccatgtttcaagagcaagttcacaggattcggtatcagtggcactcactttggggtggctcgtcccccgagtcctgtggtacgatgtgttcctaagcttgaagaccagaccaaaaataaaggctggaagcacagtcattgtaaagacaaagaaatagaacctgggctattccatcctctcattctaccagaccacttgggagtttctatttatgtttctgacttttcaacaatgagatgttaatcaatcctgaagaactgaagaacaggactttgttgcaatgtctggaatttactgtgaaatgggattgttgtgaatttctgccaaattttatgtttaagatttatcctatttgtatatctgctgtttcaaccaaaagaaatttttcaaaattaacaggaataaaaagtgctctgcgaccagctttgagggaagatagaccaacaaatgcggctttgtctattgatcatgatgaatagggaaagatcagtatttacgaagtctgatcaatttacagaagactcaaaaccagaaactatagtttttattcattactgctacagaccactatgaaagtgtaacctttcccctttttcaaaataagcattagcgtcattaaattcattactccctgcccccctttttttattgctggcatcatatacacaaaattcagtaatagaaatgtttaactgtctgaaattattttctggccattatcatcatcattattatttatttcttaattattgaaataattttgttactatagaagaggggagtattttaaaaaatctactcctgagctgggcatggtggctcacgcctgtaatcccaacactttgggaggccgaggcgggtggatcacctgagtcatattttccatttagtaaaatgaacatctggctgctgtatgatgccttttgtgtaccatcacctaagccacaattacctgcaaggtaattcataccactacagcacggtgcaaaaacagggttggtttgggatggtgaaagtcagccatcttagtgtcaatcttgcatgcaaattctaatgaagaaaagccactaccagcaggtccacacacactcacaaagaactcataaattattttaatccaagcgttcaaagggatcctgggtcccaggaaccatcctgctgtttcatctcagtgagaggcaagatggttaaggaaaaacagctctagtttcctccatccccccaatt

SEQ ID NO: 11679 - DNA, 730 bp, Homo sapiens
agggagtaggcggagacagagaggctgtatttcagtgcagcctgccagacctcttctggaggaagactggacaaagggggtcacacattccttccatacggttgagcctctacctgcctggtgctggtcacagttcagcttcttcatgatggtggatcccaatggcaatgaatccagtgctacatacttcatcctaataggcctccctggtttagaagaggctcagttctggttggccttcccattgtgctccctctaccttattgctgtgctaggtaacttgacaatcatctacattgtgcggactgagcacagcctgcatgagcccatgtatatatttctttgcatgctttcaggcattgacatcctcatctccacctcatccatgcccaaaatgctggccatcttctggttcaattccactaccatccagtttgatgcttgtctgctacagatgtttgccatccactccttatctggcatggaatccacagtgctgctggccatggcttttgaccgctatgtggccatctgtcacccactgcgccatgccacagtacttacgttgcctcgtgtcaccaaaattggtgtggctgctgtggtgcggggggctgcactgatggcaccccttcctgtcttcatcaagcagctgccttctgccgctcaatatcctttccattcctaatggctacacaagatgtcatgaagctggcctgtgatgatatccggg

SEQ ID NO: 11680 - DNA, 2444 bp, Homo sapiens
  misc_feature (1179)..(1179): n is a, c, g, or t
agggagtaggcggagacagagaggctgtatttcagtgcagcctgccagacctcttctggaggaagactggacaaagggggtcacacattccttccatacggttgagcctctacctgcctggtgctggtcacagttcagcttcttcatgatggtggatcccaatggcaatgaatccagtgctacatacttcatcctaataggcctccctggtttagaagaggctcagttctggttggccttcccattgtgctccctctaccttattgctgtgctagcaagcggcgtgactctccgctgcccgtcatcttggccaatatctatctgctggttcctcctgtgctcaacccaattgtctatggagtgaagacaaaggagattcgacagcgcatccttcgacttttccatgtggccacacacgcttcagagccctaggtgtcagtgatcaaacttcttttccattcagagtcctctgattcagattttaatgttaacattttggaagacagtattcagaaaaaaaatttccttaataaaaatacaactcagatccttcaaatatgaaactggttggggaatctccattttttcaatattattttcttctttgttttcttgctacatataattattaataccctgactaggttgtggttggagggttattacttttcattttaccatgcagtccaaatctaaactgcttctactgatggtttacagcattctgagataagaatggtacatctagagaacatttgccaaaggcctaagcacggcaaaggaaaataaacacagaatataataaaatgagataatctagcttaaaactataacttcctcttcagaactcccaaccacattggatctcagaaaaatgctgtcttcaaaatgacttctacagagaagaaataatttttcctctggacactagcacttaaggggaagattggaagtaaagccttgaaaagagtacatttacctacgttaatgaaagttgacacactgttctgagagttttcacagcatatggaccctgtttttcctatttaattttcttatcaaccctttaattaggcaaagatattattagtaccctcattgtagccatgggaaaattgatgttcagtggggatcagtgaattaaatggggtcatacaagtataaaaattaaaaaaaaangacttcatgcccaatctcatatgatgtggaagaactgttagagagaccaacagggtagtgggttagagatttccagagtcttacattttctagaggaggtatttaatttcttctcactcatccagtgttgtatttaggaatttcctggcaacagaactcatggctttaatcccactagctattgcttattgtcctggtccaattgccaattacctgtgtcttggaagaagtgatttctaggttcaccattatggaagattcttattcagaaagtctgcatagggcttatagcaagttatttatttttaaaagttccataggtgattctgataggcagtgaggttagggagccaccagttatgatgggaagtatggaatggcaggtcttgaagataacattggccttttgagtgtgactcgtagctggaaagtgagggaatcttcaggaccatgctttatttggggctttgtgcagtatggaacagggactttgagaccaggaaagcaatctgacttaggcatgggaatcaggcatttttgcttctgaggggctattaccaagggttaataggtttcatcttcaacaggatatgacaacagtgttaaccaagaaactcaaattacaaatactaaaacatgtgatcatatatgtggtaagtttcattttctttttcaatcctcaggttccctgatatggattcctataacatgctttcatccccttttgtaatggatatcatatttggaaatgcctatttaatacttgtatttgctgctggactgtaagcccatgagggcactgtttattattgaatgtcatctctgttcatcattgactgctctttgctcatcattgaatcccccagcaaagtgcctagaacataatagtgcttatgcttgacaccggttatttttcatcaaacctgattccttctgtcctgaacacatagccaggcaattttccagccttctttgagttgggtattattaaattctggccattacttccaatgtgagtggaagtgacatgtgcaatttctatacctggctcataaaaccctcccatgtgcagcctttcatgttgacattaaatgtgacttgggaagctatgtgttacacagagtaaatcaccagaagcctggatttctgaaaaaactgtgcagagccaaacctctgtcatttgcaactcccacttgtatttgtacgaggcagttggataagtgaaaaataaagtactattgtgtcaagtctctgaaaatgatttt

SEQ ID NO: 11681 - DNA, 886 bp, Homo sapiens
agacccagttgcttgtgtcgagggagggagggagggaacagagggtgcgcgtgtgaaagctccgcccccagccctagctcctccttcccgcttcagcaggtccaggctctgcgccagtgcatccttctccaagagtgcgctgcctgggcccgcttgccctggagtgtaagtgctgggtaaataagaaccgcctggcgcaggctgtgtctactcttcacgccgccttctcagatcgggctgcatgtccccactccgtgtttacatctcgttcccgctccgggtctcggtgactggctcctcaagccggagacgcgtgtggtgcggcgcgatgcgggcgccagcgctgtgtgtgctggcggtgcgctgccttagtgcgggggaaagtggagggaacggtcctgcggggcgttctgtccaagaaaaaggactgcagcctcggggagccagggtcccctcgcagacgagctgccaacgccgcggagccatttctgttccaccctaggggaggagtagggggatatcttttaaaagtttaattgcaaaataagtaggttagtaaggccatttgtggttgctgtttcagtaacttcagcagtcaacggagagaagagtggaaaccttactggatgcggacaggagagccagttactgaaagcagatataacgcggatcctgtaaagagtggtgtgtatccaaaaaaaaaaaatctgtacaatgtattttaaaacttgtgtgcacaaaactgaagattttcttttttacctagtccaaatgccgtcctagcctgagtcctgctctttataaaaataaaataaaaagaatttgaagcttgtgaaagtattaagtgtagacattcaagtttatttgaaaccctaccaaaaaaaaa

SEQ ID NO: 11682 - DNA, 1684 bp, Homo sapiens
agacccagttgcttgtgtcgagggagggagggagggaacagagggtgcgcgtgtgaaagctccgcccccagccctagctcctccttcccgcttcagcaggtccaggctctgcgccagtgcatccttctccaagagtgcgctgcctgggcccgcttgccctggagttaacttcagcagtcaacggagagaagagtggaaaccttactggatgcggacaggagagccagttactgaaagcagatataacgcggatcctgtaaagagtgaattgtatatttccacatatgctggacaataggcagaaagtggagacccaaagaacttgtgatatgacggacataagaagcttcagttggcctcaaatgtcaaataatatccttcctgaataatcaagaatgtcaagcttttactttctacatcttggactgtactttgtaccaatctcaagtcccatatgatgcactttctaggtgaaaagtttttttttacagaccttaaatttttctttatttactttttagagtgatggtatatattagtttcaccacgttagtaattcatgctatataaatgataagccaaagtaagaaaaatagtgaaatgaattgcaaatctaactacattttttagtttccataatcaccacagaaattgctgttagtgcacttgatccaagaagagtcattcacaatctctcccttgcatgtttcccacctggatacagattcgtttagaggtcagcctctgacacaagatcagtcaatccaatgcctgccattatagttttggaaaggtgcctaaaaagacattaattttcctccaaatgacagaaactaaaggcaggtgaatgcggcagctattggtgtacttggatgctgaggatcaggcagagtggcttggtaatgagagagatgaatgagacagacacccagagagaaaggaaattaaggagcagtaaaagcattttacacccctccctccactctgccaaccctcagggctcatacacttttgctaactatatcacttatgtgctgttgtataccaaattacctcaaaactaagtggcttaacacaacagcatgtattatcccacaatttctgtgggctgagaatctagacagggagtagttggatcccctgtgtcagagtcttccacgagtttgcagtcaaagtcctgactgaggttgtggtttcatctgaaatttcaaatggggaaggatcctttcccaagttcactcatatggctgcagtaggattcagtttcctgcagactgttacactaatagcctcagtttctcaccacctgttggccagaggctgcactcagtttcttgtcacataagcttctcagctcacagcatggcatctgcctttgtcagagtgaaaagagaaaaagccaccaagaaggaagtcatggtctaatcttggaggagaatcttatgacttttgctgctctcttcttgttagaagccactacatccagcctctactcatgggaaggaaatgacacaaggtgtgggtatcaggaggcagaaatctttgagagctgttttaaaagcaacctaacacactgacatatttcagtccttaggcactgtaaaatagcccaaatatccctgcagtacatctgaatgcttgcctaaattctccaaaattcttttctattatttacaatcaaaac

SEQ ID NO: 11683 - DNA, 692 bp, Homo sapiens
agacccagttgcttgtgtcgagggagggagggagggaacagagggtgcgcgtgtgaaagctccgcccccagccctagctcctccttcccgcttcagcaggtccaggctctgcgccagtgcatccttctccaagagtgcgctgcctgggcccgcttgccctggagttaacttcagcagtcaacggagagaagagtggaaaccttactggatgcggacaggagagccagttactgaaagcagatataacgcggatcctgtaaagagtgaaaggagaagaccacttttagttgcctccctgctagcaccctgacttgctctgcttgaataagaatccaaggacacaagctaagacatttgcactgggtttagatctactgcgattcacaaaacacaaaagaactttcagtcagagggtgacacataatgattttagacaaaactcagtttcttctggtggaagctattcagattgtttggagagtgggaggaaaaaggagtgaagcatcgcttaacaacaaaagtaataatgcaggcagaatattaaatggagaagccagactttcaacacatagaaaagaaagctagttcagaatgttgagagacttgggagctgattgattgaaggtggcacttagaaggttgccctttttaaagataaaggctgatactgtgactctgtcccaggggacctg

SEQ ID NO: 11684 - DNA, 492 bp, Homo sapiens
tgtgttgactgtatatcaggcagttgctatagtcaggcattttaatagtttgcttcccaactctccaaatgtaaaacatagtaacaaaatttatacgccaccagcataaaaagaagaaacccagatgaagggaagtcaagtgagaaaaataagggtaatctacgcctgaattgaggccataaaatacttgtcttgagctgggggcactgctgtgcacctgtagtcccagctacttgggaggctgcagcagtaggatggcttgaggccaggatttctgtgctgtagggcactatgctgatggggtgtccacactaaattcagcactaatatggtgaaccccaaggagcagaggaccactaggttgcctcagaaaggctgaaccagcccaggtcagaaacagagcaggtcaaacttcaggtgctgatcagtagtgagactgtgcctatgaatagctactgcactccagcctagacaacaagagcttctctctca

SEQ ID NO: 11685 - DNA, 377 bp, Homo sapiens
aataatttatctggtaaactggaaagctacacagaaaaatatttagaattttcagcttacttgatgcctccaatgaaacctaagtagatttataatttaaatataaaaagaggaaaaaaaaaagaaacctagaatacattctatgagctaattttaagtgaaaaaaaaatcaggatacaaacttttctgtataattttaactatgtaacataagtgcacagccaaaatactgtaagaacaagcttttcaaggaactatactataaatggtcacaaaatctgggtagtaaaatcatgggctatttaaaaaattttcattatgcttttatacattttccaaatatcctaccacgagtatactttatctccatcatcaga

SEQ ID NO: 11686 - DNA, 330 bp, Homo sapiens
agatagcaaaataagagaagaaagaagtatgatcagatgtgagaaatgttacattcaaaatcataaacttggaaaaaggtaaattcccagatgggttcctttaggacagaaagaaaaaagtgcaattataaaatggggaataagtggatatatacaaatattatagcaattgatttgaaattacaaaaaaatgagtaggagctcagtaatttagcatgataattacttgagtgggcatgaccgaaacatgtgagtgaatagtttagaagaaagaggaatataattgaaatattatgaggtaattttcctgttgttctcagcaaacatcag

SEQ ID NO: 11687 - DNA, 353 bp, Homo sapiens
acccttgcatttctaggataaatcccacttggtcatggtatataatctttttaatatgctgttggatttgttgtgctgggattttgttgataatttttgcatctatattcataaggaatattggtacgtaatgtttccttgtgatgtcttcatctggttttggtatcagagtaatgctggctccgtagaattagttagaagatattcccccttctactttttagaagagcttgagaaggattgttgttgactcttctttatgtttgttggaattgtctagtgaaaccgtctggtcctggaattctctttttggggaagtttttgattactggtctaatttcctcactctttat

SEQ ID NO: 11688 - DNA, 372 bp, Homo sapiens
taatgccagaatgagttaagattttgggggcctattggaaaggcatgattgtagtttgcaatgtgagaaggacatgagatttggagaggccagaggtggaatggtatagttcagatatttgacccagcccaaatctcttgttgaattgtaatccccaatgctggaggtggggccttccttgtatgatgtgtttggaacatgcaggcaaattcctcatggcttggtgctgttttcatgatagtgagtgagttctcctgagatgtggtcatttaaaagtgtatggcacctccccccactctctatctctcttgctcctgctctgctatatgagacacctgttccccgtttgccttccaccatgattgaaagctt

SEQ ID NO: 11689 - DNA, 683 bp, Homo sapiens
gggaaattattaggcatcaacattacagtcctgatttggtttcttctgacattttttccctaatcttaaaataactgtaaagggcacccatttttctttagttaataatagaagactgcattgacacggttaaattcccattaccctcagttctttagcaatggaatgaatggctgggatcatcgcttaatggagtgtctggacctcagtagagcttaaattgagaaataaagtttatatttatatttttattgttaattccatttttcactgacatttttaaatcccatcacaattcacgtttgtctcaaaggtatttaaatttagaaatcatatcaagtgtgaaataaagaaaattgtatatagagagagagaacagaatctataaatatgcatgtttgtgtacatacatccatatacatacatatgtgtgtgcatgcagtaattttattctcctaaagcaatgcctctgccttccaccctcactgcacatgtcctagtcctgtgatgtccctggaactgagcacctgatttccttctctgcctcccacatgaacagggaatagaaatggaaaccacgctctgtggttgctgttgtgaaaatccatgttccccacaggctgagtttggcatcttacattctagttcccattgtaaaaaagcaagcaacaaacaaaaactac

SEQ ID NO: 11690 - DNA, 246 bp, Homo sapiens
cttctgcttcagcttctcaagtagctgggattacaggcacccaccacaacgctcggctaatttttgtattttaatagaaacggggtttcaccatgttggccaggctggcctcgaactcctgacctcaagttatctgcccacctcagcctcccaaagtgctgggattacaggcgtgagccactgcacccagccacattttttcattaatctttccaacctctgtgctaggtaccattattctaaatt

SEQ ID NO: 11691 - DNA, 667 bp, Homo sapiens
tgagagacggagtttcactctgtcccccaggctggagtgcagtagtgtgatctcggctcactgcaacttcttgtctccggggttcaagcgattctcctgcctcagcttccctagtagtggggactacaggcatgcaccaccatgtccagctaatttttgtattttttagtagagacggggtttcactatatgttggccaggctggtctcaaacttctgacctcaagtgatccactcaccttggcctcccaaagtgctgggattacagacgtgagccaccatgcccggccaggattttccactcttgaagggagtattttgttgtcacttcaactcgctgttttttttccagacaacctcaaatatgaccacactacagcctgtacacaacaagacagtttatcttgtccatggggtaagtgtatgcctgatctttttaattcagtacaatctctgaaggtgttaacactaatgttttacaagaatgtagaggcgactcggtgctatgaagcgtgttaaacaactcacacaattgctacaaaacaccagggaggggctttttgtgtttttaatttttaaaacatttttccttttcttgtgagccatagtaggcctagagagattactgggtttttataattaaacatttatttcggtgaaatcaaaaa

SEQ ID NO: 11692 - DNA, 2290 bp, Homo sapiens
ttgctcagtcactggggcaactacttttcacccaatgtcctctggaaaagaaagatctggagggtctttttcttcaaaataataaggagggggtgcagaagggtagggatgaacctctccctcctttgccgcttgagctttagctggcaaattggcaaataaacctgctctgtaacctcttctgttacttcgttttactctccttcctcctcatcatcagtgtgaaaaagttccaagggagaacgcaccagaccccacatttgtcccactgttaccctgatgcttctgagctccccttactcaccacagggatggctttaagagtacttgggtgtcctccagcttagttccacattctccgttgctccagtgacccttcaacctggattcgagcccccacaatggacgtcacttgccgagaccagttcagtcagggagaccctaacccagcagcactagaggaattaaagacatacacacagaaatatagaggtgtgaggtggaaaatcaggggtctcacagccttcagagctgagagccccaaccggagatttacccatgtatttattaacagcaagccagtcattagcattgtttctatagttattaaattaactaaaagtatcccttatgagaaatgaagggatgggccaagttaaaggaataggttgggctagttaactgcagcaggagcatgtccttaaggcacagatcgctcatgctattgtttgtggtttaagaatgcctttaagcggttttccgccctgggtgggccaggtattccttgccctcattcctgtaaacctgcaaccttccagcgtgggcgttatggccatcatgaaaatgtcacagtgctacagagattttgtttatggccagttttggggccagtttatggccagattttggggggcctgttcccaacaccaggagatgtgttgatttgctccagcaatgaaaccacatctggtacggcagctgcaattggagtcactacttagttaagctcatcataatccactgtcatcctccaagatccatctgtcttctgcacaggccaaatgggagagttgaacagggagatggtgggaatcaccacccctgtgtccttcaagtccttgatagtagcactaatctccatgttccctccagggattcaatattgtttttgatttactacttttctaggtacagccagctctaatggcttccatttggcgtttccaaccataatagcctttaccagtcaaggagccaatgtgggggttctgccagctgctaagtatgtctatgccaattatgcatcctggcacttggaaaatgaccacaggatgagtctggggacccactggacccgctgtaagttggacctgagctaaaactccattaattacctgacctcaggtgatccacccaccttggcctacctgtagggaccagccccacagggtcggtgggtttttctccccgtgtgcggagatgagagagcatagaaataaagacacaagacaaagagaaaagaaaagacacctgggcccaggggaccactaccaccaagacgcagagaccggtagtggtcccaaatgccaggctgcactgatatttattagatacaagacaaaggggcagggtaaggagtgtgagccatctccaatgataggtaaggccacgtgggtcatgtgtccactgaacagggggcccttccctgcctggcagccgaggcagagagagagggagagagagagacagcttacaccattatttctgcatatcagagacttttagtactttcactaattttctactgctatctaaaaggcagagccaggtgtacaggatggaacacgaaagcagactaggagcgtgaccactgaagcacagcatcacagggagacggttaggcccctggataactgcgggcaggcctgactgatgtcaggccctccacaagaggtggaggactagagtcttctctaaactcccccagggaaagggacactccctttcccggtctgctaagtagcaggtatttttccttggcactgacgctactgctagaccacggtctacttggcaacaggcgttttcccagatgctggcgttaccactagaccaaggagccctctggtggccctgtctgggcataacagaaggctcacactcatgtcttctggtcacttctcactatgtcccctcagctcctatatctgtatggcctggtttttcctaggttatgattatagagtgaggattattataatattggaataaagagtaattgctacaaact

SEQ ID NO: 11693 - DNA, 565 bp, Homo sapiens
tgcgcagacggggcggggcagccctttgtctgaaggtgctgcgggatgccgttccttcgcgcgtgaggctgcggctctgacgccccataggctccttcaatttccgtgatcctcggagtccccaggagaccaggtgatggcagcagccagactcctgccagtgccggcaggaccccaggccaagctgaccttcgaggatgtggctgtgctcctctcccaggatgaatgggaccgcctgtgccctgctcagaggggcctctacagaaatgtgatgatggaaacctatgggaatgtagtctcattgggacttccaggatccaagcctgacataatctcccagctggagcgaggggaagatccctgggtcctggacaggaagggggctaagaagagccagggcctgtggagtgactactcagacaacctcaaatatgaccacactacagcctgtacacaacaagacagtttatcttgtccatgggaatgtgaaaccaagggagagagtcaaaatacagacttgagtccgaagccattaatttcagagcaaacagtgattctggggaaa

SEQ ID NO: 11694 - DNA, 571 bp, Homo sapiens
gtttcaccgtgttggccaggctggtctcgaactcctggcctcaagtgatcctcccacctttgcttccgaaagtgttgggattacaggcgtgaggcaccatgcctggcctagaaaaccctttatctggagcttttaactttattcaagatcagaaaggttatgctaactttttagtaaaaattcaactcaaaaatgggtattttcctcaaaacttgcccttatgacctgcagatcctgtgccccagaaaccgtgagatgtctcaattcccatgcaggcaaaggaggggagcttcacactcagcagacctcatagctgttacaccaagtgggtacctctttacatcttatggtatttcccccaaaacaatgctgaaaatactgttctttggtagatatatttaaaacatacatttctcaaattcagatagctcttttttactatctctagtatttctattcctatatttgaaggggttttttttttcatttttttactcctggttcaagagtccagtatccattgccatattactatgatgaagatgaatctagtttattcataattaaaaat

SEQ ID NO: 11695 - DNA, 584 bp, Homo sapiens
ttcgtaacttgtcttctggacataggtttctctgtccggtggtctctacgaagtgggtaagggtgggagattgccattgacattcccgccctggacgggactctggtcctgtgggctttgacaggtcactgcattcctgccaggtcgacgttttgcgtttattgccccataggctccttcaatttccgtgatcctcggagtccccaggagaccaggtgatggcagcagccagactcctgccagtgccggcaggaccccaggccaagctgaccttcgaggatgtggctgtgctcctctcccaggatgaatgggaccgcctgtgccctgctcagaggggcctctacagaaatgtgatgatggaaacctatgggaatgtagtctcattgggacttccaggatccaagcctgacataatctcccagctggagcgaggggaagatccctgggtcctggacaggaagggggctaagaagagccagggcctgtggagtgactactcagaatgtgaaaccaagggagagagtcaaaatacagacttgagtccgaagccattaatttcagagcaaacagtgattctggggaaa

SEQ ID NO: 11696 - DNA, 687 bp, Homo sapiens
gtttcaccgtgttggccaggctggtctcgaactcctggcctcaagtgatcctcccacctttgcttccgaaagtgttgggattacaggcgtgaggcaccatgcctggcctagaaaaccctttatctggagcttttaactttattcaagatcagaaaggttatgctaactttttagtaaaaattcaactcaaaaatgggtattttcctcaaaacttgcccttatgacctgcagatcctgtgccccagaaaccgtgagatgtctcaattcccatgcaggcaaaggaggggagcttcacactcagcagacctcatagctgttacaccaatggcttctgctgtggctatcccatgtccggtgtgaggagacagtggtatgactcatccctttgtgtccggaattggtgggttcttggtctcactgacgtcaagaatgaagctgcggaccctcgtggcagctccagcaagtatcaatcccattgctggacatcacatccaacacccgtctccaattagtgggtgagtctctctttttttcctctccagattcctctcatatttctgggggttcaccagaaaattccagtaccaggtgagaggtctccctggtcaccaggtgaccgtggcctaccctctcaggggacgccgtcagaatgctcaccactttggccactgcagcctctgggggtct

SEQ ID NO: 11697 - DNA, 426 bp, Homo sapiens
ttcgtaacttgtcttctggacataggtttctctgtccggtggtctctacgaagtgggtaagggtgggagattgccattgacattcccgccctggacgggactctggtcctgtgggctttgacaggtcactgcattcctgccaggtcgacgttttgcgtttattggtgagattgaaatcccttcatttgtgttttcgccatttgtatttctttgtgatttgccagctcatatttttttccatgtatgttgaaaacatgcttctcaatttgtcttttgactctgattatggtgtttgattctggtttgggctttttcaaaatagaaaatttaaaatttttaggagtcaaatattttgccttaaggcattttgggctttgtgctgtgttttaaagggctttccccactccaagattatttttaaaataa

SEQ ID NO: 11698 - DNA, 354 bp, Homo sapiens
tttcgtttcagcagttggtcgagtgtgctacttgccgggtgtcttatcctctccccattttgctgtcgatgctgtcttttctgttactgtgttagagccctattttaatgaatgagcccaactctttgcaacacagcaaatattttccttgttgtttattggcttaattttaaaattgaaaataatatgcaatacttcttctaatgcaggcatgtcagaaatatataagtttcagaatttttgaatgccgttagagctttaggcacgcacgcacacccttttttctgtcatcaaagggaagctggtgtcgtttgactaacaccaggggcggcagggggcgctccactcgtcctc

SEQ ID NO: 11699 - DNA, 276 bp, Homo sapiens
tgcgcagacggggcggggcagccctttgtctgaaggtgctgcgggatgccgttccttcgcgcgtgaggctgcggctctgacggtgagtggggggcgcgtgtcgtcgccggccaggaccctctcccatcacggacaccggagccggtgcgtcctccacacgaatcgtggactcttccccgcgagcacgcactgcctcctgcgtttacgctggtcccctcccctcacggacgcgcggcggcctcctccccagggccaaggccgcgccctctcccccgt

SEQ ID NO: 11700 - DNA, 1711 bp, Homo sapiens
cagggccgagtgggcgacggagacggtcgctgttcagtgacgccccctgtcgggagcacgccgggccggacacagcgaagagcggctgcgcctcggacctcgcagcactcagcctcctaagtgggaggaataacctcacgcaagtcatcaaacaagaggacttcagtgttgcaacgaaggaagagaaagggcccctgagaaggcgacattcgcactgcagcggcgcagggaccagccaggcggctgagggcaaggtcgttcccagcagcgggaaccgcaagggcaaaaggctcggaggggggaacgagctcgagttccaggacggccgaagccagcgcaagtcgaggagggactgcggggccggcaggggtgtcctccacagggcgacggcggcaggagctcgggaaccgggactgcgagcggccccataggctccttcaatttccgtgatcctcggagtccccaggagaccaggtgatggcagcagccagactcctgccagtgccggcaggaccccaggccaagctgaccttcgaggatgtggctgtgctcctctcccaggatgaatgggaccgcctgtgccctgctcagaggggcctctacagaaatgtgatgatggaaacctatgggaatgtagtctcattgggacttccaggatccaagcctgacataatctcccagctggagcgaggggaagatccctgggtcctggacaggaagggggctaagaagagccagggcctgtggagtgactactcagacaacctcaaatatgaccacactacagcctgtacacaacaagacagtttatcttgtccatggggctggagtgcagtgtagagacagagtcttgctgtgttgcccaagctggtctcaaactctgggattacagacatgagccaccacaccgggtgaaacttcagacaatagaagtaatacttttcagtgtaaatgagtaactatttctttagcctataggcttttattccatgaagatgaggcttatacattaaaaaaagaaagaactaaaacttctatcagtttaaaaaacacatagccagcttaggcaagatactgagaccccacactacaaaataaaattaaaaattagccagacatgatggtgcattcctgtaatcccagccacatggaggctgagacaggaggattccttgagcccaggaggttgaggttgcagtaagccatgatcacaccactgcactccagcctgggtgatagagtgagaccctgtctcaaaaaaaaacccacatagagtgactttctaaaatgagatatgttaaaaattgtattaaactgggccgggggtggtggctcatgcctgtaatctcagcactttgggaggccgaggcagatggaccacctgaggtcaggagtttgaaaccaagctggccaacatggtgaaaccccatctctactaaaaatacaaaaaattatctgggcatggtggcacatgcctgtaatcccagctacttgggaggctgaggcaggagaatcgcttgaacctgggaggcagaggttgcggtgagctgagatcgtgccattgcactccagcctgggcaacaagaacgaaactctgtctcaaaaaaattgtattaaactgaagacagtgaatttaaatttttttattaaaaaaactgttaaattctcactgtttcaatttgtcaatacacttaataaattcctctgaata

SEQ ID NO: 11701 - DNA, 1158 bp, Homo sapiens
cagggccgagtgggcgacggagacggtcgctgttcagtgacgccccctgtcgggagcacgccgggccggacacagcgaagagcggctgcgcctcggacctcgcagcactcagcctcctaagtgggaggaataacctcacgcaagtcatcaaacaagaggacttcagtgttgcaacgaaggaagagaaagggcccctgagaaggcgacattcgcactgcagcggcgcagggaccagccaggcggctgagggcaaggtcgttcccagcagcgggaaccgcaagggcaaaaggctcggaggggggaacgagctcgagttccaggacggccgaagccagcgcaagtcgaggagggactgcggggccggcaggggtgtcctccacagggcgacggcggcaggagctcgggaaccgggactgcgagcggccccataggctccttcaatttccgtgatcctcggagtccccaggagaccaggtgatggcagcagccagactcctgccagtgccggcaggaccccaggccaagctgaccttcgaggatgtggctgtgctcctctcccaggatgaatgggaccgcctgtgccctgctcagaggggcctctacagaaatgtgatgatggaaacctatgggaatgtagtctcattgggacttccaggatccaagcctgacataatctcccagctggagcgaggggaagatccctgggtcctggacaggaagggggctaagaagagccagggcctgtggagtgactactcaggtgagtgaggagagctggcccctccctcactgagggctaaacaggtcctgagcaaagctgtggacctagttcatactgtgccgctcactggagtggcttccacctggagtaaaaccttatctggccttatctggcaaaggagtctatagactgggggttgctgaatcaggtggcagcccatggctggaagtgagcatagcagtgaatttcaacaagctgatgtgcagagccatgtagaggaagttagggcatggctgcagtgattctgtccctgaccagagggactggttagccagatttggtcctaataggacattcaggttttgagagttacctgatgatttagaaaataacaaagcatcctaaatgtggaaaggaagtgtctcaacctgacactt

SEQ ID NO: 11702 - DNA, 533 bp, Homo sapiens
ccgcgtcaagacgaaaacgagctgctttcgtttcagcagttggtcgagtgtgctacttgccgggtgtcttatcctctccccattttgctgtcgatgctgtcttttctgttactgtgttagagccctattttaatgaatgagcccaactctttgcaacacagcaaatattttccttgttgtttattggcttaattttaaaattgaaaataatatgcaatacttcttctaatgcaggcatgtcagaaatatataaaagtcatcccccccgacactctgccagtgtatgaagaggcaggagctgtgaacagtttcagaatttttgaatgccgttagagctttaggcacgcacgcacacccttttttctgtcatcaaagggaagctggtgtcgtttgactaacaccaggggcggcagggggcgctccactcgtcctccgccgggtgggtactcgcagatttttcagttcgtaacttgtcttctggacataggtttctctgtccggtggtctctacgaagtgggtaagggtgggagat

SEQ ID NO: 11703 - DNA, 254 bp, Homo sapiens
tgtgatttgccagctcatatttttttccatgtatgttgaaaacatgcttctcaatttgtcttttgactctgattatggtgtttgattctggtttgggctttttcaaaatagaaaatttaaaatttttaggagtcaaatattttgccttaaggcattttgggctttgtgctgtgttttaaagggctttccccactccaagattatttttaaaataaactcttgtttttctgtggtacttgtaaaatgttggatac

SEQ ID NO: 11704 - DNA, 1740 bp, Homo sapiens
tgcgcagacggggcggggcagccctttgtctgaaggtgctgcgggatgccgttccttcgcgcgtgaggctgcggctctgacgccccataggctccttcaatttccgtgatcctcggagtccccaggagaccaggtgatggcagcagccagactcctgccagtgccggcaggaccccaggccaagctgaccttcgaggatgtggctgtgctcctctcccaggatgaatgggaccgcctgtgccctgctcagaggggcctctacagaaatgtgatgatggaaacctatgggaatgtagtctcattgggacttccaggatccaagcctgacataatctcccagctggagcgaggggaagatccctgggtcctggacaggaagggggctaagaagagccagggcctgtggagtgactactcagatcctgtgccccagaaaccgtgagatgtctcaattcccatgcaggcaaaggaggggagcttcacactcagcagacctcatagctgttacaccaatggcttctgctgtggctatcccatgtccggtgtgaggagacagtggtatgactcatccctttgtgtccggaattggtgggttcttggtctcactgacgtcaagaatgaagctgcggaccctcgtggtacagccagctctaatggcttccatttggcgtttccaaccataatagcctttaccagtcaaggagccaatgtgggggttctgccagctgctaagtatgtctatgccaattatgcatcctggcacttggaaaatgaccacaggatgagtctggggacccactggacccgctgtaagttggacctgagctaaaactccattaattacctgacctcaggtgatccacccaccttggcctacctgtagggaccagccccacagggtcggtgggtttttctccccgtgtgcggagatgagagagcatagaaataaagacacaagacaaagagaaaagaaaagacacctgggcccaggggaccactaccaccaagacgcagagaccggtagtggtcccaaatgccaggctgcactgatatttattagatacaagacaaaggggcagggtaaggagtgtgagccatctccaatgataggtaaggccacgtgggtcatgtgtccactgaacagggggcccttccctgcctggcagccgaggcagagagagagggagagagagagacagcttacaccattatttctgcatatcagagacttttagtactttcactaattttctactgctatctaaaaggcagagccaggtgtacaggatggaacacgaaagcagactaggagcgtgaccactgaagcacagcatcacagggagacggttaggcccctggataactgcgggcaggcctgactgatgtcaggccctccacaagaggtggaggactagagtcttctctaaactcccccagggaaagggacactccctttcccggtctgctaagtagcaggtatttttccttggcactgacgctactgctagaccacggtctacttggcaacaggcgttttcccagatgctggcgttaccactagaccaaggagccctctggtggccctgtctgggcataacagaaggctcacactcatgtcttctggtcacttctcactatgtcccctcagctcctatatctgtatggcctggtttttcctaggttatgattatagagtgaggattattataatattggaataaagagtaattgctacaaact

SEQ ID NO: 11705 - DNA, 591 bp, Homo sapiens
tgcgcagacggggcggggcagccctttgtctgaaggtgctgcgggatgccgttccttcgcgcgtgaggctgcggctctgacgccccataggctccttcaatttccgtgatcctcggagtccccaggagaccaggtgatggcagcagccagactcctgccagtgccggcaggaccccaggtaagctgtccccagtgcttatgcagtgcccccagcccgagccctgtggttccttccgtgccccgtagagctcctaagagcagccagagcgtcaccacatgccctgaactccgcggccccttcccatcacccacctcagctcacagagccccccactgccaactgctcatgtcacatgtcacatgcacccactccccatcacagacatcaggatttggttttacctgcagcagcccctgtcgttcgccaagctgaccttcgaggatgtggctgtgctcctctcccaggatgaatgggaccgcctgtgccctgctcagaggggcctctacagaaatgtgatgatggaaacctatgggaatgtagtctcattgggtaagccaccttagcaggcctcgtctatgtatctgcgtatt

SEQ ID NO: 11706 - DNA, 540 bp, Homo sapiens
cagggccgagtgggcgacggagacggtcgctgttcagtgacgccccctgtcgggagcacgccgggccggacacagcgaagagcggctgcgcctcggacctcgcagcactcagcctcctaagtgggaggaataacctcacgcaagtcatcaaacaagaggacttcagtgttgcaacgaaggaagagaaagggcccctgagaaggcgacattcgcactgcagcggcgcagggaccagccaggcggctgagggcaaggtcgttcccagcagcgggaaccgcaagggcaaaaggctcggaggggggaacgagctcgagttccaggacggccgaagccagcgcaagtcgaggagggactgcggggccggcaggggtgtcctccacagggcgacggcggcaggagctcgggaaccgggactgcgagcgggtaaggctcggcgatgggctgtaacctccgcgcccggaagtgcggccggggagccggccgggcccattgcccagaggtgttcggcccctctagggatcgcggaggtctggctctcgg

SEQ ID NO: 11707 - DNA, 1370 bp, Homo sapiens
tgcgcagacggggcggggcagccctttgtctgaaggtgctgcgggatgccgttccttcgcgcgtgaggctgcggctctgacgccccataggctccttcaatttccgtgatcctcggagtccccaggagaccaggtgatggcagcagccagactcctgccagtgccggcaggaccccaggccaagctgaccttcgaggatgtggctgtgctcctctcccaggatgaatgggaccgcctgtgccctgctcagaggggcctctacagaaatgtgatgatggaaacctatgggaatgtagtctcattgggacttccaggatccaagcctgacataatctcccagctggagcgaggggaagatccctgggtcctggacaggaagggggctaagaagagccagggcctgtggagtgactactcagacaacctcaaatatgaccacactacagcctgtacacaacaagacagtttatcttgtccatggggctggagtgcagtgtagagacagagtcttgctgtgttgcccaagctggtctcaaactctgggattacagacatgagccaccacaccgggtgaaacttcagacaatagaagtaatacttttcagtgtaaatgagtaactatttctttagcctataggcttttattccatgaagatgaggcttatacattaaaaaaagaaagaactaaaacttctatcagtttaaaaaacacatagccagcttaggcaagatactgagaccccacactacaaaataaaattaaaaattagccagacatgatggtgcattcctgtaatcccagccacatggaggctgagacaggaggattccttgagcccaggaggttgaggttgcagtaagccatgatcacaccactgcactccagcctgggtgatagagtgagaccctgtctcaaaaaaaaacccacatagagtgactttctaaaatgagatatgttaaaaattgtattaaactgggccgggggtggtggctcatgcctgtaatctcagcactttgggaggccgaggcagatggaccacctgaggtcaggagtttgaaaccaagctggccaacatggtgaaaccccatctctactaaaaatacaaaaaattatctgggcatggtggcacatgcctgtaatcccagctacttgggaggctgaggcaggagaatcgcttgaacctgggaggcagaggttgcggtgagctgagatcgtgccattgcactccagcctgggcaacaagaacgaaactctgtctcaaaaaaattgtattaaactgaagacagtgaatttaaatttttttattaaaaaaactgttaaattctcactgtttcaatttgtcaatacacttaataaattcctctgaata

SEQ ID NO: 11708 - DNA, 1803 bp, Homo sapiens
tgcgcagacggggcggggcagccctttgtctgaaggtgctgcgggatgccgttccttcgcgcgtgaggctgcggctctgacgccccataggctccttcaatttccgtgatcctcggagtccccaggagaccaggtgatggcagcagccagactcctgccagtgccggcaggaccccaggccaagctgaccttcgaggatgtggctgtgctcctctcccaggatgaatgggaccgcctgtgccctgctcagaggggcctctacagaaatgtgatgatggaaacctatgggaatgtagtctcattgggacttccaggatccaagcctgacataatctcccagctggagcgaggggaagatccctgggtcctggacaggaagggggctaagaagagccagggcctgtggagtgactactcagacaacctcaaatatgaccacactacagcctgtacacaacaagacagtttatcttgtccatgggatcctgtgccccagaaaccgtgagatgtctcaattcccatgcaggcaaaggaggggagcttcacactcagcagacctcatagctgttacaccaatggcttctgctgtggctatcccatgtccggtgtgaggagacagtggtatgactcatccctttgtgtccggaattggtgggttcttggtctcactgacgtcaagaatgaagctgcggaccctcgtggtacagccagctctaatggcttccatttggcgtttccaaccataatagcctttaccagtcaaggagccaatgtgggggttctgccagctgctaagtatgtctatgccaattatgcatcctggcacttggaaaatgaccacaggatgagtctggggacccactggacccgctgtaagttggacctgagctaaaactccattaattacctgacctcaggtgatccacccaccttggcctacctgtagggaccagccccacagggtcggtgggtttttctccccgtgtgcggagatgagagagcatagaaataaagacacaagacaaagagaaaagaaaagacacctgggcccaggggaccactaccaccaagacgcagagaccggtagtggtcccaaatgccaggctgcactgatatttattagatacaagacaaaggggcagggtaaggagtgtgagccatctccaatgataggtaaggccacgtgggtcatgtgtccactgaacagggggcccttccctgcctggcagccgaggcagagagagagggagagagagagacagcttacaccattatttctgcatatcagagacttttagtactttcactaattttctactgctatctaaaaggcagagccaggtgtacaggatggaacacgaaagcagactaggagcgtgaccactgaagcacagcatcacagggagacggttaggcccctggataactgcgggcaggcctgactgatgtcaggccctccacaagaggtggaggactagagtcttctctaaactcccccagggaaagggacactccctttcccggtctgctaagtagcaggtatttttccttggcactgacgctactgctagaccacggtctacttggcaacaggcgttttcccagatgctggcgttaccactagaccaaggagccctctggtggccctgtctgggcataacagaaggctcacactcatgtcttctggtcacttctcactatgtcccctcagctcctatatctgtatggcctggtttttcctaggttatgattatagagtgaggattattataatattggaataaagagtaattgctacaaact

SEQ ID NO: 11709 - DNA, 811 bp, Homo sapiens
tgacgggaaaaaagttccttgggagtgagaagtgattactttttataaggtggttgagaaaggcctcactgataagatacttagagagctgaaggaggtggagagagagccatgcttacctccaaaggaacagcattccagagaggaatatgcatggcatgtttagaacagcagaaaaagccaatgaggctggagtgaagttcagcaaaggcaaaggtggagagagttgagatccaagagggagcagggagtcatgtcacgccctggtgaggatcataaggattgtcttttactctgaataaaatgggaatctttgcaggttgaacagaggactaatgagattcaacttagtgtttttaaaaagatctctctggcctctctgttgagaacagttcataggagaactctggtcaaaacaggggtcctggttataaggcagcactccaggcaaaacaagccagaggtatggatgagagaggcagctgcagatagaagtggtcacatgcaggatgtattttgaaagcagacctggccaggtgtggtggctcaggcctgtaattccagcactttgggaggccaaggcaggaggatcacttgagcccaggagttcaaggctagcctgggaaacatagcaagactctgtctctaaaaaaataaaaaattagctgggtttggtggtgcgtgcctgtagtcccagggacttgggaggctgaggtgagagaatcgctttagcctgggaagtcatggctgcagtgagctgtgatcacgccactgcactccagcctgggcaacagagcaagaccctgtctag

SEQ ID NO: 11710 - DNA, 737 bp, Homo sapiens
gcatctcctgcccctcttttcatccactgcatttcagccacactggtctttgccaacttaaaaacacaaagttcattccccacttaagacttgcaacagctcctccctctgcctgacatgatcaacccgagcttcccacacttgccattcagatctgagcttaaatgacacctacctgaagaggccttcctactctcccactcttccactctccattctaaggtcgcatcctcaccccacctaccaccagcacctccaccctgcttatattctcccaaagtacatcgcactacttaatattttttggcccaattattttttgtctcttctactagaatgttagaattacaagaaagagatcctgtctgttttattcactattgtatcttcagtactggaacagtacgtggcacttagatattcaattattttttactgaatgtttacaccactcctgagaagaataagcgtaagcgaaagaaggtgaagctggctgtcctgaaatactgtaaggtggatgagaatggcaaaataagtcgccttcatctagagtgctcttcagatgaatgtggtactggagcgtttatggccagccactttgacagacattattgtgacaaatgtctcattgcttcagcaaaccagaagacaattaattgtgtatgagttaataaaagacatgaactaacaaaacacatttactgaatgaataaatgtattaataattaaatgtcact

SEQ ID NO: 11711 - DNA, 384 bp, Homo sapiens
caatacagttatctttaagaatctgaaatgttctcatgagaaacagaaaatagagattctcttctctcttcaggaggtaggaccatgtacaaaggaaggaagttcaaaagagaaaaaagaatattcatctcagttaagagattagggaaagaatgagaaggaattgacatttcacttgctgagcttatattatatacaatatattatacagtttttatactcatttataccttactttccaatagttaatgttttccaaatacactattgtcattcttctagcaaaagcccagaaagtattttatagggagtcccatggaagataagatttgatatcctctgtggcttcttcaaatactaatagtttatgatttgctagctagc

SEQ ID NO: 11712 - DNA, 469 bp, Homo sapiens
ggaagcatttttctgcctcagcagagagaaaagtcaacaatggtctggtcatggtgaggaaaggaagtttcataaaagttcaacgaagaggagagacaggaaaaaagcaacaaaccacagtttctgaattgttggtctacaaaataaaagtctaatttttccatcagtcccaggtaaataccaacttagctgctgttgtaaactcaaattgctataggtaagtgaacatttttcagttatggtcatctataaaccagactcttgttgaaaagctggctaagattagctgaggtttataatctgcctaagtgaaattacttcatatacatgtttctaaatttccctaagaaattttgaaaaaggaatttaaaaatattaagatacagcaacaaaaagccatttcatttttgactgtattttaaggatattccaattttaaaatgttcaaattaaatgaagctttcaacac

SEQ ID NO: 11713 - DNA, 741 bp, Homo sapiens
catttaatatcatttattgtctagcaattgatttgaagatgaattatttgcatttccaggattaagtcattttatttgcaatggctcacatcaaatgactagctaaaaagagtttaaagaattaaaccaaagagattgttttgacaaaccttttccagcctattaaaattttcttagttttgtcctatcacatgtagagtagtacataagttattcggctctttattcgcaccactgcaacataaaagaaaaaacaaacagacactaaaacattgcaaagtcagcaatttgggggcttagaaatgtcctcacctcaacatatgtgcgttaataaataacagagggttatagtgccttttgggtgttttaaaaggaaaagaaaaaataaaatagcagaggacagagtaaattttcaccatgatagttaataaagtttcagtacaaaaccagttgttagcaatcaacaaacatgatattcttataataatatgatatttagaaactacatttatcatctttcttttgagacagagtctcactttgttgccgtggctgaagtgcagtggtgtgatctcagctcactgcaacctccatcccccggattcaagcgattcttgtgtctctgcctcctgagtagctgggataggagaatcgcttgaatctgggagtcagaggttgcattgagctaagatcgtgccactgcactccagattgggtgatggagcgagactccaactcaaa

SEQ ID NO: 11714 - DNA, 198 bp, Homo sapiens
ttccttagtgcctgtatctgggtcagtcagtccccttacctccctttccttggcttaaggtcctgctctgaacatgtccctttcaatattcatgtacagatattctggtggacacatggatgctgttttttcacatcctccctaacactggatattactgattttttttttcatttcagacattctgcatgtgttcca

SEQ ID NO: 11715 - DNA, 1866 bp, Homo sapiens
gtaaggaactgtagcttctctctgaaactgccgggaaagggaaaatctttttaaaatagacatcacacaaccaacagggtcccctaggttcaggcggggaggtgaggtcgagtgagaggaactgcttagcatacgcggggatgctcctcccatctcaccccaccgcgctaaggagaaggtcactttctctttaaatgcaaatgaactccctccagcttagctttcacccggtggtgttcccgggaggagagggcggagggcggagggaacttgcaccgaagcatcactcgagaccccaaacctccaggcctgaggcccagccagcgcccaatggatgacaaaaagaagaaacggagtcccaagccctgcctggcccagccagcccaggccccaggcacactacggagggtccctgtgcctaccagccacagcggctccttggccctaggacttcctcatctgccatcccccaagcagcgggccaagttcaagagagtaggcaaagagaagtgccgcccagtcctggctggaggtggaagcggctctgcaggcacgcccctgcagcactccttcctgaccgaggtgactgatgtctatgagatggaggggggactcctgaacctgctcaatgatttccactctggccggctgcaggccttcgggaaggaatgctcctttgagcagctggagcacgttcgggagatgcaggagaagctagcccggctgcacttcagcctggatgtgtgtggggaggaggaggacgatgaagaggaagaggatggggtcactgaggggctgccagaggagcagaagaagacaatggctgaccgtaacctggaccagctgcttagcaatctggaagacctcagtaattctatccagaagctgcacctggccgagaacgccgagcctgaggagcagtccgctgcgtaggcgtcccacgcaggcccacactgcccctctcattctcttcaaactgtgactttttacagactcgggcgggtgttctgcggccccccaggtgctatgggggaggggggcgttgaatggaattaaaccagaaagaaagcaaaaaaaaaaaaacaaaaacaaaaaaaaacaaaaaaaaaaaaaaaagaaaaaaaaaaacacggagcaaaaaaaaaggacagagcacgggaggacacaaaaaggcagagccagagaaaacaaacacgacggagcccaacataaggaggaagagacaaagaacaagcacgacagacgcacacgaaaacaagacggcaccgacgggacgaaaacagagggccgagacggaacgagcggaagagacgccacacacaagaggggaggagaaaagaagaggaacaagaccgagaagagagaaggagaggaaaagaggagagagagagaaaaagagaagagaaagagagacctggaagaggaaagaagaaggaacagagagagagatctcctccgacgcgatcattaaggagaagagtataatagaagcagattaggtaataagagtgatgtagtatcacgagtgagacaagaaacaaagagaaaagagataagacaaatcagataaagatgaatcgtgtattcaggaaagaaaagcaagggggaggggcgggagaggaagagaagcggaaggaggagaagaagaaggaagtgcgcggagagaagcgagaggaccgcacaagcgaagcgagggaggcgcggcggaccggaaggggcagcacagcgaggcgagggcaggggggaggccacgcaggggagagggcaggggcagaaggcgaggggggcgggaaggggagccccggcgcgcaggcgagggacgagaagacgcaggggaggagcaggacggcagaggagagaagacaa

SEQ ID NO: 11716 - DNA, 982 bp, Homo sapiens
caggcagaaggggaattaggttgggccttagaaggtccttcaagtgtacatccacgatcccagcagcagacactggcatctggctctgcccctaccgtatagatgaggtgacaagctggaaggtcccagggcccttccttggtgcagctctcagggatttctgggtgaagggctaactttgcccctggctatctttgtggggttgcttccctcctaggcctgaggcccagccagcgcccaatggatgacaaaaagaagaaacggagtcccaagccctgcctggcccagccagcccaggccccaggcacactacggagggtccctgtgcctaccagccacagcggctccttggccctaggacttcctcatctgccatcccccaagcagcgggccaagttcaagagagtaggcaaagagaagtgccgcccagtcctggctggaggtggaagcggctctgcaggcacgcccctgcagcactccttcctgaccgaggtgactgatgtctatgagatggaggggggactcctgaacctgctcaatgatttccactctggccggctgcaggccttcgggaaggaatgctcctttgagcagctggagcacgttcgggagatgcaggagaagctagcccggctgcacttcagcctggatgtgtgtggggaggaggaggacgatgaagaggaagaggatggggtcactgaggggctgccagaggagcagaagaagacaatggctgaccgtaacctggaccagctgcttagcaatctggaagacctcagtaattctatccagaagctgcacctggccgagaacgccgagcctgaggagcagtccgctgcgtaggcgtcccacgcaggcccacactgcccctctcattctcttcaaactgtgactttttacagactcgggcgggtgttctgcggccccccaggtgctatgggggaggggggcgttgaatggaattaaaccagaaagaaagcaa

SEQ ID NO: 11717 - DNA, 1241 bp, Homo sapiens
  misc_feature (24)..(24): n is a, c, g, or t
  misc_feature (71)..(71): n is a, c, g, or t
cctatgtttaagtgtgatctcccnagggcagatgggataaaaccctgaatgcagataaatgctcctgccanagtctccctctgccttccggggtgagagagggcaggcggggactgcaacctcagtccacagacggcccgagaccctcgtccccggccctttgcacaggtgagggaactaaacctgtgcaagatgggagaccggggtgggaggaaggactggtccaaagcgccacgatccttgacgggcacagccagaagctgcacctggccgagaacgccgagcctgaggagcagtccgctgcgtaggcgtcccacgcaggcccacactgcccctctcattctcttcaaactgtgactttttacagactcgggcgggtgttctgcggccccccaggtgctatgggggaggggggcgttgaatggaattaaaccagaaagaaagcaaaaaaaaaaaaacaaaaacaaaaaaaaacaaaaaaaaaaaaaaaagaaaaaaaaaaacacggagcaaaaaaaaaggacagagcacgggaggacacaaaaaggcagagccagagaaaacaaacacgacggagcccaacataaggaggaagagacaaagaacaagcacgacagacgcacacgaaaacaagacggcaccgacgggacgaaaacagagggccgagacggaacgagcggaagagacgccacacacaagaggggaggagaaaagaagaggaacaagaccgagaagagagaaggagaggaaaagaggagagagagagaaaaagagaagagaaagagagacctggaagaggaaagaagaaggaacagagagagagatctcctccgacgcgatcattaaggagaagagtataatagaagcagattaggtaataagagtgatgtagtatcacgagtgagacaagaaacaaagagaaaagagataagacaaatcagataaagatgaatcgtgtattcaggaaagaaaagcaagggggaggggcgggagaggaagagaagcggaaggaggagaagaagaaggaagtgcgcggagagaagcgagaggaccgcacaagcgaagcgagggaggcgcggcggaccggaaggggcagcacagcgaggcgagggcaggggggaggccacgcaggggagagggcaggggcagaaggcgaggggggcgggaaggggagccccggcgcgcaggcgagggacgagaagacgcaggggaggagcaggacggcagaggagagaagacaa

SEQ ID NO: 11718 - DNA, 325 bp, Homo sapiens
ggtgcctgactgccccctaccctgtgatcatggtcatgtccaccccacccagagtaggcaaagagaagtgccgcccagtcctggctggaggtggaagcggctctgcaggcacgcccctgcagcactccttcctgaccgaggtgactgatgtctatgagatggaggggggactcctgaacctgctcaatgatttccactctggccggctgcaggccttcggtgagtcctgggggctggtttcagcgggtgtgtggatagggctgtagggcccagtccatggggcatggctgggaccatggttccagggttccagggttccaggact

SEQ ID NO: 11719 - DNA, 1072 bp, Homo sapiens
gtaaggaactgtagcttctctctgaaactgccgggaaagggaaaatctttttaaaatagacatcacacaaccaacagggtcccctaggttcaggcggggaggtgaggtcgagtgagaggaactgcttagcatacgcggggatgctcctcccatctcaccccaccgcgctaaggagaaggtcactttctctttaaatgcaaatgaactccctccagcttagctttcacccggtggtgttcccgggaggagagggcggagggcggagggaacttgcaccgaagcatcactcgagaccccaaacctccaggcctgaggcccagccagcgcccaatggatgacaaaaagaagaaacggagtcccaagccctgcctggcccagccagcccaggccccaggcacactacggagggtccctgtgcctaccagccacagcggctccttggccctaggacttcctcatctgccatcccccaagcagcgggccaagttcaagagagtaggcaaagagaagtgccgcccagtcctggctggaggtggaagcggctctgcaggcacgcccctgcagcactccttcctgaccgaggtgactgatgtctatgagatggaggggggactcctgaacctgctcaatgatttccactctggccggctgcaggccttcgggaaggaatgctcctttgagcagctggagcacgttcgggagatgcaggagaagctagcccggctgcacttcagcctggatgtgtgtggggaggaggaggacgatgaagaggaagaggatggggtcactgaggggctgccagaggagcagaagaagacaatggctgaccgtaacctggaccagctgcttagcaatctggaagacctcagtaattctatccagaagctgcacctggccgagaacgccgagcctgaggagcagtccgctgcgtaggcgtcccacgcaggcccacactgcccctctcattctcttcaaactgtgactttttacagactcgggcgggtgttctgcggccccccaggtgctatgggggaggggggcgttgaatggaattaaaccagaaagaaagcaa

SEQ ID NO: 11720 - DNA, 1645 bp, Homo sapiens
gtaaggaactgtagcttctctctgaaactgccgggaaagggaaaatctttttaaaatagacatcacacaaccaacagggtcccctaggttcaggcggggaggtgaggtcgagtgagaggaactgcttagcatacgcggggatgctcctcccatctcaccccaccgcgctaaggagaaggtcactttctctttaaatgcaaatgaactccctccagcttagctttcacccggtggtgttcccgggaggagagggcggagggcggagggaacttgcaccgaagcatcactcgagaccccaaacctccaggcctgaggcccagccagcgcccaatggatgacaaaaagaagaaacggagtcccaagccctgcctggcccagccagcccaggccccaggcacactacggagggtccctgtgcctaccagccacagcggctccttggccctaggacttcctcatctgccatcccccaagcagcgggccaagttcaagagagtaggcaaagagaagtgccgcccagtcctggctggaggtggaagcggctctgcaggcacgcccctgcagcactccttcctgaccgaggtgactgatgtctatgagatggaggggggactcctgaacctgctcaatgatttccactctggccggctgcaggccttcgggaaggaatgctcctttgagcagctggagcacgttcgggagatgcaggagaagctagcccggctgcacttcagcctggatgtgtgtggggaggaggaggacgatgaagaggaagaggatggggtcactgaggggctgccagaggagcagaagaagacaatggctgaccgtaacctggaccagctgcttagcaatctggaagacctcagtaattctatgtatcctttccaaggaacccgtctatgtgtgtgtgttcctgagaggtcagtttcctcctctccagccctccaggagtattcacacacaaccaacttccccacctcttgcagtcctgtcagatttagccacagactgcccaaacccaggtacaggaatttagaatttccccaaaattagaagaaaagtggttgtaggggatgttttactactgatcaaaatctttgtgagtactttagctgacatcaatcatagcaaagcttgtccgatgtcctcctatcctttcagcattgaacaattatttttactaatttacactaccacctcacctggtcctcagtcagaaacagcgcgagtgcgcgcgcacacaccccagtgtgtctgacctgcacgatctggatgaagagagagggggtgagagagggcaggcggggactgcaacctcagtccacagacggcccgagaccctcgtccccggccctttgcacaggtgagggaactaaacctgtgcaagatgggagaccggggtgggaggaaggactggtccaaagcgccacgatccttgacgggcacagccagaagctgcacctggccgagaacgccgagcctgaggagcagtccgctgcgtaggcgtcccacgcaggcccacactgcccctctcattctcttcaaactgtgactttttacagactcgggcgggtgttctgcggccccccaggtgctatgggggaggggggcgttgaatggaattaaaccagaaagaaagcaa

SEQ ID NO: 11721 - DNA, 787 bp, Homo sapiens
  misc_feature (580)..(580): n is a, c, g, or t
  misc_feature (590)..(590): n is a, c, g, or t
caggcagaaggggaattaggttgggccttagaaggtccttcaagtgtacatccacgatcccagcagcagacactggcatctggctctgcccctaccgtatagatgaggtgacaagctggaaggtcccagggcccttccttggtgcagctctcagggatttctgggtgaagggctaactttgcccctggctatctttgtggggttgcttccctcctaggcctgaggcccagccagcgcccaatggatgacaaaaagaagaaacggagtcccaagccctgcctggcccagccagcccaggccccaggcacactacggagggtccctgtgcctaccagccacagcggctccttggccctaggacttcctcatctgccatcccccaagcagcgggccaagttcaagagagtaggcaaagagaagtgccgcccagtcctggctggaggtggaagcggctctgcaggcacgcccctgcagcactccttcctgaccgaggtgactgatgtctatgagatggaggggggactcctgaacctgctcaatgatttccactctggccggctgcaggccttcgctggaaganctcataattntatccagaagctgcacctggccgagaacgccgagcctgaggagcagtccgctgcgtaggcgtcccacgcaggcccacactgcccctctcattctcttcaaactgtgactttttacagactcgggcgggtgttctgcggccccccaggtgctatgggggaggggggcgttgaatggaattaaaccagaaagaaagcaa

SEQ ID NO: 11722 - DNA, 594 bp, Homo sapiens
tcttgttgcccaggctggagtgcaatggcatgatctcagctcaccgcaacctctgtctcctgggttcaagcgattctcctgcctcagcctcctgggtagctgggattacaggtatgcaccaccctgcccggctaattttgtatttttagtagagatggggtttctccatgttggtcaggctggtctcgaactcccgacctcaggtgatccacctgccttggcctcccaaagtgctgggattacaggcatgagccaccgcccctggcagcagtttctcgtgtctgaatgtttagttgaatccagaaagacaccctggtgggtgctgtatactaaatctacttcacctatttactttgtactccaatccttgttggtgtgaccctctggtttaaagaactggccaaacttccatcaatttagtaaatattcattgaatgtttattatgtgttgggtaatgctatggatacagcattgaagaaaacagacaaaatcccttccttctgggagtttatattctagtaggagaagacagacaataaattaatagtcagtgatcagaatttagataatactgtattttgaattcagagtct

SEQ ID NO: 11723 - DNA, 246 bp, Homo sapiens
tatttgtagccatcataattgtcaaaattggaatccattcagtgctaaaaaaatcctgtttcatgtctattgagaacacaaacgcaagggggcatactgtaattattttaattaataagcatatgtggttatttattgagcataaaatttgggtgtgatacaactataagccctccatctgtgtaatgtaatgtgccctgaggatgtgatatagtgatattaataactgggaactcatttttattt

SEQ ID NO: 11724 - DNA, 803 bp, Homo sapiens
  misc_feature (776)..(776): n is a, c, g, or t
agatcgtgccactgcactccaccgtgggcaacagagggagactccatctcaaaacagaaagaaattatttataaatattattgaccgggcgcggtggctcacgcctgtaatcccaacgctgtgggaggctgaggcaggcagatcacctgaggtcaggagttcaagaccagcctagccaacatggtgaaaccccatctctactaaaaatacaaaaattagctgggcatggtggcaggcacctgtattcttagctactcaggaggctgaggcaggagaatcgcttgaacccaggagatggaaattgcagtgagccaagattttgccactgcactccagcctgagcagcagagtgagacttagtctcaaaaaaaaaagtatgtatatataattatatacaaatatttatttgaaaacctttacaatagcaaagttatttttttaacttgttgaaaactagtaggcagcatttaaaaggttctgtacaatgaatgaaaaagatactgtcatcactgggcattccagagtactagggataagataatatactacacatcttctagaaagtaaaagcaggttacacataaaggaacaaggattagaatgacctcagactttcaacagcaatgttgaatgccagcaaacaatgaagaagtgcctttataatcttaaaagaataatttcaaaaattatttgggctgggcacagtggctcgagggggggcccgggtaccccaatttcgccctattagttgagtccgtatttaccattccactggnccgtcgttttaccacgtcgtgactggt

SEQ ID NO: 11725 - DNA, 691 bp, Homo sapiens
gtctcctgtataaacttcattgaggtagtgtcttgttcactgccatattcctagggacaagtaaagttccctgtatattgtaggagctaagtgttgaatgaatgaatggtggctgctattattgcttcaccttcaccctccaagagtaatctccccattctggtttatagtttctgtgctcactgcttgtgataatcgtaagtatatattgttgagaacagtgcctgttttctctttccctgaaaacacatactttgacgttggctgacatagttcactcagctgttcctaaccactgatccctctgtatcacaggtatctcgggggagctttgtgccttgatggatcaagttcatcatatgcagcactcaaaatggcagcatccttcggacctcaccacgcgaaactacgcccgccgacagaaacatctgcaaagatacagtctgactcagtgggttgacaggaacatgcgaagccaccatcggttccagcgtctcccagacttctcgtacagttaatttgtgtcatcccatcagcaatgaaggtccctatccagggtcctgcttggagcagcatttcatgttcttttgctgttttgtgctttgccgattttggattttatttttcacaaaatttttatttaaaaaactcgtcaccttttggaaatgcccattgccgacttgaatttttt

SEQ ID NO: 11726 - DNA, 429 bp, Homo sapiens
ggatgggggcgcctgttgcttctccagggggttgcgcacgccgtccgccccttggagggattgggaggcccacgccctgctgcgagaagggcgcgttctagctcctgagggactccaagctctaccagacctgcctgaagtgttttaaagcacattttctttttgaaaagaaacctgttgctgcagcttagcgcatctgttctctgtgtccatgtgggaggagaatcctggcaccctcatctagtgaaatgttacctaaagcaaagatttgcagccctgggttgttttttccgtcctgcagtgtttttagttacttcgaaggaatttgcaaaactgttacagataatttcagttctttttgattttttgtaaatgttgtgcctattttttatggagtgataaagcctgctgagtgcgtttcgtgctgtg

SEQ ID NO: 11727 - DNA, 1725 bp, Homo sapiens
tgcggagggcggggctgaggcgcctgagcggggcacaaccctcctagaggcgggacggtttcctgccaatcactgctggtttgccctccccctggtgttggcccggctgactcggggtaggggaggtcggggagggggcgataaaatggcgcagggggcggagtgaggcgcagtcgttcgcccaggctttggcccggcttccggaggaaggtgggagtcaatcattttgacaagtctcctgaaaggaacagctagcaggaactgaaacctttttccatttggtctcgtggcaaaggcagagattgctccagcagctccacacaaaatgatgtgctcacgggtgccctctgaacagtcttctggtacctctctcttgcctaaagacggtgccccattttcttgggattccttggatgaggatggattggatgactccttgctggagctgtcagagggagaagaagatgatggtgatgtaaattacacagaggaagagattgatgcactgttgaaggaagatgacccatcatatgagcagtcttctggggaagatgatggtgggcatgttgagaagggagaaagagggagtcaaattctacttgatactccccgagagaaaaattcatcgtacagcctgggaccagtagctgagactcctgacctcttcaaactacctcagctaagtacatcaagtggtcatggaccagctcatactaaaccattaaacagacgctctgtactagaaaagaatcttataaaagtaactgttgcaccatttaatccaacagtttgtgatgctctgcttgataaggacgagactgattcgtccaaagatactgaaaaactctcttcccttggagaagagatgagagaagatggtcttagcccaaatgaaagcaaactttgtactgaatctgaagggatcagccccaataactctgcctggaatgggccccagctctcttcttcaaacaataactttcaacagactgtctctgataaaaatatgcctgacagtgagaaccctacgtctgtattctctcggatctcagaccattcagagactcctaatatggagttatcctgcagaaatggtggttcacacaagtcaagttgtgaaatgagatctctggttgtttccacctcatcaaacaaacaggatgttcttaacaaggattctgggaagatgaaaggccatgagagaagactaggcaaagtcattcctgttctacaaactaagaccaggactaatgttccgacgttttcacagtcaaatctagaacagcagaagcagctttatctcaggagtgtcattgctcatatagaagacccagaggacactaaccaaggtatctcgggggagctttgtgccttgatggatcaagttcatcatatgcagcactcaaaatggcagcatccttcggacctcaccacgcgaaactacgcccgccgacagaaacatctgcaaagatacagtctgactcagtgggttgacaggaacatgcgaagccaccatcggttccagcgtctcccagacttctcgtacagttaatttgtgtcatcccatcagcaatgaaggtccctatccagggtcctgcttggagcagcatttcatgttcttttgctgttttgtgctttgccgattttggattttatttttcacaaaatttttatttaaaaaactcgtcaccttttggaaatgcccattgccgacttgaatttttt

SEQ ID NO: 11728 - DNA, 1635 bp, Homo sapiens
tgcggagggcggggctgaggcgcctgagcggggcacaaccctcctagaggcgggacggtttcctgccaatcactgctggtttgccctccccctggtgttggcccggctgactcggggaaggtgggagtcaatcattttgacaagtctcctgaaaggaacagctagcaggaactgaaacctttttccatttggtctcgtggcaaaggcagagattgctccagcagctccacacaaaatgatgtgctcacgggtgccctctgaacagtcttctggtacctctctcttgcctaaagacggtgccccattttcttgggattccttggatgaggatggattggatgactccttgctggagctgtcagagggagaagaagatgatggtgatgtaaattacacagaggaagagattgatgcactgttgaaggaagatgacccatcatatgagcagtcttctggggaagatgatggtgggcatgttgagaagggagaaagagggagtcaaattctacttgatactccccgagagaaaaattcatcgtacagcctgggaccagtagctgagactcctgacctcttcaaactacctcagctaagtacatcaagtggtcatggaccagctcatactaaaccattaaacagacgctctgtactagaaaagaatcttataaaagtaactgttgcaccatttaatccaacagtttgtgatgctctgcttgataaggacgagactgattcgtccaaagatactgaaaaactctcttcccttggagaagagatgagagaagatggtcttagcccaaatgaaagcaaactttgtactgaatctgaagggatcagccccaataactctgcctggaatgggccccagctctcttcttcaaacaataactttcaacagactgtctctgataaaaatatgcctgacagtgagaaccctacgtctgtattctctcggatctcagaccattcagagactcctaatatggagttatcctgcagaaatggtggttcacacaagtcaagttgtgaaatgagatctctggttgtttccacctcatcaaacaaacaggatgttcttaacaaggattctgggaagatgaaaggccatgagagaagactaggcaaagtcattcctgttctacaaactaagaccaggactaatgttccgacgttttcacagtcaaatctagaacagcagaagcagctttatctcaggagtgtcattgctcatatagaagacccagaggacactaaccaaggtatctcgggggagctttgtgccttgatggatcaagttcatcatatgcagcactcaaaatggcagcatccttcggacctcaccacgcgaaactacgcccgccgacagaaacatctgcaaagatacagtctgactcagtgggttgacaggaacatgcgaagccaccatcggttccagcgtctcccagacttctcgtacagttaatttgtgtcatcccatcagcaatgaaggtccctatccagggtcctgcttggagcagcatttcatgttcttttgctgttttgtgctttgccgattttggattttatttttcacaaaatttttatttaaaaaactcgtcaccttttggaaatgcccattgccgacttgaatttttt

SEQ ID NO: 11729 - DNA, 1628 bp, Homo sapiens
ggatgggggcgcctgttgcttctccagggggttgcgcacgccgtccgccccttggagggattgggaggcccacgccctgctgcgagaagggcgcgttctagctcctgaggaaggtgggagtcaatcattttgacaagtctcctgaaaggaacagctagcaggaactgaaacctttttccatttggtctcgtggcaaaggcagagattgctccagcagctccacacaaaatgatgtgctcacgggtgccctctgaacagtcttctggtacctctctcttgcctaaagacggtgccccattttcttgggattccttggatgaggatggattggatgactccttgctggagctgtcagagggagaagaagatgatggtgatgtaaattacacagaggaagagattgatgcactgttgaaggaagatgacccatcatatgagcagtcttctggggaagatgatggtgggcatgttgagaagggagaaagagggagtcaaattctacttgatactccccgagagaaaaattcatcgtacagcctgggaccagtagctgagactcctgacctcttcaaactacctcagctaagtacatcaagtggtcatggaccagctcatactaaaccattaaacagacgctctgtactagaaaagaatcttataaaagtaactgttgcaccatttaatccaacagtttgtgatgctctgcttgataaggacgagactgattcgtccaaagatactgaaaaactctcttcccttggagaagagatgagagaagatggtcttagcccaaatgaaagcaaactttgtactgaatctgaagggatcagccccaataactctgcctggaatgggccccagctctcttcttcaaacaataactttcaacagactgtctctgataaaaatatgcctgacagtgagaaccctacgtctgtattctctcggatctcagaccattcagagactcctaatatggagttatcctgcagaaatggtggttcacacaagtcaagttgtgaaatgagatctctggttgtttccacctcatcaaacaaacaggatgttcttaacaaggattctgggaagatgaaaggccatgagagaagactaggcaaagtcattcctgttctacaaactaagaccaggactaatgttccgacgttttcacagtcaaatctagaacagcagaagcagctttatctcaggagtgtcattgctcatatagaagacccagaggacactaaccaaggtatctcgggggagctttgtgccttgatggatcaagttcatcatatgcagcactcaaaatggcagcatccttcggacctcaccacgcgaaactacgcccgccgacagaaacatctgcaaagatacagtctgactcagtgggttgacaggaacatgcgaagccaccatcggttccagcgtctcccagacttctcgtacagttaatttgtgtcatcccatcagcaatgaaggtccctatccagggtcctgcttggagcagcatttcatgttcttttgctgttttgtgctttgccgattttggattttatttttcacaaaatttttatttaaaaaactcgtcaccttttggaaatgcccattgccgacttgaatttttt

SEQ ID NO: 11730 - DNA, 2044 bp, Homo sapiens
tgtgttctcgaattttgttttatttcaaaagtaatacatttttgttttgtgttaaagtgtaaactgaatattcagacattttacataatatacatttgttttgtttgtatgttgtagatatcattccatgatagtacatacagatctacttcattgtgtttttaaataattgaaaagtactccatagcacaaacataccatgatttactgaacagttctcttggtaatagacatttaggttgcctccaggatttggctactttgaacatccatgtatatatatatgaagttctagaagtgaaattgctgggtcaaatggtgtagtcaaattactcttcacaaaatatcgtactgacttaacgcttttactgatagtgtgtgaatgctcgtttctccacatcctcaccaatccagattatcatggcatcttaattatcaccattttgataggcaaaagtatctcatcgttctaacgtgtatttccatgtttctggtaaggttaaatatcttaaaattatttcttatgctacaagtcacagtgcaaagattttgaaatactagaacattacccacatatagtggactggagttggtataaggttattttctcttcctcagtgaaattgtctcttatttctccagaaatgatgtgctcacgggtgccctctgaacagtcttctggtacctctctcttgcctaaagacggtgccccattttcttgggattccttggatgaggatggattggatgactccttgctggagctgtcagagggagaagaagatgatggtgatgtaaattacacagaggaagagattgatgcactgttgaaggaagatgacccatcatatgagcagtcttctggggaagatgatggtgggcatgttgagaagggagaaagagggagtcaaattctacttgatactccccgagagaaaaattcatcgtacagcctgggaccagtagctgagactcctgacctcttcaaactacctcagctaagtacatcaagtggtcatggaccagctcatactaaaccattaaacagacgctctgtactagaaaagaatcttataaaagtaactgttgcaccatttaatccaacagtttgtgatgctctgcttgataaggacgagactgattcgtccaaagatactgaaaaactctcttcccttggagaagagatgagagaagatggtcttagcccaaatgaaagcaaactttgtactgaatctgaagggatcagccccaataactctgcctggaatgggccccagctctcttcttcaaacaataactttcaacagactgtctctgataaaaatatgcctgacagtgagaaccctacgtctgtattctctcggatctcagaccattcagagactcctaatatggagttatcctgcagaaatggtggttcacacaagtcaagttgtgaaatgagatctctggttgtttccacctcatcaaacaaacaggatgttcttaacaaggattctgggaagatgaaaggccatgagagaagactaggcaaagtcattcctgttctacaaactaagaccaggactaatgttccgacgttttcacagtcaaatctagaacagcagaagcagctttatctcaggagtgtcattgctcatatagaagacccagaggacactaaccaaggtatctcgggggagctttgtgccttgatggatcaagttcatcatatgcagcactcaaaatggcagcatccttcggacctcaccacgcgaaactacgcccgccgacagaaacatctgcaaagatacagtctgactcagtgggttgacaggaacatgcgaagccaccatcggttccagcgtctcccagacttctcgtacagttaatttgtgtcatcccatcagcaatgaaggtccctatccagggtcctgcttggagcagcatttcatgttcttttgctgttttgtgctttgccgattttggattttatttttcacaaaatttttatttaaaaaactcgtcaccttttggaaatgcccattgccgacttgaatttttt

SEQ ID NO: 11731 - DNA, 603 bp, Homo sapiens
cccttctcccagctcctatcccttaggactgccccgccccctagaacctccccgtcaggatctccgtccctcagccgctcacagcctcctcccagcgcccatcgcgcttgagctgcccactacctctagactgccctcccgggctggcgtcccacggagtctcagccgcgcaccccttcctcgcgttaccctccttccggacagcaccccctcccttctccaaacctggagtgagaagggcagggtggggaagagggtagggcatccgtgaagttcaatggggcggcacccaccccatcatgactggcggcaaggatgtgggctggtccctcggttaaggacggggccatttctcccttcccactttgggtggaagttgaggcgggtcccgggaccctccggaaaccccctgcctcctgaagggctggggaatgtgctcagtctctttctcctctccccttattaaaaccgcccaaccctggtgttgtgacacacacttgtagtcccagtctcttcagaggccgaggcaagatgatggcttgagcccaggagtttgagaccagcctggccaatataacgagatgccttctctacaaaaaaaaa

SEQ ID NO: 11732 - DNA, 853 bp, Homo sapiens
cggattcggctggttccgggttgagaggctgcgctggaccgaagcggtggctgctaagctcgcggggcctcaaggacgagctgctgtgctccatctgcctgagcatctaccaggacccggtgagcctgggctgcgagcactacttctgccgccgctgcatcacggagcactgggtgcggcaggaggcgcagggcgcccgcgactgccccgagtgccggcgcacgttcgccgagcccgcgctggcgcccagcctcaagctggccaacatcgtggagcgctacagctccttcccgctggacgccatcctcaacgcgcgccgcgccgcgcgaccctgccaggcgcacgacaaggtcaagctcttctgcctcacggaccgcgcgcttctctgcttcttctgcgacgagcctgcactgcacgagcagcatcaggtcaccggcatcgacgacgccttcgacgagctgcagagggagctgaaggaccaacttcaggcccttcaagacagcgagcgggaacacaccgaagcgctgcagctgctcaagcgacaactggcggagaccaagtcttccaccaagagcctgcggaccactatcggcgaggccttcgagcggctgcaccggctgctgcgtgaacgccagaaggccatgctagaggagctggaggcggacacggcccgcacgctgaccgacatcgagcagaaagtccagcgctacagccagcagctgcgcaaggtccaggagggagcccagatcctgcaggagcggctggctgaaaccgaccggcacaccttcctggctggggtggcctcactgtccgagcggtaagtgccacccgccggggccctccccggctgacc

SEQ ID NO: 11733 - DNA, 3262 bp, Homo sapiens
cccttctcccagctcctatcccttaggactgccccgccccctagaacctccccgtcaggatctccgtccctcagccgctcacagcctcctcccagcgcccatcgcgcttgagctgcccactacctctagactgccctcccgggctggcgtcccacggagtctcagccgcgcaccccttcctcgcgttaccctccttccggacagcaccccctcccttctccggtagctcctacccctgcctgtgcgggcctcgtccccgcgcccagccctcggtgctgcctccgacagcgccgcgctctctcagccgcccccctgcccctcgggcccccctctctgctgcccctggcgccatggcgtgcagcctcaaggacgagctgctgtgctccatctgcctgagcatctaccaggacccggtgagcctgggctgcgagcactacttctgccgccgctgcatcacggagcactgggtgcggcaggaggcgcagggcgcccgcgactgccccgagtgccggcgcacgttcgccgagcccgcgctggcgcccagcctcaagctggccaacatcgtggagcgctacagctccttcccgctggacgccatcctcaacgcgcgccgcgccgcgcgaccctgccaggcgcacgacaaggtcaagctcttctgcctcacggaccgcgcgcttctctgcttcttctgcgacgagcctgcactgcacgagcagcatcaggtcaccggcatcgacgacgccttcgacgagctgcagagggagctgaaggaccaacttcaggcccttcaagacagcgagcgggaacacaccgaagcgctgcagctgctcaagcgacaactggcggagaccaagtcttccaccaagagcctgcggaccactatcggcgaggccttcgagcggctgcaccggctgctgcgtgaacgccagaaggccatgctagaggagctggaggcggacacggcccgcacgctgaccgacatcgagcagaaagtccagcgctacagccagcagctgcgcaaggtccaggagggagcccagatcctgcaggagcggctggctgaaaccgaccggcacaccttcctggctggggtggcctcactgtccgagcggctcaagggaaaaatccatgagaccaacctcacatatgaagacttcccgacctccaagtacacaggccccctgcagtacaccatctggaagtccctgttccaggacatccacccagtgccagccgccctaaccctggacccgggcacagcccaccagcgcctgatcctgtcggacgactgcaccattgtggcttacggcaacttgcacccacagccactgcaggactcgccaaagcgcttcgatgtggaggtgtcggtgctgggttctgaagccttcagtagtggcgtccactactgggaggtggtggtggcggagaagacccagtgggtgatcgggctggcacacgaagccgcaagccgcaagggcagcatccagatccagcccagccgcggcttctactgcatcgtgatgcacgatggcaaccagtacagcgcctgcacggagccctggacgcggcttaacgtccgggacaagcttgacaaggtgggtgtcttcctggactatgaccaaggcttgctcatcttctacaatgctgatgacatgtcctggctctacaccttccgcgagaagttccctggcaagctctgctcttacttcagccctggccagagccacgccaatggcaagaacgttcagccgctgcggatcaacaccgtccgcatctagtccaggcagaaggagaccacaacctcctgggaccactgccacctgcaagagccctgcccaggagatagaagacctggactccagcccaccgtggccactggagacctcaggccagttgtttaccctccagcctccagtctgtaaaatggaggttgcattccctacttcctaaactctcttccagcatcgatgttctgtagctctgaccttgatagggatacagctttgatccaaggatgtgacatggcttctcctcagggcaacccctgcccaaccctcatccccatcttctcaggggcaggggactaccttccagtgtctccctccagcccagccctgacctcaggaagtgtcagagcatggccagtagttggcagcccgaaagacacacagcaccctcttatgtcccatggcctaagacttacccctgaccaagctagtgatgggccatttacccttgaccccagtccacagtggtcacaggtagtacctggtcctagggttgcctgagagccaacctctcctgccacccccacaccaagaactatatggttcctacttctcccactgatctgctggtcagtgatgatgctgtggcctgtggaaggcacctggtagttgagtccacacattatagtcatgtgccaccaccttcctgcccacaggccgagggacagggtgagggtatacccaaagctgatgcagagcccattagcctaaaagcaactgcaggacaagcctccctggatgatcgaggtccccagtagctctgaacaagagtccagccaaccctcttcagccaggcctctgtgacctgctagggtgcaggaggcttccagaagcagttgttgtaattaggacccaagcactgggaggggctgttggctagaccccttgtcagacttggcatctatctcagttaggatcctgctgcagaaaacaagagccacttgtagctggtttaattagacaaggatttactacctggcccctggtggcttgcaaaattgttggaagagctggagaagcagactctgctgaatttccaggaactcccagcgccagattcatcatgtctgttgtgaccaggaaagctgcccccatctgcaggaagccactatgccagaaagctgctgactgcagaactaggctccctctgccacggtccgtgccagccaatagatgtcctgaggcctgcccctctcccacttcactcagttcccaaatctaaatttttacaagagattctgtttgggggaacttaagtcagatccagaaccttggctgcaagggagtctgggaaatgtcatttccctagaaggaagttagggtgggtggagcaagccccacctgcggcgaatggcctagcatacaatagcgaagacctctgaaaagtgagaagcccacatgtgagtttgacatgccgcttgacaatgtcaatcccaataggtggcatcagaatgaacccactagatgactgagcc

SEQ ID NO: 11734 - DNA, 3317 bp, Homo sapiens
cccttctcccagctcctatcccttaggactgccccgccccctagaacctccccgtcaggatctccgtccctcagccgctcacagcctcctcccagcgcccatcgcgcttgagctgcccactacctctagactgccctcccgggctggcgtcccacggagtctcagccgcgcaccccttcctcgcgttaccctccttccggacagcaccccctcccttctccggtagctcctacccctgcctgtgcgggcctcgtccccgcgcccagccctcggtgctgcctccgacagcgccgcgctctctcagccgcccccctgcccctcgggcccccctctctgctgcccctggcgccatggcgtgcagcctcaaggacgagctgctgtgctccatctgcctgagcatctaccaggacccggtgagcctgggctgcgagcactacttctgccgccgctgcatcacggagcactgggtgcggcaggaggcgcagggcgcccgcgactgccccgagtgccggcgcacgttcgccgagcccgcgctggcgcccagcctcaagctggccaacatcgtggagcgctacagctccttcccgctggacgccatcctcaacgcgcgccgcgccgcgcgaccctgccaggcgcacgacaaggtcaagctcttctgcctcacggaccgcgcgcttctctgcttcttctgcgacgagcctgcactgcacgagcagcatcaggtcaccggcatcgacgacgccttcgacgagctgcagagggagctgaaggaccaacttcaggcccttcaagacagcgagcgggaacacaccgaagcgctgcagctgctcaagcgacaactggcggagaccaagtcttccaccaagagcctgcggaccactatcggcgaggccttcgagcggctgcaccggctgctgcgtgaacgccagaaggccatgctagaggagctggaggcggacacggcccgcacgctgaccgacatcgagcagaaagtccagcgctacagccagcagctgcgcaaggtccaggagggagcccagatcctgcaggagcggctggctgaaaccgaccggcacaccttcctggctggggtggcctcactgtccgagcggctcaagggaaaaatccatgagaccaacctcacatatgaagacttcccgacctccaagtacacaggccccctgcagtacaccatctggaagtccctgttccaggacatccacccagtgccagccgccctaaccctggacccgggcacagcccaccagcgcctgatcctgtcggacgactgcaccattgtggcttacggcaacttgcacccacagccactgcaggactcgccaaagcgcttcgatgtggaggtgtcggtgctgggttctgaagccttcagtagtggcgtccactactgggaggtggtggtggcggagaagacccagtgggtgatcgggctggcacacgaagccgcaagccgcaagggcagcatccagatccagcccagccgcggcttctactgcatcgtgatgcacgatggcaaccagtacagcgcctgcacggagccctggacgcggcttaacgtccgggacaagcttgacaaggtgggtgtcttcctggactatgaccaaggcttgctcatcttctacaatgctgatgacatgtcctggctctacaccttccgcgagaagttccctggcaagctctgctcttacttcagccctggccagagccacgccaatggcaagaacgttcagccgctgcggatcaacaccgtccgcatctagtccaggcagaaggagaccacaacctcctgggaccactgccacctgcaagagccctgcccaggagatagaagacctggactccagcccaccgtggccactggagacctcaggccagttgtttaccctccagcctccagtctgtaaaatggaggttgcattccctacttcctaaactctcttccagcatcgatgttctgtagctctgaccttgatagggatacagctttgatccaaggatgtgacatggcttctcctcagggcaacccctgcccaaccctcatccccatcttctcaggggcaggggactaccttccagtgtctccctccagcccagccctgacctcaggaagtgtcagagcatggccagtagttggcagcccgaaagacacacagcaccctcttatgtcccatggcctaagacttacccctgaccaagctagtgatgggccatttacccttgaccccagtccacagtggtcacaggtagtacctggtcctagggttgcctgagagccaacctctcctgccacccccacaccaagaactatatggttcctacttctcccactgatctgctggtcagtgatgatgctgtggcctgtggaaggcacctggtagttgagtccacacattatagtcatgtgccaccaccttcctgcccacaggccgagggacagggtgagggtatacccaaagctgatgcagagcccattagcctaaaagcaactgcaggacaagcctccctggatgatcgaggtccccagtagctctgaacaagagtccagccaaccctcttcagccaggcctctgtgacctgctagggtgcaggaggcttccagaagcagttgttgtaattaggacccaagcactgggaggggctgttggctagaccccttgtcagacttggcatctatctcagttaggatcctgctgcagaaaacaagagccacttgtagctggtttaattagacaaggatttactacctggcccctggtggcttgcaaaattgttggaagagctggagaagcagactctgctgaatttccaggaactcccagcgccagattcatcatgtctgttgtgaccaggaaagctgcccccatctgcaggaagccactatgccagaaagctgctgactgcagaactaggctccctctgccacggtccgtgccagccaatagatgtcctgcccagaggtgggaactggaggagtgggctgcaagactgagcctaaatgtctccccggccttgacttttctttctagtcctggggcctagattctgcacttggggtctctgacacaacacaccatcccaaagtagccggaagagctaaacacagggggttcttaaaatggctgcccccgccacccgggcctcccttgggcaaaaggaattgtcagccctaccccaacccttcaactaccagaatctgggccaccccagcagtatttttatttaaaatgttgcccattttatgagttatgatcaatttgtattaaattaaagttacagatgtcagtaaaaaaaaaccattc

SEQ ID NO: 11735 - DNA, 3570 bp, Homo sapiens
cccttctcccagctcctatcccttaggactgccccgccccctagaacctccccgtcaggatctccgtccctcagccgctcacagcctcctcccagcgcccatcgcgcttgagctgcccactacctctagactgccctcccgggctggcgtcccacggagtctcagccgcgcaccccttcctcgcgttaccctccttccggacagcaccccctcccttctccggtagctcctacccctgcctgtgcgggcctcgtccccgcgcccagccctcggtgctgcctccgacagcgccgcgctctctcagccgcccccctgcccctcgggcccccctctctgctgcccctggcgccatggcgtgcagcctcaaggacgagctgctgtgctccatctgcctgagcatctaccaggacccggtgagcctgggctgcgagcactacttctgccgccgctgcatcacggagcactgggtgcggcaggaggcgcagggcgcccgcgactgccccgagtgccggcgcacgttcgccgagcccgcgctggcgcccagcctcaagctggccaacatcgtggagcgctacagctccttcccgctggacgccatcctcaacgcgcgccgcgccgcgcgaccctgccaggcgcacgacaaggtcaagctcttctgcctcacggaccgcgcgcttctctgcttcttctgcgacgagcctgcactgcacgagcagcatcaggtcaccggcatcgacgacgccttcgacgagctgcagagggagctgaaggaccaacttcaggcccttcaagacagcgagcgggaacacaccgaagcgctgcagctgctcaagcgacaactggcggagaccaagtcttccaccaagagcctgcggaccactatcggcgaggccttcgagcggctgcaccggctgctgcgtgaacgccagaaggccatgctagaggagctggaggcggacacggcccgcacgctgaccgacatcgagcagaaagtccagcgctacagccagcagctgcgcaaggtccaggagggagcccagatcctgcaggagcggctggctgaaaccgaccggcacaccttcctggctggggtggcctcactgtccgagcggctcaagggaaaaatccatgagaccaacctcacatatgaagacttcccgacctccaagtacacaggccccctgcagtacaccatctggaagtccctgttccaggacatccacccagtgccagccgccctaaccctggacccgggcacagcccaccagcgcctgatcctgtcggacgactgcaccattgtggcttacggcaacttgcacccacagccactgcaggactcgccaaagcgcttcgatgtggaggtgtcggtgctgggttctgaagccttcagtagtggcgtccactactgggaggtggtggtggcggagaagacccagtgggtgatcgggctggcacacgaagccgcaagccgcaagggcagcatccagatccagcccagccgcggcttctactgcatcgtgatgcacgatggcaaccagtacagcgcctgcacggagccctggacgcggcttaacgtccgggacaagcttgacaaggtgggtgtcttcctggactatgaccaaggcttgctcatcttctacaatgctgatgacatgtcctggctctacaccttccgcgagaagttccctggcaagctctgctcttacttcagccctggccagagccacgccaatggcaagaacgttcagccgctgcggatcaacaccgtccgcatctagtccaggcagaaggagaccacaacctcctgggaccactgccacctgcaagagccctgcccaggagatagaagacctggactccagcccaccgtggccactggagacctcaggccagttgtttaccctccagcctccagtctgtaaaatggaggttgcattccctacttcctaaactctcttccagcatcgatgttctgtagctctgaccttgatagggatacagctttgatccaaggatgtgacatggcttctcctcagggcaacccctgcccaaccctcatccccatcttctcaggggcaggggactaccttccagtgtctccctccagcccagccctgacctcaggaagtgtcagagcatggccagtagttggcagcccgaaagacacacagcaccctcttatgtcccatggcctaagacttacccctgaccaagctagtgatgggccatttacccttgaccccagtccacagtggtcacaggtagtacctggtcctagggttgcctgagagccaacctctcctgccacccccacaccaagaactatatggttcctacttctcccactgatctgctggtcagtgatgatgctgtggcctgtggaaggcacctggtagttgagtccacacattatagtcatgtgccaccaccttcctgcccacaggccgagggacagggtgagggtatacccaaagctgatgcagagcccattagcctaaaagcaactgcaggacaagcctccctggatgatcgaggtccccagtagctctgaacaagagtccagccaaccctcttcagccaggcctctgtgacctgctagggtgcaggaggcttccagaagcagttgttgtaattaggacccaagcactgggaggggctgttggctagaccccttgtcagacttggcatctatctcagttaggatcctgctgcagaaaacaagagccacttgtagctggtttaattagacaaggatttactacctggcccctggtggcttgcaaaattgttggaagagctggagaagcagactctgctgaatttccaggaactcccagcgccagattcatcatgtctgttgtgaccaggaaagctgcccccatctgcaggaagccactatgccagaaagctgctgactgcagaactaggctccctctgccacggtccgtgccagccaatagatgtcctgaggcctgcccctctcccacttcactcagttcccaaatctaaatttttacaagagattctgtttgggggaacttaagtcagatccagaaccttggctgcaagggagtctgggaaatgtcatttccctagaaggaagttagggtgggtggagcaagccccacctgcgtttttctgccacagcatccaatcgtgaagaactcgggagagggtggagtccacatctagggttgtcctgccccttggctctatccctgcccagaggtgggaactggaggagtgggctgcaagactgagcctaaatgtctccccggccttgacttttctttctagtcctggggcctagattctgcacttggggtctctgacacaacacaccatcccaaagtagccggaagagctaaacacagggggttcttaaaatggctgcccccgccacccgggcctcccttgggcaaaaggaattgtcagccctaccccaacccttcaactaccagaatctgggccaccccagcagtatttttatttaaaatgttgcccattttatgagttatgatcaatttgtattaaattaaagttacagatgtcagtaaaaaaaaaccattc

SEQ ID NO: 11736 - DNA, 3349 bp, Homo sapiens
cggattcggctggttccgggttgagaggctgcgctggaccgaagcggtggctgctaagctcgcggggcgccgcgctctctcagccgcccccctgcccctcgggcccccctctctgctgcccctggcgccatggcgtgcagcctcaaggacgagctgctgtgctccatctgcctgagcatctaccaggacccggtgagcctgggctgcgagcactacttctgccgccgctgcatcacggagcactgggtgcggcaggaggcgcagggcgcccgcgactgccccgagtgccggcgcacgttcgccgagcccgcgctggcgcccagcctcaagctggccaacatcgtggagcgctacagctccttcccgctggacgccatcctcaacgcgcgccgcgccgcgcgaccctgccaggcgcacgacaaggtcaagctcttctgcctcacggaccgcgcgcttctctgcttcttctgcgacgagcctgcactgcacgagcagcatcaggtcaccggcatcgacgacgccttcgacgagctgcagagggagctgaaggaccaacttcaggcccttcaagacagcgagcgggaacacaccgaagcgctgcagctgctcaagcgacaactggcggagaccaagtcttccaccaagagcctgcggaccactatcggcgaggccttcgagcggctgcaccggctgctgcgtgaacgccagaaggccatgctagaggagctggaggcggacacggcccgcacgctgaccgacatcgagcagaaagtccagcgctacagccagcagctgcgcaaggtccaggagggagcccagatcctgcaggagcggctggctgaaaccgaccggcacaccttcctggctggggtggcctcactgtccgagcggctcaagggaaaaatccatgagaccaacctcacatatgaagacttcccgacctccaagtacacaggccccctgcagtacaccatctggaagtccctgttccaggacatccacccagtgccagccgccctaaccctggacccgggcacagcccaccagcgcctgatcctgtcggacgactgcaccattgtggcttacggcaacttgcacccacagccactgcaggactcgccaaagcgcttcgatgtggaggtgtcggtgctgggttctgaagccttcagtagtggcgtccactactgggaggtggtggtggcggagaagacccagtgggtgatcgggctggcacacgaagccgcaagccgcaagggcagcatccagatccagcccagccgcggcttctactgcatcgtgatgcacgatggcaaccagtacagcgcctgcacggagccctggacgcggcttaacgtccgggacaagcttgacaaggtgggtgtcttcctggactatgaccaaggcttgctcatcttctacaatgctgatgacatgtcctggctctacaccttccgcgagaagttccctggcaagctctgctcttacttcagccctggccagagccacgccaatggcaagaacgttcagccgctgcggatcaacaccgtccgcatctagtccaggcagaaggagaccacaacctcctgggaccactgccacctgcaagagccctgcccaggagatagaagacctggactccagcccaccgtggccactggagacctcaggccagttgtttaccctccagcctccagtctgtaaaatggaggttgcattccctacttcctaaactctcttccagcatcgatgttctgtagctctgaccttgatagggatacagctttgatccaaggatgtgacatggcttctcctcagggcaacccctgcccaaccctcatccccatcttctcaggggcaggggactaccttccagtgtctccctccagcccagccctgacctcaggaagtgtcagagcatggccagtagttggcagcccgaaagacacacagcaccctcttatgtcccatggcctaagacttacccctgaccaagctagtgatgggccatttacccttgaccccagtccacagtggtcacaggtagtacctggtcctagggttgcctgagagccaacctctcctgccacccccacaccaagaactatatggttcctacttctcccactgatctgctggtcagtgatgatgctgtggcctgtggaaggcacctggtagttgagtccacacattatagtcatgtgccaccaccttcctgcccacaggccgagggacagggtgagggtatacccaaagctgatgcagagcccattagcctaaaagcaactgcaggacaagcctccctggatgatcgaggtccccagtagctctgaacaagagtccagccaaccctcttcagccaggcctctgtgacctgctagggtgcaggaggcttccagaagcagttgttgtaattaggacccaagcactgggaggggctgttggctagaccccttgtcagacttggcatctatctcagttaggatcctgctgcagaaaacaagagccacttgtagctggtttaattagacaaggatttactacctggcccctggtggcttgcaaaattgttggaagagctggagaagcagactctgctgaatttccaggaactcccagcgccagattcatcatgtctgttgtgaccaggaaagctgcccccatctgcaggaagccactatgccagaaagctgctgactgcagaactaggctccctctgccacggtccgtgccagccaatagatgtcctgaggcctgcccctctcccacttcactcagttcccaaatctaaatttttacaagagattctgtttgggggaacttaagtcagatccagaaccttggctgcaagggagtctgggaaatgtcatttccctagaaggaagttagggtgggtggagcaagccccacctgcgtttttctgccacagcatccaatcgtgaagaactcgggagagggtggagtccacatctagggttgtcctgccccttggctctatccctgcccagaggtgggaactggaggagtgggctgcaagactgagcctaaatgtctccccggccttgacttttctttctagtcctggggcctagattctgcacttggggtctctgacacaacacaccatcccaaagtagccggaagagctaaacacagggggttcttaaaatggctgcccccgccacccgggcctcccttgggcaaaaggaattgtcagccctaccccaacccttcaactaccagaatctgggccaccccagcagtatttttatttaaaatgttgcccattttatgagttatgatcaatttgtattaaattaaagttacagatgtcagtaaaaaaaaaccattc

SEQ ID NO: 11737 - DNA, 2213 bp, Homo sapiens
gccggaaggcagatctcaccgcctgcttccctctgcagcggtagcacaagctcagcgatggcggctccagaaggcagcggtctaggcgaggacgcccggctggaccaggagaccgcccagtggctgcgctgggacaagaattccttaactttggaggcagtgaaacgactaatagcagaaggtaataaagaagaactacgaaaatgttttggggcccgaatggagtttgggacagctggcctccgagctgctatgggacctggaatttctcgtatgaatgacttgaccatcatccagactacacagggattttgcagatacctggaaaaacaattcagtgacttaaagcagaaaggcatcgtgatcagttttgacgcccgagctcatccatccagtgggggtagcagcagaaggtttgcccgacttgctgcaaccacatttatcagtcaggggattcctgtgtacctcttttctgatataacgccaaccccctttgtgcccttcacagtatcacatttgaaactttgtgctggaatcatgataactgcatctcacaatccaaagcaggataatggttataaggtctattgggataatggagctcagatcatttctcctcacgataaagggatttctcaagctattgaagaaaatctagaaccgtggcctcaagcttgggacgattctttaattgatagcagtccacttctccacaatccgagtgcttccatcaataatgactactttgaagaccttaaaaagtactgtttccacaggagcgtgaacagggagacaaaggtgaagtttgtgcacacctctgtccatggggtgggtcatagctttgtgcagtcagctttcaaggcttttgaccttgttcctcctgaggctgttcctgaacagaaagatccggatcctgagtttccaacagtgaaatacccgaatcccgaagaggggaaaggtgtcttgactttgtcttttgctttggctgacaaaaccaaggccagaattgttttagctaacgacccggatgctgatagacttgctgtggcagaaaagcaagacagtggtgaatggagggtgttttcaggcaatgagttgggggccctcctgggctggtggctttttacatcttggaaagagaagaaccaggatcgcagtgctctcaaagacacgtacatgttgtccagcaccgtctcctccaaaatcttgcgggccattgccttaaaggaaggttttcattttgaggaaacattaactggctttaagtggatgggaaacagagccaaacagctaatagaccaggggaaaactgttttatttgcatttgaagaagctattggatacatgtgctgcccttttgttctggacaaagatggagtcagtgccgctgtcataagtgcagagttggctagcttcctagcaaccaagaatttgtctttgtctcagcaactaaaggccatttatgtggagtatggctaccatattactaaagcttcctattttatctgccatgatcaagaaaccattaagaaattatttgaaaacctcagaaactacgatggaaaaaataattatccaaaagcttgtggcaaatttgaaatttctgccattagggaccttacaactggctatgatgatagccaacctgataaaaaagctgttcttcccactagtaaaagcagccaaatgatcaccttcacctttgctaatggaggcgtggccaccatgcgcaccagtgggacagagcccaaaatcaagtactatgcagagctgtgtgccccacctgggaacagtgatcctgagcagctgaagaaggaactgaatgaactggtcagtgctattgaagaacattttttccagccacagaagtacaatctgcagccaaaagcagactaaaatagtccagccttgggtatacttgcatttacctacaattaagctgggtttaacttgttaagcaatatttttaagggccaaatgattcaaaacatcacaggtatttatgtgttttacaaagacctacattcctcattgtttcatgtttgacctttaaggtgaaaaaagaaaatggccaaacccaacaaactaacattcctactaaaaagttgagcttggacatattttgaatttttgtaagtgaagatttttaaactgactaacttaaaaaaatagattgtaattgatgtgccttaatttgcataaatcataaatgt

SEQ ID NO: 11738 - DNA, 2373 bp, Homo sapiens
gccggaaggcagatctcaccgcctgcttccctctgcagcggtagcacaagctcagcgatggcggctccagaaggcagcggtctaggcgaggacgcccggctggaccaggagaccgcccagtggctgcgctgggacaagaattccttaactttggaggcagtgaaacgactaatagcagaaggtaataaagaagaactacgaaaatgttttggggcccgaatggagtttgggacagctggcctccgagctgctatgggacctggaatttctcgtatgaatgacttgaccatcatccagactacacagggattttgcagatacctggaaaaacaattcagtgacttaaagcagaaaggcatcgtgatcagttttgacgcccgagctcatccatccagtgggggtagcagcagaaggtttgcccgacttgctgcaaccacatttatcagtcaggggattcctgtgtacctcttttctgatataacgccaaccccctttgtgcccttcacagtatcacatttgaaactttgtgctggaatcatgataactgcatctcacaatccaaagcaggataatggttataaggtctattgggataatggagctcagatcatttctcctcacgataaagggatttctcaagctattgaagaaaatctagaaccgtggcctcaagcttgggacgattctttaattgatagcagtccacttctccacaatccgagtgcttccatcaataatgactactttgaagaccttaaaaagtactgtttccacaggagcgtgaacagggagacaaaggtgaagtttgtgcacacctctgtccatggggtgggtcatagctttgtgcagtcagctttcaaggcttttgaccttgttcctcctgaggctgttcctgaacagaaagatccggatcctgagtttccaacagtgaaatacccgaatcccgaagaggggaaaggtgtcttgactttgtcttttgctttggctgacaaaaccaaggccagaattgttttagctaacgacccggatgctgatagacttgctgtggcagaaaagcaagacagtggtgaatggagggtgttttcaggcaatgagttgggggccctcctgggctggtggctttttacatcttggaaagagaagaaccaggatcgcagtgctctcaaagacacgtacatgttgtccagcaccgtctcctccaaaatcttgcgggccattgccttaaaggaaggttttcattttgaggaaacattaactggctttaagtggatgggaaacagagccaaacagctaatagaccaggggaaaactgttttatttgcatttgaagaagctattggatacatgtgctgcccttttgttctggacaaagatggagtcagtgccgctgtcataagtgcagagttggctagcttcctagcaaccaagaatttgtctttgtctcagcaactaaaggccatttatgtggagtatggctaccatattactaaagcttcctattttatctgccatgatcaagaaaccattaagaaattatttgaaaacctcagaaactacgatggaaaaaataattatccaaaagcttgtggcaaatttgaaatttctgccattagggaccttacaactggctatgatgatagccaacctgataaaaaagctgttcttcccactagtaaaagcagccaaatgatcaccttcacctttgctaatggaggcgtggccaccatgcgcaccagtgggacagagcccaaaatcaagtactatgcagagctgtgtgccccacctgggaacagtgatcctgagcagctgaagaaggaactgaatgaactggtcagtgctattgaagaacattttttccagccacagaagtacaatctgcagccaaaagcagactaaaatagtccagccttgggtatacttgcatttacctacaattaagctgggtttaacttgttaagcaatatttttaagggccaaatgattcaaaacatcacaggtatttatgtgttttacaaagacctacattcctcattgtttcatgtttgacctttaaggtgaaaaaagaaaatggccaaacccaacaaactaacattcctactaaaaagttgagcttggacatattttgaatttttgtaagtgaagatttttaaactgactaacttaaaaaaatagattgtaattgatgtgccttaatttgcataaatcataaatgtatgtcctctctgtaattgttttaatgtgtgcttgaaatatccagaaaacctatggagttagtaaattctgggctgtcatatgtaggatagccactttttaggtatatgtacatttatatttctatcaattccttagaaagtaaaataaatgaatagatca

SEQ ID NO: 11739 - DNA, 2351 bp, Homo sapiens
  misc_feature (10)..(10): n is a, c, g, or t
gggtggcganttcggcacgaggcacaagctcagcgatggcggctccagaaggcagcggtctaggcgaggacgcccggctggaccaggagaccgcccagtggctgcgctgggacaagaattccttaactttggaggcagtgaaacgactaatagcagaaggtaataaagaagaactacgaaaatgttttggggcccgaatggagtttgggacagctggcctccgagctgctatgggacctggaatttctcgtatgaatgacttgaccatcatccagactacacagggattttgcagatacctggaaaaacaattcagtgacttaaagcagaaaggcatcgtgatcagttttgacgcccgagctcatccatccagtgggggtagcagcagaaggtttgcccgacttgctgcaaccacatttatcagtcaggggattcctgtgtacctcttttctgatataacgccaaccccctttgtgcccttcacagtatcacatttgaaactttgtgctggaatcatgataactgcatctcacaatccaaagcaggataatggttataaggtctattgggataatggagctcagatcatttctcctcacgataaagggatttctcaagctattgaagaaaatctagaaccgtggcctcaagcttgggacgattctttaattgatagcagtccacttctccacaatccgagtgcttccatcaataatgactactttgaagaccttaaaaagtactgtttccacaggagcgtgaacagggagacaaaggtgaagtttgtgcacacctctgtccatggggtgggtcatagctttgtgcagtcagctttcaaggcttttgaccttgttcctcctgaggctgttcctgaacagaaagatccggatcctgagtttccaacagtgaaatacccgaatcccgaagaggggaaaggtgtcttgactttgtcttttgctttggctgacaaaaccaaggccagaattgttttagctaacgacccggatgctgatagacttgctgtggcagaaaagcaagacagtggtgaatggagggtgttttcaggcaatgagttgggggccctcctgggctggtggctttttacatcttggaaagagaagaaccaggatcgcagtgctctcaaagacacgtacatgttgtccagcaccgtctcctccaaaatcttgcgggccattgccttaaaggaaggttttcattttgaggaaacattaactggctttaagtggatgggaaacagagccaaacagctaatagaccaggggaaaactgttttatttgcatttgaagaagctattggatacatgtgctgcccttttgttctggacaaagatggagtcagtgccgctgtcataagtgcagagttggctagcttcctagcaaccaagaatttgtctttgtctcagcaactaaaggccatttatgtggagtatggctaccatattactaaagcttcctattttatctgccatgatcaagaaaccattaagaaattatttgaaaacctcagaaactacgatggaaaaaataattatccaaaagcttgtggcaaatttgaaatttctgccattagggaccttacaactggctatgatgatagccaacctgataaaaaagctgttcttcccactagtaaaagcagccaaatgatcaccttcacctttgctaatggaggcgtggccaccatgcgcaccagtgggacagagcccaaaatcaagtactatgcagagctgtgtgccccacctgggaacagtgatcctgagcagctgaagaaggaactgaatgaactggtcagtgctattgaagaacattttttccagccacagaagtacaatctgcagccaaaagcagactaaaatagtccagccttgggtatacttgcatttacctacaattaagctgggtttaacttgttaagcaatatttttaagggccaaatgattcaaaacatcacaggtatttatgtgttttacaaagacctacattcctcattgtttcatgtttgacctttaaggtgaaaaaagaaaatggccaaacccaacaaactaacattcctactaaaaagttgagcttggacatattttgaatttttgtaagtgaagatttttaaactgactaacttaaaaaaatagattgtaattgatgtgccttaatttgcataaatcataaatgtatgtcctctctgtaattgttttaatgtgtgcttgaaatatccagaaaacctatggagttagtaaattctgggctgtcatatgtaggatagccactttttaggtatatgtacatttatatttctatcaattccttagaaagtaaaataaatgaatagatca

SEQ ID NO: 11740 - DNA, 3234 bp, Homo sapiens
gccggaaggcagatctcaccgcctgcttccctctgcagcggtagcacaagctcagcgatggcggctccagaaggcagcggtctaggcgaggacgcccggctggaccaggagaccgcccagtggctgcgctgggacaagaattccttaactttggaggcagtgaaacgactaatagcagaaggtaataaagaagaactacgaaaatgttttggggcccgaatggagtttgggacagctggcctccgagctgctatgggacctggaatttctcgtatgaatgacttgaccatcatccagactacacagggattttgcagatacctggaaaaacaattcagtgacttaaagcagaaaggcatcgtgatcagttttgacgcccgagctcatccatccagtgggggtagcagcagaaggtttgcccgacttgctgcaaccacatttatcagtcaggggattcctgtgtacctcttttctgatataacgccaaccccctttgtgcccttcacagtatcacatttgaaactttgtgctggaatcatgataactgcatctcacaatccaaagcaggataatggttataaggtctattgggataatggagctcagatcatttctcctcacgataaagggatttctcaagctattgaagaaaatctagaaccgtggcctcaagcttgggacgattctttaattgatagcagtccacttctccacaatccgagtgcttccatcaataatgactactttgaagaccttaaaaagtactgtttccacaggagcgtgaacagggagacaaaggtgaagtttgtgcacacctctgtccatggggtgggtcatagctttgtgcagtcagctttcaaggcttttgaccttgttcctcctgaggctgttcctgaacagaaagatccggatcctgagtttccaacagtgaaatacccgaatcccgaagaggggaaaggtgtcttgactttgtcttttgctttggctgacaaaaccaaggccagaattgttttagctaacgacccggatgctgatagacttgctgtggcagaaaagcaagacagtggtgaatggagggtgttttcaggcaatgagttgggggccctcctgggctggtggctttttacatcttggaaagagaagaaccaggatcgcagtgctctcaaagacacgtacatgttgtccagcaccgtctcctccaaaatcttgcgggccattgccttaaaggaaggttttcattttgaggaaacattaactggctttaagtggatgggaaacagagccaaacagctaatagaccaggggaaaactgttttatttgcatttgaagaagctattggatacatgtgctgcccttttgttctggacaaagatggagtcagtgccgctgtcataagtgcagagttggctagcttcctagcaaccaagaatttgtctttgtctcagcaactaaaggccatttatgtggagtatggctaccatattactaaagcttcctattttatctgccatgatcaagaaaccattaagaaattatttgaaaacctcagaaactacgatggaaaaaataattatccaaaagcttgtggcaaatttgaaatttctgccattagggaccttacaactggctatgatgatagccaacctgataaaaaagctgttcttcccactagtaaaagcagccaaatgatcaccttcacctttgctaatggaggcgtggccaccatgcgcaccagtgggacagagcccaaaatcaagtactatgcagagctgtgtgccccacctgggaacagtgatcctgagcagctgaagaaggaactgaatgaactggtcagtgctattgaagaacattttttccagccacagaagtacaatctgcagccaaaagcagactaaaatagtccagccttgggtatacttgcatttacctacaattaagctgggtttaacttgttaagcaatatttttaagggccaaatgattcaaaacatcacaggtatttatgtgttttacaaagacctacattcctcattgtttcatgtttgacctttaaggtgaaaaaagaaaatggccaaacccaacaaactaacattcctactaaaaagttgagcttggacatattttgaatttttgtaagtgaagatttttaaactgactaacttaaaaaaatagattgtaattgatgtgccttaatttgcataaatcataaatgtatgtcctctctgtaattgttttaatgtgtgcttgaaatatccagaaaacctatggagttagtaaattctgggctgtcatatgtaggatagccactttttaggtatatgtacatttatatttctatcaattccttagaaagtaaaataaatgaatagatcaaatgttgtgttcatgtttggggaaaatataatttgcagaaacctatgaagtagagcaaagatgctttaaaaagataagtttttttgaactaaattttttttagttctaataatgcacataggatattagtacatcgtacacgtgctaggaaaaaacagcttcagtgtctttgtttaatgtgttgaaactcatctttttaaatcttgaaaaaccaattgtttacttgaaacttgaaagtagcatatttttctgttttttggttgtttgttcatttgtattagcacaatttaatgtaattcctggtttggaggcagcaagacctatgagcaagaactatttacttgaccctcgtttttttctcttgttcttgtgtggtctgaaatctaaaactagactttattatgatagatttcctataagccaatttctaataacaaatagatttattatttaatctgtaccttctatcttctcataattcgtggtcttacagccttccaaaataactccagttgggcacccatgagctaggatcaaactttctttatatactttatatattttacattatttctgatttttaaagcaaatgattgccattatgattacactcaacctaaatagttatgaacagtttcagaacaatgaaaaattacaatactatgtgatagtattgtaactatttttctattttagtcatatgtcgcttatatcctaccagaactcttaaatctataatattcgatatattctacaaactgctttattgtagaagccatatttatgtttattttataatgttttctagtgtcaaactgtactgtggagaaaagaaatgttagatctgtgtaaaaaactgca

SEQ ID NO: 11741 - DNA, 2183 bp, Homo sapiens
gccggaaggcagatctcaccgcctgcttccctctgcagcggtagcacaagctcagcgatggcggctccagaaggcagcggtctaggcgaggacgcccggctggaccaggagaccgcccagtggctgcgctgggacaagaattccttaactttggaggcagtgaaacgactaatagcagaaggtaataaagaagaactacgaaaatgttttggggcccgaatggagtttgggacagctggcctccgagctgctatgggacctggaatttctcgtatgaatgacttgaccatcatccagactacacagggattttgcagatacctggaaaaacaattcagtgacttaaagcagaaaggcatcgtgatcagttttgacgcccgagctcatccatccagtgggggtagcagcagaaggtttgcccgacttgctgcaaccacatttatcagtcaggggattcctgtgtacctcttttctgatataacgccaaccccctttgtgcccttcacagtatcacatttgaaactttgtgctggaatcatgataactgcatctcacaatccaaagcaggataatggttataaggtctattgggataatggagctcagatcatttctcctcacgataaagggatttctcaagctattgaagaaaatctagaaccgtggcctcaagcttgggacgattctttaattgatagcagtccacttctccacaatccgagtgcttccatcaataatgactactttgaagaccttaaaaagtactgtttccacagactttgtcttttgctttggctgacaaaaccaaggccagaattgttttagctaacgacccggatgctgatagacttgctgtggcagaaaagcaagacagtggtgaatggagggtgttttcaggcaatgagttgggggccctcctgggctggtggctttttacatcttggaaagagaagaaccaggatcgcagtgctctcaaagacacgtacatgttgtccagcaccgtctcctccaaaatcttgcgggccattgccttaaaggaaggttttcattttgaggaaacattaactggctttaagtggatgggaaacagagccaaacagctaatagaccaggggaaaactgttttatttgcatttgaagaagctattggatacatgtgctgcccttttgttctggacaaagatggagtcagtgccgctgtcataagtgcagagttggctagcttcctagcaaccaagaatttgtctttgtctcagcaactaaaggccatttatgtggagtatggctaccatattactaaagcttcctattttatctgccatgatcaagaaaccattaagaaattatttgaaaacctcagaaactacgatggaaaaaataattatccaaaagcttgtggcaaatttgaaatttctgccattagggaccttacaactggctatgatgatagccaacctgataaaaaagctgttcttcccactagtaaaagcagccaaatgatcaccttcacctttgctaatggaggcgtggccaccatgcgcaccagtgggacagagcccaaaatcaagtactatgcagagctgtgtgccccacctgggaacagtgatcctgagcagctgaagaaggaactgaatgaactggtcagtgctattgaagaacattttttccagccacagaagtacaatctgcagccaaaagcagactaaaatagtccagccttgggtatacttgcatttacctacaattaagctgggtttaacttgttaagcaatatttttaagggccaaatgattcaaaacatcacaggtatttatgtgttttacaaagacctacattcctcattgtttcatgtttgacctttaaggtgaaaaaagaaaatggccaaacccaacaaactaacattcctactaaaaagttgagcttggacatattttgaatttttgtaagtgaagatttttaaactgactaacttaaaaaaatagattgtaattgatgtgccttaatttgcataaatcataaatgtatgtcctctctgtaattgttttaatgtgtgcttgaaatatccagaaaacctatggagttagtaaattctgggctgtcatatgtaggatagccactttttaggtatatgtacatttatatttctatcaattccttagaaagtaaaataaatgaatagatca

SEQ ID NO: 11742 - DNA, 2037 bp, Homo sapiens
tcaatagcttgacaaatccctttatcgtgaggagaaatgatctgagctcatccatccagtgggggtagcagcagaaggtttgcccgacttgctgcaaccacatttatcagtcaggggattcctgtgtacctcttttctgatataacgccaaccccctttgtgcccttcacagtatcacatttgaaactttgtgctggaatcatgataactgcatctcacaatccaaagcaggataatggttataaggtctattgggataatggagctcagatcatttctcctcacgataaagggatttctcaagctattgaagaaaatctagaaccgtggcctcaagcttgggacgattctttaattgatagcagtccacttctccacaatccgagtgcttccatcaataatgactactttgaagaccttaaaaagtactgtttccacaggagcgtgaacagggagacaaaggtgaagtttgtgcacacctctgtccatggggtgggtcatagctttgtgcagtcagctttcaaggcttttgaccttgttcctcctgaggctgttcctgaacagaaagatccggatcctgagtttccaacagtgaaatacccgaatcccgaagaggggaaaggtgtcttgactttgtcttttgctttggctgacaaaaccaaggccagaattgttttagctaacgacccggatgctgatagacttgctgtggcagaaaagcaagacagtggtgaatggagggtgttttcaggcaatgagttgggggccctcctgggctggtggctttttacatcttggaaagagaagaaccaggatcgcagtgctctcaaagacacgtacatgttgtccagcaccgtctcctccaaaatcttgcgggccattgccttaaaggaaggttttcattttgaggaaacattaactggctttaagtggatgggaaacagagccaaacagctaatagaccaggggaaaactgttttatttgcatttgaagaagctattggatacatgtgctgcccttttgttctggacaaagatggagtcagtgccgctgtcataagtgcagagttggctagcttcctagcaaccaagaatttgtctttgtctcagcaactaaaggccatttatgtggagtatggctaccatattactaaagcttcctattttatctgccatgatcaagaaaccattaagaaattatttgaaaacctcagaaactacgatggaaaaaataattatccaaaagcttgtggcaaatttgaaatttctgccattagggaccttacaactggctatgatgatagccaacctgataaaaaagctgttcttcccactagtaaaagcagccaaatgatcaccttcacctttgctaatggaggcgtggccaccatgcgcaccagtgggacagagcccaaaatcaagtactatgcagagctgtgtgccccacctgggaacagtgatcctgagcagctgaagaaggaactgaatgaactggtcagtgctattgaagaacattttttccagccacagaagtacaatctgcagccaaaagcagactaaaatagtccagccttgggtatacttgcatttacctacaattaagctgggtttaacttgttaagcaatatttttaagggccaaatgattcaaaacatcacaggtatttatgtgttttacaaagacctacattcctcattgtttcatgtttgacctttaaggtgaaaaaagaaaatggccaaacccaacaaactaacattcctactaaaaagttgagcttggacatattttgaatttttgtaagtgaagatttttaaactgactaacttaaaaaaatagattgtaattgatgtgccttaatttgcataaatcataaatgtatgtcctctctgtaattgttttaatgtgtgcttgaaatatccagaaaacctatggagttagtaaattctgggctgtcatatgtaggatagccactttttaggtatatgtacatttatatttctatcaattccttagaaagtaaaataaatgaatagatca

SEQ ID NO: 11743 - DNA, 905 bp, Homo sapiens
  misc_feature (10)..(10): n is a, c, g, or t
gggtggcganttcggcacgaggcacaagctcagcgatggcggctccagaaggcagcggtctaggcgaggacgcccggctggaccaggagaccgcccagtggctgcgctgggacaagaattccttaactttggaggcagtgaaacgactaatagcagaaggtaataaagaagaactacgaaaatgttttggggcccgaatggagtttgggacagctggcctccgagctgctatgggacctggaatttctcgtatgaatgacttgaccatcatccagactacacagctttgtgcagtcagctttcaaggcttttgaccttgttcctctgatcctgagcagctgaagaaggaactgaatgaactggtcagtgctattgaagaacattttttccagccacagaagtacaatctgcagccaaaagcagactaaaatagtccagccttgggtatacttgcatttacctacaattaagctgggtttaacttgttaagcaatatttttaagggccaaatgattcaaaacatcacaggtatttatgtgttttacaaagacctacattcctcattgtttcatgtttgacctttaaggtgaaaaaagaaaatggccaaacccaacaaactaacattcctactaaaaagttgagcttggacatattttgaatttttgtaagtgaagatttttaaactgactaacttaaaaaaatagattgtaattgatgtgccttaatttgcataaatcataaatgtatgtcctctctgtaattgttttaatgtgtgcttgaaatatccagaaaacctatggagttagtaaattctgggctgtcatatgtaggatagccactttttaggtatatgtacatttatatttctatcaattccttagaaagtaaaataaatgaatagatca

SEQ ID NO: 11744 - DNA, 871 bp, Homo sapiens
gtttcttacaaagtcttatgagaagagcaaaggataactttgtttatagttcagacattggaaaaatctttgggaaaaataatgcatattgtctcatggggtgttttgtctaagtcaatagatgtgttccatgcttaagtctctggagttctcttttttttcctatttagtcctcttcttaaggttatattttcattgtcacttgggtcaatggggggagcatttaaactgtgctttgggaataatcccttgacctggatttttttcccccttattttccagtgatcctgatgatcctgagcagctgaagaaggaactgaatgaactggtcagtgctattgaagaacattttttccagccacagaagtacaatctgcagccaaaagcagactaaaatagtccagccttgggtatacttgcatttacctacaattaagctgggtttaacttgttaagcaatatttttaagggccaaatgattcaaaacatcacaggtatttatgtgttttacaaagacctacattcctcattgtttcatgtttgacctttaaggtgaaaaaagaaaatggccaaacccaacaaactaacattcctactaaaaagttgagcttggacatattttgaatttttgtaagtgaagatttttaaactgactaacttaaaaaaatagattgtaattgatgtgccttaatttgcataaatcataaatgtatgtcctctctgtaattgttttaatgtgtgcttgaaatatccagaaaacctatggagttagtaaattctgggctgtcatatgtaggatagccactttttaggtatatgtacatttatatttctatcaattccttagaaagtaaaataaatgaatagatca

SEQ ID NO: 11745 - DNA, 664 bp, Homo sapiens
  misc_feature (39)..(40): n is a, c, g, or t
  misc_feature (42)..(43): n is a, c, g, or t
gaaagagatgaatgggacgggaccgggggccgactgganngnngaaagaattcaaggatttcaggtactggccacttaactagatgatcctgagcagctgaagaaggaactgaatgaactggtcagtgctattgaagaacattttttccagccacagaagtacaatctgcagccaaaagcagactaaaatagtccagccttgggtatacttgcatttacctacaattaagctgggtttaacttgttaagcaatatttttaagggccaaatgattcaaaacatcacaggtatttatgtgttttacaaagacctacattcctcattgtttcatgtttgacctttaaggtgaaaaaagaaaatggccaaacccaacaaactaacattcctactaaaaagttgagcttggacatattttgaatttttgtaagtgaagatttttaaactgactaacttaaaaaaatagattgtaattgatgtgccttaatttgcataaatcataaatgtatgtcctctctgtaattgttttaatgtgtgcttgaaatatccagaaaacctatggagttagtaaattctgggctgtcatatgtaggatagccactttttaggtatatgtacatttatatttctatcaattccttagaaagtaaaataaatgaatagatca

SEQ ID NO: 11746 - DNA, 9296 bp, Homo sapiens
atgccgccgctcctggcgcccctgctctgcctggcgctgctgcccgcgctcgccgcacgaggcccgcgatgctcccagcccggtgagacctgcctgaatggcgggaagtgtgaagcggccaatggcacggaggcctgcgtctgtggcggggccttcgtgggcccgcgatgccaggaccccaacccgtgcctcagcaccccctgcaagaacgccgggacatgccacgtggtggaccgcagaggcgtggcagactatgcctgcagctgtgccctgggcttctctgggcccctctgcctgacacccctggacaacgcctgcctcaccaacccctgccgcaacgggggcacctgcgacctgctcacgctgacggagtacaagtgccgctgcccgcccggctggtcagggaaatcgtgccagcaggctgacccgtgcgcctccaacccctgcgccaacggtggccagtgcctgcccttcgaggcctcctacatctgccactgcccacccagcttccatggccccacctgccggcaggatgtcaacgagtgtggccagaagcccgggctttgccgccacggaggcacctgccacaacgaggtcggctcctaccgctgcgtctgccgcgccacccacactggccccaactgcgagcggccctacgtgccctgcagcccctcgccctgccagaacgggggcacctgccgccccacgggcgacgtcacccacgagtgtgcctgcctgccaggcttcaccggccagaactgtgaggaaaatatcgacgattgtccaggaaacaactgcaagaacgggggtgcctgtgtggacggcgtgaacacctacaactgcccgtgcccgccagagtggacaggtcagtactgtaccgaggatgtggacgagtgccagctgatgccaaatgcctgccagaacggcgggacctgccacaacacccacggtggctacaactgcgtgtgtgtcaacggctggactggtgaggactgcagcgagaacattgatgactgtgccagcgccgcctgcttccacggcgccacctgccatgaccgtgtggcctccttttactgcgagtgtccccatggccgcacaggtctgctgtgccacctcaacgacgcatgcatcagcaacccctgtaacgagggctccaactgcgacaccaaccctgtcaatggcaaggccatctgcacctgcccctcggggtacacgggcccggcctgcagccaggacgtggatgagtgctcgctgggtgccaacccctgcgagcatgcgggcaagtgcatcaacacgctgggctccttcgagtgccagtgtctgcagggctacacgggcccccgatgcgagatcgacgtcaacgagtgcgtctcgaacccgtgccagaacgacgccacctgcctggaccagattggggagttccagtgcatgtgcatgcccggctacgagggtgtgcactgcgaggtcaacacagacgagtgtgccagcagcccctgcctgcacaatggccgctgcctggacaagatcaatgagttccagtgcgagtgccccacgggcttcactgggcatctgtgccagtacgatgtggacgagtgtgccagcaccccctgcaagaatggtgccaagtgcctggacggacccaacacttacacctgtgtgtgcacggaagggtacacggggacgcactgcgaggtggacatcgatgagtgcgaccccgacccctgccactacggctcctgcaaggacggcgtcgccaccttcacctgcctctgccgcccaggctacacgggccaccactgcgagaccaacatcaacgagtgctccagccagccctgccgcctacgggggcacctgccaggacccggacaacgcctacctctgcttctgcctgaaggggaccacaggacccaactgcgagatcaacctggatgactgtgccagcagcccctgcgactcgggcacctgtctggacaagatcgatggctacgagtgtgcctgtgagccgggctacacagggagcatgtgtaacagcaacatcgatgagtgtgcgggcaacccctgccacaacgggggcacctgcgaggacggcatcaatggcttcacctgccgctgccccgagggctaccacgaccccacctgcctgtctgaggtcaatgagtgcaacagcaacccctgcgtccacggggcctgccgggacagcctcaacgggtacaagtgcgactgtgaccctgggtggagtgggaccaactgtgacatcaacaacaacgagtgtgaatccaacccttgtgtcaacggcggcacctgcaaagacatgaccagtggctacgtgtgcacctgccgggagggcttcagcggtcccaactgccagaccaacatcaacgagtgtgcgtccaacccatgtctgaaccagggcacgtgtattgacgacgttgccgggtacaagtgcaactgcctgctgccctacacaggtgccacgtgtgaggtggtgctggccccgtgtgcccccagcccctgcagaaacggcggggagtgcaggcaatccgaggactatgagagcttctcctgtgtctgccccacgggctggcaagggcagacctgtgaggtcgacatcaacgagtgcgttctgagcccgtgccggcacggcgcatcctgccagaacacccacggcggctaccgctgccactgccaggccggctacagtgggcgcaactgcgagaccgacatcgacgactgccggcccaacccgtgtcacaacgggggctcctgcacagacggcatcaacacggccttctgcgactgcctgcccggcttccggggcactttctgtgaggaggacatcaacgagtgtgccagtgacccctgccgcaacggggccaactgcacggactgcgtggacagctacacgtgcacctgccccgcaggcttcagcgggatccactgtgagaacaacacgcctgactgcacagagagctcctgcttcaacggtggcacctgcgtggacggcatcaactcgttcacctgcctgtgtccacccggcttcacgggcagctactgccagcacgtagtcaatgagtgcgactcacgaccctgcctgctaggcggcacctgtcaggacggtcgcggtctccacaggtgcacctgcccccagggctacactggccccaactgccagaaccttgtgcactggtgtgactcctcgccctgcaagaacggcggcaaatgctggcagacccacacccagtaccgctgcgagtgccccagcggctggaccggcctttactgcgacgtgcccagcgtgtcctgtgaggtggctgcgcagcgacaaggtgttgacgttgcccgcctgtgccagcatggagggctctgtgtggacgcgggcaacacgcaccactgccgctgccaggcgggctacacaggcagctactgtgaggacctggtggacgagtgctcacccagcccctgccagaacggggccacctgcacggactacctgggcggctactcctgcaagtgcgtggccggctaccacggggtgaactgctctgaggagatcgacgagtgcctctcccacccctgccagaacgggggcacctgcctcgacctccccaacacctacaagtgctcctgcccacggggcactcagggtgtgcactgtgagatcaacgtggacgactgcaatccccccgttgaccccgtgtcccggagccccaagtgctttaacaacggcacctgcgtggaccaggtgggcggctacagctgcacctgcccgccgggcttcgtgggtgagcgctgtgagggggatgtcaacgagtgcctgtccaatccctgcgacgcccgtggcacccagaactgcgtgcagcgcgtcaatgacttccactgcgagtgccgtgctggtcacaccgggcgccgctgcgagtccgtcatcaatggctgcaaaggcaagccctgcaagaatgggggcacctgcgccgtggcctccaacaccgcccgcgggttcatctgcaagtgccctgcgggcttcgagggcgccacgtgtgagaatgacgctcgtacctgcggcagcctgcgctgcctcaacggcggcacatgcatctccggcccgcgcagccccacctgcctgtgcctgggccccttcacgggccccgaatgccagttcccggccagcagcccctgcctgggcggcaacccctgctacaaccaggggacctgtgagcccacatccgagagccccttctaccgttgcctgtgccccgccaaattcaacgggctcttgtgccacatcctggactacagcttcgggggtggggccgggcgcgacatccccccgccgctgatcgaggaggcgtgcgagctgcccgagtgccaggaggacgcgggcaacaaggtctgcagcctgcagtgcaacaaccacgcgtgcggctgggacggcggtgactgctccctcaacttcaatgacccctggaagaactgcacgcagtctctgcagtgctggaagtacttcagtgacggccactgtgacagccagtgcaactcagccggctgcctcttcgacggctttgactgccagcgtgcggaaggccagtgcaaccccctgtacgaccagtactgcaaggaccacttcagcgacgggcactgcgaccagggctgcaacagcgcggagtgcgagtgggacgggctggactgtgcggagcatgtacccgagaggctggcggccggcacgctggtggtggtggtgctgatgccgccggagcagctgcgcaacagctccttccacttcctgcgggagctcagccgcgtgctgcacaccaacgtggtcttcaagcgtgacgcacacggccagcagatgatcttcccctactacggccgcgaggaggagctgcgcaagcaccccatcaagcgtgccgccgagggctgggccgcacctgacgccctgctgggccaggtgaaggcctcgctgctccctggtggcagcgagggtgggcggcggcggagggagctggaccccatggacgtccgcggctccatcgtctacctggagattgacaaccggcagtgtgtgcaggcctcctcgcagtgcttccagagtgccaccgatgtggccgcattcctgggagcgctcgcctcgctgggcagcctcaacatcccctacaagatcgaggccgtgcagagtgagaccgtggagccgcccccgccggcgcagctgcacttcatgtacgtggcggcggccgcctttgtgcttctgttcttcgtgggctgcggggtgctgctgtcccgcaagcgccggcggcagcatggccagctctggttccctgagggcttcaaagtgtctgaggccagcaagaagaagcggcgggagcccctcggcgaggactccgtgggcctcaagcccctgaagaacgcttcagacggtgccctcatggacgacaaccagaatgagtggggggacgaggacctggagaccaagaagttccggttcgaggagcccgtggttctgcctgacctggacgaccagacagaccaccggcagtggactcagcagcacctggatgccgctgacctgcgcatgtctgccatggcccccacaccgccccagggtgaggttgacgccgactgcatggacgtcaatgtccgcgggcctgatggcttcaccccgctcatgatcgcctcctgcagcgggggcggcctggagacgggcaacagcgaggaagaggaggacgcgccggccgtcatctccgacttcatctaccagggcgccagcctgcacaaccagacagaccgcacgggcgagaccgccttgcacctggccgcccgctactcacgctctgatgccgccaagcgcctgctggaggccagcgcagatgccaacatccaggacaacatgggccgcaccccgctgcatgcggctgtgtctgccgacgcacaaggtgtcttccagatcctgatccggaaccgagccacagacctggatgcccgcatgcatgatggcacgacgccactgatcctggctgcccgcctggccgtggagggcatgctggaggacctcatcaactcacacgccgacgtcaacgccgtagatgacctgggcaagtccgccctgcactgggccgccgccgtgaacaatgtggatgccgcagttgtgctcctgaagaacggggctaacaaagatatgcagaacaacagggaggagacacccctgtttctggccgcccgggagggcagctacgagaccgccaaggtgctgctggaccactttgccaaccgggacatcacggatcatatggaccgcctgccgcgcgacatcgcacaggagcgcatgcatcacgacatcgtgaggctgctggacgagtacaacctggtgcgcagcccgcagctgcacggagccccgctggggggcacgcccaccctgtcgcccccgctctgctcgcccaacggctacctgggcagcctcaagcccggcgtgcagggcaagaaggtccgcaagcccagcagcaaaggcctggcctgtggaagcaaggaggccaaggacctcaaggcacggaggaagaagtcccaggatggcaagggctgcctgctggacagctccggcatgctctcgcccgtggactccctggagtcaccccatggctacctgtcagacgtggcctcgccgccactgctgccctccccgttccagcagtctccgtccgtgcccctcaaccacctgcctgggatgcccgacacccacctgggcatcgggcacctgaacgtggcggccaagcccgagatggcggcgctgggtgggggcggccggctggcctttgagactggcccacctcgtctctcccacctgcctgtggcctctggcaccagcaccgtcctgggctccagcagcggaggggccctgaatttcactgtgggcgggtccaccagtttgaatggtcaatgcgagtggctgtcccggctgcagagcggcatggtgccgaaccaatacaaccctctgcgggggagtgtggcaccaggccccctgagcacacaggccccctccctgcagcatggcatggtaggcccgctgcacagtagccttgctgccagcgccctgtcccagatgatgagctaccagggcctgcccagcacccggctggccacccagcctcacctggtgcagacccagcaggtgcagccacaaaacttacagatgcagcagcagaacctgcagccagcaaacatccagcagcagcaaagcctgcagccgccaccaccaccaccacagccgcaccttggcgtgagctcagcagccagcggccacctgggccggagcttcctgagtggagagccgagccaggcagacgtgcagccactgggccccagcagcctggcggtgcacactattctgccccaggagagccccgccctgcccacgtcgctgccatcctcgctggtcccacccgtgaccgcagcccagttcctgacgcccccctcgcagcacagctactcctcgcctgtggacaacacccccagccaccagctacaggtgcctgagcaccccttcctcaccccgtcccctgagtcccctgaccagtggtccagctcgtccccgcattccaacgtctccgactggtccgagggcgtctccagccctcccaccagcatgcagtcccagatcgcccgcattccggaggccttcaagtaaacggcgcgccccacgagaccccggcttcctttcccaagccttcgggcgtctgtgtgcgctctgtggatgccagggccgaccagaggagcctttttaaaacacatgtttttatacaaaataagaacaaggattttaattttttttagtatttatttatgtacttttattttacacagaaacactgcctttttatttatatgtactgttttatctggccccaggtagaaacttttatctattctgagaaaacaagcaagttctgagagccagggttttcctacgtaggatgaaaagattcttctgtgtttataaaatataaacaaagattcatgatttataaatgccatttatttattgattccttttttcaaaatccaaaaagaaatgatgttggagaagggaagttgaacgagcatagtccaaaaagctcctggggcgtccaggccgcgccctttccccgacgcccacccaaccccaagccagcccggccgctccaccagcatcacctgcctgttaggagaagctgcatccagaggcaaacggaggcaaagctggctcaccttccgcacgcggattaatttgcatctgaaataggaaacaagtgaaagcatatgggttagatgttgccatgtgttttagatggtttcttgcaagcatgcttgtgaaaatgtgttctcggagtgtgtatgccaagagtgcacccatggtaccaatcatgaatctttgtttcaggttcagtattatgtagttgttcgttggttatacaagttcttggtccctccagaaccaccccggccccctgcccgttcttgaaatgtaggcatcatgcatgtcaaacatgagatgtgtggactgtggcacttgcctgggtcacacacggaggcatcctacccttttctggggaaagacactgcctgggctgaccccggtggcggccccagcacctcagcctgcacagtgtcccccaggttccgaagaagatgctccagcaacacagcctgggccccagctcgcgggacccgaccccccgtgggctcccgtgttttgtaggagacttgccagagccgggcacattgagctgtgcaacgccgtgggctgcgtcctttggtcctgtccccgcagccctggcagggggcatgcggtcgggcaggggctggagggaggcgggggctgcccttgggccacccctcctagtttgggaggagcagatttttgcaataccaagtatagcctatggcagaaaaaatgtctgtaaatatgtttttaaaggtggattttgtttaaaaaatcttaatgaatgagtctgttgtgtgtcatgccagtgagggacgtcagactcggctcagctcggggagccttagccgcccatgcactggggacgctccgctgccgtgccgcctgcactcctcagggcagcctcccccggctctacgggggccgcgtggtgccatccccagggggcatgaccagatgcgtcccaagatgttgatttttactgtgttttataaaatagagtgtagtttacagaaaaagactttaaaagtgatctacatgaggaactgtagatgatgtatttttttcatcttttttgttaactgatttgcaataaaaatgatactgatggtga

SEQ ID NO: 11747 - DNA, 7120 bp, Homo sapiens
tccctcgacctgcagtgtggtcccccttgcaggtacaagtgcgactgtgaccctgggtggagtgggaccaactgtgacatcaacaacaacgagtgtgaatccaacccttgtgtcaacggcggcacctgcaaagacatgaccagtggctacgtgtgcacctgccgggagggcttcagcggtcccaactgccagaccaacatcaacgagtgtgcgtccaacccatgtctgaaccagggcacgtgtattgacgacgttgccgggtacaagtgcaactgcctgctgccctacacaggtgccacgtgtgaggtggtgctggccccgtgtgcccccagcccctgcagaaacggcggggagtgcaggcaatccgaggactatgagagcttctcctgtgtctgccccacgggctggcaagggcagacctgtgaggtcgacatcaacgagtgcgttctgagcccgtgccggcacggcgcatcctgccagaacacccacggcggctaccgctgccactgccaggccggctacagtgggcgcaactgcgagaccgacatcgacgactgccggcccaacccgtgtcacaacgggggctcctgcacagacggcatcaacacggccttctgcgactgcctgcccggcttccggggcactttctgtgaggaggacatcaacgagtgtgccagtgacccctgccgcaacggggccaactgcacggactgcgtggacagctacacgtgcacctgccccgcaggcttcagcgggatccactgtgagaacaacacgcctgactgcacagagagctcctgcttcaacggtggcacctgcgtggacggcatcaactcgttcacctgcctgtgtccacccggcttcacgggcagctactgccagcacgtagtcaatgagtgcgactcacgaccctgcctgctaggcggcacctgtcaggacggtcgcggtctccacaggtgcacctgcccccagggctacactggccccaactgccagaaccttgtgcactggtgtgactcctcgccctgcaagaacggcggcaaatgctggcagacccacacccagtaccgctgcgagtgccccagcggctggaccggcctttactgcgacgtgcccagcgtgtcctgtgaggtggctgcgcagcgacaaggtgttgacgttgcccgcctgtgccagcatggagggctctgtgtggacgcgggcaacacgcaccactgccgctgccaggcgggctacacaggcagctactgtgaggacctggtggacgagtgctcacccagcccctgccagaacggggccacctgcacggactacctgggcggctactcctgcaagtgcgtggccggctaccacggggtgaactgctctgaggagatcgacgagtgcctctcccacccctgccagaacgggggcacctgcctcgacctccccaacacctacaagtgctcctgcccacggggcactcagggtgtgcactgtgagatcaacgtggacgactgcaatccccccgttgaccccgtgtcccggagccccaagtgctttaacaacggcacctgcgtggaccaggtgggcggctacagctgcacctgcccgccgggcttcgtgggtgagcgctgtgagggggatgtcaacgagtgcctgtccaatccctgcgacgcccgtggcacccagaactgcgtgcagcgcgtcaatgacttccactgcgagtgccgtgctggtcacaccgggcgccgctgcgagtccgtcatcaatggctgcaaaggcaagccctgcaagaatgggggcacctgcgccgtggcctccaacaccgcccgcgggttcatctgcaagtgccctgcgggcttcgagggcgccacgtgtgagaatgacgctcgtacctgcggcagcctgcgctgcctcaacggcggcacatgcatctccggcccgcgcagccccacctgcctgtgcctgggccccttcacgggccccgaatgccagttcccggccagcagcccctgcctgggcggcaacccctgctacaaccaggggacctgtgagcccacatccgagagccccttctaccgttgcctgtgccccgccaaattcaacgggctcttgtgccacatcctggactacagcttcgggggtggggccgggcgcgacatccccccgccgctgatcgaggaggcgtgcgagctgcccgagtgccaggaggacgcgggcaacaaggtctgcagcctgcagtgcaacaaccacgcgtgcggctgggacggcggtgactgctccctcaacttcaatgacccctggaagaactgcacgcagtctctgcagtgctggaagtacttcagtgacggccactgtgacagccagtgcaactcagccggctgcctcttcgacggctttgactgccagcgtgcggaaggccagtgcaaccccctgtacgaccagtactgcaaggaccacttcagcgacgggcactgcgaccagggctgcaacagcgcggagtgcgagtgggacgggctggactgtgcggagcatgtacccgagaggctggcggccggcacgctggtggtggtggtgctgatgccgccggagcagctgcgcaacagctccttccacttcctgcgggagctcagccgcgtgctgcacaccaacgtggtcttcaagcgtgacgcacacggccagcagatgatcttcccctactacggccgcgaggaggagctgcgcaagcaccccatcaagcgtgccgccgagggctgggccgcacctgacgccctgctgggccaggtgaaggcctcgctgctccctggtggcagcgagggtgggcggcggcggagggagctggaccccatggacgtccgcggctccatcgtctacctggagattgacaaccggcagtgtgtgcaggcctcctcgcagtgcttccagagtgccaccgatgtggccgcattcctgggagcgctcgcctcgctgggcagcctcaacatcccctacaagatcgaggccgtgcagagtgagaccgtggagccgcccccgccggcgcagctgcacttcatgtacgtggcggcggccgcctttgtgcttctgttcttcgtgggctgcggggtgctgctgtcccgcaagcgccggcggcagcatggccagctctggttccctgagggcttcaaagtgtctgaggccagcaagaagaagcggcgggagcccctcggcgaggactccgtgggcctcaagcccctgaagaacgcttcagacggtgccctcatggacgacaaccagaatgagtggggggacgaggacctggagaccaagaagttccggttcgaggagcccgtggttctgcctgacctggacgaccagacagaccaccggcagtggactcagcagcacctggatgccgctgacctgcgcatgtctgccatggcccccacaccgccccagggtgaggttgacgccgactgcatggacgtcaatgtccgcgggcctgatggcttcaccccgctcatgatcgcctcctgcagcgggggcggcctggagacgggcaacagcgaggaagaggaggacgcgccggccgtcatctccgacttcatctaccagggcgccagcctgcacaaccagacagaccgcacgggcgagaccgccttgcacctggccgcccgctactcacgctctgatgccgccaagcgcctgctggaggccagcgcagatgccaacatccaggacaacatgggccgcaccccgctgcatgcggctgtgtctgccgacgcacaaggtgtcttccagatcctgatccggaaccgagccacagacctggatgcccgcatgcatgatggcacgacgccactgatcctggctgcccgcctggccgtggagggcatgctggaggacctcatcaactcacacgccgacgtcaacgccgtagatgacctgggcaagtccgccctgcactgggccgccgccgtgaacaatgtggatgccgcagttgtgctcctgaagaacggggctaacaaagatatgcagaacaacagggaggagacacccctgtttctggccgcccgggagggcagctacgagaccgccaaggtgctgctggaccactttgccaaccgggacatcacggatcatatggaccgcctgccgcgcgacatcgcacaggagcgcatgcatcacgacatcgtgaggctgctggacgagtacaacctggtgcgcagcccgcagctgcacggagccccgctggggggcacgcccaccctgtcgcccccgctctgctcgcccaacggctacctgggcagcctcaagcccggcgtgcagggcaagaaggtccgcaagcccagcagcaaaggcctggcctgtggaagcaaggaggccaaggacctcaaggcacggaggaagaagtcccaggatggcaagggctgcctgctggacagctccggcatgctctcgcccgtggactccctggagtcaccccatggctacctgtcagacgtggcctcgccgccactgctgccctccccgttccagcagtctccgtccgtgcccctcaaccacctgcctgggatgcccgacacccacctgggcatcgggcacctgaacgtggcggccaagcccgagatggcggcgctgggtgggggcggccggctggcctttgagactggcccacctcgtctctcccacctgcctgtggcctctggcaccagcaccgtcctgggctccagcagcggaggggccctgaatttcactgtgggcgggtccaccagtttgaatggtcaatgcgagtggctgtcccggctgcagagcggcatggtgccgaaccaatacaaccctctgcgggggagtgtggcaccaggccccctgagcacacaggccccctccctgcagcatggcatggtaggcccgctgcacagtagccttgctgccagcgccctgtcccagatgatgagctaccagggcctgcccagcacccggctggccacccagcctcacctggtgcagacccagcaggtgcagccacaaaacttacagatgcagcagcagaacctgcagccagcaaacatccagcagcagcaaagcctgcagccgccaccaccaccaccacagccgcaccttggcgtgagctcagcagccagcggccacctgggccggagcttcctgagtggagagccgagccaggcagacgtgcagccactgggccccagcagcctggcggtgcacactattctgccccaggagagccccgccctgcccacgtcgctgccatcctcgctggtcccacccgtgaccgcagcccagttcctgacgcccccctcgcagcacagctactcctcgcctgtggacaacacccccagccaccagctacaggtgcctgagcaccccttcctcaccccgtcccctgagtcccctgaccagtggtccagctcgtccccgcattccaacgtctccgactggtccgagggcgtctccagccctcccaccagcatgcagtcccagatcgcccgcattccggaggccttcaagtaaacggcgcgccccacgagaccccggcttcctttcccaagccttcgggcgtctgtgtgcgctctgtggatgccagggccgaccagaggagcctttttaaaacacatgtttttatacaaaataagaacaaggattttaattttttttagtatttatttatgtacttttattttacacagaaacactgcctttttatttatatgtactgttttatctggccccaggtagaaacttttatctattctgagaaaacaagcaagttctgagagccagggttttcctacgtaggatgaaaagattcttctgtgtttataaaatataaacaaagattcatgatttataaatgccatttatttattgattccttttttcaaaatccaaaaagaaatgatgttggagaagggaagttgaacgagcatagtccaaaaagctcctggggcgtccaggccgcgccctttccccgacgcccacccaaccccaagccagcccggccgctccaccagcatcacctgcctgttaggagaagctgcatccagaggcaaacggaggcaaagctggctcaccttccgcacgcggattaatttgcatctgaaataggaaacaagtgaaagcatatgggttagatgttgccatgtgttttagatggtttcttgcaagcatgcttgtgaaaatgtgttctcggagtgtgtatgccaagagtgcacccatggtaccaatcatgaatctttgtttcaggttcagtattatgtagttgttcgttggttatacaagttcttggtccctccagaaccaccccggccccctgcccgttcttgaaatgtaggcatcatgcatgtcaaacatgagatgtgtggactgtggcacttgcctgggtcacacacggaggcatcctacccttttctggggaaagacactgcctgggctgaccccggtggcggccccagcacctcagcctgcacagtgtcccccaggttccgaagaagatgctccagcaacacagcctgggccccagctcgcgggacccgaccccccgtgggctcccgtgttttgtaggagacttgccagagccgggcacattgagctgtgcaacgccgtgggctgcgtcctttggtcctgtccccgcagccctggcagggggcatgcggtcgggcaggggctggagggaggcgggggctgcccttgggccacccctcctagtttgggaggagcagatttttgcaataccaagtatagcctatggcagaaaaaatgtctgtaaatatgtttttaaaggtggattttgtttaaaaaatcttaatgaatgagtctgttgtgtgtcatgccagtgagggacgtcagactcggctcagctcggggagccttagccgcccatgcactggggacgctccgctgccgtgccgcctgcactcctcagggcagcctcccccggctctacgggggccgcgtggtgccatccccagggggcatgaccagatgcgtcccaagatgttgatttttactgtgttttataaaatagagtgtagtttacagaaaaagactttaaaagtgatctacatgaggaactgtagatgatgtatttttttcatcttttttgttaactgatttgcaataaaaatgatactgatggtga

SEQ ID NO: 11748 - DNA, 7178 bp, Homo sapiens
ggtttgggtgatatctgaactgctctttatgtcttccagcatacctccacagggtacagtgactgggatgactacgcatacagtgatgtggatcttagagatcaccatagtgagacaacacttgttgccgtaagtctgacagttgggaccgctgaagcccaacccttgtgtcaacggcggcacctgcaaagacatgaccagtggctacgtgtgcacctgccgggagggcttcagcggtcccaactgccagaccaacatcaacgagtgtgcgtccaacccatgtctgaaccagggcacgtgtattgacgacgttgccgggtacaagtgcaactgcctgctgccctacacaggtgccacgtgtgaggtggtgctggccccgtgtgcccccagcccctgcagaaacggcggggagtgcaggcaatccgaggactatgagagcttctcctgtgtctgccccacgggctggcaagggcagacctgtgaggtcgacatcaacgagtgcgttctgagcccgtgccggcacggcgcatcctgccagaacacccacggcggctaccgctgccactgccaggccggctacagtgggcgcaactgcgagaccgacatcgacgactgccggcccaacccgtgtcacaacgggggctcctgcacagacggcatcaacacggccttctgcgactgcctgcccggcttccggggcactttctgtgaggaggacatcaacgagtgtgccagtgacccctgccgcaacggggccaactgcacggactgcgtggacagctacacgtgcacctgccccgcaggcttcagcgggatccactgtgagaacaacacgcctgactgcacagagagctcctgcttcaacggtggcacctgcgtggacggcatcaactcgttcacctgcctgtgtccacccggcttcacgggcagctactgccagcacgtagtcaatgagtgcgactcacgaccctgcctgctaggcggcacctgtcaggacggtcgcggtctccacaggtgcacctgcccccagggctacactggccccaactgccagaaccttgtgcactggtgtgactcctcgccctgcaagaacggcggcaaatgctggcagacccacacccagtaccgctgcgagtgccccagcggctggaccggcctttactgcgacgtgcccagcgtgtcctgtgaggtggctgcgcagcgacaaggtgttgacgttgcccgcctgtgccagcatggagggctctgtgtggacgcgggcaacacgcaccactgccgctgccaggcgggctacacaggcagctactgtgaggacctggtggacgagtgctcacccagcccctgccagaacggggccacctgcacggactacctgggcggctactcctgcaagtgcgtggccggctaccacggggtgaactgctctgaggagatcgacgagtgcctctcccacccctgccagaacgggggcacctgcctcgacctccccaacacctacaagtgctcctgcccacggggcactcagggtgtgcactgtgagatcaacgtggacgactgcaatccccccgttgaccccgtgtcccggagccccaagtgctttaacaacggcacctgcgtggaccaggtgggcggctacagctgcacctgcccgccgggcttcgtgggtgagcgctgtgagggggatgtcaacgagtgcctgtccaatccctgcgacgcccgtggcacccagaactgcgtgcagcgcgtcaatgacttccactgcgagtgccgtgctggtcacaccgggcgccgctgcgagtccgtcatcaatggctgcaaaggcaagccctgcaagaatgggggcacctgcgccgtggcctccaacaccgcccgcgggttcatctgcaagtgccctgcgggcttcgagggcgccacgtgtgagaatgacgctcgtacctgcggcagcctgcgctgcctcaacggcggcacatgcatctccggcccgcgcagccccacctgcctgtgcctgggccccttcacgggccccgaatgccagttcccggccagcagcccctgcctgggcggcaacccctgctacaaccaggggacctgtgagcccacatccgagagccccttctaccgttgcctgtgccccgccaaattcaacgggctcttgtgccacatcctggactacagcttcgggggtggggccgggcgcgacatccccccgccgctgatcgaggaggcgtgcgagctgcccgagtgccaggaggacgcgggcaacaaggtctgcagcctgcagtgcaacaaccacgcgtgcggctgggacggcggtgactgctccctcaacttcaatgacccctggaagaactgcacgcagtctctgcagtgctggaagtacttcagtgacggccactgtgacagccagtgcaactcagccggctgcctcttcgacggctttgactgccagcgtgcggaaggccagtgcaaccccctgtacgaccagtactgcaaggaccacttcagcgacgggcactgcgaccagggctgcaacagcgcggagtgcgagtgggacgggctggactgtgcggagcatgtacccgagaggctggcggccggcacgctggtggtggtggtgctgatgccgccggagcagctgcgcaacagctccttccacttcctgcgggagctcagccgcgtgctgcacaccaacgtggtcttcaagcgtgacgcacacggccagcagatgatcttcccctactacggccgcgaggaggagctgcgcaagcaccccatcaagcgtgccgccgagggctgggccgcacctgacgccctgctgggccaggtgaaggcctcgctgctccctggtggcagcgagggtgggcggcggcggagggagctggaccccatggacgtccgcggctccatcgtctacctggagattgacaaccggcagtgtgtgcaggcctcctcgcagtgcttccagagtgccaccgatgtggccgcattcctgggagcgctcgcctcgctgggcagcctcaacatcccctacaagatcgaggccgtgcagagtgagaccgtggagccgcccccgccggcgcagctgcacttcatgtacgtggcggcggccgcctttgtgcttctgttcttcgtgggctgcggggtgctgctgtcccgcaagcgccggcggcagcatggccagctctggttccctgagggcttcaaagtgtctgaggccagcaagaagaagcggcgggagcccctcggcgaggactccgtgggcctcaagcccctgaagaacgcttcagacggtgccctcatggacgacaaccagaatgagtggggggacgaggacctggagaccaagaagttccggttcgaggagcccgtggttctgcctgacctggacgaccagacagaccaccggcagtggactcagcagcacctggatgccgctgacctgcgcatgtctgccatggcccccacaccgccccagggtgaggttgacgccgactgcatggacgtcaatgtccgcgggcctgatggcttcaccccgctcatgatcgcctcctgcagcgggggcggcctggagacgggcaacagcgaggaagaggaggacgcgccggccgtcatctccgacttcatctaccagggcgccagcctgcacaaccagacagaccgcacgggcgagaccgccttgcacctggccgcccgctactcacgctctgatgccgccaagcgcctgctggaggccagcgcagatgccaacatccaggacaacatgggccgcaccccgctgcatgcggctgtgtctgccgacgcacaaggtgtcttccagatcctgatccggaaccgagccacagacctggatgcccgcatgcatgatggcacgacgccactgatcctggctgcccgcctggccgtggagggcatgctggaggacctcatcaactcacacgccgacgtcaacgccgtagatgacctgggcaagtccgccctgcactgggccgccgccgtgaacaatgtggatgccgcagttgtgctcctgaagaacggggctaacaaagatatgcagaacaacagggaggagacacccctgtttctggccgcccgggagggcagctacgagaccgccaaggtgctgctggaccactttgccaaccgggacatcacggatcatatggaccgcctgccgcgcgacatcgcacaggagcgcatgcatcacgacatcgtgaggctgctggacgagtacaacctggtgcgcagcccgcagctgcacggagccccgctggggggcacgcccaccctgtcgcccccgctctgctcgcccaacggctacctgggcagcctcaagcccggcgtgcagggcaagaaggtccgcaagcccagcagcaaaggcctggcctgtggaagcaaggaggccaaggacctcaaggcacggaggaagaagtcccaggatggcaagggctgcctgctggacagctccggcatgctctcgcccgtggactccctggagtcaccccatggctacctgtcagacgtggcctcgccgccactgctgccctccccgttccagcagtctccgtccgtgcccctcaaccacctgcctgggatgcccgacacccacctgggcatcgggcacctgaacgtggcggccaagcccgagatggcggcgctgggtgggggcggccggctggcctttgagactggcccacctcgtctctcccacctgcctgtggcctctggcaccagcaccgtcctgggctccagcagcggaggggccctgaatttcactgtgggcgggtccaccagtttgaatggtcaatgcgagtggctgtcccggctgcagagcggcatggtgccgaaccaatacaaccctctgcgggggagtgtggcaccaggccccctgagcacacaggccccctccctgcagcatggcatggtaggcccgctgcacagtagccttgctgccagcgccctgtcccagatgatgagctaccagggcctgcccagcacccggctggccacccagcctcacctggtgcagacccagcaggtgcagccacaaaacttacagatgcagcagcagaacctgcagccagcaaacatccagcagcagcaaagcctgcagccgccaccaccaccaccacagccgcaccttggcgtgagctcagcagccagcggccacctgggccggagcttcctgagtggagagccgagccaggcagacgtgcagccactgggccccagcagcctggcggtgcacactattctgccccaggagagccccgccctgcccacgtcgctgccatcctcgctggtcccacccgtgaccgcagcccagttcctgacgcccccctcgcagcacagctactcctcgcctgtggacaacacccccagccaccagctacaggtgcctgagcaccccttcctcaccccgtcccctgagtcccctgaccagtggtccagctcgtccccgcattccaacgtctccgactggtccgagggcgtctccagccctcccaccagcatgcagtcccagatcgcccgcattccggaggccttcaagtaaacggcgcgccccacgagaccccggcttcctttcccaagccttcgggcgtctgtgtgcgctctgtggatgccagggccgaccagaggagcctttttaaaacacatgtttttatacaaaataagaacaaggattttaattttttttagtatttatttatgtacttttattttacacagaaacactgcctttttatttatatgtactgttttatctggccccaggtagaaacttttatctattctgagaaaacaagcaagttctgagagccagggttttcctacgtaggatgaaaagattcttctgtgtttataaaatataaacaaagattcatgatttataaatgccatttatttattgattccttttttcaaaatccaaaaagaaatgatgttggagaagggaagttgaacgagcatagtccaaaaagctcctggggcgtccaggccgcgccctttccccgacgcccacccaaccccaagccagcccggccgctccaccagcatcacctgcctgttaggagaagctgcatccagaggcaaacggaggcaaagctggctcaccttccgcacgcggattaatttgcatctgaaataggaaacaagtgaaagcatatgggttagatgttgccatgtgttttagatggtttcttgcaagcatgcttgtgaaaatgtgttctcggagtgtgtatgccaagagtgcacccatggtaccaatcatgaatctttgtttcaggttcagtattatgtagttgttcgttggttatacaagttcttggtccctccagaaccaccccggccccctgcccgttcttgaaatgtaggcatcatgcatgtcaaacatgagatgtgtggactgtggcacttgcctgggtcacacacggaggcatcctacccttttctggggaaagacactgcctgggctgaccccggtggcggccccagcacctcagcctgcacagtgtcccccaggttccgaagaagatgctccagcaacacagcctgggccccagctcgcgggacccgaccccccgtgggctcccgtgttttgtaggagacttgccagagccgggcacattgagctgtgcaacgccgtgggctgcgtcctttggtcctgtccccgcagccctggcagggggcatgcggtcgggcaggggctggagggaggcgggggctgcccttgggccacccctcctagtttgggaggagcagatttttgcaataccaagtatagcctatggcagaaaaaatgtctgtaaatatgtttttaaaggtggattttgtttaaaaaatcttaatgaatgagtctgttgtgtgtcatgccagtgagggacgtcagactcggctcagctcggggagccttagccgcccatgcactggggacgctccgctgccgtgccgcctgcactcctcagggcagcctcccccggctctacgggggccgcgtggtgccatccccagggggcatgaccagatgcgtcccaagatgttgatttttactgtgttttataaaatagagtgtagtttacagaaaaagactttaaaagtgatctacatgaggaactgtagatgatgtatttttttcatcttttttgttaactgatttgcaataaaaatgatactgatggtga

SEQ ID NO: 11749 - DNA, 9583 bp, Homo sapiens
atgccgccgctcctggcgcccctgctctgcctggcgctgctgcccgcgctcgccgcacgaggcccgcgatgctcccagcccggtgagacctgcctgaatggcgggaagtgtgaagcggccaatggcacggaggcctgcgtctgtggcggggccttcgtgggcccgcgatgccaggaccccaacccgtgcctcagcaccccctgcaagaacgccgggacatgccacgtggtggaccgcagaggcgtggcagactatgcctgcagctgtgccctgggcttctctgggcccctctgcctgacacccctggacaacgcctgcctcaccaacccctgccgcaacgggggcacctgcgacctgctcacgctgacggagtacaagtgccgctgcccgcccggctggtcagggaaatcgtgccagcaggctgacccgtgcgcctccaacccctgcgccaacggtggccagtgcctgcccttcgaggcctcctacatctgccactgcccacccagcttccatggccccacctgccggcaggatgtcaacgagtgtggccagaagcccgggctttgccgccacggaggcacctgccacaacgaggtcggctcctaccgctgcgtctgccgcgccacccacactggccccaactgcgagcggccctacgtgccctgcagcccctcgccctgccagaacgggggcacctgccgccccacgggcgacgtcacccacgagtgtgcctgcctgccaggcttcaccggccagaactgtgaggaaaatatcgacgattgtccaggaaacaactgcaagaacgggggtgcctgtgtggacggcgtgaacacctacaactgcccgtgcccgccagagtggacaggtcagtactgtaccgaggatgtggacgagtgccagctgatgccaaatgcctgccagaacggcgggacctgccacaacacccacggtggctacaactgcgtgtgtgtcaacggctggactggtgaggactgcagcgagaacattgatgactgtgccagcgccgcctgcttccacggcgccacctgccatgaccgtgtggcctccttttactgcgagtgtccccatggccgcacaggtctgctgtgccacctcaacgacgcatgcatcagcaacccctgtaacgagggctccaactgcgacaccaaccctgtcaatggcaaggccatctgcacctgcccctcggggtacacgggcccggcctgcagccaggacgtggatgagtgctcgctgggtgccaacccctgcgagcatgcgggcaagtgcatcaacacgctgggctccttcgagtgccagtgtctgcagggctacacgggcccccgatgcgagatcgacgtcaacgagtgcgtctcgaacccgtgccagaacgacgccacctgcctggaccagattggggagttccagtgcatgtgcatgcccggctacgagggtgtgcactgcgaggtcaacacagacgagtgtgccagcagcccctgcctgcacaatggccgctgcctggacaagatcaatgagttccagtgcgagtgccccacgggcttcactgggcatctgtgccagtacgatgtggacgagtgtgccagcaccccctgcaagaatggtgccaagtgcctggacggacccaacacttacacctgtgtgtgcacggaagggtacacggggacgcactgcgaggtggacatcgatgagtgcgaccccgacccctgccactacggctcctgcaaggacggcgtcgccaccttcacctgcctctgccgcccaggctacacgggccaccactgcgagaccaacatcaacgagtgctccagccagccctgccgcctacgggggcacctgccaggacccggacaacgcctacctctgcttctgcctgaaggggaccacaggacccaactgcgagatcaacctggatgactgtgccagcagcccctgcgactcgggcacctgtctggacaagatcgatggctacgagtgtgcctgtgagccgggctacacagggagcatgtgtaacagcaacatcgatgagtgtgcgggcaacccctgccacaacgggggcacctgcgaggacggcatcaatggcttcacctgccgctgccccgagggctaccacgaccccacctgcctgtctgaggtcaatgagtgcaacagcaacccctgcgtccacggggcctgccgggacagcctcaacgggtacaagtgcgactgtgaccctgggtggagtgggaccaactgtgacatcaacaacaacgagtgtgaatccaacccttgtgtcaacggcggcacctgcaaagacatgaccagtggctacgtgtgcacctgccgggagggcttcagcggtcccaactgccagaccaacatcaacgagtgtgcgtccaacccatgtctgaaccagggcacgtgtattgacgacgttgccgggtacaagtgcaactgcctgctgccctacacaggtgccacgtgtgaggtggtgctggccccgtgtgcccccagcccctgcagaaacggcggggagtgcaggcaatccgaggactatgagagcttctcctgtgtctgccccacgggctggcaagggcagacctgtgaggtcgacatcaacgagtgcgttctgagcccgtgccggcacggcgcatcctgccagaacacccacggcggctaccgctgccactgccaggccggctacagtgggcgcaactgcgagaccgacatcgacgactgccggcccaacccgtgtcacaacgggggctcctgcacagacggcatcaacacggccttctgcgactgcctgcccggcttccggggcactttctgtgaggaggacatcaacgagtgtgccagtgacccctgccgcaacggggccaactgcacggactgcgtggacagctacacgtgcacctgccccgcaggcttcagcgggatccactgtgagaacaacacgcctgactgcacagagagctcctgcttcaacggtggcacctgcgtggacggcatcaactcgttcacctgcctgtgtccacccggcttcacgggcagctactgccagcacgtagtcaatgagtgcgactcacgaccctgcctgctaggcggcacctgtcaggacggtcgcggtctccacaggtgcacctgcccccagggctacactggccccaactgccagaaccttgtgcactggtgtgactcctcgccctgcaagaacggcggcaaatgctggcagacccacacccagtaccgctgcgagtgccccagcggctggaccggcctttactgcgacgtgcccagcgtgtcctgtgaggtggctgcgcagcgacaaggtgttgacgttgcccgcctgtgccagcatggagggctctgtgtggacgcgggcaacacgcaccactgccgctgccaggcgggctacacaggcagctactgtgaggacctggtggacgagtgctcacccagcccctgccagaacggggccacctgcacggactacctgggcggctactcctgcaagtgcgtggccggctaccacggggtgaactgctctgaggagatcgacgagtgcctctcccacccctgccagaacgggggcacctgcctcgacctccccaacacctacaagtgctcctgcccacggggcactcagggtgtgcactgtgagatcaacgtggacgactgcaatccccccgttgaccccgtgtcccggagccccaagtgctttaacaacggcacctgcgtggaccaggtgggcggctacagctgcacctgcccgccgggcttcgtgggtgagcgctgtgagggggatgtcaacgagtgcctgtccaatccctgcgacgcccgtggcacccagaactgcgtgcagcgcgtcaatgacttccactgcgagtgccgtgctggtcacaccgggcgccgctgcgagtccgtcatcaatggctgcaaaggcaagccctgcaagaatgggggcacctgcgccgtggcctccaacaccgcccgcgggttcatctgcaagtgccctgcgggcttcgagggcgccacgtgtgagaatgacgctcgtacctgcggcagcctgcgctgcctcaacggcggcacatgcatctccggcccgcgcagccccacctgcctgtgcctgggccccttcacgggccccgaatgccagttcccggccagcagcccctgcctgggcggcaacccctgctacaaccaggggacctgtgagcccacatccgagagccccttctaccgttgcctgtgccccgccaaattcaacgggctcttgtgccacatcctggactacagcttcgggggtggggccgggcgcgacatccccccgccgctgatcgaggaggcgtgcgagctgcccgagtgccaggaggacgcgggcaacaaggtctgcagcctgcagtgcaacaaccacgcgtgcggctgggacggcggtgactgctccctcaacttcaatgacccctggaagaactgcacgcagtctctgcagtgctggaagtacttcagtgacggccactgtgacagccagtgcaactcagccggctgcctcttcgacggctttgactgccagcgtgcggaaggccagtgcaaccccctgtacgaccagtactgcaaggaccacttcagcgacgggcactgcgaccagggctgcaacagcgcggagtgcgagtgggacgggctggactgtgcggagcatgtacccgagaggctggcggccggcacgctggtggtggtggtgctgatgccgccggagcagctgcgcaacagctccttccacttcctgcgggagctcagccgcgtgctgcacaccaacgtggtcttcaagcgtgacgcacacggccagcagatgatcttcccctactacggccgcgaggaggagctgcgcaagcaccccatcaagcgtgccgccgagggctgggccgcacctgacgccctgctgggccaggtgaaggcctcgctgctccctggtggcagcgagggtgggcggcggcggagggagctggaccccatggacgtccgcggctccatcgtctacctggagattgacaaccggcagtgtgtgcaggcctcctcgcagtgcttccagagtgccaccgatgtggccgcattcctgggagcgctcgcctcgctgggcagcctcaacatcccctacaagatcgaggccgtgcagactcagtgcgagtgcagcgatttgaagttgactaatcctccttccttaaaggagaaaaaagtaaaagccgtctccagatagagtcggctggtgcaggagagaatttagcgatagtttgcaattctgattaatcgcgtagaaaatgaccttattttggagggcgggatggaggagagtgggtgaggaggcgcccggacgcggagccagtccgccgccccccggccaccagcctgctgcgtagccgctgcctgatgtccgggcacctgcccctggcccccgtgcccgcaggtgagaccgtggagccgcccccgccggcgcagctgcacttcatgtacgtggcggcggccgcctttgtgcttctgttcttcgtgggctgcggggtgctgctgtcccgcaagcgccggcggcagcatggccagctctggttccctgagggcttcaaagtgtctgaggccagcaagaagaagcggcgggagcccctcggcgaggactccgtgggcctcaagcccctgaagaacgcttcagacggtgccctcatggacgacaaccagaatgagtggggggacgaggacctggagaccaagaagttccggttcgaggagcccgtggttctgcctgacctggacgaccagacagaccaccggcagtggactcagcagcacctggatgccgctgacctgcgcatgtctgccatggcccccacaccgccccagggtgaggttgacgccgactgcatggacgtcaatgtccgcgggcctgatggcttcaccccgctcatgatcgcctcctgcagcgggggcggcctggagacgggcaacagcgaggaagaggaggacgcgccggccgtcatctccgacttcatctaccagggcgccagcctgcacaaccagacagaccgcacgggcgagaccgccttgcacctggccgcccgctactcacgctctgatgccgccaagcgcctgctggaggccagcgcagatgccaacatccaggacaacatgggccgcaccccgctgcatgcggctgtgtctgccgacgcacaaggtgtcttccagatcctgatccggaaccgagccacagacctggatgcccgcatgcatgatggcacgacgccactgatcctggctgcccgcctggccgtggagggcatgctggaggacctcatcaactcacacgccgacgtcaacgccgtagatgacctgggcaagtccgccctgcactgggccgccgccgtgaacaatgtggatgccgcagttgtgctcctgaagaacggggctaacaaagatatgcagaacaacagggaggagacacccctgtttctggccgcccgggagggcagctacgagaccgccaaggtgctgctggaccactttgccaaccgggacatcacggatcatatggaccgcctgccgcgcgacatcgcacaggagcgcatgcatcacgacatcgtgaggctgctggacgagtacaacctggtgcgcagcccgcagctgcacggagccccgctggggggcacgcccaccctgtcgcccccgctctgctcgcccaacggctacctgggcagcctcaagcccggcgtgcagggcaagaaggtccgcaagcccagcagcaaaggcctggcctgtggaagcaaggaggccaaggacctcaaggcacggaggaagaagtcccaggatggcaagggctgcctgctggacagctccggcatgctctcgcccgtggactccctggagtcaccccatggctacctgtcagacgtggcctcgccgccactgctgccctccccgttccagcagtctccgtccgtgcccctcaaccacctgcctgggatgcccgacacccacctgggcatcgggcacctgaacgtggcggccaagcccgagatggcggcgctgggtgggggcggccggctggcctttgagactggcccacctcgtctctcccacctgcctgtggcctctggcaccagcaccgtcctgggctccagcagcggaggggccctgaatttcactgtgggcgggtccaccagtttgaatggtcaatgcgagtggctgtcccggctgcagagcggcatggtgccgaaccaatacaaccctctgcgggggagtgtggcaccaggccccctgagcacacaggccccctccctgcagcatggcatggtaggcccgctgcacagtagccttgctgccagcgccctgtcccagatgatgagctaccagggcctgcccagcacccggctggccacccagcctcacctggtgcagacccagcaggtgcagccacaaaacttacagatgcagcagcagaacctgcagccagcaaacatccagcagcagcaaagcctgcagccgccaccaccaccaccacagccgcaccttggcgtgagctcagcagccagcggccacctgggccggagcttcctgagtggagagccgagccaggcagacgtgcagccactgggccccagcagcctggcggtgcacactattctgccccaggagagccccgccctgcccacgtcgctgccatcctcgctggtcccacccgtgaccgcagcccagttcctgacgcccccctcgcagcacagctactcctcgcctgtggacaacacccccagccaccagctacaggtgcctgagcaccccttcctcaccccgtcccctgagtcccctgaccagtggtccagctcgtccccgcattccaacgtctccgactggtccgagggcgtctccagccctcccaccagcatgcagtcccagatcgcccgcattccggaggccttcaagtaaacggcgcgccccacgagaccccggcttcctttcccaagccttcgggcgtctgtgtgcgctctgtggatgccagggccgaccagaggagcctttttaaaacacatgtttttatacaaaataagaacaaggattttaattttttttagtatttatttatgtacttttattttacacagaaacactgcctttttatttatatgtactgttttatctggccccaggtagaaacttttatctattctgagaaaacaagcaagttctgagagccagggttttcctacgtaggatgaaaagattcttctgtgtttataaaatataaacaaagattcatgatttataaatgccatttatttattgattccttttttcaaaatccaaaaagaaatgatgttggagaagggaagttgaacgagcatagtccaaaaagctcctggggcgtccaggccgcgccctttccccgacgcccacccaaccccaagccagcccggccgctccaccagcatcacctgcctgttaggagaagctgcatccagaggcaaacggaggcaaagctggctcaccttccgcacgcggattaatttgcatctgaaataggaaacaagtgaaagcatatgggttagatgttgccatgtgttttagatggtttcttgcaagcatgcttgtgaaaatgtgttctcggagtgtgtatgccaagagtgcacccatggtaccaatcatgaatctttgtttcaggttcagtattatgtagttgttcgttggttatacaagttcttggtccctccagaaccaccccggccccctgcccgttcttgaaatgtaggcatcatgcatgtcaaacatgagatgtgtggactgtggcacttgcctgggtcacacacggaggcatcctacccttttctggggaaagacactgcctgggctgaccccggtggcggccccagcacctcagcctgcacagtgtcccccaggttccgaagaagatgctccagcaacacagcctgggccccagctcgcgggacccgaccccccgtgggctcccgtgttttgtaggagacttgccagagccgggcacattgagctgtgcaacgccgtgggctgcgtcctttggtcctgtccccgcagccctggcagggggcatgcggtcgggcaggggctggagggaggcgggggctgcccttgggccacccctcctagtttgggaggagcagatttttgcaataccaagtatagcctatggcagaaaaaatgtctgtaaatatgtttttaaaggtggattttgtttaaaaaatcttaatgaatgagtctgttgtgtgtcatgccagtgagggacgtcagactcggctcagctcggggagccttagccgcccatgcactggggacgctccgctgccgtgccgcctgcactcctcagggcagcctcccccggctctacgggggccgcgtggtgccatccccagggggcatgaccagatgcgtcccaagatgttgatttttactgtgttttataaaatagagtgtagtttacagaaaaagactttaaaagtgatctacatgaggaactgtagatgatgtatttttttcatcttttttgttaactgatttgcaataaaaatgatactgatggtga

SEQ ID NO: 11750 - DNA, 4501 bp, Homo sapiens
agagagagagagaagaattgatcggtgtcatgtgaagtgttgaagtttgtatcttgaaaatccctctaaatcctttgtcttaacagctcagtgcgagtgcagcgatttgaagttgactaatcctccttccttaaaggagaaaaaagtaaaagccgtctccagatagagtcggctggtgcaggagagaatttagcgatagtttgcaattctgattaatcgcgtagaaaatgaccttattttggagggcgggatggaggagagtgggtgaggaggcgcccggacgcggagccagtccgccgccccccggccaccagcctgctgcgtagccgctgcctgatgtccgggcacctgcccctggcccccgtgcccgcaggtgagaccgtggagccgcccccgccggcgcagctgcacttcatgtacgtggcggcggccgcctttgtgcttctgttcttcgtgggctgcggggtgctgctgtcccgcaagcgccggcggcagcatggccagctctggttccctgagggcttcaaagtgtctgaggccagcaagaagaagcggcgggagcccctcggcgaggactccgtgggcctcaagcccctgaagaacgcttcagacggtgccctcatggacgacaaccagaatgagtggggggacgaggacctggagaccaagaagttccggttcgaggagcccgtggttctgcctgacctggacgaccagacagaccaccggcagtggactcagcagcacctggatgccgctgacctgcgcatgtctgccatggcccccacaccgccccagggtgaggttgacgccgactgcatggacgtcaatgtccgcgggcctgatggcttcaccccgctcatgatcgcctcctgcagcgggggcggcctggagacgggcaacagcgaggaagaggaggacgcgccggccgtcatctccgacttcatctaccagggcgccagcctgcacaaccagacagaccgcacgggcgagaccgccttgcacctggccgcccgctactcacgctctgatgccgccaagcgcctgctggaggccagcgcagatgccaacatccaggacaacatgggccgcaccccgctgcatgcggctgtgtctgccgacgcacaaggtgtcttccagatcctgatccggaaccgagccacagacctggatgcccgcatgcatgatggcacgacgccactgatcctggctgcccgcctggccgtggagggcatgctggaggacctcatcaactcacacgccgacgtcaacgccgtagatgacctgggcaagtccgccctgcactgggccgccgccgtgaacaatgtggatgccgcagttgtgctcctgaagaacggggctaacaaagatatgcagaacaacagggaggagacacccctgtttctggccgcccgggagggcagctacgagaccgccaaggtgctgctggaccactttgccaaccgggacatcacggatcatatggaccgcctgccgcgcgacatcgcacaggagcgcatgcatcacgacatcgtgaggctgctggacgagtacaacctggtgcgcagcccgcagctgcacggagccccgctggggggcacgcccaccctgtcgcccccgctctgctcgcccaacggctacctgggcagcctcaagcccggcgtgcagggcaagaaggtccgcaagcccagcagcaaaggcctggcctgtggaagcaaggaggccaaggacctcaaggcacggaggaagaagtcccaggatggcaagggctgcctgctggacagctccggcatgctctcgcccgtggactccctggagtcaccccatggctacctgtcagacgtggcctcgccgccactgctgccctccccgttccagcagtctccgtccgtgcccctcaaccacctgcctgggatgcccgacacccacctgggcatcgggcacctgaacgtggcggccaagcccgagatggcggcgctgggtgggggcggccggctggcctttgagactggcccacctcgtctctcccacctgcctgtggcctctggcaccagcaccgtcctgggctccagcagcggaggggccctgaatttcactgtgggcgggtccaccagtttgaatggtcaatgcgagtggctgtcccggctgcagagcggcatggtgccgaaccaatacaaccctctgcgggggagtgtggcaccaggccccctgagcacacaggccccctccctgcagcatggcatggtaggcccgctgcacagtagccttgctgccagcgccctgtcccagatgatgagctaccagggcctgcccagcacccggctggccacccagcctcacctggtgcagacccagcaggtgcagccacaaaacttacagatgcagcagcagaacctgcagccagcaaacatccagcagcagcaaagcctgcagccgccaccaccaccaccacagccgcaccttggcgtgagctcagcagccagcggccacctgggccggagcttcctgagtggagagccgagccaggcagacgtgcagccactgggccccagcagcctggcggtgcacactattctgccccaggagagccccgccctgcccacgtcgctgccatcctcgctggtcccacccgtgaccgcagcccagttcctgacgcccccctcgcagcacagctactcctcgcctgtggacaacacccccagccaccagctacaggtgcctgagcaccccttcctcaccccgtcccctgagtcccctgaccagtggtccagctcgtccccgcattccaacgtctccgactggtccgagggcgtctccagccctcccaccagcatgcagtcccagatcgcccgcattccggaggccttcaagtaaacggcgcgccccacgagaccccggcttcctttcccaagccttcgggcgtctgtgtgcgctctgtggatgccagggccgaccagaggagcctttttaaaacacatgtttttatacaaaataagaacaaggattttaattttttttagtatttatttatgtacttttattttacacagaaacactgcctttttatttatatgtactgttttatctggccccaggtagaaacttttatctattctgagaaaacaagcaagttctgagagccagggttttcctacgtaggatgaaaagattcttctgtgtttataaaatataaacaaagattcatgatttataaatgccatttatttattgattccttttttcaaaatccaaaaagaaatgatgttggagaagggaagttgaacgagcatagtccaaaaagctcctggggcgtccaggccgcgccctttccccgacgcccacccaaccccaagccagcccggccgctccaccagcatcacctgcctgttaggagaagctgcatccagaggcaaacggaggcaaagctggctcaccttccgcacgcggattaatttgcatctgaaataggaaacaagtgaaagcatatgggttagatgttgccatgtgttttagatggtttcttgcaagcatgcttgtgaaaatgtgttctcggagtgtgtatgccaagagtgcacccatggtaccaatcatgaatctttgtttcaggttcagtattatgtagttgttcgttggttatacaagttcttggtccctccagaaccaccccggccccctgcccgttcttgaaatgtaggcatcatgcatgtcaaacatgagatgtgtggactgtggcacttgcctgggtcacacacggaggcatcctacccttttctggggaaagacactgcctgggctgaccccggtggcggccccagcacctcagcctgcacagtgtcccccaggttccgaagaagatgctccagcaacacagcctgggccccagctcgcgggacccgaccccccgtgggctcccgtgttttgtaggagacttgccagagccgggcacattgagctgtgcaacgccgtgggctgcgtcctttggtcctgtccccgcagccctggcagggggcatgcggtcgggcaggggctggagggaggcgggggctgcccttgggccacccctcctagtttgggaggagcagatttttgcaataccaagtatagcctatggcagaaaaaatgtctgtaaatatgtttttaaaggtggattttgtttaaaaaatcttaatgaatgagtctgttgtgtgtcatgccagtgagggacgtcagactcggctcagctcggggagccttagccgcccatgcactggggacgctccgctgccgtgccgcctgcactcctcagggcagcctcccccggctctacgggggccgcgtggtgccatccccagggggcatgaccagatgcgtcccaagatgttgatttttactgtgttttataaaatagagtgtagtttacagaaaaagactttaaaagtgatctacatgaggaactgtagatgatgtatttttttcatcttttttgttaactgatttgcaataaaaatgatactgatggtga

SEQ ID NO: 11751 - DNA, 6149 bp, Homo sapiens
atgccgccgctcctggcgcccctgctctgcctggcgctgctgcccgcgctcgccgcacgaggcccgcgatgctcccagcccggtgagacctgcctgaatggcgggaagtgtgaagcggccaatggcacggaggcctgcgtctgtggcggggccttcgtgggcccgcgatgccaggaccccaacccgtgcctcagcaccccctgcaagaacgccgggacatgccacgtggtggaccgcagaggcgtggcagactatgcctgcagctgtgccctgggcttctctgggcccctctgcctgacacccctggacaacgcctgcctcaccaacccctgccgcaacgggggcacctgcgacctgctcacgctgacggagtacaagtgccgctgcccgcccggctggtcagggaaatcgtgccagcaggctgacccgtgcgcctccaacccctgcgccaacggtggccagtgcctgcccttcgaggcctcctacatctgccactgcccacccagcttccatggccccacctgccggcaggatgtcaacgagtgtggccagaagcccgggctttgccgccacggaggcacctgccacaacgaggtcggctcctaccgctgcgtctgccgcgccacccacactggccccaactgcgagcggccctacgtgccctgcagcccctcgccctgccagaacgggggcacctgccgccccacgggcgacgtcacccacgagtgtgcctgcctgccaggcttcaccggccagaactgtgaggaaaatatcgacgattgtccaggaaacaactgcaagaacgggggtgcctgtgtggacggcgtgaacacctacaactgcccgtgcccgccagagtggacaggtcagtactgtaccgaggatgtggacgagtgccagctgatgccaaatgcctgccagaacggcgggacctgccacaacacccacggtggctacaactgcgtgtgtgtcaacggctggactggtgaggactgcagcgagaacattgatgactgtgccagcgccgcctgcttccacggcgccacctgccatgaccgtgtggcctccttttactgcgagtgtccccatggccgcacaggtctgctgtgccacctcaacgacgcatgcatcagcaacccctgtaacgagggctccaactgcgacaccaaccctgtcaatggcaaggccatctgcacctgcccctcggggtacacgggcccggcctgcagccaggacgtggatgagtgctcgctgggtgccaacccctgcgagcatgcgggcaagtgcatcaacacgctgggctccttcgagtgccagtgtctgcagggctacacgggcccccgatgcgagatcgacgtcaacgagtgcgtctcgaacccgtgccagaacgacgccacctgcctggaccagattggggagttccagtgcatgtgcatgcccggctacgagggtgtgcactgcgaggtcaacacagacgagtgtgccagcagcccctgcctgcacaatggccgctgcctggacaagatcaatgagttccagtgcgagtgccccacgggcttcactgggcatctgtgccagtacgatgtggacgagtgtgccagcaccccctgcaagaatggtgccaagtgcctggacggacccaacacttacacctgtgtgtgcacggaagggtacacggggacgcactgcgaggtggacatcgatgagtgcgaccccgacccctgccactacggctcctgcaaggacggcgtcgccaccttcacctgcctctgccgcccaggctacacgggccaccactgcgagaccaacatcaacgagtgctccagccagccctgccgcctacgggggcacctgccaggacccggacaacgcctacctctgcttctgcctgaaggggaccacaggacccaactgcgagatcaacctggatgactgtgccagcagcccctgcgactcgggcacctgtctggacaagatcgatggctacgagtgtgcctgtgagccgggctacacagggagcatgtgtaacagcaacatcgatgagtgtgcgggcaacccctgccacaacgggggcacctgcgaggacggcatcaatggcttcacctgccgctgccccgagggctaccacgaccccacctgcctgtctgaggtcaatgagtgcaacagcaacccctgcgtccacggggcctgccgggacagcctcaacgggtacaagtgcgactgtgaccctgggtggagtgggaccaactgtgacatcaacaacaacgagtgtgaatccaacccttgtgtcaacggcggcacctgcaaagacatgaccagtggctacgtgtgcacctgccgggagggcttcagcggtcccaactgccagaccaacatcaacgagtgtgcgtccaacccatgtctgaaccagggcacgtgtattgacgacgttgccgggtacaagtgcaactgcctgctgccctacacaggtgccacgtgtgaggtggtgctggccccgtgtgcccccagcccctgcagaaacggcggggagtgcaggcaatccgaggactatgagagcttctcctgtgtctgccccacgggctggcaagggcagacctgtgaggtcgacatcaacgagtgcgttctgagcccgtgccggcacggcgcatcctgccagaacacccacggcggctaccgctgccactgccaggccggctacagtgggcgcaactgcgagaccgacatcgacgactgccggcccaacccgtgtcacaacgggggctcctgcacagacggcatcaacacggccttctgcgactgcctgcccggcttccggggcactttctgtgaggaggacatcaacgagtgtgccagtgacccctgccgcaacggggccaactgcacggactgcgtggacagctacacgtgcacctgccccgcaggcttcagcgggatccactgtgagaacaacacgcctgactgcacagagagctcctgcttcaacggtggcacctgcgtggacggcatcaactcgttcacctgcctgtgtccacccggcttcacgggcagctactgccagcacgtagtcaatgagtgcgactcacgaccctgcctgctaggcggcacctgtcaggacggtcgcggtctccacaggtgcacctgcccccagggctacactggccccaactgccagaaccttgtgcactggtgtgactcctcgccctgcaagaacggcggcaaatgctggcagacccacacccagtaccgctgcgagtgccccagcggctggaccggcctttactgcgacgtgcccagcgtgtcctgtgaggtggctgcgcagcgacaaggtgttgacgttgcccgcctgtgccagcatggagggctctgtgtggacgcgggcaacacgcaccactgccgctgccaggcgggctacacaggcagctactgtgaggacctggtggacgagtgctcacccagcccctgccagaacggggccacctgcacggactacctgggcggctactcctgcaagtgcgtggccggctaccacggggtgaactgctctgaggagatcgacgagtgcctctcccacccctgccagaacgggggcacctgcctcgacctccccaacacctacaagtgctcctgcccacggggcactcagggtgtgcactgtgagatcaacgtggacgactgcaatccccccgttgaccccgtgtcccggagccccaagtgctttaacaacggcacctgcgtggaccaggtgggcggctacagctgcacctgcccgccgggcttcgtgggtgagcgctgtgagggggatgtcaacgagtgcctgtccaatccctgcgacgcccgtggcacccagaactgcgtgcagcgcgtcaatgacttccactgcgagtgccgtgctggtcacaccgggcgccgctgcgagtccgtcatcaatggctgcaaaggcaagccctgcaagaatgggggcacctgcgccgtggcctccaacaccgcccgcgggttcatctgcaagtgccctgcgggcttcgagggcgccacgtgtgagaatgacgctcgtacctgcggcagcctgcgctgcctcaacggcggcacatgcatctccggcccgcgcagccccacctgcctgtgcctgggccccttcacgggccccgaatgccagttcccggccagcagcccctgcctgggcggcaacccctgctacaaccaggggacctgtgagcccacatccgagagccccttctaccgttgcctgtgccccgccaaattcaacgggctcttgtgccacatcctggactacagcttcgggggtggggccgggcgcgacatccccccgccgctgatcgaggaggcgtgcgagctgcccgagtgccaggaggacgcgggcaacaaggtctgcagcctgcagtgcaacaaccacgcgtgcggctgggacggcggtgactgctccctcaacttcaatgacccctggaagaactgcacgcagtctctgcagtgctggaagtacttcagtgacggccactgtgacagccagtgcaactcagccggctgcctcttcgacggctttgactgccagcgtgcggaaggccagtgcaaccccctgtacgaccagtactgcaaggaccacttcagcgacgggcactgcgaccagggctgcaacagcgcggagtgcgagtgggacgggctggactgtgcggagcatgtacccgagaggctggcggccggcacgctggtggtggtggtgctgatgccgccggagcagctgcgcaacagctccttccacttcctgcgggagctcagccgcgtgctgcacaccaacgtggtcttcaagcgtgacgcacacggccagcagatgatcttcccctactacggccgcgaggaggagctgcgcaagcaccccatcaagcgtgccgccgagggctgggccgcacctgacgccctgctgggccaggtgaaggcctcgctgctccctggtggcagcgagggtgggcggcggcggagggagctggaccccatggacgtccgcggctccatcgtctacctggagattgacaaccggcagtgtgtgcaggcctcctcgcagtgcttccagagtgccaccgatgtggccgcattcctgggagcgctcgcctcgctgggcagcctcaacatcccctacaagatcgaggccgtgcagagtgagaccgtggagccgcccccgccggcgcagctgcacttcatgtacgtggcggcggccgcctttgtgcttctgttcttcgtgggctgcggggtgctgctgtcccgcaagcgccggcggcagcatggccagctctggttccctgagggcttcaaagtgtctgaggccagcaagaagaagcggcgggagcccctcggcgaggactccgtgggcctcaagcccctgaagaacgcttcagacggtgccctcatggacgacaaccagaatgagtggggggacgaggacctggagaccaagaagttccggttcgaggagcccgtggttctgcctgacctggacgaccagacagaccaccggcagtggactcagcagcacctggatgccgctgacctgcgcatgtctgccatggcccccacaccgccccagggtgaggttgacgccgactgcatggacgtcaatgtccgcgggcctgatggcttcaccccgctcatgatcgcctcctgcagcgggggcggcctggagacgggcaacagcgaggaagaggaggacgcgccggccgtcatctccgacttcatctaccagggcgccagcctgcacaaccagacagaccgcacgggcgagaccgccttgcacctggccgcccgctactcacgctctgatgccgccaagcgcctgctggaggccagcgcagatgccaacatccaggacaacatgggccgcaccccgctgcatgcggctgtgtctgccgacgcacaaggtgtcttccagatcctgatccggaaccgagccacagacctggatgcccgcatgcatgatggcacgacgccactgatcctggctgcccgcctggccgtggagggcatgctggaggacctcatcaactcacacgccgacgtcaacgccgtagatgacctgggcaagtccgcctgcactggccgccgccgtgaacaatgtgatgcacaaacccgaaaggatcctctag

SEQ ID NO: 11752 - DNA, 5906 bp, Homo sapiens
atgccgccgctcctggcgcccctgctctgcctggcgctgctgcccgcgctcgccgcacgaggcccgcgatgctcccagcccggtgagacctgcctgaatggcgggaagtgtgaagcggccaatggcacggaggcctgcgtctgtggcggggccttcgtgggcccgcgatgccaggaccccaacccgtgcctcagcaccccctgcaagaacgccgggacatgccacgtggtggaccgcagaggcgtggcagactatgcctgcagctgtgccctgggcttctctgggcccctctgcctgacacccctggacaacgcctgcctcaccaacccctgccgcaacgggggcacctgcgacctgctcacgctgacggagtacaagtgccgctgcccgcccggctggtcagggaaatcgtgccagcaggctgacccgtgcgcctccaacccctgcgccaacggtggccagtgcctgcccttcgaggcctcctacatctgccactgcccacccagcttccatggccccacctgccggcaggatgtcaacgagtgtggccagaagcccgggctttgccgccacggaggcacctgccacaacgaggtcggctcctaccgctgcgtctgccgcgccacccacactggccccaactgcgagcggccctacgtgccctgcagcccctcgccctgccagaacgggggcacctgccgccccacgggcgacgtcacccacgagtgtgcctgcctgccaggcttcaccggccagaactgtgaggaaaatatcgacgattgtccaggaaacaactgcaagaacgggggtgcctgtgtggacggcgtgaacacctacaactgcccgtgcccgccagagtggacaggtcagtactgtaccgaggatgtggacgagtgccagctgatgccaaatgcctgccagaacggcgggacctgccacaacacccacggtggctacaactgcgtgtgtgtcaacggctggactggtgaggactgcagcgagaacattgatgactgtgccagcgccgcctgcttccacggcgccacctgccatgaccgtgtggcctccttttactgcgagtgtccccatggccgcacaggtctgctgtgccacctcaacgacgcatgcatcagcaacccctgtaacgagggctccaactgcgacaccaaccctgtcaatggcaaggccatctgcacctgcccctcggggtacacgggcccggcctgcagccaggacgtggatgagtgctcgctgggtgccaacccctgcgagcatgcgggcaagtgcatcaacacgctgggctccttcgagtgccagtgtctgcagggctacacgggcccccgatgcgagatcgacgtcaacgagtgcgtctcgaacccgtgccagaacgacgccacctgcctggaccagattggggagttccagtgcatgtgcatgcccggctacgagggtgtgcactgcgaggtcaacacagacgagtgtgccagcagcccctgcctgcacaatggccgctgcctggacaagatcaatgagttccagtgcgagtgccccacgggcttcactgggcatctgtgccagtacgatgtggacgagtgtgccagcaccccctgcaagaatggtgccaagtgcctggacggacccaacacttacacctgtgtgtgcacggaagggtacacggggacgcactgcgaggtggacatcgatgagtgcgaccccgacccctgccactacggctcctgcaaggacggcgtcgccaccttcacctgcctctgccgcccaggctacacgggccaccactgcgagaccaacatcaacgagtgctccagccagccctgccgcctacgggggcacctgccaggacccggacaacgcctacctctgcttctgcctgaaggggaccacaggacccaactgcgagatcaacctggatgactgtgccagcagcccctgcgactcgggcacctgtctggacaagatcgatggctacgagtgtgcctgtgagccgggctacacagggagcatgtgtaacagcaacatcgatgagtgtgcgggcaacccctgccacaacgggggcacctgcgaggacggcatcaatggcttcacctgccgctgccccgagggctaccacgaccccacctgcctgtctgaggtcaatgagtgcaacagcaacccctgcgtccacggggcctgccgggacagcctcaacgggtacaagtgcgactgtgaccctgggtggagtgggaccaactgtgacatcaacaacaacgagtgtgaatccaacccttgtgtcaacggcggcacctgcaaagacatgaccagtggctacgtgtgcacctgccgggagggcttcagcggtcccaactgccagaccaacatcaacgagtgtgcgtccaacccatgtctgaaccagggcacgtgtattgacgacgttgccgggtacaagtgcaactgcctgctgccctacacaggtgccacgtgtgaggtggtgctggccccgtgtgcccccagcccctgcagaaacggcggggagtgcaggcaatccgaggactatgagagcttctcctgtgtctgccccacgggctggcaagggcagacctgtgaggtcgacatcaacgagtgcgttctgagcccgtgccggcacggcgcatcctgccagaacacccacggcggctaccgctgccactgccaggccggctacagtgggcgcaactgcgagaccgacatcgacgactgccggcccaacccgtgtcacaacgggggctcctgcacagacggcatcaacacggccttctgcgactgcctgcccggcttccggggcactttctgtgaggaggacatcaacgagtgtgccagtgacccctgccgcaacggggccaactgcacggactgcgtggacagctacacgtgcacctgccccgcaggcttcagcgggatccactgtgagaacaacacgcctgactgcacagagagctcctgcttcaacggtggcacctgcgtggacggcatcaactcgttcacctgcctgtgtccacccggcttcacgggcagctactgccagcacgtagtcaatgagtgcgactcacgaccctgcctgctaggcggcacctgtcaggacggtcgcggtctccacaggtgcacctgcccccagggctacactggccccaactgccagaaccttgtgcactggtgtgactcctcgccctgcaagaacggcggcaaatgctggcagacccacacccagtaccgctgcgagtgccccagcggctggaccggcctttactgcgacgtgcccagcgtgtcctgtgaggtggctgcgcagcgacaaggtgttgacgttgcccgcctgtgccagcatggagggctctgtgtggacgcgggcaacacgcaccactgccgctgccaggcgggctacacaggcagctactgtgaggacctggtggacgagtgctcacccagcccctgccagaacggggccacctgcacggactacctgggcggctactcctgcaagtgcgtggccggctaccacggggtgaactgctctgaggagatcgacgagtgcctctcccacccctgccagaacgggggcacctgcctcgacctccccaacacctacaagtgctcctgcccacggggcactcagggtgtgcactgtgagatcaacgtggacgactgcaatccccccgttgaccccgtgtcccggagccccaagtgctttaacaacggcacctgcgtggaccaggtgggcggctacagctgcacctgcccgccgggcttcgtgggtgagcgctgtgagggggatgtcaacgagtgcctgtccaatccctgcgacgcccgtggcacccagaactgcgtgcagcgcgtcaatgacttccactgcgagtgccgtgctggtcacaccgggcgccgctgcgagtccgtcatcaatggctgcaaaggcaagccctgcaagaatgggggcacctgcgccgtggcctccaacaccgcccgcgggttcatctgcaagtgccctgcgggcttcgagggcgccacgtgtgagaatgacgctcgtacctgcggcagcctgcgctgcctcaacggcggcacatgcatctccggcccgcgcagccccacctgcctgtgcctgggccccttcacgggccccgaatgccagttcccggccagcagcccctgcctgggcggcaacccctgctacaaccaggggacctgtgagcccacatccgagagccccttctaccgttgcctgtgccccgccaaattcaacgggctcttgtgccacatcctggactacagcttcgggggtggggccgggcgcgacatccccccgccgctgatcgaggaggcgtgcgagctgcccgagtgccaggaggacgcgggcaacaaggtctgcagcctgcagtgcaacaaccacgcgtgcggctgggacggcggtgactgctccctcaacttcaatgacccctggaagaactgcacgcagtctctgcagtgctggaagtacttcagtgacggccactgtgacagccagtgcaactcagccggctgcctcttcgacggctttgactgccagcgtgcggaaggccagtgcaaccccctgtacgaccagtactgcaaggaccacttcagcgacgggcactgcgaccagggctgcaacagcgcggagtgcgagtgggacgggctggactgtgcggagcatgtacccgagaggctggcggccggcacgctggtggtggtggtgctgatgccgccggagcagctgcgcaacagctccttccacttcctgcgggagctcagccgcgtgctgcacaccaacgtggtcttcaagcgtgacgcacacggccagcagatgatcttcccctactacggccgcgaggaggagctgcgcaagcaccccatcaagcgtgccgccgagggctgggccgcacctgacgccctgctgggccaggtgaaggcctcgctgctccctggtggcagcgagggtgggcggcggcggagggagctggaccccatggacgtccgcggctccatcgtctacctggagattgacaaccggcagtgtgtgcaggcctcctcgcagtgcttccagagtgccaccgatgtggccgcattcctgggagcgctcgcctcgctgggcagcctcaacatcccctacaagatcgaggccgtgcagagtgagaccgtggagccgcccccgccggcgcagctgcacttcatgtacgtggcggcggccgcctttgtgcttctgttcttcgtgggctgcggggtgctgctgtcccgcaagcgccggcggcagcatggccagctctggttccctgagggcttcaaagtgtctgaggccagcaagaagaagcggcgggagcccctcggcgaggactccgtgggcctcaagcccctgaagaacgcttcagacggtgccctcatggacgacaaccagaatgagtggggggacgaggacctggagaccaagaagttccggttcgaggagcccgtggttctgcctgacctggacgaccagacagaccaccggcagtggactcagcagcacctggatgccgctgacctgcgcatgtctgccatggcccccacaccgccccagggtgaggttgacgccgactgcatggacgtcaatgtccgcgggcctggtaagggtgccagcagccagggcttccctagccccgtggcccacctgcctctctcccctaagccccgaggctggggtacagttgatactctggaaacttagaattgggggtgagagctttcatccttggggtgtttcccattcagagtagacgtgggggggtcctggagtcctcctgttcttccaccaaccccttcctggggtgataccgcagggccactctgtccctgtaaattactcttttctgaaaccttcttgagacatggaa

SEQ ID NO: 11753 - DNA, 2864 bp, Homo sapiens
atgccgccgctcctggcgcccctgctctgcctggcgctgctgcccgcgctcgccgcacgaggcccgcgatgctcccagcccggtgagacctgcctgaatggcgggaagtgtgaagcggccaatggcacggaggcctgcgtctgtggcggggccttcgtgggcccgcgatgccaggaccccaacccgtgcctcagcaccccctgcaagaacgccgggacatgccacgtggtggaccgcagaggcgtggcagactatgcctgcagctgtgccctgggcttctctgggcccctctgcctgacacccctggacaacgcctgcctcaccaacccctgccgcaacgggggcacctgcgacctgctcacgctgacggagtacaagtgccgctgcccgcccggctggtcagggaaatcgtgccagcaggctgacccgtgcgcctccaacccctgcgccaacggtggccagtgcctgcccttcgaggcctcctacatctgccactgcccacccagcttccatggccccacctgccggcaggatgtcaacgagtgtggccagaagcccgggctttgccgccacggaggcacctgccacaacgaggtcggctcctaccgctgcgtctgccgcgccacccacactggccccaactgcgagcggccctacgtgccctgcagcccctcgccctgccagaacgggggcacctgccgccccacgggcgacgtcacccacgagtgtgcctgcctgccaggcttcaccggccagaactgtgaggaaaatatcgacgattgtccaggaaacaactgcaagaacgggggtgcctgtgtggacggcgtgaacacctacaactgcccgtgcccgccagagtggacaggtcagtactgtaccgaggatgtggacgagtgccagctgatgccaaatgcctgccagaacggcgggacctgccacaacacccacggtggctacaactgcgtgtgtgtcaacggctggactggtgaggactgcagcgagaacattgatgactgtgccagcgccgcctgcttccacggcgccacctgccatgaccgtgtggcctccttttactgcgagtgtccccatggccgcacaggtctgctgtgccacctcaacgacgcatgcatcagcaacccctgtaacgagggctccaactgcgacaccaaccctgtcaatggcaaggccatctgcacctgcccctcggggtacacgggcccggcctgcagccaggacgtggatgagtgctcgctgggtgccaacccctgcgagcatgcgggcaagtgcatcaacacgctgggctccttcgagtgccagtgtctgcagggctacacgggcccccgatgcgagatcgacgtcaacgagtgcgtctcgaacccgtgccagaacgacgccacctgcctggaccagattggggagttccagtgcatgtgcatgcccggctacgagggtgtgcactgcgaggtcaacacagacgagtgtgccagcagcccctgcctgcacaatggccgctgcctggacaagatcaatgagttccagtgcgagtgccccacgggcttcactgggcatctgtgccagtacgatgtggacgagtgtgccagcaccccctgcaagaatggtgccaagtgcctggacggacccaacacttacacctgtgtgtgcacggaagggtacacggggacgcactgcgaggtggacatcgatgagtgcgaccccgacccctgccactacggctcctgcaaggacggcgtcgccaccttcacctgcctctgccgcccaggctacacgggccaccactgcgagaccaacatcaacgagtgctccagccagccctgccgcctacgggggcacctgccaggacccggacaacgcctacctctgcttctgcctgaaggggaccacaggacccaactgcgagatcaacctggatgactgtgccagcagcccctgcgactcgggcacctgtctggacaagatcgatggctacgagtgtgcctgtgagccgggctacacagggagcatgtgtaacagcaacatcgatgagtgtgcgggcaacccctgccacaacgggggcacctgcgaggacggcatcaatggcttcacctgccgctgccccgagggctaccacgaccccacctgcctgtctgaggtcaatgagtgcaacagcaacccctgcgtccacggggcctgccgggacagcctcaacgggtacaagtgcgactgtgaccctgggtggagtgggaccaactgtgacatcaacaacaacgagtgtgaatccaacccttgtgtcaacggcggcacctgcaaagacatgaccagtggctacgtgtgcacctgccgggagggcttcagcggtcccaactgccagaccaacatcaacgagtgtgcgtccaacccatgtctgaaccagggcacgtgtattgacgacgttgccgggtacaagtgcaactgcctgctgccctacacaggtgccacgtgtgaggtggtgctggccccgtgtgcccccagcccctgcagaaacggcggggagtgcaggcaatccgaggactatgagagcttctcctgtgtctgccccacgggctggcaagggcagacctgtgaggtcgacatcaacgagtgcgttctgagcccgtgccggcacggcgcatcctgccagaacacccacggcggctaccgctgccactgccaggccggctacagtgggcgcaactgcgagaccgacatcgacgactgccggcccaacccgtgtcacaacgggggctcctgcacagacggcatcaacacggccttctgcgactgcctgcccggcttccggggcactttctgtgacactttctgatacaatgtaaacaaggaacagctat

SEQ ID NO: 11754 - DNA, 1020 bp, Homo sapiens
atgccgccgctcctggcgcccctgctctgcctggcgctgctgcccgcgctcgccgcacgaggcccgcgatgctcccagcccggtgagacctgcctgaatggcgggaagtgtgaagcggccaatggcacggaggcctgcgtctgtggcggggccttcgtgggcccgcgatgccaggaccccaacccgtgcctcagcaccccctgcaagaacgccgggacatgccacgtggtggaccgcagaggcgtggcagactatgcctgcagctgtgccctgggcttctctgggcccctctgcctgacacccctggacaacgcctgcctcaccaacccctgccgcaacgggggcacctgcgacctgctcacgctgacggagtacaagtgccgctgcccgcccggctggtcagggaaatcgtgccagcaggctgacccgtgcgcctccaacccctgcgccaacggtggccagtgcctgcccttcgaggcctcctacatctgccactgcccacccagcttccatggccccacctgccggcaggatgtcaacgagtgtggccagaagcccgggctttgccgccacggaggcacctgccacaacgaggtcggctcctaccgctgcgtctgccgcgccacccacactggccccaactgcgagcggccctacgtgccctgcagcccctcgccctgccagaacgggggcacctgccgccccacgggcgacgtcacccacgagtgtgcctgcctgccaggtagtgctgcccgctggccggggtgcacgagcccctccccggctgccaggcccagggggtgggaacggggcgcctggtgtaggggcagccctgggagggcccatggcggggagttgggaaggcgggatggcgagttccccagactgcgtgtggtgtcggggggacgcgtctggagcggggtgtgcgctgggaggaggcttgcacagggtccaggtgccagcccgtgtctctggagtttcccggaactcacattcgagctgtaggacgccctgcctccc

SEQ ID NO: 11755 - DNA, 2255 bp, Homo sapiens
atgccgccgctcctggcgcccctgctctgcctggcgctgctgcccgcgctcgccgcacgaggcccgcgatgctcccagcccggtgagacctgcctgaatggcgggaagtgtgaagcggccaatggcacggaggcctgcgtctgtggcggggccttcgtgggcccgcgatgccaggaccccaacccgtgcctcagcaccccctgcaagaacgccgggacatgccacgtggtggaccgcagaggcgtggcagactatgcctgcagctgtgccctgggcttctctgggcccctctgcctgacacccctggacaacgcctgcctcaccaacccctgccgcaacgggggcacctgcgacctgctcacgctgacggagtacaagtgccgctgcccgcccggctggtcagggaaatcgtgccagcaggctgacccgtgcgcctccaacccctgcgccaacggtggccagtgcctgcccttcgaggcctcctacatctgccactgcccacccagcttccatggccccacctgccggcaggatgtcaacgagtgtggccagaagcccgggctttgccgccacggaggcacctgccacaacgaggtcggctcctaccgctgcgtctgccgcgccacccacactggccccaactgcgagcggccctacgtgccctgcagcccctcgccctgccagaacgggggcacctgccgccccacgggcgacgtcacccacgagtgtgcctgcctgccaggcttcaccggccagaactgtgaggaaaatatcgacgattgtccaggaaacaactgcaagaacgggggtgcctgtgtggacggcgtgaacacctacaactgcccgtgcccgccagagtggacaggtcagtactgtaccgaggatgtggacgagtgccagctgatgccaaatgcctgccagaacggcgggacctgccacaacacccacggtggctacaactgcgtgtgtgtcaacggctggactggtgaggactgcagcgagaacattgatgactgtgccagcgccgcctgcttccacggcgccacctgccatgaccgtgtggcctccttttactgcgagtgtccccatggccgcacaggtctgctgtgccacctcaacgacgcatgcatcagcaacccctgtaacgagggctccaactgcgacaccaaccctgtcaatggcaaggccatctgcacctgcccctcggggtacacgggcccggcctgcagccaggacgtggatgagtgctcgctgggtgccaacccctgcgagcatgcgggcaagtgcatcaacacgctgggctccttcgagtgccagtgtctgcagggctacacgggcccccgatgcgagatcgacgtcaacgagtgcgtctcgaacccgtgccagaacgacgccacctgcctggaccagattggggagttccagtgcatgtgcatgcccggctacgagggtgtgcactgcgaggtcaacacagacgagtgtgccagcagcccctgcctgcacaatggccgctgcctggacaagatcaatgagttccagtgcgagtgccccacgggcttcactgggcatctgtgccagtacgatgtggacgagtgtgccagcaccccctgcaagaatggtgccaagtgcctggacggacccaacacttacacctgtgtgtgcacggaagggtacacggggacgcactgcgaggtggacatcgatgagtgcgaccccgacccctgccactacggctcctgcaaggacggcgtcgccaccttcacctgcctctgccgcccaggctacacgggccaccactgcgagaccaacatcaacgagtgctccagccagccctgccgcctacgggggcacctgccaggacccggacaacgcctacctctgcttctgcctgaaggggaccacaggacccaactgcgagatcaacctggatgactgtgccagcagcccctgcgactcgggcacctgtctggacaagatcgatggctacgagtgtgcctgtgagccgggctacacagggagcatgtgtaacagcaacatcgatgagtgtgcgggcaacccctgccacaacgggggcacctgcgaggacggcatcaatggcttcacctgccgctgccccgagggctaccacgaccccacctgcctgtctgaggtcaatgagtgcaacagcaacccctgcgtccacggggcctgccgggacagcctcaacggcgtcagcctctaccttcccgcctcggctagggtcctcggaaaccgga

SEQ ID NO: 11756 - DNA, 530 bp, Homo sapiens
aacggggccaactgcacggactgcgtggacagctacacgtgcacctgccccgcaggcttcagcgggatccactgtgagaacaacacgcctgactgcacagagaggtgtgcggggctcgagtgaggccgtggaagggaacgggcggtgcgggccacacgcagtagctggcagcctggcacaccatgcaggcgtccgcctaggccggctgggcacttagcgctggctgcattgagtccagacattgttcattgtaccgacctgtccctcctgagagggccattgtgacctcctcctgtgtcccgcaccaggagcgccggtagtctgtcctgaagaactggtgcgcttccttctattagacaacgagaactctgtccgttcttgtttcctttttgccgtgtttgccaggaagctcatttggtaaacgtcagtctcgtccctggtttctgacgtaattacctcccgtgttaccaggacggtttctggtttctccctcatttactttaaccaccctatgcccacgcgtttggtaa

SEQ ID NO: 11757 - DNA, 393 bp, Homo sapiens
ctaaggctcttcattaaaaatagtaatatgaataggaattactttgtttgtttgtttttcgtttgtttgccaccacacccggctaattttttatttttagtaaagatggggtttttccatgctggtcaggctggtctcgaactcgtgaccttaggttatccgcccaccttggcctcccaaagtgctgggattacaggcgtgagccaccgcgcccagcctatgagtaggaattactttgtggtgctgttatacatgtgaaaaaggatttgcgagactttgggagtctgaggtggaataatcacttgaggctaggaattcgagatgagcctgggcaacatagacccggtctctacaacaacagcaacaaaatgagctgggcatggtggtacacac

SEQ ID NO: 11758 - DNA, 427 bp, Homo sapiens
attcactgcattcataaggcctttctctagtgtggattttgtgatgcttaagaagtgtttgtttggagatgaaggctttcccacagtcactgcattcataagccctttctccagtgtgaattctctggtgtcgcatgtagtcagacgagcggataaatgatttcccacatatgatgcacacataaggcttttctccagtatgaattctctggtgctcaagaagtctttttttgtgaatgaaggccttcccacattctttgcactcataaggcctttctcccgtgtggattctatggtgatcaagaagtgactgtttgtatatgaaggatttcccacattcactgcactgataagccccttctccagtgtgaactctctggtgtcgaatgcggtcataggaatgaataaaagatttcccacattccat

SEQ ID NO: 11759 - DNA, 601 bp, Homo sapiens
ctggaaaaaggaacaggataatcgtgattggctcaagccttagggtgggcatggctccctgacaagggagagaggaaaaagctgttgagtgaagaagactgctcaagtttccccatctgtataatgggaggagtaagggctgtcgtgaaaactcaatgaaagaagattcttcaacgtggtaggtgcagtggcagctggcagtaccctgaccctgccaccgcacagccctctcagcattgctcatcctgcactgtggatatcagttgagccacgtgtctcctgccctgggctgtgagctccataggcagggtctccatggctgtatctccagaacccagcacagaaccaggtgcttgggaaagttttgaattgattctcatctgccattggcatggggaagggaactagcttgtatgaaacagataacaatgtatgggaccctcattcattatttcagcaaatatttgctgagttcctcctacatggctagccctgtgctagacactggggaatcggcgatgaacaaagcagatagaaatccccactcttgtggagctgacattctggagggagagacaaaaagcaaacatataaaaaaaaa

SEQ ID NO: 11760 - DNA, 231 bp, Homo sapiens
ctctgattggagaagatgttctttctcccactgcaattagggacaattgctgctgctggcagcaattatcttgtgaccagagtggaagccaatttaagaaaaatgaagacacagaatagagcagagctgaggtcccagagaaatggagcaaggcactgtctgcgctccggacttcagttgtgtttgatcacatccctgtttattgtttatgccagttttagtggtgttttc

SEQ ID NO: 11761 - DNA, 607 bp, Homo sapiens
aaacacaaattctgcccaatttggggttaatcaaaggagacagagcaccttccctgttagaaagagttagccagtcttgcttaatgaagtttggctttgaggaatgggcaaatccctcagtttgttcctaatgctaagtgaaacattgtagtcaagaatccaggactggacagaccttagaaaaataaaaatcaagcaattattgagtcttggaagaagcgtgagcatttcaatgcttcattgcaatgtcttgactaggaaatatagagttaggaaaacttttcacttagtcattataggaatcaaagcaggtgcgtggtaagggaggtgtccttaattttgatgaattttctgacacacaactcaaagactgacagtgtcctatatgttaatcgtcacgcctatgacttaaaatatttgaatcttaaagaaataatctactagatggccaaaactactgtttagaatttttgatttacctctaaaggggatgtaaagagtaactccgtgcatgactaacattcaaggaacaaaaactatttacttccttgaatacacttataagcctcagtataattttgttatcctaaacagtgcaaaaaaaaaa

SEQ ID NO: 11762 - DNA, 788 bp, Homo sapiens
tggaaacctcagggccaaaggctcctgtctgtccttttccgccctaaatcttctgtgaagaaccgtacttggcccgtacgtgctcagtaaatgtttattgaatgaatgcacttttctaaatcacaagctggcagaagggggggcctttctcaaactccatctctagaggtttatgttactgtcctgtcaagagattccagattcagaccttgagttctgtggctgtggacaaaagccaacaaagacccaaatcctctgtccttgggagcttgaggagagtttaccagttcgagttcccactgggtctgagaactttgcctttaaaatccattcctggcccctgcctaccacttcctgctctggggaatagagttgagggggccacctccatcaccttaatgtgactctccccacagaaacaacagaataaacaagtggaacatcagctggaagaagtaacatgatttctttgtttgctcgcgacatgactgctcggtttgggggacactcagatgtagaggccccgagtctcgtctcacccactcccagcctggggaagaaggctcaccccccagagtccaccccatcccccacagggtccctgataacccggtcccatgggtgggcctgtcccggggcaggggcagtggtggcattctggggacatgtctcttgcagtaccatctctgcctctgcctggttagatctctgtcttcctcttcctacaggaaaagaaagcaaacaacgagaaacagaaagccgaaagggagctagaggtgagtggacgg

SEQ ID NO: 11763 - DNA, 784 bp, Homo sapiens
ggctcagtcgcacagctacctggtaggtgactggaggtgttgatcagtgcttggtgggattttgctgatgtggccccaagcccgcctccctccccaccctgcgatggcagaagaaactcgacaaagtaaattggcagcagccaagagaaagttaaaagaatattggcagagaaacagccctggtgttccagcaggagccaagaggaacaggaaaacaaatggcagcatccatgagacagccacttctggtggttgccactcacctggagattcagcaacaggtatccacggggagagccctacatcatctgctaccctgaaggatctggagagcccgtgccaagaactagcagtagtcccagactcgaggtccgtaaaagtcagtcaactgaagaacaccatcaaatctttgaaacaacagaataaacaagtggaacatcagctggaagaagtaacatgatttctttgtttgctcgcgacatgactgctcggtttgggggacactcagatgtagaggccccgagtctcgtctcacccactcccagcctggggaagaaggctcaccccccagagtccaccccatcccccacagggtccctgataacccggtcccatgggtgggcctgtcccggggcaggggcagtggtggcattctggggacatgtctcttgcagtaccatctctgcctctgcctggttagatctctgtcttcctcttcctacaggaaaagaaagcaaacaacgagaaacagaaagccgaaagggagctagaggtgagtggacgg

SEQ ID NO: 11764 - DNA, 744 bp, Homo sapiens
ccgcctgctggtggattagcatagactactctaatttttgattttgtgtattacttgcaagttcactgtcactagttaggaagacagtggaaccttgtggctgattttcatacgttcagccaaggtcagcacacatttctctcccctgcgtctctttgacacctgatgtggtggccatgccttcgctgggcccctgccgcctcggggtttcttgtcttcctggctgctactgctccatggtggcctctccctccttacccttcccttaacgctgtgtcctcagagccttgctggggcctctcctccttcgcttttgaacgctcagcgacttgcagggcttctgctgtcgtctctctcctgggggcgcctcaattgatagctgagccttgggcctctctggatgtctcctagtgcctcgagtttccaacactacaccacgttcagcccccaccctgcgttcctttccttcgagtctgaaaacatcatccatctagatgtctgagccaggaaatcggacagttgttcttggttcgtccgtctcttcctcctgcctgtttctcactaattgtgtcctcagtcctgccacccacagtaccctggcctctgtccatctgcagctcacccaggcgacctttcccggggcatttctgcctgtgcaccccccaagcacgatgcttctgggaaaagtccagacctttaagagtcccagctttgcctcctgcttgcttctctgcctgtctgcct

SEQ ID NO: 11765 - DNA, 1137 bp, Homo sapiens
aaagagcaagccccgaactcctgatcacgtcagcgggagtctcagctgggtgccgggctgtcttgaacacttgctaattttgggtgttgtttttcctcctctggctgggctataagtttcctttttcttttctttctttctctttgttttttcttttgaaacagggtctctctacagtggctcgatcatagctcactgcagcctcgaactcctgcactcaagcgatcctctcgcctctcgagtcgctgggactacaggcgcgagccaccgcgccccacaaattctgtttaaaaaaaaaattgtagagatgggatctcactgtgttgccaggctggtctcaaattcaaattcctgggcataatgggttttccagtcttggcctcccaaagtactgtgattatacctgtgagccaccacatctggcctgaagtttccttttggaacttaaaagagtggatcttattgcagtagctcttctctaaataattcaatagcagatctctgggattccctttttattattatccataggcactggaagacaagatggatctttttaaatgctagaagttttaaccagttcttaacatgtctttgttgaggcaccttccagaatataagataaaacaactccagtttctgttatagtgacttgaatctcagagtcaagagcccagtgtcaaagaaaattggctttgactttttgtaatctaggagcacgagtctgtgaggtgtttattcaaagagttaaagagcctgttttgtaccaaacaataaactgtaaaaagaaaaaaaaaagtgaattttgagagtatgaaagaatagccaacagatccatatatctggaaaaaacgtattatagtataggtataagagaatgacacagatctagaaaacattgttttagtggattttatttcagctgaggaagataggctggtctcagtggagacttaaaccttttttttttttttttttttgagacagggtctcattcctcattctgctgcccaagctggaatgcagtgataccatcatagttcactgcagcctcaaactctgggttcaagcagtccgctcgcctcagcctcccaagtaactggaactataggcatgtgccaccatgcctggctaatt

SEQ ID NO: 11766 - DNA, 809 bp, Homo sapiens
agggaagcagtagcgacatctgggcatcacttggcagcgtggctttggctgctcagcacgtgcttgctagagaatccctgatggctgttatggcttacacatttaaccacttccctttggtacatgtgtagaggtgctgggtaagcatcttgtcaactttaacacagctgacaaagttatgacaccaagaatgcttagactttgcagttttccccgaactccggctgatcctgttaaaatgtctctccttacagagagctgatttgtgcccccaaattttctcatctcagcaggcagggtctctttgccagaaaaaagaaaaatctgttgtcatccagatactctgatttagcattatctgagaggaaggcatgtttcctatctggtttgttgctgattttccagttggtttccgtgggacggagccatggagaaggatgcaggaggatagctggagacacttgcatttttaagctcctctcctccaatgcaaagccttaaaatgcgtgggattttccctcttgttaaggctgcagtcttcatgcctcttctcagttggagagtgataaagtttgaacaaatccctttatttatgttggaagtatctgagtgtgaaaatccttttctgcccttaaaattactcgatccgtttttttctcttttttaaatgatcagtttaatacatgcccattatagtgaaattagaaattacaaacaagaaccagaaggaaaagttgctgaagttccactaccgtgtatccctgcagatgcgttcccatacagatgaacagatataaatctgtattttg

SEQ ID NO: 11767 - DNA, 465 bp, Homo sapiens
gaagggcctgacctgggctcgcagctgactcagcatttgtgctgtttctctctttcctccttccccagttctgagaccgctgctgagccagaaactcgaatgctagcaagggaggggatgggtgaggaatgataataatgatgagcttcctgagcatctgccctgagccaggccctgtgctgaaggctgtgtggggatgagctcactgagtcttcacaacagccctgtgtggtcccagtgttacaatgcccattttacagatgggaaaactgaggccccactcataaccctcatgccagagaaaggaatccaacaggggcttggaactgcagtcagaggctgcccctcagtggccatttcttctcggggggacttgtcacccttatggtttccatgaccctggccaccctccatagatatataccgtgagcccataggaaaacattttctcgtagccaccttttt

SEQ ID NO: 11768 - DNA, 383 bp, Homo sapiens
gggtttcaccatgttggccaagccaatctcgaacccctgatctgaggtgatccacccacctgggcctcccaaggtgctgggattatacacatgagccaccacacctgaccaacatatgtattatttcacacatttttgtgtgtatgtggtgagaacacttaaaatctattcttttagcaattttccagaatgtgatacactggtattaactgtagttaccatattgcacagtagatcttgaacttattcctcctaaccgaaattttgtgtcctttgacccacatctctccacccccaagccccccacccctggtaagctctgcttttaagagttaactttttaagattctacatataaaggagaacaatatttaaggcagata

SEQ ID NO: 11769 - DNA, 324 bp, Homo sapiens
gcatcaaatgcaagtgcatgttttattggcctgaataagtggagacacggagcaggaatctgaaagggcttcctaccttctttgatcagtgttgcattgttgtgtcaaggccatgccttttacacacctcatctacacaccttggcaagggaaacttagttgtgcaatgccagaaggtaacagggtaatttttcagcattgctgacaaactgggaaagaaccagaaaacaacaacatgaggatataaagcaacaactggaaccactcactttaccaagaatgtctgagatgttttttaatccttgcaatgcaaaactctgtcta

SEQ ID NO: 11770 - DNA, 497 bp, Homo sapiens
cctttttcccagatgaatagaaccctcagattcatttcagctgtatagaatgaaaaagccttccagctagcagctgtcagtaaactgttctttttttctgtatagacaatataacatcaataaagatagtttgtgaaaacaggagggaggaaaaaaaaaacaaaaatcctgacaagtactttatttttatttttacacatgtccttctatgtccatctgtcagtatctttatgtgcttgaaatctttttatgaatacatttttacattatattttcattataaacacaatatttcattagatactccatgtaagagttgcagcctttgtggtcagtgtgtgtatggttcagtgagggatggtgctgacctccccagaaaagacttctgcttctttagatattccagtattggattaggattgctcattctgggtataccagagccttacagggtgcctagaaatgggagccagtgccgggagaaggccaaaaaaaaa

SEQ ID NO: 11771 - DNA, 479 bp, Homo sapiens
ctctttctactctggtagaattcagattattatttaagaaatgggggaggggggaagtagcttttgttcacatacgcataagcctgagaacacaagtgttttaataacgcatgtagctttctatagaaatagagctatctttgtttggattgctgcaaataatcaacttgtatagggacatcctagaagtggaatttaccctatgatccgaataccaggaaaaaatcattttagaaatggttttgtaattaagactcagatgcttggaatatttgaggggtaagtgagtaaaagaaaggcataaggctctgcccactctcaaatatgctttttaaaaacatgtgatttgaggctgggcacagtggctcagctggtaatcccaacactttgggaggctgaggcaaaaggattgcttgagctcaggagtttgagattagactgggcaacatagtgagacctccatctctgccaaaaaaaaa

SEQ ID NO: 11772 - DNA, 412 bp, Homo sapiens
gttcttaggcatgggcaagcaactttgaatcagataggaatggacaccagttcatactgtagctattttttctacttaaaattgtcttacctgtgcttatatattgattgattttttaatttattatttgttattctctttttagagttggggtcttgctctgtctcccaggttggagtgcactggcagaatcatagctcactgcacccttgaactgggctcaagagatccttccaccccactctctcagttcactgggattacagacctgaggcacagcactcagctctatagctttgatttagtcttagagaaacacagaaaaactagagtgatttcaaatccattgttctattttctcttgaaaggacacatttttctgcacagtgtattctaaatagttgatgatgca

SEQ ID NO: 11773 - DNA, 698 bp, Homo sapiens
cagggcattggtggcttgcggatgtagtcccagctactcatgaggctgaggttggagaatcgcttgagcccaggaagcggagtctgcagtgagctgaggttgcgccactccagcctgggtgacagagtgagaccctgtccaaaaaataaaattaaattaaaaaataagatcaaggctagttctagacaaaattaaattgttctttctagtattttctcctttcagcatctctctttcttcaactcttcctctgttctgtgcagcctcctctcaagtcctcactgccatctcttccaaacactttctgatgactgccaacggtgaacaaacccgtgcaccctaggagaaggcattacccctctgtggcagaggtggtcgtgttcatcaactcctccaggtttctcctgcatttcccacctcccctgtactcacatcgggcccggggactggttgatgggctgtgaacagaagtgacaggtgtcgctttggtctaaggcagttgggaacagtttgtgagttctctttactctctttatcatcactgtgactggaagggaaacaccgagatggcgaagttgcaagatggaagctgcctggatctgtgagctgctgttagagaaaagctactaaggagtttcctggcttgcattacactgtcccgtgaaagaaaaaataaacctcggtcttaagctgttgaa

SEQ ID NO: 11774 - DNA, 514 bp, Homo sapiens
gcgcacactgagtactgctggtggtgccgaggtcactggtggggtgaggaagaaggagaagggggatgccagtgccctctcatgtaagatttgtagtattttaaacagaacctattttggagccatgcatccagtcacctgctaggagacctactagtagagaccccaagtcatctctttttgtcaaagaacaagataagagcacagccagcctatattttaaaagacatttaggccgggcatggtggctcatgcctgtaaccccagcactttcggaggccgaggcaggcggatcacctgaggtcaggagttcaagaccagcctggccaacttggaaaaaccccatctctactaaaaacacaaaaattagtcaggcgtggtggtgcacacctgtagtcctggctgcttgggaggcttaggcaggagaatcacttgaacccaggaggcagaggtttcagtgagccaagattgcaccactgcactccagcctgggcaacagagtgagactccatct

SEQ ID NO: 11775 - DNA, 728 bp, Homo sapiens
gctgggattacaagcgtgcaccacctcacccagccctacttgaccttcagtatattgttttcttcttctcttgcgttgtcccctcccaccccttctgctcatgaacttctacttaggcttgaagatgtgattccaatgttacttcctttggaaatgagccaaaacttccagtggattaacccaggaagagataactacttcctcttctgtggtcttgtatttcattcagacctccatcatagcacttacatggctaagactgattgttttacctatggatgtttcattaaaccagaaggcagaagaaacatacttggctgcaaggcttgtttctttgcttcctcttgagtacttctgcaaaaatattactggactctttgtgcatgttgtgaccaacactgtcattctgataggaggaaaatgtgattaattccacagtttaatttgaaatgctatattaaaagatttgggctagaattctcttctggtcttcgttttgatagtgaagtatactggcacatacttaaaagttagctcaatcaaaatgcttcataaatcccagctttcgttactcttcaaggaaaagatgccagtttacttctctttaaataatgtgtttagtctgggcatggtggctcatgcctataatcccaacactttgggaggccgaggcaggaggattgcttgaagccaggagttcaataccagactagacaactaaaaccctg

SEQ ID NO: 11776 - DNA, 2922 bp, Homo sapiens
  misc_feature (2718)..(2718): n is a, c, g, or t
  misc_feature (2741)..(2741): n is a, c, g, or t
  misc_feature (2744)..(2744): n is a, c, g, or t
  misc_feature (2749)..(2749): n is a, c, g, or t
  misc_feature (2868)..(2868): n is a, c, g, or t
  misc_feature (2874)..(2874): n is a, c, g, or t
gcgcacggcttgcccatgtgtgctgcagccgtcagccggcccagctgagcagcagcaacggaccttgttaacggcgcggcagcctccaccgcctgctgttgccctcctctctcggtggtctgtccgcccagcgcacgtcaccatgggcaagagccggacgaagcgcttcaagcgacctcagttctcccctacgggcgactgtcaggccgaggcggctgcggcggcgaatgggaccggaggcgaggaggacgacgggccggcggcggagctgctggaaaagctccagcacccgagcgccgaggtccgcgagtgcgcctgcgcagggctggcccggctggtgcagcagcggccggcactcccgggcctggcgcgacgagacgccgtgcgccgcctcgggccgctgctgctagaccccagcctggccgtcagggagactgcagccggcgcgctgagaaatcccagtgcttgtggaggttttgaagtttgtgatgacatggtgactaaggatatcatgacccctctggttgcgctgctaaaagagtgtagtgctggactggattcaaatgagatgtctctgcaggagaaaaaagatcagaacagaaattctattgagaacatagccaatgagactgtgaacgtgctgtggaatatatgtgaatgcagtagtagagcagtgtctatattcaacaaagaagggtgtttggagattgtgttaaagtatttaagtaggttccctaccaatgttgacctggctatttcagtagcatattgtttgcagacagtgactgaggataacccagagctgctgaagtctttcagtgctacagcattgaacatgctggaatcagcactgctttctcccgtcagttccatggaatctcttctattgaagacattggtagcaggcacaatttggaatctaaaggacattattccatgcaagagtcaagcagaaatcataaatgccttactaaagatcttatctgaagttttgggaatggatgctggtgaaatggttattcaaatgaaagaggctgaaacgcaaaggttaaaaactgctgcagaggctgaggaaatattagagaacactaatggggatgatttgattgaagatgatgaaatggaaggaatttctcataaaagaagagtcagaaggaaaactttcgtttcagatttacttccgcccactgacaaggaactgagagagactatagcattgctgacagcccaacagactgctctggaaattattgtcaacatgtgctgcaatgaagatccctctgatgacgaatgggaagagctttctagcagtgatgaaagtgacgcatttatggagaattccttcagtgagtgcgggggacagctgttttctcccctctgcctctcccatgaagttcacacggctctcaccaactacctcatcccaaagaagatttttgagaaaactgcctttccaaacagcattgcagttgacctatgttctaggaaccctacttggaaacctttgattagaaaaatgaacactattcagtgcagagccctcttctgtctccagagtcttgtgtccctcctggatgtggagcacctgggaggagccgcagcccttcagacgcttgcacagcatctgtcacagctgcttttttctcaaccagattttgctaaacatgttgactttctagaagccataagtagtgctttgagggcccttttgcaaacaatggcctccaagaacatttcccagtgcatgactcctgatcagctgatgacattatgcaaagcaggcattcatagtagtaatgtcggggttagagtgaatgtcgttagcattttaggaatcactggcagcgtccttgccaaagaagatggtacacttgaaactcttaagaacattgggtgctttctgcttgaagttaccaccaaagatccttcccttgtggtagcaggagaagctttggatgccctctttgatgtttttgcagatggtaaagaagccgaaagagcctcgattcaaattaaattattatctgctctgaaagaattccagccggtctttaaaatgaagatacgtaaagaagggagaggtaactatagcacagatcagctgtgtgttcttgacaatgtgaaaatgaatttgcgaagatttattgcttatcaagaaactgttgagaaaagactgacttcttaaacaatccaaaaaagaaaccaggttatttggggcccacgtgtgttccgctttctcacattcccacgagaaggttcagctcaccgcagtttaggacccagccgcaaagccgggctcattctggggagtgattttcttcacggaggctcgatacgcaggcgccgtctgcaggcaacagcttctgctgaagggcagccgtatttagaacagcggaaatgtgcagggtgagagtaagggggacacggctgaagggagcctatgggtggaatgagtgacggagaggcacaattttggaatgaagaagatatagatcatttgcggaaattacaaatgtggttgccaagagacagggtctcgctatgttgcccaagctggaggaagtggaattcctgagagcagcagagatcgagcttggggttacggtttgctgcgtctgagcaaaaggacctgcgagaacaggccgagcgtggctcacgcctataatcccagcaccttgggagaccgaggcgggcagatcacttgaggtcaggagttcnaggccagcctggtcaacatggcnaanccccntctctattaaaaatacaaaaattagctaggcatggtggtgcatgcctgtaatcccagctactcgggaggctgaggcaagagaatcgcttgaacccgggaggcggaggttgcagtgagcngagatngcgccactgcactccagcctgggtgacagagctgagactccatctcaa

SEQ ID NO: 11777 - DNA, 2051 bp, Homo sapiens
agcggagtgtttggagagatcactcaggcagctggaggaagggagagcacaggggcctggcagcaggaggaccagtcaggaggctgccgaaggacgatgaaggctgagttggaaggaggcaatcatgtcctctcatgcttacctgtgttcgtgatgtctcgggaagcgtaaattgatggtgtttcaaagaaatcaaaatgtggatagaaccacttttcccctcatatgagcaaactcccactgacaaggaactgagagagactatagcattgctgacagcccaacagactgctctggaaattattgtcaacatgtgctgcaatgaagatccctctgatgacgaatgggaagagctttctagcagtgatgaaagtgacgcatttatggagaattccttcagtgagtgcgggggacagctgttttctcccctctgcctctcccatgaagttcacacggctctcaccaactacctcatcccaaagaagatttttgagaaaactgcctttccaaacagcattgcagttgacctatgttctaggaaccctacttggaaacctttgattagaaaaatgaacactattcagtgcagagccctcttctgtctccagagtcttgtgtccctcctggatgtggagcacctgggaggagccgcagcccttcagacgcttgcacagcatctgtcacagctgcttttttctcaaccagattttgctaaacatgttgactttctagaagccataagtagtgctttgagggcccttttgcaaacaatggcctccaagaacatttcccagtgcatgactcctgatcagctgatgacattatgcaaagcaggcattcatagtagtaatgtcggggttagagtgaatgtcgttagcattttaggaatcactggcagcgtccttgccaaagaagatggtacacttgaaactcttaagaacattgggtgctttctgcttgaagttaccaccaaagatccttcccttgtggtagcaggagaagctttggatgccctctttgatgtttttgcagatggtaaagaagccgaaagagcctcgattcaaattaaattattatctgctctgaaagaattccagccggtctttaaaatgaagatacgtaaagaagggagaggtaactatagcacagatcagctgtgtgttcttgacaatgtgaaaatgaatttgcgaagatttattgcttatcaagaaactgttgagaaaagactgacttcttaaacaatccaaaaaagaaaccagttcttcccccaaagtattcaatgcttagaatactaaaaggttttctttgaatgtatatgtttctgaaagtcattttttaatgattacattctgtacattctgtaaaaacttcaaaacctggccaggcatggtctcaaattcctgacctcgggtgatccgcctgccctggcctcccagggtgctgggattgcgggcgtgagccaccgtgcctggccagaaactcttttttaagcgatgagatctgtgtggcatttctagcgctctctaaattatgtctctggcatattttaatcactggaaactcaaagagtggaagagtggaagtgcgaaggaatctcaggtagctcttaactaattcgccagcagtgaagaaacttcaaccaatcatgttttccttgaattttgcaaagaaagaaaatccaaagcattgcttggatgttcttttaaggcattttatatcagttgaaccttaaactgaaatatgaagacaagctttataaactagttttttgatatgaagtatatcaattatgtttgccttttgtgaagaagtaaatgagttgaatttgtatttcacttactagattatactaatgagctaatggggtcattgccatcctccctactcatgactttgatgagttattgctgtaacatcacttcttgatttaatttgatatggaatcagaattgggagaaggtatttttaaataaacaactttttaatggaaagttttgtgtcttacaaaatcttttttaagataccaaataaagggttattagtagaaaatg

SEQ ID NO: 11778 - DNA, 3208 bp, Homo sapiens
gcgcacggcttgcccatgtgtgctgcagccgtcagccggcccagctgagcagcagcaacggaccttgttaacggcgcggcagcctccaccgcctgctgttgccctcctctctcggtggtctgtccgcccagcgcacgtcaccatgggcaagagccggacgaagcgcttcaagcgacctcagttctcccctacgggcgactgtcaggccgaggcggctgcggcggcgaatgggaccggaggcgaggaggacgacgggccggcggcggagctgctggaaaagaaatcccagtgcttgtggaggttttgaagtttgtgatgacatggtgactaaggatatcatgacccctctggttgcgctgctaaaagagtgtagtgctggactggattcaaatgagatgtctctgcaggagaaaaaagatcagaacagaaattctattgagaacatagccaatgagactgtgaacgtgctgtggaatatatgtgaatgcagtagtagagcagtgtctatattcaacaaagaagggtgtttggagattgtgttaaagtatttaagtaggttccctaccaatgttgacctggctatttcagtagcatattgtttgcagacagtgactgaggataacccagagctgctgaagtctttcagtgctacagcattgaacatgctggaatcagcactgctttctcccgtcagttccatggaatctcttctattgaagacattggtagcaggcacaatttggaatctaaaggacattattccatgcaagagtcaagcagaaatcataaatgccttactaaagatcttatctgaagttttgggaatggatgctggtgaaatggttattcaaatgaaagaggctgaaacgcaaaggttaaaaactgctgcagaggctgaggaaatattagagaacactaatggggatgatttgattgaagatgatgaaatggaaggaatttctcataaaagaagagtcagaaggaaaactttcgtttcagatttacttccgcccactgacaaggaactgagagagactatagcattgctgacagcccaacagactgctctggaaattattgtcaacatgtgctgcaatgaaggtttgttaacatttacatttagacattttccccctgagccaagagggaaactcccgtggagattttcttaactattccagttctgcgtggtttgcccgcttcccagatccctctgatgacgaatgggaagagctttctagcagtgatgaaagtgacgcatttatggagaattccttcagtgagtgcgggggacagctgttttctcccctctgcctctcccatgaagttcacacggctctcaccaactacctcatcccaaagaaggtaatccattttcattctaggcttaccgtggagcatgggaaaagcttaagcaaggtattcattttgtgtacaaaagaagcaagctcacacttccaggttgtagatggtggtaagatctgagacaaagctgagcctaacagtactggaaataggcgaaaaggtcattctatatgaagcctaaccatttcacttaggagtaatatgttggaattatgtaagggaatcgtgttaaatgactactctttaacctttgctttactgcctcttttaaatctagatttttgagaaaactgcctttccaaacagcattgcagttgacctatgttctaggaaccctacttggaaacctttgattagaaaaatgaacactattcagtgcagagccctcttctgtctccagagtcttgtgtccctcctggatgtggagcacctgggaggagccgcagcccttcagacgcttgcacagcatctgtcacagctgcttttttctcaaccagattttgctaaacatgttgactttctagaagccataagtagtgctttgagggcccttttgcaaacaatggcctccaagaacatttcccagtgcatgactcctgatcagctgatgacattatgcaaagcaggcattcatagtagtaatgtcggggttagagtgaatgtcgttagcattttaggaatcactggcagcgtccttgccaaagaagatggtacacttgaaactcttaagaacattgggtgctttctgcttgaagttaccaccaaagatccttcccttgtggtagcaggagaagctttggatgccctctttgatgtttttgcagatggtaaagaagccgaaagagcctcgattcaaattaaattattatctgctctgaaagaattccagccggtctttaaaatgaagatacgtaaagaagggagaggtaactatagcacagatcagctgtgtgttcttgacaatgtgaaaatgaatttgcgaagatttattgcttatcaagaaactgttgagaaaagactgacttcttaaacaatccaaaaaagaaaccagttcttcccccaaagtattcaatgcttagaatactaaaaggttttctttgaatgtatatgtttctgaaagtcattttttaatgattacattctgtacattctgtaaaaacttcaaaacctggccaggcatggtctcaaattcctgacctcgggtgatccgcctgccctggcctcccagggtgctgggattgcgggcgtgagccaccgtgcctggccagaaactcttttttaagcgatgagatctgtgtggcatttctagcgctctctaaattatgtctctggcatattttaatcactggaaactcaaagagtggaagagtggaagtgcgaaggaatctcaggtagctcttaactaattcgccagcagtgaagaaacttcaaccaatcatgttttccttgaattttgcaaagaaagaaaatccaaagcattgcttggatgttcttttaaggcattttatatcagttgaaccttaaactgaaatatgaagacaagctttataaactagttttttgatatgaagtatatcaattatgtttgccttttgtgaagaagtaaatgagttgaatttgtatttcacttactagattatactaatgagctaatggggtcattgccatcctccctactcatgactttgatgagttattgctgtaacatcacttcttgatttaatttgatatggaatcagaattgggagaaggtatttttaaataaacaactttttaatggaaagttttgtgtcttacaaaatcttttttaagataccaaataaagggttattagtagaaaatg

SEQ ID NO: 11779 - DNA, 1664 bp, Homo sapiens
  misc_feature (1461)..(1461): n is a, c, g, or t
  misc_feature (1484)..(1484): n is a, c, g, or t
  misc_feature (1487)..(1487): n is a, c, g, or t
  misc_feature (1492)..(1492): n is a, c, g, or t
agcggagtgtttggagagatcactcaggcagctggaggaagggagagcacaggggcctggcagcaggaggaccagtcaggaggctgccgaaggacgatgaaggctgagttggaaggaggcaatcatgtcctctcatgcttacctgtgttcgtgatgtctcgggaagcgtaaattgatggtgtttcaaagaaatcaaaatgtggatagaaccacttttcccctcatatgagcaaactcccactgacaaggaactgagagagactatagcattgctgacagcccaacagactgctctggaaattattgtcaacatgtgctgcaatgaagatccctctgatgacgaatgggaagagctttctagcagtgatgaaagtgacgcatttatggagaattccttcagtgagtgcgggggacagctgttttctcccctctgcctctcccatgaagttcacacggctctcaccaactacctcatcccaaagaagatttttgagaaaactgcctttccaaacagcattgcagttgacctatgttctaggaaccctacttggaaacctttgattagaaaaatgaacactattcagtgcagagccctcttctgtctccagagtcttgtgtccctcctggatgtggagcacctgggaggagccgcagcccttcagacgcttgcacagcatctgtcacagctgcttttttctcaaccagattttgctaaacatgttgactttctagaagccataagtagtgctttgagggcccttttgcaaacaatggcctccaagaacatttcccagtgcatgactcctgatcagctgatgacattatgcaaagcaggcattcatagtagtaatgtcggggttagagtgaatgtcgttagcattttaggaatcactggcagcgtccttgccaaagaagatggtacacttgaaactcttaagaacattgggtgctttctgcttgaagttaccaccaaagatccttcccttgtggtagcaggagaagctttggatgccctctttgatgtttttgcagatggtaaagaagccgaaagagcctcgattcaaattaaattattatctgctctgaaagaattccagccggtctttaaaatgaagatacgtaaagaagggagaggtaactatagcacagatcagctgtgtgttcttgacaatgtgaaaatgaatttgcgaagatttattgcttatcaagaaactgttgagaaaagactgacttcttaaacaatccaaaaaagaaaccagttcttcccccaaagtattcaatgcttagaatactaaaaggttttctttgaatgtatatgtttctgaaagtcattttttaatgattacattctgtacattctgtaaaaacttcaaaacctggccaggcatggtgtggctcacgcctataatcccagcaccttgggagaccgaggcgggcagatcacttgaggtcaggagttcnaggccagcctggtcaacatggcnaanccccntctctattaaaaatacaaaaattagctaggcatggtggtgcatgcctgtaatcccagctactcgggaggctgaggcagaagaatctgagccaagataacaccattgcactccagcctgggcgacagagtgagactatctcaaaaataaataaatcacctaaataaatagtca

SEQ ID NO: 11780 - DNA, 1375 bp, Homo sapiens
agcggagtgtttggagagatcactcaggcagctggaggaagggagagcacaggggcctggcagcaggaggaccagtcaggaggctgccgaaggacgatgaaggctgagttggaaggaggcaatcatgtcctctcatgcttacctgtgttcgtgatgtctcgggaagcgtaaattgatggtgtttcaaagaaatcaaaatgtggatagaaccacttttcccctcatatgagcaaactcccactgacaaggaactgagagagactatagcattgctgacagcccaacagactgctctggaaattattgtcaacatgtgctgcaatgaagatccctctgatgacgaatgggaagagctttctagcagtgatgaaagtgacgcatttatggagaattccttcagtgagtgcgggggacagctgttttctcccctctgcctctcccatgaagttcacacggctctcaccaactacctcatcccaaagaagatttttgagaaaactgcctttccaaacagcattgcagttgacctatgttctaggaaccctacttggaaacctttgattagaaaaatgaacactattcagtgcagagccctcttctgtctccagagtcttgtgtccctcctggatgtggagcacctgggaggagccgcagcccttcagacgcttgcacagcatctgtcacagctgcttttttctcaaccagattttgctaaacatgttgactttctagaagccataagtagtgctttgagggcccttttgcaaacaatggcctccaagaacatttcccagtgcatgactcctgatcagctgatgacattatgcaaagcaggcattcatagtagtaatgtcggggttagagtgaatgtcgttagcattttaggaatcactggcagcgtccttgccaaagaagatggtacacttgaaactcttaagaacattgggtgctttctgcttgaagttaccaccaaagatccttcccttgtggtagcaggagaagctttggatgccctctttgatgtttttgcagatggtaaagaagccgaaagagcctcgattcaaattaaattattatctgctctgaaagaattccagccggtctttaaaatgaagatacgtaaagaagggagaggtaactatagcacagatcagctgtgtgttcttgacaatgtgaaaatgaatttgcgaagatttattgcttatcaagaaactgttgagaaaagactgacttcttaaacaatccaaaaaagaaaccagttcttcccccaaagtattcaatgcttagaatactaaaaggttttctttgaatgtatatgtttctgaaagtcattttttaatgattacattctgtatgttgtcggatcctcaggcac

SEQ ID NO: 11781 - DNA, 535 bp, Homo sapiens
attatccactacatggtagaagcaccatataatgtaatggtttctacagtctttaattatgataatacagatatctcaaagtaagttcttaccttgtatagactcagccaatttttttaaaaccacacaatcctatttatactttcaaagcctttttcttaccattaatattaaaaaggaattggactctctttagtgtgtgtacatctggaatgaaagtcttcatcaaattaaatggagcccctttgatattagataacagtgccgacatgagcagggttcaccttagttcagaattaccagctctgtctgggagaactggaatacatattaatagtaacttacctgccaggagtttatgtcactcttaaaatcctgtagcctatagaggagattcctgtcagtccggttttcacatgctgatagaattaattgagtttaacattataaatactgtcctcttctcttttaacagtgcatgactcctgatcagctgatgacattatgcaaagcaggcattcatagtagtaatgtc

SEQ ID NO: 11782 - DNA, 419 bp, Homo sapiens
aacagagtaagaccctgtctaaaaaatgatgataaattttagaaaacacaaaaaacagttcaccttgtgattctttgctaactgccatagataccttgtatttacagatatttccagtcagaacgtgaagcttaggctaaaagttaatactgaattctgatgggcaacttctggagaatcagatggcattgtttcacttcctttccagaatgaacactattcagtgcagagccctcttctgtctccagagtcttgtgtccctcctggatgtggagcacctgggaggagccgcagcccttcagacgcttgcacagcatctgtcacagctgcttttttctcaaccaggtatttagactttattgcgaaagactacgcagacggaacagaattttgaaggggcaggaatttggattttgtaa

SEQ ID NO: 11783 - DNA, 2727 bp, Homo sapiens
gcgcacggcttgcccatgtgtgctgcagccgtcagccggcccagctgagcagcagcaacggaccttgttaacggcgcggcagcctccaccgcctgctgttgccctcctctctcggtggtctgtccgcccagcgcacgtcaccatgggcaagagccggacgaagcgcttcaagcgacctcagttctcccctacgggcgactgtcaggccgaggcggctgcggcggcgaatgggaccggaggcgaggaggacgacgggccggcggcggagctgctggaaaagaaatcccagtgcttgtggaggttttgaagtttgtgatgacatggtgactaaggatatcatgacccctctggttgcgctgctaaaagagtgtagtgctggactggattcaaatgagatgtctctgcaggagaaaaaagatcagaacagaaattctattgagaacatagccaatgagactgtgaacgtgctgtggaatatatgtgaatgcagtagtagagcagtgtctatattcaacaaagaagggtgtttggagattgtgttaaagtatttaagtaggttccctaccaatgttgacctggctatttcagtagcatattgtttgcagacagtgactgaggataacccagagctgctgaagtctttcagtgctacagcattgaacatgctggaatcagcactgctttctcccgtcagttccatggaatctcttctattgaagacattggtagcaggcacaatttggaatctaaaggacattattccatgcaagagtcaagcagaaatcataaatgccttactaaagatcttatctgaagttttgggaatggatgctggtgaaatggttattcaaatgaaagaggctgaaacgcaaaggttaaaaactgctgcagaggctgaggaaatattagagaacactaatggggatgatttgattgaagatgatgaaatggaaggaatttctcataaaagaagagtcagaaggaaaactttcgtttcagatttacttccgcccactgacaaggaactgagagagactatagcattgctgacagcccaacagactgctctggaaattattgtcaacatgtgctgcaatgaagatccctctgatgacgaatgggaagagctttctagcagtgatgaaagtgacgcatttatggagaattccttcagtgagtgcgggggacagctgttttctcccctctgcctctcccatgaagttcacacggctctcaccaactacctcatcccaaagaagatttttgagaaaactgcctttccaaacagcattgcagttgacctatgttctaggaaccctacttggaaacctttgattagaaaaatgaacactattcagtgcagagccctcttctgtctccagagtcttgtgtccctcctggatgtggagcacctgggaggagccgcagcccttcagacgcttgcacagcatctgtcacagctgcttttttctcaaccagattttgctaaacatgttgactttctagaagccataagtagtgctttgagggcccttttgcaaacaatggcctccaagaacatttcccagtgcatgactcctgatcagctgatgacattatgcaaagcaggcattcatagtagtaatgtcggggttagagtgaatgtcgttagcattttaggaatcactggcagcgtccttgccaaagaagatggtacacttgaaactcttaagaacattgggtgctttctgcttgaagttaccaccaaagatccttcccttgtggtagcaggagaagctttggatgccctctttgatgtttttgcagatggtaaagaagccgaaagagcctcgattcaaattaaattattatctgctctgaaagaattccagccggtctttaaaatgaagatacgtaaagaagggagaggtaactatagcacagatcagctgtgtgttcttgacaatgtgaaaatgaatttgcgaagatttattgcttatcaagaaactgttgagaaaagactgacttcttaaacaatccaaaaaagaaaccagttcttcccccaaagtattcaatgcttagaatactaaaaggttttctttgaatgtatatgtttctgaaagtcattttttaatgattacattctgtggcgtgagccaccgtgcctggccagaaactcttttttaagcgatgagatctgtgtggcatttctagcgctctctaaattatgtctctggcatattttaatcactggaaactcaaagagtggaagagtggaagtgcgaaggaatctcaggtagctcttaactaattcgccagcagtgaagaaacttcaaccaatcatgttttccttgaattttgcaaagaaagaaaatccaaagcattgcttggatgttcttttaaggcattttatatcagttgaaccttaaactgaaatatgaagacaagctttataaactagttttttgatatgaagtatatcaattatgtttgccttttgtgaagaagtaaatgagttgaatttgtatttcacttactagattatactaatgagctaatggggtcattgccatcctccctactcatgactttgatgagttattgctgtaacatcacttcttgatttaatttgatatggaatcagaattgggagaaggtatttttaaataaacaactttttaatggaaagttttgtgtcttacaaaatcttttttaagataccaaataaagggttattagtagaaaatg

SEQ ID NO: 11784 - DNA, 766 bp, Homo sapiens
acgccttgtatacgattgcggcgtggcgcgcgtgtgcatatatgtactgtgatcatgaccgtttcctagcgcactaggcacgatcctggtcatgactagtggtacggatcctgatcaagtctgccagtggccgtccggaaagggatgggattaaagcgacatgcacatcgagtcctgtcgtcaaacatctgtatctatcgagatagaagtccagcgcgagatcgcatatcggtcttctacctggatgcttgctggcatattttaatcactggaaactcaaagagtggaagagtggaagtgcgaaggaatctcaggtagctcttaactaattcgccagcagtgaagaaacttcaaccaatcatgttttccttgaattttgcaaagaaagaaaatccaaagcattgcttggatgttcttttaaggcattttatatcagttgaaccttaaactgaaatatgaagacaagctttataaactagttttttgatatgaagtatatcaattatgtttgccttttgtgaagaagtaaatgagttgaatttgtatttcacttactagattatactaatgagctaatggggtcattgccatcctccctactcatgactttgatgagttattgctgtaacatcacttcttgatttaatttgatatggaatcagaattgggagaaggtatttttaaataaacaactttttaatggaaagttttgtgtcttacaaaatcttttttaagataccaaataaagggttattagtagaaaatg

SEQ ID NO: 11785 - DNA, 1769 bp, Homo sapiens
tggcacgaggactggaaattattgccaacatgtgctgcattttagatccctctgatgacgaatgggaagagctttctagcagtgatgaaagtgacgcatttatggagaattccttcagtgagtgcgggggacagctgttttctcccctctgcctctcccatgaagttcacacggctctcaccaactacctcatcccaaagaagatttttgagaaaactgcctttccaaacagcattgcagttgacctatgttctaggaaccctacttggaaacctttgattagaaaaatgaacactattcagtgcagagccctcttctgtctccagagtcttgtgtccctcctggatgtggagcacctgggaggagccgcagcccttcagacgcttgcacagcatctgtcacagctgcttttttctcaaccagattttgctaaacatgttgactttctagaagccataagtagtgctttgagggcccttttgcaaacaatggcctccaagaacatttcccagtgcatgactcctgatcagctgatgacattatgcaaagcaggcattcatagtagtaatgtcggggttagagtgaatgtcgttagcattttaggaatcactggcagcgtccttgccaaagaagatggtacacttgaaactcttaagaacattgggtgctttctgcttgaagttaccaccaaagatccttcccttgtggtagcaggagaagctttggatgccctctttgatgtttttgcagatggtaaagaagccgaaagagcctcgattcaaattaaattattatctgctctgaaagaattccagccggtctttaaaatgaagatacgtaaagaagggagaggtaactatagcacagatcagctgtgtgttcttgacaatgtgaaaatgaatttgcgaagatttattgcttatcaagaaactgttgagaaaagactgacttcttaaacaatccaaaaaagaaaccagttcttcccccaaagtattcaatgcttagaatactaaaaggttttctttgaatgtatatgtttctgaaagtcattttttaatgattacattctgtacattctgtaaaaacttcaaaacctggccaggcatggtctcaaattcctgacctcgggtgatccgcctgccctggcctcccagggtgctgggattgcgggcgtgagccaccgtgcctggccagaaactcttttttaagcgatgagatctgtgtggcatttctagcgctctctaaattatgtctctggcatattttaatcactggaaactcaaagagtggaagagtggaagtgcgaaggaatctcaggtagctcttaactaattcgccagcagtgaagaaacttcaaccaatcatgttttccttgaattttgcaaagaaagaaaatccaaagcattgcttggatgttcttttaaggcattttatatcagttgaaccttaaactgaaatatgaagacaagctttataaactagttttttgatatgaagtatatcaattatgtttgccttttgtgaagaagtaaatgagttgaatttgtatttcacttactagattatactaatgagctaatggggtcattgccatcctccctactcatgactttgatgagttattgctgtaacatcacttcttgatttaatttgatatggaatcagaattgggagaaggtatttttaaataaacaactttttaatggaaagttttgtgtcttacaaaatcttttttaagataccaaataaagggttattagtagaaaatg

SEQ ID NO: 11786 - DNA, 1548 bp, Homo sapiens
  misc_feature (1494)..(1494): n is a, c, g, or t
  misc_feature (1500)..(1500): n is a, c, g, or t
agcggagtgtttggagagatcactcaggcagctggaggaagggagagcacaggggcctggcagcaggaggaccagtcaggaggctgccgaaggacgatgaaggctgagttggaaggaggcaatcatgtcctctcatgcttacctgtgttcgtgatgtctcgggaagcgtaaattgatggtgtttcaaagaaatcaaaatgtggatagaaccacttttcccctcatatgagcaaactcccactgacaaggaactgagagagactatagcattgctgacagcccaacagactgctctggaaattattgtcaacatgtgctgcaatgaagatccctctgatgacgaatgggaagagctttctagcagtgatgaaagtgacgcatttatggagaattccttcagtgagtgcgggggacagctgttttctcccctctgcctctcccatgaagttcacacggctctcaccaactacctcatcccaaagaagatttttgagaaaactgcctttccaaacagcattgcagttgacctatgttctaggaaccctacttggaaacctttgattagaaaaatgaacactattcagtgcagagccctcttctgtctccagagtcttgtgtccctcctggatgtggagcacctgggaggagccgcagcccttcagacgcttgcacagcatctgtcacagctgcttttttctcaaccagattttgctaaacatgttgactttctagaagccataagtagtgctttgagggcccttttgcaaacaatggcctccaagaacatttcccagtgcatgactcctgatcagctgatgacattatgcaaagcaggcattcatagtagtaatgtcggggttagagtgaatgtcgttagcattttaggaatcactggcagcgtccttgccaaagaagatggtacacttgaaactcttaagaacattgggtgctttctgcttgaagttaccaccaaagatccttcccttgtggtagcaggagaagctttggatgccctctttgatgtttttgcagatggtaaagaagccgaaagagcctcgattcaaattaaattattatctgctctgaaagaattccagccggtctttaaaatgaagatacgtaaagaagggagaggtaactatagcacagatcagctgtgtgttcttgacaatgtgaaaatgaatttgcgaagatttattgcttatcaagaaactgttgagaaaagactgacttcttaaacaatccaaaaaagaaaccagttcttcccccaaagtattcaatgcttagaatactaaaaggttttctttgaatgtatatgtttctgaaagtcattttttaatgattacattctgtacattctgtaaaaacttcaaaacctggccaggcatggtaaaaattagctaggcatggtggtgcatgcctgtaatcccagctactcgggaggctgaggcaagagaatcgcttgaacccgggaggcggaggttgcagtgagcngagatngcgccactgcactccagcctgggtgacagagctgagactccatctcaa

SEQ ID NO: 11787 - DNA, 2181 bp, Homo sapiens
gcgcacggcttgcccatgtgtgctgcagccgtcagccggcccagctgagcagcagcaacggaccttgttaacggcgcggcagcctccaccgcctgctgttgccctcctctctcggtggtctgtccgcccagcgcacgtcaccatgggcaagagccggacgaagcgcttcaagcgacctcagttctcccctacgggcgactgtcaggccgaggcggctgcggcggcgaatgggaccggaggcgaggaggacgacgggccggcggcggagctgctggaaaagaaatcccagtgcttgtggaggttttgaagtttgtgatgacatggtgactaaggatatcatgacccctctggttgcgctgctaaaagagtgtagtgctggactggattcaaatgagatgtctctgcaggagaaaaaagatcagaacagaaattctattgagaacatagccaatgagactgtgaacgtgctgtggaatatatgtgaatgcagtagtagagcagtgtctatattcaacaaagaagggtgtttggagattgtgttaaagtatttaagtaggttccctaccaatgttgacctggctatttcagtagcatattgtttgcagacagtgactgaggataacccagagctgctgaagtctttcagtgctacagcattgaacatgctggaatcagcactgctttctcccgtcagttccatggaatctcttctattgaagacattggtagcaggcacaatttggaatctaaaggacattattccatgcaagagtcaagcagaaatcataaatgccttactaaagatcttatctgaagttttgggaatggatgctggtgaaatggttattcaaatgaaagaggctgaaacgcaaaggttaaaaactgctgcagaggctgaggaaatattagagaacactaatggggatgatttgattgaagatgatgaaatggaaggaatttctcataaaagaagagtcagaaggaaaactttcgtttcagatttacttccgcccactgacaaggaactgagagagactatagcattgctgacagcccaacagactgctctggaaattattgtcaacatgtgctgcaatgaaggtttgttaacatttacatttagacattttccccctgagccaagagggaaactcccgtggagattttcttaactattccagttctgcgtggtttgcccgcttcccagatccctctgatgacgaatgggaagagctttctagcagtgatgaaagtgacgcatttatggagaattccttcagtgagtgcgggggacagctgttttctcccctctgcctctcccatgaagttcacacggctctcaccaactacctcatcccaaagaaggtaatccattttcattctaggcttaccgtggagcatgggaaaagcttaagcaaggtattcattttgtgtacaaaagaagcaagctcacacttccaggttgtagatggtggtaagatctgagacaaagctgagcctaacagtactggaaataggcgaaaaggtcattctatatgaagcctaaccatttcacttaggagtaatatgttggaattatgtaagggaatcgtgttaaatgactactctttaacctttgctttactgcctcttttaaatctagatttttgagaaaactgcctttccaaacagcattgcagttgacctatgttctaggaaccctacttggaaacctttgattagaaagtaagaactcttctgctttcaaaaacatttgtcattattttattttatgaaatgatgggctattaaatagaaggtgctgactccccctaggacccagaagttttgttcctgggtatatataccagaaaaatatgtgcccacatgccctagaatacatgtatatgagagtgttcatagcagtgtgtgtcacagttgccccaacccataaacaaacgtgttgtccatcagagttagaatggtaaataaattttgacaaaatcacgcagtacaatacatgcagcagtaaaagggatctgaattagagctactcacaactcggatggaacttacattgttgaaccaaaaaagcgagacataaaagaatacacacactgtgattcagtttttacaaagttgagaaacaggcaacattgaactattttgttcagggatgcataccttggtgataaacctatt

SEQ ID NO: 11788 - DNA, 463 bp, Homo sapiens
ggcgacagagggagactccatctcaaaaaagaatgcacaacccagccccaaaggcacagaaatgtcactgtcacttcacaaagctccttgcatccctgcgcagtcaaggtaagagatgatgcagtgagatttaagaggctgaaggcgcgagtgcccgggaagccgggggggggggttgggcatgtgggaccccctccatgttgacagtcgaggcatacggcctgcaggtccacgcttacttgctgtccatgctgtcggtgtcacaaagctgcatgttgaccagcctatctcccttttctcctggcacaccagaagactacatttcctaggccccttgtatcaaggtgggtccatttgggtagttctagccaaagcaaagtatgaaaaggatcttcaccactgagaggtctgacccacttcagggtcacacaagcacttctcgttcttgtccatggcacccttt

SEQ ID NO: 11789 - DNA, 875 bp, Homo sapiens
cttttagcagcttaatgtctatacaaaggaattcattcattcacttctttttttctcaacacgtatggaacccctgccacacaggcagcactgtcctagctggaaacatgagtagataaagtcactgattcaaaggaactttattctactggtgggcacaaaatggcagctaaatttataaggtaacattggctgctttactgaaaaaaacaaagcagggtaggtgggtacaatgagtgattgtcaagagtatgactattttagacacggcggtcggtaaaatccgcctcaaggtggaggcattagaaccaagacctctgctcaccagcaggcagtctgaaaaagtattagacaaaataacccagaaaacaaagacttggggtggcaaacaagcttcaagtgctcaagaaactgtaagaaatgttgatgtgactggcctgagtttcagtctgaaaactttgggtgctaaatagtgaacatagttgcagaaaaatagaaagtaaaagaaagcattgtacgtttaaacatatgcaaataaataggtagaaacagatagaaaacagtatgttttagggagtataattttggggtaacatatcttttattatttttcctaactggggagggggtggaagactatattgccaacaaaatgaaagcttttaccccctaaacatgtcaaacaattcagcagctgataattacatttattggagttaaaaaataaagtgggatcttaaggagaattagtttatttgaatcatggtgactgagagtgaaaagagaaaaagacaaatgtgaaacttctgtttcatccactaaggagtcagcagaaagtaccacggaacctacagacctcaaacaccaaaaaaaaa

SEQ ID NO: 11790 - DNA, 728 bp, Homo sapiens
gaggcgggggttgcagtgagccgagatcataccactgtactccagactgggcaacaagagcaaaactctgtcttaaaaaaaaaaaaaaatttaataatgtcagcctgctcccacacttcccaaggagaatttggtctttgctaacttgggcctcagttgagcagatttggagtgaagggtgaagatgagaattgtcctccccggaaaaggcccaagagccccagacagagtttaatccccttgaataggtaaaagagaaatgaacagatatgtaaggtggtcagggggagaccagagctgggtttagaaggaagtagagtgttaggaggcagctgccatgattgtaaatatacaggtgtacgtgcacatgaagtgggaataatgacatctcccccattaggttgctatgagacctaagaagcccgcatgctttgctgtggactgaatgtttgcataccctcctgaattcatatgctgaagcctaaatccccaatttgatggtatacgaaggtggggcctttgggaggtaattaggtcatgaaagtggagccctcatgaataggaagaatgcccttataaaagaaattccaacaagctgccttgccccttttctgccatttgagaaaacagtgagaaattgctgcctgtgaaccaggaagcgggtgctcaccggacactgaagccactggcaccttgatcttgaatttcccagcctccagaactgtgag

SEQ ID NO: 11791 - DNA, 3096 bp, Homo sapiens
  misc_feature (3)..(3): n is a, c, g, or t
  misc_feature (8)..(8): n is a, c, g, or t
  misc_feature (10)..(10): n is a, c, g, or t
  misc_feature (12)..(12): n is a, c, g, or t
  misc_feature (15)..(16): n is a, c, g, or t
  misc_feature (21)..(23): n is a, c, g, or t
ggnctgcngncntanngcggnnncgcggggaatttcgagtggtgttggagcgccggaggctagtgggtggctgacccccagcatcctcgagagcgaccatggactccctggccgagtctcggtggcctccgggcctggcagtcatgaagacaatagatgatttgctgcggtgtggaatttgcttcgagtatttcaacattgcaatgataatacctcagtgttcacataactactgctctctctgtataagaaaatttctgtcctataaaactcagtgtccaacttgctgtgtgactgtcacagagccggatctgaaaaataaccgcatattagatgaactggtaaaaagcttgaattttgcacggaatcatctgctgcagtttgctttagagtcaccagccaaatctcctgcttcttcctcttcaaagaatcttgctgtcaaagtatatactcctgtagcctccagacagtctttaaagcaggggagcaggttaatggataatttcttgatcagagaaatgagtggttctacatcagagttgttgataaaagaaaataaaagcaaattcagccctcaaaaagaggcgagccctgctgcaaagaccaaagagacacgttctgtagaagagatcgctccagatccctcagaggctaagcgtcctgagccaccctcgacatccactttgaaacaagttactaaagtggattgtcctgtttgcggggttaacattccagaaagtcacattaataagcatttagacagctgtttatcacgcgaagagaagaaggaaagcctcagaagttctgttcacaaaaggaagccgctgcccaaaactgtatataatttgctctctgatcgtgatttaaagaaaaagctaaaagagcatggattatctattcaaggaaataaacaacagctcattaaaaggcaccaagaatttgtacacatgtacaatgcccaatgcgatgctttgcatcctaaatcagctgctgaaatagttcaagaaatcgaaaatatagagaagactaggatgcgtcttgaagctagtaaactcaatgaaagtgtaatggtttttacaaaggaccaaacagaaaaggaaatagatgaaatccacagtaaatatcgtaaaaaacataagagtgaatttcagcttctggtggatcaggctagaaaaggatacaagaaaattgctggaatgtcacaaaaaacagtaacaataacaaaagaagatgaatctacagaaaagctatcttctgtatgcatgggacaggaagataatatgacctcagtaacaaaccacttttctcaatcaaagctggactccccagaggaattggaacctgacagagaagaggattcttctagctgtattgatattcaagaagttctttcttcatcagaatcagattcatgcaatagttccagttcagacatcataagagatcttttagaagaagaggaagcctgggaagcatcacataaaaacgatcttcaagacacagaaataagtccaagacagaatcgccgcacaagagccgctgaaagtgctgagattgaaccaagaaacaagcgtaataggaattaatgtgggcttttgctgacttttcaaatgcattgattagaataccgtacttttggttgccacagatagattttctatttataaatgcccaaggaaagatgctaaattctaaatattacggttagctgatattcattcttttctgcttttccagaggggaaaaatgttacaaaatatccttacttggtcagttgcctcctgcctctaaaacatctctctctaaaaatactgacatttcacacaggtaccagctttgcagaggaggtagactctttggcactttggcacagggatttggtttggtttggtttggtttgataattaaatttcagaatgtccttaggccattctccttctcttccatggagaatccagcctcacaaaaggattctttcaacttctttattgcaagaaacagttgagttaaatgtttgtttttggaaaggcgggatgtcagttcacatccttggtgtgtgtaagtaccgatgcacgccaccaccatgcctgtgttacagcagctccatgatggttgttgcccgaggttaatgtagttgtttgttagacctgtgtcttacacatttctcagagtaggatattagtattataatttaaagctacgacagtcacaaagtcacaataacttagaaacattgcgcatattcttctgaaatagcacttaaaaatgattagtgtcagtattttttcacttgggtcaatcaaatctgtaacactgaatccaagctattaaacaaaaagtatgcaatgaatgaattttgtaaatgaatagagagtatcagtttacaataatgttcttaaaacagtatcctctggatagttgagtatgggttagaaatcattgaaatggattggtcagaaattgctatctgtgtaaaatgtctaccagtagccagatgcttccagagttcttaatgcctctctggcatttcagagccagcatcccccaactcccacccctctgccatcacccagcccaaacacatcagctttcaaatgagatgatagtaaatgcggcaatgttaagacaagaaatttatgatttgccagattcaacatttatgacctccccttccaaagactgtctccgttgaccttgtctttttggtatgccttggggtttctgataatgtgtggagtctcattatggctgagagtttagtgttttcacagtgaagtgcagacatttgatttctttatgagttccctgtgttagaaatggctatagaaaaatttgtcataataatttcatttgcatgaaatcctgaggggtgcattaaggaaactaaaagcaccacttaccaaatctatcggcagaactgatgtgaggtaagtgagcatgtcaaacaaaataggagctcacatggatatatttatgtcactgagttgtcagaaattatgtcaaaatgaaaactgtttgtttcatgacaaattatatagtctataaattaaactggaagtaattattactttaattgcagcaaaaggagtttgtgag

SEQ ID NO: 11792 - DNA, 1921 bp, Homo sapiens
  misc_feature (3)..(3): n is a, c, g, or t
  misc_feature (8)..(8): n is a, c, g, or t
  misc_feature (10)..(10): n is a, c, g, or t
  misc_feature (12)..(12): n is a, c, g, or t
  misc_feature (15)..(16): n is a, c, g, or t
  misc_feature (21)..(23): n is a, c, g, or t
ggnctgcngncntanngcggnnncgcggggaatttcgagtggtgttggagcgccggaggctagtgggtggctgacccccagcatcctcgagagcgaccatggactccctggccgagtctcggtggcctccgggcctggcagtcatgaagacaatagatgatttgctgcggtgtggaatttgcttcgagtatttcaacattgcaatgataatacctcagtgttcacataactactgctctctctgtataagaaaatttctgtcctataaaactcagtgtccaacttgctgtgtgactgtcacagagccggatctgaaaaataaccgcatattagatgaactggtaaaaagcttgaattttgcacggaatcatctgctgcagtttgctttagagtcaccagccaaatctcctgcttcttcctcttcaaagaatcttgctgtcaaagtatatactcctgtagcctccagacagtctttaaagcaggggagcaggttaatggataatttcttgatcagagaaatgagtggttctacatcagagttgttgataaaagaaaataaaagcaaattcagccctcaaaaagaggcgagccctgctgcaaagaccaaagagacacgttctgtagaagagatcgctccagatccctcagaggctaagcgtcctgagccaccctcgacatccactttgaaacaagttactaaagtggattgtcctgtttgcggggttaacattccagaaagtcacattaataagcatttagacagctgtttatcacgcgaagagaagaaggaaagcctcagaagttctgttcacaaaaggaagccgctgcccaaaactgtatataatttgctctctgatcgtgatttaaagaaaaagctaaaagagcatggattatctattcaaggaaataaacaacagctcattaaaaggcaccaagaatttgtacacatgtacaatgcccaatgcgatgctttgcatcctaaatcagctgctgaaatagttcaagaaatcgaaaatatagagaagactaggatgcgtcttgaagctagtaaactcaatgaaagtgtaatggtttttacaaaggaccaaacagaaaaggaaatagatgaaatccacagtaaatatcgtaaaaaacataagagtgaatttcagcttctggtggatcaggctagaaaaggatacaagaaaattgctggaatgtcacaaaaaacagtaacaataacaaaagaagatgaatctacagaaaagctatcttctgtatgcatgggacaggaagataatatgacctcagtaacaaaccacttttctcaatcaaagctggactccccagaggaattggaacctgacagagaagaggattcttctagctgtattgatattcaagaagttctttcttcatcagaatcagattcatgcaatagttccagttcagacatcataagagatcttttagaagaagaggaagcctgggaagcatcacataaaaacgatcttcaagacacagaaataagtccaagacagaatcgccgcacaagagccgctgaaagtgctgagattgaaccaagaaacaagcgtaataggaattaatgtgggcttttgctgacttttcaaatgcattgattagaataccgtacttttggttgccacagatagattttctatttataaatgcccaaggaaagatgctaaattctaaatattacggttagctgatattcattcttttctgcttttccagaggggaaaaatgttacaaaatatccttacttggtcagttgcctcctgcctctaaaacatctctctctaaaaatactgacatttcacacaggtaccagctttgcagaggaggtagactctttggcactttggcacagggatttggtttggtttggtttggtttgataattaaatttcagaatgtc

SEQ ID NO: 11793 - DNA, 1696 bp, Homo sapiens
gagagagagagagagagagagagagagagagagagagagagagagagagagagatgagagagagagagatgagatacagagagacatagtgagagaatcttttagagaaagaggaagcctgagaagcatcacataaaaacgatcttcaagacacagaaataagtccaagacagaatcgccgcacaagagccgctgaaagtgctgagattgaaccaagaaacaagcgtaataggaattaatgtgggcttttgctgacttttcaaatgcattgattagaataccgtacttttggttgccacagatagattttctatttataaatgcccaaggaaagatgctaaattctaaatattacggttagctgatattcattcttttctgcttttccagaggggaaaaatgttacaaaatatccttacttggtcagttgcctcctgcctctaaaacatctctctctaaaaatactgacatttcacacaggtaccagctttgcagaggaggtagactctttggcactttggcacagggatttggtttggtttggtttggtttgataattaaatttcagaatgtccttaggccattctccttctcttccatggagaatccagcctcactttttggaaaggcgggatgtcagttcacatccttggtgtgtgtaagtaccgatgcacgccaccaccatgcctgtgttacagcagctccatgatggttgttgcccgaggttaatgtagttgtttgttagacctgtgtcttacacatttctcagagtaggatattagtattataatttaaagctacgacagtcacaaagtcacaataacttagaaacattgcgcatattcttctgaaatagcacttaaaaatgattagtgtcagtattttttcacttgggtcaatcaaatctgtaacactgaatccaagctattaaacaaaaagtatgcaatgaatgaattttgtaaatgaatagagagtatcagtttacaataatgttcttaaaacagtatcctctggatagttgagtatgggttagaaatcattgaaatggattggtcagaaattgctatctgtgtaaaatgtctaccagtagccagatgcttccagagttcttaatgcctctctggcatttcagagccagcatcccccaactcccacccctctgccatcacccagcccaaacacatcagctttcaaatgagatgatagtaaatgcggcaatgttaagacaagaaatttatgatttgccagattcaacatttatgacctccccttccaaagactgtctccgttgaccttgtctttttggtatgccttggggtttctgataatgtgtggagtctcattatggctgagagtttagtgttttcacagtgaagtgcagacatttgatttctttatgagttccctgtgttagaaatggctatagaaaaatttgtcataataatttcatttgcatgaaatcctgaggggtgcattaaggaaactaaaagcaccacttaccaaatctatcggcagaactgatgtgaggtaagtgagcatgtcaaacaaaataggagctcacatggatatatttatgtcactgagttgtcagaaattatgtcaaaatgaaaactgtttgtttcatgacaaattatatagtctataaattaaactggaagtaattattactttaattgcagcaaaaggagtttgtgag

SEQ ID NO: 11794 - DNA, 3043 bp, Homo sapiens
  misc_feature (3)..(3): n is a, c, g, or t
  misc_feature (8)..(8): n is a, c, g, or t
  misc_feature (10)..(10): n is a, c, g, or t
  misc_feature (12)..(12): n is a, c, g, or t
  misc_feature (15)..(16): n is a, c, g, or t
  misc_feature (21)..(23): n is a, c, g, or t
ggnctgcngncntanngcggnnncgcggggaatttcgagtggtgttggagcgccggaggctagtgggtggctgacccccagcatcctcgagagcgaccatggactccctggccgagtctcggtggcctccgggcctggcagtcatgaagacaatagatgatttgctgcggtgtggaatttgcttcgagtatttcaacattgcaatgataatacctcagtgttcacataactactgctctctctgtataagaaaatttctgtcctataaaactcagtgtccaacttgctgtgtgactgtcacagagccggatctgaaaaataaccgcatattagatgaactggtaaaaagcttgaattttgcacggaatcatctgctgcagtttgctttagagtcaccagccaaatctcctgcttcttcctcttcaaagaatcttgctgtcaaagtatatactcctgtagcctccagacagtctttaaagcaggggagcaggttaatggataatttcttgatcagagaaatgagtggttctacatcagagttgttgataaaagaaaataaaagcaaattcagccctcaaaaagaggcgagccctgctgcaaagaccaaagagacacgttctgtagaagagatcgctccagatccctcagaggctaagcgtcctgagccaccctcgacatccactttgaaacaagttactaaagtggattgtcctgtttgcggggttaacattccagaaagtcacattaataagcatttagacagctgtttatcacgcgaagagaagaaggaaagcctcagaagttctgttcacaaaaggaagccgctgcccaaaactgtatataatttgctctctgatcgtgatttaaagaaaaagctaaaagagcatggattatctattcaaggaaataaacaacagctcattaaaaggcaccaagaatttgtacacatgtacaatgcccaatgcgatgctttgcatcctaaatcagctgctgaaatagttcaagaaatcgaaaatatagagaagactaggatgcgtcttgaagctagtaaactcaatgaaagtgtaatggtttttacaaaggaccaaacagaaaaggaaatagatgaaatccacagtaaatatcgtaaaaaacataagagtgaatttcagcttctggtggatcaggctagaaaaggatacaagaaaattgctggaatgtcacaaaaaacagtaacaataacaaaagaagatgaatctacagaaaagctatcttctgtatgcatgggacaggaagataatatgacctcagtaacaaaccacttttctcaatcaaagctggactccccagaggaattggaacctgacagagaagaggattcttctagctgtattgatattcaagaagttctttcttcatcagaatcagattcatgcaatagttccagttcagacatcataagagatcttttagaagaagaggaagcctgggaagcatcacataaaaacgatcttcaagacacagaaataagtccaagacagaatcgccgcacaagagccgctgaaagtgctgagattgaaccaagaaacaagcgtaataggaattaatgtgggcttttgctgacttttcaaatgcattgattagaataccgtacttttggttgccacagatagattttctatttataaatgcccaaggaaagatgctaaattctaaatattacggttagctgatattcattcttttctgcttttccagaggggaaaaatgttacaaaatatccttacttggtcagttgcctcctgcctctaaaacatctctctctaaaaatactgacatttcacacaggtaccagctttgcagaggaggtagactctttggcactttggcacagggatttggtttggtttggtttggtttgataattaaatttcagaatgtccttaggccattctccttctcttccatggagaatccagcctcactttttggaaaggcgggatgtcagttcacatccttggtgtgtgtaagtaccgatgcacgccaccaccatgcctgtgttacagcagctccatgatggttgttgcccgaggttaatgtagttgtttgttagacctgtgtcttacacatttctcagagtaggatattagtattataatttaaagctacgacagtcacaaagtcacaataacttagaaacattgcgcatattcttctgaaatagcacttaaaaatgattagtgtcagtattttttcacttgggtcaatcaaatctgtaacactgaatccaagctattaaacaaaaagtatgcaatgaatgaattttgtaaatgaatagagagtatcagtttacaataatgttcttaaaacagtatcctctggatagttgagtatgggttagaaatcattgaaatggattggtcagaaattgctatctgtgtaaaatgtctaccagtagccagatgcttccagagttcttaatgcctctctggcatttcagagccagcatcccccaactcccacccctctgccatcacccagcccaaacacatcagctttcaaatgagatgatagtaaatgcggcaatgttaagacaagaaatttatgatttgccagattcaacatttatgacctccccttccaaagactgtctccgttgaccttgtctttttggtatgccttggggtttctgataatgtgtggagtctcattatggctgagagtttagtgttttcacagtgaagtgcagacatttgatttctttatgagttccctgtgttagaaatggctatagaaaaatttgtcataataatttcatttgcatgaaatcctgaggggtgcattaaggaaactaaaagcaccacttaccaaatctatcggcagaactgatgtgaggtaagtgagcatgtcaaacaaaataggagctcacatggatatatttatgtcactgagttgtcagaaattatgtcaaaatgaaaactgtttgtttcatgacaaattatatagtctataaattaaactggaagtaattattactttaattgcagcaaaaggagtttgtgag

SEQ ID NO: 11795 - DNA, 2411 bp, Homo sapiens
aagcgttgcagcaggaaaacttccatctcgctctcctggctttgatcctcactggacatcagaccagaggcaccgaagggagggaggatgcgagatgaccggccctttggcaacctgaccatcgacttagcagagccttcaaaagcaagccaggggctggctgcacgaccaaagaggcgccgcgcctctcgtggatgtgtgtgtgtgagtgatccagcgagtgtgtgtgcgtgtgagggtgtgtgtgtgtatgcctgtgtgcacagcacaactgtgtgcgtgtcccggtgagtgtgcctgtgcatgcgtgagtgtgtgtacgtgtgcatgtgtgtgtgagtgcgcttggttattactattattattatttttggaagaaaaatctttgaaaatctggggcaggttactgtgctcctagggtgattcttcttttgcaagaggagctgaccagggcaagctactagagccatttctcggcaagtaaagagatttttccttccagaaggagaaggatttttctccctgctctgcagccaagtgaaagagattagtccctaaacctgtgaaatcgaccagagctgtgtgattaccagggcttgagagaggactcgaaaagaaaaggagaaataaatcaaacagcctgtcagttcctttggccacgtcagaagatgtcatctcaaactaagttcaagaaagacaaagagatcattgctgaatatgaagcccaaataaaagttccagttcagacatcataagagatcttttagaagaagaggaagcctgggaagcatcacataaaaacgatcttcaagacacagaaataagtccaagacagaatcgccgcacaagagccgctgaaagtgctgagattgaaccaagaaacaagcgtaataggaattaatgtgggcttttgctgacttttcaaatgcattgattagaataccgtacttttggttgccacagatagattttctatttataaatgcccaaggaaagatgctaaattctaaatattacggttagctgatattcattcttttctgcttttccagaggggaaaaatgttacaaaatatccttacttggtcagttgcctcctgcctctaaaacatctctctctaaaaatactgacatttcacacaggtaccagctttgcagaggaggtagactctttggcactttggcacagggatttggtttggtttggtttggtttgataattaaatttcagaatgtccttaggccattctccttctcttccatggagaatccagcctcacaaaaggattctttcaacttctttattgcaagaaacagttgagttaaatgtttgtttttggaaaggcgggatgtcagttcacatccttggtgtgtgtaagtaccgatgcacgccaccaccatgcctgtgttacagcagctccatgatggttgttgcccgaggttaatgtagttgtttgttagacctgtgtcttacacatttctcagagtaggatattagtattataatttaaagctacgacagtcacaaagtcacaataacttagaaacattgcgcatattcttctgaaatagcacttaaaaatgattagtgtcagtattttttcacttgggtcaatcaaatctgtaacactgaatccaagctattaaacaaaaagtatgcaatgaatgaattttgtaaatgaatagagagtatcagtttacaataatgttcttaaaacagtatcctctggatagttgagtatgggttagaaatcattgaaatggattggtcagaaattgctatctgtgtaaaatgtctaccagtagccagatgcttccagagttcttaatgcctctctggcatttcagagccagcatcccccaactcccacccctctgccatcacccagcccaaacacatcagctttcaaatgagatgatagtaaatgcggcaatgttaagacaagaaatttatgatttgccagattcaacatttatgacctccccttccaaagactgtctccgttgaccttgtctttttggtatgccttggggtttctgataatgtgtggagtctcattatggctgagagtttagtgttttcacagtgaagtgcagacatttgatttctttatgagttccctgtgttagaaatggctatagaaaaatttgtcataataatttcatttgcatgaaatcctgaggggtgcattaaggaaactaaaagcaccacttaccaaatctatcggcagaactgatgtgaggtaagtgagcatgtcaaacaaaataggagctcacatggatatatttatgtcactgagttgtcagaaattatgtcaaaatgaaaactgtttgtttcatgacaaattatatagtctataaattaaactggaagtaattattactttaattgcagcaaaaggagtttgtgag

SEQ ID NO: 11796 - DNA, 1755 bp, Homo sapiens
  misc_feature (3)..(3): n is a, c, g, or t
  misc_feature (8)..(8): n is a, c, g, or t
  misc_feature (10)..(10): n is a, c, g, or t
  misc_feature (12)..(12): n is a, c, g, or t
  misc_feature (15)..(16): n is a, c, g, or t
  misc_feature (21)..(23): n is a, c, g, or t
ggnctgcngncntanngcggnnncgcggggaatttcgagtggtgttggagcgccggaggctagtgggtggctgacccccagcatcctcgagagcgaccatggactccctggccgagtctcggtggcctccgggcctggcagtcatgaagacaatagatgatttgctgcggtgtggaatttgcttcgagtatttcaacattgcaatgataatacctcagtgttcacataactactgctctctctgtataagaaaatttctgtcctataaaactcagtgtccaacttgctgtgtgactgtcacagagccggatctgaaaaataaccgcatattagatgaactggtaaaaagcttgaattttgcacggaatcatctgctgcagtttgctttagagtcaccagccaaatctcctgcttcttcctcttcaaagaatcttgctgtcaaagtatatactcctgtagcctccagacagtctttaaagcaggggagcaggttaatggataatttcttgatcagagaaatgagtggttctacatcagagttgttgataaaagaaaataaaagcaaattcagccctcaaaaagaggcgagccctgctgcaaagaccaaagagacacgttctgtagaagagatcgctccagatccctcagaggctaagcgtcctgagccaccctcgacatccactttgaaacaagttactaaagtggattgtcctgtttgcggggttaacattccagaaagtcacattaataagcatttagacagctgtttatcacgcgaagagaagaaggaaagcctcagaagttctgttcacaaaaggaagccgctgcccaaaactgtatataatttgctctctgatcgtgatttaaagaaaaagctaaaagagcatggattatctattcaaggaaataaacaacagctcattaaaaggcaccaagaatttgtacacatgtacaatgcccaatgcgatgctttgcatcctaaatcagctgctgaaatagttcaagaaatcgaaaatatagagaagactaggatgcgtcttgaagctagtaaactcaatgaaagtgtaatggtttttacaaaggaccaaacagaaaaggaaatagatgaaatccacagtaaatatcgtaaaaaacataagagtgaatttcagcttctggtggatcaggctagaaaaggatacaagaaaattgctggaatgtcacaaaaaacagtaacaataacaaaagaagatgaatctacagaaaagctatcttctgtatgcatgggacaggaagataatatgacctcagtaacaaaccacttttctcaatcaaagctggactccccagaggaattggaacctgacagagaagaggattcttctagctgtattgatattcaagaagttctttcttcatcagaatcagattcatgcaatagttccagttcagacatcataagagatcttttagaagaagaggaagcctgggaagcatcacataagctctacttctccaaaagacgttacatattccaaggatcctgcgtctcaacaaaccctttcttctgcaaaagaacagcctgcttttattccaagctctgagattccttataggaagctgtttctctccagttatgccatgttatgccttaacctgggccaacagtgcctacacacggagaatgcaatggttgaggccaattcattaacagggattgtttagccacatccgttgttaattgacaacatgtctatggaattagaagcctcgtgt

SEQ ID NO: 11797 - DNA, 1763 bp, Homo sapiens
  misc_feature (3)..(3): n is a, c, g, or t
  misc_feature (8)..(8): n is a, c, g, or t
  misc_feature (10)..(10): n is a, c, g, or t
  misc_feature (12)..(12): n is a, c, g, or t
  misc_feature (15)..(16): n is a, c, g, or t
  misc_feature (21)..(23): n is a, c, g, or t
ggnctgcngncntanngcggnnncgcggggaatttcgagtggtgttggagcgccggaggctagtgggtggctgacccccagcatcctcgagagcgaccatggactccctggccgagtctcggtggcctccgggcctggcagtcatgaagacaatagatgatttgctgcggtgtggaatttgcttcgagtatttcaacattgcaatgataatacctcagtgttcacataactactgctctctctgtataagaaaatttctgtcctataaaactcagtgtccaacttgctgtgtgactgtcacagagccggatctgaaaaataaccgcatattagatgaactggtaaaaagcttgaattttgcacggaatcatctgctgcagtttgctttagagtcaccagccaaatctcctgcttcttcctcttcaaagaatcttgctgtcaaagtatatactcctgtagcctccagacagtctttaaagcaggggagcaggttaatggataatttcttgatcagagaaatgagtggttctacatcagagttgttgataaaagaaaataaaagcaaattcagccctcaaaaagaggcgagccctgctgcaaagaccaaagagacacgttctgtagaagagatcgctccagatccctcagaggctaagcgtcctgagccaccctcgacatccactttgaaacaagttactaaagtggattgtcctgtttgcggggttaacattccagaaagtcacattaataagcatttagacagctgtttatcacgcgaagagaagaaggaaagcctcagaagttctgttcacaaaaggaagccgctgcccaaaactgtatataatttgctctctgatcgtgatttaaagaaaaagctaaaagagcatggattatctattcaaggaaataaacaacagctcattaaaaggcaccaagaatttgtacacatgtacaatgcccaatgcgatgctttgcatcctaaatcagctgctgaaatagttcaagaaatcgaaaatatagagaagactaggatgcgtcttgaagctagtaaactcaatgaaagtgtaatggtttttacaaaggaccaaacagaaaaggaaatagatgaaatccacagtaaatatcgtaaaaaacataagagtgaatttcagcttctggtggatcaggctagaaaaggatacaagaaaattgctggaatgtcacaaaaaacagtaacaataacaaaagaagatgaatctacagaaaagctatcttctgtatgcatgggacaggaagataatatgacctcagtaacaaaccacttttctcaatcaaagctggactccccagaggaattggaacctgacagagaagaggattcttctagctgtattgatattcaagaagttctttcttcatcagaatcagattcatgcaatagttccagttcagacatcataagagatcttttagaagaagaggaagcctgggaagcatcacataagtgagttctcataatcatgaaataagcatgcactttgacctgagaaattatacttctatgcagctgattttcaaacaaaattatatttgtgctttctggtttaaagaagtagtaatcctcatgcaaggtaaagattttcagtttactacttgtttctatatatttctgctaagaaatggaatcctatgtaataactgtagttatgtatcagatgttatttctgtatggataaattgttcttatgggcaattaatacagtcatgcatcacttaacaatggg

SEQ ID NO: 11798 - DNA, 1744 bp, Homo sapiens
  misc_feature (3)..(3): n is a, c, g, or t
  misc_feature (8)..(8): n is a, c, g, or t
  misc_feature (10)..(10): n is a, c, g, or t
  misc_feature (12)..(12): n is a, c, g, or t
  misc_feature (15)..(16): n is a, c, g, or t
  misc_feature (21)..(23): n is a, c, g, or t
ggnctgcngncntanngcggnnncgcggggaatttcgagtggtgttggagcgccggaggctagtgggtggctgacccccagcatcctcgagagcgaccatggactccctggccgagtctcggtggcctccgggcctggcagtcatgaagacaatagatgatttgctgcggtgtggaatttgcttcgagtatttcaacattgcaatgataatacctcagtgttcacataactactgctctctctgtataagaaaatttctgtcctataaaactcagtgtccaacttgctgtgtgactgtcacagagccggatctgaaaaataaccgcatattagatgaactggtaaaaagcttgaattttgcacggaatcatctgctgcagtttgctttagagtcaccagccaaatctcctgcttcttcctcttcaaagaatcttgctgtcaaagtatatactcctgtagcctccagacagtctttaaagcaggggagcaggttaatggataatttcttgatcagagaaatgagtggttctacatcagagttgttgataaaagaaaataaaagcaaattcagccctcaaaaagaggcgagccctgctgcaaagaccaaagagacacgttctgtagaagagatcgctccagatccctcagaggctaagcgtcctgagccaccctcgacatccactttgaaacaagttactaaagtggattgtcctgtttgcggggttaacattccagaaagtcacattaataagcatttagacagctgtttatcacgcgaagagaagaaggaaagcctcagaagttctgttcacaaaaggaagccgctgcccaaaactgtatataatttgctctctgatcgtgatttaaagaaaaagctaaaagagcatggattatctattcaaggaaataaacaacagctcattaaaaggcaccaagaatttgtacacatgtacaatgcccaatgcgatgctttgcatcctaaatcagctgctgaaatagttcaagaaatcgaaaatatagagaagactaggatgcgtcttgaagctagtaaactcaatgaaagtgtaatggtttttacaaaggaccaaacagaaaaggaaatagatgaaatccacagtaaatatcgtaaaaaacataagagtgaatttcagcttctggtggatcaggctagaaaaggatacaagaaaattgctggaatgtcacaaaaaacagtaacaataacaaaagaagatgaatctacagaaaagctatcttctgtatgcatgggacaggaagataatatgacctcagtaacaaaccacttttctcaatcaaagctggactccccagaggaattggaacctgacagagaagaggattcttctagctgtattgatattcaagaagttctttcttcatcagaatcagattcatgcaatagttccagttcagacatcataagagatcttttagaagaagaggaagcctgggaagcatcacataaaaacgatcttcaagacacagaaataagtccaagacagaatcgccgcacaagagggtcataagcaagccaaacttatgaggaagatgaagccataagtaagcagaacctataaataggctaaaaatatgagatggagggctgggtgcggtggctcatgtctgtaatctcagcactttgggaggctgaggtgggcagatcacttgaggccaggaattcaagaccagcctggctaacatggtgaaaccccgtctgtactaaaaa

SEQ ID NO: 11799 - DNA, 1567 bp, Homo sapiens
cgcgccgggggtttctgggaaaaggcttgtgaacggcgtttctgcgtctgccgtggacagcgaagctgctgcggttcctgagccggaggagtgcctgtgaagaaaacggggtattgccctgaggcttatattctgcctcagttgtcttttcttgaaatattataaatcagaatgtctgcacagtcagtggaagaagattcaatacttatcatcccaactccagatgaagaggaaaaaattctgagagtgaagttggaggaggatcctgatggcgaagagggatcaagtatcccctggaaccatctcccagacccagagattttccgacagcgattcaggcagtttggataccaggattcacctgggccccgtgaggctgtgagccagctccgagaactttgccgtctgtggctcaggccagagacgcacacaaaagaacaaatcttggagctggtagtgctggagcagtttgttgccatcctacccaaagagctacagacttgggttcgagatcatcatccagagaatggagaggaggcagtgacagtgctggaggatttggagagtgaacttgatgaccctggacaaccggtttctctccgtcgacgaaaacgggaagtactagtagaagacatggtatctcaagaagaagctcagggattaccaagttctgagcttgatgctgtggagaaccagctcaagtgggcatcctgggagctccattccctaaggcactgtgatgatgatggtaggactgaaaatggagcactagctccaaagcaggagcttccttcagcattagaatcccatgaagttcctggcactctcagtatgggtgttcctcaaatttttaaatatggagaaacctgtttccccaagggcaggtttgaaagaaagagaaatccctctcgaaagaaacaacatatatgtgatgaatgtggaaaacacttcagtcagggctcagcccttattcttcatcaaagaattcacagtggggagaaaccttatggatgtgttgagtgtgggaaagcattcagccgaagttccattcttgtgcaacaccagagagtccacactggagaaaaaccttacaaatgtcttgaatgtgggaaagcctttagccagaattcggggcttattaatcatcagagaatccatactggggagaaaccttatgaatgcgttcagtgtgggaaatcgtatagtcaaagctcaaatctttttagacatcagagaagacacaatgcagaaaaacttctgaatgttgtgaaagtttaagaaattgaaaaaaaaaaaagaatcagcactcaggtctttttcttcagaaatgaagacaaaatttaaaatatgaaatgatgcagaatagttttttccctattgactgtcagaaaatccactgggaaatgtaaaaatcttcactcaccattatgatatttatcttgaaagaaatggtgtcatacctgcctagaaactgaaattttaaacttaattcaggtcttaatgcctaaattttccatgtgatgtttatagtctgtattacttctccaaataatgaactacctgattc

SEQ ID NO: 11800 - DNA, 936 bp, Homo sapiens
cgcgccgggggtttctgggaaaaggcttgtgaacggcgtttctgcgtctgccgtggacagcgaagctgctgcggttcctgagccggaggagtgcctgtgaagaaaacggggtattgccctgaggcttatattctgcctcagttgtcttttcttgaaatattataaatcagaatgtctgcacagtcagtggaagaagattcaatacttatcatcccaactccagatgaagaggaaaaaattctgagagtgaagttggaggaggatcctgatggcgaagagggatcaagtatcccctggaaccatctcccagacccagagattttccgacagcgattcaggcagtttggataccaggattcacctgggccccgtgaggctgtgagccagctccgagaactttgccgtctgtggctcaggccagagacgcacacaaaagaacaaatcttggagctggtagtgctggagcagtttgttgccatcctacccaaagagctacagacttgggttcgagatcatcatccagagaatggagaggaggcagtgacagtgctggaggatttggagagtgaacttgatgaccctggacaaccggtttctctccgtcgacgaaaacgggaagtactagtagaagacatggtatctcaagaagaagctcagggattaccaagttctgagcttgatgctgtggagaaccagctcaagtgggcatcctgggagctccattccctaaggcactgtgtaatcattccttgaagtagttggagatggtgctggtatgccactgaatgaggtctgagcaggttttcttcacatctgaggggacagtgccagccagtcaacttttggggtggggctgaagtctgctgaaaatctgcagttttacatgtttcatgggacattcttctgtgcaataaagtttgagaagtatcattcttg

SEQ ID NO: 11801 - DNA, 448 bp, Homo sapiens
cccccgggctgccaggaattcggcacgagctgaggagaaactctctccacatggcacaaattcaggcttacatggtccttggttcctgggatctccatgtaagcctgaatttgtgccatgtggagagagtctgtctgaggagaaactcggatgctagcagaaatggaaagagaactaagttctgatgtcatttttctggaggccctagatccagctgtgcctaaagcctgccctacctccggactttaaagttttgtgagccaataaagtccctttcttgtttaagataattgaattgagtttctgttctgattaatataggttatttgtattttcttattgatttgtagaaaacctttgtaattttaaattctagactttatgcactatataagttaataaaattagcatggccttccatgatttggcctgtgtcaacttttgccat

SEQ ID NO: 11802 - DNA, 386 bp, Homo sapiens
gcggccgcctactactactaaatttgcggccgcgtcgacagaagattcaatacttatcatcccaactccagatgaagaggaaaaaattctgagagtgaagttggaggaggatcctgatggcgaagagggatcaagtatcccctggaaccatctcccagacccagagattttccgacagcgattcaggcagtttggataccaggattcacctgggccccgtgaggctgtgagccagctccgagaactttgccgtctgtggctcaggccagagacgcacacaaaagaacaaatcttggagctggtagtgctggagcagtttgttgccatcctacccaaagagctacagactgtcgacgcggccgcgaatttagtagtagtagtcgacc

SEQ ID NO: 11803 - DNA, 177 bp, Homo sapiens
gaaacacgctatagaccactgattacagaattcagagcacaggtaccattgaagatgttcttttttcataactatatactattccattgcatgaatattctgtaatttatttaatcccctatggattgataattaggttccactctgggcagctaactcagctcaaggtgggttgta

SEQ ID NO: 11804 - DNA, 6310 bp, Homo sapiens
cgcgccgggggtttctgggaaaaggcttgtgaacggcgtttctgcgtctgccgtggacagcgaagctgctgcggttcctgagccggaggagtgcctgtgaagaaaacggggtattgccctgaggcttatattctgcctcagttgtcttttcttgaaatattataaatcagaatgtctgcacagtcagtggaagaagattcaatacttatcatcccaactccagatgaagaggaaaaaattctgagagtgaagttggaggaggatcctgatggcgaagagggatcaagtatcccctggaaccatctcccagacccagagattttccgacagcgattcaggcagtttggataccaggattcacctgggccccgtgaggctgtgagccagctccgagaactttgccgtctgtggctcaggccagagacgcacacaaaagaacaaatcttggagctggtagtgctggagcagtttgttgccatcctacccaaagagctacagacttgggttcgagatcatcatccagagaatggagaggaggcagtgacagtgctggaggatttggagagtgaacttgatgaccctggacaaccggtttctctccgtcgacgaaaacgggaagtactagtagaagacatggtatctcaagaagaagctcagggattaccaagttctgagcttgatgctgtggagaaccagctcaagtgggcatcctgggagctccattccctaaggcactgtgatgatgatggtaggactgaaaatggagcactagctccaaagcaggagcttccttcagcattagaatcccatgaagttcctggcactctcagtatgggtgttcctcaaatttttaaatatggagaaacctgtttccccaagggcaggtttgaaagaaagagaaatccctctcgaaagaaacaacatatatgtgatgaatgtggaaaacacttcagtcagggctcagcccttattcttcatcaaagaattcacagtggggagaaaccttatggatgtgttgagtgtgggaaagcattcagccgaagttccattcttgtgcaacaccagagagtccacactggagaaaaaccttacaaatgtcttgaatgtgggaaagcctttagccagaattcggggcttattaatcatcagagaatccatactggggagaaaccttatgaatgcgttcagtgtgggaaatcgtatagtcaaagctcaaatctttttagacatcagagaagacacaatgcagaaaaacttctgaatgttgtgaaagtttaagaaattgaaaaaaaaaaaagaatcagcactcaggtctttttcttcagaaatgaagacaaaatttaaaatatgaaatgatgcagaatagttttttccctattgactgtcagaaaatccactgggaaatgtaaaaatcttcactcaccattatgatatttatcttgaaagaaatggtgtcatacctgcctagaaactgaaattttaaacttaattcaggtcttaatgcctaaattttccatgtgatgtttatagtctgtattacttctccaaataatgaactacctgattcattgtccctttcttgaaagtttcttttttaagacaaatacattatttctgcattgatcattgaaatgttctttatatggatacattcccttatatattaaaaggcaacaggaattacaaagtctgaaaaccattttaaaccatcttttaaaaatttacccttatttccttttacctaatttgaatatgcatttgagaaaataagaggataaaggatggctaagagcctcaaaatgaaccataagatctcagataagaagtgatggtgataaaacatcaaaaagtgaatggaacaccttgattggggaagatatgcaaatactttgatctaagaattgaaatgtatcaagaatttatattttgcctgcaggaaaattcaaaagctactcatcctctctataatttggagtcatcttactaatgaaaataatgttttcccatatattattaaaaagcatacagtctaaataataaacagttgtaaaataatgaaggtagaaattataacactagggaaaaatttgtagcggatggcagtgttgaaggcaaatgtaaacataagggtaatggtctgtcatggcttttagaaaaagatgatagagttcatcattattttgccttcatctttgttaaggacagaaaattccctgacaggtgggcaagtatcaggttacctattttttattcctttggtacaaaagggttgaacgtcaggctaaaaaagcagccatgcatttattattaagcattttctaccgacaaggcactgtgctaggtactgtaatcctaccataagtaggtaggtatttcttccactgtaaatcataggggtttgctgttttatgtgagttagcctcttccccttgtctgagcattcctcaggggaggtcacctgtgaggttcccagaactgtagttttttttaccagggtgttgtatttggagggggaggaggactcggctcaaaagagctagctggctctccagtgttcagaggtgagtccacgatactcttaccacaatttggaagtttgtgaatctttttaaagaactaatcaatctctaatagcattgaggttgtacctacatattaagttgaatggactgttctatttaaaaaataaacaactagacaattaactagtttattaacctatcacaattgaatttttttttaattttcagtcttaacacattttttaaaatgtattaaagtaatacattgtagtagtaggattatatactccttggctgagaattccaagtactgtggttctactgtttagtggaaaactctggaagttaaaatatagaatatgagaggaggcttttttataatgggcatcattgtgtggaaaatgacccatgtgaatacaaatatttcctagttcagagattttggttatatctggtgcttggatcaagtttaaaaatggaaggtgagattttgcatgagcctattaaaaagcatagtaataaatgcaaggccagctggtggaaaagtgaggcagaatggagcttgtttataggttttctgataacaattataaaaaatgtgctttatagattaagatttattgaagtataaatatgtagtaatgatataatgtattttaagttatacaagaaaatgtagggacttttgtttgggtctttttctctttgtggctgaggggaaacaagtcagtgtccaataaagctgtaaactcctctgctctaagataaatgatgtgatttatttatttataactggcttctttccaagtaggttttcaggtggcatatttggaagacggctggaatgacagaattcttgtatcagagtaggtaagaagggagcaacctctcaatggctattatgtcatgctttttaagatcgtatgcggttcctatatacaaggaagcttccctgtggtagatttgtcataaatgccaaagatatttggtaatgtgagtgtagaaaaagtagtatgagggttggcaaatactgtttttgtcttggcagctctaatatctgcattgttcagaaaggattctgaggctaaggcaaagctctgtgggaaaaagggactggaccaaaaaaaaactggatggtggcacacaagaagaggaaatgatgagatgtgtactttctatctctggttaggcttagtccccactagacaaattgattttaaatactatgtagtgatttttaaattccatccacacattcattacccacacagataatcatagaaatttgggggagtgcctagcttctgatgaagtggtgatatggcagttgccaagcagtggcatcgccagagtatctgtttggttagcaaatgagcagtcattttaggtcatgcagattgctgatatctgcccagtagccactgagcatttgctggttttttcttctggctttcttggaggttaagctctctgtagtcatacccagttggtacttgatctttagcaatatgtctcatattcatgtaaattgaagggagggttacatgtactgaaataatctgcatgctaggcattggcttagacaccgtacctatctcacttagatttgtggactaggaaagcaagattcagagatcatgtgacttgcatgtggcctagagataaaattcaaatctggttctgtagactccagggacatattcaccatgccatgggtggtggctattaaaccttgataaatttgtgtttatggttaacaaatgtgaaagctattaaacattgctggtttgaattttttacagtgcagaaatgtaaaatgaaaaaggatatttcctttcacagtgttaccgagaagtcatgataatttcgtttgttcttccagatttaggcatatacttatttaatcaataatgtgttaacagctgacacctgtggttgctgtgacaggcactatttgaagtgctttatcatggattaactcttaatcctcagctaccgtataaagtaggacataaccccatttcacatgcactacactgagacttgcctcctctccccccacattgaagatgttcttttttcataactatatactattccattgcatgaatattctgtaatttatttaatcccctatggattgataattaggttcattatagatagaagtgtaattaacattcctgtacatgtattttgctacttgtgtgggtatttctgtaggatgaataactagaaatttattggatcaggtttcacatttgcagttttgaaaactactaccaaaaagatttcaccaatttacaactccatcattagtaagaatgcctgtttgcctatagtctgccaaccctgaatccttaaaaatttttgccaatctggtaggcaaaatttctttcttttctttgaatattaatgaggaggaacatcttttcatgtttcttggccatttgcatttcctattatgaattgcttttgcccattttcctttttttaattatgaaagtctaatgactaccttctcattgtataaaaaacacagttctttgaatagagagacccttttctccaatgctaccaatcacattccacttaccacagtttaacatacatcctctagtcacctttccgtacgaatatacatacacataaaaacactttttacataaataggatctcatattctgtagctttttaaaattttggtctcaaaaaaagataacaggtctttaaatttctttaatggttgaatatgattaaatactatgaaaatgccattatttattcccttaatttttttcctctcgctattacattgccaaagtaaacatcctattcagatgtctttgtgcatgtgtgtgaatatttctttagtctggagtccagtaaggtggatttttggatcaaagggtttgttctctgtccaccttcagtcttcccaaaggccttcataactgtattttcaccaagtgtatggagaatgttcatttccccatataaccatacctacacttgatagtttttatctgttgggcgaaaaagaaccttttcttattttgcatttccctgattataaaaaaaaatggtgagattggggttattttcatgtttattggccatttatagtttactgtggattgtttgtatcccttacctgctttctattgggttatgtgtggatatattgtttttatttgttcagcatctccttccccatcttctggtaacacaacctttatttatttgtggggaacctattccctgtggcttaggtgagcatgtgaccaggcctggcctcctgagtcccacagcttcctagccacagtgataaaagaatgggtatataacttaagccaggctaaggaaagcccttaacagaacttctgctggaactactggaaagaaggctttatggagatcccaggaaccaaggaccatgtaagcctgaatttgtgccatgtggagagagtctgtctgaggagaaactcggatgctagcagaaatggaaagagaactaagttctgatgtcatttttctggaggccctagatccagctgtgcctaaagcctgccctacctccggactttaaagttttgtgagccaataaagtccctttcttgtttaagataattgaattgagtttctgttctgattaatataggttatttgtattttcttattgatttgtagaaaacctttgtaattttaaattctagactttatgcactatataagttaataaaattagcatggccttccatgatttggcctgtgtcaacttttgccat

SEQ ID NO: 11805 - DNA, 6205 bp, Homo sapiens
cgcgccgggggtttctgggaaaaggcttgtgaacggcgtttctgcgtctgccgtggacagcgaagctgctgcggttcctgagccggaggagtgcctgtgaagaaaacggggtattgccctgaggcttatattctgcctcagttgtcttttcttgaaatattataaatcagaatgtctgcacagtcagtggaagaagattcaatacttatcatcccaactccagatgaagaggaaaaaattctgagagtgaagttggaggaggatcctgatggcgaagagggatcaagtatcccctggaaccatctcccagacccagagattttccgacagcgattcaggcagtttggataccaggattcacctgggccccgtgaggctgtgagccagctccgagaactttgccgtctgtggctcaggccagagacgcacacaaaagaacaaatcttggagctggtagtgctggagcagtttgttgccatcctacccaaagagctacagacttgggttcgagatcatcatccagagaatggagaggaggcagtgacagtgctggaggatttggagagtgaacttgatgaccctggacaaccggtttctctccgtcgacgaaaacgggaagtactagtagaagacatggtatctcaagaagaagctcagggattaccaagttctgagcttgatgctgtggagaaccagctcaagtgggcatcctgggagctccattccctaaggcactgtgatgatgatggtaggactgaaaatggagcactagctccaaagcaggagcttccttcagcattagaatcccatgaagttcctggcactctcagtatgggtgttcctcaaatttttaaatatggagaaacctgtttccccaagggcaggtttgaaagaaagagaaatccctctcgaaagaaacaacatatatgtgatgaatgtggaaaacacttcagtcagggctcagcccttattcttcatcaaagaattcacagtggggagaaaccttatggatgtgttgagtgtgggaaagcattcagccgaagttccattcttgtgcaacaccagagagtccacactggagaaaaaccttacaaatgtcttgaatgtgggaaagcctttagccagaattcggggcttattaatcatcagagaatccatactggggagaaaccttatgaatgcgttcagtgtgggaaatcgtatagtcaaagctcaaatctttttagacatcagagaagacacaatgcagaaaaacttctgaatgttgtgaaagtttaagaaattgaaaaaaaaaaaagaatcagcactcaggtctttttcttcagaaatgaagacaaaatttaaaatatgaaatgatgcagaatagttttttccctattgactgtcagaaaatccactgggaaatgtaaaaatcttcactcaccattatgatatttatcttgaaagaaatggtgtcatacctgcctagaaactgaaattttaaacttaattcaggtcttaatgcctaaattttccatgtgatgtttatagtctgtattacttctccaaataatgaactacctgattcattgtccctttcttgaaagtttcttttttaagacaaatacattatttctgcattgatcattgaaatgttctttatatggatacattcccttatatattaaaaggcaacaggaattacaaagtctgaaaaccattttaaaccatcttttaaaaatttacccttatttccttttacctaatttgaatatgcatttgagaaaataagaggataaaggatggctaagagcctcaaaatgaaccataagatctcagataagaagtgatggtgataaaacatcaaaaagtgaatggaacaccttgattggggaagatatgcaaatactttgatctaagaattgaaatgtatcaagaatttatattttgcctgcaggaaaattcaaaagctactcatcctctctataatttggagtcatcttactaatgaaaataatgttttcccatatattattaaaaagcatacagtctaaataataaacagttgtaaaataatgaaggtagaaattataacactagggaaaaatttgtagcggatggcagtgttgaaggcaaatgtaaacataagggtaatggtctgtcatggcttttagaaaaagatgatagagttcatcattattttgccttcatctttgttaaggacagaaaattccctgacaggtgggcaagtatcaggttacctattttttattcctttggtacaaaagggttgaacgtcaggctaaaaaagcagccatgcatttattattaagcattttctaccgacaaggcactgtgctaggtactgtaatcctaccataagtaggtaggtatttcttccactgtaaatcataggggtttgctgttttatgtgagttagcctcttccccttgtctgagcattcctcaggggaggtcacctgtgaggttcccagaactgtagttttttttaccagggtgttgtatttggagggggaggaggactcggctcaaaagagctagctggctctccagtgttcagaggtgagtccacgatactcttaccacaatttggaagtttgtgaatctttttaaagaactaatcaatctctaatagcattgaggttgtacctacatattaagttgaatggactgttctatttaaaaaataaacaactagacaattaactagtttattaacctatcacaattgaatttttttttaattttcagtcttaacacattttttaaaatgtattaaagtaatacattgtagtagtaggattatatactccttggctgagaattccaagtactgtggttctactgtttagtggaaaactctggaagttaaaatatagaatatgagaggaggcttttttataatgggcatcattgtgtggaaaatgacccatgtgaatacaaatatttcctagttcagagattttggttatatctggtgcttggatcaagtttaaaaatggaaggtgagattttgcatgagcctattaaaaagcatagtaataaatgcaaggccagctggtggaaaagtgaggcagaatggagcttgtttataggttttctgataacaattataaaaaatgtgctttatagattaagatttattgaagtataaatatgtagtaatgatataatgtattttaagttatacaagaaaatgtagggacttttgtttgggtctttttctctttgtggctgaggggaaacaagtcagtgtccaataaagctgtaaactcctctgctctaagataaatgatgtgatttatttatttataactggcttctttccaagtaggttttcaggtggcatatttggaagacggctggaatgacagaattcttgtatcagagtaggtaagaagggagcaacctctcaatggctattatgtcatgctttttaagatcgtatgcggttcctatatacaaggaagcttccctgtggtagatttgtcataaatgccaaagatatttggtaatgtgagtgtagaaaaagtagtatgagggttggcaaatactgtttttgtcttggcagctctaatatctgcattgttcagaaaggattctgaggctaaggcaaagctctgtgggaaaaagggactggaccaaaaaaaaactggatggtggcacacaagaagaggaaatgatgagatgtgtactttctatctctggttaggcttagtccccactagacaaattgattttaaatactatgtagtgatttttaaattccatccacacattcattacccacacagataatcatagaaatttgggggagtgcctagcttctgatgaagtggtgatatggcagttgccaagcagtggcatcgccagagtatctgtttggttagcaaatgagcagtcattttaggtcatgcagattgctgatatctgcccagtagccactgagcatttgctggttttttcttctggctttcttggaggttaagctctctgtagtcatacccagttggtacttgatctttagcaatatgtctcatattcatgtaaattgaagggagggttacatgtactgaaataatctgcatgctaggcattggcttagacaccgtacctatctcacttagatttgtggactaggaaagcaagattcagagatcatgtgacttgcatgtggcctagagataaaattcaaatctggttctgtagactccagggacatattcaccatgccatgggtggtggctattaaaccttgataaatttgtgtttatggttaacaaatgtgaaagctattaaacattgctggtttgaattttttacagtgcagaaatgtaaaatgaaaaaggatatttcctttcacagtgttaccgagaagtcatgataatttcgtttgttcttccagatttaggcatatacttatttaatcaataatgtgttaacagctgacacctgtggttgctgtgacaggcactatttgaagtgctttatcatggattaactcttaatcctcagctaccgtataaagtaggacataaccccatttcacatgcactacactgagacttgcctcctctccccccacattgaagatgttcttttttcataactatatactattccattgcatgaatattctgtaatttatttaatcccctatggattgataattaggttcattatagatagaagtgtaattaacattcctgtacatgtattttgctacttgtgtgggtatttctgtaggatgaataactagaaatttattggatcaggtttcacatttgcagttttgaaaactactaccaaaaagatttcaccaatttacaactccatcattagtaagaatgcctgtttgcctatagtctgccaaccctgaatccttaaaaatttttgccaatctggtaggcaaaatttctttcttttctttgaatattaatgaggaggaacatcttttcatgtttcttggccatttgcatttcctattatgaattgcttttgcccattttcctttttttaattatgaaagtctaatgactaccttctcattgtataaaaaacacagttctttgaatagagagacccttttctccaatgctaccaatcacattccacttaccacagtttaacatacatcctctagtcacctttccgtacgaatatacatacacataaaaacactttttacataaataggatctcatattctgtagctttttaaaattttggtctcaaaaaaagataacaggtctttaaatttctttaatggttgaatatgattaaatactatgaaaatgccattatttattcccttaatttttttcctctcgctattacattgccaaagtaaacatcctattcagatgtctttgtgcatgtgtgtgaatatttctttagtctggagtccagtaaggtggatttttggatcaaagggtttgttctctgtccaccttcagtcttcccaaaggccttcataactgtattttcaccaagtgtatggagaatgttcatttccccatataaccatacctacacttgatagtttttatctgttgggcgaaaaagaaccttttcttattttgcatttccctgattataaaaaaaaatggtgagattggggttattttcatgtttattggccatttatagtttactgtggattgtttgtatcccttacctgctttctattgggttatgtgtggatatattgtttttatttgttcagcatctccttccccatcttctggtaacacaacctttatttatttgtggggaacctattccctgtggcttaggtgagcatgtgaccaggcctggcctcctgagtcccacagcttcctagccacagtgataaaagaatgggtatataacttaagccaggctaaggaaagcccttaacagaacttctgctggaactactggaaagaaggctttatggagatcccaggaaccaaggaccatgtaagcctgaatttgtgccatgtggagagagtctgtctgaggagaaactcggatgctagcagaaatggaaagagaactaagttctgatgtcatttttctggaggccctagatccagctgtgcctaaagcctgccctacctccggactttaaagttttgtgagccaataaagtccctttcttgtttaagataattgaattgagtttctgttctgatacggtttagagggatcctctagaacgcctc

SEQ ID NO: 11806 - DNA, 6147 bp, Homo sapiens
cgcgccgggggtttctgggaaaaggcttgtgaacggcgtttctgcgtctgccgtggacagcgaagctgctgcggttcctgagccggaggagtgcctgtgaagaaaacggggtattgccctgaggcttatattctgcctcagttgtcttttcttgaaatattataaatcagaatgtctgcacagtcagtggaagaagattcaatacttatcatcccaactccagatgaagaggaaaaaattctgagagtgaagttggaggaggatcctgatggcgaagagggatcaagtatcccctggaaccatctcccagacccagagattttccgacagcgattcaggcagtttggataccaggattcacctgggccccgtgaggctgtgagccagctccgagaactttgccgtctgtggctcaggccagagacgcacacaaaagaacaaatcttggagctggtagtgctggagcagtttgttgccatcctacccaaagagctacagacttgggttcgagatcatcatccagagaatggagaggaggcagtgacagtgctggaggatttggagagtgaacttgatgaccctggacaaccggtttctctccgtcgacgaaaacgggaagtactagtagaagacatggtatctcaagaagaagctcagggattaccaagttctgagcttgatgctgtggagaaccagctcaagtgggcatcctgggagctccattccctaaggcactgtgatgatgatggtaggactgaaaatggagcactagctccaaagcaggagcttccttcagcattagaatcccatgaagttcctggcactctcagtatgggtgttcctcaaatttttaaatatggagaaacctgtttccccaagggcaggtttgaaagaaagagaaatccctctcgaaagaaacaacatatatgtgatgaatgtggaaaacacttcagtcagggctcagcccttattcttcatcaaagaattcacagtggggagaaaccttatggatgtgttgagtgtgggaaagcattcagccgaagttccattcttgtgcaacaccagagagtccacactggagaaaaaccttacaaatgtcttgaatgtgggaaagcctttagccagaattcggggcttattaatcatcagagaatccatactggggagaaaccttatgaatgcgttcagtgtgggaaatcgtatagtcaaagctcaaatctttttagacatcagagaagacacaatgcagaaaaacttctgaatgttgtgaaagtttaagaaattgaaaaaaaaaaaagaatcagcactcaggtctttttcttcagaaatgaagacaaaatttaaaatatgaaatgatgcagaatagttttttccctattgactgtcagaaaatccactgggaaatgtaaaaatcttcactcaccattatgatatttatcttgaaagaaatggtgtcatacctgcctagaaactgaaattttaaacttaattcaggtcttaatgcctaaattttccatgtgatgtttatagtctgtattacttctccaaataatgaactacctgattcattgtccctttcttgaaagtttcttttttaagacaaatacattatttctgcattgatcattgaaatgttctttatatggatacattcccttatatattaaaaggcaacaggaattacaaagtctgaaaaccattttaaaccatcttttaaaaatttacccttatttccttttacctaatttgaatatgcatttgagaaaataagaggataaaggatggctaagagcctcaaaatgaaccataagatctcagataagaagtgatggtgataaaacatcaaaaagtgaatggaacaccttgattggggaagatatgcaaatactttgatctaagaattgaaatgtatcaagaatttatattttgcctgcaggaaaattcaaaagctactcatcctctctataatttggagtcatcttactaatgaaaataatgttttcccatatattattaaaaagcatacagtctaaataataaacagttgtaaaataatgaaggtagaaattataacactagggaaaaatttgtagcggatggcagtgttgaaggcaaatgtaaacataagggtaatggtctgtcatggcttttagaaaaagatgatagagttcatcattattttgccttcatctttgttaaggacagaaaattccctgacaggtgggcaagtatcaggttacctattttttattcctttggtacaaaagggttgaacgtcaggctaaaaaagcagccatgcatttattattaagcattttctaccgacaaggcactgtgctaggtactgtaatcctaccataagtaggtaggtatttcttccactgtaaatcataggggtttgctgttttatgtgagttagcctcttccccttgtctgagcattcctcaggggaggtcacctgtgaggttcccagaactgtagttttttttaccagggtgttgtatttggagggggaggaggactcggctcaaaagagctagctggctctccagtgttcagaggtgagtccacgatactcttaccacaatttggaagtttgtgaatctttttaaagaactaatcaatctctaatagcattgaggttgtacctacatattaagttgaatggactgttctatttaaaaaataaacaactagacaattaactagtttattaacctatcacaattgaatttttttttaattttcagtcttaacacattttttaaaatgtattaaagtaatacattgtagtagtaggattatatactccttggctgagaattccaagtactgtggttctactgtttagtggaaaactctggaagttaaaatatagaatatgagaggaggcttttttataatgggcatcattgtgtggaaaatgacccatgtgaatacaaatatttcctagttcagagattttggttatatctggtgcttggatcaagtttaaaaatggaaggtgagattttgcatgagcctattaaaaagcatagtaataaatgcaaggccagctggtggaaaagtgaggcagaatggagcttgtttataggttttctgataacaattataaaaaatgtgctttatagattaagatttattgaagtataaatatgtagtaatgatataatgtattttaagttatacaagaaaatgtagggacttttgtttgggtctttttctctttgtggctgaggggaaacaagtcagtgtccaataaagctgtaaactcctctgctctaagataaatgatgtgatttatttatttataactggcttctttccaagtaggttttcaggtggcatatttggaagacggctggaatgacagaattcttgtatcagagtaggtaagaagggagcaacctctcaatggctattatgtcatgctttttaagatcgtatgcggttcctatatacaaggaagcttccctgtggtagatttgtcataaatgccaaagatatttggtaatgtgagtgtagaaaaagtagtatgagggttggcaaatactgtttttgtcttggcagctctaatatctgcattgttcagaaaggattctgaggctaaggcaaagctctgtgggaaaaagggactggaccaaaaaaaaactggatggtggcacacaagaagaggaaatgatgagatgtgtactttctatctctggttaggcttagtccccactagacaaattgattttaaatactatgtagtgatttttaaattccatccacacattcattacccacacagataatcatagaaatttgggggagtgcctagcttctgatgaagtggtgatatggcagttgccaagcagtggcatcgccagagtatctgtttggttagcaaatgagcagtcattttaggtcatgcagattgctgatatctgcccagtagccactgagcatttgctggttttttcttctggctttcttggaggttaagctctctgtagtcatacccagttggtacttgatctttagcaatatgtctcatattcatgtaaattgaagggagggttacatgtactgaaataatctgcatgctaggcattggcttagacaccgtacctatctcacttagatttgtggactaggaaagcaagattcagagatcatgtgacttgcatgtggcctagagataaaattcaaatctggttctgtagactccagggacatattcaccatgccatgggtggtggctattaaaccttgataaatttgtgtttatggttaacaaatgtgaaagctattaaacattgctggtttgaattttttacagtgcagaaatgtaaaatgaaaaaggatatttcctttcacagtgttaccgagaagtcatgataatttcgtttgttcttccagatttaggcatatacttatttaatcaataatgtgttaacagctgacacctgtggttgctgtgacaggcactatttgaagtgctttatcatggattaactcttaatcctcagctaccgtataaagtaggacataaccccatttcacatgcactacactgagacttgcctcctctccccccacattgaagatgttcttttttcataactatatactattccattgcatgaatattctgtaatttatttaatcccctatggattgataattaggttcattatagatagaagtgtaattaacattcctgtacatgtattttgctacttgtgtgggtatttctgtaggatgaataactagaaatttattggatcaggtttcacatttgcagttttgaaaactactaccaaaaagatttcaccaatttacaactccatcattagtaagaatgcctgtttgcctatagtctgccaaccctgaatccttaaaaatttttgccaatctggtaggcaaaatttctttcttttctttgaatattaatgaggaggaacatcttttcatgtttcttggccatttgcatttcctattatgaattgcttttgcccattttcctttttttaattatgaaagtctaatgactaccttctcattgtataaaaaacacagttctttgaatagagagacccttttctccaatgctaccaatcacattccacttaccacagtttaacatacatcctctagtcacctttccgtacgaatatacatacacataaaaacactttttacataaataggatctcatattctgtagctttttaaaattttggtctcaaaaaaagataacaggtctttaaatttctttaatggttgaatatgattaaatactatgaaaatgccattatttattcccttaatttttttcctctcgctattacattgccaaagtaaacatcctattcagatgtctttgtgcatgtgtgtgaatatttctttagtctggagtccagtaaggtggatttttggatcaaagggtttgttctctgtccaccttcagtcttcccaaaggccttcataactgtattttcaccaagtgtatggagaatgttcatttccccatataaccatacctacacttgatagtttttatctgttgggcgaaaaagaaccttttcttattttgcatttccctgattataaaaaaaaatggtgagattggggttattttcatgtttattggccatttatagtttactgtggattgtttgtatcccttacctgctttctattgggttatgtgtggatatattgtttttatttgttcagcatctccttccccatcttctggtaacacaacctttatttatttgtggggaacctattccctgtggcttaggtgagcatgtgaccaggcctggcctcctgagtcccacagcttcctagccacagtgataaaagaatgggtatataacttaagccaggctaaggaaagcccttaacagaacttctgctggaactactggaaagaaggctttatggagatcccaggaaccaaggaccatgtaagcctgaatttgtgccatgtggagagagtctgtctgaggagaaactcggatgctagcagaaatggaaagagaactaagttctgatgtcatttttctggaggccctagatccagctgtgcctaaagcctgccctacctccggactttaaagttttgtgagccaataaagtccctttcttgtttaa

SEQ ID NO: 11807 - DNA, 6327 bp, Homo sapiens
cgcgccgggggtttctgggaaaaggcttgtgaacggcgtttctgcgtctgccgtggacagcgaagctgctgcggttcctgagccggaggagtgcctgtgaagaaaacggggtattgccctgaggcttatattctgcctcagttgtcttttcttgaaatattataaatcagaatgtctgcacagtcagtggaagaagattcaatacttatcatcccaactccagatgaagaggaaaaaattctgagagtgaagttggaggaggatcctgatggcgaagagggatcaagtatcccctggaaccatctcccagacccagagattttccgacagcgattcaggcagtttggataccaggattcacctgggccccgtgaggctgtgagccagctccgagaactttgccgtctgtggctcaggccagagacgcacacaaaagaacaaatcttggagctggtagtgctggagcagtttgttgccatcctacccaaagagctacagacttgggttcgagatcatcatccagagaatggagaggaggcagtgacagtgctggaggatttggagagtgaacttgatgaccctggacaaccggtttctctccgtcgacgaaaacgggaagtactagtagaagacatggtatctcaagaagaagctcagggattaccaagttctgagcttgatgctgtggagaaccagctcaagtgggcatcctgggagctccattccctaaggcactgtgatgatgatggtaggactgaaaatggagcactagctccaaagcaggagcttccttcagcattagaatcccatgaagttcctggcactctcagtatgggtgttcctcaaatttttaaatatggagaaacctgtttccccaagggcaggtttgaaagaaagagaaatccctctcgaaagaaacaacatatatgtgatgaatgtggaaaacacttcagtcagggctcagcccttattcttcatcaaagaattcacagtggggagaaaccttatggatgtgttgagtgtgggaaagcattcagccgaagttccattcttgtgcaacaccagagagtccacactggagaaaaaccttacaaatgtcttgaatgtgggaaagcctttagccagaattcggggcttattaatcatcagagaatccatactggggagaaaccttatgaatgcgttcagtgtgggaaatcgtatagtcaaagctcaaatctttttagacatcagagaagacacaatgcagaaaaacttctgaatgttgtgaaagtttaagaaattgaaaaaaaaaaaagaatcagcactcaggtctttttcttcagaaatgaagacaaaatttaaaatatgaaatgatgcagaatagttttttccctattgactgtcagaaaatccactgggaaatgtaaaaatcttcactcaccattatgatatttatcttgaaagaaatggtgtcatacctgcctagaaactgaaattttaaacttaattcaggtcttaatgcctaaattttccatgtgatgtttatagtctgtattacttctccaaataatgaactacctgattcattgtccctttcttgaaagtttcttttttaagacaaatacattatttctgcattgatcattgaaatgttctttatatggatacattcccttatatattaaaaggcaacaggaattacaaagtctgaaaaccattttaaaccatcttttaaaaatttacccttatttccttttacctaatttgaatatgcatttgagaaaataagaggataaaggatggctaagagcctcaaaatgaaccataagatctcagataagaagtgatggtgataaaacatcaaaaagtgaatggaacaccttgattggggaagatatgcaaatactttgatctaagaattgaaatgtatcaagaatttatattttgcctgcaggaaaattcaaaagctactcatcctctctataatttggagtcatcttactaatgaaaataatgttttcccatatattattaaaaagcatacagtctaaataataaacagttgtaaaataatgaaggtagaaattataacactagggaaaaatttgtagcggatggcagtgttgaaggcaaatgtaaacataagggtaatggtctgtcatggcttttagaaaaagatgatagagttcatcattattttgccttcatctttgttaaggacagaaaattccctgacaggtgggcaagtatcaggttacctattttttattcctttggtacaaaagggttgaacgtcaggctaaaaaagcagccatgcatttattattaagcattttctaccgacaaggcactgtgctaggtactgtaatcctaccataagtaggtaggtatttcttccactgtaaatcataggggtttgctgttttatgtgagttagcctcttccccttgtctgagcattcctcaggggaggtcacctgtgaggttcccagaactgtagttttttttaccagggtgttgtatttggagggggaggaggactcggctcaaaagagctagctggctctccagtgttcagaggtgagtccacgatactcttaccacaatttggaagtttgtgaatctttttaaagaactaatcaatctctaatagcattgaggttgtacctacatattaagttgaatggactgttctatttaaaaaataaacaactagacaattaactagtttattaacctatcacaattgaatttttttttaattttcagtcttaacacattttttaaaatgtattaaagtaatacattgtagtagtaggattatatactccttggctgagaattccaagtactgtggttctactgtttagtggaaaactctggaagttaaaatatagaatatgagaggaggcttttttataatgggcatcattgtgtggaaaatgacccatgtgaatacaaatatttcctagttcagagattttggttatatctggtgcttggatcaagtttaaaaatggaaggtgagattttgcatgagcctattaaaaagcatagtaataaatgcaaggccagctggtggaaaagtgaggcagaatggagcttgtttataggttttctgataacaattataaaaaatgtgctttatagattaagatttattgaagtataaatatgtagtaatgatataatgtattttaagttatacaagaaaatgtagggacttttgtttgggtctttttctctttgtggctgaggggaaacaagtcagtgtccaataaagctgtaaactcctctgctctaagataaatgatgtgatttatttatttataactggcttctttccaagtaggttttcaggtggcatatttggaagacggctggaatgacagaattcttgtatcagagtaggtaagaagggagcaacctctcaatggctattatgtcatgctttttaagatcgtatgcggttcctatatacaaggaagcttccctgtggtagatttgtcataaatgccaaagatatttggtaatgtgagtgtagaaaaagtagtatgagggttggcaaatactgtttttgtcttggcagctctaatatctgcattgttcagaaaggattctgaggctaaggcaaagctctgtgggaaaaagggactggaccaaaaaaaaactggatggtggcacacaagaagaggaaatgatgagatgtgtactttctatctctggttaggcttagtccccactagacaaattgattttaaatactatgtagtgatttttaaattccatccacacattcattacccacacagataatcatagaaatttgggggagtgcctagcttctgatgaagtggtgatatggcagttgccaagcagtggcatcgccagagtatctgtttggttagcaaatgagcagtcattttaggtcatgcagattgctgatatctgcccagtagccactgagcatttgctggttttttcttctggctttcttggaggttaagctctctgtagtcatacccagttggtacttgatctttagcaatatgtctcatattcatgtaaattgaagggagggttacatgtactgaaataatctgcatgctaggcattggcttagacaccgtacctatctcacttagatttgtggactaggaaagcaagattcagagatcatgtgacttgcatgtggcctagagataaaattcaaatctggttctgtagactccagggacatattcaccatgccatgggtggtggctattaaaccttgataaatttgtgtttatggttaacaaatgtgaaagctattaaacattgctggtttgaattttttacagtgcagaaatgtaaaatgaaaaaggatatttcctttcacagtgttaccgagaagtcatgataatttcgtttgttcttccagatttaggcatatacttatttaatcaataatgtgttaacagctgacacctgtggttgctgtgacaggcactatttgaagtgctttatcatggattaactcttaatcctcagctaccgtataaagtaggacataaccccatttcacatgcactacactgagacttgcctcctctccccccacattgaagatgttcttttttcataactatatactattccattgcatgaatattctgtaatttatttaatcccctatggattgataattaggttcattatagatagaagtgtaattaacattcctgtacatgtattttgctacttgtgtgggtatttctgtaggatgaataactagaaatttattggatcaggtttcacatttgcagttttgaaaactactaccaaaaagatttcaccaatttacaactccatcattagtaagaatgcctgtttgcctatagtctgccaaccctgaatccttaaaaatttttgccaatctggtaggcaaaatttctttcttttctttgaatattaatgaggaggaacatcttttcatgtttcttggccatttgcatttcctattatgaattgcttttgcccattttcctttttttaattatgaaagtctaatgactaccttctcattgtataaaaaacacagttctttgaatagagagacccttttctccaatgctaccaatcacattccacttaccacagtttaacatacatcctctagtcacctttccgtacgaatatacatacacataaaaacactttttacataaataggatctcatattctgtagctttttaaaattttggtctcaaaaaaagataacaggtctttaaatttctttaatggttgaatatgattaaatactatgaaaatgccattatttattcccttaatttttttcctctcgctattacattgccaaagtaaacatcctattcagatgtctttgtgcatgtgtgtgaatatttctttagtctggagtccagtaaggtggatttttggatcaaagggtttgttctctgtccaccttcagtcttcccaaaggccttcataactgtattttcaccaagtgtatggagaatgttcatttccccatataaccatacctacacttgatagtttttatctgttgggcgaaaaagaaccttttcttattttgcatttccctgattataaaaaaaaatggtgagattggggttattttcatgtttattggccatttatagtttactgtggattgtttgtatcccttacctgctttctattgggttatgtgtggatatattgtttttatttgttcagcatctccttccccatcttctggtaacacaacctttatttatttgtggggaacctattccctgtggcttaggtgagcatgtgaccaggcctggcctcctgagtcccacagcttcctagccacagtgataaaagaatgggtatataacttaagccaggctaaggaaagcccttaacagaacttctgctggaactactggaaagaaggctttatggagatcccaggaaccaaggaccatgtaagcctgaatttgtgccatgtggagagagtctgtctgaggagaaactcggatgctagcagaaatggaaagagaactaagttctgatgtcatttttctggaggccctagatccagctgtgcctaaagcctgccctacctccggactttaaagttttgtgagccaataaagtccctttcttgtttaaagaaagaaaggatttcttggacctttaccaaaccatttgttacagaacacccggtaaacttaaatattgtcaccaacgagcgattagactgggatgaacacaattctgcccggggggggggccggacgacacttcccccttttggggggatttattgctcgccgcaagatggcggacatt

SEQ ID NO: 11808 - DNA, 6390 bp, Homo sapiens
cgcaggcggaagtgccgtggttccgacgctgttgtcacagggtggcctttggtcatctgaaatccgcggtcctgagtgctgggaagaggggctagaggacgtcgggccggggccgggatacacagcaggtctatgcagcagtaaggtgggcgatccacctgggacgaggagtgcctgtgaagaaaacggggtattgccctgaggcttatattctgcctcagttgtcttttcttgaaatattataaatcagaatgtctgcacagtcagtggaagaagattcaatacttatcatcccaactccagatgaagaggaaaaaattctgagagtgaagttggaggaggatcctgatggcgaagagggatcaagtatcccctggaaccatctcccagacccagagattttccgacagcgattcaggcagtttggataccaggattcacctgggccccgtgaggctgtgagccagctccgagaactttgccgtctgtggctcaggccagagacgcacacaaaagaacaaatcttggagctggtagtgctggagcagtttgttgccatcctacccaaagagctacagacttgggttcgagatcatcatccagagaatggagaggaggcagtgacagtgctggaggatttggagagtgaacttgatgaccctggacaaccggtttctctccgtcgacgaaaacgggaagtactagtagaagacatggtatctcaagaagaagctcagggattaccaagttctgagcttgatgctgtggagaaccagctcaagtgggcatcctgggagctccattccctaaggcactgtgatgatgatggtaggactgaaaatggagcactagctccaaagcaggagcttccttcagcattagaatcccatgaagttcctggcactctcagtatgggtgttcctcaaatttttaaatatggagaaacctgtttccccaagggcaggtttgaaagaaagagaaatccctctcgaaagaaacaacatatatgtgatgaatgtggaaaacacttcagtcagggctcagcccttattcttcatcaaagaattcacagtggggagaaaccttatggatgtgttgagtgtgggaaagcattcagccgaagttccattcttgtgcaacaccagagagtccacactggagaaaaaccttacaaatgtcttgaatgtgggaaagcctttagccagaattcggggcttattaatcatcagagaatccatactggggagaaaccttatgaatgcgttcagtgtgggaaatcgtatagtcaaagctcaaatctttttagacatcagagaagacacaatgcagaaaaacttctgaatgttgtgaaagtttaagaaattgaaaaaaaaaaaagaatcagcactcaggtctttttcttcagaaatgaagacaaaatttaaaatatgaaatgatgcagaatagttttttccctattgactgtcagaaaatccactgggaaatgtaaaaatcttcactcaccattatgatatttatcttgaaagaaatggtgtcatacctgcctagaaactgaaattttaaacttaattcaggtcttaatgcctaaattttccatgtgatgtttatagtctgtattacttctccaaataatgaactacctgattcattgtccctttcttgaaagtttcttttttaagacaaatacattatttctgcattgatcattgaaatgttctttatatggatacattcccttatatattaaaaggcaacaggaattacaaagtctgaaaaccattttaaaccatcttttaaaaatttacccttatttccttttacctaatttgaatatgcatttgagaaaataagaggataaaggatggctaagagcctcaaaatgaaccataagatctcagataagaagtgatggtgataaaacatcaaaaagtgaatggaacaccttgattggggaagatatgcaaatactttgatctaagaattgaaatgtatcaagaatttatattttgcctgcaggaaaattcaaaagctactcatcctctctataatttggagtcatcttactaatgaaaataatgttttcccatatattattaaaaagcatacagtctaaataataaacagttgtaaaataatgaaggtagaaattataacactagggaaaaatttgtagcggatggcagtgttgaaggcaaatgtaaacataagggtaatggtctgtcatggcttttagaaaaagatgatagagttcatcattattttgccttcatctttgttaaggacagaaaattccctgacaggtgggcaagtatcaggttacctattttttattcctttggtacaaaagggttgaacgtcaggctaaaaaagcagccatgcatttattattaagcattttctaccgacaaggcactgtgctaggtactgtaatcctaccataagtaggtaggtatttcttccactgtaaatcataggggtttgctgttttatgtgagttagcctcttccccttgtctgagcattcctcaggggaggtcacctgtgaggttcccagaactgtagttttttttaccagggtgttgtatttggagggggaggaggactcggctcaaaagagctagctggctctccagtgttcagaggtgagtccacgatactcttaccacaatttggaagtttgtgaatctttttaaagaactaatcaatctctaatagcattgaggttgtacctacatattaagttgaatggactgttctatttaaaaaataaacaactagacaattaactagtttattaacctatcacaattgaatttttttttaattttcagtcttaacacattttttaaaatgtattaaagtaatacattgtagtagtaggattatatactccttggctgagaattccaagtactgtggttctactgtttagtggaaaactctggaagttaaaatatagaatatgagaggaggcttttttataatgggcatcattgtgtggaaaatgacccatgtgaatacaaatatttcctagttcagagattttggttatatctggtgcttggatcaagtttaaaaatggaaggtgagattttgcatgagcctattaaaaagcatagtaataaatgcaaggccagctggtggaaaagtgaggcagaatggagcttgtttataggttttctgataacaattataaaaaatgtgctttatagattaagatttattgaagtataaatatgtagtaatgatataatgtattttaagttatacaagaaaatgtagggacttttgtttgggtctttttctctttgtggctgaggggaaacaagtcagtgtccaataaagctgtaaactcctctgctctaagataaatgatgtgatttatttatttataactggcttctttccaagtaggttttcaggtggcatatttggaagacggctggaatgacagaattcttgtatcagagtaggtaagaagggagcaacctctcaatggctattatgtcatgctttttaagatcgtatgcggttcctatatacaaggaagcttccctgtggtagatttgtcataaatgccaaagatatttggtaatgtgagtgtagaaaaagtagtatgagggttggcaaatactgtttttgtcttggcagctctaatatctgcattgttcagaaaggattctgaggctaaggcaaagctctgtgggaaaaagggactggaccaaaaaaaaactggatggtggcacacaagaagaggaaatgatgagatgtgtactttctatctctggttaggcttagtccccactagacaaattgattttaaatactatgtagtgatttttaaattccatccacacattcattacccacacagataatcatagaaatttgggggagtgcctagcttctgatgaagtggtgatatggcagttgccaagcagtggcatcgccagagtatctgtttggttagcaaatgagcagtcattttaggtcatgcagattgctgatatctgcccagtagccactgagcatttgctggttttttcttctggctttcttggaggttaagctctctgtagtcatacccagttggtacttgatctttagcaatatgtctcatattcatgtaaattgaagggagggttacatgtactgaaataatctgcatgctaggcattggcttagacaccgtacctatctcacttagatttgtggactaggaaagcaagattcagagatcatgtgacttgcatgtggcctagagataaaattcaaatctggttctgtagactccagggacatattcaccatgccatgggtggtggctattaaaccttgataaatttgtgtttatggttaacaaatgtgaaagctattaaacattgctggtttgaattttttacagtgcagaaatgtaaaatgaaaaaggatatttcctttcacagtgttaccgagaagtcatgataatttcgtttgttcttccagatttaggcatatacttatttaatcaataatgtgttaacagctgacacctgtggttgctgtgacaggcactatttgaagtgctttatcatggattaactcttaatcctcagctaccgtataaagtaggacataaccccatttcacatgcactacactgagacttgcctcctctccccccacattgaagatgttcttttttcataactatatactattccattgcatgaatattctgtaatttatttaatcccctatggattgataattaggttcattatagatagaagtgtaattaacattcctgtacatgtattttgctacttgtgtgggtatttctgtaggatgaataactagaaatttattggatcaggtttcacatttgcagttttgaaaactactaccaaaaagatttcaccaatttacaactccatcattagtaagaatgcctgtttgcctatagtctgccaaccctgaatccttaaaaatttttgccaatctggtaggcaaaatttctttcttttctttgaatattaatgaggaggaacatcttttcatgtttcttggccatttgcatttcctattatgaattgcttttgcccattttcctttttttaattatgaaagtctaatgactaccttctcattgtataaaaaacacagttctttgaatagagagacccttttctccaatgctaccaatcacattccacttaccacagtttaacatacatcctctagtcacctttccgtacgaatatacatacacataaaaacactttttacataaataggatctcatattctgtagctttttaaaattttggtctcaaaaaaagataacaggtctttaaatttctttaatggttgaatatgattaaatactatgaaaatgccattatttattcccttaatttttttcctctcgctattacattgccaaagtaaacatcctattcagatgtctttgtgcatgtgtgtgaatatttctttagtctggagtccagtaaggtggatttttggatcaaagggtttgttctctgtccaccttcagtcttcccaaaggccttcataactgtattttcaccaagtgtatggagaatgttcatttccccatataaccatacctacacttgatagtttttatctgttgggcgaaaaagaaccttttcttattttgcatttccctgattataaaaaaaaatggtgagattggggttattttcatgtttattggccatttatagtttactgtggattgtttgtatcccttacctgctttctattgggttatgtgtggatatattgtttttatttgttcagcatctccttccccatcttctggtaacacaacctttatttatttgtggggaacctattccctgtggcttaggtgagcatgtgaccaggcctggcctcctgagtcccacagcttcctagccacagtgataaaagaatgggtatataacttaagccaggctaaggaaagcccttaacagaacttctgctggaactactggaaagaaggctttatggagatcccaggaaccaaggaccatgtaagcctgaatttgtgccatgtggagagagtctgtctgaggagaaactcggatgctagcagaaatggaaagagaactaagttctgatgtcatttttctggaggccctagatccagctgtgcctaaagcctgccctacctccggactttaaagttttgtgagccaataaagtccctttcttgtttaagataattgaattgagtttctgttctgattaatataggttatttgtattttcttattgatttgtagaaaacctttgtaattttaaattctagactttatgcactatataagttaataaaattagcatggccttccatgatttggcctgtgtcaacttttgccat

SEQ ID NO: 11809 - DNA, 5773 bp, Homo sapiens
cgcgccgggggtttctgggaaaaggcttgtgaacggcgtttctgcgtctgccgtggacagcgaagctgctgcggttcctgagccggaggagtgcctgtgaagaaaacggggtattgccctgaggcttatattctgcctcagttgtcttttcttgaaatattataaatcagaatgtctgcacagtcagtggaagaagattcaatacttatcatcccaactccagatgaagaggaaaaaattctgagagtgaagttggaggaggatcctgatggcgaagagggatcaagtatcccctggaaccatctcccagacccagagattttccgacagcgattcaggcagtttggataccaggattcacctgggccccgtgaggctgtgagccagctccgagaactttgccgtctgtggctcaggccagagacgcacacaaaagaacaaatcttggagctggtagtgctggagcagtttgttgccatcctacccaaagagctacagacttgggttcgagatcatcatccagagaatggagaggaggcagtgacagtgctggaggatttggagagtgaacttgatgaccctggacaaccggtttctctccgtcgacgaaaacgggaagtactagtagaagacatggtatctcaagaagaagctcagggattaccaagttctgagcttgatgctgtggagaaccagctcaagtgggcatcctgggagctccattccctaaggcactgtgatgatgatggtaggactgaaaatggagcactagctccaaagcaggagcttccttcagcattagaatcccatgaagttcctggcactctcagtatgggtgttcctcaaatttttaaatatggagaaacctgtttccccaagggcaggtttgaaagaaagagaaatccctctcgaaagaaacaacatatatgtgatgaatgtggaaaacacttcagtcagggctcagcccttattcttcatcaaagaattcacagtggggagaaaccttatggatgtgttgagtgtgggaaagcattcagccgaagttccattcttgtgcaacaccagagagtccacactggagaaaaaccttacaaatgtcttgaatgtgggaaagcctttagccagaattcggggcttattaatcatcagagaatccatactggggagaaaccttatgaatgcgttcagtgtgggaaatcgtatagtcaaagctcaaatctttttagacatcagagaagacacaatgcagaaaaacttctgaatgttgtgaaagtttaagaaattgaaaaaaaaaaaagaatcagcactcaggtctttttcttcagaaatgaagacaaaatttaaaatatgaaatgatgcagaatagttttttccctattgactgtcagaaaatccactgggaaatgtaaaaatcttcactcaccattatgatatttatcttgaaagaaatggtgtcatacctgcctagaaactgaaattttaaacttaattcaggtcttaatgcctaaattttccatgtgatgtttatagtctgtattacttctccaaataatgaactacctgattcattgtccctttcttgaaagtttcttttttaagacaaatacattatttctgcattgatcattgaaatgttctttatatggatacattcccttatatattaaaaggcaacaggaattacaaagtctgaaaaccattttaaaccatcttttaaaaatttacccttatttccttttacctaatttgaatatgcatttgagaaaataagaggataaaggatggctaagagcctcaaaatgaaccataagatctcagataagaagtgatggtgataaaacatcaaaaagtgaatggaacaccttgattggggaagatatgcaaatactttgatctaagaattgaaatgtatcaagaatttatattttgcctgcaggaaaattcaaaagctactcatcctctctataatttggagtcatcttactaatgaaaataatgttttcccatatattattaaaaagcatacagtctaaataataaacagttgtaaaataatgaaggtagaaattataacactagggaaaaatttgtagcggatggcagtgttgaaggcaaatgtaaacataagggtaatggtctgtcatggcttttagaaaaagatgatagagttcatcattattttgccttcatctttgttaaggacagaaaattccctgacaggtgggcaagtatcaggttacctattttttattcctttggtacaaaagggttgaacgtcaggctaaaaaagcagccatgcatttattattaagcattttctaccgacaaggcactgtgctaggtactgtaatcctaccataagtaggtaggtatttcttccactgtaaatcataggggtttgctgttttatgtgagttagcctcttccccttgtctgagcattcctcaggggaggtcacctgtgaggttcccagaactgtagttttttttaccagggtgttgtatttggagggggaggaggactcggctcaaaagagctagctggctctccagtgttcagaggtgagtccacgatactcttaccacaatttggaagtttgtgaatctttttaaagaactaatcaatctctaatagcattgaggttgtacctacatattaagttgaatggactgttctatttaaaaaataaacaactagacaattaactagtttattaacctatcacaattgaatttttttttaattttcagtcttaacacattttttaaaatgtattaaagtaatacattgtagtagtaggattatatactccttggctgagaattccaagtactgtggttctactgtttagtggaaaactctggaagttaaaatatagaatatgagaggaggcttttttataatgggcatcattgtgtggaaaatgacccatgtgaatacaaatatttcctagttcagagattttggttatatctggtgcttggatcaagtttaaaaatggaaggtgagattttgcatgagcctattaaaaagcatagtaataaatgcaaggccagctggtggaaaagtgaggcagaatggagcttgtttataggttttctgataacaattataaaaaatgtgctttatagattaagatttattgaagtataaatatgtagtaatgatataatgtattttaagttatacaagaaaatgtagggacttttgtttgggtctttttctctttgtggctgaggggaaacaagtcagtgtccaataaagctgtaaactcctctgctctaagataaatgatgtgatttatttatttataactggcttctttccaagtaggttttcaggtggcatatttggaagacggctggaatgacagaattcttgtatcagagtaggtaagaagggagcaacctctcaatggctattatgtcatgctttttaagatcgtatgcggttcctatatacaaggaagcttccctgtggtagatttgtcataaatgccaaagatatttggtaatgtgagtgtagaaaaagtagtatgagggttggcaaatactgtttttgtcttggcagctctaatatctgcattgttcagaaaggattctgaggctaaggcaaagctctgtgggaaaaagggactggaccaaaaaaaaactggatggtggcacacaagaagaggaaatgatgagatgtgtactttctatctctggttaggcttagtccccactagacaaattgattttaaatactatgtagtgatttttaaattccatccacacattcattacccacacagataatcatagaaatttgggggagtgcctagcttctgatgaagtggtgatatggcagttgccaagcagtggcatcgccagagtatctgtttggttagcaaatgagcagtcattttaggtcatgcagattgctgatatctgcccagtagccactgagcatttgctggttttttcttctggctttcttggaggttaagctctctgtagtcatacccagttggtacttgatctttagcaatatgtctcatattcatgtaaattgaagggagggttacatgtactgaaataatctgcatgctaggcattggcttagacaccgtacctatctcacttagatttgtggactaggaaagcaagattcagagatcatgtgacttgcatgtggcctagagataaaattcaaatctggttctgtagactccagggacatattcaccatgccatgggtggtggctattaaaccttgataaatttgtgtttatggttaacaaatgtgaaagctattaaacattgctggtttgaattttttacagtgcagaaatgtaaaatgaaaaaggatatttcctttcacagtgttaccgagaagtcatgataatttcgtttgttcttccagatttaggcatatacttatttaatcaataatgtgttaacagctgacacctgtggttgctgtgacaggcactatttgaagtgctttatcatggattaactcttaatcctcagctaccgtataaagtaggacataaccccatttcacatgcactacactgagacttgcctcctctccccccacattgaagatgttcttttttcataactatatactattccattgcatgaatattctgtaatttatttaatcccctatggattgataattaggttcattatagatagaagtgtaattaacattcctgtacatgtattttgctacttgtgtgggtatttctgtaggatgaataactagaaatttattggatcaggtttcacatttgcagttttgaaaactactaccaaaaagatttcaccaatttacaactccatcattagtaagaatgcctgtttgcctatagtctgccaaccctgaatccttaaaaatttttgccaatctggtaggcaaaatttctttcttttctttgaatattaatgaggaggaacatcttttcatgtttcttggccatttgcatttcctattatgaattgcttttgcccattttcctttttttaattatgaaagtctaatgactaccttctcattgtataaaaaacacagttctttgaatagagagacccttttctccaatgctaccaatcacattccacttaccacagtttaacatacatcctctagtcacctttccgtacgaatatacatacacataaaaacactttttacataaataggatctcatattctgtagctttttaaaattttggtctcaaaaaaagataacaggtctttaaatttctttaatggttgaatatgattaaatactatgaaaatgccattatttattcccttaatttttttcctctcgctattacattgccaaagtaaacatcctattcagatgtctttgtgcatgtgtgtgaatatttctttagtctggagtccagtaaggtggatttttggatcaaagggtttgttctctgtccaccttcagtcttcccaaaggccttcataactgtattttcaccaagtgtatggagaatgttcatttccccatataaccatacctacacttgatagtttttatctgttgggcgaaaaagaaccttttcttattttgcatttccctgattataaaaaaaaatggtgagattggggttattttcatgtttattggccatttatagtttactgtggattgtttgtatcccttacctgctttctattgggttatgtgtggatatattgtttttatttgttcagcatctccttccccatcttctggtaacagaccgtcaaatcctcagagtca

SEQ ID NO: 11810 - DNA, 5339 bp, Homo sapiens
aaatttccggccgcgtccgactggggagaaaccttatggatgtgttgagtgtgggaaagcattcagccgaagttccattcttgtgcaacaccagagagtccacactggagaaaaaccttacaaatgtcttgaatgtgggaaagcctttagccagaattcggggcttattaatcatcagagaatccatactggggagaaaccttatgaatgcgttcagtgtgggaaatcgtatagtcaaagctcaaatctttttagacatcagagaagacacaatgcagaaaaacttctgaatgttgtgaaagtttaagaaattgaaaaaaaaaaaagaatcagcactcaggtctttttcttcagaaatgaagacaaaatttaaaatatgaaatgatgcagaatagttttttccctattgactgtcagaaaatccactgggaaatgtaaaaatcttcactcaccattatgatatttatcttgaaagaaatggtgtcatacctgcctagaaactgaaattttaaacttaattcaggtcttaatgcctaaattttccatgtgatgtttatagtctgtattacttctccaaataatgaactacctgattcattgtccctttcttgaaagtttcttttttaagacaaatacattatttctgcattgatcattgaaatgttctttatatggatacattcccttatatattaaaaggcaacaggaattacaaagtctgaaaaccattttaaaccatcttttaaaaatttacccttatttccttttacctaatttgaatatgcatttgagaaaataagaggataaaggatggctaagagcctcaaaatgaaccataagatctcagataagaagtgatggtgataaaacatcaaaaagtgaatggaacaccttgattggggaagatatgcaaatactttgatctaagaattgaaatgtatcaagaatttatattttgcctgcaggaaaattcaaaagctactcatcctctctataatttggagtcatcttactaatgaaaataatgttttcccatatattattaaaaagcatacagtctaaataataaacagttgtaaaataatgaaggtagaaattataacactagggaaaaatttgtagcggatggcagtgttgaaggcaaatgtaaacataagggtaatggtctgtcatggcttttagaaaaagatgatagagttcatcattattttgccttcatctttgttaaggacagaaaattccctgacaggtgggcaagtatcaggttacctattttttattcctttggtacaaaagggttgaacgtcaggctaaaaaagcagccatgcatttattattaagcattttctaccgacaaggcactgtgctaggtactgtaatcctaccataagtaggtaggtatttcttccactgtaaatcataggggtttgctgttttatgtgagttagcctcttccccttgtctgagcattcctcaggggaggtcacctgtgaggttcccagaactgtagttttttttaccagggtgttgtatttggagggggaggaggactcggctcaaaagagctagctggctctccagtgttcagaggtgagtccacgatactcttaccacaatttggaagtttgtgaatctttttaaagaactaatcaatctctaatagcattgaggttgtacctacatattaagttgaatggactgttctatttaaaaaataaacaactagacaattaactagtttattaacctatcacaattgaatttttttttaattttcagtcttaacacattttttaaaatgtattaaagtaatacattgtagtagtaggattatatactccttggctgagaattccaagtactgtggttctactgtttagtggaaaactctggaagttaaaatatagaatatgagaggaggcttttttataatgggcatcattgtgtggaaaatgacccatgtgaatacaaatatttcctagttcagagattttggttatatctggtgcttggatcaagtttaaaaatggaaggtgagattttgcatgagcctattaaaaagcatagtaataaatgcaaggccagctggtggaaaagtgaggcagaatggagcttgtttataggttttctgataacaattataaaaaatgtgctttatagattaagatttattgaagtataaatatgtagtaatgatataatgtattttaagttatacaagaaaatgtagggacttttgtttgggtctttttctctttgtggctgaggggaaacaagtcagtgtccaataaagctgtaaactcctctgctctaagataaatgatgtgatttatttatttataactggcttctttccaagtaggttttcaggtggcatatttggaagacggctggaatgacagaattcttgtatcagagtaggtaagaagggagcaacctctcaatggctattatgtcatgctttttaagatcgtatgcggttcctatatacaaggaagcttccctgtggtagatttgtcataaatgccaaagatatttggtaatgtgagtgtagaaaaagtagtatgagggttggcaaatactgtttttgtcttggcagctctaatatctgcattgttcagaaaggattctgaggctaaggcaaagctctgtgggaaaaagggactggaccaaaaaaaaactggatggtggcacacaagaagaggaaatgatgagatgtgtactttctatctctggttaggcttagtccccactagacaaattgattttaaatactatgtagtgatttttaaattccatccacacattcattacccacacagataatcatagaaatttgggggagtgcctagcttctgatgaagtggtgatatggcagttgccaagcagtggcatcgccagagtatctgtttggttagcaaatgagcagtcattttaggtcatgcagattgctgatatctgcccagtagccactgagcatttgctggttttttcttctggctttcttggaggttaagctctctgtagtcatacccagttggtacttgatctttagcaatatgtctcatattcatgtaaattgaagggagggttacatgtactgaaataatctgcatgctaggcattggcttagacaccgtacctatctcacttagatttgtggactaggaaagcaagattcagagatcatgtgacttgcatgtggcctagagataaaattcaaatctggttctgtagactccagggacatattcaccatgccatgggtggtggctattaaaccttgataaatttgtgtttatggttaacaaatgtgaaagctattaaacattgctggtttgaattttttacagtgcagaaatgtaaaatgaaaaaggatatttcctttcacagtgttaccgagaagtcatgataatttcgtttgttcttccagatttaggcatatacttatttaatcaataatgtgttaacagctgacacctgtggttgctgtgacaggcactatttgaagtgctttatcatggattaactcttaatcctcagctaccgtataaagtaggacataaccccatttcacatgcactacactgagacttgcctcctctccccccacattgaagatgttcttttttcataactatatactattccattgcatgaatattctgtaatttatttaatcccctatggattgataattaggttcattatagatagaagtgtaattaacattcctgtacatgtattttgctacttgtgtgggtatttctgtaggatgaataactagaaatttattggatcaggtttcacatttgcagttttgaaaactactaccaaaaagatttcaccaatttacaactccatcattagtaagaatgcctgtttgcctatagtctgccaaccctgaatccttaaaaatttttgccaatctggtaggcaaaatttctttcttttctttgaatattaatgaggaggaacatcttttcatgtttcttggccatttgcatttcctattatgaattgcttttgcccattttcctttttttaattatgaaagtctaatgactaccttctcattgtataaaaaacacagttctttgaatagagagacccttttctccaatgctaccaatcacattccacttaccacagtttaacatacatcctctagtcacctttccgtacgaatatacatacacataaaaacactttttacataaataggatctcatattctgtagctttttaaaattttggtctcaaaaaaagataacaggtctttaaatttctttaatggttgaatatgattaaatactatgaaaatgccattatttattcccttaatttttttcctctcgctattacattgccaaagtaaacatcctattcagatgtctttgtgcatgtgtgtgaatatttctttagtctggagtccagtaaggtggatttttggatcaaagggtttgttctctgtccaccttcagtcttcccaaaggccttcataactgtattttcaccaagtgtatggagaatgttcatttccccatataaccatacctacacttgatagtttttatctgttgggcgaaaaagaaccttttcttattttgcatttccctgattataaaaaaaaatggtgagattggggttattttcatgtttattggccatttatagtttactgtggattgtttgtatcccttacctgctttctattgggttatgtgtggatatattgtttttatttgttcagcatctccttccccatcttctggtaacacaacctttatttatttgtggggaacctattccctgtggcttaggtgagcatgtgaccaggcctggcctcctgagtcccacagcttcctagccacagtgataaaagaatgggtatataacttaagccaggctaaggaaagcccttaacagaacttctgctggaactactggaaagaaggctttatggagatcccaggaaccaaggaccatgtaagcctgaatttgtgccatgtggagagagtctgtctgaggagaaactcggatgctagcagaaatggaaagagaactaagttctgatgtcatttttctggaggccctagatccagctgtgcctaaagcctgccctacctccggactttaaagttttgtgagccaataaagtccctttcttgtttaagataattgaattgagtttctgttctgattaatataggttatttgtattttcttattgatttgtagaaaacctttgtaattttaaattctagactttatgcactatataagttaataaaattagcatggccttccatgatttggcctgtgtcaacttttgccat

SEQ ID NO: 11811 - DNA, 3130 bp, Homo sapiens
tgcataatagataattgagaagatagggtggcatggctcacaacagtaatgatggcttcatattttttttccttctttttaatatatttatcttgggcaaattctgtctgtctcggaatgtgtaccatttataactggcttctttccaagtaggttttcaggtggcatatttggaagacggctggaatgacagaattcttgtatcagagtaggtaagaagggagcaacctctcaatggctattatgtcatgctttttaagatcgtatgcggttcctatatacaaggaagcttccctgtggtagatttgtcataaatgccaaagatatttggtaatgtgagtgtagaaaaagtagtatgagggttggcaaatactgtttttgtcttggcagctctaatatctgcattgttcagaaaggattctgaggctaaggcaaagctctgtgggaaaaagggactggaccaaaaaaaaactggatggtggcacacaagaagaggaaatgatgagatgtgtactttctatctctggttaggcttagtccccactagacaaattgattttaaatactatgtagtgatttttaaattccatccacacattcattacccacacagataatcatagaaatttgggggagtgcctagcttctgatgaagtggtgatatggcagttgccaagcagtggcatcgccagagtatctgtttggttagcaaatgagcagtcattttaggtcatgcagattgctgatatctgcccagtagccactgagcatttgctggttttttcttctggctttcttggaggttaagctctctgtagtcatacccagttggtacttgatctttagcaatatgtctcatattcatgtaaattgaagggagggttacatgtactgaaataatctgcatgctaggcattggcttagacaccgtacctatctcacttagatttgtggactaggaaagcaagattcagagatcatgtgacttgcatgtggcctagagataaaattcaaatctggttctgtagactccagggacatattcaccatgccatgggtggtggctattaaaccttgataaatttgtgtttatggttaacaaatgtgaaagctattaaacattgctggtttgaattttttacagtgcagaaatgtaaaatgaaaaaggatatttcctttcacagtgttaccgagaagtcatgataatttcgtttgttcttccagatttaggcatatacttatttaatcaataatgtgttaacagctgacacctgtggttgctgtgacaggcactatttgaagtgctttatcatggattaactcttaatcctcagctaccgtataaagtaggacataaccccatttcacatgcactacactgagacttgcctcctctccccccacattgaagatgttcttttttcataactatatactattccattgcatgaatattctgtaatttatttaatcccctatggattgataattaggttcattatagatagaagtgtaattaacattcctgtacatgtattttgctacttgtgtgggtatttctgtaggatgaataactagaaatttattggatcaggtttcacatttgcagttttgaaaactactaccaaaaagatttcaccaatttacaactccatcattagtaagaatgcctgtttgcctatagtctgccaaccctgaatccttaaaaatttttgccaatctggtaggcaaaatttctttcttttctttgaatattaatgaggaggaacatcttttcatgtttcttggccatttgcatttcctattatgaattgcttttgcccattttcctttttttaattatgaaagtctaatgactaccttctcattgtataaaaaacacagttctttgaatagagagacccttttctccaatgctaccaatcacattccacttaccacagtttaacatacatcctctagtcacctttccgtacgaatatacatacacataaaaacactttttacataaataggatctcatattctgtagctttttaaaattttggtctcaaaaaaagataacaggtctttaaatttctttaatggttgaatatgattaaatactatgaaaatgccattatttattcccttaatttttttcctctcgctattacattgccaaagtaaacatcctattcagatgtctttgtgcatgtgtgtgaatatttctttagtctggagtccagtaaggtggatttttggatcaaagggtttgttctctgtccaccttcagtcttcccaaaggccttcataactgtattttcaccaagtgtatggagaatgttcatttccccatataaccatacctacacttgatagtttttatctgttgggcgaaaaagaaccttttcttattttgcatttccctgattataaaaaaaaatggtgagattggggttattttcatgtttattggccatttatagtttactgtggattgtttgtatcccttacctgctttctattgggttatgtgtggatatattgtttttatttgttcagcatctccttccccatcttctggtaacacaacctttatttatttgtggggaacctattccctgtggcttaggtgagcatgtgaccaggcctggcctcctgagtcccacagcttcctagccacagtgataaaagaatgggtatataacttaagccaggctaaggaaagcccttaacagaacttctgctggaactactggaaagaaggctttatggagatcccaggaaccaaggaccatgtaagcctgaatttgtgccatgtggagagagtctgtctgaggagaaactcggatgctagcagaaatggaaagagaactaagttctgatgtcatttttctggaggccctagatccagctgtgcctaaagcctgccctacctccggactttaaagttttgtgagccaataaagtccctttcttgtttaagataattgaattgagtttctgttctgattaatataggttatttgtattttcttattgatttgtagaaaacctttgtaattttaaattctagactttatgcactatataagttaataaaattagcatggccttccatgatttggcctgtgtcaacttttgccat

SEQ ID NO: 11812 - DNA, 3029 bp, Homo sapiens
cgcgccgggggtttctgggaaaaggcttgtgaacggcgtttctgcgtctgccgtggacagcgaagctgctgcggttcctgagccggaggagtgcctgtgaagaaaacggggtattgccctgaggcttatattctgcctcagttgtcttttcttgaaatattataaatcagaatgtctgcacagtcagtggaagaagattcaatacttatcatcccaactccagatgaagaggaaaaaattctgagagtgaagttggaggaggatcctgatggcgaagagggatcaagtatcccctggaaccatctcccagacccagagattttccgacagcgattcaggcagtttggataccaggattcacctgggccccgtgaggctgtgagccagctccgagaactttgccgtctgtggctcaggccagagacgcacacaaaagaacaaatcttggagctggtagtgctggagcagtttgttgccatcctacccaaagagctacagacttgggttcgagatcatcatccagagaatggagaggaggcagtgacagtgctggaggatttggagagtgaacttgatgaccctggacaaccggtttctctccgtcgacgaaaacgggaagtactagtagaagacatggtatctcaagaagaagctcagggattaccaagttctgagcttgatgctgtggagaaccagctcaagtgggcatcctgggagctccattccctaaggcactgtgatgatgatggtaggactgaaaatggagcactagctccaaagcaggagcttccttcagcattagaatcccatgaagttcctggcactctcagtatgggtgttcctcaaatttttaaatatggagaaacctgtttccccaagggcaggtttgaaagaaagagaaatccctctcgaaagaaacaacatatatgtgatgaatgtggaaaacacttcagtcagggctcagcccttattcttcatcaaagaattcacagtggggagaaaccttatggatgtgttgagtgtgggaaagcattcagccgaagttccattcttgtgcaacaccagagagtccacactggagaaaaaccttacaaatgtcttgaatgtgggaaagcctttagccagaattcggggcttattaatcatcagagaatccatactggggagaaaccttatgaatgcgttcagtgtgggaaatcgtatagtcaaagctcaaatctttttagacatcagagaagacacaatgcagaaaaacttctgaatgttgtgaaagtttaagaaattgaaaaaaaaaaaagaatcagcactcaggtctttttcttcagaaatgaagacaaaatttaaaatatgaaatgatgcagaatagttttttccctattgactgtcagaaaatccactgggaaatgtaaaaatcttcactcaccattatgatatttatcttgaaagaaatggtgtcatacctgcctagaaactgaaattttaaacttaattcaggtcttaatgcctaaattttccatgtgatgtttatagtctgtattacttctccaaataatgaactacctgattcattgtccctttcttgaaagtttcttttttaagacaaatacattatttctgcattgatcattgaaatgttctttatatggatacattcccttatatattaaaaggcaacaggaattacaaagtctgaaaaccattttaaaccatcttttaaaaatttacccttatttccttttacctaatttgaatatgcatttgagaaaataagaggataaaggatggctaagagcctcaaaatgaaccataagatctcagataagaagtgatggtgataaaacatcaaaaagtgaatggaacaccttgattggggaagatatgcaaatactttgatctaagaattgaaatgtatcaagaatttatattttgcctgcaggaaaattcaaaagctactcatcctctctataatttggagtcatcttactaatgaaaataatgttttcccatatattattaaaaagcatacagtctaaataataaacagttgtaaaataatgaaggtagaaattataacactagggaaaaatttgtagcggatggcagtgttgaaggcaaatgtaaacataagggtaatggtctgtcatggcttttagaaaaagatgatagagttcatcattattttgccttcatctttgttaaggacagaaaattccctgacaggtgggcaagtatcaggttacctattttttattcctttggtacaaaagggttgaacgtcaggctaaaaaagcagccatgcatttattattaagcattttctaccgacaaggcactgtgctaggtactgtaatcctaccataagtaggtaggtatttcttccactgtaaatcataggggtttgctgttttatgtgagttagcctcttccccttgtctgagcattcctcaggggaggtcacctgtgaggttcccagaactgtagttttttttaccagggtgttgtatttggagggggaggaggactcggctcaaaagagctagctggctctccagtgttcagaggtgagtccacgatactcttaccacaatttggaagtttgtgaatctttttaaagaactaatcaatctctaatagcattgaggttgtacctacatattaagttgaatggactgttctatttaaaaaataaacaactagacaattaactagtttattaacctatcacaattgaatttttttttaattttcagtcttaacacattttttaaaatgtattaaagtaatacattgtagtagtaggattatatactccttggctgagaattccaagtactgtggttctactgtttagtggaaaactctggaagttaaaatatagaatatgagaggaggcttttttataatgggcatcattgtgtggaaaatgacccatgtgaatacaaatatttcctagttcagagattttggttatatctggtgcttggatcaagtttaaaatgaagttgctaggggggggggtcctctaagtc

SEQ ID NO: 11813 - DNA, 1987 bp, Homo sapiens
gacgaatgtgacacctgatccaataaatttctcgttatacatcctacagaaatacccacacaagtagcaaaatacatgtacaggaatgttaattacacttctatcaataatgtgttaacagctgacacctgtggttgctgtgacaggcactatttgaagtgctttatcatggattaactcttaatcctcagctaccgtataaagtaggacataaccccatttcacatgcactacactgagacttgcctcctctccccccacattgaagatgttcttttttcataactatatactattccattgcatgaatattctgtaatttatttaatcccctatggattgataattaggttcattatagatagaagtgtaattaacattcctgtacatgtattttgctacttgtgtgggtatttctgtaggatgaataactagaaatttattggatcaggtttcacatttgcagttttgaaaactactaccaaaaagatttcaccaatttacaactccatcattagtaagaatgcctgtttgcctatagtctgccaaccctgaatccttaaaaatttttgccaatctggtaggcaaaatttctttcttttctttgaatattaatgaggaggaacatcttttcatgtttcttggccatttgcatttcctattatgaattgcttttgcccattttcctttttttaattatgaaagtctaatgactaccttctcattgtataaaaaacacagttctttgaatagagagacccttttctccaatgctaccaatcacattccacttaccacagtttaacatacatcctctagtcacctttccgtacgaatatacatacacataaaaacactttttacataaataggatctcatattctgtagctttttaaaattttggtctcaaaaaaagataacaggtctttaaatttctttaatggttgaatatgattaaatactatgaaaatgccattatttattcccttaatttttttcctctcgctattacattgccaaagtaaacatcctattcagatgtctttgtgcatgtgtgtgaatatttctttagtctggagtccagtaaggtggatttttggatcaaagggtttgttctctgtccaccttcagtcttcccaaaggccttcataactgtattttcaccaagtgtatggagaatgttcatttccccatataaccatacctacacttgatagtttttatctgttgggcgaaaaagaaccttttcttattttgcatttccctgattataaaaaaaaatggtgagattggggttattttcatgtttattggccatttatagtttactgtggattgtttgtatcccttacctgctttctattgggttatgtgtggatatattgtttttatttgttcagcatctccttccccatcttctggtaacacaacctttatttatttgtggggaacctattccctgtggcttaggtgagcatgtgaccaggcctggcctcctgagtcccacagcttcctagccacagtgataaaagaatgggtatataacttaagccaggctaaggaaagcccttaacagaacttctgctggaactactggaaagaaggctttatggagatcccaggaaccaaggaccatgtaagcctgaatttgtgccatgtggagagagtctgtctgaggagaaactcggatgctagcagaaatggaaagagaactaagttctgatgtcatttttctggaggccctagatccagctgtgcctaaagcctgccctacctccggactttaaagttttgtgagccaataaagtccctttcttgtttaagataattgaattgagtttctgttctgattaatataggttatttgtattttcttattgatttgtagaaaacctttgtaattttaaattctagactttatgcactatataagttaataaaattagcatggccttccatgatttggcctgtgtcaacttttgccat

SEQ ID NO: 11814 - DNA, 1470 bp, Homo sapiens
agattgtgtggtggtcaatatgctgggttatcagcgatcagtatcgagatttaggggattctggtaggcaaaatttctttcttttctttgaatattaatgaggaggaacatcttttcatgtttcttggccatttgcatttcctattatgaattgcttttgcccattttcctttttttaattatgaaagtctaatgactaccttctcattgtataaaaaacacagttctttgaatagagagacccttttctccaatgctaccaatcacattccacttaccacagtttaacatacatcctctagtcacctttccgtacgaatatacatacacataaaaacactttttacataaataggatctcatattctgtagctttttaaaattttggtctcaaaaaaagataacaggtctttaaatttctttaatggttgaatatgattaaatactatgaaaatgccattatttattcccttaatttttttcctctcgctattacattgccaaagtaaacatcctattcagatgtctttgtgcatgtgtgtgaatatttctttagtctggagtccagtaaggtggatttttggatcaaagggtttgttctctgtccaccttcagtcttcccaaaggccttcataactgtattttcaccaagtgtatggagaatgttcatttccccatataaccatacctacacttgatagtttttatctgttgggcgaaaaagaaccttttcttattttgcatttccctgattataaaaaaaaatggtgagattggggttattttcatgtttattggccatttatagtttactgtggattgtttgtatcccttacctgctttctattgggttatgtgtggatatattgtttttatttgttcagcatctccttccccatcttctggtaacacaacctttatttatttgtggggaacctattccctgtggcttaggtgagcatgtgaccaggcctggcctcctgagtcccacagcttcctagccacagtgataaaagaatgggtatataacttaagccaggctaaggaaagcccttaacagaacttctgctggaactactggaaagaaggctttatggagatcccaggaaccaaggaccatgtaagcctgaatttgtgccatgtggagagagtctgtctgaggagaaactcggatgctagcagaaatggaaagagaactaagttctgatgtcatttttctggaggccctagatccagctgtgcctaaagcctgccctacctccggactttaaagttttgtgagccaataaagtccctttcttgtttaagataattgaattgagtttctgttctgattaatataggttatttgtattttcttattgatttgtagaaaacctttgtaattttaaattctagactttatgcactatataagttaataaaattagcatggccttccatgatttggcctgtgtcaacttttgccat

SEQ ID NO: 11815 - DNA, 784 bp, Homo sapiens
tcctgacttgcaatgatcaccattctaagcggcacgagttggtttctcaagtggtttgatttgcatttctctaatgaccagtgatgattggggttattttcatgtttattggccatttatagtttactgtggattgtttgtatcccttacctgctttctattgggttatgtgtggatatattgtttttatttgttcagcatctccttccccatcttctggtaacacaacctttatttatttgtggggaacctattccctgtggcttaggtgagcatgtgaccaggcctggcctcctgagtcccacagcttcctagccacagtgataaaagaatgggtatataacttaagccaggctaaggaaagcccttaacagaacttctgctggaactactggaaagaaggctttatggagatcccaggaaccaaggaccatgtaagcctgaatttgtgccatgtggagagagtctgtctgaggagaaactcggatgctagcagaaatggaaagagaactaagttctgatgtcatttttctggaggccctagatccagctgtgcctaaagcctgccctacctccggactttaaagttttgtgagccaataaagtccctttcttgtttaagataattgaattgagtttctgttctgattaatataggttatttgtattttcttattgatttgtagaaaacctttgtaattttaaattctagactttatgcactatataagttaataaaattagcatggccttccatgatttggcctgtgtcaacttttgccat

SEQ ID NO: 11816 - DNA, 1423 bp, Homo sapiens
cgcgccgggggtttctgggaaaaggcttgtgaacggcgtttctgcgtctgccgtggacagcgaagctgctgcggttcctgagccggaggagtgcctgtgaagaaaacggggtattgccctgaggcttatattctgcctcagttgtcttttcttgaaatattataaatcagaatgtctgcacagtcagtggaagaagattcaatacttatcatcccaactccagatgaagaggaaaaaattctgagagtgaagttggaggaggatcctgatggcgaagagggatcaagtatcccctggaaccatctcccagacccagagattttccgacagcgattcaggcagtttggataccaggattcacctgggccccgtgaggctgtgagccagctccgagaactttgccgtctgtggctcaggccagagacgcacacaaaagaacaaatcttggagctggtagtgctggagcagtttgttgccatcctacccaaagagctacagacttgggttcgagatcatcatccagagaatggagaggaggcagtgacagtgctggaggatttggagagtgaacttgatgaccctggacaaccggtttctctccgtcgacgaaaacgggaagtactagtagaagacatggtatctcaagaagaagctcagggattaccaagttctgagcttgatgctgtggagaaccagctcaagtgggcatcctgggagctccattccctaaggcactgtggtgaggaccagaactctgtgtgggctagagggtgaaagagagtataggccttttgttcagaactttgcttgttctcactggtggggggatcatatcactcttaatctaatatctcagtttttttctgattaagttgattttgctggcctcagaccttttattcctagacattaacatcttcagccttttcttccctttcagtctccttcctaaaaagagttgcccatgtcaggctagcatttgccttactttgagccagcacccacccatggaccaagtccctctattttgcattcagtattacttgtcatctgttttacatccttttactttcaatctcctgcctaattccattggtacagtaagcttacctgaaaacctcttctaatctctttgttgtatatcactgaaatctttctaaatatttatttctgatttccttcaacgtctacctagagtcattttcttctaagaagcttcttttgtagaaatatttggagtaatttttttcctttttctaagtatttatgcaaaaaaagcctccttagctataacatgctttaaatgcagaaaaagcttttttaaaagctcaaagttgtattaattcacgagaccagtctttcccaatatattagccattaacaccatatacttatgtgtatcctttgatatggcccagtatat

SEQ ID NO: 11817 - DNA, 479 bp, Homo sapiens
ttctttatccacctttggagtggaataaatctcaatataagctaaataacaacattacaaatcaaagaatattcaaagcaaattcaggttaaaaatgaacattttaaagatgcattttctttaaaaattaacttttcacttcatatgtttacaagatttaacactgggcaaagggtggatctatctagcacacagtaatatggtaattcaccactttccctgaaaggccaaaaagaatgacttgctaaaagtatttactaaatatgcaccaaagataatgacttaactagtaactgtgaaactgtttctaagactgtgggctgagataaatattataaaatatagacaaaatttttatatttctaatactggatattctgtgagtaccacgggttctcccagaaggtgatgcaaatcttgatttttatctgtacagatgtcttcatttttttaaatttaaaattattttaggaccgtgt

SEQ ID NO: 11818 - DNA, 437 bp, Homo sapiens
gtaacacacaataacatttaaaattcaatcttcagctttgaacttgtcctacaagatacccttttctgataactttgaattgatcccttaactgctactgcatttctactacatctctcttaatttgctatacttaccttcagagaagactgaatgctgatagctgcctttcccttatacgttagtgcatttcctaaagttcacatttgctgcagaccatactgctgtcactaaggaaatatccctggccagggtgggctaaaaattaaaccaccacccaatgccattaaagctaatgcatctggagtaacatgtaattgttgggttttggagcattacttcagtatctgacttaaggaaaggtgatatttttggaatacacctatgtaaaatggtctctcctaattttatatcttcacaaaatcatttatttcagg

SEQ ID NO: 11819 - DNA, 337 bp, Homo sapiens
agccttcagggtagaaggacaaggcctgaggttgctagagattacttcctacccaatcacacataaaacccaatgttttatgtgtgccataaaaacattactttctatgtgtgttgtgtcctgaaaaggttgcaaagcactgccattaccagtttttacaattcccttgccctgctgttctcctgctatacatccatgaggaaacaccattcagtccaactatctttttttgtgctcacacttgagtgctgcaaaagcaaagtcacagaaacccaaagatttgaagtactgtacacttgaagtcattaaagtcaaacggtccttcatcattgccagg

SEQ ID NO: 11820 - DNA, 490 bp, Homo sapiens
gagatcatattcctaattctgtggtaccaaaatatttttattaaatgatgttgattggatgttttttcttacatggctaaactaaaagttggcaacccctacattagtctctactttttgttctttttttaattaaattttattggtccatggaatctaaaagtctaggaacattgtcttggatagtgtgctgttcatgaaggtagctctctgggcttagtggtatgactgccgtatgtttcctattccctctgatcttcttaacaatggtcagtagccattttgtgattctatcagttggttcatgtgatatcatatgtctcccccacccatatttcctcagaacattcttctgcctccctacacctgtctcctttcgcacttgagttggaaaatgattgtaccaaagcctgcacaatattttttaaagcagtgaagtagggtagatgccttggtacccttaatctagcaaaagatctttaaaagagtc

SEQ ID NO: 11821 - DNA, 284 bp, Homo sapiens
  misc_feature (110)..(110): n is a, c, g, or t
  misc_feature (112)..(112): n is a, c, g, or t
aaaactcgagaccaggaggtggaagttgcagtgaaccaagatcatgccacttccactgcactctagcctgggcagcagattccatgaatgaaagggagagagagagggangngaaaaaagaaagaaagaaggaaaggaagaaagaaagaaagaaagaaagaaagaaaaagaagaaaagaaagaaagaaggaaagaggaagaaagaaagaaagaaagaaagaaagaaagaaagaaagaaagaaagaaagaaagaaagaaagatccaaagaagggcaaagaggaag

SEQ ID NO: 11822 - DNA, 397 bp, Homo sapiens
ggcaggagaatcaggcagggaggttgcagtgagccgagatggcagcagtacagtccagcttcggctcggcatcagagggagaccgtggaaagagggagagggagaccgtggggagagggagacggagaggcagagggagagagagagggacttaactttcatcttgtgtttcagcaagaaccattttaagatctctgttgcatttctgtcctagtagtttaaatgctgggattacaggcatgagccactgcgtccggcctgaagcttttccattaaaaaaaaaaacgtttgcggccgcaagcttttttttttttttttttttttaaagcaaatgacaaagacccagtttaccagctttacttttttaaacctaagcttaacattacatatttaaaca

SEQ ID NO: 11823 - DNA, 904 bp, Homo sapiens
cactaatatcacagtctctctgattaagaaactcaagagagtaaataatcttctgataggtttgggaggggctcttcggttttactaccttcttttttttgagaaaaagcatccagcctgggcgacagagtgagaccccgtctccaaaaataaataaataaataaataaatctgaaggacactgtcaagagtgtgaaagggcaaccagactaggcgaaaatatttgcaaataatttacctgaaaaggatgatagagatttataatcagaatatataaagaacttctacagctcaacaacagaaaaaccaaacaacccaaataaaagatgagcaaaggactttacattctgtgtatagacttttctccaaagaaggtatgcaattggccaataaatatatgaaaggatgcttgaaatcttcagtcattagagaatgcaaatcaagaccctagggagataccactttacactcactaggttagctattatttaaaacaaaaaaaggaaaataagtgttgaagatacggataaattaaaaccctcatgcatcactggtgggaatgtaaaatggtgcagccaccatagaaaacaatttgatagttgctcaaaaagttaaacatagaactaccatatgacccaatacttccctcctaggtatatacccaaaagaattgaaagcagggatggaagcagacatttgtatactaatattcgtagcagtattattcacaatactcaaaaggtataaacaagccaagtgtccgtcaacagatgaatggataaacagcatgtgatttatacacagaatgtaatattagtcagtcattaaaaacaaagttctgctatataacatagcatagaagaatcttgaacacattaaaacatgcaaactgaaataaaccaga

SEQ ID NO: 11824 - DNA, 399 bp, Homo sapiens
gatggtaagcttttatgtgaatagctcctaaataacattaccatcactcactactactggtatggaaattgagttaggataacagagcctgagttcccccatgagataacaagatgcttctgaatataagtcaaaattggagtatagattgtctcacaactctactgttttttgtttcttttcgtctttctttctgttttctctttttgtccctctctttctctcttgtctgaagagtctgggacgctgaaggctataaacatcatggtttgttacacactttcgatgtctgctcaaatgtggtgtaccatttctaaaccacctcctgttaaaccgtttgtgggaaagttacatttaaaataaatcatttcatgatcagcagttttattggtgcgtggt

SEQ ID NO: 11825 - DNA, 418 bp, Homo sapiens
gttcataggatggctgggtaagtggctgtttgttttttccttactgtggatatgtatcagtgaaggaatctgtagaacattcttgatgggaacatttagtcatatcaagtcaataaattaatgtttaggctgggcgcagtggctcacgcctgtaatcccaacaccttgggaggccaaggcgggcagatcatctgaggtcaggagttcaagaccagcctggccaacatggtaaaatcccgtctctactaaaaatacaaaaattagctgggtgtggtggtgcatacttgtagtcccagctactctggaggctgaggcaagagaattgcctgaacctgggagatggaggttgcagtgagctaagagtgcaccattgcactctagcctgggcaacagagtgagactctgtcaaaaaaaaatt

SEQ ID NO: 11826 - DNA, 460 bp, Homo sapiens
atctcctcgtctgccatttgctaagactgtgggaaaagcacagtgtttgggcggggtgtactgattttccatgtacagtctgtcacagcttcccttggctaggaaaggaaaatcccccgacccattgtgcttcctgggtgaggcgacgccctgtcatgcttcaccttgccctccgtgggctgcacccactgtccaaccagtcccagtgagatgaatcaggtacctcagttggtgatgcagaaatcacccgtcttctgcgtcgatcactctgggagctgcagaccagagctgttcctattcagctatcttggaacggaacccagccatttctttttaatcatcacatgttaaatttgaaggaactggcttagtttttagaagagtgatcggtctcattaaagtggagggaaaaataggacccttaaggaaaatcaaaagatagtgacttaatttagctaga

SEQ ID NO: 11827 - DNA, 444 bp, Homo sapiens
caaaacaactacaaattatacgaatttaattatttgtagaatacaagaattcagtaacttctgctagcatacaaagtctcaccgccttatgagcaaaaataacccatcagaaaaaggaccaacctgatttaaaaaagaacacattaagaaattcccaaggctggacgtggtggctcacacctgtaatcccagcctttggaaggccaagccaggcggaatgcttgagcccagaagtttgagaccagcctgggtaacttggtgaaagtctctaggaaaaaaaaaaaaaaattagccgggcatgatggtgcgtgcctgtggtcccatccacttgaaggctgagatgggaggatcgtttaagcctgggagacagaggttgcagtgagccgagatcatgacactgcacttagcctgggtggcagagcgagactctgtcaaaaaaaaaaa

SEQ ID NO: 11828 - DNA, 602 bp, Homo sapiens
ggcatattcgtcaggacccccacgccgctccagggttttaaacaaggccaacatttgatgtcacatgtgaaaaaagacctacaagtgaagtaggtgggccaaaagacatgcacatttaaaaatgtgctaactatactagctaaaacctgtgcttaatatatgccagaaactgctctggtgctgttaatggagcctgctaaacaaaactgcttctcaacaatagaagttgtactacgctatggagtggacactccatagcaatgaaatgttttggagtgcctgtttcctcatctcagcaacataatagttctcaaacttcttagtctttgttattctgatatagataaaatgttttctattatgagtttcattttttttttatgtttaacagccatttgtggggctgagtgcagtggctcatgcctgtaatcccagcactttaggaggccgaagcaggcggatcacttgaggtcaggagttcaaaaccagcctggccaacatggtgaaaccctgtctctactaaaaatacaaaaacattagccgggtgtggtgatgggcacctgtaatcccagccacttgggaggctgaggcaggagaatcgc

SEQ ID NO: 11829 - DNA, 641 bp, Homo sapiens
atacatttaagacacttatcctggtggcaagaaatagtaaatgctcgataaatattagctaaaagtatatatgccgatatacatgggttaatacagatactacgatggagtattagataaagttctagctcactgcagccttcaccttccagactcaagcgattcttctgcctcagcctctcaagcagctgggaccacagatgtgtgcctccacacatggctatgttgcccaggcaggtcttaaactcctggactcaagcagtcctctccccttggcctcccaaagtgctgcgattacaggtgtgagccactgttccagccctgaggttcttgatagtctaggtagagaggaaaattaaagaagttatgtggaaaacatacattctttaggagagtttttcctggcaccaaataaatattcatcccacagagttagagggatattgagtactggacttgattatgtccttgaccccagtactaaatttgtgaacttggacaagttatttaacctatcatgtataaatgtattaacatactgtatgtttacttttagtcacttttgagattgataaaaagtgctgaataaagtgttttgggaagtgcctttttcattcaatcctgtacacctaaaacttgtt

SEQ ID NO: 11830 - DNA, 738 bp, Homo sapiens
ggcatattcgtcaggacccccacgccgctccagggttttaaacaaggccaacatttgatgtcacatgtgaaaaaagacctacaagtgaagtaggtgggccaaaagacatgcacatttaaaaatgtgctaactatactagctaaaacctgtgcttaatatatgccagaaactgctctggtgctgttaatggagcctgctaaacaaaactgcttctcaacaatagaagttgtactacgctatggagtggacactccatagcaatgaaatgttttggagtgcctgtttcctcatctcagcaacataatagttctcaaacttcttagtctttgttattctgatatagataaaatgttttctattatgagtttcattttttttttatgtttaacagccatttgtgtgagccactgttccagccctgaggttcttgatagtctaggtagagaggaaaattaaagaagttatgtggaaaacatacattctttaggagagtttttcctggcaccaaataaatattcatcccacagagttagagggatattgagtactggacttgattatgtccttgaccccagtactaaatttgtgaacttggacaagttatttaacctatcatgtataaatgtattaacatactgtatgtttacttttagtcacttttgagattgataaaaagtgctgaataaagtgttttgggaagtgcctttttcattcaatcctgtacacctaaaacttgtt

SEQ ID NO: 11831 - DNA, 1065 bp, Homo sapiens
gcaaaggtaagagaattcactgtgaattaattattcattgaacacctattttgtgccattgactatccttattgctgggagcacagcgtttaaaaaaaaaccaaaaacctttctcccactctaatagatgagtcacataatgggaaaacaaacaaatgtatcatctattaaagtgggagaacttggttttgtagttttaaaagtattgtcatggaaccaacgatactgcttgcatctatacaccatgattagagaggaagtggatggagagtgtgtgtgtctgagagagagaatatttagaatgccaaaagcgggcacttcaaggaaggctttttttatttaaaaaaaattagctcattctacatactttagaaattacctttgagtagcaaatgttaaggatataaatactttgcacgtatattccttgtttatagttaaccatatgttattttttacctgaaaaatactaaaacatattctacctacgtgcaatctaagttttgtagcagagtctttttacgggggccaaacaattctggactaatttttaaaaccctgaaatggctcactgttttgaggttattttgatggagtatgaatttacttctttgtcatttggagaaggtgcacagtattattatgaacagagaagagctgtatgaaaactgatcttccagcatctatcatctccttttagtctaatgagatactgccattatctcctgatgaaatattgttctagaaaaccttaccccatcatacgatttctgcagatcttacaggagcaatctgagctcaagcaatattaattactgtttcatttgtccatttgtctgtgtataatcatgtattttaatgatcttctattttctatggtttgtgtagatttggagactaattcaaaagagttgaagttttttggacatgtttagttgaatgtgcagttctcttttgaagaatcctgtctccaaatcctgttttgaaaagagtgttgatgagtagcacagcacctgtcatattgtgagtgtgcaataaaatcatgccttttcagcagaccttaac

SEQ ID NO: 11832 - DNA, 1987 bp, Homo sapiens
actctgttgaccaccgtgaagttcaggtcttaagccaaagcatgccactcactccgcaccaggcagtgcctagtggagagaggccctacatgtgtgttgagtgtgggaagtgctttggccggagttcccacctccttcagcatcagcgtatccacactggagagaagccctatgtgtgcagtgtatgtgggaaggccttcagccagagctcagtccttagtaaacacaggagaattcacacaggtgagaagccctatgagtgtaatgagtgtggaaaagcctttagagtgagctcagatcttgctcagcatcacaagatacatacaggagagaagcctcacgaatgtcttgagtgtcggaaagccttcactcaactctcacatctcattcagcaccagcggatccacacgggagaaaggccatatgtgtgtccgttgtgtgggaaagccttcaaccatagcactgttctgcggagccaccagagggtacacactggggagaagcctcacaggtgcaatgagtgtgggaaaaccttcagtgtgaagaggacactgctgcagcaccagaggatccacaccggggagaagccctacacgtgcagcgagtgtgggaaggccttcagcgaccgctcagtcctcattcagcaccacaacgtgcacaccggggagaagccctatgagtgcagtgagtgtgggaagaccttcagccaccgctccacactgatgaatcacgagcggatccacaccgaggaaaagccctatgcatgctacgaatgtgggaaggccttcgttcagcactcacacctgatccagcaccagagagtccacactggggagaagccctatgtgtgtggtgaatgtgggcacgccttcagtgcacgccggtctctgatccagcatgagagaatccacacaggtgaaaagcccttccagtgcacagaatgtggcaaagcttcagcctgaaagcaactctgattgtgcacctgaggacccacacgggcgagaagccatatgagtgcaatagctgcgggaaggccttcagccagtactcagtgctcatccagcaccagcggatccacacaggcgagaagccctatgagtgcggggagtgtgggcgtgccttcaaccagcatggccacctaatccagcaccagaaagtgcacagaaagttgtgacccatggctgacacaagaatccattctcacagaaactgcatgtggaaccacaagcagccttcagcccaagagaagtctctgttaactctataggaagcttttctttggcgattcagtgtcacaaaataactccagaaagaagcacttagcgtgctgttcctgtggaaaaacttcagagactacctgttttattttcctcaacatcttgaagttatgttggagagtaatcatacaattgtagagaattttggtaaaaaacagccataattctttaacattagtttatttgaactaagggaatttaaggcataagaaccattatcccaataaaatcttacattccaaataaagttctttttctaagaacattacatgcccttcctaaatatcaattaaccatactaattattgcacttaaaatttgaaagtcggactattttcagtattctcttaaaagactaaagtattgtatggataaagtgatataaaaagatattttcatcaagcatcatgtaaaatggttggaaatcctaagtgtgtggatttccatcctaagtgtgtggagtcctgttttgtatgaaacaaggaaaaagcttatatattagtgagaaattacataaatttaaaaaactttttgtatgtgtgtgtggagatagtcttgctctgttgcccaagctgcagtgcagtggcatgatcttggctcactgcagtctcccccaccccaggttcaagcttttcttgtgcctcagtctcccaagtaactaggattatagatatgcgccaccacacctggctaatttttgtatttttagt

SEQ ID NO: 11833 - DNA, 1933 bp, Homo sapiens
actctgttgaccaccgtgaagttcaggtcttaagccaaagcatgccactcactccgcaccaggcagtgcctagtggagagaggccctacatgtgtgttgagtgtgggaagtgctttggccggagttcccacctccttcagcatcagcgtatccacactggagagaagccctatgtgtgcagtgtatgtgggaaggccttcagccagagctcagtccttagtaaacacaggagaattcacacaggtgagaagccctatgagtgtaatgagtgtggaaaagcctttagagtgagctcagatcttgctcagcatcacaagatacatacaggagagaagcctcacgaatgtcttgagtgtcggaaagccttcactcaactctcacatctcattcagcaccagcggatccacacgggagaaaggccatatgtgtgtccgttgtgtgggaaagccttcaaccatagcactgttctgcggagccaccagagggtacacactggggagaagcctcacaggtgcaatgagtgtgggaaaaccttcagtgtgaagaggacactgctgcagcaccagaggatccacaccggggagaagccctacacgtgcagcgagtgtgggaaggccttcagcgaccgctcagtcctcattcagcaccacaacgtgcacaccggggagaagccctatgagtgcagtgagtgtgggaagaccttcagccaccgctccacactgatgaatcacgagcggatccacaccgaggaaaagccctatgcatgctacgaatgtgggaaggccttcgttcagcactcacacctgatccagcaccagagagtccacactggggagaagccctatgtgtgtggtgaatgtgggcacgccttcagtgcacgccggtctctgatccagcatgagagaatccacacagtctgattgtgcacctgaggacccacacgggcgagaagccatatgagtgcaatagctgcgggaaggccttcagccagtactcagtgctcatccagcaccagcggatccacacaggcgagaagccctatgagtgcggggagtgtgggcgtgccttcaaccagcatggccacctaatccagcaccagaaagtgcacagaaagttgtgacccatggctgacacaagaatccattctcacagaaactgcatgtggaaccacaagcagccttcagcccaagagaagtctctgttaactctataggaagcttttctttggcgattcagtgtcacaaaataactccagaaagaagcacttagcgtgctgttcctgtggaaaaacttcagagactacctgttttattttcctcaacatcttgaagttatgttggagagtaatcatacaattgtagagaattttggtaaaaaacagccataattctttaacattagtttatttgaactaagggaatttaaggcataagaaccattatcccaataaaatcttacattccaaataaagttctttttctaagaacattacatgcccttcctaaatatcaattaaccatactaattattgcacttaaaatttgaaagtcggactattttcagtattctcttaaaagactaaagtattgtatggataaagtgatataaaaagatattttcatcaagcatcatgtaaaatggttggaaatcctaagtgtgtggatttccatcctaagtgtgtggagtcctgttttgtatgaaacaaggaaaaagcttatatattagtgagaaattacataaatttaaaaaactttttgtatgtgtgtgtggagatagtcttgctctgttgcccaagctgcagtgcagtggcatgatcttggctcactgcagtctcccccaccccaggttcaagcttttcttgtgcctcagtctcccaagtaactaggattatagatatgcgccaccacacctggctaatttttgtatttttagt

SEQ ID NO: 11834 - DNA, 1934 bp, Homo sapiens
actctgttgaccaccgtgaagttcaggtcttaagccaaagcatgccactcactccgcaccaggcagtgcctagtggagagaggccctacatgtgtgttgagtgtgggaagtgctttggccggagttcccacctccttcagcatcagcgtatccacactggagagaagccctatgtgtgcagtgtatgtgggaaggccttcagccagagctcagtccttagtaaacacaggagaattcacacaggtgagaagccctatgagtgtaatgagtgtggaaaagcctttagagtgagctcagatcttgctcagcatcacaagatacatacaggagagaagcctcacgaatgtcttgagtgtcggaaagccttcactcaactctcacatctcattcagcaccagcggatccacacgggagaaaggccatatgtgtgtccgttgtgtgggaaagccttcaaccatagcactgttctgcggagccaccagagggtacacactggggagaagcctcacaggtgcaatgagtgtgggaaaaccttcagtgtgaagaggacactgctgcagcaccagaggatccacaccggggagaagccctacacgtgcagcgagtgtgggaaggccttcagcgaccgctcagtcctcattcagcaccacaacgtgcacaccggggagaagccctatgagtgcagtgagtgtgggaagaccttcagccaccgctccacactgatgaatcacgagcggatccacaccgaggctgatccagcaccagagagtccacactggggagaagccctatgtgtgtggtgaatgtgggcacgccttcagtgcacgccggtctctgatccagcatgagagaatccacacaggtgaaaagcccttccagtgcacagaatgtggcaaagcttcagcctgaaagcaactctgattgtgcacctgaggacccacacgggcgagaagccatatgagtgcaatagctgcgggaaggccttcagccagtactcagtgctcatccagcaccagcggatccacacaggcgagaagccctatgagtgcggggagtgtgggcgtgccttcaaccagcatggccacctaatccagcaccagaaagtgcacagaaagttgtgacccatggctgacacaagaatccattctcacagaaactgcatgtggaaccacaagcagccttcagcccaagagaagtctctgttaactctataggaagcttttctttggcgattcagtgtcacaaaataactccagaaagaagcacttagcgtgctgttcctgtggaaaaacttcagagactacctgttttattttcctcaacatcttgaagttatgttggagagtaatcatacaattgtagagaattttggtaaaaaacagccataattctttaacattagtttatttgaactaagggaatttaaggcataagaaccattatcccaataaaatcttacattccaaataaagttctttttctaagaacattacatgcccttcctaaatatcaattaaccatactaattattgcacttaaaatttgaaagtcggactattttcagtattctcttaaaagactaaagtattgtatggataaagtgatataaaaagatattttcatcaagcatcatgtaaaatggttggaaatcctaagtgtgtggatttccatcctaagtgtgtggagtcctgttttgtatgaaacaaggaaaaagcttatatattagtgagaaattacataaatttaaaaaactttttgtatgtgtgtgtggagatagtcttgctctgttgcccaagctgcagtgcagtggcatgatcttggctcactgcagtctcccccaccccaggttcaagcttttcttgtgcctcagtctcccaagtaactaggattatagatatgcgccaccacacctggctaatttttgtatttttagt

SEQ ID NO: 11835 - DNA, 517 bp, Homo sapiens
accctactgccaagtgtctgattagcagcatcctgaaaggaaaagccggctgcctcccctgaagtgggtccccagttctgtagtccagcttgctccagaggttattgtcactctgccaccaaaaacaaccaatacagtcaaagctcagcagctccagctctagctggatgaattatcttctaaccactcttaccccacattgtacaactgcatccatccttcctcagttgtacagacaacttaaatatttcctctacaccattggttctcaaccagtggccgttgccccgtgctgccaccaccaggggacatttggtggagtttggagacatttttggttgttaaagccataggatgctactgacatatagtcgggagaggccagggatgcttctaaatatcctgcaatgcacagaatagttcccccacccaacaaagaattatctagcccgatagcgctgagggtatgaaaccctgctgtacacagtgatgtcacatactgaggtctcattgttat

SEQ ID NO: 11836 - DNA, 575 bp, Homo sapiens
attatttaagaatcagggcaggaatcactgcttcgagaagcgtttcttgattcctaaagtttaaattaaatgccctcattcatgttcttcttataatttttctgtcattttactcactacattgattagtaaatacctggctttccctcataccaattagctctttatagcaagagcacatagcaagcatttgatacatttttaagtaccaagatatgaaatctcaatatcatacatgattaaaagctttatatattttagtgagtaattaagtttacactgtgaataaggattaattcccagatgaccatctacagttactaccacatagagggtatacacgatagatcgattacaagaatataaaacttattttccttcctgtatccacatttctttgcaatgtgaatttgcaggccctctcaagaagtggagtctatttccctaccccttgaatctgggcaggctttatgacttatttatttggctaataacatacagaagaagacatgtgtgtcacttttaagcctgggcctcaagtggtctcacacaagtcttctttcccttgtggaact

SEQ ID NO: 11837 - DNA, 181 bp, Homo sapiens
gtgagtcccatacaggctaaaggggcagtgagacatttgtcctacatggggacagatcagtgtatttaagtgtagtggatactgttttctacgaaattgttcataaatttttttttattttgagatgggatctcattgtgtcatccaggctggagtgcagtggtttgatcatggctcacag

SEQ ID NO: 11838 - DNA, 435 bp, Homo sapiens
tggaattccatgacaagtccaataacattaactagctttcaaggtcgatgtcagcaaaatgaaattgccattagaagcatcacaatcagtgtccttcctcatttggcataggtggaggaggactgcagagttacctttagtaatatctcatgatacaatgatgcttcatgtcaaatagcaattaatatcattttaacttaaataatgtggatattattttacattttgatattaatttttttaaaacacttgaggtttaaagaaaagataaaacaaggtagctttgtcaagaatgagaatttagatcttcactggttaatctctttaatttcaaatttagctacttaagtggaacgtcccaacttaaaataaatgtctagaaattgcctcataggttaaagaactctcaaaaacctgtccctgacaatggtattt

SEQ ID NO: 11839 - DNA, 413 bp, Homo sapiens
tggttttcactttggaccataagcatccgtattgtggtaagagtgttgggttgagtgactcagtgctgtgcctgctttctccacctgagtgctactgatgatgggtctgggggagcagcatgagcattaacaggggacttactaaaaataggaagaataggaagatacagacaaatatttcttatttgtctcacgtgtatgaggaatctaaaaggttgaactcctagacgcagggagtacaaaggtggataccagagccaagaggtagggaaaatggaagatgttgtttaaagggtacaaacttttagttataaataaggttcgtgaatctaatatatagcatcatgattatagtagataataatgtttttgtatacttgatacaataaaggaaactatgtaagatgatacat

SEQ ID NO: 11840 - DNA, 552 bp, Homo sapiens
agcgaggtgtggtggcatgcacctgtactcccagctactggggaggctgaggtgggagaatcacttgaacctgggaggcggaggttgcagtgagccgagatcacgccactgcaccccagcctgggtgacagagtgagactccgtctcaaaaaaaaagaaaagttcatgcacagctcacaacaatgcactggtaacgggaagcctaactaagaagatgaaaagtgaaatttggggggcattaactatggttcctttcaggtctaaacctcataactgacttccccagcaggctttgagcaatcaaaacacccaggacaaatcccataagcatacctaattgaataatccagattctgtttgcttgggtttttgaagcatcaaaacagttcctttgtgtgcttactttggctcccctgcagttttaattaagcctcccaaggctcacaagcatattaaaattaggtggaaagaaaacctgcagcctttgatgccaatgaccacaaggtgcaagtatttgggtttgatcttttgctacagcagctacagctgatg

SEQ ID NO: 11841 - DNA, 324 bp, Homo sapiens
attattttcagatctttagcacaaactggaaaaaacacccagacattttctttaaaccacttaaaacaacaatacagtctggaccgcagacatactggcttcatctccaacctcaaattcagccctcaatatttgcctatataagcaatgtttacagcctcagaagccaaacaatctcttcttttagtttttatcttgattccaggccccatactttattcttatctgagagtccttggaatattttcatttcctgaagttctgaaaaatggattgtctctgctgtgtagctcctctctcctttctctcattctttatagctta

SEQ ID NO: 11842 - DNA, 383 bp, Homo sapiens
tttttttttttagaaaaaggttttaatggacatttggtaactacattctgtttttgacaacctccccattacatttctagttatctattcaaaaccaaaggacaaaaaataaaaaaataaaaactacaccagtttacaaagaacaatggggcgaaagcaaaatgtattccttgctgtttcacacgtgcttttaaaggaaacaaacaaccaaacaaacagagaaattgtagttcctaagtttcttgacccaaatccaagcagactcattgacaagcctaaacctctccgtgtgtcttcctgcttctgaggctaaaatatggataagctcaaagtttgacacatggatatattttcaaatgacatgtttagtgtaaaaaaaaaaa

SEQ ID NO: 11843 - DNA, 474 bp, Homo sapiens
gatttgatagaggaagtcagtccttggtctagatgggtacttgtcatacagtaggaaaaagggcgggggcagttgtcctttattctgcctctgcactattcacatgtggagcacagtgatttgtgagagtatgtataaccttcgtgaacatcactggcctcagaaccctcccttgccaaatttacctgcatctgtgcaaagacaagtggagatattgatgatatgtgcatatcccagagggaatagcgtttgctttttgatgcatgcccacccttgcataattgggaggttttaacatagcatatttcaccataaaggaattttattctaagaatgttaatcagaatatccctaagtaacagaagttcccatctggtcagttgcaaggtgaccaaaacactttcttggtttgagtatagtcatatgttctgtcaaatgatgttttggtcaacagtggacttcatgtaaggtagt

SEQ ID NO: 11844 - DNA, 318 bp, Homo sapiens
aagaaattataagatctgaaaagacaggagaatggaattctacatgggaaaaatgcacacacttggaatcacaaagtgtgttcaccaaaagagggtagaccagctggcctcaaacccacccctaggtctccctgcatttgatcttattcttggaagactcatgtgtcagtttcactattatttcaacaagctggtaaagaaagtacaataatggctgctaacatttactgcgaacttgctatgtggtaagggctgtgttaattgctatatatacattattgcatgaatgaagtagggacctgactatctccattctac

SEQ ID NO: 11845 - DNA, 395 bp, Homo sapiens
tttctgattactctattgcccttacatgcaagcaactggacattgactaaatatggatagcatgtttggtatatagacataaaatatgggttataaaggagattcacttagagaagaaaagccatgcagccttttggagagaaacccccaatcaataggccattgggactgaacacaggaataatcaatcacaatagacaatgctttctgagtcctatgtaggtcaggctctggagtggctggtgctgatttgctccagatctgcagtggctccccctccactcgggaggctgaggtgggaggattgcttgagcctgaaagggagaggctgcagtgagccaagatcatgccactgcactccagcctgggtgatggagcaagaccctgtcaccaga

SEQ ID NO: 11846 - DNA, 484 bp, Homo sapiens
gaaagatcagagactcttttgctaggctgttgaagttcgaggtgaaatcatcttttcttcacttgttaactgaaggcaaacccttcgaaatatcctggccttgttgttcatgttgtttttgcatttttatcatcagggtcacttttgttatagatttgtcatagtgtggatcaacctgcattcttgtcagggtttgcaagcctccctgccaacgtgctgatccagtgcctgtcctggagttacccacctcatcctggtctgtctttcttagaacaatgactttctagctctagcctaatacaataatttgtttggtggtttaaaggagttggccaagaaacacaggcaagagctagcattcccaaacttaatccttaatctgtttgtcttacttgtttatggagaaaaacagaaacaaaatcaccctaagattgtgctatctgaaaccaaaacacctccaggaagatgttccaggctgaatgtc

SEQ ID NO: 11847 - DNA, 607 bp, Homo sapiens
aaagtgctaagattacaggtggcagccaccatgcctggccaagaaggaaactttaaaacaggtgtcaaggacagcaaggatttgaataattagcttagtacacagagggctcactacatatctaaatttgcaccgaacagaggataaaattatgttgtttctgaaacacttttaaaaatcgatcatgtaccagaccacaaagaaaaatatgaactcttaaaagtagaaatcataacaggccacatcttgttaatgtaatgcattaaacttgaaattaactacaaaaagcttctcccccaccaaaaaagaactaaccccctggaaattttaaactattttttaaatagcctttagactaaagaaattaatagaacactttatcaaagtatatgggatttggccaaagctttatttaaagaaaaatatatagccttacatatttttattaacagccagaagatattgcaaataagcacctaactcaagaaaccagaaaaagggcctagtggagtgggtcacgcctgcagatctagctacctggcaggctgacacaagaggatcacttgaggcttcagtgagctatgatccagcctgggcaacagagcga

SEQ ID NO: 11848 - DNA, 463 bp, Homo sapiens
caacatactcctgctctttgttcatttgcttttttgatcctgaagatctgacattgggagagatgggaattcaaaatgatggcaacaattactcagcaatgcagtctgtttttattttctcctacttagttcattgacagtttcctcctcgccccagtttgataatatccctttcaacaacccatagtaccggtgttgcaaatagtttaggaaagcacccaaagctggatgaaattgtgcaaagtgtattctcagcatgtatattcaataccatgcctcttaaaaatgcttctcttaaagggtgcacgctgtagcatgaaatgtgtgcatatttaatgtatcttcctggaatatgctatgtgctaaatatatatatattctataaataaaataataaaatgtacaatagaaatacatatttctgtatgcaaataaatatattatacacaaactcttaatacgc

SEQ ID NO: 11849 - DNA, 559 bp, Homo sapiens
atttaattcagaataagatataataactcttcaataaaatatatacaattgtacaaggcaccctttcaaaggggtaaaggcatactggagggatgggagagatggagaggaaggtgaaataccagggagcttaatgggctgtttggcaactccattttcaccaagtcaaaacatggctttatcttctgccctggacatgttaaaaagtatataaaattttctaataagtttagcatatacagcaggtacacacacagagaaagcataattttttttctttctggatctaccaattgttcaagaatatttagcatacaggtaatggttacaaggtactcattttttaagcagaaaattactgtacccccccacccaaataatctttgcaatctgtgaggatgaaagtacctagtatttctcagaaaccatcaactcctcccaacaggctttaactttttactctccaattatctgaaatgaagtaaagcaacagccttgagaagaattaggaagtatttctaattttctacctcacctccaggcattctcaggattcttc

SEQ ID NO: 11850 - DNA, 700 bp, Homo sapiens
caaaagaccctgttaagaggattaaatacaagccaccgactcggagaaaatattttgcaaaacacgtatccggcaaagaattaatatcagaatacataatgaattttcaaaactcaatataaaaatatctaactggaaagtgggcaaaaccattaataaacatttcaccacataggatatatagatggcaaagaagcatatgaaaagatgcgcaacatcattagctattagggaaatgcaaattaaaaccaccataagatattagtacagaatggttaaaataaaataatagtgataacaccaaatgccaataaggaagtggaggagaaataggatcattgatatattgtttttgggaaggtaaaatggtacagccctctagaaagcagtttggtaattagaaaaaaacccaaagtatgcatgcagttctgtaagataaagtgtctgtccaggcatgcatacaacccagcaattgcatgcctgggcgcttaccttacagaaatgaaaatttataattacattataatttgtacacaaaattcatcacagctttattaatagaagccaaactctctgtgggcttctcacagtgtacccattgccagagtaaactgcagccttgaaccattgctcagcctccttacccatgagctatgaacactgaagcaggttgcacagtgaaaaaaaaaaaaaaaaaact

SEQ ID NO: 11851 - DNA, 599 bp, Homo sapiens
atagacattcagtgacttttatctcgttggccaagaaagggcacatggtccacgctcggaaaatttgaagcagtcctaagacttttaaggaaactattgggaaaaagaaatcgtttcctttacaggttgctgaaagggtaagaggtaggtccagaacttctggcaactatcttgctagcaagtcgggtagggcttgcctgagaatgacaccaatacagaggaaactatagccaagcagtggagagagggagactgagtcctggctctttttttagcccatacatctaataatgtctgaagccagattaacctctggatttttaagttctgtgtgtcaagacattccctttcatttttaagccagtttgagttcagtttttaaaaattatttgaaacagaaagaatcctgaataatacaggtcccttccaacaaaataaaacttgattatactaacatgtactctatatatctagcttggcagatttctagttatttctagtagatttctaacatttctagtaatgctttgatggtagttagatgcagttacttgctgtaagtaattggaaataataaaacctcattgttttaaaagtga

SEQ ID NO: 11852 - DNA, 445 bp, Homo sapiens
ggtagcacacgttaatggtgttgctagctggagataatgccttgacatccacgtgtggctgtcatctaagaggagagtgggaatggctttgaatactagaaaagtacaaaagtgacaagcagggtgttatgtgtataggattgtagtaattaaaaatgatctgttttaccaagccttaacttggcttggtaaagccaaggattaattaaggaataacagtatgaattcccttttttaggggtgtactgagaaagttattgttaaaatcatactaagaaattactaacatataaaggatactatgcttaatttcctgtagaaaccccgtgagcagcatcttcaaaattctcagaatagattttttttcaggaagaaaatgtactaaaagaaacaaattttagaatgacagagatcctgggaattatttggatttgaagtatgttag

SEQ ID NO: 11853 - DNA, 98 bp, Homo sapiens
aacttaaacatcacctctaaagaagttatactttcactgcagattgttctctcaaaaaaggcaaacaacttttgagcatttccagatgtagctctcat

SEQ ID NO: 11854 - DNA, 226 bp, Homo sapiens
tcacttgaccccaggagctcaggaccaacttgggcaacacagtgagatcctgtgtctacaaaaagttaattattagtcgggcatggtggcatgttccagtagtcctagctatttgggaggcttaagtgggagaattgtttgagcctaggaggtcgaagctgcagtgagccatgattaactcacttcaccctagcctgtgtgacaacagtgagatctggtcttggga

SEQ ID NO: 11855 - DNA, 580 bp, Homo sapiens
tggagtgcaggtcttaccgtccgagatcgtccgcaactgggcgagctgtgcatggggcgtggctaaggccgtggtttggttacgattggccagcgggacttaagtgttgtctctgaagagcatggacattagtctggagggtcctggaagagtgatccccgccccaccatcaaatggcgcttaggtctaggaagcgggtgtgggtggggccttagggcgaggcgcagacacaccccgaagtggttggattgtataccgcaaggggctggatcgaaccccccaaagacactggaaggctgtgtggctgaggagggcccggcagatccagtgtgtcgtgggctttacaggaaagagctccaccttctctggagtgtgcagatgcgatctaggtgtgtccacccgatgggagctgcgggccgggcagatgctgccccagtacaaagctgatttggacctggggcctctggacttccctgattctctgcttgcatctccagcaaagtcctgtcccgttggctgccttcatccactctctcacttctctgccttcagagtaaaattgcaagatctgtggtgctta

SEQ ID NO: 11856 - DNA, 1201 bp, Homo sapiens
ttcttgccttctcagctgagcttttcctgactagtgaagagaaggcatcacagtgtatttaggggatatttcagttgattgtaaaatgaaagattaattggtttatttatggtaaattaatctggtcttcaaattcttccctatatttttctgtgttttgatgttcatctgcagtgggaaggagaagggtgggaaaagttgtcttgcttgtgtggtttacagatagacataataatttccagggaaaagtgcatggtattatttatctcaggaataggattaaaaaaggaatgtgcctagatcaggcgttcagtgtaccttatggtcatattttaccctgaagttaaatagtcttaaagtactattcagagtgggagaagcggtatgtattcctgaagagtcttcatggtcctgggcattgtgctatgggtaactcttaactcttcactcttaagcagctgaaatctagccatgtttaccttgaggtaagtgaacgctgttccgagtattggtttatcatgagggagcaccattttgtgaatagtttgggaggacaactgaaggattgtcttttttgcatgtttgtttttgaaggcctatctcccattttgttaattcagttaataattgttccttttctgaggctctctaagcttccaaaacaggaatctgctacattttactaaagggccttactattgttcattcagttaataattgttcttttcggaggctaagcttccaaatgaggaatctgctgcattttactaaagtgccttgctaagtggtaactgtggtggcaaaatgatgtatatgctctcaattatatatacctggcacacttgaactaccatgttaggaatatattaaggttgccattaataaaaatttctaacctttgaagtagaattgaaatttaattttatttactccatgtgcacattttcctcgtttagtcagttacttagattcattgaggagagatgtatttgataatgttctcacgttaaacataaaaaaaaagtaaatttgaaatctagcttatagatttggactttattaactcagtcaaaacataaaatgaattgctggaattcacatggtgggaaaagtatcttagaaataagatagtaggcatttgggagcgagataaagaaatattaaaattttcatgtagatttggctcatgttggcctttaat

SEQ ID NO: 11857 - DNA, 1132 bp, Homo sapiens
attattcttaaaaatcctgatccctgaatgctcagggagactgatttgagtaataataaaactactgtctcccacacagccggctctgcatgaattgctctttattgcaattcccctgtcttgagaaatcgcttctgtctaggcagcgggcaaggtgagcccattgggcagttacaaggagacacggagacacagagacacaaagacagacacacaaaaaagagactgtcatgtgaaaagacagacacacagagagaacatcgtaagaagacagaggaggagattggagagaagcaactgtaagccaaggaacaccaaagactgcaggaaaccccaaaaactaggaacagggcatggaacagattctacccatattctcaggaagagtccctgccaacacctggaattcaagcttctggattccagatctaaaaaacctgggcttagataatgattacgccaaaccactggattcaagaaaaagctcgtcatgcccaactattgcatgacagtatgtgagagccaaccgactaaagatattttaggagaataaaatatttggagagcattggagtaaggactgtcattcctggaatggaagcatttaattaaaatgaccataagcctgaagtgactggggcatgggaatatccttgatgagaagatagtgaagcatgtaacaccctgggatagatggtgctgatggaacattttgaggagacccaagttgttggtggaggtgatgggagactcaggacaacagaaagtatgggattttcaatgctgcagaaatggggctgatatggtttggctctgtccccacccaaatatcaccttgaactgtagctcccataattcccatgtgtggtgggagggacccagtgggaggtaattgaatcatgggggctggtttctcccatgctattctcatgatagtgagtaagtctcacgagatctgatggttttataaaggggagtttccctacacaaattctgtcttgcctgctgccatgtaagacgtgactttgctccttattcaccttctgctgcgattgtgatgccacccccagccatgagtgagccaaactcactgttactgtgagtcaattaaacctctttcctttataaatta

SEQ ID NO: 11858 - DNA, 728 bp, Homo sapiens
attattcttaaaaatcctgatccctgaatgctcagggagactgatttgagtaataataaaactactgtctcccacacagccggctctgcatgaattgctctttattgcaattcccctgtcttgagaaatcgcttctgtctaggcagcgggcaaggtgagcccattgggcagttacaaggagacacggagacacagagacacaaagacagacacacaaaaaagagactgtcatgtgaaaagacagacacacagagagaacatcgtaagaagacagaggaggagattggagagaagcaactgtaagccaaggaacaccaaagactgcaggaaaaagatcatccagctcaagttcagtctcaaatgactgcaccccccagctgacaactggactgcaccagaatcaatcacctgaactgctcaccaagtcccaacctaaagaagacatgagaaggtcacttgagggtcatgaaaaaatttgcagaaggaatgaatgccttgaaggacgttgcgaccagctgctgatacccaggaatctggttgctcaagatgttacctgagaataaagaaacgcagacttttccccctcacttccctgaaactgcctctcctttactccttagctacctaaaaactcactgcttcctctttttgttaagatggatttgagacatcttgctctcccaacttcttgctttgaccaaattgaataaatcttgtttgatctccaa

SEQ ID NO: 11859 - DNA, 2040 bp, Homo sapiens
  misc_feature (83)..(83): n is a, c, g, or t
ccgcaagtgctgggatgacaggtgtgagccaccgcccccggcccctcgcccgccttttgaaggagcctttcgtcctcaagggngaggccactccccccccgcgagttccatgccccctagagggtcatcgttcccgacggggaggtggcgccctcccccgggccccgggccccgaccgcccgtgctgcctccttccgggccctcctccgcgatgacggcgccgccagcaggccaggcggactgggcggggctccgagcggggactgggacccagaccgactaggggactgggagcgggcggcgcggccatggcgggctgctgcgccgcgctggcggccttcctgttcgagtacgacacgccgcgcatcgtgctcatccgcagccgcaaagtggggctcatgaaccgcgccgtgcaactgctcatcctggcctacgtcatcgggtgggtgtttgtgtgggaaaagggctaccaggaaactgactccgtggtcagctccgttacgaccaaggtcaagggcgtggctgtgaccaacacttctaaacttggattccggatctgggatgtggcggattatgtgataccagctcaggaggaaaactccctcttcgtcatgaccaacgtgatcctcaccatgaaccagacacagggcctgtgccccgagattccagatgcgaccactgtgtgtaaatcagatgccagctgtactgccggctctgccggcacccacagcaacggagtctcaacaggcaggtgcgtagctttcaacgggtctgtcaagacgtgtgaggtggcggcctggtgcccggtggaggatgacacacacgtgccacaacctgcttttttaaaggctgcagaaaacttcactcttttggttaagaacaacatctggtatcccaaatttaatttcagcaagaggaatatccttcccaacatcaccactacttacctcaagtcgtgcatttatgatgctaaaacagatcccttctgccccatattccgtcttggcaaaatagtggagaacgcaggacacagtttccaggacatggccgtggagggaggcatcatgggcatccaggtcaactgggactgcaacctggacagagccgcctccctctgcttgcccaggtactccttccgccgcctcgatacacgggacgttgagcacaacgtatctcctggctacaatttcaggtttgccaagtactacagagacctggctggcaacgagcagcgcacgctcatcaaggcctatggcatccgcttcgacatcattgtgtttgggaaggcagggaaatttgacatcatccccactatgatcaacatcggctctggcctggcactgctaggcatggcgaccgtgctgtgtgacatcatagtcctctactgcatgaagaaaagactctactatcgggagaagaaatataaatatgtggaagattacgagcagggtcttgctagtgagctggaccagtgaggcctaccccacacctgggctctccacagccccatcaaagaacagagaggaggaggagggagaaatggccaccacatcaccccagagaaatttctggaatctgattgagtctccactccacaagcactcagggttccccagcagctcctgtgtgttgtgtgcaggatctgtttgcccactcggcccaggaggtcagcagtctgttcttggctgggtcaactctgcttttcccgcaacctggggttgtcgggggagcgctggcccgacgcagtggcactgctgtggctttcagggctggagctggctttgctcagaagcctcctgtctccagctctctccaggacaggcccagtcctctgaggcacggcggctctgttcaagcactttatgcggcaggggaggccgcctggctgcagtcactagacttgtagcaggcctgggctgcaggcttccccccgaccattccctgcagccatgcggcagagctggcatttctcctcagagaagcgctgtgctaaggtgatcgaggaccagacattaaagcgtgattttcttaaaaaaagtc

SEQ ID NO: 11860 - DNA, 1789 bp, Homo sapiens
taaagcaggctgtacggtccggagtgtatggatggactgggagcgggcggcgcggccatggcgggctgctgcgccgcgctggcggccttcctgttcgagtacgacacgccgcgcatcgtgctcatccgcagccgcaaagtggggctcatgaaccgcgccgtgcaactgctcatcctggcctacgtcatcgggtgggtgtttgtgtgggaaaagggctaccaggaaactgactccgtggtcagctccgttacgaccaaggtcaagggcgtggctgtgaccaacacttctaaacttggattccggatctgggatgtggcggattatgtgataccagctcaggaggaaaactccctcttcgtcatgaccaacgtgatcctcaccatgaaccagacacagggcctgtgccccgagattccagatgcgaccactgtgtgtaaatcagatgccagctgtactgccggctctgccggcacccacagcaacggagtctcaacaggcaggtgcgtagctttcaacgggtctgtcaagacgtgtgaggtggcggcctggtgcccggtggaggatgacacacacgtgccacaacctgcttttttaaaggctgcagaaaacttcactcttttggttaagaacaacatctggtatcccaaatttaatttcagcaagaggaatatccttcccaacatcaccactacttacctcaagtcgtgcatttatgatgctaaaacagatcccttctgccccatattccgtcttggcaaaatagtggagaacgcaggacacagtttccaggacatggccgtggagggaggcatcatgggcatccaggtcaactgggactgcaacctggacagagccgcctccctctgcttgcccaggtactccttccgccgcctcgatacacgggacgttgagcacaacgtatctcctggctacaatttcaggtttgccaagtactacagagacctggctggcaacgagcagcgcacgctcatcaaggcctatggcatccgcttcgacatcattgtgtttgggaaggcagggaaatttgacatcatccccactatgatcaacatcggctctggcctggcactgctaggcatggcgaccgtgctgtgtgacatcatagtcctctactgcatgaagaaaagactctactatcgggagaagaaatataaatatgtggaagattacgagcagggtcttgctagtgagctggaccagtgaggcctaccccacacctgggctctccacagccccatcaaagaacagagaggaggaggagggagaaatggccaccacatcaccccagagaaatttctggaatctgattgagtctccactccacaagcactcagggttccccagcagctcctgtgtgttgtgtgcaggatctgtttgcccactcggcccaggaggtcagcagtctgttcttggctgggtcaactctgcttttcccgcaacctggggttgtcgggggagcgctggcccgacgcagtggcactgctgtggctttcagggctggagctggctttgctcagaagcctcctgtctccagctctctccaggacaggcccagtcctctgaggcacggcggctctgttcaagcactttatgcggcaggggaggccgcctggctgcagtcactagacttgtagcaggcctgggctgcaggcttccccccgaccattccctgcagccatgcggcagagctggcatttctcctcagagaagcgctgtgctaaggtgatcgaggaccagacattaaagcgtgattttcttaaaaaaagtc

SEQ ID NO: 11861 - DNA, 2088 bp, Homo sapiens
  misc_feature (83)..(83): n is a, c, g, or t
ccgcaagtgctgggatgacaggtgtgagccaccgcccccggcccctcgcccgccttttgaaggagcctttcgtcctcaagggngaggccactccccccccgcgagttccatgccccctagagggtcatcgttcccgacggggaggtggcgccctcccccgggccccgggccccgaccgcccgtgctgcctccttccgggccctcctccgcgatgacggcgccgccagcaggccaggcggactgggcggggctccgagcggggactgggacccagaccgactaggggactgggagcgggcggcgcggccatggcgggctgctgcgccgcgctggcggccttcctgttcgagtacgacacgccgcgcatcgtgctcatccgcagccgcaaagtggggctcatgaaccgcgccgtgcaactgctcatcctggcctacgtcatcgggtgctaccatccccatttggcagaagtggaaatggagtcccctagaaggtgggtgtttgtgtgggaaaagggctaccaggaaactgactccgtggtcagctccgttacgaccaaggtcaagggcgtggctgtgaccaacacttctaaacttggattccggatctgggatgtggcggattatgtgataccagctcaggaggaaaactccctcttcgtcatgaccaacgtgatcctcaccatgaaccagacacagggcctgtgccccgagattccagatgcgaccactgtgtgtaaatcagatgccagctgtactgccggctctgccggcacccacagcaacggagtctcaacaggcaggtgcgtagctttcaacgggtctgtcaagacgtgtgaggtggcggcctggtgcccggtggaggatgacacacacgtgccacaacctgcttttttaaaggctgcagaaaacttcactcttttggttaagaacaacatctggtatcccaaatttaatttcagcaagaggaatatccttcccaacatcaccactacttacctcaagtcgtgcatttatgatgctaaaacagatcccttctgccccatattccgtcttggcaaaatagtggagaacgcaggacacagtttccaggacatggccgtggagggaggcatcatgggcatccaggtcaactgggactgcaacctggacagagccgcctccctctgcttgcccaggtactccttccgccgcctcgatacacgggacgttgagcacaacgtatctcctggctacaatttcaggtttgccaagtactacagagacctggctggcaacgagcagcgcacgctcatcaaggcctatggcatccgcttcgacatcattgtgtttgggaaggcagggaaatttgacatcatccccactatgatcaacatcggctctggcctggcactgctaggcatggcgaccgtgctgtgtgacatcatagtcctctactgcatgaagaaaagactctactatcgggagaagaaatataaatatgtggaagattacgagcagggtcttgctagtgagctggaccagtgaggcctaccccacacctgggctctccacagccccatcaaagaacagagaggaggaggagggagaaatggccaccacatcaccccagagaaatttctggaatctgattgagtctccactccacaagcactcagggttccccagcagctcctgtgtgttgtgtgcaggatctgtttgcccactcggcccaggaggtcagcagtctgttcttggctgggtcaactctgcttttcccgcaacctggggttgtcgggggagcgctggcccgacgcagtggcactgctgtggctttcagggctggagctggctttgctcagaagcctcctgtctccagctctctccaggacaggcccagtcctctgaggcacggcggctctgttcaagcactttatgcggcaggggaggccgcctggctgcagtcactagacttgtagcaggcctgggctgcaggcttccccccgaccattccctgcagccatgcggcagagctggcatttctcctcagagaagcgctgtgctaaggtgatcgaggaccagacattaaagcgtgattttcttaaaaaaagtc

SEQ ID NO: 11862 - DNA, 1892 bp, Homo sapiens
  misc_feature (83)..(83): n is a, c, g, or t
ccgcaagtgctgggatgacaggtgtgagccaccgcccccggcccctcgcccgccttttgaaggagcctttcgtcctcaagggngaggccactccccccccgcgagttccatgccccctagagggtcatcgttcccgacggggaggtggcgccctcccccgggccccgggccccgaccgcccgtgctgcctccttccgggccctcctccgcgatgacggcgccgccagcaggccaggcggactgggcggggctccgagcggggactgggacccagaccgactaggggactgggagcgggcggcgcggccatggcgggctgctgcgccgcgctggcggccttcctgttcgagtacgacacgccgcgcatcgtgctcatccgcagccgcaaagtggggctcatgaaccgcgccgtgcaactgctcatcctggcctacgtcatcgggaggaaaactccctcttcgtcatgaccaacgtgatcctcaccatgaaccagacacagggcctgtgccccgagattccagatgcgaccactgtgtgtaaatcagatgccagctgtactgccggctctgccggcacccacagcaacggagtctcaacaggcaggtgcgtagctttcaacgggtctgtcaagacgtgtgaggtggcggcctggtgcccggtggaggatgacacacacgtgccacaacctgcttttttaaaggctgcagaaaacttcactcttttggttaagaacaacatctggtatcccaaatttaatttcagcaagaggaatatccttcccaacatcaccactacttacctcaagtcgtgcatttatgatgctaaaacagatcccttctgccccatattccgtcttggcaaaatagtggagaacgcaggacacagtttccaggacatggccgtggagggaggcatcatgggcatccaggtcaactgggactgcaacctggacagagccgcctccctctgcttgcccaggtactccttccgccgcctcgatacacgggacgttgagcacaacgtatctcctggctacaatttcaggtttgccaagtactacagagacctggctggcaacgagcagcgcacgctcatcaaggcctatggcatccgcttcgacatcattgtgtttgggaaggcagggaaatttgacatcatccccactatgatcaacatcggctctggcctggcactgctaggcatggcgaccgtgctgtgtgacatcatagtcctctactgcatgaagaaaagactctactatcgggagaagaaatataaatatgtggaagattacgagcagggtcttgctagtgagctggaccagtgaggcctaccccacacctgggctctccacagccccatcaaagaacagagaggaggaggagggagaaatggccaccacatcaccccagagaaatttctggaatctgattgagtctccactccacaagcactcagggttccccagcagctcctgtgtgttgtgtgcaggatctgtttgcccactcggcccaggaggtcagcagtctgttcttggctgggtcaactctgcttttcccgcaacctggggttgtcgggggagcgctggcccgacgcagtggcactgctgtggctttcagggctggagctggctttgctcagaagcctcctgtctccagctctctccaggacaggcccagtcctctgaggcacggcggctctgttcaagcactttatgcggcaggggaggccgcctggctgcagtcactagacttgtagcaggcctgggctgcaggcttccccccgaccattccctgcagccatgcggcagagctggcatttctcctcagagaagcgctgtgctaaggtgatcgaggaccagacattaaagcgtgattttcttaaaaaaagtc

SEQ ID NO: 11863 - DNA, 1727 bp, Homo sapiens
  misc_feature (83)..(83): n is a, c, g, or t
ccgcaagtgctgggatgacaggtgtgagccaccgcccccggcccctcgcccgccttttgaaggagcctttcgtcctcaagggngaggccactccccccccgcgagttccatgccccctagagggtcatcgttcccgacggggaggtggcgccctcccccgggccccgggccccgaccgcccgtgctgcctccttccgggccctcctccgcgatgacggcgccgccagcaggccaggcggactgggcggggctccgagcggggactgggacccagaccgactaggggactgggagcgggcggcgcggccatggcgggctgctgcgccgcgctggcggccttcctgttcgagtacgacacgccgcgcatcgtgctcatccgcagccgcaaagtggggctcatgaaccgcgccgtgcaactgctcatcctggcctacgtcatcgggtgggtgtttgtgtgggaaaagggctaccaggaaactgactccgtggtcagctccgttacgaccaaggtcaagggcgtggctgtgaccaacacttctaaacttggattccggatctgggatgtggcggattatgtgataccagctcaggaggaaaactccctcttcgtcatgaccaacgtgatcctcaccatgaaccagacacagggcctgtgccccgagattccagatgcgaccactgtgtgtaaatcagatgccagctgtactgccggctctgccggcacccacagcaacggagtctcaacaggcaggtgcgtagctttcaacgggtctgtcaagacgtgtgaggtggcggcctggtgcccggtggaggatgacacacacgtgccacaacctgcttttttaaaggctgcagaaaacttcactcttttggttaagaacaacatctggtatcccaaatttaatttcagcaagaggaatatccttcccaacatcaccactacttacctcaagtcgtgcatttatgatgctaaaacagatcccttctgccccatattccgtcttggcaaaatagtggagaacgcaggacacagtttccaggacatggccgtggagggaggcatcatgggcatccaggtcaactgggactgcaacctggacagagccgcctccctctgcttgcccaggtactccttccgccgcctcgatacacgggacgttgagcacaacgtatctcctggctacaatttcaggtttgccaagtactacagagacctggctggcaacgagcagcgcacgctcatcaaggcctatggcatccgcttcgacatcattgtgtttgggaaggcagggaaatttgacatcatccccactatgatcaacatcggctctggcctggcactgctaggcatggcgaccgtgctgtgtgacatcatagtcctctactgcatgaagaaaagactctactatcgggagaagaaatataaatatgtggaagattacgagcaggtaggcccctcctggcccccagcaggcacaggcctctcatctcttgggtgtgggagccctgggcgtgggcctgtctggggaggcccttctgcagaggctggcaccagtgtggcgtggtgtccccgttaacccgggcagtcctgccactctcagcagctgctccatccctaggcccctgtactagattgactctttaaacccagcctcgtttcaatgagcgacatctcaggttggtgaagataatgcatgctctgagaatgcctgtgggcacacactact

SEQ ID NO: 11864 - DNA, 1489 bp, Homo sapiens
ctcattactaacaacatctcccccgcatcccccttccaaacaacatcggctctggcctggcactgctaggcatggcgaccgtgctgtgtgacacagggcctgtgccccgagattccagatgcgaccactgtgtgtaaatcagatgccagctgtactgccggctctgccggcacccacagcaacggagtctcaacaggcaggtgcgtagctttcaacgggtctgtcaagacgtgtgaggtggcggcctggtgcccggtggaggatgacacacacgtgccacaacctgcttttttaaaggctgcagaaaacttcactcttttggttaagaacaacatctggtatcccaaatttaatttcagcaagaggaatatccttcccaacatcaccactacttacctcaagtcgtgcatttatgatgctaaaacagatcccttctgccccatattccgtcttggcaaaatagtggagaacgcaggacacagtttccaggacatggccgtggagggaggcatcatgggcatccaggtcaactgggactgcaacctggacagagccgcctccctctgcttgcccaggtactccttccgccgcctcgatacacgggacgttgagcacaacgtatctcctggctacaatttcaggtttgccaagtactacagagacctggctggcaacgagcagcgcacgctcatcaaggcctatggcatccgcttcgacatcattgtgtttgggaaggcagggaaatttgacatcatccccactatgatcaacatcggctctggcctggcactgctaggcatggcgaccgtgctgtgtgacatcatagtcctctactgcatgaagaaaagactctactatcgggagaagaaatataaatatgtggaagattacgagcagggtcttgctagtgagctggaccagtgaggcctaccccacacctgggctctccacagccccatcaaagaacagagaggaggaggagggagaaatggccaccacatcaccccagagaaatttctggaatctgattgagtctccactccacaagcactcagggttccccagcagctcctgtgtgttgtgtgcaggatctgtttgcccactcggcccaggaggtcagcagtctgttcttggctgggtcaactctgcttttcccgcaacctggggttgtcgggggagcgctggcccgacgcagtggcactgctgtggctttcagggctggagctggctttgctcagaagcctcctgtctccagctctctccaggacaggcccagtcctctgaggcacggcggctctgttcaagcactttatgcggcaggggaggccgcctggctgcagtcactagacttgtagcaggcctgggctgcaggcttccccccgaccattccctgcagccatgcggcagagctggcatttctcctcagagaagcgctgtgctaaggtgatcgaggaccagacattaaagcgtgattttcttaaaaaaagtc

SEQ ID NO: 11865 - DNA, 1687 bp, Homo sapiens
cgctggtacggtccggaagtgttatgatcgactgggagcgggcggcgcggccatggcgggctgctgcgccgcgctggcggccttcctgttcgagtacgacacgccgcgcatcgtgctcatccgcagccgcaaagtggggctcatgaaccgcgccgtgcaactgctcatcctggcctacgtcatcgggtgggtgtttgtgtgggaaaagggctaccaggaaactgactccgtggtcagctccgttacgaccaaggtcaagggcgtggctgtgaccaacacttctaaacttggattccggatctgggatgtggcggattatgtgataccagctcaggaggaaaactccctcttcgtcatgaccaacgtgatcctcaccatgaaccagacacagggcctgtgccccgagattccagatgcgaccactgtgtgtaaatcagatgccagctgtactgccggctctgccggcacccacagcaacgacctgcttttttaaaggctgcagaaaacttcactcttttggttaagaacaacatctggtatcccaaatttaatttcagcaagaggaatatccttcccaacatcaccactacttacctcaagtcgtgcatttatgatgctaaaacagatcccttctgccccatattccgtcttggcaaaatagtggagaacgcaggacacagtttccaggacatggccgtggagggaggcatcatgggcatccaggtcaactgggactgcaacctggacagagccgcctccctctgcttgcccaggtactccttccgccgcctcgatacacgggacgttgagcacaacgtatctcctggctacaatttcaggtttgccaagtactacagagacctggctggcaacgagcagcgcacgctcatcaaggcctatggcatccgcttcgacatcattgtgtttgggaaggcagggaaatttgacatcatccccactatgatcaacatcggctctggcctggcactgctaggcatggcgaccgtgctgtgtgacatcatagtcctctactgcatgaagaaaagactctactatcgggagaagaaatataaatatgtggaagattacgagcagggtcttgctagtgagctggaccagtgaggcctaccccacacctgggctctccacagccccatcaaagaacagagaggaggaggagggagaaatggccaccacatcaccccagagaaatttctggaatctgattgagtctccactccacaagcactcagggttccccagcagctcctgtgtgttgtgtgcaggatctgtttgcccactcggcccaggaggtcagcagtctgttcttggctgggtcaactctgcttttcccgcaacctggggttgtcgggggagcgctggcccgacgcagtggcactgctgtggctttcagggctggagctggctttgctcagaagcctcctgtctccagctctctccaggacaggcccagtcctctgaggcacggcggctctgttcaagcactttatgcggcaggggaggccgcctggctgcagtcactagacttgtagcaggcctgggctgcaggcttccccccgaccattccctgcagccatgcggcagagctggcatttctcctcagagaagcgctgtgctaaggtgatcgaggaccagacattaaagcgtgattttcttaaaaaaagtc

SEQ ID NO: 11866 - DNA, 1650 bp, Homo sapiens
  misc_feature (83)..(83): n is a, c, g, or t
ccgcaagtgctgggatgacaggtgtgagccaccgcccccggcccctcgcccgccttttgaaggagcctttcgtcctcaagggngaggccactccccccccgcgagttccatgccccctagagggtcatcgttcccgacggggaggtggcgccctcccccgggccccgggccccgaccgcccgtgctgcctccttccgggccctcctccgcgatgacggcgccgccagcaggccaggcggactgggcggggctccgagcggggactgggacccagaccgactaggggactgggagcgggcggcgcggccatggcgggctgctgcgccgcgctggcggccttcctgttcgagtacgacacgccgcgcatcgtgctcatccgcagccgcaaagtggggctcatgaaccgcgccgtgcaactgctcatcctggcctacgtcatcggacctgcttttttaaaggctgcagaaaacttcactcttttggttaagaacaacatctggtatcccaaatttaatttcagcaagaggaatatccttcccaacatcaccactacttacctcaagtcgtgcatttatgatgctaaaacagatcccttctgccccatattccgtcttggcaaaatagtggagaacgcaggacacagtttccaggacatggccgtggagggaggcatcatgggcatccaggtcaactgggactgcaacctggacagagccgcctccctctgcttgcccaggtactccttccgccgcctcgatacacgggacgttgagcacaacgtatctcctggctacaatttcaggtttgccaagtactacagagacctggctggcaacgagcagcgcacgctcatcaaggcctatggcatccgcttcgacatcattgtgtttgggaaggcagggaaatttgacatcatccccactatgatcaacatcggctctggcctggcactgctaggcatggcgaccgtgctgtgtgacatcatagtcctctactgcatgaagaaaagactctactatcgggagaagaaatataaatatgtggaagattacgagcagggtcttgctagtgagctggaccagtgaggcctaccccacacctgggctctccacagccccatcaaagaacagagaggaggaggagggagaaatggccaccacatcaccccagagaaatttctggaatctgattgagtctccactccacaagcactcagggttccccagcagctcctgtgtgttgtgtgcaggatctgtttgcccactcggcccaggaggtcagcagtctgttcttggctgggtcaactctgcttttcccgcaacctggggttgtcgggggagcgctggcccgacgcagtggcactgctgtggctttcagggctggagctggctttgctcagaagcctcctgtctccagctctctccaggacaggcccagtcctctgaggcacggcggctctgttcaagcactttatgcggcaggggaggccgcctggctgcagtcactagacttgtagcaggcctgggctgcaggcttccccccgaccattccctgcagccatgcggcagagctggcatttctcctcagagaagcgctgtgctaaggtgatcgaggaccagacattaaagcgtgattttcttaaaaaaagtc

SEQ ID NO: 11867 - DNA, 1467 bp, Homo sapiens
  misc_feature (83)..(83): n is a, c, g, or t
ccgcaagtgctgggatgacaggtgtgagccaccgcccccggcccctcgcccgccttttgaaggagcctttcgtcctcaagggngaggccactccccccccgcgagttccatgccccctagagggtcatcgttcccgacggggaggtggcgccctcccccgggccccgggccccgaccgcccgtgctgcctccttccgggccctcctccgcgatgacggcgccgccagcaggccaggcggactgggcggggctccgagcggggactgggacccagaccgactaggggactgggagcgggcggcgcggccatggcgggctgctgcgccgcgctggcggccttcctgttcgagtacgacacgccgcgcatcgtgctcatccgcagccgcaaagtggggctcatgaaccgcgccgtgcaactgctcatcctggcctacgtcatcgggtgggtgtttgtgtgggaaaagggctaccaggaaactgactccgtggtcagctccgttacgaccaaggtcaagggcgtggctgtgaccaacacttctaaacttggattccggatctgggatgtggcggattatgtgataccagctcaggaggaaaactccctcttcgtcatgaccaacgtgatcctcaccatgaaccagacacagggcctgtgccccgagattccagatgcgaccactgtgtgtaaatcagatgccagctgtactgccggctctgccggcacccacagcaacggagtctcaacaggcaggtgcgtagctttcaacgggtctgtcaagacgtgtgaggtggcggcctggtgcccggtggaggatgacacacacgtgccacaacctgcttttttaaaggctgcagaaaacttcactcttttggttaagaacaacatctggtatcccaaatttaatttcagcaagaggaatatccttcccaacatcaccactacttacctcaagtcgtgcatttatgatgctaaaacagatcccttctgccccatattccgtcttggcaaaatagtggagaacgcaggacacagtttccaggacatggccgtggagggaggcatcatgggcatccaggtcaactgggactgcaacctggacagagccgcctccctctgcttgcccaggtactccttccgccgcctcgatacacgggacgttgagcacaacgtatctcctggctacaatttcaggtttgccaagtactacagagacctggctggcaacgagcagcgcgaagacctgtaatgtgccggacttaccctttaaattattcagaaggatgtcccgtggaaaatgtggccctgaggatgccgtctcctgcagtggacagcggcggggagaggctgcctgctctctaacggttgattctcatttgtcccttaaacagctgcatttcttggttgttcttaaacagacttgtatattttgatacagttctttgtaataaaattgaccattgtaggta

SEQ ID NO: 11868 - DNA, 340 bp, Homo sapiens
cctttccattccggtaaagattccaggcttctcaggaaggggcacgcaaagaataagatgggttgatgggttgcaagcatcctggctcactctcaccctatgctaaactcaggcgaccgtgctgtgtgacatcatagtcctctactgcatgaagaaaagactctactatcgggagaagaaatataaatatgtggaagattacgagcaggtaggcccctcctggcccccagcaggcacaggcctctcatctcttgggtgtgggagccctgggcgtgggcctgtctggggaggcccttctgcagaggctggcaccagtgtggcgtggtgtccccgttaaccc

SEQ ID NO: 11869 - DNA, 1000 bp, Homo sapiens
  misc_feature (83)..(83): n is a, c, g, or t
ccgcaagtgctgggatgacaggtgtgagccaccgcccccggcccctcgcccgccttttgaaggagcctttcgtcctcaagggngaggccactccccccccgcgagttccatgccccctagagggtcatcgttcccgacggggaggtggcgccctcccccgggccccgggccccgaccgcccgtgctgcctccttccgggccctcctccgcgatgacggcgccgccagcaggccaggcggactgggcggggctccgagcggggactgggacccagaccgactaggggactgggagcgggcggcgcggccatggcgggctgctgcgccgcgctggcggccttcctgttcgagtacgacacgccgcgcatcgtgctcatccgcagccgcaaagtggggctcatgaaccgcgccgtgcaactgctcatcctggcctacgtcatcgggtgggtgtttgtgtgggaaaagggctaccaggaaactgactccgtggtcagctccgttacgaccaaggtcaagggcgtggctgtgaccaacacttctaaacttggattccggatctgggatgtggcggattatgtgataccagctcaggaggaaaactccctcttcgtcatgaccaacgtgatcctcaccatgaaccagacacagggcctgtgccccgagattccagatgcgaccactgtgtgtaaatcagatgccagctgtactgccggctctgccggcacccacagcaacggagtctcaacaggcaggtgcgtagctttcaacgggtctgtcaagacgtgtgaggtggcggcctggtgcccggtggaggatgacacacacgtgccacaggaggccgcctggctgcagtcactagacttgtagcaggcctgggctgcaggcttccccccgaccattccctgcagccatgcggcagagctggcatttctcctcagagaagcgctgtgctaaggtgatcgaggaccagacattaaagcgtgattttcttaaaaaaagtc

SEQ ID NO: 11870 - DNA, 2126 bp, Homo sapiens
caggcaccgcgtggttctcacaaccagcagctcggctcactgagacccggtggtccagacgctgctcctggctggggtggcgctgcagggagaaccgcgagctctcaggggtcggcgggtgacttctttccggaagaaagcgaggaacgcgctctgcggggtgagccggactccccaactccggacgatcagcccaggactgagagccccgaagtccccaaccacaagtaagcggccccagaaggacaagtctaggtcgccgtccagagcgccatggccgcgcccgcccttcgtttgtgccacatcgccttccacgtgcccgccgggcagcccctagcccggaacctgcagcgcctcttcggcttccagcccctggcttcgcgggaggtggacggctggcggcagctagccctgcgcagcggcgacgcggtctttttggtgaacgagggcgcagggtctggagagccgctgtacggcctggatccgcgtcacgccgtgcccagcgccacaaacctgtgcttcgacgtggcggacgccggcgctgcaacccgggagctggcagcgctgggctgcagcgtgcctgtccctcccgttcgcgtgcgggacgcgcagggtgccgccacttacgccgtggtcagctcgcctgccggcatcctcagcctgaccttgctggagcgcgctggctaccgcggacccttcctacccggcttcaggcccgtgtcctctgcgcctggccccgggtgggtcagccgcgtggaccacctgaccttggcctgcacccccggcagctcccccacacttttgcgctggttccacgactgcctgggcttttgccacttgccgctgagcccaggtgaggatcccgagctgggcctcgaaatgacagcagggtttgggcttgggggactgaggcttacagccctgcaggcccagccgggcagcattgtccccactcttgttctggctgagtcccttccgggggcgacgacacgacaggaccaggtggagcagttcctggcccggcacaaggggccaggcctgcagcacgtggggctgtatacgcctaacattgtggaggccactgagggggtggcaactgctggaggccagttcctggctccccctggggcatactaccagcagccaggaaaggagaggcagatccgagctgcagggcacgagcctcatctgcttgctcgacaggggatcctgctagatggtgataaaggcaagtttctgcttcaggtcttcaccaagtccctttttactgaggacactttcttcctggagctgattcagaggcagggggccactggctttggtcagggcaacatcagagctctgtggcagtccgtacaggagcaatctgccaggagccaggaagcctaaggatgcccagggctgggtgcagccagctgtcctgcagctctggggagaccagcacagaactgaggaacatctgcaggaggcccaactagtgaaaggctttgcctccggggggcaggtgtgacttccatttcatcagtgcctgccagaagctgtgtctctcattgggctccaaagaggtgggattttttaaaactaaaacatttcttatatacagtctataataaatatgtaagatacaaagaacaataaaagaattacacactaggaaatagaacataaccaatactttcgagtcctccctgtgtcccgctgtgattctatttcctcccacccactcctcaaatcctgtcattattagccctttgcttttctgtattgtttcactccgtatgtaacataaccctaaataaattatttcgtatttgaggtaggaatttaaaacagaacaaatcttctcctgtgcttcctctccccctagggagcgaccactcaggtggggaggggctgggtgagagttgagcccaactacctactccagagtgatgccaccactccaattagagctgacctgagacgtaaacagagggtgttgtgtgtcagccactggcaggttctccctgtagctgccttgcctttctcctgggggttggagggcagatcagtctggacagaacacccccactccaaccccatctgcccggggctggctgggagttcagccagagaaagtcagaacc

SEQ ID NO: 11871 - DNA, 1655 bp, Homo sapiens
caggcaccgcgtggttctcacaaccagcagctcggctcactgagacccggtggtccagacgctgctcctggctggggtggcgctgcagggagaaccgcgagctctcaggggtcggcgggtgacttctttccggaagaaagcgaggaacgcgctctgcggggtgagccggactccccaactccggacgatcagcccaggactgagagccccgaagtccccaaccacaagtaagcggccccagaaggacaagtctaggtcgccgtccagagcgccatggccgcgcccgcccttcgtttgtgccacatcgccttccacgtgcccgccgggcagcccctagcccggaacctgcagcgcctcttcggcttccagcccctggcttcgcgggaggtggacggctggcggcagctagccctgcgcagcggcgacgcggtctttttggtgaacgagggcgcagggtctggagagccgctgtacggcctggatccgcgtcacgccgtgcccagcgccacaaacctgtgcttcgacgtggcggacgccggcgctgcaacccgggagctggcagcgctgggctgcagcgtgcctgtccctcccgttcgcgtgcgggacgcgcagggtgccgccacttacgccgtggtcagctcgcctgccggcatcctcagcctgaccttgctggagcgcgctggctaccgcggacccttcctacccggcttcaggcccgtgtcctctgcgcctggccccgggtgggtcagccgcgtggaccacctgaccttggcctgcacccccggcagctcccccacacttttgcgctggttccacgactgcctgggcttttgccacttgccgctgagcccaggtgaggatcccgagctgggcctcgaaatgacagcagggtttgggcttgggggactgaggcttacagccctgcaggcccagccgggcagcattgtccccactcttgttctggctgagtcccttccgggggcgacgacacgacaggaccaggtggagcagttcctggcccggcacaaggggccaggcctgcagcacgtggggctgtatacgcctaacattgtggaggccactgagggggtggcaactgctggaggccagttcctggctccccctggggcatactaccagcagccaggaaaggagaggcagatccgagctgcagggcacgagcctcatctgcttgctcgacaggggatcctgctagatggtgataaaggcaagtttctgcttcaggtcttcaccaagtccctttttactgaggacactttcttcctggagctgattcagaggcagggggccactggctttggtcagggcaacatcagagctctgtggcagtccgtacaggagcaatctgccaggagccaggaagcctaaggatgcccagggctgggtgcagccagctgtcctgcagctctggggagaccagcacagaactgaggaacatctgcaggaggcccaactagtgaaaggctttgcctccggggggcaggtgtgacttccatttcatcagtgcctgccagaagctgtgtctctcattgggctccaaagaggtgggattttttaaaactaaaacatttcttatatacagtctataataaatatgtaagatacaaagaacaataaaagaattacacactagg

SEQ ID NO: 11872 - DNA, 978 bp, Homo sapiens
caggcaccgcgtggttctcacaaccagcagctcggctcactgagacccggtggtccagacgctgctcctggctggggtggcgctgcagggagaaccgcgagctctcaggggtcggcgggtgacttctttccggaagaaagcgaggaacgcgctctgcggggtgagccggactccccaactccggacgatcagcccaggactgagagccccgaagtccccaaccacaagtaagcggccccagaaggacaagtctaggtcgccgtccagagcgccatggccgcgcccgcccttcgtttgtgccacatcgccttccacgtgcccgccgggcagcccctagcccggaacctgcagcgcctcttcggcttccagcccctggcttcgcgggaggtggacggctggcggcagctagccctgcgcagcggcgacgcggtctttttggtgaacgagggcgcagggtctggagagccgctgtacggcctggatccgcgtcacgccgtgcccagcgccacaaacctgtgcttcgacgtggcggacgccggcgctgcaacccgggagctggcagcgctgggctgcagcgtgcctgtccctcccgttcgcgtgcgggacgcgcagggtgccgccacttacgccgtggtcagctcgcctgccggcatcctcagcctgaccttgctggagcgcgctggctaccgcggacccttcctacccggcttcaggcccgtgtcctctgcgcctggccccgggtgggtcagccgcgtggaccacctgaccttggctgacccggagtcccaactttgcgctggtcccgctgctggttttgcatggcgtagccggtgagtccgagtggtggatgagggtggttgggtgggtaagcgtgccggggggtgtccttttttgttgccccgggcaccgctgtgttgcccagggggcgggtccctggcaggggagttttctcctatgggtctcagttttgctcgggcc

SEQ ID NO: 11873 - DNA, 1685 bp, Homo sapiens
caggcaccgcgtggttctcacaaccagcagctcggctcactgagacccggtggtccagacgctgctcctggctggggtggcgctgcagggagaaccgcgagctctcaggggtcggcgggtgacttctttccggaagaaagcgaggaacgcgctctgcggggtgagccggactccccaactccggacgatcagcccaggactgagagccccgaagtccccaaccacaagtaagcggccccagaaggacaagtctaggtcgccgtccagagcgccatggccgcgcccgcccttcgtttgtgccacatcgccttccacgtgcccgccgggcagcccctagcccggaacctgcagcgcctcttcggcttccagcccctggcttcgcgggaggtggacggctggcggcagctagccctgcgcagcggcgacgcggtctttttggtgaacgagggcgcagggtctggagagccgctgtacggcctggatccgcgtcacgccgtgcccagcgccacaaacctgtgcttcgacgtggcggacgccggcgctgcaacccgggagctggcagcgctgggctgcagcgtgcctgtccctcccgttcgcgtgcgggacgcgcagggtgccgccacttacgccgtggtcagctcgcctgccggcatcctcagcctgaccttgctggagcgcgctggctaccgcggacccttcctacccggcttcaggcccgtgtcctctgcgcctggccccgggtgggtcagccgcgtggaccacctgaccttggcctgcacccccggcagctcccccacacttttgcgctggttccacgactgcctgggcttttgccacttgccgctgagcccaggtgaggatcccgagctgggcctcgaaatgacagcagggtttgggcttgggggactgaggcttacagccctgcaggcccagccgggcagcattgtccccactcttgttctggctgagtcccttccgggggcgacgacacgacaggaccaggtggagcagttcctggcccggcacaaggggccaggcctgcagcacgtggggctgtatacgcctaacattgtggaggccactgagggggtggcaactgctggaggccagttcctggctccccctggggcatactaccagcagccaggaaaggagaggcagatccgagctgcagggcacgagcctcatctgcttgctcgacaggggatcctgctagatggtgataaaggcaagtttctgcttcaggtcttcaccaagtccctttttactgaggacactttcttcctggagctgattcagaggcagggggccactggctttggtcagggcaacatcagagctctgtggcagtccgtacaggagcaatctgccaggagccaggaagcctaaggatgcccagggctgggtgcagccagctgtcctgcagctctggggagaccagcacagaactgaggaacatctgcaggaggcccaactagtgaaaggctttgcctccggggggcaggtgtgacttccatttcatcagtgcctgccagaagctgtgtctctcattgggctccaaagaggtgggattttttaaaactaaaacatttcttatatacagtctataataaatatgtaagatacaaaggcccatgaaagagttgctccctgggggataggctgtggcccgataatctcaaaga

SEQ ID NO: 11874 - DNA, 893 bp, Homo sapiens
atgaacctgtggctcctggcctgcctggtggccggcttcctgggagcctgggcccccgctgtccacacccaaggtgtctttgaggactgctgcctggcctaccactaccccattgggtgggctgtgctccggcgcgcctggacttaccggatccaggaggtgagcgggagctgcaatctgcctgctgcgatattctacctccccaagagacacaggaaggtgtgtgggaaccccaaaagcagggaggtgcagagagccatgaagctcctggatgctcgaaataaggtttttgcaaagctccaccacaacacgcagaccttccaagcaggccctcatgctgtaaagaagttgagttctggaaactccaagttatcatcatccaagtttagcaatcccatcagcagcagcaagaggaatgtctccctcctgatatcagctaattcaggactgtgagccggctcatttctgggctccatcggcacaggaggggccggatctttctccgataaaaccgtcgccctacagacccagctgtccccacgcctctgtcttttgggtcaagtcttaatccctgcacctgagttggtcctccctctgcacccccaccacctcctgcccgtctggcaactggaaagagggagttggcctgattttaagccttttgccgctccggggaccagcagcaatcctgggcagccagtggctcttgtagagaagacttaggatacctctctcactttctgtttcttgccgtccaccccgggccatgccagtgtgtccctctgggtccctccaaaactctggtcagttcaaggatgcccctcccaggctatgcttttctataacttttaaataaaccttggggggtgatggagtcaaaactgcctgttaca

SEQ ID NO: 11875 - DNA, 759 bp, Homo sapiens
atgaacctgtggctcctggcctgcctggtggccggcttcctgggagcctgggcccccgctgtccacacccaaggtgtctttgaggactgctgcctggcctaccactaccccattgggtgggctgtgctccggcgcgcctggacttaccggatccaggaggtgagcgggagctgcaatctgcctgctgcgatcaggccctcatgctgtaaagaagttgagttctggaaactccaagttatcatcatccaagtttagcaatcccatcagcagcagcaagaggaatgtctccctcctgatatcagctaattcaggactgtgagccggctcatttctgggctccatcggcacaggaggggccggatctttctccgataaaaccgtcgccctacagacccagctgtccccacgcctctgtcttttgggtcaagtcttaatccctgcacctgagttggtcctccctctgcacccccaccacctcctgcccgtctggcaactggaaagagggagttggcctgattttaagccttttgccgctccggggaccagcagcaatcctgggcagccagtggctcttgtagagaagacttaggatacctctctcactttctgtttcttgccgtccaccccgggccatgccagtgtgtccctctgggtccctccaaaactctggtcagttcaaggatgcccctcccaggctatgcttttctataacttttaaataaaccttggggggtgatggagtcaaaactgcctgttaca

SEQ ID NO: 11876 - DNA, 431 bp, Homo sapiens
tttatcgctgtaaatccatattgtgcaaggtattagtgctggggatgcaaagataaattagatattatctctgcctttgagaggcagctgatggtttaacaaagaataacaaacagctaggtaactatattataagtattaaaacagggcaggcatggtggttcatgcctgtaatcccaacactttcaggggctgaggcaggaggattgcttgagcccaagagtttgagatcgtacggggcgacatagtgagacctcatgtctactaaaaataaaaataaaaaaatagttgagtgtgatgacatgcacttgtagtcctaactacttgggacactgaggtgggaggatcacttgagcccgggaggtggaagttgcagtgagcagtaatagcaccagtgcactccaccctggcaacggaacaagatcctgtct

SEQ ID NO: 11877 - DNA, 949 bp, Homo sapiens
ccccattttaaagacaggaaaatgggctcagagaaggatcaacttgcctgagcacaacagggccacagcctgtctcccagcccccagatcaggccattgaccaagctgaggatgcagagctgggatccttgccctttgttctgtgttgtcccctggatgtgatggttccttggaactgaagagggcctggactcagtggcaggcatacactccaggccccagtgccatcagtcacacacaggagctgggttagggacggggctttactctctctcgagtgagtgtctccagtaggctatgccatgaggggagggtctgttagaaccaagatgaggaagaaagaaagggagagagagcagttccaagccagagttgttgaacaacaaggccaaggttgcagaatgaggcaggggtgaatctgagaccagaacccaggctccaggttccaggcttccacgtgagatgcgcaaatatttgagaatcttgcactgtacaggctccaggctgtatttgtccccagccagcttcaacttgtctatctgatgggctgagtgtctatatgagtgtccttggcagtgatgacccagtggactgcccagccccagaagagctggctgtcacctgtgtgccaggatcccagtggccaaagggcaggggcaccaggaagtgagaggagagccgggacctgggaaatgagtgttgactgtgtctgaaaccgagtgtgggggccgcagccatccttgccccatgtccttctgcagaataagagtaaacaggccttctctagccatgtttgatgcaagatggcccacagctgtgactttttagctttatgtacatagtctttattataaaggtaacatatatttactggaattaacccaaacactacagaaaatatgtaaacatttacaattaaaaatgtgtctactctttgaactgcaatgct

SEQ ID NO: 11878 - DNA, 483 bp, Homo sapiens
tcccactccacgtcctgtccaatacttggcattgtgagtttttcccattttagccattctatgagtatgccgaggtatcacaccgtggttttaattttatttctcagatgacgaatgcagttcatttttttaccaaggatattttggacctggaaacattattcaacaaatttgaaaatttcctttcgtccccaaattgtagaactcacttccatccccacattgtggaaacgtctggcagtgcttctgatttcttctgggcgggtttgaatctcccaggctggaagccaagggatggagtagacaagagtttctctggatgagtctggggaactggccacctgccccagaatcacgtgggttgctggtcagagatgcaggtgctgagccctggcccagccccggactcatcagacagcccttgacccattggtccttctagggctgttttttttttttcttgtcacgaaaccaaaaaaaaaa

SEQ ID NO: 11879 - DNA, 339 bp, Homo sapiens
gcagtggggatagagggccagggaggcaaggactttgtttgtgcagtggcctcaggatgggggtgaatttgcaatctcagccctgaccactctaggctggcagggacaccaggctccctgggactgattccctgggtgagacggggcagggaactgactcctcacaaaggcccctcctaggagcactgccttaacaggtaaaaccaggccccacctttagattaaaagcttcttctttaaatgaaaacactttggctgggcgtggtggctcacacctgtaatcccagcactttgggaggccgagatgggtggatcacctgaggtcaggagttcgagagc

SEQ ID NO: 11880 - DNA, 460 bp, Homo sapiens
  misc_feature (85)..(85): n is a, c, g, or t
  misc_feature (101)..(101): n is a, c, g, or t
  misc_feature (318)..(318): n is a, c, g, or t
  misc_feature (325)..(325): n is a, c, g, or t
  misc_feature (428)..(428): n is a, c, g, or t
  misc_feature (447)..(447): n is a, c, g, or t
ttcctccctggggtaactggaggtccctggtgcctttactcaggcagtgctgcctcacccactccattccttgtccccgtggctncctgcttgcagcagtnagaacctgcagccccccaagccctcagttattccacggcccctgtgcagtcactggccccacaagtcacccatcctgggccctggcgtgctctctccatccatcctctctgtcacctctgtgctggtttgctcctatctgcatgtcaacctggaaatggctgttgctttgtagagaccctctttccctgacttcagagccaattcctttgctgctgngcagagnctgacatttgaaaccaacaccaactcacaaagcagctcctcctttccagaagctgccccactgtggatgggcgagtggcccgggctgtcggctgtggcggtgntacatgaccgctctgagcntcccacctgacgg

SEQ ID NO: 11881 - DNA, 1355 bp, Homo sapiens
aaatatccaaactatatcactcctctctaaaccagtttagagggttcaaactttgccttctccagatttgcctcttccctgagaccttccctgatagcttcccacacatactgctctccccagtccatcaatgaattcctgcatccaggtggctaatggttccatacttacccttcagctgtgaccagttttgtgtccacctctgtcttcctccctctttttgcttagatgacacccactcaacctctagatgtcccctgctacaggtgggatgcccttgttatatgttcttatagcaccacctgtcttcccttcatggcacttatatttgtaaatgtattcatgccatagagtactgcatgaaggcagtcgagtgggtggttcaaacgtagaccctggtgtcagcctgcctggactagctatatgaccttgggcaagtttcttaacctctctatacctcaatttccttacttatcaggtgaagatattaagagtacctcctcagagtgtgattttgttaatttatgtaaagtactgagaacatgcctggcatgtaataggcactgtataagtgatatctattattattgtacatgggattatttgatgtctgtatcccatcccccatcagacatgaaaaaataggtctgcttttgatcaccattttacacttaaagaaaagggtcaggctgggcatggtggctcacacttgtaattccagccctttgggaggctgaggcaggtggattgcttgagcctaggagggagggagggaaagaaaggaagaaagaaagagagagagggggagagagagagagaaagaaagaaagaaaagaaataaaagaaagaaagaggaaaaagggaaggagggagggagggaaagagaaagagaaaagagggagagagaaagaaaaagaaaagaaagaaagaagggagggagggagggaaagaaggaaggaaggaaggggaaggggaaggagaggtccataggagtagccaataaattgaatactgaatatttggacaattgcctctctctaagtgctctagaagcttctagagggaaggaatcttgtcttatacattaaaaaaaaaaaaaaaaaagtcttatccagtctgaagtacggtgcctggcacattaattcctttcctcttttcccctcactgccaaatgagctattgccactcacttgatatgcaaacactggctgtctagtatggaaaaatatttttctggctgtagacttgagtttgattaccaaattgatttctgtgaattacatttcaattctgtgcagaactttttgacagccctttaatcaccatgtatccaataaatatttattaaagacata

SEQ ID NO: 11882 - DNA, 522 bp, Homo sapiens
agatatttatttttgtatgaaccaataccatcagcatcagagaagccataatttaattatgaaggactatatattataataagttataacacttcaaccagttttcatgtttgtagttatgggcacactataataatttccttcagtaagggtaaacaccagtgaagcaagttaaaaacagaataaataaaaaaactatattcaatgaaactactagatgcaacccacatttccagtaatcctggagaatagtaagcattaagcttaagatctggaacatctcattcagtgtgctttactgtaggatatcttacttgaaaataataagaataatgtcactcaatagcattttagacttgttgattatctatgtacatataaatctggtctaaatgttgaggtaaaaatccgaattaaaacttgctgaggctgggcacaatggctcacacctgaaatcccagcactttgagaggccaaggccagaaaatcgcttgaggccaggaatttgagactagcctgggc

SEQ ID NO: 11883 - DNA, 1730 bp, Homo sapiens
cagaggcactcctcacctcccagatggggcagctgggcagaggtactcctcagttcccagatggggtggcggccgggcagaggtgctccccacctcccagacggggcagcggccgggcaaaggtgctccccacctcccagacagggcggccgggcagaggcgaattttttcttaatatcttaatattttatgtcatttgtgtacaaaatgaaattctggcttttaataatagtacattcttacttgtttcatcctatagaatacatacaactgtttcaaaattatcataccaaaattattattagcaatattaaaatagctatgctagctttctttggttatgttagcatgttatggtatatcttttcccactctttttcttttaatcttataataagtgtatatttaagatgtgtctcttgatagcaacatatacttgagtttgcttttcatcatccagcctgacaatcttttatcttttaactagagtacttaatcttacttactgtacttactgatatgttgggtttaaatgtaccatattaatctctgttttctatttatcatatctattcttgttcttttttatcttttcctggtttcttttgcattatttctatttcattttcacccctattatgttgttagttatacattctaattctttcattgcttaccctagagattataacatgcatccttgacttattgaactgtaatgtaaattagtatattcatcattccccagacaatgcaaagacctttgaatactttaagccttatttatctctcttctgcttttgtgttgcttttaacacacattttaattctatttatatttgaaacccgatgaaacatttttaatttgtttatatttatttatatgtaccaacatatttaccatttatttccagtgtccttcaattcttcctatatttccatgcttccatgtgggataatttttcatctagatttagtatttcttccaatgcagatctggtagtgatgaattctctcagtttttatttatctgaaaacgtctctttctctttcattctttgaaggatatttttgctgggcatagaagtttggatggcaattattttctttcagcactttgaagaaattattgtcttctgattttactgtttcaccatacttcccttctctctgcaatcttagctcatcaaatccttgatgtcttcaaatagacttttctccctctctagctcttctagtagttgttggtgagaggttggtctgataaaagtaatctaccctggctagacatctgctgctaataataaacctactaaataaagtttaagatttatttgcaattttttttaccttagaatttatcccatgagaaatgtagaatcaggttactatattcaaaaattacttgacataattatttttaaaaattttaaaaggtaagaaacaacctttttaaatttaagaattaagagactaagaaattgagaattatttcaaaactcaaaaaatgttgaaggctttaaaaatgagtaagataaaatgtaaggtaaatgaaatgaatgtaggcattttgaagattagaaatttagccgtaggtaaagaatacaaaggaaaaataattttaaaatcatcaaccagatcaacaaaatatatgttaatgccgagactttgaattagagtgcgaattgtatcttaattaaaaagagaaaacccaaaactggaaaaaaaaa

SEQ ID NO: 11884 - DNA, 439 bp, Homo sapiens
gcagacttccgtctgcaagcacctagagggtgactgtcctcttgaggcagtgccagagatgaccaaggggtgggataggtgggcaggaagagtgggtcccatctgaggaatgttctgagtatttggagagagagggagcagcccatcctctgcttgtcggaaaaggctgaaattccatccccaggccccaagcctgcggcaaggcaagggcagaggttgggctgtggagctagggattcctggcctcggaaagcgggtaggaatgatcaaggatggtggagggcccgcggtggctgagaaccaggggtcttaggaccaggccctcctacccagttttcgatcacttattcgtctctcttgccctgtccctgttacctaacctcactcaatgttctacctctttctagaataaaccctgactccctccaaaacagagctc

SEQ ID NO: 11885 - DNA, 507 bp, Homo sapiens
tcatactctggtcagaatgacctgctgtagaactgagagaactgtccttctgtatttactatgctgacagaatatgcattaaaacatctatacatctacaacaatgtgacatgtgctaagcaaagagagagcaaagaccaaaatcatatatcatgatcaatgacaattgactagggtaatatcttatgaagagaaactttaagggaaaactttatccctttgatgttaggaatagaaatggctttttgccttctcatagaatcttagcactggaaggagactcagaaattatagcatactataagggttggccagctatggtttacaggcaaaatctagcctgggatgcctgtttttgttaataaaattttatggaatattcgtgctcatttatttgcatatcgtccatgtcagctaatggtagaattgagtagccaagaccccatggcccacaaaaccaatcagactctaattcattttatatatttcatagataaagggactgag

SEQ ID NO: 11886 - DNA, 457 bp, Homo sapiens
ttttccaatgtatattgtcatttaatctgataggtaatctgctataaaactatttttcaccctcatacaactcatagtcattaaactgaaacttctttcagcttctgtaccagactaaacacacttctacgtttcttgttcattactagtactttctccatcactgtaagtctagacaatcaacaaaacaacaaatcaaagtcaaactgatagtctttgctggattccatggtgtaaagagtccctgcatgattgatttcaagctgccagcgtgacgccactgcaggtggtgctggggagacgtgcattatcccccatggtgcagtatctctcccccaagccccacacagacactgttggtgtcaataactccagagcagatgtaatagtaagcacagtcaaataattaggaatggctggatttggatatttagggcctttgtttttttaggtttgt

SEQ ID NO: 11887 - DNA, 422 bp, Homo sapiens
tattttttattatgtttttgttgttgttgagatggggccttgctatgttgcttgggctggtctcgaactcctgggctcaagcaatccagtctccttaaaatcactctacacctctgctctaatccaccatgggctcagtgccatgatgggaaccttacccaagcgcttgggttcctttatggtgaaaaagggacttcttgctattgcccccatggattatccacaaataagatgacatctttaatctttacattgagaattaagtgatcaatatcttcacagaaattataaatctgattattgaaattaagcaaatcacttcaatgtgcattctaactctattcagaagaaaaaaacctggctttcattgatagtgataaatattccagattattcatttcattctgaatttttgtaattta

SEQ ID NO: 11888 - DNA, 536 bp, Homo sapiens
tttttttttttggcttttccaaaattcccttctttcaccattttgagttgaaaagtcaagataaatatttatgctgtataataacccacctctctgctacagcaaccacaaatgtcacaggttcctaaagcctccaagaatatttgttttacagcaagaagtagttgctttttctaaaaaaaacacacaattttctcctccaggatagacaatgggtaaaaatctagctgttaactactagccagagttatgggaaggaaaagaatccctcctttttctctcaaccagttttcctttctaacccacttcctttgccaactgctgatgaggcatgtctaattttgcagagtgatactagaacagtgagaggcactgccagctccttcttccccggtccaaagcacctccttccctgaaacacaaccttacaactgcaagtattagatgtcacagcgagcaagcctttaggagattattttaaaatgaccaaatatacaccagtaagagaaaacttctgaaaaactgctctgttatgc

SEQ ID NO: 11889 - DNA, 413 bp, Homo sapiens
actctctgatttcaccctccacccaaccaattggcattccccattccctagcaccccgcctgccaagctatccttaaaaaaatcctagcctccaaattttcggagaggctaatatgagtaataataaattcctatccttccgcttagtgagctctgcatttattaaactctctgttgtgaaaacttgctgttctcagtgccccggcttttctgggcagtgggtcagatgaacccattgggtgatgacattatgactaggttatactcattgtggctagactatactcattccttcaaagatcataaggagtcccaatggtaagaggaaaattttctttgttctctaccatctcctcccagcctctgtgctgatttaaaaaacaaaacaaacaacaacaactaaaaacaatgca

SEQ ID NO: 11890 - DNA, 280 bp, Homo sapiens
tagctgtacaattaacgctaggcaatatagagagctcaataaatacctcctcacttgcacaccaaattccaataccatttgaaagatataagaatcatacaaatggggattaaaacatcaactatattttaagcatatgtgagaatgtggctttggattctctttcaaatggattttctaatactttcctctctatatctcaacccaatatattgatttacgtaggcatgggaagtgctgaattgcaggaaaaaggctacctatcctaataaacttacca

SEQ ID NO: 11891 - DNA, 648 bp, Homo sapiens
cacagtggctcacacctgtaatcccagcactttgggaggtcaaggcgggcggatcacgaggtcaggagttcgagaccagcctggccaacatggtgaaacccgtttctactaaaaatacaaaaattagccaggcatggtggcaggcgcctgtaatcccagctagccaggaggctgaggcaggagaatggcttgagcctgggaggtggaggttgcagtgagccgagatcatgccatggcactccagcctgggcgataacagcaagactccatctcaaaaaaaaacaaaaagtctgtatctgggcaagaaaaataagtcctttcaatgtgtctagtttataaacccatttaattcatatttactggttctatattttagtaaataattaccaccagctccctctatatagtatattaccaaagacaagtctaatttaacatttatatgctattcattttttcttttctttaaaaaattttttttaatagagaagggttttcgccatgttgcccaggctgctttttaactcctgggctacattgcgaaacctgttctctacaaaaaatacaaaaaattagccaagcatggtgatgcacacccgtaatcccagctacttgtgaagctgaggtgggaggatcacctgagcccag

SEQ ID NO: 11892 - DNA, 663 bp, Homo sapiens
cacagtggctcacacctgtaatcccagcactttgggaggtcaaggcgggcggatcacgaggtcaggagttcgagaccagcctggccaacatggtgaaacccgtttctactaaaaatacaaaaattagccaggcatggtggcaggcgcctgtaatcccagctagccaggaggctgaggcaggagaatggcttgagcctgggaggtggaggttgcagtgagccgagatcatgccatggcactccagcctgggcgataacagcaagactccatctcaaaaaaaaacaaaaagtctgtatctgggcaagaaaaataagtcctttcaatgtgtctagtttataaacccatttaattcatatttactggttctatattttagtaaataattaccaccagctccctctatatagtatattaccaaagacaagtctaatttaacatttatatgctattcattttttcttttctttaaaaaattttttttaatagagaagggttttcgccatgttgcccaggctgctttttaactcctgggctcaagcaatccacccacctcagtctcccaaagtgctgggattacaggcgtgagccactgcacccggcccccctattcatttctaatgtcccattcagtgcatatgataagaaataagatgatttgcagaa

SEQ ID NO: 11893 - DNA, 333 bp, Homo sapiens
caaaactttacttcagtttagcacctttttaaaaatcacttgtattagtctgttctcacactgctataaagatactactcaagactggttagtgtataaacaaaagaggtttaattgactcacagttccttatggctagggaggcctcaggaaacttacaatcatggcagaaggccaagaggaagcaggcttcttcttcacaaggtggcaggagagggagagagctagagtgagggagtgccacactttaaaaccattagctctcctgagaactaattcactatcatgagaacagcatgggggaaactgaccccatgatccaatcacccccac

SEQ ID NO: 11894 - DNA, 566 bp, Homo sapiens
ttcttggtcctgggataggaggaaaaaagaaaaatgtatcaaaaacacacaacctggtgggagaacccaaccctttctgccagaaggaggcagagaagggaataagaggtcaaggaggttcggtccttctattattacccccaccatgcgcacaacagccccctcctgcgtaagtggggcaaaacagcgcaaaatacatatctggggccaaaacccatgtgaaaggcaaaatctggaagggagggggcctaaggacaccgagcctgctcccgggaagggaggggggaagggaaaacgttgcctcgacgccagcaagggatttgtattccctcctaaatttgcccacccagcgtcatccccgtcactccaagtaccaattcagaggtaaggggcggctcacgtcaccgctgggccgatatcgcccacatttgccccaagcagttgccctgggcctgaggtttgcccccccctgcagtcggcgaccggcagcgctgcctccccgtccgccattagagacccagccaaacaatacgtgcggagcaagagcccgcagcgcagcgccgagg

SEQ ID NO: 11895 - DNA, 818 bp, Homo sapiens
cagcttgcagagcactgccaggaacatctccattaggctttttgtgagtgagaaacactcataagatactgtgctcagccaatgagagcttggggttatttgatcctgcatagcctattctattgcaaatgatatgaaaatcaggagtgggtttctgctgtagccaaaaaacagaaaaaacaaactcttgttggctaagcagctgcgtggcaggcaaaaagaatacagctcataagctggacagcaggagatctatattatgcaagtacaagacatttgctaagactctcatgctaacttgggaggcaggttatgtgccccagagacagcagctctaggggaaagggacaggccagataggatgtgcagtgtgagttggctactgttgactgcattttggaatgctatcacagtaaggaggaaagaactggctagtttgcaagcagaaatgaaaggcaacaatctaaaaaaaattagcatcaaaaggttgcaaaagactttctcaaactctaatgagaaaaggtaagattcaaaattgctttcagcaataaaggcataataaaacttctcatctgaacaaaataacttggtcttttggtaaatatggaattaagggggtggctctcccatcatgatcccagatggcctcatggtagctaccattaaattgagagaagcatggaggtaaggcagcaaggaaataaggcagcttatgtctaggaaagaattttatgtgtgtgcttgagttgtccattgctgtgtaacaaattaccccaaaactttgtcacttaaaaccactatcatttatcactcatgat

SEQ ID NO: 11896 - DNA, 462 bp, Homo sapiens
gccgagaccccacctctactaaaaatacaaaaattaactggacgggtgctgggattacaggtgtgagccactgcaaccgaccagttgaattttttttttttaatcataaaagtgtgttgaattttgtcaaatgcttttcctgcatgagatgagagggtcatgtggtttccttcctccactctgctaatattgattgattttcatatattgaactatccttgcattccaggaatgaatcctgcttggttagggtgtagagtcctttaactatactgctaaattcgttttgctggcattttgttgaggactttcccagtgaggctcatcagggatattggcctgccatttctcttgtggtgtgtttgtctggctttaatatgagggtaatgctggcttcctaggatgagtgaggaaatgttcttcaatttgtccaagagtttgaggagtggtactgattcttct

SEQ ID NO: 11897 - DNA, 306 bp, Homo sapiens
tcatcctcaggtggctcattgagcatcttggctgtatttcattttagagatgatatgttttgagatggagacttttcccccaagttctccactgctagccatctaatctccaaacagaccaatctctctaccccagaacttcttttccccagggagcctggtggtgcagctgctccatggagaacacctgttttctctttgacatctatcttattagaacacagtccgtgggtactggagggtcttagggctgccactatttactttgtggagaagtaaaaaccacagggagactgccctgcaagt

SEQ ID NO: 11898 - DNA, 283 bp, Homo sapiens
actcttaaaccatgccctaaccaaattctgcttttgccatttaacagctcatgagtctgaacctcagtctcttctgtaaagctgatgcaataatccctacctcaagggccgtgcacatgcagagtgcaaggtgcacagtaaacattcagcaagcagtggcagctcacactgtcacagttctagataccaggtctggggatctggattctaaaacccagttctgttactaacttgcttgggaccttgggacattctcatgtttctctgagcctcagtttcctca

SEQ ID NO: 11899 - DNA, 404 bp, Homo sapiens
gggttaattttttaggtcaagattatgaatgtaattgctcttttttgtgttcataactcaacagtttaatttgggaggattttatgggtatcttggtatatttgaaatctctgacctttttgaggatgtttcttggtgcattttctagacaaaatcatcacctgcaaaaaataggaatttagcagtacgcttttttctcttctgatgtcttttaagtgtggtgagagtgtagtcctgccttctccttttaaggggagagtgggtaactcaaatgcatcttcatttaccaatgcttctccattatttattaatgcattccattatttgttatgtttgcttttgttttaaatctatccaggtaagatttactctattgatgctctttttatgacataaagaaaaaa

SEQ ID NO: 11900 - DNA, 417 bp, Homo sapiens
cttcccattgatttgaaaaaccgcttttgtcatatactaaattgttgcatgcctttaggtccatttttggagtttggtagctttgatgtgcatatgattttgatttataagctgcagatctgtggagctctgctttttgcttttggtattttgcttagaacagcccttcccacatgaaataataaaaatatacctgtatttttattaaagttcttttttattgaatataataattatacacatttatgggatacatgtgatattttgatacaaggatagcatacaatgtataatgatcaaatcagggtaattaggatgtctgtcacctcaaacatcattttttgtgttggaaacatttcacatctcttcttctggttgttttgaaatatacaataaattattaactgtagtcatctt

SEQ ID NO: 11901 - DNA, 541 bp, Homo sapiens
cagaagctgtgccaaatccttctgtgaaaacttcctcaaagctggcggtttgaggttagagtttcaatgtaatgttacatgagttgccgaaaatgaatatagttattttagttaatttcccctgcaaagtcttgcttattcctacaaggtatcatatgactcattgtgagagttattataagaaggaatgatgtttcagtcctttaaaatattttaaatcattttataacttctgattatttgaaaaacgtatggaagcatgtctctttcccctctggtagtgggggaaattttcaagaagagtagaagccaggaggctgtatctgtttcttttgtgtctcatgtcagtttgaaataaggtgaatttgatcgctgtaaatccatattgtgcaaggtattagtgctggggatgcaaagataaattagatattatctctgcctttgagaggcagctgatggtttaacaaagaataacaaacagctaggtaactatattataagtattaaaacagggcaggcatggtggttcatgcctgtaatc

SEQ ID NO: 11902 - DNA, 404 bp, Homo sapiens
gaaatctaccaattaccaaaaaagtaattcaaaataatgatcttttaaaaactcaacaaggccaggtgcagtgactcacacctgtaattccagcactttaggacaccaaggtgggcgagtcacttgaggtcaggagttcaagacccgcctggccaacatggtgaaaccctgtctctactaaaaatacaaaaattaactgggtgtggtggtgcacacctgtagtcccagctacttgggaggctgaggcaggagaatcacttgaacttggaaggcaaagattgttgtgagccaagatcacgccactgcactccagcctaggtgacagagtgacactctgtctcacaaacaaacaaacaaacaaaaaaccctcaataggatacaagataatacagaaagataattca

SEQ ID NO: 11903 - DNA, 838 bp, Homo sapiens
atggctcgcactaagcaaactgctcggaagtctactggtggcaaggcgccacgcaaacagttggccactaaggcagcccgcaaaagcgctccggccaccggcggcgtgaaaaagccccaccgctaccggccgggcaccgtggctctgcgcgagatccgccgttatcagaagtccactgaactgcttattcgtaaactacctttccagcgcctggtgcgcgagattgcgcaggactttaaaacagacctgcgtttccagagctccgctgtgatggctctgcaggaggcgtgcgaggcctacttggtagggctatttgaggacactaacctgtgcgccatccacgccaagcgcgtcactatcatgcccaaggacatccagctcgcccgccgcatccgcggagagagggcgtgattactgtggtctctctgacggtccaagcaaaggctcttttcagagccaccaccttttcaagtaaagtagctgtaagaaaccaatttaagacaaaagggaatgcattgggagcacttttcgttttaatgcctactgaaggcttcaaaaccaatcgatttcggccggtcgcggtgactcacgcctgtaattcaagcactttgagaggctgaggcgggcggattaccagaaatcaggagttcgggatcagcctggccaacatggccgaatcccgtctctacgaaaaatacaaaaacacgccgggcgcgacggcgagcgcttgtaatcccagctacactctgaaggctgaggcaggagaaacacttgaacctgagaggcagaggtttcagtgaatcgagatggctctaatgtactccagtctgggcgacag

SEQ ID NO: 11904 - DNA, 795 bp, Homo sapiens
gccttgttttatggaaaataaacacagccttcaggttatgaaaaccagatgtagaagaggacaagtttaaaaaattaaagtccaagccggcgcacgtggctctgcgcgagatccgccgttatcagaagtccactgaactgcttattcgtaaactacctttccagcgcctggtgcgcgagattgcgcaggactttaaaacagacctgcgtttccagagctccgctgtgatggctctgcaggaggcgtgcgaggcctacttggtagggctatttgaggacactaacctgtgcgccatccacgccaagcgcgtcactatcatgcccaaggacatccagctcgcccgccgcatccgcggagagagggcgtgattactgtggtctctctgacggtccaagcaaaggctcttttcagagccaccaccttttcaagtaaagtagctgtaagaaaccaatttaagacaaaagggaatgcattgggagcacttttcgttttaatgcctactgaaggcttcaaaaccaatcgatttcggccggtcgcggtgactcacgcctgtaattcaagcactttgagaggctgaggcgggcggattaccagaaatcaggagttcgggatcagcctggccaacatggccgaatcccgtctctacgaaaaatacaaaaacacgccgggcgcgacggcgagcgcttgtaatcccagctacactctgaaggctgaggcaggagaaacacttgaacctgagaggcagaggtttcagtgaatcgagatggctctaatgtactccagtctgggcgacag

SEQ ID NO: 11905 - DNA, 410 bp, Homo sapiens
gtaataactaactacaaccaggaacagctgggtgtgtttatggggtttggggttttttttagcaagaagctagttttccagccagcaaattttcaatactttcctttctgccacctcctcactttcttcttctgctcttctcattccatagttattgccctcagaacagttcaactcagcttcaacactggaatggtctcattctgctccatcacagaactggggattctaatcctttattattctgtgctccttcctctctctccagaggcaaaaagaatgaaaattggggccgggcgcagtgcctcacacctgtaatctcaacactttgggaggccgaggcaggtggatcacttgaggtcaggagttcgagaccagtctggccaaaatggcaaaaccccgtctctact

SEQ ID NO: 11906 - DNA, 538 bp, Homo sapiens
ttgccgactctcaaaataaaggctcagaggggtgtccaatggaccagaaccattctttcgtgtctatttactgtacctcaacgtgggtttccttatcttaagagcaagagttgtactcaacaaataaaccttgccagttccaaagctggtaaatagcttttgtcaggtccacactgagcctctgaaaagcaatctgctggtgggagctgacagctaagctgtgcgtcttttgaccttctccttatctaggcagagaaaattttcactcatccatgagactgttctttacatttttctggggatcagcaaggtgacaggtggtttgcaaaacccaacatgattattatttttctaaatcatagttgttccagctctagctttcttccccccaatattcacatggattcctgtttaaccaaacctcccacttccactagctaataaaagtgtcatgcagattgttacaaagaactattgttatttacaagtctacgttttctttgaaatcaaaacataataaagtgaattttcagtgtta

SEQ ID NO: 11907 - DNA, 706 bp, Homo sapiens
ttgccgactctcaaaataaaggctcagaggggtgtccaatggaccagaaccattctttcgtgtctatttactgtacctcaacgtgggtttccttatcttaagagcaagagttgtactcaacaaataaaccttgccagttccaaagctggtaaatagcttttgtcaggtccacactgagcctctgaaaagcaatctgctggtgggagctgacagctaagctgtgcgtcttttgaccttctccttatctaggcagagaaaattttcactcatccatgagactgttctttacatttttctggggatcagcaaggtgacaggtggtttgcaaaacccaacatgattattatttttctaaatcatagttgttccagctctagctttcttccccccaatattcacatggattcctgtttaaccaaacctcccacttccactagctaataaaagtgtcatgcagattgttacaaagaactattgttatttacaagtctacgttttctttgaaatcaaaacataataaagtgaattttcagtgttaactctgttattttaaactcatggtagtcttgccaaaccctctggtgaaaagaagtccctgcaggttatgggaactattcccttgtcttttctcaggaccgtacttcaaacaactcaatcaagaggcatctttcaagtttgtaaagatgttcaaggaaggcaattgact

SEQ ID NO: 11908 - DNA, 361 bp, Homo sapiens
ctccatctcctgagttcaagcgattctcctgcctcagcctcccgagtagctgggattaccaacgtgcaccacggtcagctaaattttgtatttttagtagagacggggtttcgctatgttggccaggctggtctcatgtgatccacccacctcggcctcccaaagttttgggattataagcgtgagccaccatgcccagccgcaactttttagaaaagtatttttcaggccaaacacgatggttcttgcctgtaatcccagcagtttgggaggctctcgtgggaggatcacttgaggccaggaatttgagaccagcctgggcaacatagtgagacctcatctcactatgaaaaaaaaatta

SEQ ID NO: 11909 - DNA, 1083 bp, Homo sapiens
ggtaccaagtcatcctcaggtttgataactaatggtgccttctttgatccatcaaagttatgactgaatgtggcaccgggacagttagttgctgtcctagagttaatttgctagcttcttgtgttaacaagatggtggcagctaatgccttaaggcaaagaggccatcttaacaccatggagtctagttgttgggataaatatgccactgggtgacgccatgatcctataagttgagtcagagcccctatagtcattgttttttgttcatgaacatatagaaagacttagttatgtctcatagtcttaaggctggggcctgggttaaagcttccttgatctgtttgaaggctatttcttggttagttttttaaaagaggggctccttttcccctccttttgtggcgtcatataacagcttagccatcagtgaaaaacttggaatccagatgtggcagaatgttgctgcgtctaaaaattcctatttgtcatcgggtagtcggggttagaagtgcacaaatggcttgcttcctctcatagccaaaccagtgttcctcgtggctcaatatgacacctagatatgtaacctcttcatggaaaatttgggctttcttttttgatattttgtaacttgctttctataggagatggaggagatcctgggttccccgataacactcctctcaggttggggcaggcaaagaaagctcgtctatgtactgcaacaaggcacagttgttacttggcacggtataggccatgaggtctgaggccaatgtttctctaaagattgtgggagagaacggggcatggtggtttgcgcctctcatcccaacactttgggcggccacatggctggatcatgaggtcaggagtccaagaccagactggccaagatggtgaaaccctgtctttaccaaaaatacaaaaattaggcagccatggtggcaggcgcctgtaatcccagctacccaggaggcaaaggcaggagaattgcttgaaccgagggggcagaggttgcagtgagctgagatcgtgccactgcactctagccttggtgacagaacaagactctgactcaaaa

SEQ ID NO: 11910 - DNA, 435 bp, Homo sapiens
taaggctattgattcagtcctctgctgagtaaaccatgggtatctccagaagtggacaatttgtttttacaagtatggtacatattaatagtaacaacaacaaaaaagaaaacagtacttatttttctggtgttcctgttttagtattccttgaacaaaacctttatcacttggaatttttattgtctacttatggaaagacttttagacttacgtagacagtatcacatcactcttatgcatacataaagaggaaaaaaatgtttcctataactttgtcacagttagtctgactcttctgaataacttttttaatcccagtagtcaagctcctgtacttttgtaaaatatattaacagtgaattactagaaaatgggccatgttcttgtatattacagtgatgtcaattgctgataaattttctaactgcttac

SEQ ID NO: 11911 - DNA, 1792 bp, Homo sapiens
aggactttaaatatctctttatgaagttccctgcctaacctctttctatttaaaggcaaacaaatttcgaagaggttttgtgttccctctttatgtttctctatgacccagtttagtctaaaaccttagttcattacatatacaacacatagcctttgatccctggtaactggcaggtgttggtgattaataaaccaaggcttcaaagtgaagtatgtgtgtgcagatgacttttggaataacgtgggcatagcatcataccttcctgattgtcttcagcatataaaaattaactgttgtagttaaaattatgtcagtgcagagcttgtggttacttgggaatgttctttcagaatagtccatgttgcctattaaacctagttttaaacacattgggcagtcaatttatgcacccaaaatatcaccctcaggtagattgagggcaagataaaatgctgtatgtagctatacaaaggaattcagaaacattactggaaagcaaagcctttgtcagcttgctactgacaaagtagtaaaaagctactaatcagtgttgagtcagatgtcaacagaaaaatacaaatacctatgagagccacagcagtttctcatttcatagccgattcaatgaatatgattagaaattcactgagctcactcttgcaggtttaaatggaggcctgcataaggactgcaagaggaaatctgggtgggagagaatgtaatctgatcttgcactcataggcaatgctgcaatgcaatcatgtccaatacaagcacagcttcattcataacaggaaacgtcttctttgggaaaatagctctattggtgcccaaactcaggtatgccagtgtatgcaggtggagtcgccctacccctcttccaaacatgtcctgtgagatttttaaaataagatgggatagtacaggggcatgaaaagaattgattccttcacaggatttgaatccagttcaagggagaatgtagaaaattcaaaacccaacatataaggtatcacacaaccaagaaaagtaaaaccattgcaagtttacttgcgttgagtacaaaacagatttaatggtgttctatgtcatagtttaatgctctgggtatttaaatatgttttcaacaggatttgagttgaaagtttgtaatgtgctttgatggaacacctctcaatttctattcaataaacttatgtaattgtccattgacaatataatgataacagtaccattgaactctaaactgtggtttatcttcactactgggaagcaactgtgcatcagtattaaagatatgcagaaacataatattcactaatttgttcatctgcttctgtatattgtttatggaattacatggcaagaactgttctaaagcaacatagtctttccacattacttttagaggtgaaattacttttgttttgcttctctataatgtgtacttcaaatgaaacaccatacttttttctaaaaaaagatgttcaatttactaatttttttaaatctcataatttaaaaagcatttgttgtgattttaaagtgttgcaagaaaagggattttgtggccgtgggtagactttttatactttgttttatagatggattttttttaactgtagtttgtttaagtcaccaagcagcatccaaaatcttaatgtgtttcatttgatgttgttagatcagagaagaaattggcataaaatcggttaatagtattgtcaaagaattgtgtattgtgtactcactgggaaaaaataaaatatattcacatttcaaatttgta

SEQ ID NO: 11912 - DNA, 1740 bp, Homo sapiens
aggactttaaatatctctttatgaagttccctgcctaacctctttctatttaaaggcaaacaaatttcgaagaggttttgtgttccctctttatgtttctctatgacccagtttagtctaaaaccttagttcattacatatacaacacatagcctttgatccctggtaactggcaggtgttggtgattaataaaccaaggcttcaaagtgaagtatgtgtgtgcagatgacttttggaataacgtgggcatagcatcataccttcctgattgtcttcagcatataaaaattaactgttgtagttaaaattatgtcagtgcagagcttgtggttacttgggaatgttctttcagaatagtccatgttgcctattaaacctagttttaaacacattgggcagtcaatttatgcacccaaaatatcaccctcaggtagattgagggcaagataaaatgctgtatgtagctatacaaaggaattcagaaacattactggaaagcaaagcctttgtcagcttgctactgacaaagtagtaaaaagctactaatcagtgttgagtcagatgtcaacagaaaaatacaaatacctatgagagccacagcagtttctcatttcatagccgattcaatgaatatgattagaaattcactgagctcactcttgcaggtttaaatggaggcctgcataaggactgcaagaggaaatctgggtgggagagaatgtaatctgatcttgcactcataggcaatgctgcaatgcaatcatgtccaatacaagcacagcttcattcataacaggaaacgtcttctttgggaaaatagctctattggtgcccaaactcaggtatgccagtgtatgcaggtggagtcgccctacccctcttccaaacatgtcctgtgagatttttaaaataagatgggatagtacaggggcatgaaaagaattgattccttcacaggatttgaatccagttcaagggagaatgtagaaaattcaaaacccaacatataaggtatcacacaaccaagaaaagtaaaaccattgcaagtttacttgcgttgagtacaaaacagatttaatggtgttctatgtcatagtttaatgctctgggtatttaaatatgttttcaacaggatttgagttgttatgtaattgtccattgacaatataatgataacagtaccattgaactctaaactgtggtttatcttcactactgggaagcaactgtgcatcagtattaaagatatgcagaaacataatattcactaatttgttcatctgcttctgtatattgtttatggaattacatggcaagaactgttctaaagcaacatagtctttccacattacttttagaggtgaaattacttttgttttgcttctctataatgtgtacttcaaatgaaacaccatacttttttctaaaaaaagatgttcaatttactaatttttttaaatctcataatttaaaaagcatttgttgtgattttaaagtgttgcaagaaaagggattttgtggccgtgggtagactttttatactttgttttatagatggattttttttaactgtagtttgtttaagtcaccaagcagcatccaaaatcttaatgtgtttcatttgatgttgttagatcagagaagaaattggcataaaatcggttaatagtattgtcaaagaattgtgtattgtgtactcactgggaaaaaataaaatatattcacatttcaaatttgta

SEQ ID NO: 11913 - DNA, 1738 bp, Homo sapiens
aggactttaaatatctctttatgaagttccctgcctaacctctttctatttaaaggcaaacaaatttcgaagaggttttgtgttccctctttatgtttctctatgacccagtttagtctaaaaccttagttcattacatatacaacacatagcctttgatccctggtaactggcaggtgttggtgattaataaaccaaggcttcaaagtgaagtatgtgtgtgcagatgacttttggaataacgtgggcatagcatcataccttcctgattgtcttcagcatataaaaattaactgttgtagttaaaattatgtcagtgcagagcttgtggttacttgggaatgttctttcagaatagtccatgttgcctattaaacctagttttaaacacattgggcagtcaatttatgcacccaaaatatcaccctcaggtagattgagggcaagataaaatgctgtatgtagctatacaaaggaattcagaaacattactggaaagcaaagcctttgtcagcttgctactgacaaagtagtaaaaagctactaatcagtgttgagtcagatgtcaacagaaaaatacaaatacctatgagagccacagcagtttctcatttcatagccgattcaatgaatatgattagaaattcactgagctcactcttgcaggtttaaatggaggcctgcataaggactgcaagaggaaatctgggtgggagagaatgtaatctgatcttgcactcataggcaatgctgcaatgcaatcatgtccaatacaagcacagcttcattcataacaggaaacgtcttctttgggaaaatagctctattggtgcccaaactcaggtatgccagtgtatgcaggtggagtcgccctacccctcttccaaacatgtcctgtgagatttttaaaataagatgggatagtacaggggcatgaaaagaattgattccttcacaggatttgaatccagttcaagggagaatgtagaaaattcaaaacccaacatataaggtatcacacaaccaagaaaagtaaaaccattgcaagtttacttgcgttgagtacatgttttcaacaggatttgagttgaaagtttgtaatgtgctttgatggaacacctctcaatttctattcaataaacttatgtaattgtccattgacaatataatgataacagtaccattgaactctaaactgtggtttatcttcactactgggaagcaactgtgcatcagtattaaagatatgcagaaacataatattcactaatttgttcatctgcttctgtatattgtttatggaattacatggcaagaactgttctaaagcaacatagtctttccacattacttttagaggtgaaattacttttgttttgcttctctataatgtgtacttcaaatgaaacaccatacttttttctaaaaaaagatgttcaatttactaatttttttaaatctcataatttaaaaagcatttgttgtgattttaaagtgttgcaagaaaagggattttgtggccgtgggtagactttttatactttgttttatagatggattttttttaactgtagtttgtttaagtcaccaagcagcatccaaaatcttaatgtgtttcatttgatgttgttagatcagagaagaaattggcataaaatcggttaatagtattgtcaaagaattgtgtattgtgtactcactgggaaaaaataaaatatattcacatttcaaatttgta

SEQ ID NO: 11914 - DNA, 456 bp, Homo sapiens
tggttttgtttgttgtttaatttctctttaaagtgtgttgctttcctttcccttgatgtctcagcaacagtacttctattcttattagctacttgtattagtccgttttcatgctgctgataaagacatacctgagactaggaagtaaaagaggtttaattggacttacagttccacgtgtctgaagaggtctcagaatcatgacaggagacaaaaggaacttcttacatggtggtggcaagataaaatgaggcagaagcaaaagtggaaacccctgataaactcatcagatttcatgagacttattcactatcacgagaggagcacgggaaatacccaccctcatgattcaattacctcctctgggtccctcctgcaacatgtaggaattctgagagatacaattccagctgagatttgggtggggacatagccaaaccataacaccaccattag

SEQ ID NO: 11915 - DNA, 365 bp, Homo sapiens
gaatggaggacttctttagatagggtaagtggtggtatctcccaggaggagagcacacctcattcatctttgcatccccaggcccatgattcactggcagggtcaccaaggataagctagtcacagtcagaacttttgtttcttcatttcactcctgcatgcattcattcatatatcatcatgcattcaacattgcttgcttgcttactaggtgcctagtagatgcgatacagcagtgaacaaaagaaacaaaaaatttctgatctcatgaagcttaaattctatttggggtgggcgaggaaaaaaaaacaagaaaaatacatcttacacactctgcacatgtaccccagaactaaaaatttttt

SEQ ID NO: 11916 - DNA, 448 bp, Homo sapiens
gatggctagggcaggacacggacagtcatcaggggatctatgtttggcttatggcaagtggcttcactcccacggctcaggtgccattaggggatattaagcccgcttactaaccccactgaccaccactgcatcatttggaaaatggagagtctccctgccattctctgatagctgtcagtcaggagctgacctcacagacgggcaatttcccctcctattccggtcactggtgacactgggggatgggaggccattccttggcaacacttctgagactgaagtagttttctgaacttgtcctgggcccagaaggaagatactaatcccacctctgctacttggctgctgtgtggccctgggcaagtctcaatcactgggtgtctatatgctcaagtacaaaaaacactaataaagacttatagatgggcacagtgaaaaaaaaaaa

SEQ ID NO: 11917 - DNA, 383 bp, Homo sapiens
ctactttgactccctctgtcttttctctctttgcccccccagaaattgaatcctctccattgactgcacatctgcatttcagtaggcaagctgcaattattcaatgacagcatgccctgatttttaccatggaaaactggggctggttgagatgacccaggcatgacagtcctctgtcagcaaggcaagaaataagtatctgactaaaaatctcacagcaatggagagcaccgctgtttaccattctcatagggctgttcaaaatgttgggaccaagatctgttccatctaggggcccagacatccctgaagattcctttctctattacgtctccatagggtctcatttatgctcttaaaattgtcctcgtgacaagagtggc

SEQ ID NO: 11918 - DNA, 184 bp, Homo sapiens
ttcgcttatacttcttctattctggttatttaatgctagcttagggttcctgtcatttagaccttggacccaatattttactgtagctaattagcaataaattaagtaaaaattatatgaaatcattttaaggggaagaaggacaacaacacaaattagttgtcatcactagcgttttttacct

SEQ ID NO: 11919 - DNA, 284 bp, Homo sapiens
aaaaaaaaaaagtctagctttcttggaaccaacattctagtgaaggttacactttagagcatacaagcaaatccacgataacaaatttacgttaagttccagaaaggaaaggcgtagagtgctattaaaaaggaatagcaggggccatgtaatctagactgagttggggagtaggagatggtcagagcctctctgaaatatgggcatttaaactgaaacgaaagcctgataaagggttagctaagaaaaatcaccccaagtgggaacagcatatgtgaagaccc

SEQ ID NO: 11920 - DNA, 491 bp, Homo sapiens
gagccaccgcgcctggccaacatcaagttttatataaatgcaatagatgcacacacattaatgtatgttgtactgcaacacatttggacccttttcttagtgtgggtctgcagcatttgaacagtccgacactgccctctgctgatatacatgggtaaagtctgcgctgtagatgagggaaaccattggtcttgattttttattccgagtctgttttctctgatgccactgttcctgaattatgaacagtctgagctgtaagcctgtcaccagagctaatgtcacagttcagttgtcatccttttcccagagaacacaagagtgagggtgcttcggacactgggcatctccaaagcctggaatttgatagctcagggctgctgtaagatttgttgttaagtctctttcttcctttagttcttcagcttagcccaagctgtgctcagtttattttagcggacttgtctgagtttcctaagtagactgtactg

SEQ ID NO: 11921 - DNA, 723 bp, Homo sapiens
  misc_feature (32)..(32): n is a, c, g, or t
ggtgggtgcctgttagtctctgccactcaggnaggctgtaggtaggataaccacccgatacccggggaggcggtaggttgcagttgagtagtatatcacacacacggaaaaattatggagtagagtatgaaagctgaataaaacttggaaacaggaaacttcgaagacatgaaggattagagcaggcacgctgggaatcagccctgaagaggcaggcctgcgttaagggctgaatcggtaggaaaactggggcaatgagggacgggtcaggcctaggaggagtacccatatagctgtcgtcagcggacactccttctgtgtccctcagactcagggcagtccctccgcctgcccttcagcaactctccagaacaaaagccgaggtcacctcccctgctcttgaaaaccctcaatggtcaagaagctttgtcaaatcctcatgagccttgcacagtgccaggtgctgtacctaatgtaagtgcctcattttactctaataaaaactaagtattaggctgatctacaggaggaaatgagattcacagagattaaggcaacagtcaaaagacacagaactagtaggcaacagacctggaattcgaccctgtgtcagggtggttccaaatgcaagctctttctactaaactgccagcctcccaggtgcccagaagtgatcctggccctcctcctctaccctgatgtcctgacctcctggtgtgctga

SEQ ID NO: 11922 - DNA, 1050 bp, Homo sapiens
ttgacccaccgaaagtacatgcccccacacactctctccaagcctgcaaatatgtgtgcggatagggacctccaaaactgtaaagcacccatgaaaaaagtctaaggctgtgaagatctgtgttgtgctgcttggcatgcaaggaatggaaacttaccaagtgacttcaagaaaaggggggttttctcctgaggatctggaagctggtattgagccaaaggccctatggggaaaagtattctgttcttgccttcaggcgtttcaactttgccatccctgtttactccactcgtaccttgtccactccgtaatctgcagcccaattccagagggagcaggggagatgggctttgctaaggccaggccaattcttacctagccttgtcccgtcaaacaggcccactggccagttgctggggctcacttgacccagtcggtggccatttgtgtgtccctgagcaggtgctgtggtgaggcagggccagccaggtggcactgagcagctgcaggactgatgtgattgcaggactgtgagaataattattatcactgagccttaaatactgtgttttctgtaaaagtgagtgtccttgaagcattgagcaagctgtgcaaattaccagagattatattttatattgaatttcccagttcctactgtgaaaatttaaaaacaacctctactgaattatcccccaaaatgcatttcctctaagtcctaatactaagtgattatgtaaccatggaaacggttattttgggagaaagaaaatcagagagaattggatctttagcatagctttataaaatcggactttgcttaatggaactttaaactccacagctcacagagtgtaggttcttatgctcagtacgacacatgataagctcctttagggtacatccatctcaataattggtttttgaattctctaaggagagacactatcccagaaaaaaagaaaagagcagcgaaaaaagtcaagtgatttttctgctgcagtcccagatctgttttctgtcatctttcaggagttttcttgaccccat

SEQ ID NO: 11923 - DNA, 547 bp, Homo sapiens
cctttccctttggtttctagttgagtttagcaagaagaatgtccagagactggagggagggagaagagggaggtcagaatatctacccacagtggggtccctcctgattcgctacagccctgaaatggggtcactatccctgtcaggcagcccttccgtgagcgtttctgtccaggttctggtgtctgcttcctcaccttgccccttcagcctttaggtataacagagccaccctacctgtttccccctcaatactagcccagggggctgcactaggccttgtgccctgctcacttcttggcaaatacccctttgtgataatttgagggtgccacctgtctcctgctggtaccctgattgatagagagtgtgtttgcagatttgctgcttcagtgcctttgtaacacagcaaagctgagtggttccagagggactgacctctgatctcaggttttttttgttttttgttttttgttttttttgaggctgagtgttgctctatcgcccaggctggagtacaatggtgcagcctcagcgcactgcaacc

SEQ ID NO: 11924 - DNA, 378 bp, Homo sapiens
gactctctggactatagctacagtggtcaatctgaaagttacatgcatcccctgattttctttttgttagcacccaattccctatatttgatccctttctgcttgaaatacctagaatagtttcttttttctttttctttttctttttttttttttgagacggagtctagcctgggtgacagagtgagactctgtcaaaaaaaaaaaaaaaaaaactcaaggaaaacgaacaaactggaaatcttagacacaaaaaatagccattgaattgtttaagcctcaatattcaggttaaactctagactgagtgtagtcagagaaaaaatgatgaaatgggggatagtatggaaaaatttatccaaaatgaaatacaaagag

SEQ ID NO: 11925 - DNA, 5276 bp, Homo sapiens
cacaactcgcggctctagggaaggccacagacctcagctgtacgagcggaacctggactagaggaactttcctcaggactcagggcacacagcccctcggccactactgtctgcgagcccgaggcgcaggggagcgccagcggctgcaggtacgctgcgcacccgcactggggcctgggcggtgcagcggcggcgggagggtcctgggaaccgcagccgccgaggccagtgtgtgagccggccggccgcggcaagccgcatcccccggccgcccctcgcagccccttgctccccggcagccgccgccgccctcacgcagcccagccgggcgctcgcgccaggacttccccgccgcccgcctcggcccggaacatggctgcgcgccctgctgccaccctcgcctggtcgctactgctcctctcctcagccctgctccgcgaaggctgccgagcgcgcttcgtcgccgagcgggactcggaggacgacggagaggagccggtggttttcccggagtcgcccctgcagagccccacggtgctcgtggcggtcctcgcccgcaacgcggcgcacacgctgccgcacttcctcggctgcctggagcggctggactaccccaagagcaggatggccatctgggcagccactgatcacaatgtggataatacaacagaaatattcagggagtggttgaaaaatgtacagagactctatcactatgtggagtggaggcctatggatgaaccagagtcttaccctgatgaaattggaccaaagcactggccaacctcccggtttgcccatgtgatgaaactacgacaggcagcccttcgaactgcgagggaaaaatggtcagactacattctgttcatagatgttgacaatttcctgactaatccacagaccctcaatctactgattgcagaaaacaaaactattgtggcccccatgctggagtctcggggcctgtattctaatttctggtgcggaatcacccctaagggcttctataagaggaccccagactacgttcagattcgagaatggaagaggacaggctgcttccccgtccccatggtccactccaccttcctaattgacctcaggaaggaggcctcggacaagctgactttctaccccccacaccaggactacacctggacctttgatgacatcattgtctttgccttctccagcaggcaagcaggcatccagatgtacctctgcaacagagagcactatggctacctgcccatccccctgaagccccatcagacactgcaggaagacatcgagaacctcatccatgtgcagattgaagcaatgattgaccgtcctccaatggaaccctcccagtatgtctcagttgtccctaaatatccagacaagatgggatttgatgagattttcatgataaacctcaaacgcagaaaggacaggcgggaccggatgctgcgcacactgtatgaacaggagattgaggtcaagattgtcgaggctgtggatggaaaggcactcaacacaagccagctgaaggcactgaatattgaaatgctgcctggctatcgagatccctattcctccaggcctctaacaaggggtgaaatcggctgctttctcagccactactcagtctggaaagaggtaattgatcgagagctagagaagactcttgtaattgaagacgatgtgcgttttgagcatcagtttaagaagaagctgatgaagctgatggataacattgaccaggctcagctggactgggaactgatttatattggtaggaagaggatgcaagtaaaggagccagagaaagcagtgcccaatgtggcaaacctggtcgaagccgactattcctactggaccctgggctacgtcatctctctggaaggagcacagaagctggttggagccaatccttttgggaagatgctgccagtggatgagtttctgccagtcatgtacaacaagcatcccgtagccgagtacaaggagtattatgaatccagggacctgaaagccttctctgcagaacccttgctcatctaccctacgcactacacaggccagccggggtacctgagtgacacggagacctccaccatctgggacaatgagacagtggccaccgactgggataggacacatgcctggaagtcccggaagcaaagccgcatctacagcaatgccaagaacacagaggccctgccaccgccaacctccctggacactgtgccttcaagggatgagctatgaaggctccctgggagtgtggcccacatcagttcaacatcctctggtttttctaaagggctattcatctgtttgctccagttttctgttttgttttgttcttagtggtcacagtcatctaaccaaagtgatctagtgtgatagatcgaaattaacatatttttgaccatggaaggaaataaggaaattcaacccaaatttcccaagacggctgaaagacaggttttctggaaactgttaagataaactgtaatccagacacctaattcttcagttcactactcatgtgatactgattcccacattaaggttgaacaacatggctcagagtcttgttcaagagaaagtgatcaccgagctgtcacatcagcaaatatgtagtcaaggcagccaggccaactagaccacacttattggtctagtttgtccgttttatatgacattgaaaacttgtgtgtgcaacttttgggggacaggaatcacttaaaatcatatttatttggctttttatttaaaggattctgtcacaagtcttattgaaaagtagattttttaaaaaaaaaaaatcttagtccctgttatccagtaggggtgggtatttgggtccgactgagacttggcctgtgaccatcatggcagttggagttctcatatagaggtgaccagtttgccatgtggatataatttagtagatatttgacagtttgtgtaggtatttgagggaaaaaactcaatgtttggcttttttattatggccactcgagtcaggatgctctatttataaagataaatgtaatatataaagggtgaggactggctgtgcatcctgccctgtcccgggtttgcgcgctgctacagagcttcacgctctccgctccaccccttagcctgggaacccaccgcaggtgtgagttctgtgagtcactgctaagagacagagcacattttcaggccagcaactatccttgccagagttttttcattatattttgaattatttattttacaaaatgggcgaagatattgtctttaggataaggcagagaaacagatgttgcagacttccacggcacccgggggagtggtgggtgtggacacattggttcggcaatctgattctcctgaatttcccagccaggctcttgtggggaggcctgtggatggggggatttgaactatttggaaacaaatgattctctatctcaggtgagaaacctggtcagaaacaaagggctggtcacctgatttaggccagcaaccagggaagctcttagaatcccaggcggacaccctttctcaaaagatatcccctaagagtcctttctgctttcttcacagattgattttatgtaaaatgcagagttggactacacgatttcttcccactccacaatctgtcatcctagtatagatcatggtggtttccctcaagtttatgttctcatgccctcaatctgtaaatttttgtctccagaaaaaccctcccaggcatcccataccagcaccgttcctcatcactgtccatgcaccatgcagccatatggggggccgtgcacaccccaaaccctgagcttcacacttaaactcatggggagggcccttcagagcagagtccacaggcgggtggtgctacatacacaagcttagtgtacgagtgtaagatacactttaagccagacacctaattcttcagttcactgcccatgtgatactgattgccacattaaggttgaacagcatggctcagagtctagagaaagtgatcaccaagctgtctcatcaccaaataggtagtcaaggcagcctcatctccccaggtgaggggcgggtccccactttaggacaagaggcagcttgccttccaccagacgccagcctcggccttcctccccgactcactgtgggtacccttctacactgaccagcaagctaggccgctggaggaaagggaactcacccaactctaaattgtgccgcttagacttagctgtcagtgtgacttcctttcccacccacccccagaaaaacagaaagagcatctggggagcgagtgaaaattccttaggtgattcctaagatttccttgggtatctggtttttgttttcatatttgagtgtgtgcatgtgtgcatgactttaatgacttttttaatggggtgggaggtggctggggtgctggggttgaaggaagtttgggttgatttttgtggtgttttgtttaatagagaattttttttttcctgttcccctgtcagctggtctgacagatttaagaactctcattcttaaaagactttggacttaaattctagcattttagactaggactgttctactgtgaagaaagttctgtctcctttagcccggtttgtttctccctgctcaggtctagaatcccaagcagtgttcttttctggtgaacactgtgagccgcagatgtgactttttttttaaagtcatctcttcagcaatccagaggttccttgacctcattatttgtcctatctctcccttatagtcctaagccaagacatttgacctttgacatttgacctttgcagtgtcatgtgagggcgtcagtatagaggcctttgcatctgggcctggcacccgctctctgcctctggaggctaaaccctgtctggatttctcttgggatctaacgtgggatcttctggacagacaaccgtgacatcagcagtgctggtgctgctgtgtgtggactgaacacctgcactttgcagaggacacgctgcatgggccccgcttgcggttcattcaggcctgctgcaggagctctgagaacaagaaagagtggacacccgttcccctgcatcatctgtcttgcgtgctatttcagagtggggaagtgataaactatttgccttctggagctctttgtgaaaaattaaaaaaaaacttagctcaaaaaaaaccacacaaacacccacacaacaccacaacaacacagccccacaaccacctcacaccacccaaaccacacaaaaacacacaacaagagaggg

SEQ ID NO: 11926 - DNA, 5182 bp, Homo sapiens
cacaactcgcggctctagggaaggccacagacctcagctgtacgagcggaacctggactagaggaactttcctcaggactcagggcacacagcccctcggccactactgtctgcgagcccgaggcgcaggggagcgccagcggctgcaggtacgctgcgcacccgcactggggcctgggcggtgcagcggcggcgggagggtcctgggaaccgcagccgccgaggccagtgtgtgagccggccggccgcggcaagccgcatcccccggccgcccctcgcagccccttgctccccggcagccgccgccgccctcacgcagcccagccgggcgctcgcgccaggacttccccgccgcccgcctcggcccggaacatggctgcgcgccctgctgccaccctcgcctggtcgctactgctcctctcctcagccctgctccgcgaaggctgccgagcgcgcttcgtcgccgagcgggactcggaggacgacggagaggagccggtggttttcccggagtcgcccctgcagagccccacggtgctcgtggcggtcctcgcccgcaacgcggcgcacacgctgccgcacttcctcggctgcctggagcggctggactaccccaagagcaggatggccatctgggcagccactgatcacaatgtggataatacaacagaaatattcagggagtggttgaaaaatgtacagagactctatcactatgtggagtggaggcctatggatgaaccagagtcttaccctgatgaaattggaccaaagcactggccaacctcccggtttgcccatgtgatgaaactacgacaggcagcccttcgaactgcgagggaaaaatggtcagactacattctgttcatagatgttgacaatttcctgactaatccacagaccctcaatctactgattgcagaaaacaaaactattgtggcccccatgctggagtctcggggcctgtattctaatttctggtgcggaatcacccctaagggcttctataagaggaccccagactacgttcagattcgagaatggaagaggacaggctgcttccccgtccccatggtccactccaccttcctaattgacctcaggaaggaggcctcggacaagctgactttctaccccccacaccaggactacacctggacctttgatgacatcattgtctttgccttctccagcaggcaagcaggcatccagatgtacctctgcaacagagagcactatggctacctgcccatccccctgaagccccatcagacactgcaggaagacatcgagaacctcatccatgtgcagattgaagcaatgattgaccgtcctccaatggaaccctcccagtatgtctcagttgtccctaaatatccagacaagatgggatttgatgagattttcatgataaacctcaaacgcagaaaggacaggcgggaccggatgctgcgcacactgtatgaacaggagattgaggtcaagattgtcgaggctgtggatggaaaggcactcaacacaagccagctgaaggcactgaatattgaaatgctgcctggctatcgagatccctattcctccaggcctctaacaaggggtgaaatcggctgctttctcagccactactcagtctggaaagaggtaattgatcgagagctagagaagactcttgtaattgaagacgatgtgcgttttgagcatcagtttaagaagaagctgatgaagctgatggataacattgaccaggctcagctggactgggaactgatttatattggtaggaagaggatgcaagtaaaggagccagagaaagcagtgcccaatgtggcaaacctggtcgaagccgactattcctactggaccctgggctacgtcatctctctggaaggagcacagaagctggttggagccaatccttttgggaagatgctgccagtggatgagtttctgccagtcatgtacaacaagcatcccgtagccgagtacaaggagtattatgaatccagggacctgaaagccttctctgcagaacccttgctcatctaccctacgcactacacaggccagccggggtacctgagtgacacggagacctccaccatctgggacaatgagacagtggccaccgactgggataggacacatgcctggaagtcccggaagcaaagccgcatctacagcaatgccaagaacacagaggccctgccaccgccaacctccctggacactgtgccttcaagggatgagctatgaaggctccctgggagtgtggcccacatcagttcaacatcctctggtttttctaaagggctattcatctgtttgctccagttttctgttttgttttgttcttagtggtcacagtcatctaaccaaagtgatctagtgtgatagatcgaaattaacatatttttgaccatggaaggaaataaggaaattcaacccaaatttcccaagacggctgaaagacaggttttctggaaactgttaagataaactgtaatccagacacctaattcttcagttcactactcatgtgatactgattcccacattaaggttgaacaacatggctcagagtcttgttcaagagaaagtgatcaccgagctgtcacatcagcaaatatgtagtcaaggcagccaggccaactagaccacacttattggtctagtttgtccgttttatatgacattgaaaacttgtgtgtgcaacttttgggggacaggaatcacttaaaatcatatttatttggctttttatttaaaggattctgtcacaagtcttattgaaaagtagattttttaaaaaaaaaaaatcttagtccctgttatccagtaggggtgggtatttgggtccgactgagacttggcctgtgaccatcatggcagttggagttctcatatagaggtgaccagtttgccatgtggatataatttagtagatatttgacagtttgtgtaggtatttgagggaaaaaactcaatgtttggcttttttattatggccactcgagtcaggatgctctatttataaagataaatgtaatatataaagggtgaggactggctgtgcatcctgccctgtcccgggtttgcgcgctgctacagagcttcacgctctccgctccaccccttagcctgggaacccaccgcaggtgtgagttctgtgagtcactgctaagagacagagcacattttcaggccagcaactatccttgccagagttttttcattatattttgaattatttattttacaaaatgggcgaagatattgtctttaggataaggcagagaaacagatgttgcagacttccacggcacccgggggagtggtgggtgtggacacattggttcggcaatctgattctcctgaatttcccagccaggctcttgtggggaggcctgtggatggggggatttgaactatttggaaacaaatgattctctatctcaggtgagaaacctggtcagaaacaaagggctggtcacctgatttaggccagcaaccagggaagctcttagaatcccaggcggacaccctttctcaaaagatatcccctaagagtcctttctgctttcttcacagattgattttatgtaaaatgcagagttggactacacgatttcttcccactccacaatctgtcatcctagtatagatcatggtggtttccctcaagtttatgttctcatgccctcaatctgtaaatttttgtctccagaaaaaccctcccaggcatcccataccagcaccgttcctcatcactgtccatgcaccatgcagccatatggggggccgtgcacaccccaaaccctgagcttcacacttaaactcatggggagggcccttcagagcagagtccacaggcgggtggtgctacatacacaagcttagtgtacgagtgtaagatacactttaagccagacacctaattcttcagttcactgcccatgtgatactgattgccacattaaggttgaacagcatggctcagagtctagagaaagtgatcaccaagctgtctcatcaccaaataggtagtcaaggcagcctcatctccccaggtgaggggcgggtccccactttaggacaagaggcagcttgccttccaccagacgccagcctcggccttcctccccgactcactgtgggtacccttctacactgaccagcaagctaggccgctggaggaaagggaactcacccaactctaaattgtgccgcttagacttagctgtcagtgtgacttcctttcccacccacccccagaaaaacagaaagagcatctggggagcgagtgaaaattccttaggtgattcctaagatttccttgggtatctggtttttgttttcatatttgagtgtgtgcatgtgtgcatgactttaatgacttttttaatggggtgggaggtggctggggtgctggggttgaaggaagtttgggttgatttttgtggtgttttgtttaatagagaattttttttttcctgttcccctgtcagctggtctgacagatttaagaactctcattcttaaaagactttggacttaaattctagcattttagactaggactgttctactgtgaagaaagttctgtctcctttagcccggtttgtttctccctgctcaggtctagaatcccaagcagtgttcttttctggtgaacactgtgagccgcagatgtgactttttttttaaagtcatctcttcagcaatccagaggttccttgacctcattatttgtcctatctctcccttatagtcctaagccaagacatttgacctttgacatttgacctttgcagtgtcatgtgagggcgtcagtatagaggcctttgcatctgggcctggcacccgctctctgcctctggaggctaaaccctgtctggatttctcttgggatctaacgtgggatcttctggacagacaaccgtgacatcagcagtgctggtgctgctgtgtgtggactgaacacctgcactttgcagaggacacgctgcatgggccccgcttgcggttcattcaggcctgctgcaggagctctgagaacaagaaagagtggacacccgttcccctgcatcatctgtcttgcgtgctatttcagagtggggaagtcatttcccaccgccttcccgggggttcccgaaaaaaaactttttttaacgtggaaaaaaaa

SEQ ID NO: 11927 - DNA, 1050 bp, Homo sapiens
atttttagatattttaaaccttccaacatttacagttataggtgttgtggcactctatggctatcccattccaatggaattgaaaaggagtcaacttccaggtgcgattcacttggcagagaacatgaaagcaatttgtcctttactcttataaacagctgtttttatctagttttcgcttttgtaaagattgggaaatggagtggctctttaaatttggtttgagtcttgcttcccacgtttcttaatcccactgtgtgaaaagcagatatttagaaacgtgaaggaactcgacacctttatgtaacagaacaacacatcactttctttagattgttgggggaaccctagggttctaaggaagtgagtttcctgatgtttgaaatttgccaatgcagcctttcaaaaatatgcttagcatagtttaaaaaaaagaaaattcacccttcttgctgattgtgaggaggtcagatatctgtccctcagctgtcacaatggtagacttgatggagttacatgacagagaagagagcccaaggaagcacctgagtggtttctcatctctgggccactctgttaaggcctgtttgttgactttgggattttcatcttattctggagagttaaggtcgccagatgaataaaatactactgttagtgagcactgggggagctaatcccaaaactgtttagccacaaggttaagaagttaaaaaaaaaaaagagacttttggtgtccttgttttccatttctgtaaatcacattgctgataaatttgcctttgggcatgcaccctgcccattttaggtactaggctcagttactggctacagattgcagattcccttttcagggctgatgcttttaacagtgatagttattcctgataagtaccttaactctgctgtgaggtatcaaaactgctggatctatttttggctgcctctttaccattactccctctagagaatgtccataccataacaacatatttacatatttatcacactgcatttctatcccagctcagaattgtggcaactttcttt

SEQ ID NO: 11928 - DNA, 1145 bp, Homo sapiens
aagacactgcagatgtggtggaaatggcaagagacctacaattagaagtggaccctgcaggtatgactgaattgttgcaatctcatgataaaacttgaagggatgaggagttgcttctcagggtgagcaaagaaagtagtttcttgtgatgggatctactcctgatgaagatgctaacaacactgttgaaatggtcgccaatccggattggcagagaacatgaaagcaatttgtcctttactcttataaacagctgtttttatctagttttcgcttttgtaaagattgggaaatggagtggctctttaaatttggtttgagtcttgcttcccacgtttcttaatcccactgtgtgaaaagcagatatttagaaacgtgaaggaactcgacacctttatgtaacagaacaacacatcactttctttagattgttgggggaaccctagggttctaaggaagtgagtttcctgatgtttgaaatttgccaatgcagcctttcaaaaatatgcttagcatagtttaaaaaaaagaaaattcacccttcttgctgattgtgaggaggtcagatatctgtccctcagctgtcacaatggtagacttgatggagttacatgacagagaagagagcccaaggaagcacctgagtggtttctcatctctgggccactctgttaaggcctgtttgttgactttgggattttcatcttattctggagagttaaggtcgccagatgaataaaatactactgttagtgagcactgggggagctaatcccaaaactgtttagccacaaggttaagaagttaaaaaaaaaaaagagacttttggtgtccttgttttccatttctgtaaatcacattgctgataaatttgcctttgggcatgcaccctgcccattttaggtactaggctcagttactggctacagattgcagattcccttttcagggctgatgcttttaacagtgatagttattcctgataagtaccttaactctgctgtgaggtatcaaaactgctggatctatttttggctgcctctttaccattactccctctagagaatgtccataccataacaacatatttacatatttatcacactgcatttctatcccagctcagaattgtggcaactttcttt

SEQ ID NO: 11929 - DNA, 436 bp, Homo sapiens
atatatgttgaatatcactagtcagggaaatgcaaattaaatctacaataagatgccacttttcacccaccagtttggcataaagtagaagaaggataacattcactgctgatgagaatgtgggaaacaattcttccacagattgctaatggaaataatactgtggaatcctttgggagggtagtctggcagtgcctacttaggataagataagctctgacttggacttatcccttttggaaaccaattgcattgagaaaagtttccaggatgtaaagacatgtatacaaggatgtttattgaagcattgtttgtaatggcaaagaagtatgaacaatttgaacccaacaggaggagaatgactgactaaatagcattgcattgactctatggaacgccacagttattaaaacaaatatgttagtgctgtattgat

SEQ ID NO: 11930 - DNA, 196 bp, Homo sapiens
actatttatgttaactacgcaatcttagacaagtcacttgacttctgtgcattatctgatgatctcttgttatctgatcatgtccttcatgtctacttcctagtaaaagtgttagtctgaagataattgaagatgatgtgtaaaacattttggaaaatactaaattttaaataaactgtagctgttaatttattca

SEQ ID NO: 11931 - DNA, 235 bp, Homo sapiens
tgttggtctataatatagactctgtatcaccagctctggttgtccagactccagccatctctaactctggcaaggctccttgaccccaggctgctcaccaccctgtactgctagttccttctcactgtggctggttggctggttagatagctagtggttggttggtttgcatatggttttttccatctatttttatgccccatttcagactatacctttttgatttactctatcc

SEQ ID NO: 11932 - DNA, 465 bp, Homo sapiens
ttttttttgaagaggctacttggacctctgtccttcagaacccctaaatcggccctatactagactattcattctttgatagattgggagacgacttcttttgacattcctgcaatcatagttttttgtttttgtttttgtttttttttttttttaaatcaggaagggtgagagattctggaatatgatcatgtcaattttggccagttcagttccagggagtgactgtaacagatgcagaaaaataggattgtctcctcctgcccttaattattgaacatgggcattcagtgtgatatactttgctctcatcacagacattacttttctgtcttctcaaggttaggcataatttctacctccagaggataatgattagggagggaactgggttacaactgaagaaggccttaggttattgaacaagtcaggataaatctacttgacctttggcccaacagggtt

SEQ ID NO: 11933 - DNA, 544 bp, Homo sapiens
cataagatttcttgtttaaaaagggtttttttgctttaaaaataatttcaaaatgactgacatgggcaaaaatctaaatgttttattgtattacttaaaacactctgtagccctacctcatatttatgtcctttaaacctgatttccctatgacttttctgtatatccccttaattttagcccaaaccctattcacattcctcaaaatgttggcagactctttacacttccatgactgtatttattctcgcatactcaggagacctggcttccaaccctagatctacctctgatcatgtaaacagatcatcagctttaatgagcctttgttcctgtagctgtagcggaggaatttagctatttcttccctcatacaggaatgatagtcatgcaaacttggagcacttggctgggcgtgggtgctcacgcctgtagtcccaacacattgggaggccgaggcatgtggatcacctgagatcaggagtttgagaccagcctggccaacatggtgaagccccatctctactaaaaatacaaaaaaaaa

SEQ ID NO: 11934 - DNA, 564 bp, Homo sapiens
caggaatggcccagtgcgatctgacacctgggacgctttcagggcaacaccaagggcaatgctccagtctgtatttactctcttctgaggagaaactctggcagcagctggaaaataaaacccaaagcaaggaagaagccgaaaagaagaaatactcaaatacgaggcgcattaatcatcggtgtcagatctagagcagaggacaatggctggtttgaagaaagactgaacctaaattatcttggaaactgatcttctctcctccgggttccctgtgcctgcaagcaggggtcccggtgcagccactggcatggaaccgatgggggcatccactggctgaccagcatgctttgtcacaggacaggttagagatgaccaccttctgtctgtggatcatccatagcttctgcttaggaagctacagaagagaaaaggcctctcacagggacctgcaggacaaattcattgcccatcgtgtcctcaggggacatcatttgcatgccaggatgcagtaaggccactgccttcagatccaaataaagcacccaattagcatgaacttgt

SEQ ID NO: 11935 - DNA, 440 bp, Homo sapiens
atgtacataagcagggggtatgggagtggtttggaaggctgaaccaagagtttcaacttacttcactaataccagctttcaaaactaaggaagagaagtattcagtagaattttcaaacttttcacgtatcagcaatgtgctatctaagttgattttaaactcttcctgaatgtgataaaatgttttctgacacaaaagcctttctacatgctagtgttcagaatcttaaactgggggcatttgatactgaatagaactctctctgctcccatggtaggagtgttggggcacctgagcttcttcccagtgtagtggatggctctttgaactataaccatgtattacataaatgtattatatgttatttttagctactattgagtatcagattgagaatatgcagtaagctaaataaacttttggaaattgatgtatgata

SEQ ID NO: 11936 - DNA, 820 bp, Homo sapiens
acgtcatttttattggctgtgtaatatttcattgtatgatacagatgaaccttagtttatattaagtaaccttttgttcataatccccagatttcaagtaacctctgttggtaaattgacatttatgaagcccttttctctataacaatattataaataatagtttattttctaggttaactcctcaaattctaattcatatttatcacatggtaagatgcaccactagataaatggcaccatgacacttagaacgtaagttctgcttatcgtatcatttttgtgggaaatctctgtaatccagttaggaacctgggcacagtgtcagagaggaaaacagggcacttccccaaaatctggaataaatgggaatatgggtatttctcgctctgcccagggttgtcctgaccagaacagccaagtggaatagatggtgttcactttctggactatgggaggagagttgcgggtgacagggagggcacactggattagcaggatttcctcactgtttgtatctttgacacttgtcagcaattctgcctcagcgaacttcataaagaccaccaggaacttgtttatctggtggcaaagttgggggtagtggaaatgaggatgcaaaagatacagaacacttgaacaacaaacttgatgtaattgatacttatagatcattccacccagccccagcagaatacacatttgttttaagtgcacacagaacatttaccatgttctgaaacataagacaaggaattgatgggcattaaaaaaagcatatacctttcatatataggcattccacttctaggtgtttatc

SEQ ID NO: 11937 - DNA, 353 bp, Homo sapiens
tggagagtgaggaaactacaaggcaccagagggggccagttgaggccgccacctctgcaccaagaaaccagacagctgttctgctgcctcatcagaggtctctgcaggcctttcttgcatcttggcatgggtttgaagacctggcagacttctgactcgcagcagtgagtgatgctatctggggctggaaggaccttggcaatgtctggtctcatggattttggagtcttttttgaaatagcagaacccattcttttttttttttttaacccctgcccccactccccccaacccctgaccagaacccattcttcaaaaggaagcttcttctccttgaagactgggcatttgga

SEQ ID NO: 11938 - DNA, 153 bp, Homo sapiens
tacagccaggagtttgagaccagcctgggccacgaagaccctgtctctaaaaaaaaattttaaaatgagcagggcgtggtagtgtgcacttgcattcttagctactcaggaggctgaggtgcaagggtcacctaagtccaggagttcaagact

SEQ ID NO: 11939 - DNA, 284 bp, Homo sapiens
cgtgcatggggtgagggcctgttgcgggcatctgaatctgcctggggctgctgggttccagcccttgataggcatgttagggcgagctgagggtgaaagcctgctaggcaggatgaggcacacgtgtgtgcaggcacacacaggctctgacttggcatcttcagagactgtgcagtctgggaccctccttttgcctgcattgtgaggacagggctctggggagagaattaaatgacacatgttggcacagggtcttcttttgtctcttccccccaaagaaacaa

SEQ ID NO: 11940 - DNA, 371 bp, Homo sapiens
tagtataaacttctctctgaccactgcttttgctgcatcccataagtttagttatgctgtttttgtttttattcatttctgagtattttctgattttccttgtgatttcttctttgacccattggttatttaagagtgtgttgtttaatctccatatatatgtgaattttttatttttctttctggcgttgattcctagcttcatccattgtcaatgaagataatttcacatgatattagtcttacaaagttcattgagacttattttagaagaatgtgtttttgctattgtttggtgcagagttctatatatgtctgttaggtctagttgatgtataccactgttcaagtcctgtatctctttattgatc

SEQ ID NO: 11941 - DNA, 803 bp, Homo sapiens
aacagaaatggcatagaatttgtgaatgcctatgtgctttgtcctcttttgtaaggaaatttgcaaatggatgcatacagattaaagtctatgtagtttattttcctattaaatatcaatattataacacaagagaaagaagtgtgaacaaacaagcaacagtttatgaccagcgtatatatagcaatggaaagttgcatctttgctgtgaaaacactttaaagaaaatactttttaaaaaatcccacagctttttggttgccactagacgcttcttattttaatcattttagtaatgctcagctggaccagtgttagttatatttgagtcagaaaaatgttgtttttcaacttgctttataatctcctgcatctatctcctgctgtagcatcacgaaggtgtcaggcaacagtgaaaagtgcacatttttgttgttgcagaaactgtgtcagaggaataagtaaatcagcctgcagcagaagactttgttcagctccagaggcatctgtgaccgtctgtgtccaagtctctctgtgcctttttcttttacaaactgaagctgtggagccaatgaagtaacagtagagattgtagggaaagaatacctcaggaaaaacaaatacacttacaagaagaccctgttcttagaaaatgtgtttagttatgggttagcactagaagagacttggctgtcagccaggccaagtgaaggacctctcatccattcccattcatgtcccatcataatacgggacccaaaaagcaaactcggttttgccatcagttagaaattacgttttgg

SEQ ID NO: 11942 - DNA, 310 bp, Homo sapiens
  misc_feature (8)..(8): n is a, c, g, or t
tcccaagnatgagaaattggctcatttcgtaatcccagcacttgggaggcaaggtgggtggatcatttgagctctggagttcgagaccagccggggccacatggcaggacctcgtctctactaaaaattaaaaaaaaaaaaaaattagctgggcatgagccaccatgcctggcccataatatagtattctgacttgacaacttagctaagtttattaggaatgtctttatttaattaatttggtaaattactaggaatgtagtagtttacattactgctatgaactcccttcttgctacatactcacttc

SEQ ID NO: 11943 - DNA, 348 bp, Homo sapiens
ctcccggctcaagtgattctctcacctcagcctcccaagtagctgggaatacaggcgtgtgctaccatgcccagctcatttttgtattttttgtagagatagggtttcactatgttacccaggctgttctcaaactcctgagctcaaagcgatctgcctgcctcagcctcccaaagtgctgggactataagcatgagccaccatgcctggcccataatatagtattctgacttgacaacttagctaagtttattaggaatgtctttatttaattaatttggtaaattactaggaatgtagtagtttacattactgctatgaactcccttcttgctacatactcacttc

SEQ ID NO: 11944 - DNA, 399 bp, Homo sapiens
tactgcctttatttcagaggtgctctgcccagagaggaggaatctagagaggcagtctggctacagcagctttgacgagctgctgaaatttactcagcatttcaagttgtttgcagttctaacttccaggcagctttgtttacactgtgaggggtaaaccgcctactcaagcctcagtaatgttcgacgcccctccccccaccaagcttgagcatcccaggtctacttcagactgctgtgctggcagcaagaatttcaagccagtggatcttagatttctgggctccatgggggtgggatatgctgagctagaccacccatctccctggcttcagccccctttccaggagagtgaacagttctgtctagctgctattccaggcgccactggggcattaa

SEQ ID NO: 11945 - DNA, 939 bp, Homo sapiens
aggatcccctcggtcttagggagagcatgtggtttgagaatcagaacggcacctgacacagccgagagactggcaggggacacccccaagaccttgagtaccaggctaagaagcatgggctctgtcccaagagtgacagtgaggcaatgaaagcttgccagagactcagccagggttcctagctggccaggtgtcaaggctggggggcaagggcctcaggagcctaagacacagaaggaaaagtctgctctcccatgctggataacaggcggacacacaaggacagagccctcggctgaaagaatgcttccgcactcctagtgctcctctgggccctctgctggctccccttctgttaagcgcctttcactgtgagtgttcctcacagccttgtcctcggctgccctctcctctcaggaccttcttcctggctgaccggagccactgccatggggtcaggtgccatctatgtgctgaaaactcccagatgtactatctccagcctggccctctctcttccatgctccaaacccctatagccatctgcctgtttgacagttctcctggtgtggggcggggtggaagtcatgtgtctctacagcacctcaaaaacttacccagacccaaatttgtgatctttctacacaaatctggtccccctccactgttcacatctcaagattgggccctctgtccctccagctgggcatgtcagaacctagaagtcgtcaatacctccccattctccacatctgaaagtcctttcaaatctgtcccctttaactctgtctccaccatcacctctccaggactacagtagtctactacctgaactttcccaaacctactcgtacctctctaatcctttcttcaattgtcagaaaaatcttagggtgtaaaaaataataaaaattatgtcacttcctggctttaacccct

SEQ ID NO: 11946 - DNA, 724 bp, Homo sapiens
ccgtctcaaaacagagaccgggtttcaccatgttgcccaggcggtctggaactcctaggctcaagcgatctgccacactcggccttccaaagtcctgggatcacaagggggaggcaccacgccaggcagatctattcctttctggttactaaattggaccgggggcgcggtggctcacgcctgcaatcccagcacccagggaggcggaggcgggcgtatcactcgaggtcaggagctcgagatcagcctgaccaacacggagaaaccccgtctgtaccaaaaaaataaaaccaaaattagctggcatggtggctcatgcctgcaatcccagacactcaggaggctgaggcaggagaaccacctaaacccgggaggtggaggccgcggtgagtcgagaccacgccactgcactccagcctgcaaaacgagcgaaactccactcaaaaaaaaaaaaaaaaaaaagacagtgtttcaccacgttgcccaggccggtctggaagtcctaggctcaatcgatcgccgcgctcggccgtccacagtactgggatcacaagcatgagctaccacgccaggccgatctattcctttttggttactaaattggaccggaggcgcggtggctcacgcctgcaatcccagcacccagggaggcggaggcgggtggatcacccgaggtcaggagcttgagatcagcccgaccaacacggagaaaccccgtctgtac

SEQ ID NO: 11947 - DNA, 542 bp, Homo sapiens
agaatcaagtaggaggatatataggagggtaaggactggaagcagccatggaagcctggatactagacatctagagtcatctctcaactggacatctagcatatcttcccctatggctccccaattcacttttatcccatctccaagtcattttttacacagcaacgagagcgagctttttatactcataatttaatcatgtcttttcactcctttaaaccttttgattatgttccactgcccttgggataaaggtcaaagtccttaaaattgcctaaatgacccttcatgtactatgtacttctgccttaccactcacttctcccttccttatcttgagccagccacagctggccttttcccctatttctcagggtcattatacatacgttgcctggctaatacccacttttccttcaggtctcagctgaattgtgatatttttaagaatcctttcttcattggagcttatacgtccccaatagattgttgtcataatacatgtctaccattcatttgtagcattaaatgccagtataatg

SEQ ID NO: 11948 - DNA, 323 bp, Homo sapiens
aaattttgaaaatgtagaatatataattctgtgtaaccgttagaagtcagtgaggtatacagttgtaaagttctgatgccaaacgtgaatatgatgctctcttattcttcacacagcctcctatgagtgagagcatgtcagtcaatctctgaaacagtcctgctactcaacagtgctcaattgcagcttctaatctttagaatgaagacaatattagtgtgaagctgaaaatattagttgtaatataaaacatagaaacgtgttaataacatcttagtcgtagttaataacatcttagttgtaacatattttccagttagaaa

SEQ ID NO: 11949 - DNA, 333 bp, Homo sapiens
ctagaaatatttctcggtttaaaaatagtgttttccctacctcgagtcaaggttcagttctcatctctctaattttagttccttgtttttatgaactttgaaatgttttccttaaccagaaaacagaaaaaagcaatcccagagacaagggaaatttcttgctccatttccctgtagtaaaggcatttctatgtgagattttctttttatcctgagcaggttatcagaaaccaaaattttgaattaggagtttaaagaagaggcaagggggaaaaagtgctctctacgggaccttggttgccatgtggaatgtttttggagcataaaattgat

SEQ ID NO: 11950 - DNA, 471 bp, Homo sapiens
aacagtgtgcggtttcctcatgggcagatttgtgtaatctcaaccatagtcaacaaacagcccatctgcacaggatccttccagctgctcttccataacttcatctctcccctcaacacctgcaaccactaagccattttccccctacccgtctgtaattttgttattttgagaatgccaggtaaatggaatcagagcggataatctttggagcatgattcccttgcattcacctgtgttgtttcgtgtatccatagtttattctttttttaatctgggctcactgcaatctccgcctcctgggttcaagcgattctcctgtctcagcctccccagaagctgggattacaggggcccgccaccatgcccggctaattttttttgtatttttagtagaggtggggtttcaccatgttggccaggctggtcttgaactcttgacctcaggtgatccacccgcgttggcctccc

SEQ ID NO: 11951 - DNA, 364 bp, Homo sapiens
ctttacccttcctttaattctgcccccttccttgttcccatcactccttcccaggaaaacttctccatattattgctgtgcagtggacaaaggatggtcattagcctcaggtgcagagccacatcccaccacttgctggctgggtaactaatacacacctcacagggttgtaatgaaatttaaggacatgttgatgtaatgaaactccaagcatacagaaggtgcttaacaaataatagcttgcatcattatttattctcttcttgtgctgcacctctgtggctctctagtttccacatctcagttgcaggggacgctgatggtatgggggcctagaaattcgatggcagtgatttccacgctg

SEQ ID NO: 11952 - DNA, 776 bp, Homo sapiens
tggtatagctttctctatccttttgcttttaatgtattttcttgtggataacacacgattgggctttgtttgtttttgaaatccattctgacaatctcttttttaattggtgtaatcagattattcacatttaaagtggttattgatacagttggattaatatctacaatgtctgtaactgttttgtatgtgtctcacttgactttcatatctaattttgaatttgtaatttcatattctttgccttaaagagaacgcttgcagatccctcaaaacctggagacaccccccaccttgcacacattataccggtatgtgatggtagaaaagctgcacatcagtcttggcaggcagggcaggagggatgcagggattcacagatgcgactgtgcaacgcacagatgcactgggtctttgcttggtgggttcgaagcctccagacgctgacaaacactgcagccaatgagtgggttcctatggtccgatatggagggcaaggggcgggactccctcctgcctctccctggctgggttcagagcctccgcggagagactgcgttgggcccagagtgggcgtggcttacgtgtccgccggctttcctggcaggcctggcgggggggccaggttgccatgacgaccgcggctaggtcgcggcagactcggttggtgactccgggcgcgtcgaagatcttgtacctgtcgttcgcagtggctcactttcccagtaatccataagaacagcagggataacagggtcccatgtcgtttttttgtc

SEQ ID NO: 11953 - DNA, 1500 bp, Homo sapiens
tggtatagctttctctatccttttgcttttaatgtattttcttgtggataacacacgattgggctttgtttgtttttgaaatccattctgacaatctcttttttaattggtgtaatcagattattcacatttaaagtggttattgatacagttggattaatatctacaatgtctgtaactgttttgtatgtgtctcacttgactttcatatctaattttgaatttgtaatttcatattctttgccttaaagagaacgcttgcagatccctcaaaacctggagacaccccccaccttgcacacattataccggtatgtgatggtagaaaagctgcacatcagtcttggcaggcagggcaggagggatgcagggattcacagatgcgactgtgcaacgcacagatgcactgggtctttgcttggtgggttcgaagcctccagacgctgacaaacactgcagccaatgagtgggttcctatggtccgatatggagggcaaggggcgggactccctcctgcctctccctggctgggttcagagcctccgcggagagactgcgttgggcccagagtgggcgtggcttacgtgtccgccggctttcctggcaggcctggcgggggggccaggttgccatgacgaccgcggctaggtcgcggcagactcggttggtgactccgggcgcgtcgaagatcttgtacctgtcgttcgcagtggctcactttcccaagccatgggcagcaggaagaaggaaattgccctgcaggtcaacatcagcacccaagagctttgggaggaaatgctcagttccaaaggactaactgttgttgatgtctatcaaggctggtgtggcccctgcaaacctgtggtgagcctcttccagaagatgaggatcgaggtcggcctggaccttctgcactttgcattagcagaggcagatcgtcttgatgtcctcgaaaagtacagagggaagtgcgagccaacctttctgttttatgcaggaggagaactggtggctgtggttagaggagcaaatgccccactgctgcagaaaaccatcctagaccagctggaggccgaaaagaaagtgctggctgaaggcagagaacggaaagtgattaaagatgaggctctttctgatgaagatgaatgtgtttcccatggaaagaataatggtgaagatgaggacatggtttcatcagagaggacctgtaccttggccatcattaaaccagatgcagtggcccatggaaagactgatgagattatcatgaagattcaggaagctgggtttgaaattctaacaaatgaagagagaaccatgacagaggcagaagtgcgacttttctaccaacacaaagctggagaggtcagctcatctacttccacaagttcaacacactgtcgtttctcttcctccaacattatgcttatagattgatatcagtttgtgacagaagaaattatgaagaaccaaaataggaacagcaagtgggtcatgaat

SEQ ID NO: 11954 - DNA, 1201 bp, Homo sapiens
tggtatagctttctctatccttttgcttttaatgtattttcttgtggataacacacgattgggctttgtttgtttttgaaatccattctgacaatctcttttttaattggtgtaatcagattattcacatttaaagtggttattgatacagttggattaatatctacaatgtctgtaactgttttgtatgtgtctcacttgactttcatatctaattttgaatttgtaatttcatattctttgccttaaagagaacgcttgcagatccctcaaaacctggagacaccccccaccttgcacacattataccggtatgtgatggtagaaaagctgcacatcagtcttggcaggcagggcaggagggatgcagggattcacagatgcgactgtgcaacgcacagatgcactgggtctttgcttggtgggttcgaagcctccagacgctgacaaacactgcagccaatgagtgggttcctatggtccgatatggagggcaaggggcgggactccctcctgcctctccctggctgggttcagagcctccgcggagagactgcgttgggcccagagtgggcgtggcttacgtgtccgccggctttcctggcaggcctggcgggggggccaggttgccatgacgaccgcggctaggtcgcggcagactcggttggtgactccgggcgcgtcgaagatcttgtacctgtcgttcgcagtggctcactttcccaagccatgggcagcaggaagaaggaaattgccctgcaggtcaacatcagcacccaagagctttgggaggaaatgctcagttccaaaggactaactgttgttgatgtctatcaaggctggtgtggcccctgcaaacctgtggtgagcctcttccagaagatgaggatcgaggtcggcctggaccttctgcactttgcattagtaagattctctctcagccaacagtcatacaacattgtaaaaagaatttaaaaatttaaaagagtcaggaaggagaagtgtgagagtgacctttctcaggtcattaaaaaggaatcagtgtggactttttgttgatactgtcatgatactttctaatttctctagttatgaaggttcctattccccaccccacctccctgtgtccctcttggcttgagcagttcttggtgctgtatgaagagaagaaatatatgtcactcaaatgcatattctccct

SEQ ID NO: 11955 - DNA, 383 bp, Homo sapiens
ggaactctgagagcccaagcctgtgcctggcacttggtgcaatggagccttgtgtagaggttgcattgttttttgtggatggcctctcaggagcctcaaacatcagcatctgacagcaccattttttggcttagtttcatcagagaggacctgtaccttggccatcattaaaccagatgcagtggcccatggaaagactgatgagattatcatgaaggtaagagagacaacacttaccatgcaccactgtccttgtgtcctcttttgtggataaacagggatggggcactgggcagtgatatcttagtgcagaaagatgaattctaaggggttgtagctcaagttccattcaagtaaatgaaaatgttaaatctgattgggac

SEQ ID NO: 11956 - DNA, 1631 bp, Homo sapiens
aagaaaggaattactgaatcatacgataactttatgcttagacttttgagaaactgccagactgctctccaaaatgactgtgccattttacattcccaaaagtaatgtatgaagtttctaatttttccacaccctcaccaacacttattatctgtgtttttgattcttgccatcctagtgtgtgtgaagtagtttctcactgtgatttgtatttgaatcttcttgaaggctaatgattttgagcatcttttcatgtgcttatcgtctcttctttatatagatgtctattcaggtccttggcccatttttaatttgggctatttgtcttttcattactgagttttaagaataatttttatttattctagacacacatcccatattagataggtgatttgcaactatttcctcccattctgtaggtttcttgctggtgtccttttaggaatagaagttttacgttttgatgaagtcaagtgtgtatgttttcttttgttgcttgtgtgtttgatctcatatcaaaaaaccattgcacaatccaaggccacaaagagttatgtctatgttttctagatttttatcattttagtgcttacatttaggtctttgatcttttggtgttaattttttatattgggtgtgaggtaaaaatccaacttcattcttttgcatgtgatatccaattatccagaaccacttgttgagaaggctagttcttcctcactggattatcttggcacccttgtcaaaaataagttgactgtagatgtgaaggtgtatgagttgctaaaaatacctcttctgtgatatttataatttattttctaaaaggataagttataggtcacatctcagattacaatgattcaagtcaaaaagttcaaagtagaatttactttcaaaattgtttgttcccccagagctagttaatgcccccagagctagttaataaactctatttgcagataaaagcatgctttcccttcaaaggtatttcaccaagacgggaaacacaaaactaaataagctgggaaactgaggatacacagagggtctccttaatctctggatatgtggtctaatgtatcctttttgtgctcattttttcccttttatccagaaatacaacattacctttttataaaattcctggagattgatcatatctctagtgtttgggtctagaatgtattttttggccaaaacatctctttaccccacttccacatgtggaaagaaagaaaacatggtactctaatctcacaagtgaggcatggggttgtttcctgaaatgaggcaaggactttggacaagaacatgtttggacttgagatggtttttgtaaacccaaatgatattagttctagtctgtctttatcgctcactgtattttgttttcattcatactaatgaataatagacttgattgtgttccatcatttatgtcattaatatttcctttatgtttgagtgctgtgcagttctccttgaaacttgtatggagattgaacttgatagtgatttaaagtaattaattcatatgtcagttgttagcaaggtctagtaattaaaatctactttagagtaagttattaactctccaaaataaaaacactttatcaacttaccag

SEQ ID NO: 11957 - DNA, 633 bp, Homo sapiens
tgaccatcacttgcaactggataatctttgagataccttccttgagtggcagataagtatattgatcaccagaagttagtctttgtactgttccttccaggtaaggacttggctgtttgctgatttttgttttttaattaacccatttctggaagatgctgcagaagtttgtcctggagagctacagtatttttcaaagctttatctgccttgatgagaaatggtcagaggcttaatggtttcattgcctaacaggattcagtggagtaggattccaggacacagtggccttgtatcatggctggccctccaggagaaagcatcttctaaaggtttaggaagctgtcaagtttagataaggctgagctccgatcctctgggaccttggttgtattaataaggagaaattaatttttaaccactgggaacattgccaaattatgtgacctttggcagaccagctgtgctataaaaataaatcccccatttctgaaaatgctactcctatccagtagaacaataacaatgtggcatttaggatagagaagagtaggattgagaagaaaggagagaaatagtttatgctgtcttctattgacttgggttaatcgtgtgtcccggtgctggcacgcc

SEQ ID NO: 11958 - DNA, 610 bp, Homo sapiens
tgaccatcacttgcaactggataatctttgagataccttccttgagtggcagataagtatattgatcaccagaagttagtctttgtactgttccttccaggtaaggacttggctgtttgctgatttttgttttttaattaacccatttctggaagatgctgcagaagtttgtcctggagagctacagtatttttcaaagctttatctgccttgatgagaaatggtcagaggcttaatggtttcattgcctaacaggattcagtggagtaggattccaggacacagtggccttgtatcatggctggccctccaggagaaagcatcttctaaaggtttaggaagctgtcaagtttagataaggctgagctccgatcctctgggaccttggttgtattaataaggagaaattaatttttaaccactgggaacattgccaaattatgtgacctttggcagaccagctgtgctataaaaataaatcccccatttctgaaaatgctactcctatccagtagaacaataacaatgtggcatttaggatagagaagagtaggattgagaagaaaggagagaaataggagttggcaaaaaacaaaaaaacaaaacaaaa

SEQ ID NO: 11959 - DNA, 606 bp, Homo sapiens
gaaattagaagacactaatttgatacacttacccttttttcaaaaacattatgtaattaccaaaaacatgtaaaaatcagttgtgtagattcaatctattttaattacttggttgggtttttttttttttttgaaatcacagtttatcagagttgatactcagttttttaaattatattgtataaccctctgacttctctatttacctttatcccctatcaacataaaaaataggccaggcgcggtggctcacgcctataatcccagcactgtgggaggccaaggcaggtggatcacctgaggttaggaggctgaggcaggatagttgcttgaacccaggaggcggaggttgcagtgagcagcaatgccttgcactccagcctgggcaacaagagtgaaactccatctcaaataaataaataaataaataaataaataaagttccttttgaaaaaaggaggatagaaaaaactataagctgggcatgatagatttaagttctcagacctaatcccagctctttgggaggctgaggcaagaggactgcttgagcccaggagttcaaggccagcctgggcaataaaaggagaccccgtctctacaaaa

SEQ ID NO: 11960 - DNA, 190 bp, Homo sapiens
tggcactgccgcctagcccctagcacagcccttcaccaggcctgcacgacccagacggctggagtaggaaggggaaaaccccggcctggacggctccgggcccctccggaccaggatctgtccggcggggctgagaagaaaacccggagcagtgatcagcctcgcgacccaagggggtcagggacgatag

SEQ ID NO: 11961 - DNA, 1898 bp, Homo sapiens
  misc_feature (985)..(985): n is a, c, g, or t
  misc_feature (1268)..(1268): n is a, c, g, or t
gctcaaatatattatgctctctcttgactctgtgcctttgcaagtgacattcacttggcctgaacactgttccagctccctctgttctttccaggtgatgccttctcgccttccaaatctcagtttagacgtgctcttctctgggaagtttattcatttactgtgtgttagatgttgttctaggccctggggatgtagcagagaagaagacaaagtcactgcatttggtgaggagctgtcatcttcagaatcaaaacttccccctagtgcagtgtccacctccagatactgcttcatttctctgctctctttgttcatgaaactttttcaataattgctttttcatttcttcatctccagtttttatctaattccaatttagtttctctctccatgactctgctcacactgatttttctcagacaccaacttttttttgccgcctaatacaatcgccatgttttttcttcatgttatttgatccttttagtggcactgggcataaatgaccacacgtttcttttcgaaacattatcatgacttttctgatgccacattctcctggcttttcttttgccccacaggaattcctgtagacatccactgccttactagatgtagggagcacctcagggcccagccctgtgcccactcctctctttagccctcatacttttcctaagtggtaccatctggtcccttgcttgaaatgccaaatgtgcattaaatgccaaaatgtatatcttcagcccaacctctgctttaaccccagcaactgtatgtccagatcctttttctcccttaatggataaggataaagaatcatatgaggatgcttaaacaaagtaggagccaatgcaacatgtctttaaatggagggaacagatttcaggttcctaaggacagcattgatgattctacccaagtgtactgaagatttctagcaggcgtgagatgctttcctttaccattccaaagtgttgtngctgggactttgctaacttgcctctaattttttttttaaatgaatatatcccttgttcattagctacctattgaacataaataacataaatgagatatcatgtcacaccagttagaatggcgatcattaaaaagtcaggaaacaacaagtgctggagaggatgtggagaaataggaacacttttacactgttgatgggactgtaaactagttcaaccattgtggaagacagtgtggtgattcctcagggatctataactagaaataccacttgacccagccancccattactgggtatatacccaaaggaatataaatcatgcttctataaagacacatgcacacatatgtttattgcggcactactcacaatagcaaagacttggaaccaacccaaatgtccaacaatgatagactggattaagaaaatgtggcacatatacaccatggaatactatgcagccataaaaaatgatgagttcatgtcctttgtagggacatggatgaagctggaaaccatcattctcagcaaactatcgcaaggacagaaaaccaaacattgcatgttatcactcataggtgggacttgaacaatgagaacacttggacacagaagggggaatatcacacaccggggcctgttgtggggttgggggagtggggagggttagcattaggagatatacctaatgtaaatgacgagttaatgggtgcagcacaccaacatggcacatgtatacatatataacaaacctacacgttgtgcacatgtaccctagaacttaaagtataataaaaatatatataaataaatgtaaagagactaatgtaaaaaataaataaattttaagaagagaattagctacaaataagaaaactaaagttccttagaacttaaaaaataaatcttcat

SEQ ID NO: 11962 - DNA, 177 bp, Homo sapiens
cctccccagtcttcagagtgatttaatgtgctcaggtatttgaaatccttaatgaattacctgacaacttgtttggtttgaatgactggcataaccaaatgaatcagtcattggcctgctatagatctggcgtattaaagaacaacaattgattgggtaatcatccataattaaatg

SEQ ID NO: 11963 - DNA, 1167 bp, Homo sapiens
tgaagtatgatgtggagcatcttttcatgggcttatttgccacctgtatatcttctctggtgagatgtctttcaggttttttgcccattatttaattgggttactcattttcttattgttgaattttaagagttgtttgtatatttcagttgtgttctttatcaaatgtgtcttttgcaagtattttctctcagtcagtggcctgtcttctcattttgttttaagctattcttttttaacaccccaagattttcatcgttacttttaaggccactgtgcacacataaaatactaagaagctaaacttaatatctacaggtagaagttttaaattcaagattttaaccaaataacagagttaatgctaaaatctcacttttgaagtttatgttgaatattagcattctaatatttaatatttttctatttttgaaataggaaatggaaaagatgcagtaggtttttcaaaagggtatcataggtgagcacttcttatagaagaagaaaactaagaggtagtgctatttacctcttcagcactaagtttatctttatttttatttatttctataaagagatgggagtctcactgtgttgcttaggctggtcttgaactcctggcctccagtgatgctcctgccttggcctccgagagtgctgggattataggcatgaggcaccacacccagccagtaatctttagcttctagaaacaatcagatttccttaagattttgcaattaggtttagaggagctcacttgctttttcaaatatgggttggatatgtccaaaaaaagagttttgcctctacaatgaaaaatgatttttaccagattatggaaaggaagattcataaaaatgtgcctttaaaaagcttttttaaagtgcaagttcaccaatttgacttttgaaaatacgttcattttaggaattgattttttaaggaaagttgtaaacacagcaaagcacagaattacactggttcagacttgcatcttagcaccaaaatccactatacaaatgcagacagcataaagtaacctagtttcgctttaaatttgttgcttattttattctcccttataaatgtcattggtcttttgttagaacataatttactactttattttgaaataaagtctaagatttagcatgtaagtggtat

SEQ ID NO: 11964 - DNA, 200 bp, Homo sapiens
ccgatggaattctcatgagatctggttgtttaaaagtgtgtagacttctcccttcttctctttctcctgctgccatgtgaagaaggtccttgcttccccttcgccttctgccatgattataagcttcctgaggcctcccagtcatgcttcctgttaagcccgcagaactgtgagtcaattaaacttcttctcttcatgaa

SEQ ID NO: 11965 - DNA, 554 bp, Homo sapiens
  misc_feature (547)..(551): n is a, c, g, or t
  misc_feature (554)..(554): n is a, c, g, or t
tgtaaagatcaaatcagtataattgggatacttattgccttaaacaggtatcttttctttttctggaggcagccaaatgattcttatctgggtatttgaaaatatcaactagatttttgtgaactatagtcactctactagattgatcaaagcctaggtctcatttcttctgtctgtttgtacccattgatcaacttctctccatcctcttctttgctttgctgaattattgtttccacactggaattcctcagcatgcttcctgaatgccttctgctgtagcgaatctcctgcagggtccacacgttagtggctctgtacgctacttttactttaggtttctgattgtttatgttgtaaaggaaatatttccatttatgattttaaaaatattgtttgtgaaagaacaattcttttcacagtttttaatgaaaggtttatgcctataagtaatgtctatggaggaagagacctcagggaattgacttcaggaaatcatgaatttgctctttattatgttgtgtaataaaacacttttatattcaannnnnaan

SEQ ID NO: 11966 - DNA, 408 bp, Homo sapiens
aaggctcaggtgagagctttctgcttgtgcacttgaaaattgaggcctcatcaacaaatcctctttatgaaacttgcgtgattagtctttccatcgttgcagctgtttccatcaatgcagtgtccctttaagaacctgcaggattactaatggatacaggtcatggtgacagacttaagtaaaccttcagcaataaacaatcatgttgagttttcatatgattaccatcatctcatgcctatcccaatagggcgaagaatgcatgaaggaaatgaacatgatggatcatatacatcatactgtcatcccccaagagtgagacaaacagtatcttgaggaggctcacactgtcttcctgataaaagccaacaagaatgtgcattaaaatggatcctgtattttatgata

SEQ ID NO: 11967 - DNA, 379 bp, Homo sapiens
caataaatgcctcttccttcccaggacaccatcacttccagtaactttttcatgttttttggagtaaaaaccttggaaccattttgaaatcctttctcctttctctactaaatctgatcaaatacccagctggtcttttccttcatctctatctgatcattttgatcctcctttggcatgtttgctgataccaccaagctctgcagctggtcccccttatccctcatctgtggattactagcataagtcaccttctggacttggtgtctccagggtagggtgtctgagacaatctatggggtaggggaagcaaatatagaatttctgttatatatatcttcaactaaaaattagaaatccaatgttactaaattttggt

SEQ ID NO: 11968 - DNA, 370 bp, Homo sapiens
tctgggcaaaatgtaaaatgtggaccttgtggagaaaaatctgggcagctctattcaaccgatatattcacttgccgatatatattagtaccacagcacttctttctttcttctcatgtttatcatatatatctttattagcaaagttttaaagtatttttaaaacataaaaatagaagtagacactcatacataatttcagcacctaatattcactgttagtattttggtgtgcttattaactagtgttttttcctttgcataggactttaaatttattatttctatatattaaataataacatacatatactttcatattctgcctttttcacctggcattatgtcacccccatggcgttctaagacc

SEQ ID NO: 11969 - DNA, 519 bp, Homo sapiens
tttttttgagacagagtcttgctctgttgccgaggctggaatgcaatggcatgatcatggctcaccaactataacctctgcctcctaggctcaaacgatcctcctgcctcagcctcctgagtagctggggttacaggcacatgcctggctaatatttttattttttgtagagatggggtctcactatgttgcccagggtggtttcaaactcctggcctcaagcaatcttcccgccttggcttcccaaagcactgggattacagatgtgagcctgaatggcccttcattcctttttatggctaaataatctcctttgaatccaatctgctctgaaaaggggcagtagcggtggctgcccagcctgtcttgggcgctcactccaacgctgaatggtatactgtgtggcatcctccttgggtctggggaagccacagcaggcactgccctgagcccagagggatcatatgatacaaagacccttgctgctcctgacagttgggcacaagctgctcctcatca

SEQ ID NO: 11970 - DNA, 391 bp, Homo sapiens
gtttaaatttatgccacatttgatattaacatattttgttgggtgggagcagttgctcatgcctgtaatcctagcactttgggaggccgaggcgggtggatcacttgaggtcaggagttcaagaccagccaggccaacatggcgaaaccccatcttctctactaaaaatgcaaaaaaattagccaggcatggtggcacgtgcctgtaatcccagctactcaggaggctgaggcaggagaatcactagaacacaaggggcagaggtcacagtgagccgagatcactccactgcactccagcctggttcacagagtgagactccatctcaaaaaaacacacaaaaatatttgtttatttatgtcaaattgtactttgaaaataattcatttct

SEQ ID NO: 11971 - DNA, 584 bp, Homo sapiens
cagtccccagatacagaagcctaacagtctcacatttagacctgccacagtgaaactgcagaactgtaagaaggacagagtgatataaacgactaccaatttcccagcagcagcactggagttgagcagtgagtagaccaaggtcttcattatgctgagagaaaatagctgtcaagttgcttgaattgtgcccacagcataacattaaagaagagaacacaattaagtcatttagataaaaatatgccattcttatctgtttggttttttaatcttggcttaatatttggggttgagtcatttgttttgagagctgtcctgtttattgcagggtgttcagcaacatcccagatggaagcagcatccccctacccagctgtgacaaaaagaaaaaaaaatgtctccagacactgccaaatatcttctgggggtgcccctggttgagaaccactgctttagtggataaactttaggcaggagggaaatgatcgcagttggatagttggaggaatgtggagcaagggaagcaataaactgtgaccataaaaacatagaaagatgaaaaaaaaacaacaacaaaacaa

SEQ ID NO: 11972 - DNA, 337 bp, Homo sapiens
tatttctccttctattcatcttttgtacttggagtggtccgcaaggtgaggagagttgagctcaatgaaaagaaggtagatttttgccttttttatgcagaacaatgtcttcaaaaaaatcagaacagaaaaaataagatgcattctaatggatctttgacactttttggtaatgaagcttttagttcccatagagttgtgtgtaggtcagaaaatctgccaagtttcttactctatgttcagctcaagtttgctctggcaccaaagaggagagaaacggggggttgcagaaaacagggggttgagagctttatctttttgtcctttactttcatct

SEQ ID NO: 11973 - DNA, 512 bp, Homo sapiens
acatatattttggaattcattctttaatgctaagaacttaaaatacactactctctatgaacactccctggtagtactagtaattctttctatattcttgtatttgtgagtcattaaatctgtacaaaacataatttacaactaaaaaccaaaaatgtctagacacaaaatatttggtcaatacaactctaaaatacatacattcactattattttataaagaaattggatggcctagcatatgatctatatggagttaaggaaccaaatgggtgattctaagatacaaagaatgaaagataaattaattatgtttttaatcttctatcagtgtaatacattgccttaattgtaaagcagcagaatgaatcaatgtaggtgcattcaatttttcttttggaaatggaaattacattttatcattgtcatcctaagagtaatacaagattttgagaaaagttttggtaaaaacagaaaaatgttagaaaaaatttaaaaagtaaaaaaaaaaa

SEQ ID NO: 11974 - DNA, 453 bp, Homo sapiens
tcagttttctcatctataaaatggagcaagcaagagtcatgacactcagatgctgcgcagactccaggtgatcctgcggtatactcgatatgcctggcatatcatcaggggtcccacacatgcacaagtttccctttcattccaaacagggaatgttctttccagttttaagttaatgctatttcctcatctgcattttttttctcttccattcttaataagttgagtaagagggacagtgaactggaaagggaaaacgtgaaaatgccgagaattctgaaaatacatctttccaaattgtgcagcttggtgttggcaagatgacaagggccccggaaaccgggtgcaaacacagcacagcaaaatcacgcagcttgcgtgtgcaatatatgtatgttacatgccaactgctgaacaagtgcttttaaacaaatgacaaatatgatacgatgc

SEQ ID NO: 11975 - DNA, 327 bp, Homo sapiens
  misc_feature (10)..(10): n is a, c, g, or t
  misc_feature (12)..(12): n is a, c, g, or t
cctcgtcacnanatgtttctcctgtctcccttctcctcatttcaatttggcaacttactgttgatccccagtattattttctaaattgaacttgtttgtggaaataaaaaatctgaggaccactcagagggcataagggaaccctctttgtcttagttcataaggactttctcatcatttttgtgtgtagtattattacatttaaaataaggatgatattgctgaagtagattaaatgttctctatagatatcaaagaagattagtaattctaatccttaaatttttagtctgaagtgaaatcttactataatcaaattgttgccca

SEQ ID NO: 11976 - DNA, 795 bp, Homo sapiens
agtacatgtctgtaattccagctactcggaaggctgaggcatgagaatcatttgaatgcagaagagggaggttgcagtgagctgagattgtgccactgtactccagcctgggcgacagagcaagactctctgtctcaaaaaaacaaaagaagagcgagcctcagaccggggatatggtgactcacgcttgtaatcccagcacctgtgggaggctgaggtgggaggatagcttgatcgcaggagttcaaggctagcctgagcaacatagtgagaccccatatctataaaaagaatttaaaaattaatgagctatggtggcatacacctctggtcccggctattcaggatgttgaggtgggaggatcgcttgagcctgggaggttgaaggcacagtcaactgtgatcataccactgtacttcagcctgggtgaatacctgcatatatttccaccctcctgccaaaaattacctactaaaagaactgttaagagaataaaaagagatcaagcacggtggctcacgcctgtaatcccagcactttgggaggctgaggcggatggattgcttgagctcaggagttcaaaaccagcctgggcaacatggcagaccctatctctactaaaaatacaaaaattaaaattagccaggcatggtggtgcgtgcctgtggtcccagctactcaggaggctgaggtgggaggattgtttgagcctgcagggcagaggttgtagtgagccaagatcatgccactgcactccagcccgggtgacagagtgagactgtgtctcaaaacga

SEQ ID NO: 11977 - DNA, 275 bp, Homo sapiens
tcctgagttggggaagatgggaggaatgggatgttttggaaggctggggtagagagccagcagtttcattttggacatgttagggtttgatgagtctattaatcatccacatgggaacatcaactaagcagatgcatatttgaggctgaagctcagcagagtatctgggcaggagctggaagttgttagttgtcaggaagagaatgaatttggccaggcacagtggcttatgcctataatcccaacactttaggaggccaaagcaggaggacggc

SEQ ID NO: 11978 - DNA, 522 bp, Homo sapiens
atattttagtagtcactctatcaaataatttggttcactcccctcctctaaacctaaatttttttaaaagaagagaatgtatatgtgtgtaggtattctatttatcattcatagtaacttctgaggtgttaaattgcataacattttttgaaacaaatttgatcaatcattattaattgagataagtaatacaaaggccttgtctttaatttaaataaatcatttccatatttcaccccagtggtaaagagaccacctaattgacaactactgatttataggttaaatagaatctgtcagtccttttcccaagatttgacagtgacattattactcaagtttgtaattagctggctctctttttctcattagtttctgtatttttttctaagccctcgaccccaaggatcagtgctctcagtcaagacctgtcccgagcttcccaccaagtcactgcatgcttttctgactcttgtcaataactgctgaatttgactttctaaaacccccattttattctag

SEQ ID NO: 11979 - DNA, 476 bp, Homo sapiens
caggggtgtaagcagagaggcaaggcaggctgtctgggggacaggtccttggttatcatacatgagggtgcatcagcattcctgcacggcttgttaaaacctctgagtctgtggcagatacacaccatggaatactatgcagccataaaaaaggatgagttcatgtcctttgtagggacatggatgaagctggaaaccatcattctcagcaaactattgaaaggacagaaaaccaaacactgcgtgttctcactcataggtgggaactgaacaatgagaacacttggacacaaggtggggaacatcgtgtgaccggggcctgtcatgcagtggggggagcggagagggatagcattaggagaaatacctaatgtaaatgacgagttaatgggtgcagcacaccaacatggcacatgtatacatatgtaacaaacctgcatgttgtgcacatgtaccctagaacttaaagtataata

SEQ ID NO: 11980 - DNA, 612 bp, Homo sapiens
cagctgcagctttctttctgttttgctttcgaggtagggtcttactctgtcccccaggctggagtgcagtggtgtgatcatagctcaatacagtctcgaagtcccaggctcaagcaattctcctgcatcagtctcccgagtagcatagtgtgccactatacccagctaattttttgtagagatggggtctctctatgctgcccaggctggcactggcaactttcttctttttagaataattaccgtacttaggatccaatattcttcccatctcacttgttttagaatgtgtgtcctcaggtttggattttaatcatgtcccgagggatcttgccttctaaataaaggaacactcactgggtaccaatgttcttttctgtctcctctggtgaatcagacacttctcttcttaatagagttcattgataaagggcttgggaaaaggaggtcccttcattattgagaatctaaagcattggattgggagcccacagaagaactggaacagaggctgaggcaggaggatcacttgagcccaggagttcgaggttgtaatgaactgtaatcgcaccactacactccagcctgggtgacggagtgagaccccatctc

SEQ ID NO: 11981 - DNA, 439 bp, Homo sapiens
gtactaaaccttgttctttcaacctaagaatcacttaagacaggggtccaatttagataaatataccaccctaaaggtcagtgaccaaatttggtcaacaagggtgccatcacagccgtcatcattcttgtcaccgtcaggaacaactgtcaccttgccattaccaggaagggaaagcaactggaatattccttttgtaagttctatttacagactacaaagagtccaacatcatcttagtatgatcttacaacacgataacaatggaagaacccaaaacattaaaggcttcccagaaaagaactttttgatattaaaagctgataaaccacaagaatttctaagaccatgccacactctgggacaactcctaaccacactgtaaatgtcaggcatctattttctgaataccaatggcttcaagtgttttgttttgtaa

SEQ ID NO: 11982 - DNA, 374 bp, Homo sapiens
ctcaataaaaaccctgactctttggggagatgttctaacacaaagcacagaaaatgaaaagaagattcaacagcttcatttttcaatttacctaatctggataataatctctacctggtgataattcatctcagggaagaatttaccactattttggatcagattgtacttcatagtaggtaatcatttcaaggcagtactcagtataggtgtttaatccaaaggtaatgttagttatttttctgcagctgcaaacatattttccaaggaaacaatattacaaaaggcattttcagagaggaccaagatggcagaatagaaggctccaccaattgtcaccctcgcaaggacatcaatttaattactatctacag

SEQ ID NO: 11983 - DNA, 195 bp, Homo sapiens
cttgaaaatatcccacatgatctttgcataaaaaagaattaaaattttaattgtgttaagctactctgagtatttgttacagcagcagagcacatagcctatccttagacaaataggtaagtaaaacttttaacgtggtttgcctggcatgaagtaaggtaatgagagctcagactagtgtaggggcagcggagc

SEQ ID NO: 11984 - DNA, 311 bp, Homo sapiens
  misc_feature (300)..(300): n is a, c, g, or t
  misc_feature (305)..(306): n is a, c, g, or t
  misc_feature (309)..(309): n is a, c, g, or t
ggaaaaatgggaaggaaaaaatgtctgtgcatgttcagtacagatgcaaccatccgtttttctttttttgaatatttctcacccacggttggttgaattcacatacagtatctaaatttcattaaatataaatatggaaaatcccatttgctgcatgaatttgtgtatttgaatgtgttttagtgtatttggtgttttgttttgttttgtttttgagactgagtctcgctctgttgccaggctgaagtgcagtgagccgagattgcaccattgcactctagcctgggcgacagagcaagnctcannccnaa

SEQ ID NO: 11985 - DNA, 252 bp, Homo sapiens
tgtctggcctgttgctacgtacaagtacacagcttcttaatacgattaggaaattacatcctatgttggataggtgaacaaattagttaagtcagatcaacttaatagttacagaatatgttggttggacgtggcggtagggtatagtgaagggtactaatgtatgatactggctgcccagtagaattagctggaagccttaaaaaattttatcaccccctcaggatctgggagaatttactaaaaaagaac

SEQ ID NO: 11986 - DNA, 397 bp, Homo sapiens
aattttacaggaattgcccctccctctctgtttgggtgatccttctcttttggtggattttttcatttcaaaatcaggtctcttgccagcttttaactaccattgactcatagtttttaccttcacaaagctgtttgctaccactatcaatcactcagagtttaagaactttctatttccactcctgattattgtctgtgggcctcttatgactgcctgtatctctctagaatcttccagaagcaacatgactcttttagggcctttgctgccagctaagaaggtgaagaaaagtcaccactgcaataaaaagagggcactttgtcttacttgggcaataaaccaccaccaggcaggcagcagccaataggcaggcacccccacccccaccaaaccc

SEQ ID NO: 11987 - DNA, 1417 bp, Homo sapiens
tagaacagagaaccattaaccctagcttttaggaacatttagatgacttacattttggaggggaaatgtctatgtacctttaaagtgtctctacatcaggaacacacaaagaaaacaattccagcaaccctaaaattaggctcaaatgaaatcaataaatattgtctggctgatcattataaattttatcttttaaaagcctgacctgctcttttttctcaggcttctattttctcaatgctacggttctaactatctaggtgaatgttacaggctcaatctttggaaagtcacttaggtctaatgaggggaaataaggcccagagagggtgccccacatgcttttggtctcctgcctttttgcatattgcattgaccacagcaacaccaacaagaaaccaagtacactctgaatcttctcgacattttgctatcagagcaatttatgttcatggaaagtcacaattataaatttgttccttttaaaaggaactcaaatggaatttctaatattagcctgtgagaatgtcctgactgattactgaagaatggacaaacttctaggatagaattatgggtgttgctcagatgggtagcagagaaactggggaagctcttgtactggccattgaaatgttaacactgaaaccctgcagcagtggggagagtgtgcatgctttctgctgctggtaggtggtaaggctgtatgatgttttaaagcacaggctcaaaaatcacaattcactatctacatgaccttaagcaagttattttacctctctctataactcagtttcctcaactataaagtgggataaaagcgtatctcataagataattaagaatattataatacataataaagaactcaggacagtggctagtacagaggtctcagtaaattttagtttccatttcaagtggctgttttacttgcctattgttaacagactcagaaattctgagagtctggttagaaaaaggaaaattcgttttttttcagtctaccttgcaagataagggaaaccaagtgacagtgctgaaatgaacactgggctgagtggtaccaaacatcagtttagtcactaattagccatgtgatcctgttaagaaggttagcttgtataaccttatttttaaggacacataatgatttcaaaagtccaagtataaatcagtaattacaaatcagccttataatacccaggtatctatgaaaactaaaaattgagagttgataaatataagaaattactgctgatctaaaaggaagtggcagaaatcccctgaaatgtgttaaatctttgccttactaaatacttgccagaagctataactatattttcttattaatttcatgttcatcttctcaacaagtaaacaaaaataaagccaacaaaattctcataaaaaaaaa

SEQ ID NO: 11988 - DNA, 575 bp, Homo sapiens
ataatggtctttttctaagggaggcaatagcaagtgatagtatgtaaatggttttggttttcatcaacattttttttgaactaagcagttaaggaacagtggtcacataaatacacctaccattctgtacagacatggtttctgcttttacaagtgttatatggtattttcaaaaaggcaaaatcacttaagtcgggaaattaatgaggaaatcattaagatattatgactgcctcaaagaacatttgaaaagttaggcatacacaagcagtttgtcaaataaatgtttctggattagaaggaaaatttgttaatgcccaagtcagccatcattctttgtagatatctattccaccagacagaaattatttgcatctcaattagttggaaatctgcaagttaacaggcaattcagtaagtctgagactttaatcaaaggtaaactgtgtggtgcattgagtacttttgcttggagtgccttttgcctccccatataatattaaaaagatgtacccagttgttttttatatttctaaagttttggaaatattttctgatataagcaggaaaagaaa

SEQ ID NO: 11989 - DNA, 815 bp, Homo sapiens
aggatggtgagatactgaggaaagagcaaaggatctggagatcaaagccctgcatttccattttgtcctgattcctttgctcagagacactaactaaatcaagctagcttttttcagccttgtctgtaaagtagagaaaacattagctgttgggaagacgaaaaagaatgtgtcctatgtgtgcatctatttaaatctaactgtgctgaggtgcatataaatgcctttaggtggtagggtcttccggttgtaactgcaacagaaatagcaggacttaagttcctttgtgcgtaattccagctgactttattagcggcaactcagcactagcattacccctgacatactctgagtaagatctaattcttccctcactggttcgtgatgtctaccgcagcagaaggccagctcttgactctgagttcagttggacaaaatgctgttgataaaacctcctgtcaggcctctgagcccaagctaagccatcatatcccttgtgacctgcacatatatatccagatggcctgaagtaactgaagaatcacaaaagaagtgaaaatggcctgttcctgccttaactgatgacattaccttgtgaaattccttctcctggctcatcctggctcaaaagctcccccagtgagcaccttgtgacccccatccctgccagccagagaacaaccccctttgactgtaattttccactacttacccaaatcctataaaacggccccacccctatctcccttcactgactttcttttcggactcagcccacctgcacccaggtgattaaaaagctttattgctcacac

SEQ ID NO: 11990 - DNA, 6721 bp, Homo sapiens
cccaagtttggggaagacaggaactgcagcgcccctccccgtttcacgccacgcgcgggaccgaggacctaggacctggccagctgggcgtggttcggagagccgggcgggaaaacgaaaccagaaatccgaaggccgcgccagagccctgcttccccttgcacctgcgccgggcggccatggacttgtacagcaccccggccgctgcgctggacaggttcgtggccagaaggctgcagccgcggaaggagttcgtagagaaggcgcggcgcgctctgggcgccctggccgctgccctgagggagcgcgggggccgcctcggtgctgctgccccgcgggtgctgaaaactgtcaagggaggctcctcgggccggggcacagctctcaagggtggctgtgattctgaacttgtcatcttcctcgactgcttcaagagctatgtggaccagagggcccgccgtgcagagatcctcagtgagatgcgggcatcgctggaatcctggtggcagaacccagtccctggtctgagactcacgtttcctgagcagagcgtgcctggggccctgcagttccgcctgacatccgtagatcttgaggactggatggatgttagcctggtgcctgccttcaatgtcctgggtcaggccggctccggcgtcaaacccaagccacaagtctactctaccctcctcaacagtggctgccaagggggcgagcatgcggcctgcttcacagagctgcggaggaactttgtgaacattcgcccagccaagttgaagaacctaatcttgctggtgaagcactggtaccaccaggtgtgcctacaggggttgtggaaggagacgctgcccccggtctatgccctggaattgctgaccatcttcgcctgggagcagggctgtaagaaggatgctttcagcctagccgaaggcctccgaactgtcctgggcctgatccaacagcatcagcacctgtgtgttttctggactgtcaactatggcttcgaggaccctgcagttgggcagttcttgcagcggcagcttaagagacccaggcctgtgatcctggacccagctgaccccacatgggacctggggaatggggcagcctggcactgggatttgctagcccaggaggcagcatcctgctatgaccacccatgctttctgagggggatgggggacccagtgcagtcttggaaggggccgggccttccacgtgctggatgctcaggtttgggccaccccatccagctagaccctaaccagaagacccctgaaaacagcaagagcctcaatgctgtgtacccaagagcagggagcaaacctccctcatgcccagctcctggccccactggggcagccagcatcgtcccctctgtgccgggaatggccttggacctgtctcagatccccaccaaggagctggaccgcttcatccaggaccacctgaagccgagcccccagttccaggagcaggtgaaaaaggccatcgacatcatcttgcgctgcctccatgagaactgtgttcacaaggcctcaagagtcagtaaagggggctcatttggccggggcacagacctaagggatggctgtgatgttgaactcatcatcttcctcaactgcttcacggactacaaggaccaggggccccgccgcgcagagatccttgatgagatgcgagcgcacgtagaatcctggtggcaggaccaggtgcccagcctgagccttcagtttcctgagcagaatgtgcctgaggctctgcagttccagctggtgtccacagccctgaagagctggacggatgttagcctgctgcctgccttcgatgctgtggggcagctcagttctggcaccaaaccaaatccccaggtctactcgaggctcctcaccagtggctgccaggagggcgagcataaggcctgcttcgcagagctgcggaggaacttcatgaacattcgccctgtcaagctgaagaacctgattctgctggtgaagcactggtaccgccaggttgcggctcagaacaaaggaaaaggaccagcccctgcctctctgcccccagcctatgccctggagctcctcaccatctttgcctgggagcagggctgcaggcaggattgtttcaacatggcccaaggcttccggacggtgctggggctcgtgcaacagcatcagcagctctgtgtctactggacggtcaactatagcactgaggacccagccatgagaatgcaccttcttggccagcttcgaaaacccagacccctggtcctggaccccgctgatcccacctggaacgtgggccacggtagctgggagctgttggcccaggaagcagcagcgctggggatgcaggcctgctttctgagtagagacgggacatctgtgcagccctgggatgtgatgccagccctcctttaccaaaccccagctggggaccttgacaagttcatcagtgaatttctccagcccaaccgccagttcctggcccaggtgaacaaggccgttgataccatctgttcatttttgaaggaaaactgcttccggaattctcccatcaaagtgatcaaggtggtcaagggtggctcttcagccaaaggcacagctctgcgaggccgctcagatgccgacctcgtggtgttcctcagctgcttcagccagttcactgagcagggcaacaagcgggccgagatcatctccgagatccgagcccagctggaggcatgtcaacaggagcggcagttcgaggtcaagtttgaagtctccaaatgggagaatccccgcgtgctgagcttctcactgacatcccagacgatgctggaccagagtgtggactttgatgtgctgccagcctttgacgccctaggccagctggtctctggctccaggcccagctctcaagtctacgtcgacctcatccacagctacagcaatgcgggcgagtactccacctgcttcacagagctacaacgggacttcatcatctctcgccctaccaagctgaagagcctgatccggctggtgaagcactggtaccagcagtgtaccaagatctccaaggggagaggctccctacccccacagcacgggctggaactcctgactgtgtatgcctgggagcagggcgggaaggactcccagttcaacatggctgagggcttccgcacggtcctggagctggtcacccagtaccgccagctctgtatctactggaccatcaactacaacgccaaggacaagactgttggagacttcctgaaacagcagcttcagaagcccaggcctatcatcctggatccggctgacccgacaggcaacctgggccacaatgcccgctgggacctgctggccaaggaagctgcagcctgcacatctgccctgtgctgcatgggacggaatggcatccccatccagccatggccagtgaaggctgctgtgtgaagttgagaaaatcagcggtcctactggatgaagagaagatggacaccagccctcagcatgaggaaattcagggtcccctaccagatgagagagattgtgtacatgtgtgtgtgagcacatgtgtgcatgtgtgtgcacacgtgtgcatgtgtgtgttttagtgaatctgctctcccagctcacacactcccctgcctcccatggcttacacactaggatccagactccatggtttgacaccagcctgcgtttgcagcttctctgtcacttccatgactctatcctcataccaccactgctgcttcccacccagctgagaatgccccctcctccctgactcctctctgcccatgcaaattagctcacatctttcctcctgctgcaatccatcccttcctcccattggcctctccttgccaaatctaaatactttatatagggatggcagagagttcccatctcatctgtcagccacagtcatttggtactggctacctggagccttatcttctgaagggttttaaagaatggccaattagctgagaagaattatctaatcaattagtgatgtctgccatggatgcagtagaggaaagtggtggtacaagtgccatgattgattagcaatgtctgcactggatacggaaaaaagaaggtgcttgcaggtttacagtgtatatgtgggctattgaagagccctctgagctcggttgctagcaggagagcatgcccatattggcttactttgtctgccacagacacagacagagggagttgggacatgcatgctatggggaccctcttgttggacacctaattggatgcctcttcatgagaggcctccttttcttcaccttttatgctgcactcctcccctagtttacacatcttgatgctgtggctcagtttgccttcctgaatttttattgggtccctgttttctctcctaacatgctgagattctgcatccccacagcctaaactgagccagtggccaaacaaccgtgctcagcctgtttctctctgccctctagagcaaggcccaccaggtccatccaggaggctctcctgacctcaagtccaacaacagtgtccacactagtcaaggttcagcccagaaaacagaaagcactctaggaatcttaggcagaaagggattttatctaaatcactggaaaggctggaggagcagaaggcagaggccaccactggactattggtttcaatattagaccactgtagccgaatcagaggccagagagcagccactgctactgctaatgccaccactacccctgccatcactgccccacatggacaaaactggagtcgagacctaggttagattcctgcaaccacaaacatccatcagggatggccagctgccagagctgcgggaagacggatcccacctccctttcttagcagaatctaaattacagccagacctctggctgcagaggagtctgagacatgtatgattgaatgggtgccaagtgccagggggcggagtccccagcagatgcatcctggccatctgttgcgtggatgagggagtgggtctatctcagaggaaggaacaggaaacaaagaaaggaagccactgaacatcccttctctgctccacaggagtgtcttagacagcctgactctccacaaaccactgttaaaacttacctgctaggaatgctagattgaatgggatgggaagagccttccctcattattgtcattcttggagagaggtgagcaaccaagggaagctcctctgattcacctagaacctgttctctgccgtctttggctcagcctacagagactagagtaggtgaagggacagaggacagggcttctaatacctgtgccatattgacagcctccatccctgtcccccatcttggtgctgaaccaacgctaagggcaccttcttagactcacctcatcgatactgcctggtaatccaaagctagaactctcaggaccccaaactccacctcttggattggccctggctgctgccacacacatatccaagagctcagggccagttctggtgggcagcagagacctgctctgccaagttgtccagcagcagagtggccctggcctgggcatcacaagccagtgatgctcctgggaagaccaggtggcaggtcgcagttgggtaccttccattcccaccacacagactctgggcctccccgcaaaatggctccagaattagagtaattatgagatggtgggaaccagagcaactcaggtgcatgatacaaggagaggttgtcatctgggtagggcagagaggagggcttgctcatctgaacaggggtgtatttcattccaggccctcagtctttggcaatggccaccctggtgttggcatattggccccactgtaacttttgggggcttcccggtctagccacaccctcggatggaaagacttgactgcataaagatgtcagttctccctgagttgattgataggcttaatggtcaccctaaaaacacccacatatgcttttcgatggaaccagataagttgacgctaaagttcttatggaaaaatacacacgcaatagctaggaaaacacagggaaagaagagttctgagcagggcctagtcttagccaatattaaaacatactatgaagcctctgatacttaaacagcatggcgctggtacgtaaatagaccaatgcagttaggtggctctttccaagactctggggaaaaaagtagtaaaaagctaaatgcaatcaatcagcaattgaaagctaagtgagagagccagagggcctccttggtggtaaaagagggttgcatttcttgcagccagaaggcagagaaagtgaagaccaagtccagaactgaatcctaagaaatgcaggactgcaaagaaattggtgtgtgtgtgtgtgtgtgtgtgtgtgtgtgtgtttaatttttaaaaagtttttattgagatacaagtcaataccataaagctctcacccttctaaagtgtacaattcagtggtgtgagtatattcataagatttatacttggtgtctattcataagacttatatccagcatattcataactagagccatatcacagatgcattcatcataataattccagacattttcatcaccctaaaaggaaaccctgaaacccattagcagtcattccccattcctccaacccattctctccctaatccctagaaaccaccaatctgctgtgtatttcatctattgccaacatttcatataaatggcatcatacaata

SEQ ID NO: 11991 - DNA, 1479 bp, Homo sapiens
cccaagtttggggaagacaggaactgcagcgcccctccccgtttcacgccacgcgcgggaccgaggacctaggacctggccagctgggcgtggttcggagagccgggcgggaaaacgaaaccagaaatccgaaggccgcgccagagccctgcttccccttgcacctgcgccgggcggccatggacttgtacagcaccccggccgctgcgctggacaggttcgtggccagaaggctgcagccgcggaaggagttcgtagagaaggcgcggcgcgctctgggcgccctggccgctgccctgagggagcgcgggggccgcctcggtgctgctgccccgcgggtgctgaaaactgtcaagggaggctcctcgggccggggcacagctctcaagggtggctgtgattctgaacttgtcatcttcctcgactgcttcaagagctatgtggaccagagggcccgccgtgcagagatcctcagtgagatgcgggcatcgctggaatcctggtggcagaacccagtccctggtctgagactcacgtttcctgagcagagcgtgcctggggccctgcagttccgcctgacatccgtagatcttgaggactggatggatgttagcctggtgcctgccttcaatgtcctgggtcaggccggctccggcgtcaaacccaagccacaagtctactctaccctcctcaacagtggctgccaagggggcgagcatgcggcctgcttcacagagctgcggaggaactttgtgaacattcgcccagccaagttgaagaacctaatcttgctggtgaagcactggtaccaccaggtgaagccacttggaagggtttctccagacatgtgactgtttgctttgtgctttcatagtcgtgaaactgttgtcttacatttagtggccattcatgttctctctctgggaattgtctgtttatgtcccttgtgcattattttctcttgggttagctgtcttgttactgatttgttgaagctctttatatattgtggatactgatccttatttagttaatataatgcattcttccaatagtcttccagtctgtgtcttgggcttttgctttgtttaaaggttatttgtaggacaaaatatctacagtttaatgtactcagatatatcctttgaaaaatgagttattctttgtgtgtcttaagaagtctttccctatcctgccaggtgcagtggctcatggctggaatcccagcactttgagtggccgaggcaggtggatcacttgaggtcaggagttcaagaccagcctggccaacatggtgaaaccctgtctctactaaaaatacaaaatgtagccgggcgtggtggtacacacctgtaattccagttactcgggaggctgaggcaggagaatctcttgaacccaggaggcagaggttgcagtaagccaagattgcaccactgcactccagcctgggtgacagagccagactccatctcaagg

SEQ ID NO: 11992 - DNA, 358 bp, Homo sapiens
  misc_feature (12)..(12): n is a, c, g, or t
ccgcctactacnactaaattcgcggccgcgtcgactttttattgagatacaagtcaataccataaagctctcacccttctaaagtgtacaattcagtggtgtgagtatattcataagatttatacttggtgtctattcataagacttatatccagcatattcataactagagccatatcacagatgcattcatcataataattccagacattttcatcaccctaaaaggaaaccctgaaacccattagcagtcattccccattcctccaacccattctctccctaatccctagaaaccaccaatctgctgtgtatttcatctattgccaacatttcatataaatggcatcatacaata

SEQ ID NO: 11993 - DNA, 920 bp, Homo sapiens
aggctgagctcggcaccaacaccgccctccatcctgtgtcctcagtgccctccctaactcacagcgcttcacaccaacaggtcaggccggctccggcgtcaaacccaagccacaagtctactctaccctcctcaacagtggctgccaagggggcgagcatgcggcctgcttcacagagctgcggaggaactttgtgaacattcgcccagccaagttgaagaacctaatcttgctggtgaagcactggtaccaccaggtgaagccacttggaagggtttctccagacatgtgactgtttgctttgtgctttcatagtcgtgaaactgttgtcttacatttagtggccattcatgttctctctctgggaattgtctgtttatgtcccttgtgcattattttctcttgggttagctgtcttgttactgatttgttgaagctctttatatattgtggatactgatccttatttagttaatataatgcattcttccaatagtcttccagtctgtgtcttgggcttttgctttgtttaaaggttatttgtaggacaaaatatctacagtttaatgtactcagatatatcctttgaaaaatgagttattctttgtgtgtcttaagaagtctttccctatcctgccaggtgcagtggctcatggctggaatcccagcactttgagtggccgaggcaggtggatcacttgaggtcaggagttcaagaccagcctggccaacatggtgaaaccctgtctctactaaaaatacaaaatgtagccgggcgtggtggtacacacctgtaattccagttactcgggaggctgaggcaggagaatctcttgaacccaggaggcagaggttgcagtaagccaagattgcaccactgcactccagcctgggtgacagagccagactccatctcaagg

SEQ ID NO: 11994 - DNA, 6388 bp, Homo sapiens
cccaagtttggggaagacaggaactgcagcgcccctccccgtttcacgccacgcgcgggaccgaggacctaggacctggccagctgggcgtggttcggagagccgggcgggaaaacgaaaccagaaatccgaaggccgcgccagagccctgcttccccttgcacctgcgccgggcggccatggacttgtacagcaccccggccgctgcgctggacaggttcgtggccagaaggctgcagccgcggaaggagttcgtagagaaggcgcggcgcgctctgggcgccctggccgctgccctgagggagcgcgggggccgcctcggtgctgctgccccgcgggtgctgaaaactgtcaagggaggctcctcgggccggggcacagctctcaagggtggctgtgattctgaacttgtcatcttcctcgactgcttcaagagctatgtggaccagagggcccgccgtgcagagatcctcagtgagatgcgggcatcgctggaatcctggtggcagaacccagtccctggtctgagactcacgtttcctgagcagagcgtgcctggggccctgcagttccgcctgacatccgtagatcttgaggactggatggatgttagcctggtgcctgccttcaatgtcctgggtcaggccggctccggcgtcaaacccaagccacaagtctactctaccctcctcaacagtggctgccaagggggcgagcatgcggcctgcttcacagagctgcggaggaactttgtgaacattcgcccagccaagttgaagaacctaatcttgctggtgaagcactggtaccaccaggtgtgcctacaggggttgtggaaggagacgctgcccccggtctatgccctggaattgctgaccatcttcgcctgggagcagggctgtaagaaggatgctttcagcctagccgaaggcctccgaactgtcctgggcctgatccaacagcatcagcacctgtgtgttttctggactgtcaactatggcttcgaggaccctgcagttgggcagttcttgcagcggcagcttaagagacccaggcctgtgatcctggacccagctgaccccacatgggacctggggaatggggcagcctggcactgggatttgctagcccaggaggcagcatcctgctatgaccacccatgctttctgagggggatgggggacccagtgcagtcttggaaggggccgggccttccacgtgctggatgctcaggtttgggccaccccatccagctagaccctaaccagaagacccctgaaaacagcaagagcctcaatgctgtgtacccaagagcagggagcaaacctccctcatgcccagctcctggccccactggggcagccagcatcgtcccctctgtgccgggaatggccttggacctgtctcagatccccaccaaggagctggaccgcttcatccaggaccacctgaagccgagcccccagttccaggagcaggtgaaaaaggccatcgacatcatcttgcgctgcctccatgagaactgtgttcacaaggcctcaagagtcagtaaagggggctcatttggccggggcacagacctaagggatggctgtgatgttgaactcatcatcttcctcaactgcttcacggactacaaggaccaggggccccgccgcgcagagatccttgatgagatgcgagcgcacgtagaatcctggtggcaggaccaggtgcccagcctgagccttcagtttcctgagcagaatgtgcctgaggctctgcagttccagctggtgtccacagccctgaagagctggacggatgttagcctgctgcctgccttcgatgctgtggggcagctcagttctggcaccaaaccaaatccccaggtctactcgaggctcctcaccagtggctgccaggagggcgagcataaggcctgcttcgcagagctgcggaggaacttcatgaacattcgccctgtcaagctgaagaacctgattctgctggtgaagcactggtaccgccaggttgcggctcagaacaaaggaaaaggaccagcccctgcctctctgcccccagcctatgccctggagctcctcaccatctttgcctgggagcagggctgcaggcaggattgtttcaacatggcccaaggcttccggacggtgctggggctcgtgcaacagcatcagcagctctgtgtctactggacggtcaactatagcactgaggacccagccatgagaatgcaccttcttggccagcttcgaaaacccagacccctggtcctggaccccgctgatcccacctggaacgtgggccacggtagctgggagctgttggcccaggaagcagcagcgctggggatgcaggcctgctttctgagtagagacgggacatctgtgcagccctgggatgtgatgccagccctcctttaccaaaccccagctggggaccttgacaagttcatcagtgaatttctccagcccaaccgccagttcctggcccaggtgaacaaggccgttgataccatctgttcatttttgaaggaaaactgcttccggaattctcccatcaaagtgatcaaggtggtcaagggtggctcttcagccaaaggcacagctctgcgaggccgctcagatgccgacctcgtggtgttcctcagctgcttcagccagttcactgagcagggcaacaagcgggccgagatcatctccgagatccgagcccagctggaggcatgtcaacaggagcggcagttcgaggtcaagtttgaagtctccaaatgggagaatccccgcgtgctgagcttctcactgacatcccagacgatgctggaccagagtgtggactttgatgtgctgccagcctttgacgccctaggccagctggtctctggctccaggcccagctctcaagtctacgtcgacctcatccacagctacagcaatgcgggcgagtactccacctgcttcacagagctacaacgggacttcatcatctctcgccctaccaagctgaagagcctgatccggctggtgaagcactggtaccagcagtgtaccaagatctccaaggggagaggctccctacccccacagcacgggctggaactcctgactgtgtatgcctgggagcagggcgggaaggactcccagttcaacatggctgagggcttccgcacggtcctggagctggtcacccagtaccgccagctctgtatctactggaccatcaactacaacgccaaggacaagactgttggagacttcctgaaacagcagcttcagaagcccaggcctatcatcctggatccggctgacccgacaggcaacctgggccacaatgcccgctgggacctgctggccaaggaagctgcagcctgcacatctgccctgtgctgcatgggacggaatggcatccccatccagccatggccagtgaaggctgctgtgtgaagttgagaaaatcagcggtcctactggatgaagagaagatggacaccagccctcagcatgaggaaattcagggtcccctaccagatgagagagattgtgtacatgtgtgtgtgagcacatgtgtgcatgtgtgtgcacacgtgtgcatgtgtgtgttttagtgaatctgctctcccagctcacacactcccctgcctcccatggcttacacactaggatccagactccatggtttgacaccagcctgcgtttgcagcttctctgtcacttccatgactctatcctcataccaccactgctgcttcccacccagctgagaatgccccctcctccctgactcctctctgcccatgcaaattagctcacatctttcctcctgctgcaatccatcccttcctcccattggcctctccttgccaaatctaaatactttatatagggatggcagagagttcccatctcatctgtcagccacagtcatttggtactggctacctggagccttatcttctgaagggttttaaagaatggccaattagctgagaagaattatctaatcaattagtgatgtctgccatggatgcagtagaggaaagtggtggtacaagtgccatgattgattagcaatgtctgcactggatacggaaaaaagaaggtgcttgcaggtttacagtgtatatgtgggctattgaagagccctctgagctcggttgctagcaggagagcatgcccatattggcttactttgtctgccacagacacagacagagggagttgggacatgcatgctatggggaccctcttgttggacacctaattggatgcctcttcatgagaggcctccttttcttcaccttttatgctgcactcctcccctagtttacacatcttgatgctgtggctcagtttgccttcctgaatttttattgggtccctgttttctctcctaacatgctgagattctgcatccccacagcctaaactgagccagtggccaaacaaccgtgctcagcctgtttctctctgccctctagagcaaggcccaccaggtccatccaggaggctctcctgacctcaagtccaacaacagtgtccacactagtcaaggttcagcccagaaaacagaaagcactctaggaatcttaggcagaaagggattttatctaaatcactggaaaggctggaggagcagaaggcagaggccaccactggactattggtttcaatattagaccactgtagccgaatcagaggccagagagcagccactgctactgctaatgccaccactacccctgccatcactgccccacatggacaaaactggagtcgagacctaggttagattcctgcaaccacaaacatccatcagggatggccagctgccagagctgcgggaagacggatcccacctccctttcttagcagaatctaaattacagccagacctctggctgcagaggagtctgagacatgtatgattgaatgggtgccaagtgccagggggcggagtccccagcagatgcatcctggccatctgttgcgtggatgagggagtgggtctatctcagaggaaggaacaggaaacaaagaaaggaagccactgaacatcccttctctgctccacaggagtgtcttagacagcctgactctccacaaaccactgttaaaacttacctgctaggaatgctagattgaatgggatgggaagagccttccctcattattgtcattcttggagagaggtgagcaaccaagggaagctcctctgattcacctagaacctgttctctgccgtctttggctcagcctacagagactagagtaggtgaagggacagaggacagggcttctaatacctgtgccatattgacagcctccatccctgtcccccatcttggtgctgaaccaacgctaagggcaccttcttagactcacctcatcgatactgcctggtaatccaaagctagaactctcaggaccccaaactccacctcttggattggccctggctgctgccacacacatatccaagagctcagggccagttctggtgggcagcagagacctgctctgccaagttgtccagcagcagagtggccctggcctgggcatcacaagccagtgatgctcctgggaagaccaggtggcaggtcgcagttgggtaccttccattcccaccacacagactctgggcctccccgcaaaatggctccagaattagagtaattatgagatggtgggaaccagagcaactcaggtgcatgatacaaggagaggttgtcatctgggtagggcagagaggagggcttgctcatctgaacaggggtgtatttcattccaggccctcagtctttggcaatggccaccctggtgttggcatattggccccactgtaacttttgggggcttcccggtctagccacaccctcggatggaaagacttgactgcataaagatgtcagttctccctgagttgattgataggcttaatggtcaccctaaaaacacccacatatgcttttcgatggaaccagataagttgacgctaaagttcttatggaaaaatacacacgcaatagctaggaaaacacagggaaagaagagttctgagcagggcctagtcttagccaatattaaaacatactatgaagcctctgatacttaaacagcatggcgctggtacgtaaatagaccaatgcagttaggtggctctttccaagactctggggaaaaaagtagtaaaaagctaaatgcaatcaatcagcaattgaaagctaagtgagagagccagagggcctccttggtggtaaaagagggttgcatttcttgcagccagaaggcagagaaagtgaagaccattctctccctaatccctagaaaccaccaatctgctgtgtatttcatctattgccaacatttcatataaatggcatcatacaata

SEQ ID NO: 11995 - DNA, 1180 bp, Homo sapiens
  misc_feature (71)..(71): n is a, c, g, or t
gggccaagtaaacttataacgggtctctaaggtaggcgagggccctgggtggcggggtacctttcccagtntcccccaaccaacagcagaactctgggcctccccgcaaaatggctccagaattagagtaattatgagatggtgggaaccagagcaactcaggtgcatgatacaaggagaggttgtcatctgggtagggcagagaggagggcttgctcatctgaacaggggtgtatttcattccaggccctcagtctttggcaatggccaccctggtgttggcatattggccccactgtaacttttgggggcttcccggtctagccacaccctcggatggaaagacttgactgcataaagatgtcagttctccctgagttgattgataggcttaatggtcaccctaaaaacacccacatatgcttttcgatggaaccagataagttgacgctaaagttcttatggaaaaatacacacgcaatagctaggaaaacacagggaaagaagagttctgagcagggcctagtcttagccaatattaaaacatactatgaagcctctgatacttaaacagcatggcgctggtacgtaaatagaccaatgcagttaggtggctctttccaagactctggggaaaaaagtagtaaaaagctaaatgcaatcaatcagcaattgaaagctaagtgagagagccagagggcctccttggtggtaaaagagggttgcatttcttgcagccagaaggcagagaaagtgaagaccaagtccagaactgaatcctaagaaatgcaggactgcaaagaaattggtgtgtgtgtgtgtgtgtgtgtgtgtgtgtgtgtttaatttttaaaaagtttttattgagatacaagtcaataccataaagctctcacccttctaaagtgtacaattcagtggtgtgagtatattcataagatttatacttggtgtctattcataagacttatatccagcatattcataactagagccatatcacagatgcattcatcataataattccagacattttcatcaccctaaaaggaaaccctgaaacccattagcagtcattccccattcctccaacccattctctccctaatccctagaaaccaccaatctgctgtgtatttcatctattgccaacatttcatataaatggcatcatacaata

SEQ ID NO: 11996 - DNA, 504 bp, Homo sapiens
  misc_feature (12)..(12): n is a, c, g, or t
ccgcctactacnactaaattcgcggccgcgtcgacgtaaaagagggttgcatttcttgcagccagaaggcagagaaagtgaagaccaagtccagaactgaatcctaagaaatgcaggactgcaaagaaattggtgtgtgtgtgtgtgtgtgtgtgtgtgtgtgtgtttaatttttaaaaagtttttattgagatacaagtcaataccataaagctctcacccttctaaagtgtacaattcagtggtgtgagtatattcataagatttatacttggtgtctattcataagacttatatccagcatattcataactagagccatatcacagatgcattcatcataataattccagacattttcatcaccctaaaaggaaaccctgaaacccattagcagtcattccccattcctccaacccattctctccctaatccctagaaaccaccaatctgctgtgtatttcatctattgccaacatttcatataaatggcatcatacaata

SEQ ID NO: 11997 - DNA, 3239 bp, Homo sapiens
cccaagtttggggaagacaggaactgcagcgcccctccccgtttcacgccacgcgcgggaccgaggacctaggacctggccagctgggcgtggttcggagagccgggcgggaaaacgaaaccagaaatccgaaggccgcgccagagccctgcttccccttgcacctgcgccgggcggccatggacttgtacagcaccccggccgctgcgctggacaggttcgtggccagaaggctgcagccgcggaaggagttcgtagagaaggcgcggcgcgctctgggcgccctggccgctgccctgagggagcgcgggggccgcctcggtgctgctgccccgcgggtgctgaaaactgtcaagggaggctcctcgggccggggcacagctctcaagggtggctgtgattctgaacttgtcatcttcctcgactgcttcaagagctatgtggaccagagggcccgccgtgcagagatcctcagtgagatgcgggcatcgctggaatcctggtggcagaacccagtccctggtctgagactcacgtttcctgagcagagcgtgcctggggccctgcagttccgcctgacatccgtagatcttgaggactggatggatgttagcctggtgcctgccttcaatgtcctgggtcaggccggctccggcgtcaaacccaagccacaagtctactctaccctcctcaacagtggctgccaagggggcgagcatgcggcctgcttcacagagctgcggaggaactttgtgaacattcgcccagccaagttgaagaacctaatcttgctggtgaagcactggtaccaccaggtgtgcctacaggggttgtggaaggagacgctgcccccggtctatgccctggaattgctgaccatcttcgcctgggagcagggctgtaagaaggatgctttcagcctagccgaaggcctccgaactgtcctgggcctgatccaacagcatcagcacctgtgtgttttctggactgtcaactatggcttcgaggaccctgcagttgggcagttcttgcagcggcagcttaagagacccaggcctgtgatcctggacccagctgaccccacatgggacctggggaatggggcagcctggcactgggatttgctagcccaggaggcagcatcctgctatgaccacccatgctttctgagggggatgggggacccagtgcagtcttggaaggggccgggccttccacgtgctggatgctcaggtttgggccaccccatccagctagaccctaaccagaagacccctgaaaacagcaagagcctcaatgctgtgtacccaagagcagggagcaaacctccctcatgcccagctcctggccccactggggcagccagcatcgtcccctctgtgccgggaatggccttggacctgtctcagatccccaccaaggagctggaccgcttcatccaggaccacctgaagccgagcccccagttccaggagcaggtgaaaaaggccatcgacatcatcttgcgctgcctccatgagaactgtgttcacaaggcctcaagagtcagtaaagggggctcatttggccggggcacagacctaagggatggctgtgatgttgaactcatcatcttcctcaactgcttcacggactacaaggaccaggggccccgccgcgcagagatccttgatgagatgcgagcgcacgtagaatcctggtggcaggaccaggtgcccagcctgagccttcagtttcctgagcagaatgtgcctgaggctctgcagttccagctggtgtccacagccctgaagagctggacggatgttagcctgctgcctgccttcgatgctgtggggcagctcagttctggcaccaaaccaaatccccaggtctactcgaggctcctcaccagtggctgccaggagggcgagcataaggcctgcttcgcagagctgcggaggaacttcatgaacattcgccctgtcaagctgaagaacctgattctgctggtgaagcactggtaccgccaggttgcggctcagaacaaaggaaaaggaccagcccctgcctctctgcccccagcctatgccctggagctcctcaccatctttgcctgggagcagggctgcaggcaggattgtttcaacatggcccaaggcttccggacggtgctggggctcgtgcaacagcatcagcagctctgtgtctactggacggtcaactatagcactgaggacccagccatgagaatgcaccttcttggccagcttcgaaaacccagacccctggtcctggaccccgctgatcccacctggaacgtgggccacggtagctgggagctgttggcccaggaagcagcagcgctggggatgcaggcctgctttctgagtagagacgggacatctgtgcagccctgggatgtgatgccagccctcctttaccaaaccccagctggggaccttgacaagttcatcagtgaatttctccagcccaaccgccagttcctggcccaggtgaacaaggccgttgataccatctgttcatttttgaaggaaaactgcttccggaattctcccatcaaagtgatcaaggtggtcaagggtggctcttcagccaaaggcacagctctgcgaggccgctcagatgccgacctcgtggtgttcctcagctgcttcagccagttcactgagcagggcaacaagcgggccgagatcatctccgagatccgagcccagctggaggcatgtcaacaggagcggcagttcgaggtcaagtttgaagtctccaaatgggagaatccccgcgtgctgagcttctcactgacatcccagacgatgctggaccagagtgtggactttgatgtgctgccagcctttgacgccctaggccagctggtctctggctccaggcccagctctcaagtctacgtcgacctcatccacagctacagcaatgcgggcgagtactccacctgcttcacagagctacaacgggacttcatcatctctcgccctaccaagctgaagagcctgatccggctggtgaagcactggtaccagcaggttcggcacatggataggccaccttcctaagttgccctgggatctgcctctggagcactttcctgggaggaagcagggcccagccctggccaagatcctgggttggtggagcagagcagaaagagtgctatatctcagctgtgggaccttagttttcttatctgtaagatgggggtgataaaactatgtcacagg

SEQ ID NO: 11998 - DNA, 1618 bp, Homo sapiens
cccaagtttggggaagacaggaactgcagcgcccctccccgtttcacgccacgcgcgggaccgaggacctaggacctggccagctgggcgtggttcggagagccgggcgggaaaacgaaaccagaaatccgaaggccgcgccagagccctgcttccccttgcacctgcgccgggcggccatggacttgtacagcaccccggccgctgcgctggacaggttcgtggccagaaggctgcagccgcggaaggagttcgtagagaaggcgcggcgcgctctgggcgccctggccgctgccctgagggagcgcgggggccgcctcggtgctgctgccccgcgggtgctgaaaactgtcaagggaggctcctcgggccggggcacagctctcaagggtggctgtgattctgaacttgtcatcttcctcgactgcttcaagagctatgtggaccagagggcccgccgtgcagagatcctcagtgagatgcgggcatcgctggaatcctggtggcagaacccagtccctggtctgagactcacgtttcctgagcagagcgtgcctggggccctgcagttccgcctgacatccgtagatcttgaggactggatggatgttagcctggtgcctgccttcaatgtcctgggtcaggccggctccggcgtcaaacccaagccacaagtctactctaccctcctcaacagtggctgccaagggggcgagcatgcggcctgcttcacagagctgcggaggaactttgtgaacattcgcccagccaagttgaagaacctaatcttgctggtgaagcactggtaccaccaggtgtgcctacaggggttgtggaaggagacgctgcccccggtctatgccctggaattgctgaccatcttcgcctgggagcagggctgtaagaaggatgctttcagcctagccgaaggcctccgaactgtcctgggcctgatccaacagcatcagcacctgtgtgttttctggactgtcaactatggcttcgaggaccctgcagttgggcagttcttgcagcggcagcttaagagacccaggcctgtgatcctggacccagctgaccccacatgggacctggggaatggggcagcctggcactgggatttgctagcccaggaggcagcatcctgctatgaccacccatgctttctgagggggatgggggacccagtgcagtcttggaaggggccggtaagtgagggggccccaggacccttgggttttgcactttgtttatgtgtccagtgtttcctgagcatctactatgtgccatatggtgtggaacaggctttaaaaagcaggggtggccaggtgtggtggctcacgcctgtaatctcaacacattgggaggccgaggtgggcagattacctgaggtcagaggtcaggagttcgagaccagtctggacaatatggtgaaaccttgtctctactaaaaatacgaaaattagccaggcatggtggtgggtgcgtgtaatctcagctactcgagaggctgaggcaggagaattgcttgaactagggaggcggaggttgcaatgagctgagatcactccattgcactccagcctgggtgacagagtaagactccgtcccaaaaaaa

SEQ ID NO: 11999 - DNA, 1080 bp, Homo sapiens
cccaagtttggggaagacaggaactgcagcgcccctccccgtttcacgccacgcgcgggaccgaggacctaggacctggccagctgggcgtggttcggagagccgggcgggaaaacgaaaccagaaatccgaaggccgcgccagagccctgcttccccttgcacctgcgccgggcggccatggacttgtacagcaccccggccgctgcgctggacaggttcgtggccagaaggctgcagccgcggaaggagttcgtagagaaggcgcggcgcgctctgggcgccctggccgctgccctgagggagcgcgggggccgcctcggtgctgctgccccgcgggtgctgaaaactgtcaagggaggctcctcgggccggggcacagctctcaagggtggctgtgattctgaacttgtcatcttcctcgactgcttcaagagctatgtggaccagagggcccgccgtgcagagatcctcagtgagatgcgggcatcgctggaatcctggtggcagaacccagtccctggtctgagactcacgtttcctgagcagagcgtgcctggggccctgcagttccgcctgacatccgtagatcttgaggactggatggatgttagcctggtgcctgccttcaatgtcctgggtgaggggttcctagaccattccagggttgggggcaaaagatcattgggaacaacacaggacttccaattctagcccagccaccaacttgctgtttgacctgggccagcctctacccctctctcagcctcagtctggggactaaacatattggacttgtgccagacaaaggcagagaaaccccagttcctcctggatctgtggtcctgctgtcaagatgcttggccctcccacaggcatctgggagtttccctcagccactgcctggagcggttactgctcagcccttccacaaatactcccgaaagctaagccaagtggacatgtggctagcagtaggggcctggggacgaaaccagaattctgcaaaatcttgtattttatgttgaaaacatcaatgtgatttttgtgttctccttcgtaatacacgtatgcttgagtt

SEQ ID NO: 12000 - DNA, 7735 bp, Homo sapiens
cccaagtttggggaagacaggaactgcagcgcccctccccgtttcacgccacgcgcgggaccgaggacctaggacctggccagctgggcgtggttcggagagccgggcgggaaaacgaaaccagaaatccgaaggccgcgccagagccctgcttccccttgcacctgcgccgggcggccatggacttgtacagcaccccggccgctgcgctggacaggttcgtggccagaaggctgcagccgcggaaggagttcgtagagaaggcgcggcgcgctctgggcgccctggccgctgccctgagggagcgcgggggccgcctcggtgctgctgccccgcgggtgctgaaaactgtcaagggaggctcctcgggccggggcacagctctcaagggtggctgtgattctgaacttgtcatcttcctcgactgcttcaagagctatgtggaccagagggcccgccgtgcagagatcctcagtgagatgcgggcatcgctggaatcctggtggcagaacccagtccctggtctgagactcacgtttcctgagcagagcgtgcctggggccctgcagttccgcctgacatccgtagatcttgaggactggatggatgttagcctggtgcctgccttcaatgtcctgggtcaggccggctccggcgtcaaacccaagccacaagtctactctaccctcctcaacagtggctgccaagggggcgagcatgcggcctgcttcacagagctgcggaggaactttgtgaacattcgcccagccaagttgaagaacctaatcttgctggtgaagcactggtaccaccaggtgtgcctacaggggttgtggaaggagacgctgcccccggtctatgccctggaattgctgaccatcttcgcctgggagcagggctgtaagaaggatgctttcagcctagccgaaggcctccgaactgtcctgggcctgatccaacagcatcagcacctgtgtgttttctggactgtcaactatggcttcgaggaccctgcagttgggcagttcttgcagcggcagcttaagagacccaggcctgtgatcctggacccagctgaccccacatgggacctggggaatggggcagcctggcactgggatttgctagcccaggaggcagcatcctgctatgaccacccatgctttctgagggggatgggggacccagtgcagtcttggaaggggccgggccttccacgtgctggatgctcaggtttgggccaccccatccagctagaccctaaccagaagacccctgaaaacagcaagagcctcaatgctgtgtacccaagagcagggagcaaacctccctcatgcccagctcctggccccactggggcagccagcatcgtcccctctgtgccgggaatggccttggacctgtctcagatccccaccaaggagctggaccgcttcatccaggaccacctgaagccgagcccccagttccaggagcaggtgaaaaaggccatcgacatcatcttgcgctgcctccatgagaactgtgttcacaaggcctcaagagtcagtaaagggggctcatttggccggggcacagacctaagggatggctgtgatgttgaactcatcatcttcctcaactgcttcacggactacaaggaccaggggccccgccgcgcagagatccttgatgagatgcgagcgcacgtagaatcctggtggcaggaccaggtgcccagcctgagccttcagtttcctgagcagaatgtgcctgaggctctgcagttccagctggtgtccacagccctgaagagctggacggatgttagcctgctgcctgccttcgatgctgtggggcagctcagttctggcaccaaaccaaatccccaggtctactcgaggctcctcaccagtggctgccaggagggcgagcataaggcctgcttcgcagagctgcggaggaacttcatgaacattcgccctgtcaagctgaagaacctgattctgctggtgaagcactggtaccgccaggttgcggctcagaacaaaggaaaaggaccagcccctgcctctctgcccccagcctatgccctggagctcctcaccatctttgcctgggagcagggctgcaggcaggattgtttcaacatggcccaaggcttccggacggtgctggggctcgtgcaacagcatcagcagctctgtgtctactggacggtcaactatagcactgaggacccagccatgagaatgcaccttcttggccagcttcgaaaacccagacccctggtcctggaccccgctgatcccacctggaacgtgggccacggtagctgggagctgttggcccaggaagcagcagcgctggggatgcaggcctgctttctgagtagagacgggacatctgtgcagccctgggatgtgatgccagccctcctttaccaaaccccagctggggaccttgacaagttcatcagtgaatttctccagcccaaccgccagttcctggcccaggtgaacaaggccgttgataccatctgttcatttttgaaggaaaactgcttccggaattctcccatcaaagtgatcaaggtggtcaagggtggctcttcagccaaaggcacagctctgcgaggccgctcagatgccgacctcgtggtgttcctcagctgcttcagccagttcactgagcagggcaacaagcgggccgagatcatctccgagatccgagcccagctggaggcatgtcaacaggagcggcagttcgaggtcaagtttgaagtctccaaatgggagaatccccgcgtgctgagcttctcactgacatcccagacgatgctggaccagagtgtggactttgatgtgctgccagcctttgacgccctaggccagctggtctctggctccaggcccagctctcaagtctacgtcgacctcatccacagctacagcaatgcgggcgagtactccacctgcttcacagagctacaacgggacttcatcatctctcgccctaccaagctgaagagcctgatccggctggtgaagcactggtaccagcagtgtaccaagatctccaaggggagaggctccctacccccacagcacgggctggaactcctgactgtgtatgcctgggagcagggcgggaaggactcccagttcaacatggctgagggcttccgcacggtcctggagctggtcacccagtaccgccagctctgtatctactggaccatcaactacaacgccaaggacaagactgttggagacttcctgaaacagcagcttcagaagcccaggcctatcatcctggatccggctgacccgacaggcaacctgggccacaatgcccgctgggacctgctggccaaggaagctgcagcctgcacatctgccctgtgctgcatgggacggaatggcatccccatccagccatggccagtgaaggctgctgtgtgaagttgagaaaatcagcggtcctactggatgaagagaagatggacaccagccctcagcatgaggaaattcagggtcccctaccagatgagagagattgtgtacatgtgtgtgtgagcacatgtgtgcatgtgtgtgcacacgtgtgcatgtgtgtgttttagtgaatctgctctcccagctcacacactcccctgcctcccatggcttacacactaggatccagactccatggtttgacaccagcctgcgtttgcagcttctctgtcacttccatgactctatcctcataccaccactgctgcttcccacccagctgagaatgccccctcctccctgactcctctctgcccatgcaaattagctcacatctttcctcctgctgcaatccatcccttcctcccattggcctctccttgccaaatctaaatactttatatagggatggcagagagttcccatctcatctgtcagccacagtcatttggtactggctacctggagccttatcttctgaagggttttaaagaatggccaattagctgagaagaattatctaatcaattagtgatgtctgccatggatgcagtagaggaaagtggtggtacaagtgccatgattgattagcaatgtctgcactggatacggaaaaaagaaggtgcttgcaggtttacagtgtatatgtgggctattgaagagccctctgagctcggttgctagcaggagagcatgcccatattggcttactttgtctgccacagacacagacagagggagttgggacatgcatgctatggggaccctcttgttggacacctaattggatgcctcttcatgagaggcctccttttcttcaccttttatgctgcactcctcccctagtttacacatcttgatgctgtggctcagtttgccttcctgaatttttattgggtccctgttttctctcctaacatgctgagattctgcatccccacagcctaaactgagccagtggccaaacaaccgtgctcagcctgtttctctctgccctctagagcaaggcccaccaggtccatccaggaggctctcctgacctcaagtccaacaacagtgtccacactagtcaaggttcagcccagaaaacagaaagcactctaggaatcttaggcagaaagggattttatctaaatcactggaaaggctggaggagcagaaggcagaggccaccactggactattggtttcaatattagaccactgtagccgaatcagaggccagagagcagccactgctactgctaatgccaccactacccctgccatcactgccccacatggacaaaactggagtcgagacctaggttagattcctgcaaccacaaacatccatcagggatggccagctgccagagctgcgggaagacggatcccacctccctttcttagcagaatctaaattacagccagacctctggctgcagaggagtctgagacatgtatgattgaatgggtgccaagtgccagggggcggagtccccagcagatgcatcctggccatctgttgcgtggatgagggagtgggtctatctcagaggaaggaacaggaaacaaagaaaggaagccactgaacatcccttctctgctccacaggagtgtcttagacagcctgactctccacaaaccactgttaaaacttacctgctaggaatgctagattgaatgggatgggaagagccttccctcattattgtcattcttggagagaggtgagcaaccaagggaagctcctctgattcacctagaacctgttctctgccgtctttggctcagcctacagagactagagtaggtgaagggacagaggacagggcttctaatacctgtgccatattgacagcctccatccctgtcccccatcttggtgctgaaccaacgctaagggcaccttcttagactcacctcatcgatactgcctggtaatccaaagctagaactctcaggaccccaaactccacctcttggattggccctggctgctgccacacacatatccaagagctcagggccagttctggtgggcagcagagacctgctctgccaagttgtccagcagcagagtggccctggcctgggcatcacaagccagtgatgctcctgggaagaccaggtggcaggtcgcagttgggtaccttccattcccaccacacagactctgggcctccccgcaaaatggctccagaattagagtaattatgagatggtgggaaccagagcaactcaggtgcatgatacaaggagaggttgtcatctgggtagggcagagaggagggcttgctcatctgaacaggggtgtatttcattccaggccctcagtctttggcaatggccaccctggtgttggcatattggccccactgtaacttttgggggcttcccggtctagccacaccctcggatggaaagacttgactgcataaagatgtcagttctccctgagttgattgataggcttaatggtcaccctaaaaacacccacatatgcttttcgatggaaccagataagttgacgctaaagttcttatggaaaaatacacacgcaatagctaggaaaacacagggaaagaagagttctgagcagggcctagtcttagccaatattaaaacatactatgaagcctctgatacttaaacagcatggcgctggtacgtaaatagaccaatgcagttaggtggctctttccaagactctggggaaaaaagtagtaaaaagctaaatgcaatcaatcagcaattgaaagctaagtgagagagccagagggcctccttggtggtaaaagagggttgcatttcttgcagccagaaggcagagaaagtgaagaccaagtccagaactgaatcctaagaaatgcaggactgcaaagaaattggtgtgtgtgtgtgtgtgtgtgtgtgtgtgtgtgtttaatttttaaaaagtttttattgagatacaagtcaataccataaagctctcacccttctaaagtgtacaattcagtggtgtgagtatattcataagatttatacttggtgtctattcataagacttatatccagcatattcataactagagccatatcacagatgcattcatcataataattccagacattttcatcaccctaaaaggaaaccctgaaacccattagcagtcattccccattcctccaacccattctctccctaatccctagaaaccaccaatctgctgtgtatttcatctattgccaacatttcatataaatggcatcatacaataaaaaaaaaaaaaaaaaaaaaaaaaaaaaaaaaaaaaaaaaaaaaaaaaaaaaaaaaaaaaacaaaaaaaaaaaaaaagaagagagcgggggcgcgcgcgcagcacgaagacactctctccccgggagggcggcccacacacccgccccgcccaccctttctttgtgtaaaaacagcgggcggccccaaaggagggcgtgttttatatataccgcagacgacacggccggcgcgggttcaacaagcaagcgagcgacggggggagaacaaacacgcgcgcacgggagagcatccttgaggagcacgacgagcaccccctaccactctgcgcgggggggagcggcacaaagagaggggaagcaaacaccacacatacccgacacgctccacacacaccagcgccgcagagagaacaacacaaacaacccatgcgaggcgcggaagacaatagagaggggacaagaaaacacaaaacagcagcagaataatactcagccgaccgcccgacgaacaaacaaccagcggacggcccaccccgacgcacaaccgaaacacacacagccacaccacaatatcacaatcaactccacacagagggcgacgcagcgacaatacacaccaaaaaacaaccacgacgtgcgcaccgagcactcatagaccaaagcaacacggccgaccgcacacccggcagtcacaccctccacagacccagagcgcgaaacccacacctgagcagcagtaagagaggaagagagaggcagacggaacggaaggcaggcgacggagccgaaggagcggcaaagcggagcggcagcgcacaacgagggcaggcggaggagagaccagcgctcgacgcgacggaagggggggaggccgtacggagctgggtgcgatggcaacgaaggagagaagcggagcacacgaaagcgaacaaaaacagccacagagcaaaacggcccagccaagcacccacacagaccgagctcggagagggagaacggcaaaacacgcgaca

SEQ ID NO: 12001 - DNA, 1495 bp, Homo sapiens
cccaagtttggggaagacaggaactgcagcgcccctccccgtttcacgccacgcgcgggaccgaggacctaggacctggccagctgggcgtggttcggagagccgggcgggaaaacgaaaccagaaatccgaaggccgcgccagagccctgcttccccttgcacctgcgccgggcggccatggacttgtacagcaccccggccgctgcgctggacaggttcgtggccagaaggctgcagccgcggaaggagttcgtagagaaggcgcggcgcgctctgggcgccctggccgctgccctgagggagcgcgggggccgcctcggtgctgctgccccgcgggtgctgaaaactgtcaagggaggctcctcgggccggggcacagctctcaagggtggctgtgattctgaacttgtcatcttcctcgactgcttcaagagctatgtggaccagagggcccgccgtgcagagatcctcagtgagatgcgggcatcgctggaatcctggtggcagaacccagtccctggtctgagactcacgtttcctgagcagagcgtgcctggggccctgcagttccgcctgacatccgtagatcttgaggactggatggatgttagcctggtgcctgccttcaatgtcctgggtgaggggttcctagaccattccagggttgggggcaaaagatcattgggaacaacacaggacttccaattctagcccagccaccaacttgctgtttgacctgggccagcctctacccctctctcagcctcagtctggggactaaacatattggacttgtgccagacaaaggcagagaaaccccagttcctcctggatctgtggtcctgctgtcaagatgcttggccctcccacaggcatctgggagtttccctcagccactgcctggagcggttactgctcagcccttccacaaatactcccgaaagctaagccaagtggacatgtggctagcagtaggggcctggggacgaaaccagaattctgcaaaatcttgtattttatgttgaaaacatcaatgtgatttttgtgttctccttcgtaatacacgtatgcttgagttaagataaaaataggcctctgtgtcctcatctgtaaaatgaggataatactaatggggataatagtaatcttatagagttgtcagaagaattaaatgcattaatatatgtaatcaagcttagaagtgtgtctagtgggccaggcgcagtggctcatgcctgtaatcccagctttgggaggccaagttagagactgcttgagcccaggagttcaagatcagccttggcaaaatagcaagatctagtctctacaaataataataattttaaaaaatagccaggtgtagtagtacatgcctccctctgatcccagctactggagaggctgaggtgggaggattgtttgagcccaggcagtggaggctgcagtgaattgtgattttgccactacaatctgtctgagtaagactcttctta

SEQ ID NO: 12002 - DNA, 2104 bp, Homo sapiens
cccaagtttggggaagacaggaactgcagcgcccctccccgtttcacgccacgcgcgggaccgaggacctaggacctggccagctgggcgtggttcggagagccgggcgggaaaacgaaaccagaaatccgaaggccgcgccagagccctgcttccccttgcacctgcgccgggcggccatggacttgtacagcaccccggccgctgcgctggacaggttcgtggccagaaggctgcagccgcggaaggagttcgtagagaaggcgcggcgcgctctgggcgccctggccgctgccctgagggagcgcgggggccgcctcggtgctgctgccccgcgggtgctgaaaactgtcaagggaggctcctcgggccggggcacagctctcaagggtggctgtgattctgaacttgtcatcttcctcgactgcttcaagagctatgtggaccagagggcccgccgtgcagagatcctcagtgagatgcgggcatcgctggaatcctggtggcagaacccagtccctggtctgagactcacgtttcctgagcagagcgtgcctggggccctgcagttccgcctgacatccgtagatcttgaggactggatggatgttagcctggtgcctgccttcaatgtcctgggtcaggccggctccggcgtcaaacccaagccacaagtctactctaccctcctcaacagtggctgccaagggggcgagcatgcggcctgcttcacagagctgcggaggaactttgtgaacattcgcccagccaagttgaagaacctaatcttgctggtgaagcactggtaccaccaggtgtgcctacaggggttgtggaaggagacgctgcccccggtctatgccctggaattgctgaccatcttcgcctgggagcagggctgtaagaaggatgctttcagcctagccgaaggcctccgaactgtcctgggcctgatccaacagcatcagcacctgtgtgttttctggactgtcaactatggcttcgaggaccctgcagttgggcagttcttgcagcggcagcttaagagacccaggcctgtgatcctggacccagctgaccccacatgggacctggggaatggggcagcctggcactgggatttgctagcccaggaggcagcatcctgctatgaccacccatgctttctgagggggatgggggacccagtgcagtcttggaaggggccgggccttccacgtgctggatgctcaggtttgggccaccccatccagctagaccctaaccagaagacccctgaaaacagcaagagcctcaatgctgtgtacccaagagcagggagcaaacctccctcatgcccagctcctggccccactggggcagccagcatcgtcccctctgtgccgggaatggccttggacctgtctcagatccccaccaaggagctggaccgcttcatccaggaccacctgaagccgagcccccagttccaggagcaggtgaaaaaggccatcgacatcatcttgcgctgcctccatgagaactgtgttcacaaggcctcaagagtcagtaaagggggctcatttggccggggcacagacctaagggatggctgtgatgttgaactcatcatcttcctcaactgcttcacggactacaaggaccaggggccccgccgcgcagagatccttgatgagatgcgagcgcacgtagaatcctggtggcaggaccaggtgcccagcctgagccttcagtttcctgagcagaatgtgcctgaggctctgcagttccagctggtgtccacagccctgaagagctggacggatgttagcctgctgcctgccttcgatgctgtggggcagctcagttctggcaccaaaccaaatccccaggtctactcgaggctcctcaccagtggctgccaggagggcgagcataaggcctgattggaagatgtgccaaagagtggtttcttctagaagtttgaatttgtagctacagtttccaagaagaaaaatagtagttggataatttagtaaaataataacatcattttcattttcttacctattcttaactttggtttctcaaaggaagaaaatgagcaggtagcacattctccact

SEQ ID NO: 12003 - DNA, 382 bp, Homo sapiens
catgatctcagctcactgcaacctcctcttcccgggttcaagccattctcctgcctcaggctcccaagtagctgggattataggtgcacaccaccacgcctggctaatttttatatttttagtagagacggggttttgccatgttggccaggctggtctcgaactcctgacctcaggtgatccacctgcctcggcctcccaaagtgctaggtttacaggcatgagtcaccacgcctggctggctgcatttatttcttagggccgctcaaacaaacctgcaaactgagtggcttaaaataaatgtatcctctcatggttgtggaggctgggagtctgaggtcgaggtgtgggtgggcccagctcctcctgagatgctgaggtg

SEQ ID NO: 12004 - DNA, 509 bp, Homo sapiens
atcaagagaaaactcctcaacatgttcatttatctgataaattgaatcacagtacattgaggaaatctagaaatgttacccatgtttctccagaatccagccccacagatttttctgggattctcatcatccatagaaaggatattttaaatgggtgatgagcgagtgcttttgtcctgggttaatcctagatataactctacatgtgtgagttatgagcatagacaactggactaggagtttgaggggagctcaaagtagcacagctgactgagtggctttctacattcactgatggccaactgaatctctttcaattcactgagaaccagatgaatctctgcttctggaacttgaaactaaagttaatccctttccacagatcagcagaatttaccatcaattttacttaaaaaatttatttaaatttaaaacacatttcaaaacaaatgcaggtcccacttttcacttttctaatacctagtttgaccagatttgctgagtagcta

SEQ ID NO: 12005 - DNA, 579 bp, Homo sapiens
ggatgcagaggttgcaatgagccaagatcatgccactgcactccagcctgggcgacagagcaagacctcaaggaaaaaagacaaaaaagaccttgctatttgccaggcaacccttcctacacataccattccctagggcagcaggttgtatcttcaggcagtagtcatagtttaagtcttattttgcaaaatgtccttgaaactaagttccgggtaaaataacgaccagtacacagagagtgaacatactctgttatgtaagataacatcactttatgcatcacacaactagttgactcattctcagcttaatgtggttagttttggtttttgttttcagtttccactgctactaagtcagacattctttttcctatacttctgttttttgctctgttttggcttcctgaatgcaagttcaggtcctaacagtgaagtgaggacagaaaaataaccttggatttgcctattttgtgaagtgatgggaaaggtagtcagttgagagactgttgagaagaagtaaggactgttaggacaactctttcaagaagattgaagactgagggagatgcagaggaa

SEQ ID NO: 12006 - DNA, 362 bp, Homo sapiens
ccttttttaacaatgaatagcataaagctgtccctttaaaaataaaattaaaatataaattttagttgtcccgggagttcttttgtatctgaaacctcagttgtcaagcttggaaatctgtacttttaaaatatcctcaagcgattctgattacacatcaggtttggaagcacttggcataaagaacttcccccacccaattcaaagaaatagtatttaagccctcataatgtgcagtgtggttaagctgtgtctttttccagtctagtctacctcaacactcttgtggacatgatttttgccaaaaatctgagtgagctttgggatgcattctacccccatgagatggctattttatccca

SEQ ID NO: 12007 - DNA, 2081 bp, Homo sapiens
cctaaatcaaatagtagtagcttttaaaaaaattactaaacttaatcaacactatttggaaagggggctagagtcagatattatgatcagttgatggctagctcaaggaatttttagaaatccccttccctacctccccagaatgtaccctacagccaaagtctcagcagcctacagggaaggaggctgaggagcaccctacatcagctcccctcacccattccctgctgcctccaacccctttatgggtggtttcccatttcatctttgatttaggggtgagactgcactgcacaaggctgcctgccagcggaaccgggctgtgtgccagcttctggtggatgcaggagcatctctgagaaagacggactccaagggtaagacacctcaagaaagagcacagcaggctggggacccagacttggctgcttacctagaaagccgtcagaactataaggtcattggccatgaggacctggaaactgctgtttgaccctggtattcgggcaaagaggacatgagcaagcgtatcacatctgccctccctgcaattgggcagctcccctggaagaagctgatggaattcatatatctgtctctctcctgcaagattctacctgagaccatgccactagcttttaagggctaccaagatgtacaacagaacatgatagcccattgagaaggaggcaggatacctggagatttgtggaatacagtacgagttccacaaaatttgatccttattgcttccagcaagtagcatgaacttctgtgttcacctgtataatttattttaaagattcaaaggatgttcgtataaatggcactgctccatcctccccctatgcattggtttttttccctgtaccatacaattctactgtaactacccatcaacttaaagaaaaatattatctcttctctttacattcagtcttggaagaccacaagattgtctgaaggccttctaaaaccttctgaatgtcctgcagaaatataactgtaaaaccacttccatttctaagactaaatatatcaagactatttagtgactctctctgcatgtccccctcacccgccaaccctccgtttcattatataggagctgggaagtgccacatggataatgtcaacttgtgtgctatatctctgaggaatggtgaggtggcatgggagatgtctgtgcttggaggtacctcagagaggtaacccaggggtcagcccaggctgctgggctgtagccaatagccatgcaggactggttcagcttgggctgtctgtacagctccgtactgcctatgtgtagccatctttgccttttgctgcaatagaagatgagcaaaggattaaacagaggcccacagctagtttgcagaaccactcaattttaagtgctgtttaaattgcagagcaaataatcctgtgtgggaactgtggttacaggaaatggagcactctaacaatgtttacttctaaactttgttgaatgataatagaaagcaccctaattgacttggaaaaaaaaaacagcaaaagcaaaagtagcaacatatgtcaacatatgtcactgaaataggaaacagtcattggaatgttgcacagaggctaatagctatggactgttggatacaggatacagtggtgagaggagccccattttaggtctttcttttaggtttttggttttcattactccaagtagcccttgacccaagaacaaaggcttgttgtatgagttccactgccagatttatgggatgcctggatcattcagaaggatgcttcaactattatttgtcaggtccaaaggtcgtacttgataaccccattttctatgtatggggtagtctaatatattattttatctactttatttttcccttttcagaaagtccttagtgcaaaccaccattggaatctagtcagaaatgtctgtcagatagttagaattgtaacatctaaacctgccacggatcgaatggtacttacaggtacctctcttagggactctgtgatccctaaaatatcagaagaaaatgtctgtctttctgtccaaatatctacttgacttgggggta

SEQ ID NO: 12008 - DNA, 5092 bp, Homo sapiens
gggaccatcctggctaacacgcggtaaaacatcatctctactaaaaatacaaaaaaattagccaggcgtggtagcaggcacctgttgtcccagctactcgggaggctgaggcaggagaatggcgtgaacccaggaggcggagctggcagtgagctgagatcacaccactgcaatccagcctgggcgacaaagcaagactctgtctcaaaaaaaaaaaatcaattcaggccaagtgtggtggtgcacacctgtagtcccagctactgggaaagctgaagaagtgggaggatagcttgggcccaggagatggatgctgcgggaaggggctgccatttgctgcccctgccagcggcgcgcggacctgcccgcgctcctgcagccgccgccgccgccgccgccagcccgcccggcccctgcagcggcgccgcctgcgctccctccgcggccgccggagcgggcgccatgaaccccagctcctcggcgggagaggagaaaggggcgacgggcggcagcagcagcagcggaagcggcgccgggagctgctgcctgggcgccgagggcggcgcggacccgcggggcgcagggtcagccgcggcggcgggggccgctgccctggacgagcccgcggccgccggccagaaggagaaggacgaagcgctggaggagaagctgaggaacttaactttccggaagcaggtctcgtacaggaaagcaatctcccgggcaggcctccagcatctggctcctgcacatcccctcagccttcctgtggcaaatggtccagccaaggagcccagagcgactttggactggagtgagaatgccgtgaatggagaacacctgtggctggagaccaacgtctcgggagacctctgctaccttggagaggagaactgccaagtcagatttgcaaaatcagctctcaggaggaagtgtgcagtctgtaaaatcgtcgtccacaccgcctgcattgagcagctagaaaagattaatttcagatgtaaaccaacatttcgagaaggaggctcaaggtcaccaagagaaaattttgtacgtcatcactgggtgcacaggcgtcggcaggaggggaaatgtaagcagtgtggtaagggcttccagcaaaagttctccttccacagtaaagagattgtggctatcagctgttcctggtgcaagcaggcgtttcacaataaggtgacctgcttcatgctgcatcacattgaagaaccctgctccctgggggctcatgctgctgttattgtcccgcccacttggatcattaaggtgaagaaacctcagaactccctgaaggcttcaaatcggaagaagaagagaacaagctttaaaagaaaagccagtaaaagagggatggaacaggaaaacaaaggtcgtccttttgtgataaaacccatctcttctcctctcatgaaacccttgcttgtatttgtgaatcccaagagtggaggcaaccagggaaccaaagtcctgcagatgttcatgtggtacctgaatccacggcaagtctttgatctttctcaggaagggccaaaagatgcgcttgaattgtataggaaagtaccaaatctgcgaattctggcctgtggtggggatggaacggtgggctggatcctttccatcctggatgaactgcagctgagccctcagcctcctgtgggggtccttcctctggggactgggaatgacctggctcgaactctcaactggggagggggctacactgatgaacctgtttctaagatcctgtgtcaagtggaagatgggacagttgtacagctagatcgctggaacctccatgtggaaagaaaccccgacttgcctccagaagaacttgaagatggcgtatgtaagctccctctgaatgttttcaataactacttcagccttggatttgatgcccatgtcacactggagttccatgaatccagagaagcaaatccagagaaattcaacagtcgttttcgaaataaaatgttctatgcaggggcagctttttctgacttcctacagagaagttctagagatctatccaaacatgttaaagttgtttgtgatggaacagatctcaccccaaagattcaggaactgaagttccagtgtatagtatttttaaatatacccagatattgtgctggcacaatgccctggggaaacccaggtgatcaccatgatttcgaacctcagcgtcatgatgatggttatattgaagtcattggatttaccatggcctctttggcagccctgcaagttgggggccatggagagaggctacaccagtgtcgagaagtcatgcttctaacttacaaatccatccccatgcaagtggatggggagccctgtaggttggccccagctatgattcggatctccctgaggaatcaggccaacatggtacagaagagcaagaggagaacatccatgcctttactcaatgatccccagtctgtcccagatcgtctgaggatccgggtgaacaaaatcagtttacaagactatgaaggattccactatgacaaggagaaactccgagaagcttctatttcagactggttaagaaccattgctggggaactagtgcagtcatttggagcgatacctctgggtattctagttgtgcgtggagactgtgatttggagacttgccgtatgtacatagaccgcctacaggaggacctacagtcagtttcttctggctcccagagagttcattaccaggaccatgaaacctccttccccagggctctctcagcacagaggctctctcctcggtggtgcttcctagatgacagatctcaggaacatttgcactttgtgatggagatttcccaagatgagatttttattctggacccagatatggtggtgtcacagccggcggggacacctccgggcatgcctgacctggtggtggaacaagcctcggggatctcagactggtggaatcctgccctgcggaaacgcatgctgagtgacagtgggctggggatgatagctccctattatgaggactcagatctgaaagatctcagccactcccgcgtgctacagtcaccagtctcttcagaagatcatgcaattttgcaggcagtaatagctggtgatcttatgaagctaatagaaagctataaaaatggaggcagtctgctaattcagggaccagaccactgttcactccttcactacgcagctaaaaccggcaacggggagattgtgaaatatatccttgaccacggaccttccgagttattggatatggcagacagtgaaacgggtgagactgcactgcacaaggctgcctgccagcggaaccgggctgtgtgccagcttctggtggatgcaggagcatctctgagaaagacggactccaagggtaagacacctcaagaaagagcacagcaggctggggacccagacttggctgcttacctagaaagccgtcagaactataaggtcattggccatgaggacctggaaactgctgtttgaccctggtattcgggcaaagaggacatgagcaagcgtatcacatctgccctccctgcaattgggcagctcccctggaagaagctgatggaattcatatatctgtctctctcctgcaagattctacctgagaccatgccactagcttttaagggctaccaagatgtacaacagaacatgatagcccattgagaaggaggcaggatacctggagatttgtggaatacagtacgagttccacaaaatttgatccttattgcttccagcaagtagcatgaacttctgtgttcacctgtataatttattttaaagattcaaaggatgttcgtataaatggcactgctccatcctccccctatgcattggtttttttccctgtaccatacaattctactgtaactacccatcaacttaaagaaaaatattatctcttctctttacattcagtcttggaagaccacaagattgtctgaaggccttctaaaaccttctgaatgtcctgcagaaatataactgtaaaaccacttccatttctaagactaaatatatcaagactatttagtgactctctctgcatgtccccctcacccgccaaccctccgtttcattatataggagctgggaagtgccacatggataatgtcaacttgtgtgctatatctctgaggaatggtgaggtggcatgggagatgtctgtgcttggaggtacctcagagaggtaacccaggggtcagcccaggctgctgggctgtagccaatagccatgcaggactggttcagcttgggctgtctgtacagctccgtactgcctatgtgtagccatctttgccttttgctgcaatagaagatgagcaaaggattaaacagaggcccacagctagtttgcagaaccactcaattttaagtgctgtttaaattgcagagcaaataatcctgtgtgggaactgtggttacaggaaatggagcactctaacaatgtttacttctaaactttgttgaatgataatagaaagcaccctaattgacttggaaaaaaaaaacagcaaaagcaaaagtagcaacatatgtcaacatatgtcactgaaataggaaacagtcattggaatgttgcacagaggctaatagctatggactgttggatacaggatacagtggtgagaggagccccattttaggtctttcttttaggtttttggttttcattactccaagtagcccttgacccaagaacaaaggcttgttgtatgagttccactgccagatttatgggatgcctggatcattcagaaggatgcttcaactattatttgtcaggtccaaaggtcgtacttgataaccccattttctatgtatggggtagtctaatatattattttatctactttatttttcccttttcagaaagtccttagtgcaaaccaccattggaatctagtcagaaatgtctgtcagatagttagaattgtaacatctaaacctgccacggatcgaatggtacttacaggtacctctcttagggactctgtgatccctaaaatatcagaagaaaatgtctgtctttctgtccaaatatctacttgacttgggggta

SEQ ID NO: 12009 - DNA, 1152 bp, Homo sapiens
gggaccatcctggctaacacgcggtaaaacatcatctctactaaaaatacaaaaaaattagccaggcgtggtagcaggcacctgttgtcccagctactcgggaggctgaggcaggagaatggcgtgaacccaggaggcggagctggcagtgagctgagatcacaccactgcaatccagcctgggcgacaaagcaagactctgtctcaaaaaaaaaaaatcaattcaggccaagtgtggtggtgcacacctgtagtcccagctactgggaaagctgaagaagtgggaggatagcttgggcccaggagatggatgctgcgggaaggggctgccatttgctgcccctgccagcggcgcgcggacctgcccgcgctcctgcagccgccgccgccgccgccgccagcccgcccggcccctgcagcggcgccgcctgcgctccctccgcggccgccggagcgggcgccatgaaccccagctcctcggcgggagaggagaaaggggcgacgggcggcagcagcagcagcggaagcggcgccgggagctgctgcctgggcgccgagggcggcgcggacccgcggggcgcagggtcagccgcggcggcgggggccgctgccctggacgagcccgcggccgccggccagaaggagaaggacgaagcgctggaggagaagctgaggaacttaactttccggaagcaggtctcgtacaggtaggtgcggggagccggcagccgagacaggtgcgccgcggcgggagacccactcttctacccagcaaggggcgcttccgcggagttgggcacctctctgtttccacgcctctccttccccctttccccctctcctcccggggatgtctgtcttctccccatcctatcattccaggctggagggcagcaacgcctgctttcccctgtggcaggagagaagcactgggtccctaaggtcagagcaacagaaattttgtctgtgtgtgtgtgtgtgtgtgtgtgtgtgtgtgtgtgtgtgtgagagagagagagagagagagagagagaaagagagagagagaaagggttgcagactcagtgatgcttagttttcttaagagaagtcgtcaaagttgcccctaagcaggtgtcatcttcaaccacccttcccccaccttccagattt

SEQ ID NO: 12010 - DNA, 3528 bp, Homo sapiens
gggaccatcctggctaacacgcggtaaaacatcatctctactaaaaatacaaaaaaattagccaggcgtggtagcaggcacctgttgtcccagctactcgggaggctgaggcaggagaatggcgtgaacccaggaggcggagctggcagtgagctgagatcacaccactgcaatccagcctgggcgacaaagcaagactctgtctcaaaaaaaaaaaatcaattcaggccaagtgtggtggtgcacacctgtagtcccagctactgggaaagctgaagaagtgggaggatagcttgggcccaggagatggatgctgcgggaaggggctgccatttgctgcccctgccagcggcgcgcggacctgcccgcgctcctgcagccgccgccgccgccgccgccagcccgcccggcccctgcagcggcgccgcctgcgctccctccgcggccgccggagcgggcgccatgaaccccagctcctcggcgggagaggagaaaggggcgacgggcggcagcagcagcagcggaagcggcgccgggagctgctgcctgggcgccgagggcggcgcggacccgcggggcgcagggtcagccgcggcggcgggggccgctgccctggacgagcccgcggccgccggccagaaggagaaggacgaagcgctggaggagaagctgaggaacttaactttccggaagcaggtctcgtacaggaaagcaatctcccgggcaggcctccagcatctggctcctgcacatcccctcagccttcctgtggcaaatggtccagccaaggagcccagagcgactttggactggagtgagaatgccgtgaatggagaacacctgtggctggagaccaacgtctcgggagacctctgctaccttggagaggagaactgccaagtcagatttgcaaaatcagctctcaggaggaagtgtgcagtctgtaaaatcgtcgtccacaccgcctgcattgagcagctagaaaagattaatttcagatgtaaaccaacatttcgagaaggaggctcaaggtcaccaagagaaaattttgtacgtcatcactgggtgcacaggcgtcggcaggaggggaaatgtaagcagtgtggtaagggcttccagcaaaagttctccttccacagtaaagagattgtggctatcagctgttcctggtgcaagcaggcgtttcacaataaggtgacctgcttcatgctgcatcacattgaagaaccctgctccctgggggctcatgctgctgttattgtcccgcccacttggatcattaaggtgaagaaacctcagaactccctgaaggcttcaaatcggaagaagaagagaacaagctttaaaagaaaagccagtaaaagagggatggaacaggaaaacaaaggtcgtccttttgtgataaaacccatctcttctcctctcatgaaacccttgcttgtatttgtgaatcccaagagtggaggcaaccagggaaccaaagtcctgcagatgttcatgtggtacctgaatccacggcaagtctttgatctttctcaggaagggccaaaagatgcgcttgaattgtataggaaagtaccaaatctgcgaattctggcctgtggtggggatggaacggtgggctggatcctttccatcctggatgaactgcagctgagccctcagcctcctgtgggggtccttcctctggggactgggaatgacctggctcgaactctcaactggggagggggctacactgatgaacctgtttctaagatcctgtgtcaagtggaagatgggacagttgtacagctagatcgctggaacctccatgtggaaagaaaccccgacttgcctccagaagaacttgaagatggcgtatgtaagctccctctgaatgttttcaataactacttcagccttggatttgatgcccatgtcacactggagttccatgaatccagagaagcaaatccagagaaattcaacagtcgttttcgaaataaaatgttctatgcaggggcagctttttctgacttcctacagagaagttctagagatctatccaaacatgttaaagttgtttgtgatggaacagatctcaccccaaagattcaggaactgaagttccagtgtatagtatttttaaatatacccagatattgtgctggcacaatgccctggggaaacccaggtgatcaccatgatttcgaacctcagcgtcatgatgatggttatattgaagtcattggatttaccatggcctctttggcagccctgcaagttgggggccatggagagaggctacaccagtgtcgagaagtcatgcttctaacttacaaatccatccccatgcaagtggatggggagccctgtaggttggccccagctatgattcggatctccctgaggaatcaggccaacatggtacagaagagcaagaggagaacatccatgcctttactcaatgatccccagtctgtcccagatcgtctgaggatccgggtgaacaaaatcagtttacaagactatgaaggattccactatgacaaggagaaactccgagaagcttctatttcagactggttaagaaccattgctggggaactagtgcagtcatttggagcgatacctctgggtattctagttgtgcgtggagactgtgatttggagacttgccgtatgtacatagaccgcctacaggaggacctacagtcagtttcttctggctcccagagagttcattaccaggaccatgaaacctccttccccagggctctctcagcacagaggctctctcctcggtggtgcttcctagatgacagatctcaggaacatttgcactttgtgatggagatttcccaagatgagatttttattctggacccagatatggtggtgtcacagccggcggggacacctccgggcatgcctgacctggtggtggaacaagcctcggggatctcagactggtggaatcctgccctgcggaaacgcatgctgagtgacagtgggctggggatgatagctccctattatgaggactcagatctgaaagatctcagccactcccgcgtgctacagtcaccagtctcttcagaagatcatgcaattttgcaggcagtaatagctggtgatcttatgaagctaatagaaagctataaaaatggaggcagtctgctaattcagggaccagaccactgttcactccttcactacgcagctaaaaccggcaacggggagattgtgaaatatatccttgaccacggaccttccgagttattggatatggcagacagtgaaacgggtgagactgcactgcacaaggctgcctgccagcggaaccgggctgtgtgccagcttctggtggatgcaggagcatctctgagaaagacggactccaagcaggtctccttcctgccacctagtgaagaagttgcctttcttccctttgccttccagcatgattgtaaagcttcctgaggcctccccagccatgctgaactgtgagtcaattaaacctcattataaattatccagtctcaa

SEQ ID NO: 12011 - DNA, 4316 bp, Homo sapiens
ggataacctccagagagaaggctttgtaaactggaagtgactggcgcgagtggctttcacttatacacaaacacagcgttttgtcatctgggagtgctgaaaggattgttcattgctgctggaggaagatcatggactgtcgcgggaaactgaagtggttgagtatccactagtcgtggatgagggcagtgacttcgcagttttttgcgaattacacatctctttgattatgttgtgactagttttgttagatagtcatttagtgtttgggatacctgttaagccctttgtccagggactgtggttggatttatgaattatttggacggttgtccacttgaaagaactgacagtagcttcataacaatgttacaaatctcgttctaagattaagctgttgaacctatatttgccattagcgcttaatttttgaagtattatttttatgaatcaagccctggaaaaggacaagatatttgaatgaaatagcacccataatggagaacttcacagttgctactcctgtgataggtttatcttagtttcattgtggtataaatggaatagcaggtgttgtcaggtacaaggtttgtagcttgccaatatgttcattaccaacactgcagattcccattgagttggtgggggttttgttacctttgttttttttctcagcaaaataattctataactttttgtttgtgacaagaaatggactttcagtttacttaagattaatacttcttgaatgataaaatcattttgccatgttagaagacatttccgaagaagacatttgggaatacaaatctaaaagaaaaccaaaacgagttgatccaaataatggctctaaaaatattctaaaatctgttgaaaaagcaacagatggaaaataccagtcaaaacggagtagaaacagaaaaagagccgcagaagctaaagaggtgaaggaccatgaagtgccccttggaaatgcaggttgtcagacttctgttgcttctagtcagaattcaagttgtggagatggtattcagcagacccaagacaaggaaactactccaggaaaactctgtagaactcaaaaaagccaacacgtgtccccaaagatacgtccagtttatgatggatactgtccaaattgccagatgcctttttcctcattgatagggcagacacctcgatggcatgtttttgaatgtttggattctccaccacgctctgaaacagagtgtcctgatggtcttctgtgtacctcaaccattccttttcattacaagagatacactcacttcctgctagctcaaagcagggctggtgatcatccttttagcagcccatcacctgcgtcaggtggcagtttcagtgagactaagtcaggcgtcctttgtagccttgaggaaagatggtcttcgtatcagaaccaaactgataactcggtttcaaatgatcccttattgatgacacagtattttaaaaagtctccgtctctgactgaagccagtgaaaagatttctactcatatccaaacatcccaacaagctctacaatttacagattttgttgagaatgacaaactagtgggagttgctttgcgtcttgcaaacaactcagaacacataaatttgccattgccagaaaatgacttcagtgactgtgaaatctcctattctccacttcaaagtgatgaagacactcatgatatcgatgaaaaaccggatgattcacaagaacaactgttttttaccgaaagctcaaaagatggcagcctcgaagaagatgatgacagctgtggtttttttaaaaaacgacatggtcccttactgaaggaccaggatgagagctgccccaaagtgaacagcttcttaactcgggataagtatgatgaaggattgtatagattcaatagtctaaatgatttgtctcaacctatttctcaaaataatgagagtactttgccttatgatctggcatgtactggtggtgattttgtgttgtttccacctgcattggcagggaagcttgctgcttctgttcatcaggcaactaaagcaaaacctgatgagccagaatttcactcagctcaatcaaataaacagaaacaggtaattgaagaatcatctgtttacaatcaagtttctcttccgttagttaagagtttaatgttgaaaccttttgaaagtcaggtagaagggtatctttcttcccaaccaacccaaaatacaattagaaaattatcaagtgagaacttgaatgctaagaataatactaactcagcatgtttctgcagaaaggcattagagggtgtgccagttggtaaagctacaattttaaatacagaaaacttgtctagtacacctgctccgaagtatttgaaaatattgccttctggtcttaagtataatgcaagacatccttctaccaaggtaatgaagcaaatggatataggtgtgtattttggactacctcccaaaagaaaggaagagaaattgctaggggaaagtgcattagaagggataaacttaaatccagttccaagtcctaatcaaaagaggtcctcgcagtgcaagaggaaagcagaaaaatctttaagtgatttagaatttgatgcaagtactttacatgagagtcagctttctgtggaactttctagtgagaggtcacagcgtcaaaaaaagagatgtagaaagtcaaattcactgcaggaaggagcgtgtcagaagagatcagatcaccttattaatacagaatctgaagcagtcaatttaagtaaagtcaaagtcttcacaaaatcagctcatggtgggctgcaaaggggcaacaagaaaatcccagagtcatctaatgtaggaggatcaagaaaaaagacatgtccattctataagaaaatacctggaaccggctttacagttgatgcctttcagtatggcgtggttgaaggttgcacagcctattttctcacacattttcattctgatcattatgctggattgtctaaacacttcacatttccagtttattgtagtgagataactggcaatttgttgaagaacaagcttcatgtgcaagaacaatatattcacccattgccactggacactgaatgtattgtgaatggtgtcaaagttgttttgcttgatgccaatcactgtccaggtgctgtcatgatcctcttttatcttcctaatggtactgtcatattacacacgggagacttcagagcagatcccagcatggaacgttctcttcttgcggaccagaaagtccatatgctgtacttagataccacatattgtagcccagaatacacctttccatctcagcaagaggttatccggtttgccatcaacactgcctttgaggctgtaactctaaacccacatgctcttgttgtctgtggcacttactctattggaaaagagaaagtcttcctagccattgctgatgttttaggttcaaaagtgggcatgtcccaggaaaaatataaaactctacagtgcctcaatataccagaaattaattcactcatcactaccgacatgtgcagttcattggttcaccttctcccaatgatgcaaattaattttaagggcttacagagtcatttgaagaagtgtggtgggaaatacaatcagattttggcatttcgacctacaggatggacacactctaacaagttcactagaatagcagatgttattccccagaccaaaggaaacatttcaatatatggaattccttacagtgaacacagcagctacctagaaatgaagcgctttgtccagtggctgaagccccagaaaatcatacctactgtaaatgtgggcacctggaaatctaggagcacaatggagaaatattttagagagtggaaattggaagctggatattgatgatacctccgaggattcagtagtagttaagttccttggatgtagcttgttagtagttaaatctatagaaatgtgaaatacactttgtgtggaaaaacctcatgaagattgttcagatactttattttctcatttatgtttgaacaacatgttcgtggtgctgaatgcctctcagcatcatcaaggataactgaaactgggtctccctgggacccttaatttcttgtcccctgccctccatgggcagttatattctgcatcaagccttagaagaggaagcaaaggcagattcagggaccaaaaggattaatgataattaataaagtagtttgaagcattatatatataagtaattatgtgtctttaaaattatgagatgaaacttttatatgacgtgtatacttaaataaaattaatataaaattt

SEQ ID NO: 12012 - DNA, 4254 bp, Homo sapiens
gcactggcagcgggaacttgttcccgccaagaccctaaagggattgttcattgctgctggaggaagatcatggactgtcgcgggaaactgaagtggttgagtatccactagtcgtggatgagggcagtgacttcgcagttttttgcgaattacacatctctttgattatgttgtgactagttttgttagatagtcatttagtgtttgggatacctgttaagccctttgtccagggactgtggttggatttatgaattatttggacggttgtccacttgaaagaactgacagtagcttcataacaatgttacaaatctcgttctaagattaagctgttgaacctatatttgccattagcgcttaatttttgaagtattatttttatgaatcaagccctggaaaaggacaagatatttgaatgaaatagcacccataatggagaacttcacagttgctactcctgtgataggtttatcttagtttcattgtggtataaatggaatagcaggtgttgtcaggtacaaggtttgtagcttgccaatatgttcattaccaacactgcagattcccattgagttggtgggggttttgttacctttgttttttttctcagcaaaataattctataactttttgtttgtgacaagaaatggactttcagtttacttaagattaatacttcttgaatgataaaatcattttgccatgttagaagacatttccgaagaagacatttgggaatacaaatctaaaagaaaaccaaaacgagttgatccaaataatggctctaaaaatattctaaaatctgttgaaaaagcaacagatggaaaataccagtcaaaacggagtagaaacagaaaaagagccgcagaagctaaagaggtgaaggaccatgaagtgccccttggaaatgcaggttgtcagacttctgttgcttctagtcagaattcaagttgtggagatggtattcagcagacccaagacaaggaaactactccaggaaaactctgtagaactcaaaaaagccaacacgtgtccccaaagatacgtccagtttatgatggatactgtccaaattgccagatgcctttttcctcattgatagggcagacacctcgatggcatgtttttgaatgtttggattctccaccacgctctgaaacagagtgtcctgatggtcttctgtgtacctcaaccattccttttcattacaagagatacactcacttcctgctagctcaaagcagggctggtgatcatccttttagcagcccatcacctgcgtcaggtggcagtttcagtgagactaagtcaggcgtcctttgtagccttgaggaaagatggtcttcgtatcagaaccaaactgataactcggtttcaaatgatcccttattgatgacacagtattttaaaaagtctccgtctctgactgaagccagtgaaaagatttctactcatatccaaacatcccaacaagctctacaatttacagattttgttgagaatgacaaactagtgggagttgctttgcgtcttgcaaacaactcagaacacataaatttgccattgccagaaaatgacttcagtgactgtgaaatctcctattctccacttcaaagtgatgaagacactcatgatatcgatgaaaaaccggatgattcacaagaacaactgttttttaccgaaagctcaaaagatggcagcctcgaagaagatgatgacagctgtggtttttttaaaaaacgacatggtcccttactgaaggaccaggatgagagctgccccaaagtgaacagcttcttaactcgggataagtatgatgaaggattgtatagattcaatagtctaaatgatttgtctcaacctatttctcaaaataatgagagtactttgccttatgatctggcatgtactggtggtgattttgtgttgtttccacctgcattggcagggaagcttgctgcttctgttcatcaggcaactaaagcaaaacctgatgagccagaatttcactcagctcaatcaaataaacagaaacaggtaattgaagaatcatctgtttacaatcaagtttctcttccgttagttaagagtttaatgttgaaaccttttgaaagtcaggtagaagggtatctttcttcccaaccaacccaaaatacaattagaaaattatcaagtgagaacttgaatgctaagaataatactaactcagcatgtttctgcagaaaggcattagagggtgtgccagttggtaaagctacaattttaaatacagaaaacttgtctagtacacctgctccgaagtatttgaaaatattgccttctggtcttaagtataatgcaagacatccttctaccaaggtaatgaagcaaatggatataggtgtgtattttggactacctcccaaaagaaaggaagagaaattgctaggggaaagtgcattagaagggataaacttaaatccagttccaagtcctaatcaaaagaggtcctcgcagtgcaagaggaaagcagaaaaatctttaagtgatttagaatttgatgcaagtactttacatgagagtcagctttctgtggaactttctagtgagaggtcacagcgtcaaaaaaagagatgtagaaagtcaaattcactgcaggaaggagcgtgtcagaagagatcagatcaccttattaatacagaatctgaagcagtcaatttaagtaaagtcaaagtcttcacaaaatcagctcatggtgggctgcaaaggggcaacaagaaaatcccagagtcatctaatgtaggaggatcaagaaaaaagacatgtccattctataagaaaatacctggaaccggctttacagttgatgcctttcagtatggcgtggttgaaggttgcacagcctattttctcacacattttcattctgatcattatgctggattgtctaaacacttcacatttccagtttattgtagtgagataactggcaatttgttgaagaacaagcttcatgtgcaagaacaatatattcacccattgccactggacactgaatgtattgtgaatggtgtcaaagttgttttgcttgatgccaatcactgtccaggtgctgtcatgatcctcttttatcttcctaatggtactgtcatattacacacgggagacttcagagcagatcccagcatggaacgttctcttcttgcggaccagaaagtccatatgctgtacttagataccacatattgtagcccagaatacacctttccatctcagcaagaggttatccggtttgccatcaacactgcctttgaggctgtaactctaaacccacatgctcttgttgtctgtggcacttactctattggaaaagagaaagtcttcctagccattgctgatgttttaggttcaaaagtgggcatgtcccaggaaaaatataaaactctacagtgcctcaatataccagaaattaattcactcatcactaccgacatgtgcagttcattggttcaccttctcccaatgatgcaaattaattttaagggcttacagagtcatttgaagaagtgtggtgggaaatacaatcagattttggcatttcgacctacaggatggacacactctaacaagttcactagaatagcagatgttattccccagaccaaaggaaacatttcaatatatggaattccttacagtgaacacagcagctacctagaaatgaagcgctttgtccagtggctgaagccccagaaaatcatacctactgtaaatgtgggcacctggaaatctaggagcacaatggagaaatattttagagagtggaaattggaagctggatattgatgatacctccgaggattcagtagtagttaagttccttggatgtagcttgttagtagttaaatctatagaaatgtgaaatacactttgtgtggaaaaacctcatgaagattgttcagatactttattttctcatttatgtttgaacaacatgttcgtggtgctgaatgcctctcagcatcatcaaggataactgaaactgggtctccctgggacccttaatttcttgtcccctgccctccatgggcagttatattctgcatcaagccttagaagaggaagcaaaggcagattcagggaccaaaaggattaatgataattaataaagtagtttgaagcattatatatataagtaattatgtgtctttaaaattatgagatgaaacttttatatgacgtgtatacttaaataaaattaatataaaattt

SEQ ID NO: 12013 - DNA, 4467 bp, Homo sapiens
ggactctgagggctttttggagctcgctatgcttaacctggagatgattaaggccccgcttcctggcctcccagcctctaatgccaaaagataagggagaggctggcgtgtgaccccgttttgagtcaggtggacagagggctggccaccttcggaaccatgggtgcaatacggagtcagacctcaatacaagcccactctttcacatatttgaacttttttcacatatcaactttttttgttcactgtgcagggattgttcattgctgctggaggaagatcatggactgtcgcgggaaactgaagtggttgagtatccactagtcgtggatgagggcagtgacttcgcagttttttgcgaattacacatctctttgattatgttgtgactagttttgttagatagtcatttagtgtttgggatacctgttaagccctttgtccagggactgtggttggatttatgaattatttggacggttgtccacttgaaagaactgacagtagcttcataacaatgttacaaatctcgttctaagattaagctgttgaacctatatttgccattagcgcttaatttttgaagtattatttttatgaatcaagccctggaaaaggacaagatatttgaatgaaatagcacccataatggagaacttcacagttgctactcctgtgataggtttatcttagtttcattgtggtataaatggaatagcaggtgttgtcaggtacaaggtttgtagcttgccaatatgttcattaccaacactgcagattcccattgagttggtgggggttttgttacctttgttttttttctcagcaaaataattctataactttttgtttgtgacaagaaatggactttcagtttacttaagattaatacttcttgaatgataaaatcattttgccatgttagaagacatttccgaagaagacatttgggaatacaaatctaaaagaaaaccaaaacgagttgatccaaataatggctctaaaaatattctaaaatctgttgaaaaagcaacagatggaaaataccagtcaaaacggagtagaaacagaaaaagagccgcagaagctaaagaggtgaaggaccatgaagtgccccttggaaatgcaggttgtcagacttctgttgcttctagtcagaattcaagttgtggagatggtattcagcagacccaagacaaggaaactactccaggaaaactctgtagaactcaaaaaagccaacacgtgtccccaaagatacgtccagtttatgatggatactgtccaaattgccagatgcctttttcctcattgatagggcagacacctcgatggcatgtttttgaatgtttggattctccaccacgctctgaaacagagtgtcctgatggtcttctgtgtacctcaaccattccttttcattacaagagatacactcacttcctgctagctcaaagcagggctggtgatcatccttttagcagcccatcacctgcgtcaggtggcagtttcagtgagactaagtcaggcgtcctttgtagccttgaggaaagatggtcttcgtatcagaaccaaactgataactcggtttcaaatgatcccttattgatgacacagtattttaaaaagtctccgtctctgactgaagccagtgaaaagatttctactcatatccaaacatcccaacaagctctacaatttacagattttgttgagaatgacaaactagtgggagttgctttgcgtcttgcaaacaactcagaacacataaatttgccattgccagaaaatgacttcagtgactgtgaaatctcctattctccacttcaaagtgatgaagacactcatgatatcgatgaaaaaccggatgattcacaagaacaactgttttttaccgaaagctcaaaagatggcagcctcgaagaagatgatgacagctgtggtttttttaaaaaacgacatggtcccttactgaaggaccaggatgagagctgccccaaagtgaacagcttcttaactcgggataagtatgatgaaggattgtatagattcaatagtctaaatgatttgtctcaacctatttctcaaaataatgagagtactttgccttatgatctggcatgtactggtggtgattttgtgttgtttccacctgcattggcagggaagcttgctgcttctgttcatcaggcaactaaagcaaaacctgatgagccagaatttcactcagctcaatcaaataaacagaaacaggtaattgaagaatcatctgtttacaatcaagtttctcttccgttagttaagagtttaatgttgaaaccttttgaaagtcaggtagaagggtatctttcttcccaaccaacccaaaatacaattagaaaattatcaagtgagaacttgaatgctaagaataatactaactcagcatgtttctgcagaaaggcattagagggtgtgccagttggtaaagctacaattttaaatacagaaaacttgtctagtacacctgctccgaagtatttgaaaatattgccttctggtcttaagtataatgcaagacatccttctaccaaggtaatgaagcaaatggatataggtgtgtattttggactacctcccaaaagaaaggaagagaaattgctaggggaaagtgcattagaagggataaacttaaatccagttccaagtcctaatcaaaagaggtcctcgcagtgcaagaggaaagcagaaaaatctttaagtgatttagaatttgatgcaagtactttacatgagagtcagctttctgtggaactttctagtgagaggtcacagcgtcaaaaaaagagatgtagaaagtcaaattcactgcaggaaggagcgtgtcagaagagatcagatcaccttattaatacagaatctgaagcagtcaatttaagtaaagtcaaagtcttcacaaaatcagctcatggtgggctgcaaaggggcaacaagaaaatcccagagtcatctaatgtaggaggatcaagaaaaaagacatgtccattctataagaaaatacctggaaccggctttacagttgatgcctttcagtatggcgtggttgaaggttgcacagcctattttctcacacattttcattctgatcattatgctggattgtctaaacacttcacatttccagtttattgtagtgagataactggcaatttgttgaagaacaagcttcatgtgcaagaacaatatattcacccattgccactggacactgaatgtattgtgaatggtgtcaaagttgttttgcttgatgccaatcactgtccaggtgctgtcatgatcctcttttatcttcctaatggtactgtcatattacacacgggagacttcagagcagatcccagcatggaacgttctcttcttgcggaccagaaagtccatatgctgtacttagataccacatattgtagcccagaatacacctttccatctcagcaagaggttatccggtttgccatcaacactgcctttgaggctgtaactctaaacccacatgctcttgttgtctgtggcacttactctattggaaaagagaaagtcttcctagccattgctgatgttttaggttcaaaagtgggcatgtcccaggaaaaatataaaactctacagtgcctcaatataccagaaattaattcactcatcactaccgacatgtgcagttcattggttcaccttctcccaatgatgcaaattaattttaagggcttacagagtcatttgaagaagtgtggtgggaaatacaatcagattttggcatttcgacctacaggatggacacactctaacaagttcactagaatagcagatgttattccccagaccaaaggaaacatttcaatatatggaattccttacagtgaacacagcagctacctagaaatgaagcgctttgtccagtggctgaagccccagaaaatcatacctactgtaaatgtgggcacctggaaatctaggagcacaatggagaaatattttagagagtggaaattggaagctggatattgatgatacctccgaggattcagtagtagttaagttccttggatgtagcttgttagtagttaaatctatagaaatgtgaaatacactttgtgtggaaaaacctcatgaagattgttcagatactttattttctcatttatgtttgaacaacatgttcgtggtgctgaatgcctctcagcatcatcaaggataactgaaactgggtctccctgggacccttaatttcttgtcccctgccctccatgggcagttatattctgcatcaagccttagaagaggaagcaaaggcagattcagggaccaaaaggattaatgataattaataaagtagtttgaagcattatatatataagtaattatgtgtctttaaaattatgagatgaaacttttatatgacgtgtatacttaaataaaattaatataaaattt

SEQ ID NO: 12014 - DNA, 781 bp, Homo sapiens
cagctcagaggaactcacttgagaatgctggtttttatcagcaccccagccagcagagtgaggtctttggatcttgagctgcagtctctgagttgggcctccttcctcttttgtttcatcacttcttcacgaacgatcctggatgcaaatgaagaatttaagtccatgtcgggcaccatccagctgggccggaagcttatcacaaaatacaatcgccgggagctgacggacaagcttctcatcttccttgcgctagccctgtttcttgctacggtcctctatattgtgaaaaagcggctctttccatttttgtgagatcccaaaggtgccagttctggccctttcagctcctgtttcaggatctgtcctggttcctgagctctaggctgctaagctgagccacacacccctccgtttgcaccagttgcctgcaggttggatggaacacagtgccccacttttctgcaagtagctggcttgtaaagggtgaacagagccatgggaggaaggtctggcattgggatgccgccctggggacatacgaaccgcctccttccaccattgtgcactatgggaggccgctgctgcgtggagcacttaaagtccagcctccaggaccggatgcccctcctgtctcccgctcccatcgtgcccttaaatgccagatctggtggagggaagagagaagaggtaggaagaaaggtgatgaaaactcctggtcattccttgaataaacttgattttatttaatagaataaaatgtatttgattttgtaagata

SEQ ID NO: 12015 - DNA, 1182 bp, Homo sapiens
  misc_feature (1)..(1): n is a, c, g, or t
  misc_feature (3)..(4): n is a, c, g, or t
ngnngctgcccgtagccggcgtccccaacatggcggctccccaagacgtccacgtccggatctgtaaccaagagattgtcaaatttgacctggaggtgaaggcgcttattcaggatatccgtgattgttcaggacccttaagtgctcttactgaactgaatactaaagtaaaagagaaatttcaacagttgcgtcacagaatacaggacctggagcagttggctaaagagcaagacaaagaatcagagaaacaacttctactccaggaagtggagaatcacaaaaagcagatgctcagcaatcaggcctcatggaggaaagctaatctcacctgcaaaattgcaatcgacaatctagagaaagcagaacttcttcagggaggagatctcttaaggcaaaggaaaaccaccaaagagagcctggcccagacatccagtaccatcactgagagcctcatggggatcagcaggatgatggcccagcaggtccagcagagcgaggaggccatgcagtctctagtcacttcttcacgaacgatcctggatgcaaatgaagaatttaagtccatgtcgggcaccatccagctgggccggaagcttatcacaaaatacaatcgccgggagctgacggacaagcttctcatcttccttgcgctagccctgtttcttgctacggtcctctatattgtgaaaaagcggctctttccatttttgtgagatcccaaaggtgccagttctggccctttcagctcctgtttcaggatctgtcctggttcctgagctctaggctgctaagctgagccacacacccctccgtttgcaccagttgcctgcaggttggatggaacacagtgccccacttttctgcaagtagctggcttgtaaagggtgaacagagccatgggaggaaggtctggcattgggatgccgccctggggacatacgaaccgcctccttccaccattgtgcactatgggaggccgctgctgcgtggagcacttaaagtccagcctccaggaccggatgcccctcctgtctcccgctcccatcgtgcccttaaatgccagatctggtggagggaagagagaagaggtaggaagaaaggtgatgaaaactcctggtcattccttgaataaacttgattttatttaatagaataaaatgtatttgattttgtaagata

SEQ ID NO: 12016 - DNA, 1182 bp, Homo sapiens
  misc_feature (1)..(1): n is a, c, g, or t
  misc_feature (3)..(4): n is a, c, g, or t
ngnngctgcccgtagccggcgtccccaacatggcggctccccaagacgtccacgtccggatctgtaaccaagagattgtcaaatttgacctggaggtgaaggcgcttattcaggatatccgtgattgttcaggacccttaagtgctcttactgaactgaatactaaagtaaaagagaaatttcaacagttgcgtcacagaatacagccagttctctatcaaagggcatttatttggactgcttccacatttttttttaagctaacttattccctgacagacttttcttcaactcagcatgacttcaactctccaactacacctgttaccttcagtgacctggagcagttggctaaagagcaagacaaagaatcagagaaacaacttctactccaggaagtggagaatcacaaaaagcagatgctcaggaaaaccaccaaagagagcctggcccagacatccagtaccatcactgagagcctcatggggatcagcaggatgatggcccagcaggtccagcagagcgaggaggccatgcagtctctagtcacttcttcacgaacgatcctggatgcaaatgaagaatttaagtccatgtcgggcaccatccagctgggccggaagcttatcacaaaatacaatcgccgggagctgacggacaagcttctcatcttccttgcgctagccctgtttcttgctacggtcctctatattgtgaaaaagcggctctttccatttttgtgagatcccaaaggtgccagttctggccctttcagctcctgtttcaggatctgtcctggttcctgagctctaggctgctaagctgagccacacacccctccgtttgcaccagttgcctgcaggttggatggaacacagtgccccacttttctgcaagtagctggcttgtaaagggtgaacagagccatgggaggaaggtctggcattgggatgccgccctggggacatacgaaccgcctccttccaccattgtgcactatgggaggccgctgctgcgtggagcacttaaagtccagcctccaggaccggatgcccctcctgtctcccgctcccatcgtgcccttaaatgccagatctggtggagggaagagagaagaggtaggaagaaaggtgatgaaaactcctggtcattccttgaataaacttgattttatttaataga

SEQ ID NO: 12017 - DNA, 1155 bp, Homo sapiens
  misc_feature (1)..(1): n is a, c, g, or t
  misc_feature (3)..(4): n is a, c, g, or t
ngnngctgcccgtagccggcgtccccaacatggcggctccccaagacgtccacgtccggatctgtaaccaagagattgtcaaatttgacctggaggtgaaggcgcttattcaggatatccgtgattgttcaggacccttaagtgctcttactgaactgaatactaaagtaaaagagaaatttcaacagttgcgtcacagaatacaggacctggagcagttggctaaagagcaagacaaagaatcagagaaacaacttctactccaggaagtggagaatcacaaaaagcagatgctcagcaatcaggcctcatggaggaaagctaatctcacctgcaaaattgcaatcgacaatctagagaaagcagaacttcttcagggaggagatctcttaaggcaaaggaaaaccaccaaagagagcctggcccagacatccagtaccatcactgagagcctcatggggatcagcaggatgatggcccagcaggtccagcagagcgaggaggccatgcagtctctagtcacttcttcacgaacgatcctggatgcaaatgaagaatttaagtccatgtcgggcaccatccagctgggccggaagcttatcacaaaatacaatcgccgggagctgacggacaagcttctcatcttccttgcgctagccctgtttcttgctacggtcctctatattgtgaaaaagcggctctttccatttttgtgagatcccaaaggtgccagttctggccctttcagctcctgtttcaggatctgtcctggttcctgagctctaggctgctaagctgagccacacacccctccgtttgcaccagttgcctgcaggttggatggaacacagtgccccacttttctgcaagtagctggcttgtaaagggtgaacagagccatgggaggaaggtctggcattgggatgccgccctggggacatacgaaccgcctccttccaccattgtgcactatgggaggccgctgctgcgtggagcacttaaagtccagcctccaggaccggatgcccctcctgtctcccgctcccatcgtgcccttaaatgccagatctggtggagggaagagagaagaggtaggaagaaaggtgatgaaaactcctggtcattccttgaataaacttgattttatttaataga

SEQ ID NO: 12018 - DNA, 1080 bp, Homo sapiens
  misc_feature (1)..(1): n is a, c, g, or t
  misc_feature (3)..(4): n is a, c, g, or t
ngnngctgcccgtagccggcgtccccaacatggcggctccccaagacgtccacgtccggatctgtaaccaagagattgtcaaatttgacctggaggtgaaggcgcttattcaggatatccgtgattgttcaggacccttaagtgctcttactgaactgaatactaaagtaaaagagaaatttcaacagttgcgtcacagaatacaggacctggagcagttggctaaagagcaagacaaagaatcagagaaacaacttctactccaggaagtggagaatcacaaaaagcagatgctcaggaaaaccaccaaagagagcctggcccagacatccagtaccatcactgagagcctcatggggatcagcaggatgatggcccagcaggtccagcagagcgaggaggccatgcagtctctagtcacttcttcacgaacgatcctggatgcaaatgaagaatttaagtccatgtcgggcaccatccagctgggccggaagcttatcacaaaatacaatcgccgggagctgacggacaagcttctcatcttccttgcgctagccctgtttcttgctacggtcctctatattgtgaaaaagcggctctttccatttttgtgagatcccaaaggtgccagttctggccctttcagctcctgtttcaggatctgtcctggttcctgagctctaggctgctaagctgagccacacacccctccgtttgcaccagttgcctgcaggttggatggaacacagtgccccacttttctgcaagtagctggcttgtaaagggtgaacagagccatgggaggaaggtctggcattgggatgccgccctggggacatacgaaccgcctccttccaccattgtgcactatgggaggccgctgctgcgtggagcacttaaagtccagcctccaggaccggatgcccctcctgtctcccgctcccatcgtgcccttaaatgccagatctggtggagggaagagagaagaggtaggaagaaaggtgatgaaaactcctggtcattccttgaataaacttgattttatttaatagaataaaatgtatttgattttgtaagata

SEQ ID NO: 12019 - DNA, 1042 bp, Homo sapiens
  misc_feature (3)..(3): n is a, c, g, or t
cangctgtacccgtccggattcccgcgataaaagagaaatttcaacagttgcgtcacagaatacaggacctggagcagttggctaaagagcaagacaaagaatcagagaaacaacttctactccaggaagtggagaatcacaaaaagcagatgctcagcaatcaggcctcatggaggaaagctaatctcacctgcaaaattgcaatcgacaatctagagaaagcagaacttcttcagggaggagatctcttaaggcaaaggaaaaccaccaaagagagcctggcccagacatccagtaccatcactgagagcctcatggggatcagcaggatgatggcccagcaggtccagcagagcgaggaggccatgcagtctctagtcacttcttcacgaacgatcctggatgcaaatgaagaatttaagtccatgtcgggcaccatccagctgggccggaagcttatcacaaaatacaatcgccgggagctgacggacaagcttctcatcttccttgcgctagccctgtttcttgctacggtcctctatattgtgaaaaagcggctctttccatttttgtgagatcccaaaggtgccagttctggccctttcagctcctgtttcaggatctgtcctggttcctgagctctaggctgctaagctgagccacacacccctccgtttgcaccagttgcctgcaggttggatggaacacagtgccccacttttctgcaagtagctggcttgtaaagggtgaacagagccatgggaggaaggtctggcattgggatgccgccctggggacatacgaaccgcctccttccaccattgtgcactatgggaggccgctgctgcgtggagcacttaaagtccagcctccaggaccggatgcccctcctgtctcccgctcccatcgtgcccttaaatgccagatctggtggagggaagagagaagaggtaggaagaaaggtgatgaaaactcctggtcattccttgaataaacttgattttatttaatagaataaaatgtatttgattttgtaagata

SEQ ID NO: 12020 - DNA, 1133 bp, Homo sapiens
  misc_feature (1)..(1): n is a, c, g, or t
  misc_feature (3)..(4): n is a, c, g, or t
ngnngctgcccgtagccggcgtccccaacatggcggctccccaagacgtccacgtccggatctgtaaccaagagattgtcaaatttgacctggaggtgaaggcgcttattcaggatatccgtgattgttcaggacccttaagtgctcttactgaactgaatactaaagtaaaagagaaatttcaacagttgcgtcacagaatacaggacctggagcagttggctaaagagcaagacaaagaatcagagaaacaacttctactccaggaagtggagaatcacaaaaagcagatgctcagcaatcaggcctcatggaggaaagctaatctcacctgcaaaattgcaatcgacaatctagagaaagcagaacttcttcagggaggagatctcttaaggcaaagagcctcatggggatcagcaggatgatggcccagcaggtccagcagagcgaggaggccatgcagtctctagtcacttcttcacgaacgatcctggatgcaaatgaagaatttaagtccatgtcgggcaccatccagctgggccggaagcttatcacaaaatacaatcgccgggagctgacggacaagcttctcatcttccttgcgctagccctgtttcttgctacggtcctctatattgtgaaaaagcggctctttccatttttgtgagatcccaaaggtgccagttctggccctttcagctcctgtttcaggatctgtcctggttcctgagctctaggctgctaagctgagccacacacccctccgtttgcaccagttgcctgcaggttggatggaacacagtgccccacttttctgcaagtagctggcttgtaaagggtgaacagagccatgggaggaaggtctggcattgggatgccgccctggggacatacgaaccgcctccttccaccattgtgcactatgggaggccgctgctgcgtggagcacttaaagtccagcctccaggaccggatgcccctcctgtctcccgctcccatcgtgcccttaaatgccagatctggtggagggaagagagaagaggtaggaagaaaggtgatgaaaactcctggtcattccttgaataaacttgattttatttaatagaataaaatgtatttgattttgtaagata

SEQ ID NO: 12021 - DNA, 1250 bp, Homo sapiens
  misc_feature (1)..(1): n is a, c, g, or t
  misc_feature (3)..(4): n is a, c, g, or t
ngnngctgcccgtagccggcgtccccaacatggcggctccccaagacgtccacgtccggatctgtaaccaagagattgtcaaatttgacctggaggtgaaggcgcttattcaggatatccgtgattgttcaggacccttaagtgctcttactgaactgaatactaaagtaaaagagaaatttcaacagttgcgtcacagaatacagccagttctctatcaaagggcatttatttggactgcttccacatttttttttaagctaacttattccctgacagacttttcttcaactcagcatgacttcaactctccaactacacctgttaccttcagtgacctggagcagttggctaaagagcaagacaaagaatcagagaaacaacttctactccaggaagtggagaatcacaaaaagcagatgctcagcaatcaggcctcatggaggaaagctaatctcacctgcaaaattgcaatcgacaatctagagaaagcagaacttcttcagggaggagatctcttaaggcaaaggaaaaccaccaaagagagcctggcccagacatccagtaccatcactgagagcctcatggggatcagcaggatgatggcccagcagtcacttcttcacgaacgatcctggatgcaaatgaagaatttaagtccatgtcgggcaccatccagctgggccggaagcttatcacaaaatacaatcgccgggagctgacggacaagcttctcatcttccttgcgctagccctgtttcttgctacggtcctctatattgtgaaaaagcggctctttccatttttgtgagatcccaaaggtgccagttctggccctttcagctcctgtttcaggatctgtcctggttcctgagctctaggctgctaagctgagccacacacccctccgtttgcaccagttgcctgcaggttggatggaacacagtgccccacttttctgcaagtagctggcttgtaaagggtgaacagagccatgggaggaaggtctggcattgggatgccgccctggggacatacgaaccgcctccttccaccattgtgcactatgggaggccgctgctgcgtggagcacttaaagtccagcctccaggaccggatgcccctcctgtctcccgctcccatcgtgcccttaaatgccagatctggtggagggaagagagaagaggtaggaagaaaggtgatgaaaactcctggtcattccttgaataaacttgattttatttaataga

SEQ ID NO: 12022 - DNA, 1580 bp, Homo sapiens
  misc_feature (1)..(1): n is a, c, g, or t
  misc_feature (3)..(4): n is a, c, g, or t
ngnngctgcccgtagccggcgtccccaacatggcggctccccaagacgtccacgtccggatctgtaaccaagagattgtcaaatttgacctggaggtgaaggcgcttattcaggatatccgtgattgttcaggacccttaagtgctcttactgaactgaatactaaagtaaaagagaaatttcaacagttgcgtcacagaatacaggacctggagcagttggctaaagagcaagacaaagaatcagagaaacaacttctactccaggaagtggagaatcacaaaaagcagatgctcagcaatcaggcctcatggaggaaagctaatctcacctgcaaaattgcaatcgacaatctagagaaagcagaacttcttcagggaggagatctcttaaggcaaaggaaaaccaccaaagagagcctggcccagacatccagtaccatcactgagagcctcatggggatcagcaggatgatggcccagcaggtccagcagagcgaggaggccatgcagtctctagttccttttaaaagatgtgaatcagaggctacaggagagactgcttgagaccatctggtttcctccaatagttttcccagagtgtctcctctgtgatggagaagagtatcagccctctccagggtccttcagtataagacaacagaaaaagggcgtttactccttgaaacgcttttggaaaattgcacacgtggacaaaaggagaaagcatggtatcctgaatcccctgagccctgagtccattaccccagccagtctcgtttcagttctaccctcagcccatcccccatctggattattttgaagcaaatcccagacatcatccataaatatctcagtacatctctctaaaagataagggactctttggggaaaaagcagaagcaaccccataactacaataccatgatcacccctagaaattataattttggaccactgttttttcagtgcaccaaataggcagaagcaaaaggaaagcaagcaggtgaccccaaggtcactccttgagtttgcagcttacctgaacatctgggctcggaaccagccaggggcttcctctcagcgtgtgctgtgggagaggccttggagagagagggagcaaggcgacaacttggcctctgagcccagggcttttatgctctggtgtggcgacagcataccccccgctaacagtgggaaggaaacacaaatgctggtggcttctggggtgttgagagggtcccggtgttcttggggcccattttgtacaagcgataactattgaagaaaagagaagaatacagttcttaaccctttccttatgcctcacaaattcagcttgatttaaaagcctactaggaccataattttaaaacaaaaagcttattaggaatatggtgtctggaatttgctccacaattgcaggagtagttgcagttggggggagggggagcaggatttcagaggttggtggttcttggttatgggtggtggacacatggcatttcatgatattatgctgtctgctctgtgatggttcaaaattctccgtaataataaagtttaaaaagaaaaaaaaaa

SEQ ID NO: 12023 - DNA, 1284 bp, Homo sapiens
  misc_feature (1)..(1): n is a, c, g, or t
  misc_feature (3)..(4): n is a, c, g, or t
ngnngctgcccgtagccggcgtccccaacatggcggctccccaagacgtccacgtccggatctgtaaccaagagattgtcaaatttgacctggaggtgaaggcgcttattcaggatatccgtgattgttcaggacccttaagtgctcttactgaactgaatactaaagtaaaagagaaatttcaacagttgcgtcacagaatacagccagttctctatcaaagggcatttatttggactgcttccacatttttttttaagctaacttattccctgacagacttttcttcaactcagcatgacttcaactctccaactacacctgttaccttcagtgacctggagcagttggctaaagagcaagacaaagaatcagagaaacaacttctactccaggaagtggagaatcacaaaaagcagatgctcagcaatcaggcctcatggaggaaagctaatctcacctgcaaaattgcaatcgacaatctagagaaagcagaacttcttcagggaggagatctcttaaggcaaaggaaaaccaccaaagagagcctggcccagacatccagtaccatcactgagagcctcatggggatcagcaggatgatggcccagcaggtccagcagagcgaggaggccatgcagtctctagtcacttcttcacgaacgatcctggatgcaaatgaagaatttaagtccatgtcgggcaccatccagctgggccggaagcttatcacaaaatacaatcgccgggagctgacggacaagcttctcatcttccttgcgctagccctgtttcttgctacggtcctctatattgtgaaaaagcggctctttccatttttgtgagatcccaaaggtgccagttctggccctttcagctcctgtttcaggatctgtcctggttcctgagctctaggctgctaagctgagccacacacccctccgtttgcaccagttgcctgcaggttggatggaacacagtgccccacttttctgcaagtagctggcttgtaaagggtgaacagagccatgggaggaaggtctggcattgggatgccgccctggggacatacgaaccgcctccttccaccattgtgcactatgggaggccgctgctgcgtggagcacttaaagtccagcctccaggaccggatgcccctcctgtctcccgctcccatcgtgcccttaaatgccagatctggtggagggaagagagaagaggtaggaagaaaggtgatgaaaactcctggtcattccttgaataaacttgattttatttaataga

SEQ ID NO: 12024 - DNA, 685 bp, Homo sapiens
cagctcagaggaactcacttgagaatgctggtttttatcagcaccccagccagcagagtgaggtctttggatcttgagctgcagtctctgagttgggcctccttcctcttttgtttcatcacttcttcacgaacgatcctggatgcaaatgaagaatttaagtccatgtcgggcaccatccagctgggccggaagcttatcacaaaatacaatcgccgggagctgacggacaagcttctcatcttccttgcgctagccctgtttcttgctacggtcctctatattgtgaaaaagcggctctttccatttttgtgagatcccaaaggtgccagttctggccctttcagctcctgtttcaggatctgtcctggttcctgagctctaggctgctaagctgagccacacacccctccgtttgcaccagttgcctgcagctggggacatacgaaccgcctccttccaccattgtgcactatgggaggccgctgctgcgtggagcacttaaagtccagcctccaggaccggatgcccctcctgtctcccgctcccatcgtgcccttaaatgccagatctggtggagggaagagagaagaggtaggaagaaaggtgatgaaaactcctggtcattccttgaataaacttgattttatttaatagaataaaatgtatttgattttgtaagata

SEQ ID NO: 12025 - DNA, 1175 bp, Homo sapiens
  misc_feature (1)..(1): n is a, c, g, or t
  misc_feature (3)..(4): n is a, c, g, or t
ngnngctgcccgtagccggcgtccccaacatggcggctccccaagacgtccacgtccggatctgtaaccaagagattgtcaaatttgacctggaggtgaaggcgcttattcaggatatccgtgattgttcaggacccttaagtgctcttactgaactgaatactaaagtaaaagagaaatttcaacagttgcgtcacagaatacaggacctggagcagttggctaaagagcaagacaaagaatcagagaaacaacttctactccaggaagtggagaatcacaaaaagcagatgctcagcaatcaggcctcatggaggaaagctaatctcacctgcaaaattgcaatcgacaatctagagaaagcagaacttcttcagggaggagatctcttaaggcaaaggaaaaccaccaaagagagcctggcccagacatccagtaccatcactgagagcctcatggggatcagcaggatgatggcccagcaggtccagcagagcgaggaggccatgcagtctctagtcacttcttcacgaacgatcctggatgcaaatgaagaatttaagtccatgtcgggcaccatccagctgggccggaagcttatcacaaaatacaatcgccgggagctgacggacaagcttctcatcttccttgcgctagccctgtttcttgctacggtcctctatattgtgaaaaagcggctctttccatttttgtgagatcccaaaggtgccagttctggccctttcagctcctgtttcaggatctgtcctggttcctgagctctaggctgctaagctgagccacacacccctccgtttgcaccagttgcctgcaggttggatggaacacagtgccccacttttctgcaagtagctggcttgtaaagggtgaacagagccatgggaggaaggtctggcattgggatgccgccctggggacatacgaaccgcctccttccaccattgtgcactatgggaggccgctgctgcgtggagcacttaaagtccagcctccaggaccggatgcccctcctgtctcccgctcccatcgtgcccttaaatgccagatctggtggagggaagagagaagaggtaggaagaaaggtgatgaaaactcctggtcattccttgaataaacttgattttatttaatagaccaacaacaaaaaaaaaaaa

SEQ ID NO: 12026 - DNA, 1145 bp, Homo sapiens
  misc_feature (1)..(1): n is a, c, g, or t
  misc_feature (3)..(4): n is a, c, g, or t
ngnngctgcccgtagccggcgtccccaacatggcggctccccaagacgtccacgtccggatctgtaaccaagagattgtcaaatttgacctggaggtgaaggcgcttattcaggtactgatcccgggaccctaaaagagaaatttcaacagttgcgtcacagaatacaggacctggagcagttggctaaagagcaagacaaagaatcagagaaacaacttctactccaggaagtggagaatcacaaaaagcagatgctcagcaatcaggcctcatggaggaaagctaatctcacctgcaaaattgcaatcgacaatctagagaaagcagaacttcttcagggaggagatctcttaaggcaaaggaaaaccaccaaagagagcctggcccagacatccagtaccatcactgagagcctcatggggatcagcaggatgatggcccagcaggtccagcagagcgaggaggccatgcagtctctagtcacttcttcacgaacgatcctggatgcaaatgaagaatttaagtccatgtcgggcaccatccagctgggccggaagcttatcacaaaatacaatcgccgggagctgacggacaagcttctcatcttccttgcgctagccctgtttcttgctacggtcctctatattgtgaaaaagcggctctttccatttttgtgagatcccaaaggtgccagttctggccctttcagctcctgtttcaggatctgtcctggttcctgagctctaggctgctaagctgagccacacacccctccgtttgcaccagttgcctgcaggttggatggaacacagtgccccacttttctgcaagtagctggcttgtaaagggtgaacagagccatgggaggaaggtctggcattgggatgccgccctggggacatacgaaccgcctccttccaccattgtgcactatgggaggccgctgctgcgtggagcacttaaagtccagcctccaggaccggatgcccctcctgtctcccgctcccatcgtgcccttaaatgccagatctggtggagggaagagagaagaggtaggaagaaaggtgatgaaaactcctggtcattccttgaataaacttgattttatttaatagaataaaatgtatttgattttgtaagata

SEQ ID NO: 12027 - DNA, 1095 bp, Homo sapiens
  misc_feature (1)..(1): n is a, c, g, or t
  misc_feature (3)..(4): n is a, c, g, or t
ngnngctgcccgtagccggcgtccccaacatggcggctccccaagacgtccacgtccggatctgtaaccaagagattgtcaaatttgacctggaggtgaaggcgcttattcaggatatccgtgattgttcaggacccttaagtgctcttactgaactgaatactaaagtaaaagagaaatttcaacagttgcgtcacagaatacaggacctggagcagttggctaaagagcaagacaaagaatcagagaaacaacttctactccaggaagtggagaatcacaaaaagcagatgctcagcaatcaggcctcatggaggaaagctaatctcacctgcaaaattgcaatcgacaatctagagaaagcagaacttcttcagggaggagatctcttaaggcaaaggaaaaccaccaaagagagcctggcccagacatccagtaccatcactgagagcctcatggggatcagcaggatgatggcccagcaggtccagcagagcgaggaggccatgcagtctctagtcacttcttcacgaacgatcctggatgcaaatgaagaatttaagtccatgtcgggcaccatccagctgggccggaagcttatcacaaaatacaatcgccgggagctgacggacaagcttctcatcttccttgcgctagccctgtttcttgctacggtcctctatattgtgaaaaagcggctctttccatttttgtgagatcccaaaggtgccagttctggccctttcagctcctgtttcaggatctgtcctggttcctgagctctaggctgctaagctgagccacacacccctccgtttgcaccagttgcctgcaggttggatggaacacagtgccccacttttctgcaagtagctggcttgtaaagggtgaacagagccatgggaggaaggtctggcattgggatgccgccctggggacatacgaaccgcctccaggaccggatgcccctcctgtctcccgctcccatcgtgcccttaaatgccagatctggtggagggaagagagaagaggtaggaagaaaggtgatgaaaactcctggtcattccttgaataaacttgattttatttaataga

SEQ ID NO: 12028 - DNA, 1042 bp, Homo sapiens
  misc_feature (1)..(1): n is a, c, g, or t
  misc_feature (3)..(4): n is a, c, g, or t
ngnngctgcccgtagccggcgtccccaacatggcggctccccaagacgtccacgtccggatctgtaaccaagagattgtcaaatttgacctggaggtgaaggcgcttattcaggatatccgtgattgttcaggacccttaagtgctcttactgaactgaatactaaagtaaaagagaaatttcaacagttgcgtcacagaatacaggacctggagcagttggctaaagagcaagacaaagaatcagagaaacaacttctactccaggaagtggagaatcacaaaaagcagatgctcagcaatcaggcctcatggaggaaagctaatctcacctgcaaaattgcaatcgacaatctagagaaagcagaacttcttcagggaggagatctcttaaggcaaaggaaaaccaccaaagagagcctggcccagacatccagtaccatcactgagagcctcatggggatcagcaggatgatggcccagcaggtccagcagagcgaggaggccatgcagtctctagtcacttcttcacgaacgatcctggatgcaaatgaagaatttaagtccatgtcgggcaccatccagctgggccggaagcttatcacaaaatacaatcgccgggagctgacggacaagcttctcatcttcgatctgtcctggttcctgagctctaggctgctaagctgagccacacacccctccgtttgcaccagttgcctgcaggttggatggaacacagtgccccacttttctgcaagtagctggcttgtaaagggtgaacagagccatgggaggaaggtctggcattgggatgccgccctggggacatacgaaccgcctccttccaccattgtgcactatgggaggccgctgctgcgtggagcacttaaagtccagcctccaggaccggatgcccctcctgtctcccgctcccatcgtgcccttaaatgccagatctggtggagggaagagagaagaggtaggaagaaaggtgatgaaaactcctggtcattccttgaataaacttgattttatttaataga

SEQ ID NO: 12029 - DNA, 350 bp, Homo sapiens
gatagacagacagacccttaacatagctggatagtactgttgtaccggttgtacacctgacttaaaggtccattttgggtatagaaagaaatttgtcagaagggaattttttcttccttatctcagtgaggggctgatcctatttgtttgctttagttcttaccacttagaacttcgtggctaaatcatcttttgttcaaatctgagatccatctatatgaccttttggagagtaagttactctcttgaactagaagtttcttcttctgtaaactaggaataatatttgtattgcagaattgtgaaaagtaaataatgtggtaaggaaaataaagtacctaacatggttc

SEQ ID NO: 12030 - DNA, 363 bp, Homo sapiens
tgaagaggtttgaaactttcaccatattctcaaagggatatgtgaccctcgaaaacattagatgatgttttacccttccttaattagtttggcgttattgacttttttatgggttttctgtgcctttggttactgcagatcgttctacctcgccacgttaaattatagcttcagtataagatgagaaggcatagcatgctatttgatttatcctttatcatcatataacatgccttacaattgagcagctatggaaggtaaatatggagtatttacattccaaattttagtgcttgggtcaagtctatagacaataatgagaaaacagggtgagaacagcctacttatgtaaatacatgaatc

SEQ ID NO: 12031 - DNA, 1657 bp, Homo sapiens
gatctctagaatagtcttaagtcttgctggcggcgaggccgcggcgacaaggtagccacccccgcagcatgcctcgaccgcggtccgcagctgcaccgcctctccccgccccccagggtgcgctggtcccggtcgcgcgctcagacctccgcatcccgggcgtggtcggttaagtccccggccgtgacccaggcccggggagctagtctccgcccttcgctcttacggatcccctcggagtacgccgcaccatgcagctcaggctcttccggcgcctccttctcgccgctttgctgctggtgatcgtctggaccctcttcgggccttcggggttgggggaggagctgctgagcctctcactagcctccctgctcccagcccccgcctcaccggggccgcccctggccctgccccgcctcttgatccccaaccaggaagcttgcagtggtcccggggcccctcccttcctgctcatcctggtgtgcacggctccggagaacctgaaccagagaaacgccattcgggcttcgtggggcgggctgcgcgaggcccgggggctcagggtacagacgctattcttgctgggagagccgaacgcacagcaccccgtgtggggttcccaggggagtgacctggcctcggagtcagcagcccagggggatatcttgcaggccgccttccaggactcctaccgcaacctcaccctaaagaccctcagcgggctgaactgggctgagaaacactgccccatggcccgatacgtcctcaagacggacgatgatgtgtatgtcaacgtccctgaactggtatcagagctggtcttgcgagggggccgttgggggcaatgggagagaagcacggaaccccagagagaggctgagcaggaaggaggccaggttttgcacagcgaggaagtgcctcttctgtacttgggccgggtgcactggcgcgtgaacccctctcggacaccggggggcaggcaccgcgtatcagaggagcagtggcctcacacctggggcccctttccaccctatgcctcaggcacggggtatgtgctgtcagcgtctgctgtgcagctcattctcaaggtggccagccgggcaccccttctcccattagaggatgtctttgtgggggtaagtgcccgacgaggaggcctcgccccaacacagtgtgtcaagctggctggtgccacccactacccgctagaccggtgctgctatgggaaattcctgctgacgtcccacaggctggacccctggaagatgcaggaagcctggaagctggtgggtggctctgacggggaaaggactgcgcccttttgctcctggttccagggagtcctgggcatcctgcggtgtcgagcaatagcctggcttcagagctgagagtgcctggggccacaggaaaggcaggaacaggaccttctctctcccaggcccaacgcaggggccctcactggctgcagctgatctgtttccttataccagatcctcagtctcactaaagacagcgatatgggagacacccaggggcctggcccgccagcccaaaagatggtcatcgggaagagaaaaagaaaaaaatgctgcagttgttctctcaagctagggcagaagaggggtgtcaagctcctcaataaacttgtctccacttc

SEQ ID NO: 12032 - DNA, 1737 bp, Homo sapiens
cggggatgggagcgcgcaacgcggaagcgggcggcagaccggcgccggggcgaggcgggggaggggccgtgagtgccgcagtcggccagccatggagcggagcttgctggcggcgaggccgcggcgacaaggtagccacccccgcagcatgcctcgaccgcggtccgcagctgcaccgcctctccccgccccccagggtgcgctggtcccggtcgcgcgctcagacctccgcatcccgggcgtggtcggttaagtccccggccgtgacccaggcccggggagctagtctccgcccttcgctcttacggatcccctcggagtacgccgcaccatgcagctcaggctcttccggcgcctccttctcgccgctttgctgctggtgatcgtctggaccctcttcgggccttcggggttgggggaggagctgctgagcctctcactagcctccctgctcccagcccccgcctcaccggggccgcccctggccctgccccgcctcttgatccccaaccaggaagcttgcagtggtcccggggcccctcccttcctgctcatcctggtgtgcacggctccggagaacctgaaccagagaaacgccattcgggcttcgtggggcgggctgcgcgaggcccgggggctcagggtacagacgctattcttgctgggagagccgaacgcacagcaccccgtgtggggttcccaggggagtgacctggcctcggagtcagcagcccagggggatatcttgcaggccgccttccaggactcctaccgcaacctcaccctaaagaccctcagcgggctgaactgggctgagaaacactgccccatggcccgatacgtcctcaagacggacgatgatgtgtatgtcaacgtccctgaactggtatcagagctggtcttgcgagggggccgttgggggcaatgggagagaagcacggaaccccagagagaggctgagcaggaaggaggccaggttttgcacagcgaggaagtgcctcttctgtacttgggccgggtgcactggcgcgtgaacccctctcggacaccggggggcaggcaccgcgtatcagaggagcagtggcctcacacctggggcccctttccaccctatgcctcaggcacggggtatgtgctgtcagcgtctgctgtgcagctcattctcaaggtggccagccgggcaccccttctcccattagaggatgtctttgtgggggtaagtgcccgacgaggaggcctcgccccaacacagtgtgtcaagctggctggtgccacccactacccgctagaccggtgctgctatgggaaattcctgctgacgtcccacaggctggacccctggaagatgcaggaagcctggaagctggtgggtggctctgacggggaaaggactgcgcccttttgctcctggttccagggagtcctgggcatcctgcggtgtcgagcaatagcctggcttcagagctgagagtgcctggggccacaggaaaggcaggaacaggaccttctctctcccaggcccaacgcaggggccctcactggctgcagctgatctgtttccttataccagatcctcagtctcactaaagacagcgatatgggagacacccaggggcctggcccgccagcccaaaagatggtcatcgggaagagaaaaagaaaaaaatgctgcagttgttctctcaagctagggcagaagaggggtgtcaagctcctcaataaacttgtctccacttc

SEQ ID NO: 12033 - DNA, 1626 bp, Homo sapiens
cggggatgggagcgcgcaacgcggaagcgggcggcagaccggcgccggggcgaggcgggggaggggccgtgagtgccgcagtcggccagccatggagcggagcttgctggcggcgaggccgcggcgacaaggtagccacccccgcagcatgcctcgaccgcggtccgcagctgcaccgcctctccccgccccccagggtgcgctggtcccggtcgcgcgctcagacctccgcatcccgggcgtggtcggttaagtccccggccgtgacccaggcccggggagctagtctccgcccttcgctcttacggatcccctcggagtacgccgcaccatgcagctcaggctcttccggcgcctccttctcgccgctttgctgctggtgatcgtctggaccctcttcgggccttcggggttgggggaggagctgctgagcctctcactagcctccctgctcccagcccccgcctcaccggggccgcccctggccctgccccgcctcttgatccccaaccaggaagcttgcagtggtcccggggcccctcccttcctgctcatcctggtgtgcacggctccggagaacctgaaccagagaaacgccattcgggcttcgtggggcgggctgcgcgaggcccgggggctcagggtacagacgctattcttgctgggagagccgaacgcacagcaccccgtgtggggttcccaggggagtgacctggcctcggagtcagcagcccagggggatatcttgcaggccgccttccaggactcctaccgcaacctcaccctaaagaccctcagcgggctgaactgggctgagaaacactgccccatggcccgatacgtcctcaagacggacgatgatgtgtatgtcaacgtccctgaactggtatcagagctggtcttgcgagggggccgttgggggcaatgggagagaagcacggaaccccagagagaggctgagcaggaaggaggccaggttttgcacagcgaggaagtgcctcttctgtacttgggccgggtgcactggcgcgtgaacccctctcggacaccggggggcaggcaccgcgtatcagaggagcagtggcctcacacctggggcccctttccaccctatgcctcaggcacggggtatgtgctgtcagcgtctgctgtgcagctcattctcaaggtggccagccgggcaccccttctcccattagaggatgtctttgtgggggtaagtgcccgacgaggaggcctcgccccaacacagtgtgtcaagctggctggtgccacccactacccgctagaccggtgctgctatgggaaattcctgggcatcctgcggtgtcgagcaatagcctggcttcagagctgagagtgcctggggccacaggaaaggcaggaacaggaccttctctctcccaggcccaacgcaggggccctcactggctgcagctgatctgtttccttataccagatcctcagtctcactaaagacagcgatatgggagacacccaggggcctggcccgccagcccaaaagatggtcatcgggaagagaaaaagaaaaaaatgctgcagttgttctctcaagctagggcagaagaggggtgtcaagctcctcaataaacttgtctccacttc

SEQ ID NO: 12034 - DNA, 465 bp, Homo sapiens
agcgcctgctgcattaggagctgggtattcctcttgacatctggatgttgctgggtcacgatgcctgcctcaggccaggagtctgcgggaactgtggggcagagagcacagagtctttgctgctctttaagcgattagtgcactgaagcagcaataatgttgaattatcgcctggctgctttcttctcaggaatcttgggacaataggagagtcaagaaggagcatttacagtaaagtcatgttcagagagacaagactaattatagagtattaaagagctttattttaaacgatttaatttacaaatagctctgggcagtgcatggaactttttagaaccataaacctgtagcttaaagagacttttctaatttaaagtggctagtatagaaacatattgtttcagcaattattcagttttagagtttgttcaagttgtgccatagaagattcagcatctagtt

SEQ ID NO: 12035 - DNA, 254 bp, Homo sapiens
ttgaacttactattcattgtcattttaagttttgtgtctgatatctttaatatctgaattcttgtggcccttctttcttggttattgaacattgtcttttaaaaaaatgtgcctacttcttttttattgctaccaaacattgtttgtcatagattttttgtgcaatggatttctttgatgatcacatgaagccagtaagcctttttccaactaatggttttaaatgcctaagaactttgattccaaaaaaaaaa

SEQ ID NO: 12036 - DNA, 323 bp, Homo sapiens
ttaaaggttttgggtttaattaaacagagttgtgtttaattcatttcagataaaactttatttttaattaaatggggaatggcatttagctatcttacctgaattcttttctgagaaactcttccataagaaaatgaaaacactgattttgtcctgtctcgagaacaagtatgcttttcaaatactacttttgtgcttctcttcattatggctcatggagccttcaacgagattctgtggtaacatatccagcatattggaaattacactgaaatccctctgtattatttcaagttattaaaaaagcttttgtgtcattttta

SEQ ID NO: 12037 - DNA, 332 bp, Homo sapiens
ttagagctcaatgctttgtcctctgtcatccttctactgcatccctttcttcgtttcctcacttcaactttttagtaaacttgtctgaggcattagctttactcttacgcattttgctcccctgcctttttgttataaatattatcatggcatgaaacaaaaagcctgttatctgcctttccatgatcactttggtgacactgtttcagccacaagtaaacctagcaactctatgaatagcaggacagacttgaatgtggtgtgtgtgcaaggaagttatttaactttcttaatcttaaatgccaccagaaaacattctgctccctgttact

SEQ ID NO: 12038 - DNA, 539 bp, Homo sapiens
aaagagaacattagatcctttatgttgtatactcagatacattttacatgggtcagagatttaaatataaaaaaatgaaaccagaggagaatttaattataaccttagaattataaagcctttctaaaattatgactcaaaatctggaagtcaaaagattggtaaatttgcctttaaaaatctctgtgataaaaaactaccataaggaaagtcaaaagagaaatacagtttttaaaacaattgacgcttatgttgccgacagttgtataaatggagagaaggaaagttagcacatgctcataaaaacattatagaaaaatgggcaaagggctgggcacagtgtttcacacctgtaatcccagcactttgggaggccgaggcaggtggatcacctgaggtcaaaagttcaagaccagcctggccaacatgatgaaacctcgtctctactaaaaatataagaaattagctgggcatggtggcgggtgcctgtactcccagctacttgggaggctgaggcaggagaatcgcttgaacccgga

SEQ ID NO: 12039 - DNA, 435 bp, Homo sapiens
gcaccacaccacacccaggacctggaataggtggaatggcagcccctcaaaatatatgtccatgtcttaatgccgagccgctgtgaatgtggccttatttggagaaggggtttttgcagattaattaaattaaggaccctgagatgagatcatcctgtattaccaaggtgggccccaaatccaatgacagatgtccttataagagacacaggaggagaagacacagacacagaggagaaggccctgtgaatacagaggcagaaactggagtacgcagccaccattcaaggcatttggtcagccacagaagctggaaaaggaagtggaatctctcctagagcctgtggagggagcacagccttgccaacacctcgacttcagatttctgttttccagaactctgagagaataaattgctgttgtttaagccactaa

SEQ ID NO: 12040 - DNA, 361 bp, Homo sapiens
ttttttttttgagacaaggtctcgctgttacccaggttggagtgcaatggtacaatcacagctcactgcagcctccacctcctgggctcaagtgatcctcccacttcagtcccctgagtagctgggactacaggcatgcaccactatgcctgggtaattttaaaatttttttgtagagacaaggtctcactatatggcccaggctggttttgaaccccagggctcaagtagtcctcctgcctcagcctcccaaagtgctggaattacaagcaggtgcctggcctgcaatatatttcttatctactaacttattaacttatctattaatttattcttcctatctaactgaaaaatttgtacc

SEQ ID NO: 12041 - DNA, 106 bp, Homo sapiens
ccagccttgtttttcctaaaaacccaagcattatcttttcatcatcactgtaccctccagaaagtatgaattaagcatttatctatctccattttgtcctgaacaa

SEQ ID NO: 12042 - DNA, 466 bp, Homo sapiens
tactaatgatgctgatctttgattacagactattttggatattagattgtcctacctaatttcacaacagtagtccaatccagctgtaaatttcctatctccacaaatttaacatggcagctgacatatattaatatattttagcatcagagtatcttctaagaattgttcaacttaaaaatccactttcaaatttgttgctttatgttatacaactgttgtaatacttcatactgataaaccgctttaaaataagtaagtagttaaccttcaaaccaagaactgacaggtattattacctccattttgcagatggaaaaacaggatgaaagattaaaatttttgtccaagaccataaaagccagctgtggatccctgggtgaatcttggagttgctaacttctgtattttgcttagtttattgagtaacaataccttaatttaaaaaaaatattttcagccaaag

SEQ ID NO: 12043 - DNA, 470 bp, Homo sapiens
tcaccccaaagaactttaaattctgctttcatgccagatttcccagcagcgactgccaaacagctgcagagggagcctgaaacagagaaggggctcctctggccccccagaagctaggctgatttcggaatgcctctagaatccagcgtgcttgcccatcactcataaactgtgagtgtaaaccgcagttaagctcatatgcttcagttcctaaattacagttgcacttgggggaaatagctgctggtatttatcacagtgccctccccctagaaagtggcccacacagtcagttattacttggtcctgctcctcaacccggagcagcctgggttatcacttggccaagcagttattacgtggccagccttcctgatgcacctgcgtcagcaacctgcaaaggagccacctgctgtgccctggttatggaggaagcagagtccagtgtcccttctcaccagcacagcctg

SEQ ID NO: 12044 - DNA, 479 bp, Homo sapiens
ggtcacagcactcgagaacctcatcccactaaaaacaactattaaatacggcagctggaagaagacctgacgcttgctggtggaagtggccccagaaggctgcagctatgagcgattgtgacgaggtggaaggagggttccctggaattggaggggacgttgtgacccaagcatggatggtgtgggtagcaggatgtgaactgaggggctgataggtgtttgtggtgtgtgtgtggctggggttggccgggtgctgctttccacattgacttggcgcctgccagcggtgcggtccagttctttgactgaagttctcgccagtcatggacttcctatcctcctgtttcacgagctccatctccatcttctgctgatgtgtgagagctgccggcacggccagcagtggcaacagtaacgccttggagtgcagtccctcgccgggtggagcagtgtctggaacggcgctcagccgctcgcag

SEQ ID NO: 12045 - DNA, 1935 bp, Homo sapiens
tcatgggaggatgcaactttaaggggtttgttcctcctttgtgataagagttttcacagtgcttccgtatacatttctcatctcatccttataatagctctgttattcccattttgcagatgaggaaacagtctcagagaagataagagactttcttagagtcacacagctcatagatgggcagactgtggtcttctgcctcctagttcacaatactacactttctttctgtgatacaagctcacagacatttgtttaaaatgactactggttacagatgctgtggtgatttctggagaaatatcatcacctcctctattttcagtcagccatcgctcccagccccaacagccttcccagccccagcggaccctgctccagcatgtggctcagtcacagaccgcaacacagacttcggtggtggtgaagtccatcccagcatcttcccctggagcaatcacccacattatgcagcaggcattaagcagtcacactgcttttaccaaacacagcgaggaacttggaactgaggagggcgaggttgaagagatggacactttagaccctcagacaggtctgttttaccgatctgccctgactcagtcacagtcagctaaacagcagaaacttagccagcccccgctggaacagactcagctgcaagtgaaaactctgcagtgcttccagactaaacagaagcagaccatccacctgcaggcagaccagctccagcacaaactcccgcaaatgccccagctttccatcaggcatcaaaaactcacccctctccagcaagaacaagcacagcccaagccagatgtacagcacacacagcatcccatggtggccaaagacaggcagcttcctaccttaatggcacagcccccgcaaactgtagtacaggtgcttgcagtgaaaaccacgcagcagctccctaaactgcagcaggctccgaaccaaccaaaaatctacgtgcaaccccaaaccccccagagccaaatgtcgctcccagcttcttcagagaaacagacggcaagccaggtggagcagccaattataacccaaggatcctctgttacaaagataacttttgaggggcgccagcctcccacagttacaaagataactggtggcagttctgtgcctaagctgacatcaccagttacaagcatatctcccattcaggcctctgagaagacagcagtgtctgacattttgaaaatgtctttgatggaagctcagattgatacaaatgtagaacatatgatagtggatcccccaaagaaggctcttgccactagcatgctcactggtgaagcaggatcattaccctccacccacatggtggtggcagggatggcgaattccactccccagcaacagaaatgtagagagtcctgttcgagtccatccactgttggctcttccctaacgacaaggaaaattgatccaccagcagtgcctgcgacaggccagttcatgcgtattcagaatgtaggccaaaagaaagctgaagagagtccagcagaaattatcatccaggctattcctcagtatgctattccttgtcactccagctccaatgtggtggtggagcccagtgggcttcttgagctaaacaacttcactagtcaacagctggatgatgaggagacagcaatggagcaggacatagacagtagcacggaggatggaactgaacccagcccttctcagagctctgctgaacggtcctagtgtttggacacaatagtgcactttaaaacctgcttggttaccaagtgtccagggaaacccttgtattttgatgactaaaaagagcactttgcccgtacttaggctgtggaccctaaaacagcagtgtttcaacaagatgttgctgcaggagcagctttttaaaacaagataaaactcacaggggaatgtactttttta

SEQ ID NO: 12046 - DNA, 4639 bp, Homo sapiens
tcatgggaggatgcaactttaaggggtttgttcctcctttgtgataagagttttcacagtgcttccgtatacatttctcatctcatccttataatagctctgttattcccattttgcagatgaggaaacagtctcagagaagataagagactttcttagagtcacacagctcatagatgggcagactgtggtcttctgcctcctagttcacaatactacactttctttctgtgatacaagctcacagacatttgtttaaaatgactactggttacagatgctgtggtgatttctggagaaatatcatcacctcctctattttcagtcagccatcgctcccagccccaacagccttcccagccccagcggaccctgctccagcatgtggctcagtcacagaccgcaacacagacttcggtggtggtgaagtccatcccagcatcttcccctggagcaatcacccacattatgcagcaggcattaagcagtcacactgcttttaccaaacacagcgaggaacttggaactgaggagggcgaggttgaagagatggacactttagaccctcagacaggtctgttttaccgatctgccctgactcagtcacagtcagctaaacagcagaaacttagccagcccccgctggaacagactcagctgcaagtgaaaactctgcagtgcttccagactaaacagaagcagaccatccacctgcaggcagaccagctccagcacaaactcccgcaaatgccccagctttccatcaggcatcaaaaactcacccctctccagcaagaacaagcacagcccaagccagatgtacagcacacacagcatcccatggtggccaaagacaggcagcttcctaccttaatggcacagcccccgcaaactgtagtacaggtgcttgcagtgaaaaccacgcagcagctccctaaactgcagcaggctccgaaccaaccaaaaatctacgtgcaaccccaaaccccccagagccaaatgtcgctcccagcttcttcagagaaacagacggcaagccaggtggagcagccaattataacccaaggatcctctgttacaaagataacttttgaggggcgccagcctcccacagttacaaagataactggtggcagttctgtgcctaagctgacatcaccagttacaagcatatctcccattcaggcctctgagaagacagcagtgtctgacattttgaaaatgtctttgatggaagctcagattgatacaaatgtagaacatatgatagtggatcccccaaagaaggctcttgccactagcatgctcactggtgaagcaggatcattaccctccacccacatggtggtggcagggatggcgaattccactccccagcaacagaaatgtagagagtcctgttcgagtccatccactgttggctcttccctaacgacaaggaaaattgatccaccagcagtgcctgcgacaggccagttcatgcgtattcagaatgtaggccaaaagaaagctgaagagagtccagcagaaattatcatccaggctattcctcagtatgctattccttgtcactccagctccaatgtggtggtggagcccagtgggcttcttgagctaaacaacttcactagtcaacagctggatgatgaggagacagcaatggagcaggacatagacagtagcacggaggatggaactgaacccagcccttctcagagctctgctgaacggtcctagtgtttggacacaatagtgcactttaaaacctgcttggttaccaagtgtccagggaaacccttgtattttgatgactaaaaagagcactttgcccgtacttaggctgtggaccctaaaacagcagtgtttcaacaagatgttgctgcaggagcagctttttaaaacaagataaaactcacaggggaatgtacttttttaaaaaaaaatgaaaaagaaaaaaaaaaagctgcacatttacagtgacttaagacctggtcttctttctctgttggatcatggccggtgaaacagttttgtcttgcagtggaaagagacttcctgtgaatgtttctcaactggtttctgctgagcaaaataccatctaaaaggagaatgtgaatagttgtattttgaaatgatgtgtcaggaaaagttttttaaaaacttgtatgtttttgcaaatccctggaagtgttgaattggttaaaattttacattttctcagttcataattagtttataaacacctagaataatactggcattaaagaatccttgttggatggtagaaatcagatccctaaccagtgggaggtactttttgggtggcttgtgcattcttatcagttgtgtgctaatttattgtattgttcctttgtgctctaagcagcacacttgccttctatttatttaagtgtaaacatttcaaagcaggccgtactccttctgacaaatttcttgtaaaccaggattgcctacgctttccactgtcgtcgtctccccactttccctcttcctttaagaaaacttactaaaaaatgtttcattgcgaagcagaggaaaagaaacgttttcagacctaaaggaaatgtttggtcatgttaagaaaacaaattattcattcatatgatgctttcttaacgttgaaattgcacattcacattggactgagactttgaaaataacttttacatacttttgtttaagcccctttgaaatgtataaaaagttcatttacagttctaaatgtaatgtttttaagccttctatctttttaggacacagtttgtttaagcaatatgttttggtcttgtgatcactgtctgtcacaagtagagtgaaaggggtaagggggtgggagggtaagagttttgacaagttgtggcaaaggaaactatacttttcatttttaaaaatgtaaatagaaaagtttttaacggttttatatagatttcactataaataagcattttaagactgacaaatgttgaactgtacatacatttatcagcataactgcccagtttttttggtgctgaagtactgtaagtagaattcatcaacggtctcctaatttttgcatctacatctggggggaaaaagctgtgatactatagttaataaattcccactagagtgacactgaagatttaaacacaagcattcataagatgcgctgatctctggtggttgtcactagttctgctaggtgataatgatttacccatagatggagctgttggatattattttattgtacaaattcatgtttaaaaaactttgtgactgtttctagttaagtaattttttaacctttcttgggtcatagacttctttggtaaactatgaactctcaccaaaaagatacacatgcaacatgttaaatacatgttagactttgcatacaattttaggggctcatgggcctctaagcctatccatgtattccaggttaagccctctgttatgatcaatccattacttacagattaagtttttataaaataaagtatcttttaaatattcatggatcaagtaacaagagcaaacttgaataaagttatgttctacatattttggcagcatagcatacctgtgtcccttgagaatttagccttcatatgtttctgcaattggaatggcaaataaaagtgctatcatctacatttttttaaagaattacaaatattaagaaattatcaagtgaaatttaaaatttttcttttaaaggtgttaattccaaatagagcatgcattcatttatttattcaacaaatattaattgagcatcttctgtatgacaagtagtattctgtgcactggggataccatagtgaacaaacaggaaatcctatccttatgaagtttataaacagggcttcctgctcatgaaatggatacaaggaatgaagacaggagaaaataagaacaatacttaggtttttttataaagtggatagatgatgatgccatatatggattttcagacatccctttactgaaagtcttagcattatatctattagtattccacatttaagtacataatttaaaagtaatttaaagtcatctctttgaaggatattaacaaattacaatgcaaatgctacagaatttttagaatcctaacaactattaggcagtgataagaaaaatccatttggcttaaagtaaactttaataagtgcctagtattgcagatgcagtttatggtgaacttagaggattaaaaaccaaagggggcttcattgagatattcacatgccataaactctcccatttaaagtataccgtttaatggttttagtatatccacagagttgggcaagccattaccacaatcaatttgagaacattttcattaatcacaaaagaaatcctgaaatgaaaccaccaccaccatcgctccagccctgggtggccactcctctactttctgcctcttatggatgtgccataagaaatgtggacatttcatataaatgagattatataatatgtggtcttttgtgacttctttcacttagcgtattttcaaggttcatccgtgttgtagaatgtgtcagtactacatttctttttatggccattccattgtgtgaaatatatcacattttgtttacccgtttatcagctgatggat

SEQ ID NO: 12047 - DNA, 4965 bp, Homo sapiens
tcatgggaggatgcaactttaaggggtttgttcctcctttgtgataagagttttcacagtgcttccgtatacatttctcatctcatccttataatagctctgttattcccattttgcagatgaggaaacagtctcagagaagataagagactttcttagagtcacacagctcatagatgggcagactgtggtcttctgcctcctagttcacaatactacactttctttctgtgatacaagctcacagacatttgtttaaaatgactactggttacagatgctgtggtgatttctggagaaatatcatcacctcctctattttcagtcagccatcgctcccagccccaacagccttcccagccccagcggaccctgctccagcatgtggctcagtcacagaccgcaacacagacttcggtggtggtgaagtccatcccagcatcttcccctggagcaatcacccacattatgcagcaggcattaagcagtcacactgcttttaccaaacacagcgaggaacttggaactgaggagggcgaggttgaagagatggacactttagaccctcagacaggtctgttttaccgatctgccctgactcagtcacagtcagctaaacagcagaaacttagccagcccccgctggaacagactcagctgcaagtgaaaactctgcagtgcttccagactaaacagaagcagaccatccacctgcaggcagaccagctccagcacaaactcccgcaaatgccccagctttccatcaggcatcaaaaactcacccctctccagcaagaacaagcacagcccaagccagatgtacagcacacacagcatcccatggtggccaaagacaggcagcttcctaccttaatggcacagcccccgcaaactgtagtacaggtgcttgcagtgaaaaccacgcagcagctccctaaactgcagcaggctccgaaccaaccaaaaatctacgtgcaaccccaaaccccccagagccaaatgtcgctcccagcttcttcagagaaacagacggcaagccaggtggagcagccaattataacccaaggatcctctgttacaaagataacttttgaggggcgccagcctcccacagttacaaagataactggtggcagttctgtgcctaagctgacatcaccagttacaagcatatctcccattcaggcctctgagaagacagcagtgtctgacattttgaaaatgtctttgatggaagctcagattgatacaaatgtagaacatatgatagtggatcccccaaagaaggctcttgccactagcatgctcactggtgaagcaggatcattaccctccacccacatggtggtggcagggatggcgaattccactccccagcaacagaaatgtagagagtcctgttcgagtccatccactgttggctcttccctaacgacaaggaaaattgatccaccagcagtgcctgcgacaggccagttcatgcgtattcagaatgtaggccaaaagaaagctgaagagagtccagcagaaattatcatccaggctattcctcagtatgctattccttgtcactccagctccaatgtggtggtggagcccagtgggcttcttgagctaaacaacttcactagtcaacagctggatgatgaggagacagcaatggagcaggacatagacagtagcacggaggatggaactgaacccagcccttctcagagctctgctgaacggtcctagtgtttggacacaatagtgcactttaaaacctgcttggttaccaagtgtccagggaaacccttgtattttgatgactaaaaagagcactttgcccgtacttaggctgtggaccctaaaacagcagtgtttcaacaagatgttgctgcaggagcagctttttaaaacaagataaaactcacaggggaatgtacttttttaaaaaaaaatgaaaaagaaaaaaaaaaagctgcacatttacagtgacttaagacctggtcttctttctctgttggatcatggccggtgaaacagttttgtcttgcagtggaaagagacttcctgtgaatgtttctcaactggtttctgctgagcaaaataccatctaaaaggagaatgtgaatagttgtattttgaaatgatgtgtcaggaaaagttttttaaaaacttgtatgtttttgcaaatccctggaagtgttgaattggttaaaattttacattttctcagttcataattagtttataaacacctagaataatactggcattaaagaatccttgttggatggtagaaatcagatccctaaccagtgggaggtactttttgggtggcttgtgcattcttatcagttgtgtgctaatttattgtattgttcctttgtgctctaagcagcacacttgccttctatttatttaagtgtaaacatttcaaagcaggccgtactccttctgacaaatttcttgtaaaccaggattgcctacgctttccactgtcgtcgtctccccactttccctcttcctttaagaaaacttactaaaaaatgtttcattgcgaagcagaggaaaagaaacgttttcagacctaaaggaaatgtttggtcatgttaagaaaacaaattattcattcatatgatgctttcttaacgttgaaattgcacattcacattggactgagactttgaaaataacttttacatacttttgtttaagcccctttgaaatgtataaaaagttcatttacagttctaaatgtaatgtttttaagccttctatctttttaggacacagtttgtttaagcaatatgttttggtcttgtgatcactgtctgtcacaagtagagtgaaaggggtaagggggtgggagggtaagagttttgacaagttgtggcaaaggaaactatacttttcatttttaaaaatgtaaatagaaaagtttttaacggttttatatagatttcactataaataagcattttaagactgacaaatgttgaactgtacatacatttatcagcataactgcccagtttttttggtgctgaagtactgtaagtagaattcatcaacggtctcctaatttttgcatctacatctggggggaaaaagctgtgatactatagttaataaattcccactagagtgacactgaagatttaaacacaagcattcataagatgcgctgatctctggtggttgtcactagttctgctaggtgataatgatttacccatagatggagctgttggatattattttattgtacaaattcatgtttaaaaaactttgtgactgtttctagttaagtaattttttaacctttcttgggtcatagacttctttggtaaactatgaactctcaccaaaaagatacacatgcaacatgttaaatacatgttagactttgcatacaattttaggggctcatgggcctctaagcctatccatgtattccaggttaagccctctgttatgatcaatccattacttacagattaagtttttataaaataaagtatcttttaaatattcatggatcaagtaacaagagcaaacttgaataaagttatgttctacatattttggcagcatagcatacctgtgtcccttgagaatttagccttcatatgtttctgcaattggaatggcaaataaaagtgctatcatctacatttttttaaagaattacaaatattaagaaattatcaagtgaaatttaaaatttttcttttaaaggtgttaattccaaatagagcatgcattcatttatttattcaacaaatattaattgagcatcttctgtatgacaagtagtattctgtgcactggggataccatagtgaacaaacaggaaatcctatccttatgaagtttataaacagggcttcctgctcatgaaatggatacaaggaatgaagacaggagaaaataagaacaatacttaggtttttttataaagtggatagatgatgatgccatatatggattttcagacatccctttactgaaagtcttagcattatatctattagtattccacatttaagtacataatttaaaagtaatttaaagtcatctctttgaaggatattaacaaattacaatgcaaatgctacagaatttttagaatcctaacaactattaggcagtgataagaaaaatccatttggcttaaagtaaactttaataagtgcctagtattgcagatgcagtttatggtgaacttagaggattaaaaaccaaagggggcttcattgagatattcacatgccataaactctcccatttaaagtataccgtttaatggttttagtatatccacagagttgggcaagccattaccacaatcaatttgagaacattttcattaatcacaaaagaaatcctgaaatgaaaccaccaccaccatcgctccagccctgggtggccactcctctactttctgcctcttatggatgtgccataagaaatgtggacatttcatataaatgagattatataaaaaaaaacaaaaaaaacacaaaaaaaaaaaaaagggggggggggaaaaaagatatccgaggggggcaattaaggggataaacaagttttttgtgtaaaagggggccaagaggggggaaaataagccgcacgcccagggcggaccggaaacacgcgcgtacaggcgaaccaccgaacactgagaactcgggcaaacgaccaccacgcgcgggcgcacacactgggaacaccccacagaagaagaccgaggaaataaactcaggcgacgcgtgacaccacgcaatggtcggccgaaatgcgcgatgattaataaaaaagagcaaaaagacagaacacaggcccgacagagacgacgaccgggcaagacaacgcaggagaacagagaccagaaccaagcgagagtcaacaaccacatacacgacccacgacaaacagaaagaagacacagccacacagacgagagcaccacaagga

SEQ ID NO: 12048 - DNA, 4712 bp, Homo sapiens
tcatgggaggatgcaactttaaggggtttgttcctcctttgtgataagagttttcacagtgcttccgtatacatttctcatctcatccttataatagctctgttattcccattttgcagatgaggaaacagtctcagagaagataagagactttcttagagtcacacagctcatagatgggcagactgtggtcttctgcctcctagttcacaatactacactttctttctgtgatacaagctcacagacatttgtttaaaatgactactggttacagatgctgtggtgatttctggagaaatatcatcacctcctctattttcagtcagccatcgctcccagccccaacagccttcccagccccagcggaccctgctccagcatgtggctcagtcacagaccgcaacacagacttcggtggtggtgaagtccatcccagcatcttcccctggagcaatcacccacattatgcagcaggcattaagcagtcacactgcttttaccaaacacagcgaggaacttggaactgaggagggcgaggttgaagagatggacactttagaccctcagacaggtctgttttaccgatctgccctgactcagtcacagtcagctaaacagcagaaacttagccagcccccgctggaacagactcagctgcaagtgaaaactctgcagtgcttccagactaaacagaagcagaccatccacctgcaggcagaccagctccagcacaaactcccgcaaatgccccagctttccatcaggcatcaaaaactcacccctctccagcaagaacaagcacagcccaagccagatgtacagcacacacagcatcccatggtggccaaagacaggcagcttcctaccttaatggcacagcccccgcaaactgtagtacaggtgcttgcagtgaaaaccacgcagcagctccctaaactgcagcaggctccgaaccaaccaaaaatctacgtgcaaccccaaaccccccagagccaaatgtcgctcccagcttcttcagagaaacagacggcaagccaggtggagcagccaattataacccaaggatcctctgttacaaagataacttttgaggggcgccagcctcccacagttacaaagataactggtggcagttctgtgcctaagctgacatcaccagttacaagcatatctcccattcaggcctctgagaagacagcagtgtctgacattttgaaaatgtctttgatggaagctcagattgatacaaatgtagaacatatgatagtggatcccccaaagaaggctcttgccactagcatgctcactggtgaagcaggatcattaccctccacccacatggtggtggcagggatggcgaattccactccccagcaacagaaatgtagagagtcctgttcgagtccatccactgttggctcttccctaacgacaaggaaaattgatccaccagcagtgcctgcgacaggccagttcatgcgtattcagaatgtaggccaaaagaaagctgaagagagtccagcagaaattatcatccaggtcaagactaaagaattactgagtccaggctaccccttagaagttgtattttatctccctctctccttgcaaggctattcctcagtatgctattccttgtcactccagctccaatgtggtggtggagcccagtgggcttcttgagctaaacaacttcactagtcaacagctggatgatgaggagacagcaatggagcaggacatagacagtagcacggaggatggaactgaacccagcccttctcagagctctgctgaacggtcctagtgtttggacacaatagtgcactttaaaacctgcttggttaccaagtgtccagggaaacccttgtattttgatgactaaaaagagcactttgcccgtacttaggctgtggaccctaaaacagcagtgtttcaacaagatgttgctgcaggagcagctttttaaaacaagataaaactcacaggggaatgtacttttttaaaaaaaaatgaaaaagaaaaaaaaaaagctgcacatttacagtgacttaagacctggtcttctttctctgttggatcatggccggtgaaacagttttgtcttgcagtggaaagagacttcctgtgaatgtttctcaactggtttctgctgagcaaaataccatctaaaaggagaatgtgaatagttgtattttgaaatgatgtgtcaggaaaagttttttaaaaacttgtatgtttttgcaaatccctggaagtgttgaattggttaaaattttacattttctcagttcataattagtttataaacacctagaataatactggcattaaagaatccttgttggatggtagaaatcagatccctaaccagtgggaggtactttttgggtggcttgtgcattcttatcagttgtgtgctaatttattgtattgttcctttgtgctctaagcagcacacttgccttctatttatttaagtgtaaacatttcaaagcaggccgtactccttctgacaaatttcttgtaaaccaggattgcctacgctttccactgtcgtcgtctccccactttccctcttcctttaagaaaacttactaaaaaatgtttcattgcgaagcagaggaaaagaaacgttttcagacctaaaggaaatgtttggtcatgttaagaaaacaaattattcattcatatgatgctttcttaacgttgaaattgcacattcacattggactgagactttgaaaataacttttacatacttttgtttaagcccctttgaaatgtataaaaagttcatttacagttctaaatgtaatgtttttaagccttctatctttttaggacacagtttgtttaagcaatatgttttggtcttgtgatcactgtctgtcacaagtagagtgaaaggggtaagggggtgggagggtaagagttttgacaagttgtggcaaaggaaactatacttttcatttttaaaaatgtaaatagaaaagtttttaacggttttatatagatttcactataaataagcattttaagactgacaaatgttgaactgtacatacatttatcagcataactgcccagtttttttggtgctgaagtactgtaagtagaattcatcaacggtctcctaatttttgcatctacatctggggggaaaaagctgtgatactatagttaataaattcccactagagtgacactgaagatttaaacacaagcattcataagatgcgctgatctctggtggttgtcactagttctgctaggtgataatgatttacccatagatggagctgttggatattattttattgtacaaattcatgtttaaaaaactttgtgactgtttctagttaagtaattttttaacctttcttgggtcatagacttctttggtaaactatgaactctcaccaaaaagatacacatgcaacatgttaaatacatgttagactttgcatacaattttaggggctcatgggcctctaagcctatccatgtattccaggttaagccctctgttatgatcaatccattacttacagattaagtttttataaaataaagtatcttttaaatattcatggatcaagtaacaagagcaaacttgaataaagttatgttctacatattttggcagcatagcatacctgtgtcccttgagaatttagccttcatatgtttctgcaattggaatggcaaataaaagtgctatcatctacatttttttaaagaattacaaatattaagaaattatcaagtgaaatttaaaatttttcttttaaaggtgttaattccaaatagagcatgcattcatttatttattcaacaaatattaattgagcatcttctgtatgacaagtagtattctgtgcactggggataccatagtgaacaaacaggaaatcctatccttatgaagtttataaacagggcttcctgctcatgaaatggatacaaggaatgaagacaggagaaaataagaacaatacttaggtttttttataaagtggatagatgatgatgccatatatggattttcagacatccctttactgaaagtcttagcattatatctattagtattccacatttaagtacataatttaaaagtaatttaaagtcatctctttgaaggatattaacaaattacaatgcaaatgctacagaatttttagaatcctaacaactattaggcagtgataagaaaaatccatttggcttaaagtaaactttaataagtgcctagtattgcagatgcagtttatggtgaacttagaggattaaaaaccaaagggggcttcattgagatattcacatgccataaactctcccatttaaagtataccgtttaatggttttagtatatccacagagttgggcaagccattaccacaatcaatttgagaacattttcattaatcacaaaagaaatcctgaaatgaaaccaccaccaccatcgctccagccctgggtggccactcctctactttctgcctcttatggatgtgccataagaaatgtggacatttcatataaatgagattatataatatgtggtcttttgtgacttctttcacttagcgtattttcaaggttcatccgtgttgtagaatgtgtcagtactacatttctttttatggccattccattgtgtgaaatatatcacattttgtttacccgtttatcagctgatggat

SEQ ID NO: 12049 - DNA, 4138 bp, Homo sapiens
tcatgggaggatgcaactttaaggggtttgttcctcctttgtgataagagttttcacagtgcttccgtatacatttctcatctcatccttataatagctctgttattcccattttgcagatgaggaaacagtctcagagaagataagagactttcttagagtcacacagctcatagatgggcagactgtggtcttctgcctcctagttcacaatactacactttctttctgtgatacaagctcacagacatttgtttaaaatgactactggttacagatgctgtggtgatttctggagaaatatcatcacctcctctattttcagtcagccatcgctcccagccccaacagccttcccagccccagcggaccctgctccagcatgtggctcagtcacagaccgcaacacagacttcggtggtggtgaagtccatcccagcatcttcccctggagcaatcacccacattatgcagcaggcattaagcagtcacactgcttttaccaaacacagcgaggaacttggaactgaggagggcgaggttgaagagatggacactttagaccctcagacaggtctgttttaccgatctgccctgactcagtcacagtcagctaaacagcagaaacttagccagcccccgctggaacagactcagctgcaagtgaaaactctgcagtgcttccagactaaacagaagcagaccatccacctgcaggcagaccagctccagcacaaactcccgcaaatgccccagctttccatcaggcatcaaaaactcacccctctccagcaagaacaagcacagcccaagccagatgtacagcacacacagcatcccatggtggccaaagacaggcagcttcctaccttaatggcacagcccccgcaaactgtagtacaggtgcttgcagtgaaaaccacgcagcagctccctaaactgcagcaggctccgaaccaaccaaaaatctacgtgcaaccccaaaccccccagagccaaatgtcgctcccagcttcttcagagaaacagacggcaagccaggctattcctcagtatgctattccttgtcactccagctccaatgtggtggtggagcccagtgggcttcttgagctaaacaacttcactagtcaacagctggatgatgaggagacagcaatggagcaggacatagacagtagcacggaggatggaactgaacccagcccttctcagagctctgctgaacggtcctagtgtttggacacaatagtgcactttaaaacctgcttggttaccaagtgtccagggaaacccttgtattttgatgactaaaaagagcactttgcccgtacttaggctgtggaccctaaaacagcagtgtttcaacaagatgttgctgcaggagcagctttttaaaacaagataaaactcacaggggaatgtacttttttaaaaaaaaatgaaaaagaaaaaaaaaaagctgcacatttacagtgacttaagacctggtcttctttctctgttggatcatggccggtgaaacagttttgtcttgcagtggaaagagacttcctgtgaatgtttctcaactggtttctgctgagcaaaataccatctaaaaggagaatgtgaatagttgtattttgaaatgatgtgtcaggaaaagttttttaaaaacttgtatgtttttgcaaatccctggaagtgttgaattggttaaaattttacattttctcagttcataattagtttataaacacctagaataatactggcattaaagaatccttgttggatggtagaaatcagatccctaaccagtgggaggtactttttgggtggcttgtgcattcttatcagttgtgtgctaatttattgtattgttcctttgtgctctaagcagcacacttgccttctatttatttaagtgtaaacatttcaaagcaggccgtactccttctgacaaatttcttgtaaaccaggattgcctacgctttccactgtcgtcgtctccccactttccctcttcctttaagaaaacttactaaaaaatgtttcattgcgaagcagaggaaaagaaacgttttcagacctaaaggaaatgtttggtcatgttaagaaaacaaattattcattcatatgatgctttcttaacgttgaaattgcacattcacattggactgagactttgaaaataacttttacatacttttgtttaagcccctttgaaatgtataaaaagttcatttacagttctaaatgtaatgtttttaagccttctatctttttaggacacagtttgtttaagcaatatgttttggtcttgtgatcactgtctgtcacaagtagagtgaaaggggtaagggggtgggagggtaagagttttgacaagttgtggcaaaggaaactatacttttcatttttaaaaatgtaaatagaaaagtttttaacggttttatatagatttcactataaataagcattttaagactgacaaatgttgaactgtacatacatttatcagcataactgcccagtttttttggtgctgaagtactgtaagtagaattcatcaacggtctcctaatttttgcatctacatctggggggaaaaagctgtgatactatagttaataaattcccactagagtgacactgaagatttaaacacaagcattcataagatgcgctgatctctggtggttgtcactagttctgctaggtgataatgatttacccatagatggagctgttggatattattttattgtacaaattcatgtttaaaaaactttgtgactgtttctagttaagtaattttttaacctttcttgggtcatagacttctttggtaaactatgaactctcaccaaaaagatacacatgcaacatgttaaatacatgttagactttgcatacaattttaggggctcatgggcctctaagcctatccatgtattccaggttaagccctctgttatgatcaatccattacttacagattaagtttttataaaataaagtatcttttaaatattcatggatcaagtaacaagagcaaacttgaataaagttatgttctacatattttggcagcatagcatacctgtgtcccttgagaatttagccttcatatgtttctgcaattggaatggcaaataaaagtgctatcatctacatttttttaaagaattacaaatattaagaaattatcaagtgaaatttaaaatttttcttttaaaggtgttaattccaaatagagcatgcattcatttatttattcaacaaatattaattgagcatcttctgtatgacaagtagtattctgtgcactggggataccatagtgaacaaacaggaaatcctatccttatgaagtttataaacagggcttcctgctcatgaaatggatacaaggaatgaagacaggagaaaataagaacaatacttaggtttttttataaagtggatagatgatgatgccatatatggattttcagacatccctttactgaaagtcttagcattatatctattagtattccacatttaagtacataatttaaaagtaatttaaagtcatctctttgaaggatattaacaaattacaatgcaaatgctacagaatttttagaatcctaacaactattaggcagtgataagaaaaatccatttggcttaaagtaaactttaataagtgcctagtattgcagatgcagtttatggtgaacttagaggattaaaaaccaaagggggcttcattgagatattcacatgccataaactctcccatttaaagtataccgtttaatggttttagtatatccacagagttgggcaagccattaccacaatcaatttgagaacattttcattaatcacaaaagaaatcctgaaatgaaaccaccaccaccatcgctccagccctgggtggccactcctctactttctgcctcttatggatgtgccataagaaatgtggacatttcatataaatgagattatataatatgtggtcttttgtgacttctttcacttagcgtattttcaaggttcatccgtgttgtagaatgtgtcagtactacatttctttttatggccattccattgtgtgaaatatatcacattttgtttacccgtttatcagctgatggat

SEQ ID NO: 12050 - DNA, 2977 bp, Homo sapiens
tcatgggaggatgcaactttaaggggtttgttcctcctttgtgataagagttttcacagtgcttccgtatacatttctcatctcatccttataatagctctgttattcccattttgcagatgaggaaacagtctcagagaagataagagactttcttagagtcacacagctcatagatgggcagactgtggtcttctgcctcctagttcacaatactacactttctttctgtgatacaagctcacagacatttgtttaaaatgactactggttacagatgctgtggtgatttctggagaaatatcatcacctcctctattttcagtcagccatcgctcccagccccaacagccttcccagccccagcggaccctgctccagcatgtggctcagtcacagaccgcaacacagacttcggtggtggtgaagtccatcccagcatcttcccctggagcaatcacccacattatgcagcaggcattaagcagtcacactgcttttaccaaacacagcgaggaacttggaactgaggagggcgaggttgaagagatggacactttagaccctcagacaggtctgttttaccgatctgccctgactcagtcacagtcagctaaacagcagaaacttagccagcccccgctggaacagactcagctgcaagtgaaaactctgcagtgcttccagactaaacagaagcagaccatccacctgcaggcagaccagctccagcacaaactcccgcaaatgccccagctttccatcaggcatcaaaaactcacccctctccagcaagaacaagcacagcccaagccagatgtacagcacacacagcatcccatggtggccaaagacaggcagcttcctaccttaatggcacagcccccgcaaactgtagtacaggtgcttgcagtgaaaaccacgcagcagctccctaaactgcagcaggctccgaaccaaccaaaaatctacgtgcaaccccaaaccccccagagccaaatgtcgctcccagcttcttcagagaaacagacggcaagccaggtggagcagccaattataacccaaggatcctctgttacaaagataacttttgaggggcgccagcctcccacagttacaaagataactggtggcagttctgtgcctaagctgacatcaccagttacaagcatatctcccattcaggcctctgagaagacagcagtgtctgacattttgaaaatgtctttgatggaagctcagattgatacaaatgtagaacatatgatagtggatcccccaaagaaggctcttgccactagcatgctcactggtgaagcaggatcattaccctccacccacatggtggtggcagggatggcgaattccactccccagcaacagaaatgtagagagtcctgttcgagtccatccactgttggctcttccctaacgacaaggaaaattgatccaccagcagtgcctgcgacaggccagttcatgcgtattcagaatgtaggccaaaagaaagctgaagagagtccagcagaaattatcatccaggctattcctcagtatgctattccttgtcactccagctccaatgtggtggtggagcccagtgggcttcttgagctaaacaacttcactagtcaacagctggatgatgaggagacagcaatggagcaggacatagacagtagcacggaggatggaactgaacccagcccttctcagagctctgctgaacggtcctagtgtttggacacaatagtgcactttaaaacctgcttggttaccaagtgtccagggaaacccttgtattttgatgactaaaaagagcactttgcccgtacttaggctgtggaccctaaaacagcagtgtttcaacaagatgttgctgcaggagcagctttttaaaacaagataaaactcacaggggaatgtacttttttaaaaaaaaatgaaaaagaaaaaaaaaaagctgcacatttacagtgacttaagacctggtcttctttctctgttggatcatggccggtgaaacagttttgtcttgcagtggaaagagacttcctgtgaatgtttctcaactggtttctgctgagcaaaataccatctaaaaggagaatgtgaatagttgtattttgaaatgatgtgtcaggaaaagttttttaaaaacttgtatgtttttgcaaatccctggaagtgttgaattggttaaaattttacattttctcagttcataattagtttataaacacctagaataatactggcattaaagaatccttgttggatggtagaaatcagatccctaaccagtgggaggtactttttgggtggcttgtgcattcttatcagttgtgtgctaatttattgtattgttcctttgtgctctaagcagcacacttgccttctatttatttaagtgtaaacatttcaaagcaggccgtactccttctgacaaatttcttgtaaaccaggattgcctacgctttccactgtcgtcgtctccccactttccctcttcctttaagaaaacttactaaaaaatgtttcattgcgaagcagaggaaaagaaacgttttcagacctaaaggaaatgtttggtcatgttaagaaaacaaattattcattcatatgatgctttcttaacgttgaaattgcacattcacattggactgagactttgaaaataacttttacatacttttgtttaagcccctttgaaatgtataaaaagttcatttacagttctaaatgtaatgtttttaagccttctatctttttaggacacagtttgtttaagcaatatgttttggtcttgtgatcactgtctgtcacaagtagagtgaaaggggtaagggggtgggagggtaagagttttgacaagttgtggcaaaggaaactatacttttcatttttaaaaatgtaaatagaaaagtttttaacggttttatatagatttcactataaataagcattttaagactga

SEQ ID NO: 12051 - DNA, 393 bp, Homo sapiens
aagaattactgagtccaggctaccccttagaagttgtattttatctccctctctccttgcaaggtatcaggttgttttcttgacatttgtcattctttgctaaacagatatatagcttggaaggtatcagaatagcacattttagttaattgagaatttggatttattgaaatgtgagtagactaggatttaccatcaattcattatggtaaactttctctttgccatgatcccaaactatgggagaatgcaaattgacaatgttaaaccaattaaggtagaattaaatatagaggaagtgcttaaaggcaagtagaaatggccattgaattattaaaataatttgtttccctttgtaaaaacaaatgtaaatgaagtaaatatttcctgaca

SEQ ID NO: 12052 - DNA, 2447 bp, Homo sapiens
aagcttgttaattttaataacaaatctttatgaatctgaagagaattgatgttcatgataatgatatagatgtttaatatactttctgaaataacactgtttactgttcaagttatattgactataatttacattattcttgtttgagaattgtatggcatagacactcattagtcagagtgtctagacatccagaccatgcctgataacacaagaatcatatatcattctctagaaaacaggctgtttggttatagagtatttatcttaaatatattaacagacactacataaacattgaaaagccatgcaagttatagctcacaggagccagatctactgcaactggggcctacatacaaaattttatggcagtggtttcagtatgacaatcttttgaattgatgccgtatggtaaaactataaagattttttaaaagctctgtctcagctagaatttttaagattataactgaacagtatagcccttttagttgtttgaaaattacataatgattcaaaagcttgtttcactgcctttcccagcactaagaaaattaacaatcatttcttttaatttccttgaatcagagccattctaaagtgactctggaccagcaattctgagctatgatttcatgatacatgtattaatatctaaatgagttgtgagttgacataagaaccatagttccataataattatcttcaaatcaatggatatcttaaatgtgtttttttcttccttagagattattattaaactgatgtatttgataataaagaattttaggactgagaaagttaagtttttcttaccaataataagatattgaaatatataaattataaaacagaaataaaatgaaataaaggaggttatccctaaagtcatttaccttagtcacttgcaattaaatatggttacttcggaagaagaagtgtggccctaaagctactgtaacatgaatcatgccctaatgtgcactatatatgaactactttggtcagaaggcagcggcgggtaaggatggcttcctctcacagtgcttcttaggctatccatttaccaaggaattctaatctctttctctcacttcaccaggaaaggagggagtttaagatatagaactgggcatgctagcctcttttttcccttttgtggatttgtcataactgcagagaaccgatgttgtggtctcttgccagctacattgtgaaccttgcagtgaaagttctttgcctctgcaaagggagatttgtgcttgtgcagaactgcccatgccttagtaagcaggtctgtctaattctaagttcaatatctggtggctattgttggcataaacttaaagtacatcctctaacctagcctttttcagcagtaaacttaaaatattgaatctccatctgtctgtgtctcaagtggttcagaggtcaggagaggagagggacattattttatgactccctcaaactttaacaaagactagtgcagattatatttcgaagtaagcatgagatatattaaaaaccacatgtgggaattctttcctaattttagaggttttttttaaataatggaaattctattgaaattgagtagtgttaattacaaggcaacaggtaaacatttgttcaggatatttaaaaggtctgctgagttggaattgtgacagaccacattgttgactctagattgaattggaagggaagaatgtgaaatgaattaggatatcctctgttcacctctattaactttcttaaatgagtataacttagaaataataaaatgcaagtattttaacgttatagttgggagagttttgacaaatgtaaacacccacttcaccaccactaccatcctgatatagtgtgtgtccatcacccaaaaagttctctaaagcccttttgcagttggttcccctccacctgaacagccatccctagtcaactacttttctgctttctgtggctatacgttagatttgacttcagaattctagagtttgaaataaataggccatataatatgcactctttttgtgtctgactttttttttgcttaacatgatgcttttgaaacccatccatgttgagattcatccatgttatcatgtgtatcaataataagttcctttttattgctgaatagtattctagtatatagatataccacaatttgtttagctgttcacctattgatggacatttaggttgtttcaagttttgatctattatgaataaagctgctatatatataaatcacaattctatgtgtggacatatgtgttcatttctcttatgtaaatacctagggatggaattgctgagtcttatgaccagtttatgcacaactttaaaggaaactgccaaacttttccaaattatctgtaccatttgggatttctgctagcaatgtattaaattaatttcagtttctccatatc

SEQ ID NO: 12053 - DNA, 2264 bp, Homo sapiens
aagcttgttaattttaataacaaatctttatgaatctgaagagaattgatgttcatgataatgatatagatgtttaatatactttctgaaataacactgtttactgttcaagttatattgactataatttacattattcttgtttgagaattgtatggcatagacactcattagtcagagtgtctagacatccagaccatgcctgataacacaagaatcatatatcattctctagaaaacaggctgtttggttatagagtatttatcttaaatatattaacagacactacataaacattgaaaagccatgcaagttatagctcacaggagccagatctactgcaactggggcctacatacaaaattttatggcagtggtttcagtatgacaatcttttgaattgatgccgtatggtaaaactataaagattttttaaaagctctgtctcagctagaatttttaagattataactgaacagtatagcccttttagttgtttgaaaattacataatgattcaaaagcttgtttcactgcctttcccagcactaagaaaattaacaatcatttcttttaatttccttgaatcagagccattctaaagtgactctggaccagcaattctgagctatgatttcatgatacatgtattaatatctaaatgagttgtgagttgacataagaaccatagttccataataattatcttcaaatcaatggatatcttaaatgtgtttttttcttccttagagattattattaaactgatgtatttgataataaagaattttaggactgagaaagttaagtttttcttaccaataataagatattgaaatatataaattataaaacagaaataaaatgaaataaaggaggttatccctaaagtcatttaccttagtcacttgcaattaaatatggttacttcggaagaagaagtgtggccctaaagctactgtaacatgaatcatgccctaatgtgcactatatatgaactactttggtcagaaggcagcggcgggtaaggatggcttcctctcacagtgcttcttaggctatccatttaccaaggaattctaatctctttctctcacttcaccaggaaaggagggagtttaagatatagaactgggcatgctagcctcttttttcccttttgtggatttgtcataactgcagagaaccgatgttgtggtctcttgccagctacattgtgaaccttgcagtgaaagttctttgcctctgcaaagggagatttgtgcttgtgcagaactgcccatgccttagtaagcaggtctgtctaattctaagttcaatatctggtggctattgttggcataaacttaaagtacatcctctaacctagcctttttcagcagtaaacttaaaatattgaatctccatctgtctgtgtctcaagtggttcagaggtcaggagaggagagggacattattttatgactccctcaaactttaacaaagactagtgcagattatatttcgaagtaagcatgagatatattaaaaaccacatgtgggaattctttcctaattttagaggttttttttaaataatggaaattctattgaaattgagtagtgttaattacaaggcaacaggtaaacatttgttcaggatatttaaaaggtctgctgagttggaattgtgacagaccacattgttgactctagattgaattggaagggaagaatgtgaaatgaattaggatatcctctgttcacctctattaactttcttaaatgagtataacttagaaataataaaatgcaagtattttaacgttatagttgggagagttttgacaaatgtaaacacccacttcaccaccactaccatcctgatatagtgtgtgtccatcacccaaaaagttctctaaagcccttttgcagttggttcccctccacctgaacagccatccctagtcaactacttttctgctttctgtggctatacgttagatttgacttcagaattctagagtttgaaataaataggccatataatatgcactctttttgtgtctgactttttttttgcttaacatgatgcttttgaaacccatccatgttgagattcatccatgttatcatgtgtatcaataataagttcctttttattgctgaatagtattctagtatatagatataccacaatttgtttagctgttcacctattgatggacatttaggttgtttcaagttttgatctattatgaataaagctgctatatatataaatc

SEQ ID NO: 12054 - DNA, 343 bp, Homo sapiens
caagaagaaatagcagcccaattcaaatcctgcccctgacctcctgcccctaaaacataggcattcctagtcttctgaataatggaagacatagagaaagaatgagatggtcaaaaatatatcttcctaaatttggggcacaactgcactcatcagggatgatttgaactggaggtaagggggatctgtgaaagacaagagaaggcccggagttttagggtgggccatgtggaggctctttcaagggagaactcgggggggttcctgaaaaggaagagaacctcatcccacccagatatcttgcttgatgagtatccagatgtactggagttgagagatagag

SEQ ID NO: 12055 - DNA, 1593 bp, Homo sapiens
actccctttcttgatcttaatcctcaagaaaggatgaaaagataagcagtgtatttaaactgatcattcctgcaaagagctttttctttctcaaataagaacctgttaacctctaaatccacttatcttcaatagcgccttagggaggtgatggagagagttctggctggggcaccttccttgctccccctgagtagcactaagtaatctcacaggacaggcaaggcctttctgaagaggtcttagagtgcagggaattgcatgacaggtgctgttagccaccttggaagaactgcaggccttgcgtggtgccaccttgtttgcgggaagcccagccctgtccattcccctggccctagcatctgtttatctaatagcagtaccaatttttattgttaggataagttgtaggagaaattagcaaaggttaactgactgctgtgggtagacagtacaattcttcttcagtttctgacttaggagtgtttccgaaaagttaagtgaaaacaaaagtttgaagtgtttcccttttagttacataacagacactcattacggaattgaacagttttagacccataaataattaagttaaaagcataacaaaatcctgttaggaaactgatgaaaaatttgtttctaaaacactttagattttaaacttgaacacgtagtgaaatgtcttttaaaacaatgaagatgggtgcagtgttcacaggcctctccactaagcagatgtctactgagaacacagtattaggggatgtgggtggtagaaagatgcagtggccaagcctcaccctgggcgagctggggcaggctcgctctctcaggcacagtgaggaaggcacactgaagggggttgccctgactgccagcatgccaggtatacatggtgactgaagctgccacaggtcttctattgaccacactacaaggactcttcttggtcactgatgacagctgttgtctgtctgccattggccacactatccagttctcactggccaagcaggtgggcggggcccagccaggacttgagaatcccactgggaaaggacagagcctgggttcaggctaggtccctcttctgggcctgggcagcttccagatgtgaaggatatgagtctctcccgctctcaggaatcattctctcatctcatttggatggctatctcctattttaaatttgaatcatggaatttgaatttgtaatttggttttagccttagtttccttctggttcgcacctaagcaagataattttaagacacttaggtcaataactgtgcctataagaatttcctttgggccaggcatggtggctcacgcctgtaatcccagcactttgggaggccaaggcgggcagatcacctgaggtcacaagttcgagaccagcctggccaacgtggcaaaaccctgtctctactaaaaatacaaaaattagccggggtggtggtacatgcctgtagtcccagctactcaggaagctaaggcacgagaatcatttgaacactggaggcagaagttgcagtgagctgagatcgtgccactgcactccagcctgggtgacagagtgagactctgtcttgg

SEQ ID NO: 12056 - DNA, 1059 bp, Homo sapiens
agtgccttttagatgacagggctcctggtgtcagtcttacaagcatttgtgaagtgctaagaaagtcaagcgattttttttttttacattaagttagctatgagtggcaagagttacatggttgctccagatggttagtgtctaaaatggccaagagcagagaagtgctttactttacgtgctgaaactttattttagtaaattctactctagttttaccatctggagcaacacgatgtatactctttcattcacacagcagcattttttcattttttaaaaatgtgtaatactaaatacatgcttgtttttacacttctggaaaaaagagcagggggagcttcaaagattttcagaagtaacacgagttagctaatatcctgctcctaagcctgggcaacatggtgagaccctgtccctacaaaaaataaaataataataataataatatcctgttcctagatcttttctcacttgatatactttgagtatccttccatatcattacaaaaaaaaatcgatctcatttcttttacagctacatcagtttcatgtatggttgtactataattttcttaacctatttctcattgatgaatatttgggtaagcttcaatggcttattatactaagcaatgtgtctcagtacatttttgttggataaaattctttgaagtgtaactaatgggtcaaaatgtatgtacacatttagtcattagtagacataaccaaactaatcctccaaaacaaaatacagcttttaagtgctcctctttgccaatccaagaagaaacaaacaaaaaagggtctagttgatttttaactttgcattcccttaataaaaggaccatttgttttgctttcatctgtgaattacatattcatgttttctgccatctttttctattgtgctgttgatctatttctattacacttgtcttataaatttgtcttaaaaataatgatgaggataatttactacatcttataaataacactctaaaacccattagttatcaaatactaaagacaaatcactttatctaccagttagttgtg

SEQ ID NO: 12057 - DNA, 375 bp, Homo sapiens
agtaggcacgtggtctacagtctcagctgaaatcagcctttgagtcatcgcagcccagacatcagatacaggagtaaagaaaattccagatgattattacccccagccgcttgagttttctcagtgagacctcagacatcgcagagcaaagacaagccatccctgctgttatctaaattcctgcccacggcatcttcgaacatagtcaaatgattgctgctttaggccactaagtctgagctggtttattgcattcggcaactagaacaacatttttactaacatagtgattgaatgtagacttaataatgaaagagtccaacttccataagaaaaaaattcataattttaaaggaagaggctttgctgttaaag

SEQ ID NO: 12058 - DNA, 232 bp, Homo sapiens
gtccccaggaccagcgactctgtggctcactcggccactgggtctcggcgcaaaccctccctaggcagtgcgggcgatgctgactgcagacgtcgggcagggctttcgtgcgggcgggagcgggggaagccagtgcgcccgggcgtcagctagttgatgcgggaagaggctggggagctgcagggccgtccgcccccgggtgcggtgctctggcgcagggcctgggctgagc

SEQ ID NO: 12059 - DNA, 139 bp, Homo sapiens
aattcaagaaacttgttgccaggagacctgtcttgcaagaaatgttaaatgaaattctttagggaaacaaaagatatgtaactgaaacctggatcaacatttttttaaaaagagcattaaagaaagaattgttttacat

SEQ ID NO: 12060 - DNA, 540 bp, Homo sapiens
gtaaaaagctggaagatgaccctaaattcttgaagtctggtgatgctgccatcgttgatatggttcttggcgagcacatgtgtgttgagagcttctcagactatccacctcggggtcgctttgctgttcgtgatatgagacagacagttgcggtgtggtgtcatcaaagcagtggacaagaaggctgctggagctggcaaggtcaccaagtctgcccagaaagctcagaaggctaaatgaatattatccctaatacctgccaccccactcttaatcagtggtggaagaacggtctcagaactgtttgtttcaattggccatttaagtttagtagtaaaagactggttaatgataacaatgcatcgtaaaaccttcagaaggaaaggagaatgttttgtggaccactttggttttcttttttgcgtgtggcagttttaagttattagtttttaaaatcagtactttttaatggaaacaacttgaccaaaaatttgtcacagaattttgagacccattaaaaaagttaaatgagaaaaaaaa

SEQ ID NO: 12061 - DNA, 5575 bp, Homo sapiens
ctcggaaaagcttttcagtaaatgcactcatgctgctccaggagctcttctctgcaacaagccacccatctgccatcaacaagttaagaccaagagaactaacggctgcggaaatgagactgaagctttgattaaccagctgagcagttagaggtggagaaatttaataacttatattcaaaactgatttagggatcagagcaatcacagaaaatgaaaccaatgctttccagagggatatcctaaggaaaaaacaactcgtcctggtggattcaattttacttggaaagcctgggacacagaaaacaggaaactggtcaaaggctcctacatgttagagccttttacagactcactgcgttgagtctaacaaccgcgactgaatgcagcctccaatgtgctcagaagaatgggcttacatttcaagtggccattaggggcccctatgctggcagcaatatatgcaatgagtatggttttaaaaatgctgcctgccctgggtatggcgtgtccacccaaatgccgctgcgagaagctgctcttctactgcgactctcagggcttccactcagtgccaaacgccacagacaagggctctctgggcctgtccctgaggcacaatcacatcacagagctcgaaagagatcaatttgccagcttcagtcaacttacttggctccacttagatcacaatcaaatttcaacagtaaaagaagatgcttttcaaggactatataaacttaaggaattaatcttaagttccaacaaaatattttacttgccaaacacaacttttacccaactgattaacctgcaaaatttggacctgtcttttaatcagctgtcatctctgcacccagagctcttctatggccttcggaagctgcagaccttgcatttacgttccaactccctgcggactatcccagtacgcctgttctgggactgtcgtagtctggagtttctggatttgagcacaaatcgtttgcgaagtttggctcgcaatggatttgcaggattaattaaactgagagagcttcacctagagcacaaccagctgacgaagattaattttgctcatttcctacggctaagcagtctgcacacgctcttcttacaatggaacaaaatcagcaacttgacatgtgggatggagtggacctggggcactttagaaaagctagacctgactggaaatgaaatcaaagccatcgacttgacagtgtttgaaacgatgcccaatcttaaaatactactcatggataacaacaagttaaacagccttgattccaagatcttaaactccctgagatccctcacaaccgttggtctctctggcaatctgtgggaatgcagcgcccgaatatgtgctctggcctcctggctgggcagtttccaaggtcggtgggaacactccatcctatgccacagtcctgaccacacccaaggagaggatattctagatgcagtccatggatttcagctctgctggaatttgtcaaccactgtcactgtcatggctacaacttatagagatccaaccactgaatatacaaaaagaataagctcatcaagttaccatgtgggagacaaagaaatcccaactactgcaggcatagcagttactaccgaggaacactttcctgaaccagacaatgccatcttcactcagcgggtaattacgggaacaatggctttattgttttctttcttttttattatttttatagtgttcatctccaggaagtgctgccctcccactttaagaagaattaggcagtgctcaatggttcagaaccacaggcagctccgatcccaaacacgactccatatgtcaaacatgtcagaccaaggaccgtataatgaatatgaacccacccatgaaggacccttcatcatcattaatggttatggacagtgcaagtgtcagcagctgccatacaaagaatgtgaagtataatatctacccatcatcaaaaatcacatcagataagtaacctattttacatagtagaggctaaatacatatctaatttttaccaatggtgacattaagcctaattttccaaactaagtggagacttagtttttgaagtgttgaagtatttttaattttttaaatgaaaccatattttaagtgttaaatgaatcaatgctcacattaatttgcactcctgttggaaagtctaaaatgcttacttcaaaataagaaatgtacgtaattatatacaatcgtgtgtaaacctttacactaaggtctccatatactatttttttctactgaaaacaatttagaaagaagctattgggcagaaacagatatagatcaatacctgtttgatcactgctctccatcccatgtaccacaactatcttgctgcttaaaaggagacttagtaaagttctcttgtatgataatttggtatttactcaaatcttcaatttcttgccagggtgggaagtagaatttcatgtatgctgaagactggtaaatattaaacattctccttccagagtttctgcctgggttagtagatattatcaaagtccatatcatgaattcagaaccctttaatgtaattctaataagctgagtgactctttaatatatttacacaatgaatccaagtgactgtgaaaaggtctcattacaatgaaaccaatcctaaataattacaccaacttcttatacatttctcgtttgacttataatggacatgatttttgtggcatttagacaactgttttaaactagcattaaactgtcattgtactaattaatgtactaaatcctatgtttacattaatatgtgaaaaaagatttagaagatattttggagataaacaagacaaactgagtcaatttaacaatcctgacatgctccctccaatttaaaagcacacacacacacacacacacacacacacacactctcgcgctctctctctcaactatcatgatcaaagatgccttgacaaaggggtttaaacctctttcttctgctttttcctgatcttcaaacctcaaagagccaagttaaaaataattggctagcaacaggcttaacactgattcttattgtattacaaaggaaccatgaaaaaaaacactttctaactattatataatacatttcgatctttcaataaagatacgcattcacgctgtaagtgtagttcagtgtaggtgaagaaaacagcaccactgagatgaatctcatggcagaacaactcgacatgcctatgcagccacacagtggtaacttgaaggcagcacagaggtgagggattaaaaggaaaggcagattttgaaatctgactctcaggttagctggagttacaaggcagccaacaatgattatacacaatctgcaccaaacagggaaaggacctgctgctgaaaagggaagaggggtagatcctccaatgtaaatataaacatgccatagttaacaaatgataaggatgccacatttttcatgcagaaaagaaccacaggtattcagtttcttgtattatgatttctaaagaaaacctattaaatatttggaatttagatgcaagctactcattcacacagaacttttccataaacattgttccacatattgaaaaaactgtaaaattatagcactaacttgattttagaaaatgagcattttttacaactgccatttactgtatgtagaaaaaagacataaaaccttagagaaagccactaccatttttcaagttatcttttccccaacatcaacatcaacatgatatccttcattcagggcatattttttcttcccaggatcaaactgaaaacatgttaaggctatagtttagccagtaagatttaatcacaatttttcttctttaatactaagagatgggtaccttagtacccttcacctaacatctctcggtaaaaagcagacaagatcacaaattacagtaaaaatgtgctcttttttaaggtgggcagattagtttgtcaaagtctcagcccagttcaattcagttgatctcgagtggtgagtattttgtctcttgttaaaccagaccctgggcttgtctgggcagagacagaagctgatttaacagcatagagcacagcgccctacttccccacagacaggctgaattagaagcccctattacaaataagagcaccacgagctaaaatttaccaacccatttatcaggatgaccattgccatttgtcaggtgacagacagcttggtcacaacacaactgtgtcctgagcacacaagattccatcagccctgaaggacagcagaggagtattttccatcatttcaaaccacaaacaaaattaagatttaaactgtgggatgggtaagaaatccccttctttggctgggaatctccaccttaatccttaaaggaccataactggcaaaatccttagtgtacggacaaaagcaaattggaaaagccagccatttactaatttcagaggaacagcatagccaaggctagcgaggcatactttccagttgaaaaaaaatcaaaattttttgccttccatttttctgggtaatgtcctttaagaaaagtgaatgacagtagtaccaaaaaggtattttcctttctcatttaaaagcaaaaacctccctttttaattgcctgtagaaggcaagattttctttcatttttgtccatttgtgtttcagaatcagcacaggtttgaagattagactgttagtcatctgtgctttctttaccaactggctagaacggaacagcatcacagcaacgctgcggatcttggttacacagtgtcagagcttttgttttttgatggggttttatcctcttcaccaccactacccactccattttttttctatttttaagattagaggaaaatgaccattaagaaccagaaaaataattaatctctctggaaaaaggaaagctaaagaagactatgataccatacccatctagaaaccaagaactagtttgaaatcgtttatattcatttctgtagcatgacagggatttcaatcacctttctgaaaagagtgggctgataaacttgtaaatccacacacaactctgagaatacccactgccagcatcaaaaagcaaagatactaattttttaagccaaaaatctgtactaacacatgtaatttcttaatgtgcctaagttaatttctgtatcaattcaataaatggaattgactgaacttcccaacgccactaattattaaaatccatctgcttattctaatgctagtcaccaagagctagactccatctttccaataaaaatgagccctatgtagcactaggtttgaattctaaaattcaaaacaggcatttcattttcttaaggcacacttcctacacacagctatcaggggaaaaagctataaatgtcctgttctttttctgaagtgtggatatcaatataaaatttgttaaagaatatttttaacagctgacttacatgatcgttttcctaatacaggaatacagcgacagacctatctgaaaagtctgtttgggggcatacttttcatatcttattgactaaagcccttgagccaggaaa

SEQ ID NO: 12062 - DNA, 1780 bp, Homo sapiens
  misc_feature (3)..(3): n is a, c, g, or t
aantaccggggggggcgggctgcagctcgtgctgaattcggcacgagatttaatcacaatttttcttctttaatactaagagatgggtaccttagtacccttcacctaacatctctcggtaaaaagcagacaagatcacaaattacagtaaaaatgtgctcttttttaaggtgggcagattagtttgtcaaagtctcagcccagttcaattcagttgatctcgagtggtgagtattttgtctcttgttaaaccagaccctgggcttgtctgggcagagacagaagctgatttaacagcatagagcacagcgccctacttccccacagacaggctgaattagaagcccctattacaaataagagcaccacgagctaaaatttaccaacccatttatcaggatgaccattgccatttgtcaggtgacagacagcttggtcacaacacaactgtgtcctgagcacacaagattccatcagccctgaaggacagcagaggagtattttccatcatttcaaaccacaaacaaaattaagatttaaactgtgggatgggtaagaaatccccttctttggctgggaatctccaccttaatccttaaaggaccataactggcaaaatccttagtgtacggacaaaagcaaattggaaaagccagccatttactaatttcagaggaacagcatagccaaggctagcgaggcatactttccagttgaaaaaaaatcaaaattttttgccttccatttttctgggtaatgtcctttaagaaaagtgaatgacagtagtaccaaaaaggtattttcctttctcatttaaaagcaaaaacctccctttttaattgcctgtagaaggcaagattttctttcatttttgtccatttgtgtttcagaatcagcacaggtttgaagattagactgttagtcatctgtgctttctttaccaactggctagaacggaacagcatcacagcaacgctgcggatcttggttacacagtgtcagagcttttgttttttgatggggttttatcctcttcaccaccactacccactccattttttttctatttttaagattagaggaaaatgaccattaagaaccagaaaaataattaatctctctggaaaaaggaaagctaaagaagactatgataccatacccatctagaaaccaagaactagtttgaaatcgtttatattcatttctgtagcatgacagggatttcaatcacctttctgaaaagagtgggctgataaacttgtaaatccacacacaactctgagaatacccactgccagcatcaaaaagcaaagatactaattttttaagccaaaaatctgtactaacacatgtaatttcttaatgtgcctaagttaatttctgtatcaattcaataaatggaattgactgaacttcccaacgccactaattattaaaatccatctgcttattctaatgctagtcaccaagagctagactccatctttccaataaaaatgagccctatgtagcactaggtttgaattctaaaattcaaaacaggcatttcattttcttaaggcacacttcctacacacagctatcaggggaaaaagctataaatgtcctgttctttttctgaagtgtggatatcaatataaaatttgttaaagaatatttttaacagctgacttacatgatcgttttcctaatacaggaatacagcgacagacctatctgaaaagtctgtttgggggcatacttttcatatcttattgactaaagcccttgagccaggaaa

SEQ ID NO: 12063 - DNA, 798 bp, Homo sapiens
cgtttctcggaaaagcttttcagtaaatgcactcatgctgctccaggagctcttctctgcaacaagccacccatctgccatcaacaagttaagaccaagagaactaacggctgcggaaatgagactgaagctttgattaaccagctgagcagttagaggtggagaaatttaataacttatattcaaaactgatttagggatcagagcaatcacagaaaatgaaaccaatgctttccagagggatatcctaaggaaaaaacaactcgtcctggtggattcaattttacttggaaagcctgggacacagaaaacaggaaactggtcaaaggctcctacatgttagagccttttacagactcactgcgttgagtctaacaaccgcgactgaatgcagcctccaatgtgctcagaagaatgggtaagtctgtgcatttatatgtcttgtacattcaacaaggaatcacgcttttaaaataagctaccgaattcacattttatgagggaaatcaccatcatattttggattttgaggtttaggtaaaagcatatatcgatgatgacagagacatgttttatcttctttttaaatggcttaagttttggtccagtcataccaataaggttaatttttctgcagtaaatgaaaaataagttatatgcagtgaaatcttttgctataatgttggtggtggttgttttttttaaatagcccatatgttctgctgaaaaatatcctatcttcttgttttccttaaattatattctgcaggcttacatttcaagtggccattaggggcc

SEQ ID NO: 12064 - DNA, 753 bp, Homo sapiens
atctcctcctagcttagggtcctgaagtcaggagttccttttttcttaaggattagggaccatgtttttcagggccttttgaagttgttaaagcattgtcaactggctcaactacacaaatgccatcatttattacccactgaccaaaagattaacttccaaatcctcatcctgacactaaaggcacctattatctagccaaaacttaccttcttcactgtgttaggatggtctcgatctcctgaccttttggtccacccacctcggcctcccaaagtgctgggattataggtgtgagccagtgcgcccggcctctcataattttcttaatttttctccatataccatctgaatactaatgtatttatttatttgtttatttctgaatgagactgatatccataaaaatgatctttccttgtatactctaactccctgctttctgggcgcttggcttctcaattaaaggctaatttaccagcttctcttgcatctgggtttgtccaaagtttggggccaatgagatgtgaacggaagttgcatgtattatttctagtttgtgccctaaaaaagaatatgtatgtgttacccttgccctcttaccctctccactggctggggtgcagatgtgatggcaggaattggggcaactactttggacccagaggcagaagccctgtgatgaggatggcagaactgctctattagccctggactgttacatgaaagataaataaacttgtatcttattca

SEQ ID NO: 12065 - DNA, 395 bp, Homo sapiens
gattcaatgcaatctcaatcaaaatcacagccagctttttaagaacagaaagtcacaagttgattctaaaatttacatgaaaatgcaaaggacctagtagacaagaatttttggaaaagaataacaaaatcaaagattttacactacctgaattcagaacttagtaaagcactggtaattatgagagtgtagtattggtgtaaaggcagataaatagatcagtggaacagaatgtagttcaaaatggaccaacacttacatagccagtttattttcaactaagccaccaaagcaattcaatggggaaaagaaagtcttttcaacagactgtgcttgaaaaactggttaactattagggacaaatatttatcttgatgcctgcctcacaacataca

SEQ ID NO: 12066 - DNA, 552 bp, Homo sapiens
ataattcatgaataatgttgtcaaaattacttttaatcacaagattaacctgcaacaactatgtatattatttttatgtgttggcttattatgttcaaaaactttgtttataaaaactgattttgctatttaatttttaatttactttagaaaataatgtagcacaatgttagatttattacatatgtaacaatactatttaatgctgcaaaatcatagcacatgtttgtaactatcacattttattaactgtctttgtacttttaaagaaagaaatatgatcataatctttagttttatttaaatcaaggatcatggatttattttgacatactttctaataattataattttttcctttgtaagcatatgtgcctaaattctcattgagggctttctgtactgtgtaaatagcacagaaaatgtctatataggaatgtttaaaaaatattttctgttgcatgtaactgaaaagatacatctaatatgcaattaaattgaataaaatagtacttagtgaattaaaaagttaagtattgaaaaacattgtca

SEQ ID NO: 12067 - DNA, 330 bp, Homo sapiens
tatgatccaccaaccaacttgttactaatgattagtggtgagctggtaacaagggataaatttttaattcaaagaggtttaacaacagttccatttaattttaaaaagtatgggtcttctcatgaaaatagtgacaaacaggaaagaaagctgtttttgttcaaaataagtattctcgtatttgtgaagtataatatgtacaaacaacccaaacattgtagctggcagtatgtatgttaatgtttttttgtttttgttttgtttttgtttttgagatggagttttgctcttgtcacccaggctggagtgcagtggcatgatctttgctca

SEQ ID NO: 12068 - DNA, 307 bp, Homo sapiens
tctaacttcttcgttgcgaagacagaaactggtcaatgaggtgaagtccattagtaaagcctcacaagacagtgacagcagtagcctagctctgaatccaaaagcctccttcttcccaggaaatgtcataatttttgtgcatggataatgtgaatcttgcaactaaccaaggttcttcttctgctccataaaaaaagtacagcacaatttcactaattatataagacttgtggccaagaaattcagataaaaattctcccctgctttgacttttggccagtttatctaaactagcatgggtttattc

SEQ ID NO: 12069 - DNA, 1032 bp, Homo sapiens
gaaactgacataagctgacactctgctgtatatcttggcacaatattgctttcatctctggagtcgggtgtcttacaaatttaacagtgtcagttgggaccgtccaaagatatttacagtaatgctgaggtcaagcaatggcagtggaactgtacaggatgtgggggctgggccaaagccgtgggactccggatttattttgtgagttggagaattgtctagtcatcagaccaacagaggagcaaacctctaacagcatctccctgcttcttcccaccctctcaacaggaggcattggagaaggtttatctaatgactgacatctgacgcataaggtgcaggcacacttactcagggtgcgaatatttactgagtgtctctgtggggccatacactactctaggcactggacatacaccagtaaagagaagctgtcctcatctgtcttattttctggtcttaaatctaaagccaagaggcatttagcagcacaaatcctcttcagcagtcaacactcccaaagtttcaggcactgaggaaaataaaaacaaaactgtggccctttcccaagaagcgcacagtgtccacaagaatgtgaaagccatctggaaactgataaactgcaaaaagctcagccatcttctgttggcaaaataaaagaatggatgtccttggaagaacgatgtccttggaaagtcatcaaataaaaatgtgagagaaacacagccattagaagctaaacagcttgggacacccttgtttacacagcacgatcactgtaatattttgaagtaaattgttgtttttaaaatccaataaaatctactttccattcaccttgaaaatgtgaattgaaactcaagagccaaaaacaaaaacaaaaacaaaaaacacatgagaacactacatgctgaccctgagtctccaaaacatctattttgtgcaaagcactttgcagtatccaagtacttcacattcattgcctcacggcatgaggaccccctcaaggcctttaaccatcaagatattgct

SEQ ID NO: 12070 - DNA, 592 bp, Homo sapiens
caggataaccaaagtgttgggtttaataagggttggggttctgccaggcaatggagaaggagataagaatattgacaataggtgcaaaagagtaattttagtgatggcccataaatcagtgctgaataacaaaggacaccatgacaggaaagaggtgacatcagtttgaattcctttaaaatggccattagtaaattggaaatccaggtgaggtccaagatgcagtggaatgagtattctagaaagatactaaagggtggtggtcagatttataattaagatttacaaaatagcactattattgccaacaacaagggtgaagagacttttgaaggaaaaatagtcaagggacttgagaggcagggttaggtggatgttgaaatcacaagaacgataagagaagttgtggaggaaagagagaccatgggccagatgttaagtcttcagtgaaggaaagtttggggtaggacacaccacagatattgataacaagaaggagtagaaagtagtataagatcaccccagctactactgaggctaaggcaggaagatctcaagtttgatcctggcttgggcaaaatagcaaggcacc

SEQ ID NO: 12071 - DNA, 550 bp, Homo sapiens
aatcagatgcctttaatcaacgggcttgcttcctcccactccccagacaacctgattcatgagatgcctgcctgttccccgtgggcatctgagtttgcagcccatgctcagtagagtttattcggcaatccttttcctgacctatagcagactcctagcccaccacatttctaatgcagctgttgcaagtcttgtccagacctttcagacccttgatctctccgggagattgtgcctcatacattattgaaaagattgaggccacacaacatgtgctctaatgcctcagctttctgcctttctgcttctaaggtctctgttctctctccattccgtcctccttccctcctttctgactctctttttctttttttcatcacttttaaaaattgtaaaatagaatgtacgtacagaaaaaggaggccgaggcaggagaatcgcttgaacctgggagacagaggttgcagtgaggcgagatcacgcattgcactccagcctgggcaataagagtgaaactctgtctcaacaaaaaagaaaaacaaaaaagaac

SEQ ID NO: 12072 - DNA, 312 bp, Homo sapiens
gaccatcaagatgctccagttcatcgggtattttctctgccccagccctggaatcaaccatttctccaggaggatcatgaaatttggatcaagatctttatatttactttcatattgaagaaactgtgtaaaacagagccaaaccctgtgaataaaattggtgaacatccctagcacaactgctttgaacttaaatagattccaagccccacattgattaggtcccagtgagtttcttctttagtgcaatcgatttttttcccaggtttatgagtcataataaataaaaaattgtatattttggagtatatg

SEQ ID NO: 12073 - DNA, 386 bp, Homo sapiens
gctgctttaatagcggcagctgcctgagtcaggctttctgtgttcccaggaaagggtgggagcgtttgcatcacaagttttagaaacgcacaggaagaggagatagccctcatcaaacgcggtttgccaaaaactgtaacttactctcaatagaaataatatgcattgaaattattatagtcaaatgtacacagccaacaagattcactttcataatgtattttatgaagtataagaaaagtcttgcatttctaaagtaatttggtatacttacgcttgaagtaaataattatacgtaacttcactggaaaaacagtttttaaagataaaaagtaagagctagttatccaaactgtctataggaacagaaacgttactaaaatgaa

SEQ ID NO: 12074 - DNA, 1647 bp, Homo sapiens
ttatcattctcctctttctgagaattaaggacttgccttgtgttttaatccccttcctggccccactccatgcacacggagccggggccgtcgtggctgctgagtggtctgtgcatggcttggctgtgttggtgctggcacagctgcgggtgatctcgtgctagggccctcaggctggcacctctgggcagtcttgtgaaggccgcactggtcatcgtcttcccccaagtggccgttgctcggccaaccagtaactactaaaagcctccccacccaggccctgggctgcgtctgttcagcctggagcaggctcaccctgcacctggggtctggagtgtgctgggggccgggctgtggggtgtgggtcgccaggctcgtggctgctctctggagacgggtcacacgcgttggcagacccctctccgggcctgtgggctgaatgctggcaggggtgctgggctccgtccgtccactgctgatgcgagctgggtgggcttcccttgccttcacccactcaggttggagtagggatggagtcgctgctcctgaggggttctcgggggccaggacgggacttttaattccctcttgagacatcttcggggcctgagtgtgcagggtctgagcccactctgtgatgagtatggggagcatgtggagccccagggcagctcagcgtgtggctcaaggccttctcctgtaggtttttaaatttatttgttcccttgccagaaatgagtatgacacccccaactggccacagttcctgccttaaaatgaccgaggttaaaatgagaaacacagagcttcccttggaggtcacggtacattccagtccaggagagacggagccggtgtctgacttgagtctgtggagggcagcagtgcacccgcccaatctgtgcattcccttctgagcttgatttagcccctctgtttcagtcagtcatgctcattgagaacagacagcaagtgtatgaagcgggtggaggctgattcagcccctgtattgaaaagtcggtcgtgctcattgagaacagacgggaagcgtacgaagcgggtggaaaatcccgcagtccagccattcccttcaaaacatgcctcccagccactcaggaggctgaggcaggaggatcacttgagcccaggaggtcaaggttgcagtgagccatggagtccattgcactccatccttggtgacagagtgagacatcgtttccaaaaaaattctacagaaatgctctatttacaaatttacataatttcctttggaaatagatttaaaaattttttaaggatgaggtaggtaggcaggaaaacggggttctttttggataaaaaaattcacatggccgggtgtcatggctcatgcctgtaatcccagcactttgggaggccgaggcaggcggatcacgaggtcaggagattgagaccatcctggctaacacggtgaaactccgtctctactaaaaatacaaaaaattagccaggcatggtggcgggcgcctgtagtcccagctactcgggaggctgaggcaggagaatggcgtgaacccgggaggtggagcttgcagtgagccaagatcgtgccactgcactccagcctgggcgacagagtgagactccgcctcaaaaaagaaaaaaaaa

SEQ ID NO: 12075 - DNA, 590 bp, Homo sapiens
tttctacttccagtcatgactcctgccctccttcactcctgccacctctgcataggagcctttcaggagtcctggcgccactccagcctccatttcagttgcccactcctccctcactaggtcaaacctgaccaggaaatacggagagaaaccctggcattgcagcaaaatatgctgtgtctgacctctcaggcctgccccctggtttctaagattggtgtttattttcatatcatgtaagcccaactcactggagccaaggtcattttccccacacaaaaataggagcttcagccctgagaagctactatcgtgcccaagaggtccaagccaaagttaagactgtgtcctcccagcactttgggaggccaaggcaggtggagcacgaggttaggagaccgataccatcctggctaacacagtgaaaccccgtctctattaaaaatacaaaaaaattagccaggcatggtggcatgtgcctgtaatcccagctacttgggaggctgacgcaggagaatcgcttgaacctgggagtcggaggttgcagtgagccgagatcacaccactgcactccaccatgggtgacagag

SEQ ID NO: 12076 - DNA, 1140 bp, Homo sapiens
agcagccttagccatccttaaactcatccaaccgattcccatttccgcgggtgcttggcttagtgctgagacgggattccgccgttggtattcaggtccaacactaagactgtgtccatgttagaactcatagaagttaatggaacccctggtagtcagctctctactccgcgctcaggcaagtcgccaagcccatcacccaccagcccaggaagcctgcggaagcagagggacctgtaccgccccctctcttcggatgacttggattcagtaggagactcagtgtaaaagaaacaatggagcaatgtatatggtttgtgattgggtgaaggtttcacatttctgaagcaaaagtcttacagcaaaatacacaaaagagttttgcataccttgaaatgataaaagaccaaatcatccaaaagtaaatatgtatgcattttgttttcgtgatgttcaaccttgaaattgagagatttttaaaaatatctcccacatggatttgattggggagagtttgaacacaaaatgctgagatttttgtacagggcctggctctagatgaatttcatacacggacccaatattgagtacaagaacacactaaccatgtggcaatatagagccagaatttctgcagatggagttttcttcttaattataagtagacatagagatataatttttctgtactttctgtaaagcatattaaaacggcactagcaggcatattttttctaaaggttatattgtttttaaaatttgaattgcttggtttttagaggtacttttattacaaaataataaaaatgcttgggtagattttttttctccctagacagtagaaaaagctacttactgttttgtgggttagtacatccgagagaaaaagaaaaattatgacaacgacacatctcataaagactctgaagttaggctttaggaacttgccttgtttttgttgtcaagtaaattttattttttaaagttattttattagaaacagtataaatttagcttaagctatatgccaatatgaagaacttggccaatggcattgctatagattgtataattttttcttacaatcatatacataattttttaaatgtgtaaaaactaaagctgggaattttttttttt

SEQ ID NO: 12077 - DNA, 4961 bp, Homo sapiens
agcagccttagccatccttaaactcatccaaccgattcccatttccgcgggtgcttggcttagtgctgagacgggattccgccgttggtattcaggtccaacactaagactgtgtccatgttagaactcatagaagttaatggaacccctggtagtcagctctctactccgcgctcaggcaagtcgccaagcccatcacccaccagcccaggaagcctgcggaagcagaggagctctcagcatggcggctcctctacgtcacttgcgtccaccaaagtctgcagctcgatggatgagaacgatggccctggagaagaagtgtcggaggaaggcttccagattccagctacaataacagaacgatataaagtcggaagaacaataggagatggaaattttgctgttgtcaaggaatgtgtagaaagatcgactgctagagagtacgctctgaaaattatcaagaaaagcaaatgtcgaggcaaagagcacatgatccagaatgaagtgtctattttaagaagagtgaagcatcccaatatcgttcttctgattgaggagatggatgtgccaactgaactgtatcttgtcatggaattagtaaaggggggagacctttttgatgccattacttccactaacaaatacaccgagagagacgccagtgggatgctgtacaacctagccagcgccatcaaatacctgcatagcctgaacatcgtccaccgtgatatcaagccagagaacctgctggtgtatgagcaccaagatggcagcaaatcactgaagctgggtgactttggactggccaccattgtagacggccccctgtacacagtctgtggcaccccaacatacgtggctccagaaatcattgcagagactggatacggcctcaaggtggacatctgggcagcaggtgtaatcacttatatcctgctgtgtggtttccctccattccgtggaagtggtgatgaccaggaggtgctttttgatcagattttgatggggcaggtggactttccttctccatactgggataatgtttccgattctgcaaaggagctcattaccatgatgctgttggtcgatgtagatcagcgattttctgctgttcaagtacttgagcatccctgggttaatgatgatggcctcccagaaaatgaacatcagctgtcagtagctggaaagataaagaagcatttcaacacaggccccaagccgaatagcacagcagctggagtttctgtcatagcaaccaccgctcttgataaggagaggcaggttttccgacgaagacgcaaccaggatgtgaggagccggtacaaggcgcagccagctcctcccgaactcaactcggaatcggaagactactccccaagctcctccgagactgttcgctcccctaactcgcccttttaataagacccttttactcaaagtcctagcttaaccctttgagactctgagatttttttcccccaaatttgtgtaaaacagtttcatctgatctatctagcgctcaatgcttgaatggcagaactgaaagtgttttcaggtatctttgtagcggtttccctttactgaataagatgacacgtggtgattgtgaagatggtaatttgctgctaatagagtcctcaaagggttaaggccaatttgcaatttttttttaaacttagaagcaatgaatgttttcatcagtcaagctaggatctgcagtatgtaatatagcacttgttaaccctctgagtgcatagaattttattgagaattcttgtttgggaatttttcaggcctttggatgtatacacacatgtttcttgattttactgcagatcaaggggtgttgttagatgctgaaatgtccagaaaagaaggacatttagaatgatatcttgtttgtccttttctgtgggtttagaacgtggcaggtttataacttcgacacacgcacggttctttcttcttcacaatcctattcagaaacagattttttttttcattagagatatgactgtcagttgcagtgagttctgcatcccaagtggagggaattgggtttgtggcaaagagcttgacccaggaaatagatggtgccccccaaattgtctccacatgaagatgtactgatgacgccccagaaatgctgcttccatatcagctgctgctagcgccagcgcagactctcagggagtcaccacagcttgtcttgtgcttggtgagtgagggtctctctactcagtgtcagacatctacaggaaagaaacaactggtggaaaagagcaataaattgcccggtgctctgcagggctggaatttcaaacagaaagagggaataagatcctgtgatttttctcacctgcttttccacgcactgtggtcatcactgtgcaatctacatctagtatgaaatccacacataggagagctggggcacaaggggactggaggcagttgctttgcaagatggctgaggagaaagcacactgggaacacaatccagaatgttctaacaataagttttcagtgaataaaccactggcaagacaattccatgtgcacctttaggttacctatatagtctcctaggaagatcaggatgaaagacctagatgatacccctgaggataaaacctccatcccctaaaatgattttttttaaataccactgtctttagctgtccaggaggtcagagtgttttttctgtctttgggccaagtcctgtctgagacctgtattttcactcttgttaccaaatctatctccctagtgcagtgtctccaggcctgagtttcttctggaacagattccattttagaatggggattcacaggttctgtgcatcaccacagtgctcagagaggattctcctggggtgtcttagaggcaggtgcccaactcaaatgtattcccaaggtttgctgggctctgggatccacgagacaaccagagagggatatctcatgaaatttgcatctggtggctgaacagtacctatgttctctgttttgaatatactttaatacctgagagtcttaaaatttgtgaacaacgtttctatagtcctttattttcaaatgcacattgatcttcacttgctgcatttttactcttcaaccctgaaactatggtctacattaatatggatttttaaatcacatgtcattacttttgcaacaccatcaccaaaattttttgctcttttacatttaggttcatctctgtggtctgtgttgtcctgacatgtaaaaagcatatcgtttattgaggtttttttcccccccttttagagcatccggaagtgataacacgcaaaatcacaaagtagcataaatcagtaaattagttgagttgtttttggggggggaggtgggggtagggggcacagaacaccagaaagagtgttggtgtgtaggtagattccatattaatgaggaacactgaactagttggaaattactgctttctctagaaatataaagcaaagcactattccaaggctatggagtagctctacagcctggcctcaactctaaaagtgtgaagaatgcaatgggcagagacctacctgcagtggactgtcattttcctttctttctctgaattactgctttttctgtgggcattaactatattgctacagcatctagtgtactgagcctgcggtgcatggctcaggccttttcccatcgacgtctagggggactctggaccgtgtgaagctagggggtgtttctcagcacactgcagaagggcagctcagaagaatgcagggcccattcagcatggggatcccagcacatcactgtagaatttgagtgatctatgctgaataaacagtggaatgtgaccagtcaagtagaaatcttgagtaatcagatggaatgcaatctttctaacattaagctaccaagatcctgaatgtcagagatgtactcagagggttaacagacaagcacaaggcatgctgactacattggtgtatccagattgctttgcttttagccagtgctttctaatttttttctcgacattcttgggatagttcaagtttgaaataattaagtggtggtgttctttaaggaatttctataaccaaattgatcttatttttgatttcacttatcatagaacaaatatgtatcattatggcagtgtatctatgtaattatcaatttaatcatcaccaccggtgtttccatattttttcccaagtatttaatatagctctcttatggtggtggcctggtgatggggaccgtctttcttttactaacacatgaccaatcatatggtattttcaagggaattttaagattcatcttttcagtttgatagtagactagttaaggaagaactctttcattacttgcatcgtgtaaatcatctctgtagacatgtgttcatattaatgaacacattttttctcaacattgtagcagaaatcattttattcgtcatgatcaatgaatatgtgatttgctccagatcgttagaaggaaaagtaagatttcagtcatcaaaaatgtttttaccgtagccctcatctaacttacacgtggtgcatattaaaataagcagagaaaaaaaaatgtgaataaactactgaaaacaaaaaaaaaaaaaaaaaaaaaaaaaaaaaaaaaaaaaaaaaaaaaaaacaaaaaaaaaaaaaaaaaaaaaaaagacacaaaaccacctagcccggtgcgaagcaccattcaaccctcacagaagaaggggataaagaacagaagagaaaacaacccagggacgagagcaaggacacacacagcacccgaaagatagaaagaaaaagacagccgcaagggagaagaaaactagcaaacgagcaagagcactacacatcgcgcgcaaacaagccactgagaccgacgccgccacccgcgagaaaccagacgcggaggaaagacacgagcgcgcaaaaccgagtggctaa

SEQ ID NO: 12078 - DNA, 3734 bp, Homo sapiens
agtttctgtcatagcagcccctgctagaccaccgctcttgataaggagaggcaggttttccgacgaagacgcaaccaggatgtgaggagccggtacaaggcgcagccagctcctcccgaactcaactcggaatcggaagactactccccaagctcctccgagactgttcgctcccctaactcgcccttttaataagacccttttactcaaagtcctagcttaaccctttgagactctgagatttttttcccccaaatttgtgtaaaacagtttcatctgatctatctagcgctcaatgcttgaatggcagaactgaaagtgttttcaggtatctttgtagcggtttccctttactgaataagatgacacgtggtgattgtgaagatggtaatttgctgctaatagagtcctcaaagggttaaggccaatttgcaatttttttttaaacttagaagcaatgaatgttttcatcagtcaagctaggatctgcagtatgtaatatagcacttgttaaccctctgagtgcatagaattttattgagaattcttgtttgggaatttttcaggcctttggatgtatacacacatgtttcttgattttactgcagatcaaggggtgttgttagatgctgaaatgtccagaaaagaaggacatttagaatgatatcttgtttgtccttttctgtgggtttagaacgtggcaggtttataacttcgacacacgcacggttctttcttcttcacaatcctattcagaaacagattttttttttcattagagatatgactgtcagttgcagtgagttctgcatcccaagtggagggaattgggtttgtggcaaagagcttgacccaggaaatagatggtgccccccaaattgtctccacatgaagatgtactgatgacgccccagaaatgctgcttccatatcagctgctgctagcgccagcgcagactctcagggagtcaccacagcttgtcttgtgcttggtgagtgagggtctctctactcagtgtcagacatctacaggaaagaaacaactggtggaaaagagcaataaattgcccggtgctctgcagggctggaatttcaaacagaaagagggaataagatcctgtgatttttctcacctgcttttccacgcactgtggtcatcactgtgcaatctacatctagtatgaaatccacacataggagagctggggcacaaggggactggaggcagttgctttgcaagatggctgaggagaaagcacactgggaacacaatccagaatgttctaacaataagttttcagtgaataaaccactggcaagacaattccatgtgcacctttaggttacctatatagtctcctaggaagatcaggatgaaagacctagatgatacccctgaggataaaacctccatcccctaaaatgattttttttaaataccactgtctttagctgtccaggaggtcagagtgttttttctgtctttgggccaagtcctgtctgagacctgtattttcactcttgttaccaaatctatctccctagtgcagtgtctccaggcctgagtttcttctggaacagattccattttagaatggggattcacaggttctgtgcatcaccacagtgctcagagaggattctcctggggtgtcttagaggcaggtgcccaactcaaatgtattcccaaggtttgctgggctctgggatccacgagacaaccagagagggatatctcatgaaatttgcatctggtggctgaacagtacctatgttctctgttttgaatatactttaatacctgagagtcttaaaatttgtgaacaacgtttctatagtcctttattttcaaatgcacattgatcttcacttgctgcatttttactcttcaaccctgaaactatggtctacattaatatggatttttaaatcacatgtcattacttttgcaacaccatcaccaaaattttttgctcttttacatttaggttcatctctgtggtctgtgttgtcctgacatgtaaaaagcatatcgtttattgaggtttttttcccccccttttagagcatccggaagtgataacacgcaaaatcacaaagtagcataaatcagtaaattagttgagttgtttttggggggggaggtgggggtagggggcacagaacaccagaaagagtgttggtgtgtaggtagattccatattaatgaggaacactgaactagttggaaattactgctttctctagaaatataaagcaaagcactattccaaggctatggagtagctctacagcctggcctcaactctaaaagtgtgaagaatgcaatgggcagagacctacctgcagtggactgtcattttcctttctttctctgaattactgctttttctgtgggcattaactatattgctacagcatctagtgtactgagcctgcggtgcatggctcaggccttttcccatcgacgtctagggggactctggaccgtgtgaagctagggggtgtttctcagcacactgcagaagggcagctcagaagaatgcagggcccattcagcatggggatcccagcacatcactgtagaatttgagtgatctatgctgaataaacagtggaatgtgaccagtcaagtagaaatcttgagtaatcagatggaatgcaatctttctaacattaagctaccaagatcctgaatgtcagagatgtactcagagggttaacagacaagcacaaggcatgctgactacattggtgtatccagattgctttgcttttagccagtgctttctaatttttttctcgacattcttgggatagttcaagtttgaaataattaagtggtggtgttctttaaggaatttctataaccaaattgatcttatttttgatttcacttatcatagaacaaatatgtatcattatggcagtgtatctatgtaattatcaatttaatcatcaccaccggtgtttccatattttttcccaagtatttaatatagctctcttatggtggtggcctggtgatggggaccgtctttcttttactaacacatgaccaatcatatggtattttcaagggaattttaagattcatcttttcagtttgatagtagactagttaaggaagaactctttcattacttgcatcgtgtaaatcatctctgtagacatgtgttcatattaatgaacacattttttctcaacattgtagcagaaatcattttattcgtcatgatcaatgaatatgtgatttgctccagatcgttagaaggaaaagtaagatttcagtcatcaaaaatgtttttaccgtagccctcatctaacttacacgtggtgcatattaaaataagcagagaaaaaaaaatgtgaataaactactgaaaacaaaaaaaaaaaaaaaaaaaaaaaaaaaaaaaaaaaaaaaaaaaaaaaacaaaaaaaaaaaaaaaaaaaaaaaagacacaaaaccacctagcccggtgcgaagcaccattcaaccctcacagaagaaggggataaagaacagaagagaaaacaacccagggacgagagcaaggacacacacagcacccgaaagatagaaagaaaaagacagccgcaagggagaagaaaactagcaaacgagcaagagcactacacatcgcgcgcaaacaagccactgagaccgacgccgccacccgcgagaaaccagacgcggaggaaagacacgagcgcgcaaaaccgagtggctaa

SEQ ID NO: 12079 - DNA, 1523 bp, Homo sapiens
agcagccttagccatccttaaactcatccaaccgattcccatttccgcgggtgcttggcttagtgctgagacgggattccgccgttggtattcaggtccaacactaagactgtgtccatgttagaactcatagaagttaatggaacccctggtagtcagctctctactccgcgctcaggcaagtcgccaagcccatcacccaccagcccaggaagcctgcggaagcagaggagctctcagcatggcggctcctctacgtcacttgcgtccaccaaagtctgcagctcgatggatgagaacgatggccctggagaagaagtgtcggaggaaggcttccagattccagctacaataacagaacgatataaagtcggaagaacaataggagatggaaattttgctgttgtcaaggaatgtgtagaaagatcgactgctagagagtacgctctgaaaattatcaagaaaagcaaatgtcgaggcaaagagcacatgatccagaatgaagtgtctattttaagaagagtgaagcatcccaatatcgttcttctgattgaggagatggatgtgccaactgaactgtatcttgtcatggaattagtaaaggggggagacctttttgatgccattacttccactaacaaatacaccgagagagacgccagtgggatgctgtacaacctagccagcgccatcaaatacctgcatagcctgaacatcgtccaccgtgatatcaagccagagaacctgctggtgtatgagcaccaagatggcagcaaatcactgaagctgggtgactttggactggccaccattgtagacggccccctgtacacagtctgtggcaccccaacatacgtggctccagaaatcattgcagagactggatacggcctcaaggtggacatctgggcagcaggtgtaatcacttatatcctgctgtgtggtttccctccattccgtggaagtggtgatgaccaggaggtgctttttgatcagattttgatggggcaggtggactttccttctccatactgggataatgtttccgattctgcaaaggagctcattaccatgatgctgttggtcgatgtagatcagcgattttctgctgttcaagtacttgagcatccctgggttaatgtaagtgactcgcaccatttcctttgttctctcctaacattccttttaaaaatcagttgcagattttctaatgttattgcctccttttgaaagtgttgtgggccaggcgcagtgtctcacgcctgtaatctcagccctttgggaggccgaggtgggtggattgcctgagctcaggagttcgaggacagcttgggcaacatggcaaaaccccatctctaccaaaaaatacaaaaaattagctgggcatagtggcacaagcctgtggtcccagctactcaggaggctgaggtggtaggattgcttgaccctggaaaccagaggtggtagtaagccaagatcgtgccactgcactccaacctgaatgacagagtgagacatcatct

SEQ ID NO: 12080 - DNA, 577 bp, Homo sapiens
cttatcatagaacaaatatgtatcattatggcagtgtatctatgtaattatcaatttaatcatcaccaccggtgtttccatattttttcccaagtatttaatatagctctcttatggtggtggcctggtgatggggaccgtctttcttttactaacacatgaccaatcatatggtattttcaagggaattttaagattcatcttttcagtttgatagtagactagttaaggaagaactctttcattacttgcatcgtgtaaatcatctctgtagacatgtgttcatattaatgaacacattttttctcaacattgtagcagaaatcattttattcgtcatgatcaatgaatatgtgatttgctccagatcgttagaaggaaaagtaagatttcagtcatcaaaaatgtttttaccgtagccctcatctaacttacacgtggtgcatattaaaataagcagagaaaaaaaaatgtgaataaactactgaaaacaacttggtgttttgtgttcaatgagaccttcctgcaacctgctccccatgggtggcagttaacaggcccatcagatattgttgaa

SEQ ID NO: 12081 - DNA, 6051 bp, Homo sapiens
gcacatccctgcactagtggccgcaaccgagacgccgcgctccagcagctgctgccgcccagcccggccccgccgccgccccccagccctgcagccccgcagccccggccgcgcccagcccggcgaggacagcaccaggaggcggcccccagcgcggccacaaagacccccggcggcgtctctccgcggaccggtcctacttgaagtccatcatgtccttcggcagagacatggagctggagcacttcgacgagcgggataaggcgcagagatacagccgagggtcgcgggtgaacggcctgccgagcccgacgcacagcgcccactgcagcttctaccgcacccgcacgctgcagacgctcagctccgagaagaaggccaagaaagttcgtttctatcgaaacggagatcgatacttcaaagggattgtgtatgccatctccccagaccggttccgatcttttgaggccctgctggctgatttgacccgaactctgtcggataacgtgaatttgccccagggagtgagaacaatctacaccattgatgggctcaagaagatttccagcctggaccaactggtggaaggagagagttatgtatgtggctccatagagcccttcaagaaactggagtacaccaagaatgtgaaccccaactggtcggtgaacgtcaagaccacctcggcttctcgggcagtgtcttcactggccactgccaaaggaagcccttcagaggtgcgagagaataaggatttcattcggcccaagctggtcaccatcatcagaagtggcgtgaagccacggaaagctgtcaggattctgctgaacaagaaaacggctcattcctttgagcaggtcctcaccgatatcaccgatgccatcaagctggactcgggagtggtgaaacgcctgtacacgttggatgggaaacaggtgatgtgccttcaggacttttttggtgatgatgacatttttattgcatgtggaccggagaagttccgttaccaggatgatttcttgctagatgaaagtgaatgtcgagtggtaaagtccacttcttacaccaaaatagcttcatcatcccgcaggagcaccaccaagagcccaggaccgtccaggcgtagcaagtcccctgcctccaccagctcagttaatggaacccctggtagtcagctctctactccgcgctcaggcaagtcgccaagcccatcacccaccagcccaggaagcctgcggaagcagaggagctctcagcatggcggctcctctacgtcacttgcgtccaccaaagtctgcagctcgatggatgagaacgatggccctggagaagaagtgtcggaggaaggcttccagattccagctacaataacagaacgatataaagtcggaagaacaataggagatggaaattttgctgttgtcaaggaatgtgtagaaagatcgactgctagagagtacgctctgaaaattatcaagaaaagcaaatgtcgaggcaaagagcacatgatccagaatgaagtgtctattttaagaagagtgaagcatcccaatatcgttcttctgattgaggagatggatgtgccaactgaactgtatcttgtcatggaattagtaaaggggggagacctttttgatgccattacttccactaacaaatacaccgagagagacgccagtgggatgctgtacaacctagccagcgccatcaaatacctgcatagcctgaacatcgtccaccgtgatatcaagccagagaacctgctggtgtatgagcaccaagatggcagcaaatcactgaagctgggtgactttggactggccaccattgtagacggccccctgtacacagtctgtggcaccccaacatacgtggctccagaaatcattgcagagactggatacggcctcaaggtggacatctgggcagcaggtgtaatcacttatatcctgctgtgtggtttccctccattccgtggaagtggtgatgaccaggaggtgctttttgatcagattttgatggggcaggtggactttccttctccatactgggataatgtttccgattctgcaaaggagctcattaccatgatgctgttggtcgatgtagatcagcgattttctgctgttcaagtacttgagcatccctgggttaatgatgatggcctcccagaaaatgaacatcagctgtcagtagctggaaagataaagaagcatttcaacacaggccccaagccgaatagcacagcagctggagtttctgtcatagcactggaccacgggtttaccatcaagagatcagggtctttggactactaccagcaaccaggaatgtattggataagaccaccgctcttgataaggagaggcaggttttccgacgaagacgcaaccaggatgtgaggagccggtacaaggcgcagccagctcctcccgaactcaactcggaatcggaagactactccccaagctcctccgagactgttcgctcccctaactcgcccttttaataagacccttttactcaaagtcctagcttaaccctttgagactctgagatttttttcccccaaatttgtgtaaaacagtttcatctgatctatctagcgctcaatgcttgaatggcagaactgaaagtgttttcaggtatctttgtagcggtttccctttactgaataagatgacacgtggtgattgtgaagatggtaatttgctgctaatagagtcctcaaagggttaaggccaatttgcaatttttttttaaacttagaagcaatgaatgttttcatcagtcaagctaggatctgcagtatgtaatatagcacttgttaaccctctgagtgcatagaattttattgagaattcttgtttgggaatttttcaggcctttggatgtatacacacatgtttcttgattttactgcagatcaaggggtgttgttagatgctgaaatgtccagaaaagaaggacatttagaatgatatcttgtttgtccttttctgtgggtttagaacgtggcaggtttataacttcgacacacgcacggttctttcttcttcacaatcctattcagaaacagattttttttttcattagagatatgactgtcagttgcagtgagttctgcatcccaagtggagggaattgggtttgtggcaaagagcttgacccaggaaatagatggtgccccccaaattgtctccacatgaagatgtactgatgacgccccagaaatgctgcttccatatcagctgctgctagcgccagcgcagactctcagggagtcaccacagcttgtcttgtgcttggtgagtgagggtctctctactcagtgtcagacatctacaggaaagaaacaactggtggaaaagagcaataaattgcccggtgctctgcagggctggaatttcaaacagaaagagggaataagatcctgtgatttttctcacctgcttttccacgcactgtggtcatcactgtgcaatctacatctagtatgaaatccacacataggagagctggggcacaaggggactggaggcagttgctttgcaagatggctgaggagaaagcacactgggaacacaatccagaatgttctaacaataagttttcagtgaataaaccactggcaagacaattccatgtgcacctttaggttacctatatagtctcctaggaagatcaggatgaaagacctagatgatacccctgaggataaaacctccatcccctaaaatgattttttttaaataccactgtctttagctgtccaggaggtcagagtgttttttctgtctttgggccaagtcctgtctgagacctgtattttcactcttgttaccaaatctatctccctagtgcagtgtctccaggcctgagtttcttctggaacagattccattttagaatggggattcacaggttctgtgcatcaccacagtgctcagagaggattctcctggggtgtcttagaggcaggtgcccaactcaaatgtattcccaaggtttgctgggctctgggatccacgagacaaccagagagggatatctcatgaaatttgcatctggtggctgaacagtacctatgttctctgttttgaatatactttaatacctgagagtcttaaaatttgtgaacaacgtttctatagtcctttattttcaaatgcacattgatcttcacttgctgcatttttactcttcaaccctgaaactatggtctacattaatatggatttttaaatcacatgtcattacttttgcaacaccatcaccaaaattttttgctcttttacatttaggttcatctctgtggtctgtgttgtcctgacatgtaaaaagcatatcgtttattgaggtttttttcccccccttttagagcatccggaagtgataacacgcaaaatcacaaagtagcataaatcagtaaattagttgagttgtttttggggggggaggtgggggtagggggcacagaacaccagaaagagtgttggtgtgtaggtagattccatattaatgaggaacactgaactagttggaaattactgctttctctagaaatataaagcaaagcactattccaaggctatggagtagctctacagcctggcctcaactctaaaagtgtgaagaatgcaatgggcagagacctacctgcagtggactgtcattttcctttctttctctgaattactgctttttctgtgggcattaactatattgctacagcatctagtgtactgagcctgcggtgcatggctcaggccttttcccatcgacgtctagggggactctggaccgtgtgaagctagggggtgtttctcagcacactgcagaagggcagctcagaagaatgcagggcccattcagcatggggatcccagcacatcactgtagaatttgagtgatctatgctgaataaacagtggaatgtgaccagtcaagtagaaatcttgagtaatcagatggaatgcaatctttctaacattaagctaccaagatcctgaatgtcagagatgtactcagagggttaacagacaagcacaaggcatgctgactacattggtgtatccagattgctttgcttttagccagtgctttctaatttttttctcgacattcttgggatagttcaagtttgaaataattaagtggtggtgttctttaaggaatttctataaccaaattgatcttatttttgatttcacttatcatagaacaaatatgtatcattatggcagtgtatctatgtaattatcaatttaatcatcaccaccggtgtttccatattttttcccaagtatttaatatagctctcttatggtggtggcctggtgatggggaccgtctttcttttactaacacatgaccaatcatatggtattttcaagggaattttaagattcatcttttcagtttgatagtagactagttaaggaagaactctttcattacttgcatcgtgtaaatcatctctgtagacatgtgttcatattaatgaacacattttttctcaacattgtagcagaaatcattttattcgtcatgatcaatgaatatgtgatttgctccagatcgttagaaggaaaagtaagatttcagtcatcaaaaatgtttttaccgtagccctcatctaacttacacgtggtgcatattaaaataagcagagaaaaaaaaatgtgaataaactactgaaaacaaaaaaaaaaaaaaaaaaaaaaaaaaaaaaaaaaaaaaaaaaaaaaaacaaaaaaaaaaaaaaaaaaaaaaaagacacaaaaccacctagcccggtgcgaagcaccattcaaccctcacagaagaaggggataaagaacagaagagaaaacaacccagggacgagagcaaggacacacacagcacccgaaagatagaaagaaaaagacagccgcaagggagaagaaaactagcaaacgagcaagagcactacacatcgcgcgcaaacaagccactgagaccgacgccgccacccgcgagaaaccagacgcggaggaaagacacgagcgcgcaaaaccgagtggctaa

SEQ ID NO: 12082 - DNA, 3482 bp, Homo sapiens
agcagccttagccatccttaaactcatccaaccgattcccatttccgcgggtgcttggcttagtgctgagacgggattccgccgttggtattcaggtccaacactaagactgtgtccatgttagaactcatagaagttaatggaacccctggtagtcagctctctactccgcgctcaggcaagtcgccaagcccatcacccaccagcccaggaagcctgcggaagcagaggagctctcagcatggcggctcctctacgtcacttgcgtccaccaaagtctgcagctcgatggatgagaacgatggccctggagaagaagtgtcggaggaaggcttccagattccagctacaataacagaacgatataaagtcggaagaacaataggagatggaaattttgctgttgtcaaggaatgtgtagaaagatcgactgctagagagtacgctctgaaaattatcaagaaaagcaaatgtcgaggcaaagagcacatgatccagaatgaagtgtctattttaagaagagtgaagcatcccaatatcgttcttctgattgaggagatggatgtgccaactgaactgtatcttgtcatggaattagtaaaggggggagacctttttgatgccattacttccactaacaaatacaccgagagagacgccagtgggatgctgtacaacctagccagcgccatcaaatacctgcatagcctgaacatcgtccaccgtgatatcaagccagagaacctgctggtgtatgagcaccaagatggcagcaaatcactgaagctgggtgactttggactggccaccattgtagacggccccctgtacacagtctgtggcaccccaacatacgtggctccagaaatcattgcagagactggatacggcctcaaggtggacatctgggcagcaggtgtaatcacttatatcctgctgtgtggtttccctccattccgtggaagtggtgatgaccaggaggtgctttttgatcagattttgatggggcaggtggactttccttctccatactgggataatgtttccgattctgcaaaggagctcattaccatgatgctgttggtcgatgtagatcagcgattttctgctgttcaagtacttgagcatccctgggttaatgatgatggcctcccagaaaatgaacatcagctgtcagtagctggaaagataaagaagcatttcaacacaggccccaagccgaatagcacagcagctggagtttctgtcatagcaaccaccgctcttgataaggagaggcaggttttccgacgaagacgcaaccaggatgtgaggagccggtacaaggcgcagccagctcctcccgaactcaactcggaatcggaagactactccccaagctcctccgagactgttcgctcccctaactcgcccttttaataagacccttttactcaaagtcctagcttaaccctttgagactctgagatttttttcccccaaatttgtgtaaaacagtttcatctgatctatctagcgctcaatgcttgaatggcagaactgaaagtgttttcaggtatctttgtagcggtttccctttactgaataagatgacacgtggtgattgtgaagatggtaatttgctgctaatagagtcctcaaagggttaaggccaatttgcaatttttttttaaacttagaagcaatgaatgttttcatcagtcaagctaggatctgcagtatgtaatatagcacttgttaaccctctgagtgcatagaattttattgagaattcttgtttgggaatttttcaggcctttggatgtatacacacatgtttcttgattttactgcagatcaaggggtgttgttagatgctgaaatgtccagaaaagaaggacatttagaatgatatcttgtttgtccttttctgtgggtttagaacgtggcaggtttataacttcgacacacgcacggttctttcttcttcacaatcctattcagaaacagattttttttttcattagagatatgactgtcagttgcagtgagttctgcatcccaagtggagggaattgggtttgtggcaaagagcttgacccaggaaatagatggtgccccccaaattgtctccacatgaagatgtactgatgacgccccagaaatgctgcttccatatcagctgctgctagcgccagcgcagactctcagggagtcaccacagcttgtcttgtgcttggtgagtgagggtctctctactcagtgtcagacatctacaggaaagaaacaactggtggaaaagagcaataaattgcccggtgctctgcagggctggaatttcaaacagaaagagggaataagatcctgtgatttttctcacctgcttttccacgcactgtggtcatcactgtgcaatctacatctagtatgaaatccacacataggagagctggggcacaaggggactggaggcagttgctttgcaagatggctgaggagaaagcacactgggaacacaatccagaatgttctaacaataagttttcagtgaataaaccactggcaagacaattccatgtgcacctttaggttacctatatagtctcctaggaagatcaggatgaaagacctagatgatacccctgaggataaaacctccatcccctaaaatgattttttttaaataccactgtctttagctgtccaggaggtcagagtgttttttctgtctttgggccaagtcctgtctgagacctgtattttcactcttgttaccaaatctatctccctggtgatggggaccgtctttcttttactaacacatgaccaatcatatggtattttcaagggaattttaagattcatcttttcagtttgatagtagactagttaaggaagaactctttcattacttgcatcgtgtaaatcatctctgtagacatgtgttcatattaatgaacacattttttctcaacattgtagcagaaatcattttattcgtcatgatcaatgaatatgtgatttgctccagatcgttagaaggaaaagtaagatttcagtcatcaaaaatgtttttaccgtagccctcatctaacttacacgtggtgcatattaaaataagcagagaaaaaaaaatgtgaataaactactgaaaacaaaaaaaaaaaaaaaaaaaaaaaaaaaaaaaaaaaaaaaaaaaaaaaacaaaaaaaaaaaaaaaaaaaaaaaagacacaaaaccacctagcccggtgcgaagcaccattcaaccctcacagaagaaggggataaagaacagaagagaaaacaacccagggacgagagcaaggacacacacagcacccgaaagatagaaagaaaaagacagccgcaagggagaagaaaactagcaaacgagcaagagcactacacatcgcgcgcaaacaagccactgagaccgacgccgccacccgcgagaaaccagacgcggaggaaagacacgagcgcgcaaaaccgagtggctaa

SEQ ID NO: 12083 - DNA, 702 bp, Homo sapiens
tgacctcaaatgatccacccgactcggcctcccaaagagctggaattacaggagaagctaaacgttttaaaataagtatattatttctgaattactataacagacatggactccatttgaacaagatacttaattcccatcaaaaacttgtcaaaatatacaaatttagtcacaagacactttactaccatctaccaaagctgtagtaaacacacacattttccatctttgaaatgaaataacgtataataatgttttccaaaataacaaagatgtctgcagtgaatagcactccctttgatgtggcaactgggtcaatcgtgttaacaactgtgaattcatctttttaagaaattcttttattgtttcttttcttttccgcgacagtctcactcgtgttgccccggctggagtgcagtggcgctatcttggctcactgcagcctccgcctcccgggttcaagcaattctcatgcctcagcctcctgagtagctgggattataggcacgtgccaccacacccagctaatttttttgtatttttagtagagacggggtttgaccatgttggtcagggtggtctcgaattcctgacctcagttgagccgccggcctcggcctcccaggaagtgctgggattacaggcatgagccaccaggcccggccttattgtttctatttgtaataaatctgttccccttgc

SEQ ID NO: 12084 - DNA, 373 bp, Homo sapiens
tgtagagatggggtctcactatgttgctcaggttggtcttgaactcctggattcaagtgatccacctgccttggcttcccaaagtgctgggattatagacttgtgtgactattagagtggtgagtgaataagctttttcttattttccaaatgcaatttatcagaaaatcctcttggctcaaaatatgtccagcatccaaccacatctcaccacctccaccactgtttccctgctccaagcttccacctctcttggatatttgcaatggcattttaaatggcctccttgattctgctctctccctcctatatttcccacaaagcagctagagtacactttttgaaacataagtcagatcatatcattcccata

SEQ ID NO: 12085 - DNA, 364 bp, Homo sapiens
gaaagaagacttttaataaactagtccttaaggctgatgaaaatattaattataaagcacacagagtaccttcccttagagaaacaattgattcattcaatataaaatctagaagtgactttttaaagtggtatgtctcctgcaatgatttctttataatctctctgtaaacactaagttctagtatagaattaaaaaattaagggccctaagttgtattgaattttaaaagaataaagtataaagaaaacattttctcctggcttacatttttctgtcataactatctctcattgaggaagttcttcctttctaaaataagtctctattttcatattgtactgtaaaaagagaaaaatataca

SEQ ID NO: 12086 - DNA, 305 bp, Homo sapiens
cgtcgcctactcttggactggacagaactcttcccagttccagctgctttttgtggtttggcctcctctgctttcccagggaggatctttctggccatttttggtgttgttggcccaggccccttggaggccacattgcttacttgcatcctctgctctggaggctgctgggtaggtcttgtagctgttggtggtttcctcacccatttgtattttggggactgtggggacgtggtttggctgtaaatgccatccgtaggctttaggtcttgctagctggttgcactttctgttctgaaggggac

SEQ ID NO: 12087 - DNA, 386 bp, Homo sapiens
cctctaaagtgggcttccctttcaccctaattccatcaagctctttaaatctcaattcaagtggcacttcctctcagaaacctttcaggaacctcccatgcctcccttctcccctcaggttaattacactgtcctctgggttcttttaattttaggtgcttatagccatctcaactaatccctgtaacaactaataattaccgcgttgtaactgtttaacaacacatccatttatcatattagactatgacctttattttccagcttattcttttttattttactgatacatgatattttatatattaatgagggcaccatactgcaagtattttttacatgcatagaatgtgtaacgatcaagtcagagtatctgaggtatccac

SEQ ID NO: 12088 - DNA, 979 bp, Homo sapiens
gaggaatttagcctcttatagtgaaatgagtccaactctgggctttgcttagaggagagctcctgtcaggcttcctataatatgaaaagaagtcaccattggggaactagagaccccagaccttttcatatggatatttgagaatgtaatgcatctcaggcctcgtgctggaactctagggcactctaggcaggctcagaacacttgatattcctgacagctacacacctgacatgcaggtacatacctgatcggtgtcatctcctaacaaggattttcagttcctcgggagagcaataatctttgtaggaaagacatccctgcaataggtgatatgtggtccttagaagttttattcctttactacttggaagaaaagttctttggtgattcttctctgcttttgaagatgatcaaaagcatcttcattgattttctgaaacgaaagccttgtctgaaaccaattaatacttgggaaacagctgggcttggaggagtagaatgccagagataaatccatggctcctgctctggctctcttctgcagaaatgagggcaacagtgaggccacttccctggcaaatgtgcagctcaggatagggaagcataagaccctctgtttaaaagagagtcaagtaggtaaccaaagccaagctctgtgcaaggtgctttggagttgtaaattgaggagtgcatccttgctgtcttgaaccattctgtttgcaatggtgagaccttacataacctagccttgcagggccgcacacaacctggagtcctagagttggaggaaccttgtatccatctgacttctcattttgcagaatatgatgagaacagtagaggatcgctctgttcaccactcttgctattccattagtggggagatgcctgctagcatgtgtgaggggaacactctgatacactgggaagtatcggaaattcccagaaacacaaacataaaataactctcctagac

SEQ ID NO: 12089 - DNA, 925 bp, Homo sapiens
gaggaatttagcctcttatagtgaaatgagtccaactctgggctttgcttagaggagagctcctgtcaggcttcctataatatgaaaagaagtcaccattggggaactagagaccccagaccttttcatatggatatttgagaatgtaatgcatctcaggcctcgtgctggaactctagggcactctaggcaggctcagaacacttgatattcctgacagctacacacctgacatgcaggtacatacctgatcggtgtcatctcctaacaaggattttcagttcctcgggagagcaataatctttgtaggaaagacatccctgcaataggtgatatgtggtccttagaagttttattcctttactacttggaagaaaagttctttggtgattcttctctgcttttgaagatgatcaattgggaaacagctgggcttggaggagtagaatgccagagataaatccatggctcctgctctggctctcttctgcagaaatgagggcaacagtgaggccacttccctggcaaatgtgcagctcaggatagggaagcataagaccctctgtttaaaagagagtcaagtaggtaaccaaagccaagctctgtgcaaggtgctttggagttgtaaattgaggagtgcatccttgctgtcttgaaccattctgtttgcaatggtgagaccttacataacctagccttgcagggccgcacacaacctggagtcctagagttggaggaaccttgtatccatctgacttctcattttgcagaatatgatgagaacagtagaggatcgctctgttcaccactcttgctattccattagtggggagatgcctgctagcatgtgtgaggggaacactctgatacactgggaagtatcggaaattcccagaaacacaaacataaaataactctcctagac

SEQ ID NO: 12090 - DNA, 415 bp, Homo sapiens
aagttactctggagtgggaaggcttggaccagtcttgggaaaacaaatgggaattagcctgggcagagaaaaggggaaggggttgttatgggctgaattgtgtcctcccaaaattatattgaagccctaacagccgtaacctcagaatgtgactgtatttggagacagggctttggggtgattaagttcagatgaagccgttagggtgggttctaatccagtctgacagttttccttataagaaggaaatttgagcacaaaaagagacacaggagttgcacacacaaaggaaagaccatgtgaggattcatcaagaagaccaaggagagaggcctcaggagaaaccaacctgccaacaccttgattttggacttccagactccagtattgtgaaaaaataaatttctgttgttga

SEQ ID NO: 12091 - DNA, 285 bp, Homo sapiens
ctccacaaaaaaatttaaaaaattagctaagtatggtggcatgcacctgtggtcccaactacttgggagggtgaggcaggagaattgcttgagaccaggatgatcccttgatcctggcagggggtggagttgaggccgcattccaacctgggcaacagagtgagaccctgtctcaaaagataaataaaaaagaatagacatataatatgtaacttccaaacaaatgaaagggaaataaaggagtacgagaagaaaggcaaattcaatgatccaaaacaaagtgag

SEQ ID NO: 12092 - DNA, 623 bp, Homo sapiens
gtcgtttgaagtgagacagggcagtcccttggcctcaccttccacctcggacacctgtgctgagcctgtggcatgtcaccatacctaaactcatggcaggatgagcgccctggcagtgggaacaggccatgcagaggccccggggagggagtaagctaggtcagggggctgagtaaagacaggttcttaaccccatgaggctccgtgggtgactctgggtgggatgggggctttagcaggggagagttgggacctgcttggagcgaaggccactctggttgccatggccacgaggacaagcaggggactgtgggaagctgatgctgtggtccagttgagacaagacttgggtggcagagagacagtggacagggtggagccgtgaagtcaccctcccagtacatgagagaagacgtccaagcccagtccctgacaccagtccagccagaggcagggaggagagcagagtggagggacacaggatgacagtggggcgtggggaggccagcctctgctgtgagagctctgagatagggacgatggtacctctgaccttccctacccctccaagccctctgtcctgctggaaggagatgccaggaggagacccaggtgctgaggag

SEQ ID NO: 12093 - DNA, 480 bp, Homo sapiens
gctcagctggggtattttattagcaacgattctaccagcttggggaaggcatctagaatccatgctcagaatcactaagctatcctgcctctaactgtggtaataaatacatggtatactctttcaccatcaattttacctttaagataaaataagaaacaatcattcccacaatacgtaaaaattttccacgttggttaatagatgacagagatgaaatgaaaggcatgggcacacctaaaataaatgcttctatttttgcttctgtatgacatctccgacaagcaatggattttagcctgttgttgactgtcagtgacatacctacatttatgaaatttttcaacaccatgtaggcctgtggtgctaaggtcggacatgtgaaatacatgcaggaattaaatttccacaattgttcaatttccaaacttacccaaattaacaaagcaatacataatattatcttaggaaaatagtacc

SEQ ID NO: 12094 - DNA, 523 bp, Homo sapiens
gaggccaaggcgggaggataacttgaggtcaggagttctagacaagcctggacaacttagagtcctgtttctatgaaatactaaaaatcaaaaataaagaaataaaaatttttttttgttgtagtgggtatgtctgtggtccccactctcaggaggctgatgtgggaggattgcttgagtcaagagtttaaggctgcattgagctatggtcgtgccattgcactcttagctgagcagcagagcaagacgctctcttttttttgagatggagtcttgctctgttgccaggctggagtgcagtggcgcaatctcatctcactgcaacctccacctcccaggttcaagtgattcccctgcctcagcctcccaagtggctaagattgcaggcatacgccaccatgcctaattttttgtattttagtagagacgggatttcaccatcttggccaagatggtctcgatctctccttaccttgtgatctgcccatcttggcctcccaaagtgctgggattacaggcatga

SEQ ID NO: 12095 - DNA, 592 bp, Homo sapiens
aaattcagaacatagcaaaaggttctggctaacatgcagaacagtatgtctggactcccactactgttggtctgcaaagttgaaggctactctaggcaaatatgtcacctttaatgtatctccttaggaggagtctttcaccttattcatgctcctcagcacccacaccaaaagattcatgaagtaaatgttacctagtctctgctttaccccattacccccggcctgaggacctttgaaccattttaaatgctctacctgccagcctggccatctgtgcattgcttgctccatccacccttctgactcagctgaaataccaccttcccaaagaagtctaagtgaccacctcatctaaattgggtttcctgcccacccctcctctatcactttgcgcatggttgtatttctatcacagaacttccgtccatcattcgtgtccttcgttttgtacttgtttatcatatatcctctgtagaacagaacattctgagaagacggactttgggtgtctttctacaaaatcctccattcctaaaactgctttacctgtagatggtcctcaacaaatatctaaaacattttaaataac

SEQ ID NO: 12096 - DNA, 365 bp, Homo sapiens
ccacgttccaggaggttgtccaagacactacctggaagaaaggctactaatcacagctactctgaaataacacaatgtgcccagaaagaactgtttgagagaactggaaaacatctactttatgtttgataggtctcaaatttcaaaaggtcaaatttcattacatttcaatgtaatcatggaaggttcaatgacaaagtcagactgtatggaataacaagaacaactaaagcctattaacaaaacaaagagagaactgagaataattaggataaggggtcaataacaaactgagggaaaaggttaaaatagggtagattatgcaacagaaacaactcccaaattacagtagcctaacacaaagg

SEQ ID NO: 12097 - DNA, 735 bp, Homo sapiens
taggtatgatttgtgcagccagtcttagaggaaatacatcattttaacattattcccacaaaatgttaaagctcaatggtttgactatgagagtcaaacaattactatttgaaaatctcttatgacatttttataatctactctgtttttatttgcatgattatgcttatgtgatgaaccatccatgattctgatattgtatttctttccagtattaacatgtgtattgtgtggccaactctgatttgtacaccgtattattgttgtaatgattcaactgttcctacatttaattgcagtttaattattatgccttttggggttaaatgatgtgaagtgtttccacctactgataaataccatatgaaaacacgactaaaagactgatttaagaaacttgttatttttaaaaatatgaatttcaaaagaaatgttctcaaagacacatgcatttattttaaattcaaaaaattcttatgaatttattattgcttgtactttaactttttttattgtagacaatcctaagtgaataatgtctcatgggagaacacatgatatgtgcttgtatttgtgtaatctgatcatgcactcaatggttggaaaaggcactccagtgctaagaaaataaccagaagccaatatatcgattcttatatctcggtttatgttaccaactgaatatggtgtaatgcataactttttccagtaaataaactggttattttttgttca

SEQ ID NO: 12098 - DNA, 425 bp, Homo sapiens
acaccagactttggaggattaaaggagcaaagacttatttcttggttgcactaaaagtctgttatgcgttggctgtgagtctgtttcacgttgtctgcgatctggaacccaggctgctgtggtggttccatatggaaagttcccggtgaccaccgaggaggaagagagtgtggcaaaatgaagttacttccctgacgtcctcagtccacgaaagtcatgtggccacaccacattcaagtgggcaagaaatcaaaccacatgatctgaaagagacctttgtgaatatttccaaataaccgcatgtgacctccacacttagctcccttacatcttcagttttggtcgggctcagtggctcacgcctgtaatcccagcactttgggaggctgaggcgggcagatcacctgaggtcaggagtttgagac

SEQ ID NO: 12099 - DNA, 1065 bp, Homo sapiens
tctccctgggtagtggcccctgactttgccctcaaacctttagaaagtttcctgtggggcttggactgcaggaccccataaaagccaccactgagggacactgggccttcatagccacaaaaggtcttttggtgccagccgacagtgggcatgcgcccccctgccccacgccgccctttcctgggtgccaagctctttccaagcgacatttgcgtccatctgggctgcctcgtcctagcctggctgctcaagctctaactaaggcagcctctggcctccctccccaggcccagggcaggagctggctgctggccagcggttgtcttctgggtcggtgggggtggagtctggctggtctgtcctccaccctttccgcctcctggcaagtcctgagctgcacctcattgcccggccaaagggcagagacacgagcgactgggggcacctctgacgtgcagttcctggcctcggtgctgcccccagacacggatcctgcgttcttcgagcaccttcgggccctcgactgctccgaggtgacggtgcgagccctgcccgagggctccctcgccttccccggagtgccgctcctgcaggtgtccgggccgctcctggtggtgcagctgctggagacaccgctgctctgcctggtcagctacgccagcctggtggccaccaacgcagcgcggcttcgcttgatcgcagggccagagaagcggctgctagagatgggcctgaggcgggctcagggccccgatgggggcctgacagcctccacctacagctacctgggcggcttcgacagcagcagcaacgtgctagcgggccagctgcgaggtgtgccggtggccgggaccctggcccactccttcgtcacttccttttcaggcagcgaggtgccccctgacccggtcagtccctcctctaaaccctgctgtctccaggcgacaggccccaagccagcccttgccctggcgagaggtgtgccacccaaggcaggtcaccccagtgctgtcccaaggaagctggcacgggctgcattacctttgctctcaaactagggtgtcc

SEQ ID NO: 12100 - DNA, 2477 bp, Homo sapiens
tctccctgggtagtggcccctgactttgccctcaaacctttagaaagtttcctgtggggcttggactgcaggaccccataaaagccaccactgagggacactgggccttcatagccacaaaaggtcttttggtgccagccgacagtgggcatgcgcccccctgccccacgccgccctttcctgggtgccaagctctttccaagcgacatttgcgtccatctgggctgcctcgtcctagcctggctgctcaagctctaactaaggcagcctctggcctccctccccaggcccagggcaggagctggctgctggccagcggttgtcttctgggtcggtgggggtggagtctggctggtctgtcctccaccctttccgcctcctggcaagtcctgagctgcacctcattgcccggccaaagggcagagacacgagcgactgggggcacctctggtgaccaagaccgggctgcgctccaaagaggccgttgggcctggagtggggttgggggggtccgagaggagttgggtgacatcccccaccccatcccgggtccagctgtttcagcccctctcggcgcgccgatactattagccccacccgtcctccatcgagtcccgtgccgctcccaaaccgcacgataagccccacagggagtgcgccataggccggggcgcgtcacggggccggggcggggcggagtccggacgtcgggagcaggatggcggcggagcaggaccccgaggcgcgcgcggcggcgcggccgctgctcactgacctctaccaggccaccatggcgttgggctattggcgcgcgggccgggcgcgggacgccgccgagttcgagctcttcttccgccgctgcccgttcggcggcgccttcgccttggccgccggcttgcgcgactgtgtgcgcttcctgcgcgccttccgcctgcgggacgccgacgtgcagttcctggcctcggtgctgcccccagacacggatcctgcgttcttcgagcaccttcgggccctcgactgctccgaggtgacggtgcgagccctgcccgagggctccctcgccttccccggagtgccgctcctgcaggtgtccgggccgctcctggtggtgcagctgctggagacaccgctgctctgcctggtcagctacgccagcctggtggccaccaacgcagcgcggcttcgcttgatcgcagggccagagaagcggctgctagagatgggcctgaggcgggctcagggccccgatgggggcctgacagcctccacctacagctacctgggcggcttcgacagcagcagcaacgtgctagcgggccagctgcgaggtgtgccggtggccgggaccctggcccactccttcgtcacttccttttcaggcagcgaggtgccccctgacccgatgttggcgccagcagctggtgagggccctggggtggacctggcggcaaagcccaggtgtggctggagcaggtgtgtgcccacctggggctgggggtgcaggagccgcatccaggcgagcgggcagcctttgtggcctatgccttggcttttccccgggccttccagggcctcctggacacctacagcgtgtggaggagtggtctccccaacttcctagcagtcgccttggccctgggagagctgggctaccgggcagtgggcgtgaggctggacagtggtgacctgctacagcaggctcaggagatccgcaaggtcttccgagctgctgcagcccagttccaggtgccctggctggagtcagtcctcatcgtagtcagcaacaacattgacgaggaggcgctggcccgactggcccaggagggcagtgaggtgaatgtcattggcattggcaccagtgtggtcacctgcccccaacagccttccctgggtggcgtctataagctggtggccgtggggggccagccacgaatgaagctgaccgaggaccccgagaagcagacgttgcctgggagcaaggctgctttccggctcctgggctctgacgggtctccactcatggacatgctgcagttagcagaagagccagtgccacaggctgggcaggagctgagggtgtggcctccaggggcccaggagccctgcaccgtgaggccagcccaggtggagccactactgcggctctgcctccagcagggacagctgtgtgagccgctcccatccctggcagagtctagagccttggcccagctgtccctgagccgactcagccctgagcacaggcggctgcggagccctgcacagtaccaggtggtgctgtccgagaggctgcaggccctggtgaacagtctgtgtgcggggcagtccccctgagactcggagcggggctgactggaaacaacacgaatcactcacttttccccaaaaaaaaaaagaaaaaagagcgggacacgccaagagattcaccagagggggcacgagatcaagcatcccaatttcttgtaacaggggccaca

SEQ ID NO: 12101 - DNA, 2554 bp, Homo sapiens
tctccctgggtagtggcccctgactttgccctcaaacctttagaaagtttcctgtggggcttggactgcaggaccccataaaagccaccactgagggacactgggccttcatagccacaaaaggtcttttggtgccagccgacagtgggcatgcgcccccctgccccacgccgccctttcctgggtgccaagctctttccaagcgacatttgcgtccatctgggctgcctcgtcctagcctggctgctcaagctctaactaaggcagcctctggcctccctccccaggcccagggcaggagctggctgctggccagcggttgtcttctgggtcggtgggggtggagtctggctggtctgtcctccaccctttccgcctcctggcaagtcctgagctgcacctcattgcccggccaaagggcagagacacgagcgactgggggcacctctggtgaccaagaccgggctgcgctccaaagaggccgttgggcctggagtggggttgggggggtccgagaggagttgggtgacatcccccaccccatcccgggtccagctgtttcagcccctctcggcgcgccgatactattagccccacccgtcctccatcgagtcccgtgccgctcccaaaccgcacgataagccccacagggagtgcgccataggccggggcgcgtcacggggccggggcggggcggagtccggacgtcgggagcaggatggcggcggagcaggaccccgaggcgcgcgcggcggcgcggccgctgctcactgacctctaccaggccaccatggcgttgggctattggcgcgcgggccgggcgcgggacgccgccgagttcgagctcttcttccgccgctgcccgttcggcggcgccttcgccttggccgccggcttgcgcgactgtgtgcgcttcctgcgcgccttccgcctgcgggacgccgacgtgcagttcctggcctcggtgctgcccccagacacggatcctgcgttcttcgagcaccttcgggccctcgactgctccgaggtgacggtgcgagccctgcccgagggctccctcgccttccccggagtgccgctcctgcaggtgtccgggccgctcctggtggtgcagctgctggagacaccgctgctctgcctggtcagctacgccagcctggtggccaccaacgcagcgcggcttcgcttgatcgcagggccagagaagcggctgctagagatgggcctgaggcgggctcagggccccgatgggggcctgacagcctccacctacagctacctgggcggcttcgacagcagcagcaacgtgctagcgggccagctgcgaggtgtgccggtggccgggaccctggcccactccttcgtcacttccttttcaggcagcgaggtgccccctgacccgatgttggcgccagcagctggtgagggccctggggtggacctggcggcaaagcccaggtgtggctggagcaggtgtgtgcccacctggggctgggggtgcaggagccgcatccaggcgagcgggcagcctttgtggcctatgccttggcttttccccgggccttccagggcctcctggacacctacagcgtgtggaggagtggtctccccaacttcctagcagtcgccttggccctgggagagctgggctaccgggcagtgggcgtgaggctggacagtggtgacctgctacagcaggctcaggagatccgcaaggtcttccgagctgctgcagcccagttccaggtgccctggctggagtcagtcctcatcgtagtcagcaacaacattgacgaggaggcgctggcccgactggcccaggagggcagtgaggtgaatgtcattggcattggcaccagtgtggtcacctgcccccaacagccttccctgggtggcgtctataagctggtggccgtggggggccagccacgaatgaagctgaccgaggaccccgagaagcagacgttgcctgggagcaaggctgctttccggctcctgggctctgacggtgaggccctcccatcccccctgctgtccaccttcaaagcaccagggcccccgcttattcttgccccgtccacacagggtctccactcatggacatgctgcagttagcagaagagccagtgccacaggctgggcaggagctgagggtgtggcctccaggggcccaggagccctgcaccgtgaggccagcccaggtggagccactactgcggctctgcctccagcagggacagctgtgtgagccgctcccatccctggcagagtctagagccttggcccagctgtccctgagccgactcagccctgagcacaggcggctgcggagccctgcacagtaccaggtggtgctgtccgagaggctgcaggccctggtgaacagtctgtgtgcggggcagtccccctgagactcggagcggggctgactggaaacaacacgaatcactcacttttccccaaaaaaaaaaagaaaaaagagcgggacacgccaagagattcaccagagggggcacgagatcaagcatcccaatttcttgtaacaggggccaca

SEQ ID NO: 12102 - DNA, 2574 bp, Homo sapiens
tctccctgggtagtggcccctgactttgccctcaaacctttagaaagtttcctgtggggcttggactgcaggaccccataaaagccaccactgagggacactgggccttcatagccacaaaaggtcttttggtgccagccgacagtgggcatgcgcccccctgccccacgccgccctttcctgggtgccaagctctttccaagcgacatttgcgtccatctgggctgcctcgtcctagcctggctgctcaagctctaactaaggcagcctctggcctccctccccaggcccagggcaggagctggctgctggccagcggttgtcttctgggtcggtgggggtggagtctggctggtctgtcctccaccctttccgcctcctggcaagtcctgagctgcacctcattgcccggccaaagggcagagacacgagcgactgggggcacctctggtgaccaagaccgggctgcgctccaaagaggccgttgggcctggagtggggttgggggggtccgagaggagttgggtgacatcccccaccccatcccgggtccagctgtttcagcccctctcggcgcgccgatactattagccccacccgtcctccatcgagtcccgtgccgctcccaaaccgcacgataagccccacagggagtgcgccataggccggggcgcgtcacggggccggggcggggcggagtccggacgtcgggagcaggatggcggcggagcaggaccccgaggcgcgcgcggcggcgcggccgctgctcactgacctctaccaggccaccatggcgttgggctattggcgcgcgggccgggcgcgggacgccgccgagttcgagctcttcttccgccgctgcccgttcggcggcgccttcgccttggccgccggcttgcgcgactgtgtgcgcttcctgcgcgccttccgcctgcgggacgccgacgtgcagttcctggcctcggtgctgcccccagacacggatcctgcgttcttcgagcaccttcgggccctcgactgctccgaggtgacggtgcgagccctgcccgagggctccctcgccttccccggagtgccgctcctgcaggtgtccgggccgctcctggtggtgcagctgctggagacaccgctgctctgcctggtcagctacgccagcctggtggccaccaacgcagcgcggcttcgcttgatcgcagggccagagaagcggctgctagagatgggcctgaggcgggctcagggccccgatgggggcctgacagcctccacctacagctacctgggcggcttcgacagcagcagcaacgtgctagcgggccagctgcgaggtgtgccggtggccgggaccctggcccactccttcgtcacttccttttcaggcagcgaggtgccccctgacccgatgttggcgccagcagctggtgagggccctggggtggacctggcggcaaagcccaggtgtggctggagcaggtgtgtgcccacctggggctgggggtgcaggagccgcatccaggcgagcgggcagcctttgtggcctatgccttggcttttccccgggccttccagggcctcctggacacctacagcgtgtggaggagtggtctccccaacttcctagcagtcgccttggccctgggagagctgggctaccgggcagtgggcgtgaggctggacagtggtgacctgctacagcaggctcaggagatccgcaaggtcttccgagctgctgcagcccagttccaggtgccctggctggagtcagtcctcatcgtagtcagcaacaacattgacgaggaggcgctggcccgactggcccaggagggcagtgaggtgaatgtcattggcattggcaccagtgtggtcacctgcccccaacagccttccctgggtggcgtctataagctggtggccgtggggggccagccacgaatgaagctgaccgaggaccccgagaagcagacgttgcctgggagcaaggctgctttccggctcctgggctctgacgggtctccactcatggacatgctgcagttagcagaagagccagtgccacaggctgggcaggagctgagggtgtggcctccaggggcccaggagccctgcaccgtgaggccagcccaggtggagccactactgcggctctgcctccagcagggacaggtggctgccccaccgccctcatcctgacccccagccccggtagagccctgactgggagctagccccaagcttctctttccttacctcctccctgcagctgtgtgagccgctcccatccctggcagagtctagagccttggcccagctgtccctgagccgactcagccctgagcacaggcggctgcggagccctgcacagtaccaggtggtgctgtccgagaggctgcaggccctggtgaacagtctgtgtgcggggcagtccccctgagactcggagcggggctgactggaaacaacacgaatcactcacttttccccaaaaaaaaaaagaaaaaagagcgggacacgccaagagattcaccagagggggcacgagatcaagcatcccaatttcttgtaacaggggccaca

SEQ ID NO: 12103 - DNA, 2562 bp, Homo sapiens
tctccctgggtagtggcccctgactttgccctcaaacctttagaaagtttcctgtggggcttggactgcaggaccccataaaagccaccactgagggacactgggccttcatagccacaaaaggtcttttggtgccagccgacagtgggcatgcgcccccctgccccacgccgccctttcctgggtgccaagctctttccaagcgacatttgcgtccatctgggctgcctcgtcctagcctggctgctcaagctctaactaaggcagcctctggcctccctccccaggcccagggcaggagctggctgctggccagcggttgtcttctgggtcggtgggggtggagtctggctggtctgtcctccaccctttccgcctcctggcaagtcctgagctgcacctcattgcccggccaaagggcagagacacgagcgactgggggcacctctggtgaccaagaccgggctgcgctccaaagaggccgttgggcctggagtggggttgggggggtccgagaggagttgggtgacatcccccaccccatcccgggtccagctgtttcagcccctctcggcgcgccgatactattagccccacccgtcctccatcgagtcccgtgccgctcccaaaccgcacgataagccccacagggagtgcgccataggccggggcgcgtcacggggccggggcggggcggagtccggacgtcgggagcaggatggcggcggagcaggaccccgaggcgcgcgcggcggcgcggccgctgctcactgacctctaccaggccaccatggcgttgggctattggcgcgcgggccgggcgcgggacgccgccgagttcgagctcttcttccgccgctgcccgttcggcggcgccttcgccttggccgccggcttgcgcgactgtgtgcgcttcctgcgcgccttccgcctgcgggacgccgacgtgcagttcctggcctcggtgctgcccccagacacggatcctgcgttcttcgagcaccttcgggccctcgactgctccgaggtgacggtgcgagccctgcccgagggctccctcgccttccccggagtgccgctcctgcaggtgtccgggccgctcctggtggtgcagctgctggagacaccgctgctctgcctggtcagctacgccagcctggtggccaccaacgcagcgcggcttcgcttgatcgcagggccagagaagcggctgctagagatgggcctgaggcgggctcagggccccgatgggggcctgacagcctccacctacagctacctgggcggcttcgacagcagcagcaacgtgctagcgggccagctgcgaggtgtgccggtggccgggaccctggcccactccttcgtcacttccttttcaggcagcgaggtgccccctgacccgatgttggcgccagcagctggtgagggccctggggtggacctggcggcaaagcccaggtgtggctggagcaggtgtgtgcccacctggggctgggggtgcaggagccgcatccaggcgagcgggcagcctttgtggcctatgccttggcttttccccgggccttccagggcctcctggacacctacagcgtgtggaggagtggtctccccaacttcctagcagtcgccttggccctgggagagctgggctaccgggcagtgggcgtgaggctggacagtggtgacctgctacagcaggctcaggagatccgcaaggtcttccgagctgctgcagcccagttccaggtgccctggctggagtcagtcctcatcgtagtcagcaacaacattgacgaggaggcgctggcccgactggcccaggagggcagtgaggtgaatgtcattggcattggcaccagtgtggtcacctgcccccaacagccttccctgggtggcgtctataagctggtggccgtggggggccagccacgaatgaagctgaccgaggaccccgagaagcagacgttgcctgggagcaaggctgctttccggctcctgggctctgacgggtctccactcatggacatgctgcagttagcagaagagccagtgccacaggctgggcaggagctgagggtgtggcctccaggggcccaggagccctgcaccgtgaggccagcccaggtggagccactactgcggctctgcctccagcagggacagctgtgtgagccgctcccatccctggcagagtctagagccttggcccagctgtccctgagccgactcagccctgagcacaggcggctgcggagccctgcacagtaccaggttggggggaggcccaccctgtcattctgccctgtgcgcccccgccctcaccctgcccaccgctcctgtcctctgctccctgcaggtggtgctgtccgagaggctgcaggccctggtgaacagtctgtgtgcggggcagtccccctgagactcggagcggggctgactggaaacaacacgaatcactcacttttccccaaaaaaaaaaagaaaaaagagcgggacacgccaagagattcaccagagggggcacgagatcaagcatcccaatttcttgtaacaggggccaca

SEQ ID NO: 12104 - DNA, 2438 bp, Homo sapiens
tctccctgggtagtggcccctgactttgccctcaaacctttagaaagtttcctgtggggcttggactgcaggaccccataaaagccaccactgagggacactgggccttcatagccacaaaaggtcttttggtgccagccgacagtgggcatgcgcccccctgccccacgccgccctttcctgggtgccaagctctttccaagcgacatttgcgtccatctgggctgcctcgtcctagcctggctgctcaagctctaactaaggcagcctctggcctccctccccaggcccagggcaggagctggctgctggccagcggttgtcttctgggtcggtgggggtggagtctggctggtctgtcctccaccctttccgcctcctggcaagtcctgagctgcacctcattgcccggccaaagggcagagacacgagcgactgggggcacctctggtgaccaagaccgggctgcgctccaaagaggccgttgggcctggagtggggttgggggggtccgagaggagttgggtgacatcccccaccccatcccgggtccagctgtttcagcccctctcggcgcgccgatactattagccccacccgtcctccatcgagtcccgtgccgctcccaaaccgcacgataagccccacagggagtgcgccataggccggggcgcgtcacggggccggggcggggcggagtccggacgtcgggagcaggatggcggcggagcaggaccccgaggcgcgcgcggcggcgcggccgctgctcactgacctctaccaggccaccatggcgttgggctattggcgcgcgggccgggcgcgggacgccgccgagttcgagctcttcttccgccgctgcccgttcggcggcgccttcgccttggccgccggcttgcgcgactgtgtgcgcttcctgcgcgccttccgcctgcgggacgccgacgtgcagttcctggcctcggtgctgcccccagacacggatcctgcgttcttcgagcaccttcgggccctcgactgctccgaggtgacggtgcgagccctgcccgagggctccctcgccttccccggagtgccgctcctgcaggtgtccgggccgctcctggtggtgcagctgctggagacaccgctgctctgcctggtcagctacgccagcctggtggccaccaacgcagcgcggcttcgcttgatcgcagggccagagaagcggctgctagagatgggcctgaggcgggctcagggccccgatgggggcctgacagcctccacctacagctacctgggcggcttcgacagcagcagcaacgtgctagcgggccagctgcgaggtgtgccggtggccgggaccctggcccactccttcgtcacttccttttcaggcagcgaggtgccccctgacccgatgttggcgccagcagctggtgagggccctggggtggacctggcggcaaagcccaggtgtggctggagcaggtgtgtgcccacctggggctgggggtgcaggagccgcatccaggcgagcgggcagcctttgtggcctatgccttggcttttccccgggccttccagggcctcctggacacctacagcgtgtggaggagtggtctccccaacttcctagcagtcgccttggccctgggagagctgggctaccgggcagtgggcgtgaggctggacagtggtgacctgctacagcaggctcaggagatccgcaaggtcttccgagctgctgcagcccagttccaggtgccctggctggagtcagtcctcatcgtagtcagcaacaacattgacgaggaggcgctggcccgactggcccaggagggcagtgaggtgaatgtcattggcattggcaccagtgtggtcacctgcccccaacagccttccctgggtggcgtctataagctggtggccgtggggggccagccacgaatgaagctgaccgaggaccccgagaagcagacgttgcctgggagcaaggctgctttccggctcctgggctctgacgggtctccactcatggacatgctgcagttagcagaagagccagtgccacaggctgggcaggagctgagggtgtggcctccaggggcccaggagccctgcaccgtgaggccagcccagctgtgtgagccgctcccatccctggcagagtctagagccttggcccagctgtccctgagccgactcagccctgagcacaggcggctgcggagccctgcacagtaccaggtggtgctgtccgagaggctgcaggccctggtgaacagtctgtgtgcggggcagtccccctgagactcggagcggggctgactggaaacaacacgaatcactcacttttccccaaaaaaaaaaagaaaaaagagcgggacacgccaagagattcaccagagggggcacgagatcaagcatcccaatttcttgtaacaggggccaca

SEQ ID NO: 12105 - DNA, 2214 bp, Homo sapiens
tctccctgggtagtggcccctgactttgccctcaaacctttagaaagtttcctgtggggcttggactgcaggaccccataaaagccaccactgagggacactgggccttcatagccacaaaaggtcttttggtgccagccgacagtgggcatgcgcccccctgccccacgccgccctttcctgggtgccaagctctttccaagcgacatttgcgtccatctgggctgcctcgtcctagcctggctgctcaagctctaactaaggcagcctctggcctccctccccaggcccagggcaggagctggctgctggccagcggttgtcttctgggtcggtgggggtggagtctggctggtctgtcctccaccctttccgcctcctggcaagtcctgagctgcacctcattgcccggccaaagggcagagacacgagcgactgggggcacctctggtgaccaagaccgggctgcgctccaaagaggccgttgggcctggagtggggttgggggggtccgagaggagttgggtgacatcccccaccccatcccgggtccagctgtttcagcccctctcggcgcgccgatactattagccccacccgtcctccatcgagtcccgtgccgctcccaaaccgcacgataagccccacagggagtgcgccataggccggggcgcgtcacggggccggggcggggcggagtccggacgtcgggagcaggatggcggcggagcaggaccccgaggcgcgcgcggcggcgcggccgctgctcactgacctctaccaggccaccatggcgttgggctattggcgcgcgggccgggcgcgggacgccgccgagttcgagctcttcttccgccgctgcccgttcggcggcgccttcgccttggccgccggcttgcgcgactgtgtgcgcttcctgcgcgccttccgcctgcgggacgccgacgtgcagttcctggcctcggtgctgcccccagacacggatcctgcgttcttcgagcaccttcgggccctcgactgctccgaggtgacggtgcgagccctgcccgagggctccctcgccttccccggagtgccgctcctgcaggtgtccgggccgctcctggtggtgcagctgctggagacaccgctgctctgcctggtcagctacgccagcctggtggccaccaacgcagcgcggcttcgcttgatcgcagggccagagaagcggctgctagagatgggcctgaggcgggctcagggccccgatgggggcctgacagcctccacctacagctacctgggcggcttcgacagcagcagcaacgtgctagcgggccagctgcgaggtgtgccggtggccgggaccctggcccactccttcgtcacttccttttcaggcagcgaggtgccccctgacccgatgttggcgccagcagctggtgagggccctggggtggacctggcggcaaagcccaggtgtggctggagcaggtgtgtgcccacctggggctgggggtgcaggagccgcatccaggcgagcgggcagcctttgtggcctatgccttggcttttccccgggccttccagggcctcctggacacctacagcgtgtggaggagtggtctccccaacttcctagcagtcgccttggccctgggagagctgggctaccgggcagtgggcgtgaggctggacagtggtgacctgctacagcaggctcaggagatccgcaaggtcttccgagctgctgcagcccagttccaggtgccctggctggagtcagtcctcatcgtagtcagcaacaacattgacgaggaggcgctggcccgactggcccaggagggcagtgaggtgaatgtcattggcattggcaccagtgtggtcacctgcccccaacagccttccctgggtggcgtctataagctggtggccgtggggggccagccacgaatgaagctgaccgaggaccccgagaagcagacgttgcctgggagcaaggctgctttccggctcctgggctctgacggtggtgctgtccgagaggctgcaggccctggtgaacagtctgtgtgcggggcagtccccctgagactcggagcggggctgactggaaacaacacgaatcactcacttttccccaaaaaaaaaaagaaaaaagagcgggacacgccaagagattcaccagagggggcacgagatcaagcatcccaatttcttgtaacaggggccaca

SEQ ID NO: 12106 - DNA, 2035 bp, Homo sapiens
tctccctgggtagtggcccctgactttgccctcaaacctttagaaagtttcctgtggggcttggactgcaggaccccataaaagccaccactgagggacactgggccttcatagccacaaaaggtcttttggtgccagccgacagtgggcatgcgcccccctgccccacgccgccctttcctgggtgccaagctctttccaagcgacatttgcgtccatctgggctgcctcgtcctagcctggctgctcaagctctaactaaggcagcctctggcctccctccccaggcccagggcaggagctggctgctggccagcggttgtcttctgggtcggtgggggtggagtctggctggtctgtcctccaccctttccgcctcctggcaagtcctgagctgcacctcattgcccggccaaagggcagagacacgagcgactgggggcacctctggtgaccaagaccgggctgcgctccaaagaggccgttgggcctggagtggggttgggggggtccgagaggagttgggtgacatcccccaccccatcccgggtccagctgtttcagcccctctcggcgcgccgatactattagccccacccgtcctccatcgagtcccgtgccgctcccaaaccgcacgataagccccacagggagtgcgccataggccggggcgcgtcacggggccggggcggggcggagtccggacgtcgggagcaggatggcggcggagcaggaccccgaggcgcgcgcggcggcgcggccgctgctcactgacctctaccaggccaccatggcgttgggctattggcgcgcgggccgggcgcgggacgccgccgagttcgagctcttcttccgccgctgcccgttcggcggcgccttcgccttggccgccggcttgcgcgactgtgtgcgcttcctgcgcgccttccgcctgcgggacgccgacgtgcagttcctggcctcggtgctgcccccagacacggatcctgcgttcttcgagcaccttcgggccctcgactgctccgaggtgacggtgcgagccctgcccgagggctccctcgccttccccggagtgccgctcctgcaggtgtccgggccgctcctggtggtgcagctgctggagacaccgctgctctgcctggtcagctacgccagcctggtggccaccaacgcagcgcggcttcgcttgatcgcagggccagagaagcggctgctagagatgggcctgaggcgggctcagggccccgatgggggcctgacagcctccacctacagctacctgggcggcttcgacagcagcagcaacgtgctagcgggccagctgcgaggtgtgccggtggccgggaccctggcccactccttcgtcacttccttttcaggcagcgaggtgccccctgacccgatgttggcgccagcagctggtgagggccctggggtggacctggcggcaaagcccaggtgtggctggagcaggtgtgtgcccacctggggctgggggtgcaggagccgcatccaggcgagcgggcagcctttgtggcctatgccttggcttttccccgggccttccagggcctcctggacacctacagcgtgtggaggagtggtctccccaacttcctagcagtcgccttggccctgggagagctgggctaccgggcagtgggcgtgaggctggacagtggtgacctgctacagcaggctcaggagatccgcaaggtcttccgagctgctgcagcccagttccaggtgccctggctggagtcagtcctcatcgtagtcagcaacaacattgacgaggaggcgctggcccgactggcccaggagggcagtgaggtgaatgtcattggcattggcaccagtgtggtcacctgcccccaacagccttccctgggtggcgtctataagctgtctggctagtgggggctgtcgggctagtcggggcctgtcgggctagtcggggactgtcgggctagtcggggcctgtcgggctagtcggggactgtcgggctagtcggggactgtcgggctagcgggg

SEQ ID NO: 12107 - DNA, 2080 bp, Homo sapiens
tctccctgggtagtggcccctgactttgccctcaaacctttagaaagtttcctgtggggcttggactgcaggaccccataaaagccaccactgagggacactgggccttcatagccacaaaaggtcttttggtgccagccgacagtgggcatgcgcccccctgccccacgccgccctttcctgggtgccaagctctttccaagcgacatttgcgtccatctgggctgcctcgtcctagcctggctgctcaagctctaactaaggcagcctctggcctccctccccaggcccagggcaggagctggctgctggccagcggttgtcttctgggtcggtgggggtggagtctggctggtctgtcctccaccctttccgcctcctggcaagtcctgagctgcacctcattgcccggccaaagggcagagacacgagcgactgggggcacctctggtgaccaagaccgggctgcgctccaaagaggccgttgggcctggagtggggttgggggggtccgagaggagttgggtgacatcccccaccccatcccgggtccagctgtttcagcccctctcggcgcgccgatactattagccccacccgtcctccatcgagtcccgtgccgctcccaaaccgcacgataagccccacagggagtgcgccataggccggggcgcgtcacggggccggggcggggcggagtccggacgtcgggagcaggatggcggcggagcaggaccccgaggcgcgcgcggcggcgcggccgctgctcactgacctctaccaggccaccatggcgttgggctattggcgcgcgggccgggcgcgggacgccgccgagttcgagctcttcttccgccgctgcccgttcggcggcgccttcgccttggccgccggcttgcgcgactgtgtgcgcttcctgcgcgccttccgcctgcgggacgccgacgtgcagttcctggcctcggtgctgcccccagacacggatcctgcgttcttcgagcaccttcgggccctcgactgctccgaggtgacggtgcgagccctgcccgagggctccctcgccttccccggagtgccgctcctgcaggtgtccgggccgctcctggtggtgcagctgctggagacaccgctgctctgcctggtcagctacgccagcctggtggccaccaacgcagcgcggcttcgcttgatcgcagggccagagaagcggctgctagagatgggcctgaggcgggctcagggccccgatgggggcctgacagcctccacctacagctacctgggcggcttcgacagcagcagcaacgtgctagcgggccagctgcgaggtgtgccggtggccgggaccctggcccactccttcgtcacttccttttcaggcagcgaggtgccccctgacccgatgttggcgccagcagctggtgagggccctggggtggacctggcggcaaagcccaggtgtggctggagcaggtgtgtgcccacctggggctgggggtgcaggagccgcatccaggcgagcgggcagcctttgtggcctatgccttggcttttccccgggccttccagggcctcctggacacctacagcgtgtggaggagtggtctccccaacttcctagcagtcgccttggccctgggagagctgggctaccgggcagtgggcgtgaggctggacagtggtgacctgctacagcaggctcaggagatccgcaaggtcttccgagctgctgcagcccagtgagtttcccggggaggaggtgtgcctggtgggagatccccggggtttgggaatgggcagggaaggacagtgaggtactctgctgaagtttcagcggtgatactgcaggccgtggcagggaagtaagtggtggggctccctaggagctcccaagcagaaggaattctcgcgggagcagcaggaattctcgcgggagcagcaggaattctcgcggggcagcaggaattctcgcgggagcagcaggaattctcgcgggagcagcaggaattctcgcgggagcagcaggaattctcgcgggagcagcaggaattctcgtgggggcagcaggaattctcgcggg

SEQ ID NO: 12108 - DNA, 1669 bp, Homo sapiens
tctccctgggtagtggcccctgactttgccctcaaacctttagaaagtttcctgtggggcttggactgcaggaccccataaaagccaccactgagggacactgggccttcatagccacaaaaggtcttttggtgccagccgacagtgggcatgcgcccccctgccccacgccgccctttcctgggtgccaagctctttccaagcgacatttgcgtccatctgggctgcctcgtcctagcctggctgctcaagctctaactaaggcagcctctggcctccctccccaggcccagggcaggagctggctgctggccagcggttgtcttctgggtcggtgggggtggagtctggctggtctgtcctccaccctttccgcctcctggcaagtcctgagctgcacctcattgcccggccaaagggcagagacacgagcgactgggggcacctctggtgaccaagaccgggctgcgctccaaagaggccgttgggcctggagtggggttgggggggtccgagaggagttgggtgacatcccccaccccatcccgggtccagctgtttcagcccctctcggcgcgccgatactattagccccacccgtcctccatcgagtcccgtgccgctcccaaaccgcacgataagccccacagggagtgcgccataggccggggcgcgtcacggggccggggcggggcggagtccggacgtcgggagcaggatggcggcggagcaggaccccgaggcgcgcgcggcggcgcggccgctgctcactgacctctaccaggccaccatggcgttgggctattggcgcgcgggccgggcgcgggacgccgccgagttcgagctcttcttccgccgctgcccgttcggcggcgccttcgccttggccgccggcttgcgcgactgtgtgcgcttcctgcgcgccttccgcctgcgggacgccgacgtgcagttcctggcctcggtgctgcccccagacacggatcctgcgttcttcgagcaccttcgggccctcgactgctccgaggtgacggtgcgagccctgcccgagggctccctcgccttccccggagtgccgctcctgcaggtgtccgggccgctcctggtggtgcagctgctggagacaccgctgctctgcctggtcagctacgccagcctggtggccaccaacgcagcgcggcttcgcttgatcgcagggccagagaagcggctgctagagatgggcctgaggcgggctcagggccccgatgggggcctgacagcctccacctacagctacctgggcggcttcgacagcagcagcaacgtgctagcgggccagctgcgaggtgtgccggtggccgggaccctggcccactccttcgtcacttccttttcaggcagcgaggtgccccctgacccgatgttggcgccagcagctggtgagggccctggggtggacctggcggcaaagcccaggtgtggctggagcaggtgtgtgcccacctggggctgggggtgcaggagccgcatccaggcgagcgggcagcctttgtggcctatgccttggcttttccccgggccttccagggcctcctggacacctacagcgtgtggagccatgcgagctgctccccaggccaccccgctgatggagccccaccttgtctgctaaataaacatgtgccct

SEQ ID NO: 12109 - DNA, 2626 bp, Homo sapiens
tctccctgggtagtggcccctgactttgccctcaaacctttagaaagtttcctgtggggcttggactgcaggaccccataaaagccaccactgagggacactgggccttcatagccacaaaaggtcttttggtgccagccgacagtgggcatgcgcccccctgccccacgccgccctttcctgggtgccaagctctttccaagcgacatttgcgtccatctgggctgcctcgtcctagcctggctgctcaagctctaactaaggcagcctctggcctccctccccaggcccagggcaggagctggctgctggccagcggttgtcttctgggtcggtgggggtggagtctggctggtctgtcctccaccctttccgcctcctggcaagtcctgagctgcacctcattgcccggccaaagggcagagacacgagcgactgggggcacctctggtgaccaagaccgggctgcgctccaaagaggccgttgggcctggagtggggttgggggggtccgagaggagttgggtgacatcccccaccccatcccgggtccagctgtttcagcccctctcggcgcgccgatactattagccccacccgtcctccatcgagtcccgtgccgctcccaaaccgcacgataagccccacagggagtgcgccataggccggggcgcgtcacggggccggggcggggcggagtccggacgtcgggagcaggatggcggcggagcaggaccccgaggcgcgcgcggcggcgcggccgctgctcactgacctctaccaggccaccatggcgttgggctattggcgcgcgggccgggcgcgggacgccgccgagttcgagctcttcttccgccgctgcccgttcggcggcgccttcgccttggccgccggcttgcgcgactgtgtgcgcttcctgcgcgccttccgcctgcgggacgccggtagtcccccgtccgcgcgacgagccccccacgcccggcagaaacccccacctatggccggtggaagtccttgtccccccgtggaaccccccatgtcccacgaccggtctgtccccgcgctggtctcagcgcagttacctcgtttccagacgtgcagttcctggcctcggtgctgcccccagacacggatcctgcgttcttcgagcaccttcgggccctcgactgctccgaggtgacggtgcgagccctgcccgagggctccctcgccttccccggagtgccgctcctgcaggtgtccgggccgctcctggtggtgcagctgctggagacaccgctgctctgcctggtcagctacgccagcctggtggccaccaacgcagcgcggcttcgcttgatcgcagggccagagaagcggctgctagagatgggcctgaggcgggctcagggccccgatgggggcctgacagcctccacctacagctacctgggcggcttcgacagcagcagcaacgtgctagcgggccagctgcgaggtgtgccggtggccgggaccctggcccactccttcgtcacttccttttcaggcagcgaggtgccccctgacccgatgttggcgccagcagctggtgagggccctggggtggacctggcggcaaagcccaggtgtggctggagcaggtgtgtgcccacctggggctgggggtgcaggagccgcatccaggcgagcgggcagcctttgtggcctatgccttggcttttccccgggccttccagggcctcctggacacctacagcgtgtggaggagtggtctccccaacttcctagcagtcgccttggccctgggagagctgggctaccgggcagtgggcgtgaggctggacagtggtgacctgctacagcaggctcaggagatccgcaaggtcttccgagctgctgcagcccagttccaggtgccctggctggagtcagtcctcatcgtagtcagcaacaacattgacgaggaggcgctggcccgactggcccaggagggcagtgaggtgaatgtcattggcattggcaccagtgtggtcacctgcccccaacagccttccctgggtggcgtctataagctggtggccgtggggggccagccacgaatgaagctgaccgaggaccccgagaagcagacgttgcctgggagcaaggctgctttccggctcctgggctctgacgggtctccactcatggacatgctgcagttagcagaagagccagtgccacaggctgggcaggagctgagggtgtggcctccaggggcccaggagccctgcaccgtgaggccagcccaggtggagccactactgcggctctgcctccagcagggacagctgtgtgagccgctcccatccctggcagagtctagagccttggcccagctgtccctgagccgactcagccctgagcacaggcggctgcggagccctgcacagtaccaggtggtgctgtccgagaggctgcaggccctggtgaacagtctgtgtgcggggcagtccccctgagactcggagcggggctgactggaaacaacacgaatcactcacttttccccaaaaaaaaaaagaaaaaagagcgggacacgccaagagattcaccagagggggcacgagatcaagcatcccaatttcttgtaacaggggccaca

SEQ ID NO: 12110 - DNA, 2361 bp, Homo sapiens
tctccctgggtagtggcccctgactttgccctcaaacctttagaaagtttcctgtggggcttggactgcaggaccccataaaagccaccactgagggacactgggccttcatagccacaaaaggtcttttggtgccagccgacagtgggcatgcgcccccctgccccacgccgccctttcctgggtgccaagctctttccaagcgacatttgcgtccatctgggctgcctcgtcctagcctggctgctcaagctctaactaaggcagcctctggcctccctccccaggcccagggcaggagctggctgctggccagcggttgtcttctgggtcggtgggggtggagtctggctggtctgtcctccaccctttccgcctcctggcaagtcctgagctgcacctcattgcccggccaaagggcagagacacgagcgactgggggcacctctggtgaccaagaccgggctgcgctccaaagaggccgttgggcctggagtggggttgggggggtccgagaggagttgggtgacatcccccaccccatcccgggtccagctgtttcagcccctctcggcgcgccgatactattagccccacccgtcctccatcgagtcccgtgccgctcccaaaccgcacgataagccccacagggagtgcgccataggccggggcgcgtcacggggccggggcggggcggagtccggacgtcgggagcaggatggcggcggagcaggaccccgaggcgcgcgcggcggcgcggccgctgctcactgacctctaccaggccaccatggcgttgggctattggcgcgcgggccgggcgcgggacgccgccgagttcgagctcttcttccgccgctgcccgttcggcggcgccttcgccttggccgccggcttgcgcgactgtgtgcgcttcctgcgcgccttccgcctgcgggacgccgacgtgcagttcctggcctcggtgctgcccccagacacggatcctgcgttcttcgagcaccttcgggccctcgactgctccgaggtgacggtgcgagccctgcccgagggctccctcgccttccccggagtgccgctcctgcaggtgtccgggccgctcctggtggtgcagctgctggagacaccgctgctctgcctggtcagctacgccagcctggtggccaccaacgcagcgcggcttcgcttgatcgcagggccagagaagcggctgctagagatgggcctgaggcgggctcagggccccgatgggggcctgacagcctccacctacagctacctgggcgatgttggcgccagcagctggtgagggccctggggtggacctggcggcaaagcccaggtgtggctggagcaggtgtgtgcccacctggggctgggggtgcaggagccgcatccaggcgagcgggcagcctttgtggcctatgccttggcttttccccgggccttccagggcctcctggacacctacagcgtgtggaggagtggtctccccaacttcctagcagtcgccttggccctgggagagctgggctaccgggcagtgggcgtgaggctggacagtggtgacctgctacagcaggctcaggagatccgcaaggtcttccgagctgctgcagcccagttccaggtgccctggctggagtcagtcctcatcgtagtcagcaacaacattgacgaggaggcgctggcccgactggcccaggagggcagtgaggtgaatgtcattggcattggcaccagtgtggtcacctgcccccaacagccttccctgggtggcgtctataagctggtggccgtggggggccagccacgaatgaagctgaccgaggaccccgagaagcagacgttgcctgggagcaaggctgctttccggctcctgggctctgacgggtctccactcatggacatgctgcagttagcagaagagccagtgccacaggctgggcaggagctgagggtgtggcctccaggggcccaggagccctgcaccgtgaggccagcccaggtggagccactactgcggctctgcctccagcagggacagctgtgtgagccgctcccatccctggcagagtctagagccttggcccagctgtccctgagccgactcagccctgagcacaggcggctgcggagccctgcacagtaccaggtggtgctgtccgagaggctgcaggccctggtgaacagtctgtgtgcggggcagtccccctgagactcggagcggggctgactggaaacaacacgaatcactcacttttccccaaaaaaaaaaagaaaaaagagcgggacacgccaagagattcaccagagggggcacgagatcaagcatcccaatttcttgtaacaggggccaca

SEQ ID NO: 12111 - DNA, 1678 bp, Homo sapiens
agtccactactgcaccggcacacctgcaccggtcccacacctgctccagccacacctgggcttgggccgccaggtccaccccaggccctcaccagctgctggcgccaacatctgtggaacagagtcggtgaagaatgggggccagacgtgcagttcctggcctcggtgctgcccccagacacggatcctgcgttcttcgagcaccttcgggccctcgactgctccgaggtgacggtgcgagccctgcccgagggctccctcgccttccccggagtgccgctcctgcaggtgtccgggccgctcctggtggtgcagctgctggagacaccgctgctctgcctggtcagctacgccagcctggtggccaccaacgcagcgcggcttcgcttgatcgcagggccagagaagcggctgctagagatgggcctgaggcgggctcagggccccgatgggggcctgacagcctccacctacagctacctgggcggcttcgacagcagcagcaacgtgctagcgggccagctgcgaggtgtgccggtggccgggaccctggcccactccttcgtcacttccttttcaggcagcgaggtgccccctgacccgatgttggcgccagcagctggtgagggccctggggtggacctggcggcaaagcccaggtgtggctggagcaggtgtgtgcccacctggggctgggggtgcaggagccgcatccaggcgagcgggcagcctttgtggcctatgccttggcttttccccgggccttccagggcctcctggacacctacagcgtgtggaggagtggtctccccaacttcctagcagtcgccttggccctgggagagctgggctaccgggcagtgggcgtgaggctggacagtggtgacctgctacagcaggctcaggagatccgcaaggtcttccgagctgctgcagcccagttccaggtgccctggctggagtcagtcctcatcgtagtcagcaacaacattgacgaggaggcgctggcccgactggcccaggagggcagtgaggtgaatgtcattggcattggcaccagtgtggtcacctgcccccaacagccttccctgggtggcgtctataagctggtggccgtggggggccagccacgaatgaagctgaccgaggaccccgagaagcagacgttgcctgggagcaaggctgctttccggctcctgggctctgacgggtctccactcatggacatgctgcagttagcagaagagccagtgccacaggctgggcaggagctgagggtgtggcctccaggggcccaggagccctgcaccgtgaggccagcccaggtggagccactactgcggctctgcctccagcagggacagctgtgtgagccgctcccatccctggcagagtctagagccttggcccagctgtccctgagccgactcagccctgagcacaggcggctgcggagccctgcacagtaccaggtggtgctgtccgagaggctgcaggccctggtgaacagtctgtgtgcggggcagtccccctgagactcggagcggggctgactggaaacaacacgaatcactcacttttccccaaaaaaaaaaagaaaaaagagcgggacacgccaagagattcaccagagggggcacgagatcaagcatcccaatttcttgtaacaggggccaca

SEQ ID NO: 12112 - DNA, 2458 bp, Homo sapiens
tctccctgggtagtggcccctgactttgccctcaaacctttagaaagtttcctgtggggcttggactgcaggaccccataaaagccaccactgagggacactgggccttcatagccacaaaaggtcttttggtgccagccgacagtgggcatgcgcccccctgccccacgccgccctttcctgggtgccaagctctttccaagcgacatttgcgtccatctgggctgcctcgtcctagcctggctgctcaagctctaactaaggcagcctctggcctccctccccaggcccagggcaggagctggctgctggccagcggttgtcttctgggtcggtgggggtggagtctggctggtctgtcctccaccctttccgcctcctggcaagtcctgagctgcacctcattgcccggccaaagggcagagacacgagcgactgggggcacctctggtgaccaagaccgggctgcgctccaaagaggccgttgggcctggagtggggttgggggggtccgagaggagttgggtgacatcccccaccccatcccgggtccagctgtttcagcccctctcggcgcgccgatactattagccccacccgtcctccatcgagtcccgtgccgctcccaaaccgcacgataagccccacagggagtgcgccataggccggggcgcgtcacggggccggggcggggcggagtccggacgtcgggagcaggatggcggcggagcaggaccccgaggcgcgcgcggcggcgcggccgctgctcactgacctctaccaggccaccatggcgttgggctattggcgcgcgggccgggcgcgggacgccgccgagttcgagctcttcttccgccgctgcccgttcggcggcgccttcgccttggccgccggcttgcgcgactgtgtgcgcttcctgcgcgccttccgcctgcgggacgccgacgtgcagttcctggcctcggtgctgcccccagacacggatcctgcgttcttcgagcaccttcgggccctcgactgctccgaggtgacggtgcgagccctgcccgagggctccctcgccttccccggagtgccgctcctgcaggtgtccgggccgctcctggtggtgcagctgctggagacaccgctgctctgcctggtcagctacgccagcctggtggccaccaacgcagcgcggcttcgcttgatcgcagggccagagaagcggctgctagagatgggcctgaggcgggctcagggccccgatgggggcctgacagcctccacctacagctacctgggcgatgttggcgccagcagctggtgagggccctggggtggacctggcggcaaagcccaggtgtggctggagcaggtgtgtgcccacctggggctgggggtgcaggagccgcatccaggcgagcgggcagcctttgtggcctatgccttggcttttccccgggccttccagggcctcctggacacctacagcgtgtggaggagtggtctccccaacttcctagcagtcgccttggccctgggagagctgggctaccgggcagtgggcgtgaggctggacagtggtgacctgctacagcaggctcaggagatccgcaaggtcttccgagctgctgcagcccagttccaggtgccctggctggagtcagtcctcatcgtagtcagcaacaacattgacgaggaggcgctggcccgactggcccaggagggcagtgaggtgaatgtcattggcattggcaccagtgtggtcacctgcccccaacagccttccctgggtggcgtctataagctggtggccgtggggggccagccacgaatgaagctgaccgaggaccccgagaagcagacgttgcctgggagcaaggctgctttccggctcctgggctctgacgggtctccactcatggacatgctgcagttagcagaagagccagtgccacaggctgggcaggagctgagggtgtggcctccaggggcccaggagccctgcaccgtgaggccagcccaggtggagccactactgcggctctgcctccagcagggacaggtggctgccccaccgccctcatcctgacccccagccccggtagagccctgactgggagctagccccaagcttctctttccttacctcctccctgcagctgtgtgagccgctcccatccctggcagagtctagagccttggcccagctgtccctgagccgactcagccctgagcacaggcggctgcggagccctgcacagtaccaggtggtgctgtccgagaggctgcaggccctggtgaacagtctgtgtgcggggcagtccccctgagactcggagcggggctgactggaaacaacacgaatcactcacttttccccaaaaaaaaaaagaaaaaagagcgggacacgccaagagattcaccagagggggcacgagatcaagcatcccaatttcttgtaacaggggccaca

SEQ ID NO: 12113 - DNA, 1097 bp, Homo sapiens
cttcaccgactctgttccacagatgttggcgccagcagctggtgagggccctggggtggacctggcggcaaagcccaggtgtggctggagcaggtgtgtgcccacctggggctgggggtgcaggagccgcatccaggcgagcgggcagcctttgtggcctatgccttggcttttccccgggccttccagggcctcctggacacctacagcgtgtggaggagtggtctccccaacttcctagcagtcgccttggccctgggagagctgggctaccgggcagtgggcgtgaggctggacagtggtgacctgctacagcaggctcaggagatccgcaaggtcttccgagctgctgcagcccagttccaggtgccctggctggagtcagtcctcatcgtagtcagcaacaacattgacgaggaggcgctggcccgactggcccaggagggcagtgaggtgaatgtcattggcattggcaccagtgtggtcacctgcccccaacagccttccctgggtggcgtctataagctggtggccgtggggggccagccacgaatgaagctgaccgaggaccccgagaagcagacgttgcctgggagcaaggctgctttccggctcctgggctctgacgggtctccactcatggacatgctgcagttagcagaagagccagtgccacaggctgggcaggagctgagggtgtggcctccaggggcccaggagccctgcaccgtgaggccagcccaggtggagccactactgcggctctgcctccagcagggacagctgtgtgagccgctcccatccctggcagagtctagagccttggcccagctgtccctgagccgactcagccctgagcacaggcggctgcggagccctgcacagtaccaggtggtgctgtccgagaggctgcaggccctggtgaacagtctgtgtgcggggcagtccccctgagactcggagcggggctgactggaaacaacacgaatcactcacttttccccaaaaaaaaaaagaaaaaagagcgggacacgccaagagattcaccagagggggcacgagatcaagcatcccaatttcttgtaacaggggccaca

SEQ ID NO: 12114 - DNA, 786 bp, Homo sapiens
gccaagcatgtagagttggggagaccactccgtccaacacgctgtagcgttccaggtgccctggctggagtcagtcctcatcgtagtcagcaacaacattgacgaggaggcgctggcccgactggcccaggagggcagtgaggtgaatgtcattggcattggcaccagtgtggtcacctgcccccaacagccttccctgggtggcgtctataagctggtggccgtggggggccagccacgaatgaagctgaccgaggaccccgagaagcagacgttgcctgggagcaaggctgctttccggctcctgggctctgacgggtctccactcatggacatgctgcagttagcagaagagccagtgccacaggctgggcaggagctgagggtgtggcctccaggggcccaggagccctgcaccgtgaggccagcccaggtggagccactactgcggctctgcctccagcagggacagctgtgtgagccgctcccatccctggcagagtctagagccttggcccagctgtccctgagccgactcagccctgagcacaggcggctgcggagccctgcacagtaccaggtggtgctgtccgagaggctgcaggccctggtgaacagtctgtgtgcggggcagtccccctgagactcggagcggggctgactggaaacaacacgaatcactcacttttccccaaaaaaaaaaagaaaaaagagcgggacacgccaagagattcaccagagggggcacgagatcaagcatcccaatttcttgtaacaggggccaca

SEQ ID NO: 12115 - DNA, 1650 bp, Homo sapiens
tctccctgggtagtggcccctgactttgccctcaaacctttagaaagtttcctgtggggcttggactgcaggaccccataaaagccaccactgagggacactgggccttcatagccacaaaaggtcttttggtgccagccgacagtgggcatgcgcccccctgccccacgccgccctttcctgggtgccaagctctttccaagcgacatttgcgtccatctgggctgcctcgtcctagcctggctgctcaagctctaactaaggcagcctctggcctccctccccaggcccagggcaggagctggctgctggccagcggttgtcttctgggtcggtgggggtggagtctggctggtctgtcctccaccctttccgcctcctggcaagtcctgagctgcacctcattgcccggccaaagggcagagacacgagcgactgggggcacctctggtgaccaagaccgggctgcgctccaaagaggccgttgggcctggagtggggttgggggggtccgagaggagttgggtgacatcccccaccccatcccgggtccagctgtttcagcccctctcggcgcgccgatactattagccccacccgtcctccatcgagtcccgtgccgctcccaaaccgcacgataagccccacagggagtgcgccataggccggggcgcgtcacggggccggggcggggcggagtccggacgtcgggagcaggatggcggcggagcaggaccccgaggcgcgcgcggcggcgcggccgctgctcactgacctctaccaggccaccatggcgttgggctattggcgcgcgggccgggcgcgggacgccgccgagttcgagctcttcttccgccgctgcccgttcggcggcgccttcgccttggccgccggcttgcgcgactgtgtgcgcttcctgcgcgccttccgcctgcgggacgccgacgtgcagttcctggcctcggtgctgcccccagacacggatcctgcgttcttcgagcaccttcgggccctcgactgctccgaggtgacggtgcgagccctgcccgagggctccctcgccttccccggagtgccgctcctgcaggtgtccgggccgctcctggtggtgcagctgctggagacaccgctgctctgcctggtcagctacgccagcctggtggccaccaacgcagcgcggcttcgcttgatcgcagggccagagaagcggctgctagagatgggcctgaggcgggctcagggccccgatgggggcctgacagcctccacctacagctacctgggcggtgagtgtctggtgcggggcaaggcaagggccgggaaggaggagccccatcttggcccgaggtcccccaatcccaccgccttcctccccaggcttcgacagcagcagcaacgtgctagcgggccagctgcgaggtgtgccggtggccgggaccctggcccactccttcgtcacttccttttcaggcagcgaggtgccccctgacccggtcagtccctcctctaaaccctgctgtctccaggcgacaggccccaagccagcccttgccctggcgagaggtgtgccacccaaggcaggtcaccccagtgctgtcccaaggaagctggcacgggctgcattacctttgctctcaaactagggtgtcc

SEQ ID NO: 12116 - DNA, 206 bp, Homo sapiens
ggaagtaagtggtggggctccctaggagctcccaagcagaaggtgagcacaggtgtccttgactgaggcggggcggggagcagggggacaccagggtgaatcaggaagacccgaggggtggcccccaccctttctccacccacgcggcaggttccaggtgccctggctggagtcagtcctcatcgtagtcagcaacaacattgacg

SEQ ID NO: 12117 - DNA, 2960 bp, Homo sapiens
tggaaatatctgtatgtttctttttcctgagatcaaaaaagttaagaaatattgaactgtacaattctttgctgtggtgccattttctaagaaaatcttcacagtccatgattagtgagaaaaagcttttattttagattgccttttttcttttttgacttttttaaatttaaaaaccatcttttcttaaatgttagtaatagtagttgttcttttctgaatctcatttgaaaaaatgaaaagttggtaaaattatatttgttcttataatttgaaggaagtttcacttatctgttaaattcagaagtcagagatacatgctttataccttaaaaaaaaaatctgtgactcctcactttggaggtaggtttctgtatattcgttagagaaaggttattaatgttctttgtcagtgtttctgccttttactgataattttgtctgcttgaactgtcagtatctgatagaagtggatatggcttctcatcttgaattgtgatccccataatccccacatgtcaagggagggacacgatgggaggtgattggatcatgggggtggtttcccccatgctgctgttcttgtgatagtgagttctcatgagatctgatggttttgtttgttcgtttgagacaaggtcctgctctgtcacccaggcagagtggtgcagtggtggggtctcagctgattgcaaactctgcctcctgggctcaagtgattctcatgcctcagccttcctagtagctgggattataggcgcacaccaccatgtctggctgatttttgtatttttcatagaaacggggtttcaccatgttgaccaggctggtcttgaactcctggcctcaagtgataacacctgccttggcctcccaaagtgctcagattacaggcatgagccaccatgcctggtcgagagctgattggtttataaggcagttttccctgttctcgtttgctttctctctccagctgcaatggaagacttgtctcttccccttctgccataattgtaagtttcctgaggcttccccagccatgtggaactatgaatgaattaaacctcttttctttataaattacccagcatcgggtatgtctttatagcagtgtgaaaacagactaatacagaagtatatgttaactttctctgctgagcatgttggtgcttgcctgtagtcccagctacttgggaggctgaggtggaaggatcatttaagaccagcctgggcaacatagggagatcctatgtccaaaaaaaaaaaaaaaaaaaaaaaaaagcatgttaaatttttcatcagagttgacagcttctcaaatggtcagtttttgttatatacattgttgaggctgtgtgttagaaactttcagattcatgaacattattcaatgttctttgtagtttgttccttttattgtaatatagtctctatccctattaatgctttttcgctactgatacctgacttttttccccttaatctttgacttgtaatatgtgagattaatctatttgaataagtagacttatttctgctctctgaattttatattttctgatccatttactttgctgtgtgtgtgttttgtttttgtttttgtttttttttttttttgagtctagctttgttgcccaggctggagttgcacgatcttggttccctgcagtctcagcctcccaggttcaagtgattgtcctgtgtcaatctcccgagtagctgggactacaggcgtgtaccaccatgtgtggctaatatttgtatttttagtatggatggggttttaccatgttggtcaggctggtctcgaactcctgacctcaagtgatgtgcctgccttggcctcccaaagtgctgggattacaggcctgagccaccgcgcccggcctctttgctgtttttttcctcttctgttagatggttagttttctgcactcctttttttccctccctcttgattcgaaagtcatagactatatttccattattttaatggttactgttaaaattttcagttacgaagttttctactaaaaatgtgggcctaactggcttctaggatgaacccagctctggcacccagtctcttttactctgtttttcttgtgtggagatactcatcttgtatctcatctcagctttgtcttttggttttctcttttttacagttgcctttcatagctacatatttagagtaggagaagtcttcctcagggtgaactcaatgcatcatctctacttcagccattctttcactctactggtttgcatatctgcacataatattcagtaaatacttgttaagaagtgtttcttatatttttttcctttttgttttagttttactcacttttttcagcttttgatggaaaggagagaaagtggagataacaggaccaaccacatctgtagaatggtttttacactgactgtcgacaatcagggttggtggagtggtcagggtaagaaggaggtatagagaatttagtctgggacaaaggaactgtatggtccaagtgtgaattgacacttattatgacaatattatggcaatattatttattgataatattctaataagactgcctccattttgttaggtttgttttctgtttttatacacaccgaagtattaaatagatgccagttatttttgtagaaaacaggagggctacactgctgtattgtagctatgatgatggcgaccgcgttttacaaacatttgtgttctcctaacatagtgattaattactaggacaggtttgagatggtggcagttacaaagagcatctggctggagatgagtttagtgttcgcatatacccctactcactcctccaccatcttcccctttcagaaaccgagagaggaggtagctgatgataccaataaacttgttatgctttgagatgtatctctgtaactagcaagtgatttccaggcatttttaaaaaaaaaaa

SEQ ID NO: 12118 - DNA, 630 bp, Homo sapiens
cctggtgccaaggaaacttgctgaagggtacccgctgttaaactgcatagggcagcctgccactgctgtaaaccctgaccgggataaccgcgtgccgatctgcctgccactatatgggaaaacagaaaactagatgaagaagaaaaaggcctctgtcttccagccatgcattgttccttccacactccttattgtcaaagcctaacatggagccagctggcaaaggaaaagtgtggcctgtagagttcagccccagtattacaaagcaggatgaagaaattgggattggagctgaaagacaataaattaataactgatacagatggaaagtacatttttcaacccaaggatagaaagaagccccaaacatcatcacacaaaaggaagacagattggctgagagaggcatttacattaaaaaaataaaatactgaaggtttacagggacacatctcttggagtagagcagcctacctccaaggtattggataagcaagacaaggtgttataaagcctattgtgtaaatatatacagaagactgagaggttttcaaccgaataaatgaatgcctggtacagcgttaatatagctgagaaattcatcctgtaacaagttgagtcaaaaaaaaa

SEQ ID NO: 12119 - DNA, 723 bp, Homo sapiens
  misc_feature (640)..(640): n is a, c, g, or t
gcaggccacaggccacgtactgcttggcacctcctgttacctgcagcagctcctcgatgctacggaggaagggcagccccccaagggcaaggcctcatcccttatcccgacctgtctgaagatactgcagtgaaagcccaagtccttggaagctttccccagtgaaggactgactgggggcctcacgcttaactggtagtgcccacaagcctggcagctgtagagccgcgaacctccccacacctccctcaccgcgcaggaccctgagtgaggaggaggagctggaaacctggggtgggttggccaaaggagaacctcaagctcctggcctgatccagctccttcctgcccaaggcagcttagcccatccagactggtcctgaagtctgtccctccattggcatgaagtctgccccttagcaatccggcctcgcaggctgtactttcatggtgctctctaccttctggcccccatcccggaacattcctgagtgaattcgcaagcgcactagcatgtgatattagggagtttgcaataaattattgaggctgatgtaaaaaaaaaaaaaaaaaaaaacttcctcgtgccgatttcggcacgagttttttttctttttttttgcacttcccatgagcattnttattaaattgaacaagttgtagattcgataattccaagacttggacaaaattcacaacgccctgtgagaagccttggcttgt

SEQ ID NO: 12120 - DNA, 645 bp, Homo sapiens
  misc_feature (92)..(92): n is a, c, g, or t
gaatttgaggaagaagaaggtgagttagaggaagaagaagaagaggaggatgaggaggaggaagaagaactggaagaggtggaagacctggnagtttggcacagcaggaggggaggtagaagaaggtgcacctccacccccaaccctgcctccagctctgcctccccctgagtctcccccaaaggtgcagccagaacccgaacccgaacccgggctgcttttggaagtggaggagccagggacggaggaggagcgtggggctgacacagctcccaccctggcccctgaagcgctcccctcccagggagaggtggagagggaaggggaaagccctgcggcagggccccctccccaggagcttgttgaagaagagccctctgctcccccaaccctgttggaagaggagactgaggatgggagtgacaaggtgcagcccccaccagagacacctgcagaagaagagatggagacagagacagaggccgaagctctccaggaaaaggagcaggatgacacagcctccatgctggccgacttcatcgattgtccccctgatgatgagaagccaccacctcccacagagcctgactcctagccatcttctgcaccccactctttgtttccaataaagttatgtccttagat

SEQ ID NO: 12121 - DNA, 324 bp, Homo sapiens
tctaacgatttttacttttttccttaagtatttttaaaaaatagttctagaactgactttcatgcagaatttggtaaattttttctataaagaaacatgataaatattttacactttgcagctgcataataatctgtcatcagcaacactaccactatcactactactgcttcctcctccttcccccttcttcccctcctttctcctctttcttctttcttttacctttccagtagtgctaatcttcattcttcctttctttctcctcctcccctccttgcaccggcccttcctggtctttgaataaagtctgagtgggcggca

SEQ ID NO: 12122 - DNA, 263 bp, Homo sapiens
gaggattccccaacttcgatcgcggagaagtgcaaaaggaggaaaaaaggaagaaaaatggaagggaggaggagaaagaaagcaacactaccactatcactactactgcttcctcctccttcccccttcttcccctcctttctcctctttcttctttcttttacctttccagtagtgctaatcttcattcttcctttctttctcctcctcccctccttgcaccggcccttcctggtctttgaataaagtctgagtgggcggca

SEQ ID NO: 12123 - DNA, 741 bp, Homo sapiens
atacattctttcttttcagtatataaattttaatatgcattccatatctctccagccatatttcctatatcaatagtcccctgtggcaactttatctttgaatacaaactacgcatgttcaatatttgagtagtgataatgggttttattctataaataacagccttagtaccctaaactacagccagcataactttaccatttgcaggaactactgtgctttatattctaaatggctgttttaatgttttattcgttaccagtaaacaaacgcaggacataggaagaagaaaacttcattagcatggaataagcaaatctatcattctggtagtggggtgtcctctatccactgggctggtgtgcctcaactgctgaaatacagtgttccagggcccttctagaacgttttcacagtacaagttatatttgaatcatcaatccaaatggccttgtgctgacaagaactccaaattgtggaagaatcttttaaaatgttattttttcagagttagtttaaaaggttcctgccccctgcaagttatgctcaatagcctatttctcaaactcttcctcagaaatagaaaataattccaggtgagtgtttgaaagtagcctgctgttggccagctgtggggacacatgcttgtagtcccaactactctgaaggctgagatgggaggataccttgagcccaggagttcaagactagcctgggcaacatagacctcatctcttaaa

SEQ ID NO: 12124 - DNA, 288 bp, Homo sapiens
taacagccaaatggctcatggctgtacttttcccaaggcaaagcactgtctatatccaacaaggattaagaatactaccttttgcaacaatgagaaatggcacaagtgttgaaactatagttttattaaagccctccatgagcccatgctaatttattcagggatgaggattccagagcaaattatttcactgtttttcacctctacctcccccaggatctctgcaagaggaaaagtttttccacctacaactacctcttataggaggtagggaacctgggtaaagga

SEQ ID NO: 12125 - DNA, 549 bp, Homo sapiens
ccctacggcctctacctctgttcacatcttgtgatggggtcaaggttgccctcccagagtagaaggacaggcaaaaggtgatgctgcaaggatggtgccgagacagcagtggcacgctgcaggcgctgcccgggccagggaacttaatggagtggggacggacgtgcggctccactggttcccggactcctggtctccactgctgggcactcaggatctgcccggaggccttggacacaggcaccactggcagagcttgcccatggccctgctgccccactgcatggcttcgggctgccccccgaggggtcagacctgacgcccccaccatcagctttcctgtctgaggggctccgggctgcttccctcccacctggggctagactgtgtgtggttcagagggagatgctgggttgggggcgcccaccacactggcatggggaccctgggccagcgggccctactctgggtggtggtttctcccctctaagacaaagaagaagtgggttgcaaatctttctgtaaataaaatgccacatggcacccaag

SEQ ID NO: 12126 - DNA, 434 bp, Homo sapiens
ccctacggcctctacctctgttcacatcttgtgatggggtcaaggttgccctcccagagtagaaggacaggcaaaaggtgatgctgcaaggatggtgccgagacagcagtggcacgctgcaggcgctgcccgggccagggaacttaatggagtggggacggacgtgcggctccactggttcccggactcctggtctccactgctgggcactcaggatctgcccggaggccttggacacaggcaccactggcagagcttgccggctgtggtggctcatgcctgtaatccagtgctgtgggaggccgaggtgggaggattgctcaagtccaagtgtttgaggccagtctgggcagcatagtgagaccacatctctaagacaaagaagaagtgggttgcaaatctttctgtaaataaaatgccacatggcacccaag

SEQ ID NO: 12127 - DNA, 1177 bp, Homo sapiens
catggttcaaactgacattttaattaaatgtgatgataggttgagcaacctagcagtactctaaaatgacttttggttatggctttttccatattatgtttaggctgaggcatccctaaatgattcaattgtaattccccttcttaaacatgagatttatctttacaaaataatttattttcttaaaattgcaagttaattctatagttcatgcatacataatctcagtagatatcagctgtatgtgtacacacatacatataggtatttgtatatacacacattacataatttaaaaaaaaacttattagcagggtacaaccacgaagacaaagaggctttgtgtaatgtgatggaaacacaattgcaggacaaacaacaggctgctgtgagggctgtatttaccctttctgatgtaagacttggaaaaacatggatactggatatttaatccccataacagaaaatttagggtgcagacaacttcccacaatttttacagacaatgtcaatagaaatgcattcaatgcagggaatacacagtgtgacagtatccaaaaataagcaggttgatggtttagatttatgagacaagagaaagaaatagtagatgatgtcataattctccttttatggagttatgaaagttcttcattttatataaggtcaggtgctttcaaatgtcaatgagaaaaatatttaaaggaagaatcaaatctaagatgtagagagatctttataaacgtgaacttcaggccaggcacggtggctcatacctgcaatcccagcattttgggaggcctaggtgggccgatcacgaggtcaggggatcaagaccatcctggcccacatggtgaaaccccgtatctactaaaatacaaaaaatcagccaggagtggtgacgtgtgcctgtagtcccagctactcaggaggctgaggcaggagaatcgcctgaacccaggaggcagaggttgcagtgagccgagatagcgctactgcactccagtctggtgacagagcaagactccatctcaaaaaaaaaaaacaactttttttcatgctgagaagatataatcatcaacacattcttgagcacaactatgcacacaggcacttccgcattcacaagccatgctgtgtgcacacactgatgcccctagattccttttttgaagag

SEQ ID NO: 12128 - DNA, 1123 bp, Homo sapiens
catggttcaaactgacattttaattaaatgtgatgataggttgagcaacctagcagtactctaaaatgacttttggttatggctttttccatattatgtttaggctgaggcatccctaaatgattcaattgtaattccccttcttaaacatgagatttatctttacaaaataatttattttcttaaaattgcaagttaattctatagttcatgcatacataatctcagtagatatcagctgtatgtgtacacacatacatataggtatttgtatatacacacattacataatttaaaaaaaaacttattagcagggtacaaccacgaagacaaagaggctttgtgtaatgtgatggaaacacaattgcaggacaaacaacaggctgctgtgagggctgtatttaccctttctgatgtaagacttggaaaaacatggatactggatatttaatccccataacagaaaatttagggtgcagacaacttcccacaatttttacagacaatgtcaatagaaatgcattcaatgcagggaatacacagtgtgacagtatccaaaaataagcaggttgatgtttatggagttatgaaagttcttcattttatataaggtcaggtgctttcaaatgtcaatgagaaaaatatttaaaggaagaatcaaatctaagatgtagagagatctttataaacgtgaacttcaggccaggcacggtggctcatacctgcaatcccagcattttgggaggcctaggtgggccgatcacgaggtcaggggatcaagaccatcctggcccacatggtgaaaccccgtatctactaaaatacaaaaaatcagccaggagtggtgacgtgtgcctgtagtcccagctactcaggaggctgaggcaggagaatcgcctgaacccaggaggcagaggttgcagtgagccgagatagcgctactgcactccagtctggtgacagagcaagactccatctcaaaaaaaaaaaacaactttttttcatgctgagaagatataatcatcaacacattcttgagcacaactatgcacacaggcacttccgcattcacaagccatgctgtgtgcacacactgatgcccctagattccttttttgaagag

SEQ ID NO: 12129 - DNA, 364 bp, Homo sapiens
ttgtcagggaaaggagaattcttagaattccgggaagtatggaaaaccttcccactagcataatttgccttttggccatattggattgtgttgaaatgtgcatctatactgagataagggtgagagcccctgtccactgtcagcacagtcactactagaaggcccagaggaagtcccgtgacaagcagacagcatgaactggcacaattgtgcaatcatttcttcacagaccttctcaaggcacagcaattctcatttgataaagggtatggagagaaatttctaatataacaaaaacaaatcttgtcacttgaatttattttccgaggcaaacaaacaaaaatcaccttcatgacattagatg

SEQ ID NO: 12130 - DNA, 1222 bp, Homo sapiens
atttaccaattttttggggtgtgagcacttaatatctattctctcagcaattttcaagaatatactacattgttgttaagtataatcaccatcttttacaatgtcttctgaacttattcctcctacctaactgaaatttcatatcctttgaccaacatctccccagcccacctccatcagtgaccaccattctattctgtgcctctatgagttcaactttgttagattccacataggagatcatgcggtatttgtctgtgtgtggcttatttcacttaacataatgtcctccaggttcatacatgttttcacaaatgacaggatttcctcatttttaaggctgaatagtattccactgtgtgtgtgtgtgtgtgtgtgtgtgtgtgtgtgtgtgtgtgtgtgttttctttatccttgcatttattgatggacacttaggttgattccatattatgggaatacagatatctcttcagtatgctgacttcatttcctttggatatatacccaagagtgggattgtcggatcatatggtagttctatttctaattttttaaggaacctccacagttttccataatggttgtactagtttacattcccactagcagtacgctaagggtttccttttcctcacatcctcaccaacacttgtgatcattttggcattccttgcagttgcaccactccagtctctgcctccttggtcagcttgtctcttcctcttagtctgtctgtgtcctctcctcttttgtttcttataaggacattcgtcattggatttagggtctacctgagtataatctaggatgatcccatctcaagattttaaacttaattacatctgcaaagacccttttcccaaataggttacattcatatggtctgggtattgggatatggacacatctctttggggggccaccattccacccatatagatacatattcttttttgttgtgttttgaagacaaaagcatagatttattgaagcaaaaatacactccacagtgtgggagtgggctcaagcaagtggctcaagagcggtacatattcttattttcccaattttatagagatacattgagtaagcagtgaagctggcactggccaggcattatgactaggagctgcgcatctccaccaccacactgtgatggcatgctaatttattctgatttgtagagggtctgttttgaggcattctctgtatgaaatct

SEQ ID NO: 12131 - DNA, 398 bp, Homo sapiens
atcacccccaaaacaaactctgcacattaggtcatacaccatttcccactcctcccagcccctggcaactgctgatttacttcctgtccctatgcatttgccctttctgggtatttctttttttttttttttttttttctcttttctttttttgagatgaagtttcgctcttgttgcccaggctggagtgcaatggcgtgatctcggctcaccacaacctccacctcccaggttcaagggattctcctgcctcagcctcctgagtagctgggattacaggcatgtgccaccacgcccgggtaattttgtatttgtagtagagacgggatttctccatggtcaggctagtacctaactcccaacctgaggtgatccgcccacctcggcctctgaaagtg

SEQ ID NO: 12132 - DNA, 268 bp, Homo sapiens
ctgttctctgtttttattttatgcaactgctttttcagatatgttgtgaccttcgtaaatgtaggttgggaggaacaaaacattattaagattttcctatgtatgttttatatacatcatttccttttaactttcacaatagccctgtaaggtaaggatcagtagccccagtttacagatgagaaaacggagtctcagaaagtagatcacttcttgcaggctaatatgtgtcagcatcatattcagaaccaggaatagaaggcaaact

SEQ ID NO: 12133 - DNA, 1345 bp, Homo sapiens
catattagtgcatttctttgcagaggttacctctttttcttgtctctcgtcaggtctctgacattgacagagcctggacgttggaggaagccccaggacgttggaggggtaaagtaaaagtccacagttaccgtgagagaaaaaagagggagaaagcagtgcagccaaactcggaagaaaagagaggaggaaaaggactcgactttcacattggaacaaccttctttccagtgctaaaggatctctgatctggggaacaacaccctggacatggctccagagatcaacttgccgggcccaatgagcctcattgataacactaaagggcagctggtggtgaatccagaagctctgaagatcctatctgcaattacgcagcctgtggtggtggtggcgattgtgggcctctatcgcacaggcaaatcctacctgatgaacaagctggctgggaagaaaaacggcttctctctaggctccacagtgaagtctcacaccaagggaatctggatgtggtgtgtgcctcatcccaagaagccagaacacaccctagttctgctcgacactgagggcctgggagatatagagaagggtgacaatgagaatgactcctggatctttgccttggccatcctcctgagcagcaccttcgtgtacaatagcatgggaaccatcaaccagcaggccatggaccaacttcactatgtgacagagctgacagatcgaatcaaggcaaactcctcacctggtaacaattctgtagacgactcagctgactttgtgagcttttttccagcatttgtgtggactctcagagatttcaccctggaactggaagtagatggagaacccatcactgctgatgactacttggagctttcgctaaagctaagaaaaggtactgataagaaaagtaaaagctttaatgatcctcggttgtgcatccgaaagttcttccccaagaggaagtgcttcgtcttcgattggcccgctcctaagaagtaccttgctcacctagagcagctaaaggaggaagagctgaaccctgatttcatagaacaagttgcagaattttgttcctacatcctcagccattccaatgtcaagactctttcaggtggcattccagtcaatgggcctcgtgagtcactctctctacccacttcctacctggactttctccttctgcccattgtagaggataaaatggaaagcataagggtcacttctgacaaatgcatagtctattgatggcaaggaaaatacaacatgaaaatcatattataaattttacatgaaaactaaagctatagtatcatctcatattccttgcaaggagaataaaaaa

SEQ ID NO: 12134 - DNA, 1687 bp, Homo sapiens
catattagtgcatttctttgcagaggttacctctttttcttgtctctcgtcaggtctctgacattgacagagcctggacgttggaggaagccccaggacgttggaggggtaaagtaaaagtccacagttaccgtgagagaaaaaagagggagaaagcagtgcagccaaactcggaagaaaagagaggaggaaaaggactcgactttcacattggaacaaccttctttccagtgctaaaggatctctgatctggggaacaacaccctggacatggctccagagatcaacttgccgggcccaatgagcctcattgataacactaaagggcagctggtggtgaatccagaagctctgaagatcctatctgcaattacgcagcctgtggtggtggtggcgattgtgggcctctatcgcacaggcaaatcctacctgatgaacaagctggctgggaagaaaaacggcttctctctaggctccacagtgaagtctcacaccaagggaatctggatgtggtgtgtgcctcatcccaagaagccagaacacaccctagttctgctcgacactgagggcctgggagatatagagaagggtgacaatgagaatgactcctggatctttgccttggccatcctcctgagcagcaccttcgtgtacaatagcatgggaaccatcaaccagcaggccatggaccaacttcactatgtgacagagctgacagatcgaatcaaggcaaactcctcacctggtaacaattctgtagacgactcagctgactttgtgagcttttttccagcatttgtgtggactctcagagatttcaccctggaactggaagtagatggagaacccatcactgctgatgactacttggagctttcgctaaagctaagaaaaggttactgggtctgatgcttggttgggtaataaatagagagcaaataatatcaaaataaccatttctgtgcagtgctaaaaattataatttttaactgtatttttctgactgttctgctagaggaaatggaaacattgcttgactatatcagttggaaccaattttaaattgcattacctacctcttcttggagactttcctttctctacccctttaattttttatttcttcttcctaataaatttcctccttacatgggctttgtgaaaattataaaattgaaagatcatatttgaagtaattaatttgaagttttactacttctaattttcattcctgtaggtactgataagaaaagtaaaagctttaatgatcctcggttgtgcatccgaaagttcttccccaagaggaagtgcttcgtcttcgattggcccgctcctaagaagtaccttgctcacctagagcagctaaaggaggaagagctgaaccctgatttcatagaacaagttgcagaattttgttcctacatcctcagccattccaatgtcaagactctttcaggtggcattccagtcaatgggcctcgtgagtcactctctctacccacttcctacctggactttctccttctgcccattgtagaggataaaatggaaagcataagggtcacttctgacaaatgcatagtctattgatggcaaggaaaatacaacatgaaaatcatattataaattttacatgaaaactaaagctatagtatcatctcatattccttgcaaggagaataaaaaa

SEQ ID NO: 12135 - DNA, 2860 bp, Homo sapiens
tccaggagcccagcgcaggccgcagagccggggccgctgtgagccgagaccgcgggccgcggagctcgggcggccggcgcggagaatttgttcctgttgaagagtggctcctcttctaatttccagactccttgaggttttaggagtctggtaggtgaaattttctacctctaaggagaaacagtacctgctccttcctcaagcgcaagccctccattgctatggataccgaatccacttattctggatattcttactattcaagtcattcgaaaaaatctcacagacaaggggaaagaactagagagagacacaagtcaccccggaataaagacggcagagggtcagaaaagtctgtcaccattcaacctcccactggagagcccctgttgggaaatgattctactcggacagaggaagttcaggatgacaactggggagagaccaccacggccatcacaggcacctcggagcacagcatatcccaagaggacattgccaggatcagcaaggacatggaggacagcgtggggctggattgcaaacgctacctgggcctcaccgtcgcctcttttcttggacttctagttttcctcacccctattgccttcatccttttacctccgatcctgtggagggatgagctggagccttgtggcacaatttgtgaggggctctttatctccatggcattcaaactcctcattctgctcatagggacctgggcactttttttccgcaagcggagagctgacatgccacgggtgtttgtgtttcgtgcccttttgttggtcctcatctttctctttgtggtttcctattggcttttttacggggtccgcattttggactctcgggaccggaattaccagggcattgtgcaatatgcagtctcccttgtggatgccctcctcttcatccattacctggccatcgtcctgctggagctcaggcagctgcagcccatgttcacgctgcaggtggtccgctccaccgatggcgagtcccgcttctacagcctgggacacctgagtatccagcgagcagcattggtggtcctagaaaattactacaaagatttcaccatctataacccaaacctcctaacagcctccaaattccgagcagccaagcatatggccgggctgaaagtctacaatgtagatggccccagtaacaatgccactggccagtcccgggccatgattgctgcagctgctcggcgcagggactcaagccacaacgagttgtattatgaagaggccgaacatgaacggcgagtaaagaagcggaaagcaaggctggtggttgcagtggaagaggccttcatccacattcagcgtctccaggctgaggagcagcagaaagccccaggggaggtgatggaccctagggaggccgcccaggccattttcccctccatggccagggctctccagaagtacctgcgcatcacccggcagcagaactaccacagcatggagagcatcctgcagcacctggccttctgcatcaccaacggcatgacccccaaggccttcctagaacggtacctcagtgcgggccccaccctgcaatatgacaaggaccgctggctctctacacagtggaggcttgtcagtgatgaggctgtgactaatggattacgggatggaattgtgttcgtccttaagtgcttggacttcagcctcgtagtcaatgtgaagaaaattccattcatcatactctctgaagagttcatagaccccaaatctcacaaatttgtccttcgcttacagtctgagacatccgtttaaaagttctatatttgtggctttattaaaaaaaaaagaaaaatatatagagagatatgcaaaaaaaataaaagacaaaaacaaaaaaaaaacgtgtttgggcgccgagcacttggccccttgagaaaaagcgtcttttataaccccattcttgttttgggcagcggcaggccccctagtatggtatgggtgaacaacgttggtaatagcggtttccccagagggaaacccccggggcaaagactagagtgcagggagatcttccacacactatataaaaaaagccgcgggggggaaacacagagggtgtccgaaacacttcccagagaggaggtaccgaggcggacacagggacgtcatcaaaagggggtcccacggcgaagcgagaatataaatgcgcgcccacgcatgtacgcaaacagcacgactaggtagagtcacaaagaggaagaggcgggcggacaagacaaagacagaggacagaaagagaaaaagacaggaccgggagaaaggaggggaaaggagagaaagcaagcaagcggaagccgaacagaagccggaacgaaccccggcggagcgaaggagcaggaagaaggagaagggaagacggggagaaagcaaacacaagagagagcacagcgaggcaagcaagaagtgacgaaagtcagcaaaggaaaaaggaagccgcgtagaacgcgacgaacggaagcaacgaaagaacgaagggagaagaagggaagaggacagcagaaaagggcacacatgaggaagaagaacgacgaacgaagcacaagcgccaagtaagaaagaacgagggagagaagagaggagggagagccagcaggagagggagaggcgagagaccggagggccacaagcgagcaaggagagaagggggggggggcaagacaaacccagggggacagcggcagaggaggaggcgacaggaagaggagcggagagcgaacgaggaagacggacgggaggaggagcgagaggagagcggagggggggagagaggagagaggagaggaaggcaggggagggggggagaacaggagagagaa

SEQ ID NO: 12136 - DNA, 2233 bp, Homo sapiens
tgaaggcgggagtggagctgccgtttgtggtttggtgctgtggtgcctgttaaaagtggctttaatgagagtgtaaggtgctgcacactgaagccctgtgtttattcagctgcctcctgccagcggctacagctgggatggcttccctcgcacggcgtctgcccacagccttgcgcccggagcccagaggactcacaggaaaaggagctggcaaaggtgaagctggttttcatggtctcctgagggcccctggcccctgggagatgggtcacactccctgaatgctgtgctgttggtttccctggaggattcttgctgcaggccaggtcccgtattctccacactcaccacaagtggctgggtgtgacttgacacggtgtgaaagtggaggggcgcgagcactcagtatccagcgagcagcattggtggtcctagaaaattactacaaagatttcaccatctataacccaaacctcctaacagcctccaaattccgagcagccaagcatatggccgggctgaaagtctacaatgtagatggccccagtaacaatgccactggccagtcccgggccatgattgctgcagctgctcggcgcagggactcaagccacaacgagttgtattatgaagaggccgaacatgaacggcgagtaaagaagcggaaagcaaggctggtggttgcagtggaagaggccttcatccacattcagcgtctccaggctgaggagcagcagaaagccccaggggaggtgatggaccctagggaggccgcccaggccattttcccctccatggccagggctctccagaagtacctgcgcatcacccggcagcagaactaccacagcatggagagcatcctgcagcacctggccttctgcatcaccaacggcatgacccccaaggccttcctagaacggtacctcagtgcgggccccaccctgcaatatgacaaggaccgctggctctctacacagtggaggcttgtcagtgatgaggctgtgactaatggattacgggatggaattgtgttcgtccttaagtgcttggacttcagcctcgtagtcaatgtgaagaaaattccattcatcatactctctgaagagttcatagaccccaaatctcacaaatttgtccttcgcttacagtctgagacatccgtttaaaagttctatatttgtggctttattaaaaaaaaaagaaaaatatatagagagatatgcaaaaaaaataaaagacaaaaacaaaaaaaaaacgtgtttgggcgccgagcacttggccccttgagaaaaagcgtcttttataaccccattcttgttttgggcagcggcaggccccctagtatggtatgggtgaacaacgttggtaatagcggtttccccagagggaaacccccggggcaaagactagagtgcagggagatcttccacacactatataaaaaaagccgcgggggggaaacacagagggtgtccgaaacacttcccagagaggaggtaccgaggcggacacagggacgtcatcaaaagggggtcccacggcgaagcgagaatataaatgcgcgcccacgcatgtacgcaaacagcacgactaggtagagtcacaaagaggaagaggcgggcggacaagacaaagacagaggacagaaagagaaaaagacaggaccgggagaaaggaggggaaaggagagaaagcaagcaagcggaagccgaacagaagccggaacgaaccccggcggagcgaaggagcaggaagaaggagaagggaagacggggagaaagcaaacacaagagagagcacagcgaggcaagcaagaagtgacgaaagtcagcaaaggaaaaaggaagccgcgtagaacgcgacgaacggaagcaacgaaagaacgaagggagaagaagggaagaggacagcagaaaagggcacacatgaggaagaagaacgacgaacgaagcacaagcgccaagtaagaaagaacgagggagagaagagaggagggagagccagcaggagagggagaggcgagagaccggagggccacaagcgagcaaggagagaagggggggggggcaagacaaacccagggggacagcggcagaggaggaggcgacaggaagaggagcggagagcgaacgaggaagacggacgggaggaggagcgagaggagagcggagggggggagagaggagagaggagaggaaggcaggggagggggggagaacaggagagagaa

SEQ ID NO: 12137 - DNA, 2043 bp, Homo sapiens
tgaaggcgggagtggagctgccgtttgtggtttggtgctgtggtgcctgttaaaagtggctttaatgagagtgtaaggtgctgcacactgaagccctgtgtttattcagctgcctcctgccagcggctacagctgggatggcttccctcgcacggcgtctgcccacagccttgcgcccggagcccagaggactcacaggaaaaggagctggcaaagtatccagcgagcagcattggtggtcctagaaaattactacaaagatttcaccatctataacccaaacctcctaacagcctccaaattccgagcagccaagcatatggccgggctgaaagtctacaatgtagatggccccagtaacaatgccactggccagtcccgggccatgattgctgcagctgctcggcgcagggactcaagccacaacgagttgtattatgaagaggccgaacatgaacggcgagtaaagaagcggaaagcaaggctggtggttgcagtggaagaggccttcatccacattcagcgtctccaggctgaggagcagcagaaagccccaggggaggtgatggaccctagggaggccgcccaggccattttcccctccatggccagggctctccagaagtacctgcgcatcacccggcagcagaactaccacagcatggagagcatcctgcagcacctggccttctgcatcaccaacggcatgacccccaaggccttcctagaacggtacctcagtgcgggccccaccctgcaatatgacaaggaccgctggctctctacacagtggaggcttgtcagtgatgaggctgtgactaatggattacgggatggaattgtgttcgtccttaagtgcttggacttcagcctcgtagtcaatgtgaagaaaattccattcatcatactctctgaagagttcatagaccccaaatctcacaaatttgtccttcgcttacagtctgagacatccgtttaaaagttctatatttgtggctttattaaaaaaaaaagaaaaatatatagagagatatgcaaaaaaaataaaagacaaaaacaaaaaaaaaacgtgtttgggcgccgagcacttggccccttgagaaaaagcgtcttttataaccccattcttgttttgggcagcggcaggccccctagtatggtatgggtgaacaacgttggtaatagcggtttccccagagggaaacccccggggcaaagactagagtgcagggagatcttccacacactatataaaaaaagccgcgggggggaaacacagagggtgtccgaaacacttcccagagaggaggtaccgaggcggacacagggacgtcatcaaaagggggtcccacggcgaagcgagaatataaatgcgcgcccacgcatgtacgcaaacagcacgactaggtagagtcacaaagaggaagaggcgggcggacaagacaaagacagaggacagaaagagaaaaagacaggaccgggagaaaggaggggaaaggagagaaagcaagcaagcggaagccgaacagaagccggaacgaaccccggcggagcgaaggagcaggaagaaggagaagggaagacggggagaaagcaaacacaagagagagcacagcgaggcaagcaagaagtgacgaaagtcagcaaaggaaaaaggaagccgcgtagaacgcgacgaacggaagcaacgaaagaacgaagggagaagaagggaagaggacagcagaaaagggcacacatgaggaagaagaacgacgaacgaagcacaagcgccaagtaagaaagaacgagggagagaagagaggagggagagccagcaggagagggagaggcgagagaccggagggccacaagcgagcaaggagagaagggggggggggcaagacaaacccagggggacagcggcagaggaggaggcgacaggaagaggagcggagagcgaacgaggaagacggacgggaggaggagcgagaggagagcggagggggggagagaggagagaggagaggaaggcaggggagggggggagaacaggagagagaa

SEQ ID NO: 12138 - DNA, 1076 bp, Homo sapiens
tccaggagcccagcgcaggccgcagagccggggccgctgtgagccgagaccgcgggccgcggagctcgggcggccggcgcggagaatttgttcctgttgaagagtggctcctcttctaatttccagactccttgaggttttaggagtctggtaggtgaaattttctacctctaaggagaaacagtacctgctccttcctcaagcgcaagccctccattgctatggataccgaatccacttattctggatattcttactattcaagtcattcgaaaaaatctcacagacaaggggaaagaactagagagagacacaagtcaccccggaataaagacggcagagggtcagaaaagtctgtcaccattcaacctcccactggagagcccctgttgggaaatgattctactcggacagaggaagttcaggatgacaactggggagagaccaccacggccatcacaggcacctcggagcacagcatatcccaagaggacattgccaggatcagcaaggacatggaggacagcgtggggctggattgcaaacgctacctgggcctcaccgtcgcctcttttcttggacttctagttttcctcacccctattgccttcatccttttacctccgatcctgtggagggatgagctggagccttgtggcacaatttgtgaggggctctttatctccatggcattcaaactcctcattctgctcatagggacctgggcactttttttccgcaagcggagagctgacatgccacgggtgtttgtgtttcgtgcccttttgttggtcctcatctttctctttgtggtttcctattggcttttttacggggtccgcattttggactctcgggaccggaattaccagggcattgtgcaatatgcagtctcccttgtggatgccctcctcttcatccattacctggccatcgtcctgctggagctcaggcagctgcagcccatgttcacgctgcaggtggtccgctccaccgatggcgagtcccgcttctacagcctgggacacctgaggtaagaggcaacatccaggaggcagaaaggatggctgatgtct

SEQ ID NO: 12139 - DNA, 1324 bp, Homo sapiens
gtccatgtgttaacagcatttcttaatgatgtatatatggagtggtcttcaatcatagtgaagaatttaaagagaaagtcaattgtattggcatttttaataagaacaaaattagttcgtctaaggggactggctggccacatatttgttccttgcccatatgctttctacttcttgttcttattatgaaattatgaatttgaagcctctgaaatggtgatcagttttcaacatctttcaaaaacaaaattactatttcctccatattgccttttttagataactttaaagttaggattttaaaatatttgtaactggctaaattttaaagtcgtgacaaataattacttaggttcagaaatatacacacacttactctttagccagtttctttcaaggtttactgtcccatcagatatctagccattttcctttgcaaattacataccttcttaagagtgtatttttaagattattacttatgctttatgatgatatagtttttcaaaattatttatagcttcatatgatgttttgtaattttttctattgatacctgttttaaaaatattttccaaggaagttgattaaaattatatttgttaccttttagaaaaagcattgaaatgagtttctcttgctttttcattttccctctgctttatatgctcttcgcaatacatcatgtccaacgggatacctattgttctcatgacacccaaaattgatgagagcaaaggggtcgcaccatatggaaatgttgaaaactattgtaaagtagtattatgaagtagcttttgtgtcattcatgtcgatgacatgaaagtgaagtaaatttattctatgtaaattcacactaaaaccagtacagtaccataagtagaatacatgtaagaatcacctagtcttcactatattgagtaaatataacatgctaattttacaattaatgaaactaaacttttaaacatctccattatatctacatccttttgaaggtatttatcatagttgccaattttaattttaggattgactttctctttctgaatgacttcataaagtttggtgtgaattttgaagacttgggttactaatgattgtatctttgctagtcaacaacttatgaaatatactcaatgcgtctgatgtgtcattaagtgcagaaataactaagacacaaataacctttgcaaaccttcaagctgtgtaatattccaatgttgtttttttctttgtatatatacttatatcacgtaggatgtaaaaccagtatgaccttgtctagtctccaaacttaaaataaacttttgaaaagctggga

SEQ ID NO: 12140 - DNA, 1254 bp, Homo sapiens
ggaatcagttgtttacggtatttacaggtattcaacggccttacgttcgtctaaggggactggctggccacatatttgttccttgcccatatgctttctacttcttgttcttattatgaaattatgaatttgaagcctctgaaatggtgatcagttttcaacatctttcaaaaacaaaattactatttcctccatattgccttttttagataactttaaagttaggattttaaaatatttgtaactggctaaattttaaagtcgtgacaaataattacttaggttcagaaatatacacacacttactctttagccagtttctttcaaggtttactgtcccatcagatatctagccattttcctttgcaaattacataccttcttaagagtgtatttttaagattattacttatgctttatgatgatatagtttttcaaaattatttatagcttcatatgatgttttgtaattttttctattgatacctgttttaaaaatattttccaaggaagttgattaaaattatatttgttaccttttagaaaaagcattgaaatgagtttctcttgctttttcattttccctctgctttatatgctcttcgcaatacatcatgtccaacgggatacctattgttctcatgacacccaaaattgatgagagcaaaggggtcgcaccatatggaaatgttgaaaactattgtaaagtagtattatgaagtagcttttgtgtcattcatgtcgatgacatgaaagtgaagtaaatttattctatgtaaattcacactaaaaccagtacagtaccataagtagaatacatgtaagaatcacctagtcttcactatattgagtaaatataacatgctaattttacaattaatgaaactaaacttttaaacatctccattatatctacatccttttgaaggtatttatcatagttgccaattttaattttaggattgactttctctttctgaatgacttcataaagtttggtgtgaattttgaagacttgggttactaatgattgtatctttgctagtcaacaacttatgaaatatactcaatgcgtctgatgtgtcattaagtgcagaaataactaagacacaaataacctttgcaaaccttcaagctgtgtaatattccaatgttgtttttttctttgtatatatacttatatcacgtaggatgtaaaaccagtatgaccttgtctagtctccaaacttaaaataaacttttgaaaagctggga

SEQ ID NO: 12141 - DNA, 1371 bp, Homo sapiens
gtccatgtgttaacagcatttcttaatgatgtatatatggagtggtcttcaatcatagtgaagaatttaaagagaaagtcaattgtattggcatttttaataagaacaaaattagttcgtctaaggggactggctggccacatatttgttccttgcccatatgctttctacttcttgttcttattatgaaattatgaatttgaagcctctgaaatggtgatcagttttcaacatctttcaaaaacaaaattactatttcctccatattgccttttttagataactttaaagttaggattttaaaatatttgtaactggctaaattttaaagtcgtgacaaataattacttaggttcagaaatatacacacacttactctttagccagtttctttcaaggtttactgtcccatcagatatctagccattttcctttgcaaattacataccttcttaagagtgtatttttaagattattacttatgctttatgatgatatagtttttcaaaattatttatagcttcatatgatgttttgtaattttttctattgatacctgttttaaaaatattttccaaggaagttgattaaaattatatttgttaccttttagaaaaagcattgaaatgagtttctcttgctttttcattttccctctgctttatatgctcttcgcaatacatcatgtccaacgggatacctattgttctcatgacacccaaaattgatgagagcaaaggggtcgcaccatatggaaatgttgaaaactattgtaaagtagtattatgaagtagcttttgtgtcattcatgtcgatgacatgaaagtgaagtaaatttattctatgtaaattcacactaaaaccagtacagtaccataagtagaatacatgtaagaatcacctagtcttcactatattgagtaaatataacatgctaattttacaattaatgaaactaaacttttaaacatctccattatatctacatccttttgaaggtatttatcatagttgccaattttaattttaggattgactttctctttctgaatgacttcataaagtttggtgtgaattttgaagacttgggttactaatgattgtatctttgctagtcaacaacttatgaaatatactcaatgcgtctgatgtgtcattaagtgcagaaataactaagacacaaataacctttgcaaaccttcaagctgtgtaatattccaatgttgtttttttctttgtatatatacttatatcacgtaggatgtaaaaccagtatgaccttgtctagtctccaaacttaaaataaacttttgaaaagctgggattcttttgaagcagttgtaattaaacacatttataagaatacaaaaa

SEQ ID NO: 12142 - DNA, 1720 bp, Homo sapiens
gtccatgtgttaacagcatttcttaatgatgtatatatggagtggtcttcaatcatagtgaagaatttaaagagaaagtcaattgtattggcatttttaataagaacaaaattagttcgtctaaggggactggctggccacatatttgttccttgcccatatgctttctacttcttgttcttattatgaaattatgaatttgaagcctctgaaatggtgatcagttttcaacatctttcaaaaacaaaattactatttcctccatattgccttttttagataactttaaagttaggattttaaaatatttgtaactggctaaattttaaagtcgtgacaaataattacttaggttcagaaatatacacacacttactctttagccagtttctttcaaggtttactgtcccatcagatatctagccattttcctttgcaaattacataccttcttaagagtgtatttttaagattattacttatgctttatgatgatatagtttttcaaaattatttatagcttcatatgatgttttgtaattttttctattgatacctgttttaaaaatattttccaaggaagttgattaaaattatatttgttaccttttagaaaaagcattgaaatgagtttctcttgctttttcattttccctctgctttatatgctcttcgcaatacatcatgtccaacgggatacctattgttctcatgacacccaaaattgatgagagcaaaggggtcgcaccatatggaaatgttgaaaactattgtaaagtagtattatgaagtagcttttgtgtcattcatgtcgatgacatgaaagtgaagtaaatttattctatgtaaattcacactaaaaccagtacagtaccataagtagaatacatgtaagaatcacctagtcttcactatattgagtaaatataacatgctaattttacaattaatgaaactaaacttttaaacatctccattatatctacatccttttgaaggtatttatcatagttgccaattttaattttaggattgactttctctttctgaatgacttcataaagtttggtgtgaattttgaagacttgggttactaatgattgtatctttgctagtcaacaacttatgaaatatactcaatgcgtctgatgtgtcattaagtgcagaaataactaagacacaaataacctttgcaaaccttcaagctgtgtaatattccaatgttgtttttttctttgtatatatacttatatcacgtaggatgtaaaaccagtatgaccttgtctagtctccaaacttaaaataaacttttgaaaagctgggattcttttgaagcagttgtaattaaacacatttataagaatacaaaaacaaaaaaaaaaaaaaaacaaaaaaacaaaaaaaaacaaaaacacaaaaacacaaacaacaacaaaacaaaataataaataaaaataacaaacaatcacagaacaaacaataacaaacaaagtaacaacaacacataaggaaatcagagagaggccgaggtgcggggcgttggctggtgccacggggtgtggacggccacgtcgtcctctctgcaccgtatgtgctgggtacgcgtgtggggcgcgcgcggcggccttacatgctcggtgtgtattgtgttccttcgcgctgcgtcgccgagcgcgcgtccttgctctcgccgggtcctcggctgcgctctgatcttttt

SEQ ID NO: 12143 - DNA, 1294 bp, Homo sapiens
gtccatgtgttaacagcatttcttaatgatgtatatatggagtggtcttcaatcatagtgaagaatttaaagagaaagtcaattgtattggcatttttaataagaacaaaattagttcgtctaaggggactggctggccacatatttgttccttgcccatatgctttctacttcttgttcttattatgaaattatgaatttgaagcctctgaaatggtgatcagttttcaacatctttcaaaaacaaaattactatttcctccatattgccttttttagataactttaaagttaggattttaaaatatttgtaactggctaaattttaaagtcgtgacaaataattacttaggttcagaaatatacacacacttactctttagccagtttctttcaaggtttactgtcccatcagatatctagccattttcctttgcaaattacataccttcttaagagtgtatttttaagattattacttatgctttatgatgatatagtttttcaaaattatttatagcttcatatgatgttttgtaattttttctattgatacctgttttaaaaatattttccaaggaagttgattaaaattatatttgttaccttttagaaaaagcattgaaatgagtttctcttgctttttcattttccctctgctttatatgctcttcgcaatacatcatgtccaacgggatacctattgttctcatgacacccaaaattgatgagagcaaaggggtcgcaccatatggaaatgttgaaaactattgtaaagtagtattatgaagtagcttttgtgtcattcatgtcgatgacatgaaagtgaagtaaatttattctatgtaaattcacactaaaaccagtacagtaccataagtagaatacatgtaagaatcacctagtcttcactatattgagtaaatataacatgctaattttacaattaatgaaactaaacttttaaacatctccattatatctacatccttttgaaggtatttatcatagttgccaattttaattttaggattgactttctctttctgaatgacttcataaagtttggtgtgaattttgaagacttgggttactaatgattgtatctttgctagtcaacaacttatgaaatatactcaatgcgtctgatgtgtcattaagtgcagaaataactaagacacaaataacctttgcaaaccttcaagctgtgtaatattccaatgttgtttttttctttgtatatatacttatatcacgtaggatacagtagggagatctccatacagtagggaga

SEQ ID NO: 12144 - DNA, 761 bp, Homo sapiens
ctactctagtcaacggtagtatgccgtttctaataagctgtaccttttagaaaaagcattgaaatgagtttctcttgctttttcattttccctctgctttatatgctcttcgcaatacatcatgtccaacgggatacctattgttctcatgacacccaaaattgatgagagcaaaggggtcgcaccatatggaaatgttgaaaactattgtaaagtagtattatgaagtagcttttgtgtcattcatgtcgatgacatgaaagtgaagtaaatttattctatgtaaattcacactaaaaccagtacagtaccataagtagaatacatgtaagaatcacctagtcttcactatattgagtaaatataacatgctaattttacaattaatgaaactaaacttttaaacatctccattatatctacatccttttgaaggtatttatcatagttgccaattttaattttaggattgactttctctttctgaatgacttcataaagtttggtgtgaattttgaagacttgggttactaatgattgtatctttgctagtcaacaacttatgaaatatactcaatgcgtctgatgtgtcattaagtgcagaaataactaagacacaaataacctttgcaaaccttcaagctgtgtaatattccaatgttgtttttttctttgtatatatacttatatcacgtaggatgtaaaaccagtatgaccttgtctagtctccaaacttaaaataaacttttgaaaagctggga

SEQ ID NO: 12145 - DNA, 512 bp, Homo sapiens
gctctcggtacgatgaggcctgcaggcacctggcacgcaccctcctcgtcaccaggatgcccaagaagaaggtcatgaagggaccatcaaggaagagcccaagaggagattggcgcagttgtcagctaaacctgctcctgcaaaagtggaagcgaagctgaaaaaggcagcagcgaaggataaatcttcaggcaaaaatgtgcactctgtaagatctgtggttgtggtagtcctgttttcctaataacgttgttatgctgtgaaagattaaaaatttgaatatgtagtgtatatgctattcagttgtgaattggtgaaatgtatgtaacagcttatcaacatgtgaagatattgatagccccttaaggaaaatttgcttccaaattttaagctggaaagtcgctggaataactttaaaaaagaattacaatacgtggctttttagattttcggtatgtatgttaagaattgtgtacaagtttaagtgtctgtactgatccacatccaataaa

SEQ ID NO: 12146 - DNA, 1373 bp, Homo sapiens
gtaagaacactctcgtgagtctaacggtcttccggatgaaggctatttgaagtcgccataacctggtcagaagtgtgcctgtcggcggggagagaggcaatatcaaggttttaaatctcggagaaatggctttcgtttgcttggctatcggatgcttatatacctttctgataagcacaacatttggctgtacttcatcttcagacaccgagataaaagttaaccctcctcaggattttgagatagtggatcccggatacttaggttatctctatttgcaatggcaacccccactgtctctggatcattttaaggaatgcacagtggaatatgaactaaaataccgaaacattggtagtgaaacatggaagaccatcattactaagaatctacattacaaagatgggtttgatcttaacaagggcattgaagcgaagatacacacgcttttaccatggcaatgcacaaatggatcagaagttcaaagttcctgggcagaaactacttattggatatcaccacaaggaattccagaaactaaagttcaggatatggattgcgtatattacaattggcaatatttactctgttcttggaaacctggcataggtgtacttcttgataccaattacaacttgttttactggtatgagggcttggatcatgcattacagtgtgttgattacatcaaggctgatggacaaaatataggatgcagatttccctatttggaggcatcagactataaagatttctatatttgtgttaatggatcatcagagaacaagcctatcagatccagttatttcacttttcagcttcaaaatatagttaaacctttgccgccagtctatcttacttttactcgggagagttcatgtgaaattaagctgaaatggagcatacctttgggacctattccagcaaggtgttttgattatgaaattgagatcagagaagatgatactaccttggtgactgctacagttgaaaatgaaacatacaccttgaaaacaacaaatgaaacccgacaattatgctttgtagtaagaagcaaagtgaatatttattgctcagatgacggaatttggagtgagtggagtgataaacaatgctgggaaggtgaagacctatcgaagaaaactttgctacgtttctggctaccatttggtttcatcttaatattagttatatttgtaaccggtctgcttttgcgtaagccaaacacctacccaaaaatgattccagaatttttctgtgatacatgaagactttccatatcaagagacatggtattgactcaacagtttccagtcatggccaaatgttcaatatgagtctcaataaactgaatttttcttgcgaatgttgaa

SEQ ID NO: 12147 - DNA, 1870 bp, Homo sapiens
gtaagaacactctcgtgagtctaacggtcttccggatgaaggctatttgaagtcgccataacctggtcagaagtgtgcctgtcggcggggagagaggcaatatcaaggttttaaatctcggagaaatggctttcgtttgcttggctatcggatgcttatatacctttctgataagcacaacatttggctgtacttcatcttcagacaccgagataaaagttaaccctcctcaggattttgagatagtggatcccggatacttaggttatctctatttgcaatggcaacccccactgtctctggatcattttaaggaatgcacagtggaatatgaactaaaataccgaaacattggtagtgaaacatggaagaccatcattactaagaatctacattacaaagatgggtttgatcttaacaagggcattgaagcgaagatacacacgcttttaccatggcaatgcacaaatggatcagaagttcaaagttcctgggcagaaactacttattggatatcaccacaaggaattccagaaactaaagttcaggatatggattgcgtatattacaattggcaatatttactctgttcttggaaacctggcataggtgtacttcttgataccaattacaacttgttttactggtatgagggcttggatcatgcattacagtgtgttgattacatcaaggctgatggacaaaatataggatgcagatttccctatttggaggcatcagactataaagatttctatatttgtgttaatggatcatcagagaacaagcctatcagatccagttatttcacttttcagcttcaaaatatagttaaacctttgccgccagtctatcttacttttactcgggagagttcatgtgaaattaagctgaaatggagcatacctttgggacctattccagcaaggtgttttgattatgaaattgagatcagagaagatgatactaccttggtgactgctacagttgaaaatgaaacatacaccttgaaaacaacaaatgaaacccgacaattatgctttgtagtaagaagcaaagtgaatatttattgctcagatgacggaatttggagtgagtggagtgataaacaatgctgggaaggtgaagacctatcgaagaaaactttgctacgtttctggctaccatttggtttcatcttaatattagttatatttgtaaccggtctgcttttgcgtaagccaaacacctacccaaaaatgattccagaatttttctgtgatacatgaagactttccatatcaagagacatggtattgactcaacagtttccagtcatggccaaatgttcaatatgagtctcaataaactgaatttttcttgcgaatgttgaaaaaaaaaaaaaaaaaaaaaaaaaaaaaaaaaaaaaaaaaaaaaaaaaaaaaaaaaataattaaaaagaaaaataaaaatagaaaaaaaaagaataaaaagaaaaataaacaaaaaaaaacaaaaatgagggggggggcggccacctatatattttttcctgggcggaggcgcaaaaaaatattatgagcacgagccttttttgttttaaaaaggggcgcccccattatgatgggagatttttataataagaaaggagcacgtgtctttacaacaaagctggtgtgtgaggaaaaaacaaatctgttggatgtattgtggggagagaaacccatcttgtgggggtgagagaaaattatgaagccaatccataaggagaaataatgccagggggataaaataaaatgagtgatgtgtgtgtaccagtatatttctggcgagaagatgtccggggtgatttataattagcggtgatgataattagaagtgaggtagatgt

SEQ ID NO: 12148 - DNA, 701 bp, Homo sapiens
ataaagatttctatattgtagtctgatgcctccaaatagggaaatctgcatcctatttggaggcatcagactataaagatttctatatttgtgttaatggatcatcagagaacaagcctatcagatccagttatttcacttttcagcttcaaaatatagttaaacctttgccgccagtctatcttacttttactcgggagagttcatgtgaaattaagctgaaatggagcatacctttgggacctattccagcaaggtgttttgattatgaaattgagatcagagaagatgatactaccttggtgactgctacagttgaaaatgaaacatacaccttgaaaacaacaaatgaaacccgacaattatgctttgtagtaagaagcaaagtgaatatttattgctcagatgacggaatttggagtgagtggagtgataaacaatgctgggaaggtgaagacctatcgaagaaaactttgctacgtttctggctaccatttggtttcatcttaatattagttatatttgtaaccggtctgcttttgcgtaagccaaacacctacccaaaaatgattccagaatttttctgtgatacatgaagactttccatatcaagagacatggtattgactcaacagtttccagtcatggccaaatgttcaatatgagtctcaataaactgaatttttcttgcgaatgttgaa

SEQ ID NO: 12149 - DNA, 1647 bp, Homo sapiens
cagaatcgttttgggtctggtcgccaagatggcgtcctccgcctccgcccggactccggcagggaagcgagtgataaatcaggaagaattgcggcggttaatgaaggagaagcagcgtctgagcaccagtcggaaacggatagaatctccattcgcgaagtacaaccgtttggggcagctgagttgtgccctgtgtaacactccggttaagagcgagctcctgtggcagactcacgtcctgggaaagcagcaccgagagaaagtggccgagctgaaaggcgcgaaggaagccagccagggttcgtccgccagttcagcgcctcagtccgtcaagaggaaagcgccggacgcagacgaccaagatgtcaagagagcgaaggccaccttggtgcctcaggtacagccctccacatctgcgtggaccaccaactttgacaaaataggaaaggagttcattagagcgactcccagtaagccttcaggactcagtttactccccgattatgaagatgaggaggaggaggaagaggaggaggaaggagatggagaaagaaaaaggggggacgccagcaagccgctctccgacgcacagggcaaggagcactcagtttcctcttcacgggaggtaacaagtagtgtgctgccaaacgatttctttagtactaatcctcccaaggcccccataattcctcattcagggtcaattgagaaagcagaaatacatgaaaaagtggtggaaaggagagaaaacaccgcggaagcgttaccggaaggtttttttgacgaccctgaggtagatgcaagagtacgaaaggttgatgctccaaaagatcagatggacaaagagtgggacgaattccaaaaagccatgaggcaggtcaacactatttccgaagccatagttgccgaagaggatgaggagggacggttggaccgccagattggggagatcgatgagcagatagagtgttaccgacgggtggaaaagctacggaatcgccaggatgaaataaaaaataaacttaaagaaatcctgaccataaaagaactgcagaaaaaggaagaagagaatgctgacagcgatgatgagggggaactacaggatttgttgtctcaggattggagggtgaaaggggcattgttatagggttttaaagacccaaggtttctaacagcctctgctgttgtataaaaagtgctgtctctcagtagtatagcggttacttcatgcctcaagatttgggtacctggattgctaaactggattgttgagataaaatgagccagtgagctacagcactttggaaaatttgtgtaacatgtttttgaggtaaagttgtttttgaaatttctgaagtgttatataccaaaatgccaacttttccacgacagacttaactgtataatttcgttgtaaaatctgtaagttgtaaatattgtacatagttaaatctgtattctgttttgaatttttttaattaatagaaagaccaaccggcaaactttcagatgaatgcttactgtggtatttggaatgtatgtatcttctgaaccctacatcaagttgaaaaggtttgttttcttgtttctttggtttttgtatggttttttagaacacttcataaacacataagtcattgtaggtta

SEQ ID NO: 12150 - DNA, 1393 bp, Homo sapiens
cagaatcgttttgggtctggtcgccaagatggcgtcctccgcctccgcccggactccggcagggaagcgagtgataaatcaggaagaattgcggcggttaatgaaggagatcgatgagcagatagagtgttaccgacgggtggaaaagctacggaatcgccaggatgaaataaaaaataaacttaaagaaatcctgaccataaaagaactgcagaaaaaggaagaagagaatgctgacagcgatgatgagggggaactacaggatttgttgtctcaggattggagggtgaaaggggcattgttatagggttttaaagacccaaggtttctaacagcctctgctgttgtataaaaagtgctgtctctcagtagtatagcggttacttcatgcctcaagatttgggtacctggattgctaaactggattgttgagataaaatgagccagtgagctacagcactttggaaaatttgtgtaacatgtttttgaggtaaagttgtttttgaaatttctgaagtgttatataccaaaatgccaacttttccacgacagacttaactgtataatttcgttgtaaaatctgtaagttgtaaatattgtacatagttaaatctgtattctgttttgaatttttttaattaatagaaagaccaaccggcaaactttcagatgaatgcttactgtggtatttggaatgtatgtatcttctgaaccctacatcaagttgaaaaggtttgttttcttgtttctttggtttttgtatggttttttagaacacttcataaacacataagtcattgtaggttaatcagttctcttagtgtgctttattttaaaaacataagaaaactatatgccaaacatgaccaaaccaatgatggtcagatgtggttgcacatgagagtcacctatgaagcattaaaataattaaagtgtctgaggccttccccttcaataaatctgggattgggcccaggcaactgtgttttttaagcacccaggttattctaatatatgccagggttagagagtaactgccctaaatccagaacccatttatgtttttcaggttttttctttttctttaaataacacattccataaatttgctgtttcttgaatgaaggaaaaaatattatcttttatttatttcatccagccttaaattttgttatttggtggtaaattagggttccttgtttgcaggtcctatctattgtagaaagaatatttaagttgtctttccagcagtaacaattggctcttgctggtcattgatagtttaaatcactccttcctttagagattgaggtactcaaataggaaaagggaattagcagtgttctggagttgaaatgcatacagcatattcaaataaaagtgagcaataata

SEQ ID NO: 12151 - DNA, 2233 bp, Homo sapiens
cagaatcgttttgggtctggtcgccaagatggcgtcctccgcctccgcccggactccggcagggaagcgagtgataaatcaggaagaattgcggcggttaatgaaggagaagcagcgtctgagcaccagtcggaaacggatagaatctccattcgcgaagtacaaccgtttggggcagctgagttgtgccctgtgtaacactccggttaagagcgagctcctgtggcagactcacgtcctgggaaagcagcaccgagagaaagtggccgagctgaaaggcgcgaaggaagccagccagggttcgtccgccagttcagcgcctcagtccgtcaagaggaaagcgccggacgcagacgaccaagatgtcaagagagcgaaggccaccttggtgcctcaggtacagccctccacatctgcgtggaccaccaactttgacaaaataggaaaggagttcattagagcgactcccagtaagccttcaggactcagtttactccccgattatgaagatgaggaggaggaggaagaggaggaggaaggagatggagaaagaaaaaggggggacgccagcaagccgctctccgacgcacagggcaaggagcactcagtttcctcttcacgggaggtaacaagtagtgtgctgccaaacgatttctttagtactaatcctcccaaggcccccataattcctcattcagggtcaattgagaaagcagaaatacatgaaaaagtggtggaaaggagagaaaacaccgcggaagcgttaccggaaggtttttttgacgaccctgaggtagatgcaagagtacgaaaggttgatgctccaaaagatcagatggacaaagagtgggacgaattccaaaaagccatgaggcaggtcaacactatttccgaagccatagttgccgaagaggatgaggagggacggttggaccgccagattggggagatcgatgagcagatagagtgttaccgacgggtggaaaagctacggaatcgccaggatgaaataaaaaataaacttaaagaaatcctgaccataaaagaactgcagaaaaaggaagaagagaatgctgacagcgatgatgagggggaactacaggatttgttgtctcaggattggagggtgaaaggggcattgttatagggttttaaagacccaaggtttctaacagcctctgctgttgtataaaaagtgctgtctctcagtagtatagcggttacttcatgcctcaagatttgggtacctggattgctaaactggattgttgagataaaatgagccagtgagctacagcactttggaaaatttgtgtaacatgtttttgaggtaaagttgtttttgaaatttctgaagtgttatataccaaaatgccaacttttccacgacagacttaactgtataatttcgttgtaaaatctgtaagttgtaaatattgtacatagttaaatctgtattctgttttgaatttttttaattaatagaaagaccaaccggcaaactttcagatgaatgcttactgtggtatttggaatgtatgtatcttctgaaccctacatcaagttgaaaaggtttgttttcttgtttctttggtttttgtatggttttttagaacacttcataaacacataagtcattgtaggttaatcagttctcttagtgtgctttattttaaaaacataagaaaactatatgccaaacatgaccaaaccaatgatggtcagatgtggttgcacatgagagtcacctatgaagcattaaaataattaaagtgtctgaggccttccccttcaataaatctgggattgggcccaggcaactgtgttttttaagcacccaggttattctaatatatgccagggttagagagtaactgccctaaatccagaacccatttatgtttttcaggttttttctttttctttaaataacacattccataaatttgctgtttcttgaatgaaggaaaaaatattatcttttatttatttcatccagccttaaattttgttatttggtggtaaattagggttccttgtttgcaggtcctatctattgtagaaagaatatttaagttgtctttccagcagtaacaattggctcttgctggtcattgatagtttaaatcactccttcctttagagattgaggtactcaaataggaaaagggaattagcagtgttctggagttgaaatgcatacagcatattcaaataaaagtgagcaataata

SEQ ID NO: 12152 - DNA, 1507 bp, Homo sapiens
cagaatcgttttgggtctggtcgccaagatggcgtcctccgcctccgcccggactccggcagggaagcgagtgataaatcaggaagaattgcggcggttaatgaaggagaagcagcgtctgagcaccagtcggaaacggatagaatctccattcgcgaagtacaaccgtttggggcagctgagttgtgccctgtgtaacactccggttaagagcgagctcctgtggcagactcacgtcctgggaaagcagcaccgagagaaagtggccgagctgaaaggcgcgaaggaagccagccagggttcgtccgccagttcagcgcctcagtccgtcaagaggaaagcgccggacgcagacgaccaagatgtcaagagagcgaaggccaccttggtgcctcaggtacagccctccacatctgcgtggaccaccaactttgacaaaataggaaaggagttcattagagcgactcccagtaagccttcaggactcagtttactccccgattatgaagatgaggaggaggaggaagaggaggaggaaggagatggagaaagaaaaaggggggacgccagcaagccgctctccgacgcacagggcaaggagcactcagtttcctcttcacgggaggtaacaagtagtgtgctgccaaacgatttctttagtactaatcctcccaaggcccccataattcctcattcagggtcaattgagaaagcagaaatacatgaaaaagtggtggaaaggagagaaaacaccgcggaagcgttaccggaaggtttttttgacgaccctgaggtagatgcaagagtacgaaaggttgatgctccaaaagatcagatggacaaagagtgggacgaattccaaaaagccatgaggcaggtcaacactatttccgaagccatagttgccgaagaggatgaggagggacggttggaccgccagattggggagatcgatgagcagatagagtgttaccgacgggtggaaaagctacggaatcgccaggatgaaataaaaaataaacttaaagaaatcctgaccataaaagaactgcagaaaaaggaagaagagaatgctgacagcgatgatgagggggaactacaggatttgttgtctcaggattggagggtgaaaggggcattgttatagggttttaaagacccaaggtttctaacagcctctgctgttgtataaaaagtgctgtctctcagtagtatagcggttacttcatgcctcaagatttgggtacctggattgctaaactggattgttgagataaaatgagccagtgagctacagcactttggaaaatttgtgtaacatgtttttgaggtaaagttgtttttgaaatttctgaagtgttatataccaaaatgccaacttttccacgacagacttaactgtataatttcgttgtaaaatctgtaagttgtaaatattgtacatagttaaatctgtattctgttttgaatttttttaattaatagaaagaccaaccggcaaactttc

SEQ ID NO: 12153 - DNA, 340 bp, Homo sapiens
gttcacataggagattgctgaggctatgggtgtatccagatccagagttcaaaagtctggggcaagggtcttcctgttcactggcccccttatcagacatagctctaaacatacaaattactgttcaatatgctcacatgatggatcatccctagagagtcacccatttttataatataaaatgaagctataagaccttaaaagatgtttttttttaactgcatcttcattttcttggaaagaattgaaaaacagagtgaagcagaagacagtaaaatgttccatgtcatattaacttagccttgggcatcaagctagacaactttgcagcaacccatga

SEQ ID NO: 12154 - DNA, 626 bp, Homo sapiens
tgggctcatgcagtctcctgcctcagcctcccaaagcactgggattacaggcatgagccactgcacccggccctaacattgttttatagttttatcttgtgaaatgtattcccaagtattttattccttttggtgttattgtaaatggaattattttcttaattttgcttttgggtcattcactgctagtgttagaaacacaatcgatttttgtatattgatcttgtgtcctgtagcttgacaagggggtgaagcttagcacaaacgcagggctacctccaggagccataatgccacagtctctgtgccttgcccaggaacaggcttgcctgcctgagtcacaggccttttatgacaatccttcctgttgtggatcagattagaccaccatccccactccctgtatgggcacagttgccaagacacacagatgaaggggtccatgtggacaggtggctgggcgaggctgggctctcgagccatcccaggagctcgtgggcattcacctttccctctagttttgtgaatttgtcagcccggactctggcccagggggagctgggctcctccacggtggccaggagtgccccctcactgagacgggaagctccgcaggcacatctgga

SEQ ID NO: 12155 - DNA, 481 bp, Homo sapiens
attggtggtgctccctgtattggtggtgctccttgtattggtggtgctccttgtattggtggtgctccttgtattggtggtgctcctgtagcttgacaagggggtgaagcttagcacaaacgcagggctacctccaggagccataatgccacagtctctgtgccttgcccaggaacaggcttgcctgcctgagtcacaggccttttatgacaatccttcctgttgtggatcagattagaccaccatccccactccctgtatgggcacagttgccaagacacacagatgaaggggtccatgtggacaggtggctgggcgaggctgggctctcgagccatcccaggagctcgtgggcattcacctttccctctagttttgtgaatttgtcagcccggactctggcccagggggagctgggctcctccacggtggccaggagtgccccctcactgagacgggaagctccgcaggcacatctgga

SEQ ID NO: 12156 - DNA, 1041 bp, Homo sapiens
atcctgatacaatgtgagagactgcagaaggtatgaataccaggaaacagataactcagaagcatctgggaaatttgccatggaattaatgaagaaaagccctcagcacatcatccttctactctaatcaatatgaaatagcattcagtaactcctattaattcactctgaagagaaaccttttgaggacaatctgtatggtaaagctctcagctcgaattctcaccttcatgggcccagaagattatgtactgagagaatcctgaagaatggaacagctgtagaaagccttcagtgctatcagcagggattcatgtgacagctcacactaagggagaaaacctgtgaaggtctcagaaggcttcagtgacagtcatcccttaagacacactggaaatcacacaatggaacaacactcagaaatgcggaataccctgcagcaaaagtgttcacattactgagcaaactatagtgtggtattctgcagtgactatgggaaagccttgaatgttctatcggtttttaagggacttgagaattaattctggagagaatgccccattgaacatcatcaatattggagagctttctgtttttctacatttgttaggaaacttgtgagcattcacactacagagaaacttgaaatataaagaagaagagaaagccttcagtgatgcctctgtgttagggaaaatatggaacttctccctggatgcaaaacctatgagtatattaatattggaaaatttttcagtgattcttctctttcttgtatatgagagaacttatatggagaaacccctaggaatgtaatcagtgttaggatgcctcagcctgaactcttcactgagtggccacaattttcactgggaacaaaaagtataatcactgttttgagtgtgggatatcctttatcagtgtctcatctgtagattggactgctggctcattaatttttttagtctttttttcttttaatataaacatttgtgtatagctgttccctaaaataaacattaacatatttcataattttaa

SEQ ID NO: 12157 - DNA, 1254 bp, Homo sapiens
  misc_feature (1045)..(1045): n is a, c, g, or t
  misc_feature (1097)..(1098): n is a, c, g, or t
atcctgatacaatgtgagagactgcagaaggtatgaataccaggaaacagataactcagaagcatctgggaaatttgccatggaattaatgaagaaaagccctcagcacatcatccttctactctaatcaatatgaaatagcattcagtaactcctattaattcactctgaagagaaaccttttgaggacaatctgtatggtaaagctctcagctcgaattctcaccttcatgggcccagaagattatgtactgagagaatcctgaagaatggaacagctgtagaaagccttcagtgctatcagcagggattcatgtgacagctcacactaagggagaaaacctgtgaaggtctcagaaggcttcagtgacagtcatcccttaagacacactggaaatcacacaatggaacaacactcagaaatgcggaataccctgcagcaaaagtgttcacattactgagcaaactatagtgtggtattctgcagtgactatgggaaagccttgaatgttctatcggtttttaagggacttgagaattaattctggagagaatgccccattgaacatcatcaatattggagagctttctgtttttctacatttgttaggaaacttgtgagcattcacactacagagaaacttgaaatataaagaagaagagaaagccttcagtgatgcctctgtgttagggaaaatatggaacttctccctggatgcaaaacctatgagtatattaatattggaaaatttttcagtgattcttctctttcttgtatatgagagaacttatatggagaaacccctaggaatgtaatcagtgttaggatgcctcagcctgaactcttcactgagtggccacaattttcactgggaacaaaaagtataatcactgttttgagtgtgggatatcctttatcagtgtctcatctgtagattggactgctggctcattaatttttttagtctttttttcttttaatataaacatttgtgtatagctgttccctaaaataaacattaacatatttcataattttaaaaanaaaaaaaaaaaaaaaactcgagcttatgggctttctgtgtcatgtctttgtnnagcatgcctgatgttccttctttattaaatgacggagtcaggatgttgtgattacagttgaaggcgacgtgttagaaaggacaggtgcatgaaggcagagagtgcccacagactcggctctcgaaccggggcaggagggaacaaggtgagctgtgc

SEQ ID NO: 12158 - DNA, 487 bp, Homo sapiens
gcagatgttaggatatggaatgtgggatggtttctttcagagaaacgctgataatgtgatcatttgcagtgttattacttcccaattcatcaaatacagtcatgtctcaaatgagcataaaaacctagtccaaagtgatttttaaattagctgtcattttgaagtgttcttgcctttcttcctctccactagtacaattttttgtttgtttgttttggtttggttttgagacagtcttgctctgtcgcccaggctgaagtgcagcggcaccatctcggctcattgcaacttccgcctcctggattcaagcaattctcatgcctcagcctctcaagtagctgggattacaggtgcatgccaccacacctggctaaatttgtatttttagtagagatggggtttcaccatgttggccaggctgggctcaaactcctggcctcaagttatccacccaccacagcctcccatagtgctgggactatgagcc

SEQ ID NO: 12159 - DNA, 437 bp, Homo sapiens
ggccagaagtttgagaccagcctgagcaacagccagacctcatgtctgccaaaaatttaaaaatcagccgggcacggtggtgggcacctgcagttgcaactactcaggaggctgaaacaagaggattgcctgagcacaagaggtcaaggctacagtgagccatgatcatgccactgtactccagcctgggtgacagagaaagaccctttctcaaaaagaagcgtattctgctgttgttgagtggagtgtcctgttaggtcaagttggcttatagtgttatactaatcttctatatccttactcattttaattctatcaattatctattattgagagttaactccaactataattttggatttgtatatatgttcttgctttgtttcttcatgctttctcaaactctgtttttaggtgcataaacatttaggattgtt

SEQ ID NO: 12160 - DNA, 193 bp, Homo sapiens
cattggtcaaattttattccacagagatctaatgcttctatacatttggcaacttggtagctactcaagaagccatttcccaagccctgttttgtggcatttcatctaagaccagaagtggaggggagattcagcaggtcagactaccaaccaagagagaaggaggcagctgagggaatgtagaaagcataca

SEQ ID NO: 12161 - DNA, 182 bp, Homo sapiens
caaacaaaccacggttaaaggaaagattgtttttaaaaatttttttttttaaattatttttatttttaactattttttagtttttgagacaatctcgtactttcacccgggctggagttgcaatgagctgagattgcgccattgcactccagcctgggcaacaagagcaaaactctgtctca

SEQ ID NO: 12162 - DNA, 554 bp, Homo sapiens
caaactttctgaatcattcatttctctcatctagagctggtgggagattgagaggtgaatgggacatccaagatccctaaaaagaattgttcgatagcgtgcatgtgttataaagtggtgacacgggcatccctgttgaaatgatggatggctcactgccataggctgatagcagttgtcataaagatattttgggggaatttgaaaaggacgtaaagaaaaatctttcatattggcttgttggttatataacttcaaatttaataaaggaatacttacgtagtaattacatttccttgaaaaaactatagtgaatagaaatccctagccatttcattttttatgtttttaatgaagatctttaaaataccataggtggtaatcgtggaaaatttgaaaaatctcatgtcagtgtattaagatggtggagaagtttttttctccattatttaatggaactttgggtctttttattaaaaatgtgagactcatgaaattttggcagctgaatatttgtgaaataagaatgaattattaaaagatgtctttccata

SEQ ID NO: 12163 - DNA, 383 bp, Homo sapiens
tgaagtttggttgattaatgtgtctacttgaaggatttattatgacacatgtagaataaactccttagttgggtatctcatatcgatggtaggaaggtctgagtaacagcttttgcttatccctggctcccaccattggagaagttgagctgacttatcttttggaggcagttgcaaaaattcattgccagaatggtggtcccagtcctttctccctcccaggtctgagggctcatgccaagtggggttctgattgaactagtgagcatgtattagtagaggccagcctcttgaagccaaacagattggaccatgatttcattttcatcgtcggctttaggtgttggtagaactggactttgagagggcactattccagagaa

SEQ ID NO: 12164 - DNA, 449 bp, Homo sapiens
ttgagaagtgtcccaaggatccctcagcagtggccgctcatatccactgccttggtaagttttagagttgtgctagggaggttggcaaatgggcctggacattggccaggagtaaatcatcctcacagtttaaggtttgtggatggctcagctaggaaaacatgggtttggaaactttagaagaaggaataaaggccaaactaggcaaaaagggaagggaggtagactgggcaaagggcataacacatatggaaaagaggaactattttaggatggcaccttgccaaatgcagtactgtgaagaggcttttgctgcctaaatatctaaaatgattttctgactatgcagatagcttgaaagtcttacaaaatatcacattaggttaaagagaatctaaggggatatgattatcagcccataatccttccacttgggaactgagagatca

SEQ ID NO: 12165 - DNA, 228 bp, Homo sapiens
tcccaaagtgttgggattacaggcgtgagccgctgtgcctggcctgaagtcccattctaatgggacttacttagatatactgacttttgaagattacttaagcattaatctaattgcaatttaagattaaagtatcaggacactccaaattaaagaaattctgtggtaccagtatccaaaggataaaaattccagcttatattgatcttttattaaatgaataaatcc

SEQ ID NO: 12166 - DNA, 490 bp, Homo sapiens
gtattcacttctctattagtcacaccttttacaccatagactccaaagaggcgttaagcacctggttttcctttggctcagaaaaaccaaccaccaaaaacctccgaggtgcgcggggccacgagggtcatctcctggcgcccctgagcccggggcttgcctgcaggaagagagaaagggactcggggctcccaggtccaggaaaccctcgacgaccaggaaatgggggattcccttgccacccccagccccagctggagctgctcggacggaaagcttgcgctcgatgtagcgcgggtagaagcggatcttcccacggctgtagcacgtgcttcccgtctccccgcatcttcaatgggggtctccagcaatcccccacccgccccttcagtgggtgcccgcattcccgtcccgcattccctgagggcctttcaagcggagtcgttctctgagaggaggcctcagaactcgggtgggcggggaccgcctc

SEQ ID NO: 12167 - DNA, 804 bp, Homo sapiens
  misc_feature (338)..(338): n is a, c, g, or t
gacagggtctcactctgttgcccaggctggagttcagtggcataatcagggctcactgcagcctgacctcccggccttaagtgattgtcctgcctcagcacaccccctgcacaccccctacccccgacacacacacacacaaagtagctgggactataggcatgtgccaacaagctcagcaactaattttttttttttttttaattttagtagagacgatggctcactaagttgcccatactggtctcaaactcctgagctcaaatgatcctcctgcctcagcctcccaaaagtgccgggattacaaggctcacgtaagccacggcgcttcggccgangatttttcttttgggccatcattgttgttctctgttctttcctgcaatatcaaatcagctgtcttaatttacacacaagtctaagtcaatgggccaaggagaaaattctgtgagatctgagacaatcccccacctccaatatctctctctttcccagaagttgattgggccttttttttttactctggaattttatctctttctaggatgttcatggtctcaaaaagtcaggctccgtatgagttaccattatagaattcagtttataaatgccaactacataacaggtataactaaaacatgtgctttaaaccaatattcaccaaaaaaagaaacaacaagccaagtccctattcacaaaataatctattgaaaaaaatgtttcatcatagccccttgagtttatcaacagcataagaagtttcaaggataagagagattcacaaatacgtttgctggtgtttta

SEQ ID NO: 12168 - DNA, 568 bp, Homo sapiens
tagaacatttgcattttgttttccaggctctttgctttgagtaccttgttgaatgcacgtgcccacgttacaagatttataatttgatggcttaaatgacactcaaatatgtttgtcgtttcatatagaagtacacacttggtctgtacttgccagccatattttaattcttttagcttacagctttctagaagcatgattgtaatttccagtcattttgacttgtggagaaatggggagaatgggaataacaacggtgctttgttaataatgcatattgaagtgcaaatgaacctttaaattgaaaagggaaggcatcaatgccggtcaactcagttctcaatatttctctctagaaagcactgtgatggtttttatggaagagaaagcatcctggacttaaaatgcatgtatataatgaaaatggtgcgaaaaataatttcaaatatgtggaatccttgtgaattggaattatatagtagattgttttggttagcacctacggtaaatatgaaagggacatttcctgccccacttatgctgcctttatttcactcttaaaaaaaaa

SEQ ID NO: 12169 - DNA, 543 bp, Homo sapiens
gtgccaatatgtctccatcaactgctttctctcagcccaactggccaagtccaccctctgtgttctcacttatatgggaaagtcatgcctttctcagagtctttgtcacattgaatggattctgacttattggtatactttcctccctagagggcaagctccccaatgcctcctagcttgtcttgttctgcctaaaggaaactatcacacccttagtagtcaataagtaactcctcagaaaataatgctaaaaaataaaggttctgtagcagatactgcagaagaactagacagattttcatttccaatctcactatcccatgcctatctccattctgttgaagctataaaaaccaaaagctggttttctcagcctctcctgcagccaggagtagccatataccatagttatgttgcatgaagcagaagtggaagcctgttggtgccaacacttccctttcttacttctttctgcctgcaacatggaggaggcctggggtaatgcagcattaggtgagcatgaatgggatgacaccaacattc

SEQ ID NO: 12170 - DNA, 436 bp, Homo sapiens
cccttactaatgagtgaaactaatattcttgactcagagaacttcctcaaagcctcaaaataacaacaatttgaattggtcatctaagtataaataaagttgggaagagacacctttcatgaaaggaatggttgaactaactctcaaataggaagacatcaaagtcaaggaagaaagtaagagctcacggcttggggtggaaatggttactaagtttagccatctgctttggtctttcctgttccacatgtagctatatagtttacataaaagtatctctccagaggatcagaaagaacagatttatggaaccagatgtgagttagcatttctacaggtgtggctctgcagctgaaagaacatgttgtaccagggatgaagtttcttattatgtaatcaatataaattaccactagacttttacagaggttgataa

SEQ ID NO: 12171 - DNA, 391 bp, Homo sapiens
caaccccacgaacagcccagctttcccctctggtctctccccccacccgccaccatcgaagctgggggtgtgtgtggagggtgtgcgccttgtggggtgaatttcaagaggcaccgccccttttaaaattaggtgcttggagggcggtgcctgtgcgggctggggcagaagccaggtctgttttcgaagggacacccccgccccccccgccccagttcctgccgcgggtgtcctgcccgggctgtgtccgagggaggggtttcccctgcgcttcctcttgcacttcccgctccgtttccggggggcgggaggaagattggggaagtcggctcttactcggcgacgtctctggtgccggagaccctggttgtgcccggggacggcggccgcg

SEQ ID NO: 12172 - DNA, 551 bp, Homo sapiens
tgagtggcttgcagttcctggagccctgcaggttgttggagaggcagggagcccttctccctcctgcctgccctcttgcacttcctctcccagaacccagcactactcccagaggctctgagctggagccctagaaggaggcgctgcaaggctccgtgctcctggagcttcgagtctatggtatgagttaaacagaagggtatctcctccatcagatctacaggagggtgtctgctccatcagacctggagcttccaaggcattttacccgaagctccagcacctggcccaaggctgggctgtgctgtgtcctcagtgaaagaatggatgagtcacagctgaatgactgaagagctgaaccaggtccagaaagactcagccactggagtctgtatttcctgagtcgcctctcactgctggagctgtttatcatcgctccaactttcactaaaaaggaaaaactatcacttaaacaaagccattgaaaccccagcatcatgtgtggattttttaacataaataaatcatacaaactaagatttaaattcttg

SEQ ID NO: 12173 - DNA, 559 bp, Homo sapiens
tgctgcggtcagggagaggtcgcatgctccagccagggtctttggggactcagtttagaactaatacgccaagcaagtcgtgctgagtgtctgggcttcttctaggaaggtatttccaatcatcaaatgtgccattaaaaaaaatgcatgtcagttaagtgtgcactaagcctggaccacatgggacatagtggttccaataaacacgaataagccagttttcacattagagaaataccagtttcttgcagaaatgcggtgcttttaaaagaggttaattaataaacagcaggtaattgttcgtggcacgttgtggcagagggtaattttcattttagaggatggaagggccaaatacccctccccactcagcatttttctgtaataatcacctcagcttcacctccgcctttcatttttacagctggagctgtttatcatcgctccaactttcactaaaaaggaaaaactatcacttaaacaaagccattgaaaccccagcatcatgtgtggattttttaacataaataaatcatacaaactaagatttaaattcttg

SEQ ID NO: 12174 - DNA, 756 bp, Homo sapiens
ccttccgtgtccccaaacgcccagagcccgggacacgggccggcggccgggtcaccaagccagttcccggaatcggctcgcgccggaatccagactcggcttgcaaagcccgctcctgccgtctctccgcagcgcgccctgccccccactgccggccctcttagcttcaaaaccaaattttgcctttcatcctgagagattaataccccgcaggtgaaaccgtggagacggagctgcggaggcgctgcaaggctccgtgctcctggagcttcgagtctatggtatgagttaaacagaagggtatctcctccatcagatctacaggagggtgtctgctccatcagacctggagcttccaaggcattttacccgaagctccagcacctggcccaaggctgggctgtgctgtgtcctcagtgaaagaatggatgagtcacagctgaatgactgaagagctgaaccaatgggaaaactgatgctcagaggcttgagcaacctaggccaggacctgtccttagaggcagaagcaggactcagaggaagagcaccctgaccacaaagccccagggtccagaaagactcagccactggagtctgtatttcctgagtcgcctctcactgctggagctgtttatcatcgctccaactttcactaaaaaggaaaaactatcacttaaacaaagccattgaaaccccagcatcatgtgtggattttttaacataaataaatcatacaaactaagatttaaattcttg

SEQ ID NO: 12175 - DNA, 764 bp, Homo sapiens
ccttccgtgtccccaaacgcccagagcccgggacacgggccggcggccgggtcaccaagccagttcccggaatcggctcgcgccggaatccagactcggcttgcaaagcccgctcctgccgtctctccgcagcgcgccctgccccccactgccggccctcttagcttcaaaaccaaattttgcctttcatcctgagagattaataccccgcaggtgaaaccgtggagacggagctgcggaggcgctgcaaggctccgtgctcctggagcttcgagtctatggtatgagttaaacagaagggtatctcctccatcagatctacaggagggtgtctgctccatcagacctggagcttccaaggcattttacccgaagctccagcacctggcccaaggctgggctgtgctgtgtcctcagtgaaagaatggatgagtcacagctgaatgactgaagagctgaaccagtaggtttccctggggtttccacaggcagtttcagcccaggggaagacccagggagatgagggccaccttgcaggacgctgtggtgtggaggcagcagcctggggcagggactgtgctgagtgtctgaggccgagccacccctctgtaacctctataatccatcaggtctcagagggccgtcctatgttcagtaagccaatgctagcaccatgtgacgaggacacagcagtgagcagctgcccaggccccttgcactgtgtttggaaaaggaagctggcttgttcaggggtccccagcagg

SEQ ID NO: 12176 - DNA, 363 bp, Homo sapiens
ggggccagctggtctcctggcaactgaagtccgcgcttcccttccgttcactcattccttcctttcctcatgcaggaggcgctgcaaggctccgtgctcctggagcttcgagtctatggtatgagttaaacagaagggtatctcctccatcagatctacaggagggtgtctgctccatcagacctggagcttccaaggcattttacccgaagctccagcacctggcccaaggctgggctgtgctgtgtcctcagtgaaagaatggatgagtcacagctgaatgactgaagagctgaaccagtaggtttccctggggtttccacaggcagtttcagcccaggggaagacccagggagatgaggg

SEQ ID NO: 12177 - DNA, 436 bp, Homo sapiens
ggagccttgataaactcaccaaaacacttcaaacacaagcaggagatatcaaagagggctcaagctacctatacaccctggatgactgtgaaatctgcacatatgcagagaagatgcaaaaaggcctggcagaaagtaaatgccagggcagacttgaaaactgcctgagtttttaatgggctcccccaacccaaccacagacccatgggcagagggtaaaagctttactagcttagggtatttgagcataaccaccgactaattactggctgaccactaagctatgcagacatgggagtgacccctaagaatcaggcttaaaaataaaaacaaaaataagttttaaaaaattaagtagagagataagcagcgatgcaccatgaaggagatggattccacagatttagtttaggcaacttaataaacaaaaaaagaa

SEQ ID NO: 12178 - DNA, 449 bp, Homo sapiens
gcaaatcccttatctgagagactaatcacttgtgatatttgaccattcttagacatggcaagggcatagatagctttgccttgcctgcagcctctcctgcagagtcatctggtttctctgtcttatccagagagtgcttctattaggcaaagactgaagtctaccaaaaagctccttgcaatgtagagctacaccattgatcttcgtggaagcatttgggatcatgatgtgattgataatgtgggaagggttcattaagaaagatcagggtacacgtgagtaaaagagagcttcagaaggggtgaaaaataagagtgtcttaggccgtctcaagtgactctttgccctcattcagataagatactgatacctccatattaccaatgaggttactgccttctcaagaggtgagatgacttttcctaggtcacatacaaaatgaataaatg

SEQ ID NO: 12179 - DNA, 429 bp, Homo sapiens
gtatagtactatgaaattccactgcaagtattgatttccataaatatcaccaagataaagacacagaagtgtttcattcccacaaagaaactccctcgtacgatccttccttttattgtcagactctgcccccattctgaatccctagtgatcactggtcacttctccattgctataattttgtcatttcaagagtgttatataaatgaatccataccagatacaactttttgagataggcttctggtatccagcatactgccctagaaattcatagaagttgttttatgtaacaatctggctgaatagtgtatcatttatggatataccacagtgtatatattggcccattgaagggtatttaggttgtttctatttcttggctgtccaaataaagttgccatgaatatttatgtacaggtttttgtg

SEQ ID NO: 12180 - DNA, 379 bp, Homo sapiens
ggctgtggtccaatgccatttttgccggctataagcaggatctctggaaccaaagggagcacacacctcttctaaaaattgaagttgtttatgcctgagatgaaacagaattctatttgggcaagagatgtgcttatgtatacaaagcaaagaacaacccagtgactcctggcagcaaaccaaacaaaaccagagtaatcgggggaaaggtaactcatgctcatggaaacagtggcctggttcgtgccaaattccgaagtaatcttcctgctaaggctattggacacagaatccgagtgatgctgtacccctcaaggatctaaactaacgaaaagtcaataaataaacttggatttatgctcttgaaaaaaaaaatcat

SEQ ID NO: 12181 - DNA, 1559 bp, Homo sapiens
ttggcattttcaagaaggatggttatttttagttctggttatttggtgttggaggtctgtgacacttccttatacatttaaagccccctttgaatagttgtatcaatagttcaaaagcctgtagatatcttgcttttctattctgacagcccagcttctgcagactcaggccaaccttaggtatgtcacatcagttccccatctgtgtaaattacctgaacctctctgtggtattcactgagagttgagcttctactaagggatttccttgacctggggcttttaacaccagatttgtagtgggagtgtttattagtaaaggcaaagggagtaagtcaggagatgctagcccctgctctcagttaaacagaactatcctccttcctgaatatttaaacataaaattaattttaaactactataaaaatcatgttccattgcttgccaaatcttataccattataatgctgtatttttacatgttagtatacattgtgtccatagggatataaatatgagaatttcagcaactgtcttgcagggttaagatgtgctatttgttgattttgcaaatttttctcatgtggtacagtccctccaaagaaaatttccttagacctaaatggtagcataataatttctcctccatatccgtgactaacaagttcctgaaaacagaagtagacatattttatgcccaatttagtacctaataattgaggcttaaaacaaaattttcttgggcaagttgggtgattaaatatgaattaaaacttctagagaaagatttccagatgcccctgtttccatttgattatggttttagtttcatagcaacttgggggaaaaaaatcatttactttatgtcgtattacaacaacaactttgacagcttaaatgtagtgacctctctgaaggtaatatgcacattataatttaggatgaaagcagatttaaactaagactttctgagatgaaataaaagtaaccaattcataatagtcatgtttattgcagcaatatcttgggaacttaagtttagtggcgtttgaggtgtttctgaccatcttgcttgttcatttcaccctgctctgcagagacagaatatgattgaatgaactgcccattatattaatgaccagttcaaagcagttttgtgctttggctatagataaaatttggcaaaaatactgtaggcctttctggtccatatttatccttaaagtatttttgcccaatcaataaaaatgaaatatttatccagaaatagaaaaagctctttcctatgacattgacatagaagcccaaatactccttgtttgagaccctgcatgtcttttgtgtttaactgaatcaatgattttttttagttgtgctcttaattgcattatttcacatatgtaacactgggtttgttttggttatatagtattattttactttattctaatttcaactcatgtcactctgtagctcattaagaatttgttcaactgaaaattaaaatgtgtgttaaagcaataaaaatgaaaagattggctatgcattttaaaaaaaaa

SEQ ID NO: 12182 - DNA, 390 bp, Homo sapiens
  misc_feature (333)..(333): n is a, c, g, or t
  misc_feature (340)..(340): n is a, c, g, or t
  misc_feature (353)..(353): n is a, c, g, or t
  misc_feature (361)..(361): n is a, c, g, or t
actgcctcatagtaagtgaatataaatggcatttaaaaagaatattcctggcaatatttattttcgagctatttgaaagtatatttagaaggattattttttttattgttaaaaagatgatagaacaacagtattaaagaagagtttaaaaatagttatccatattatcaatattttaaaataatgtttgtttgcttaatatcttgtaatttcaatttacctgcatgcatattttatgtaactgagatcataattacataggcaagcttgctaggggaatggggttggggcatagtgggtcaccaatatagccccatgggagaggagggggcnggagccnggtccttttcccnccaggggngggagggggggtgccttaggccggcctgg

SEQ ID NO: 12183 - DNA, 433 bp, Homo sapiens
acagaaaaaaaaagtgcaacctctctgaatatctgaatcaatacccctttactctttgtacagcagcctctgactgaataaataagtactttttgtatagtggcctctctggcccacaggctggtgagatctaggagtccagagtcagagttgggtccctccggatctgtggagacattttcccttcatgatccttctcaccatcttctcgctctctgttttgacccacacgtggtatggaagaactgagggagctctgagcttggtttgcaagtgtgcttgggagattgttagggtacacaaccccaaattctcatatctttgtatttcatttgttcttttcaagttgagttgagtatcctaggaggaaaggagatgggaggcaggctgaagaattccaaataagtaccatgctttttatgaaaagaacctt

SEQ ID NO: 12184 - DNA, 604 bp, Homo sapiens
cacacctggctacatttttaaaattttttgtagagatgaaatctcactgtgttgcccagggtggtctcaaactcctgggctcgagtgattctcctgcctcagccttctgagtagctggggttacaggtgtgagccatcacacccagccgaaaagtatttctagtagtcaatatgtattagatttctgataagcaaactcccaataactaacacgatgggactttcaagggaaatgatagagatttccactgtttccatgttttgggaggccgtggggaggccatgctcagattgtggtgtggtcagaaacgtgcctgggggccaggcacagtggctcatgcctgtaatcctagcacttggggaggccgaggcaggtagattgcctgagctcaggagttcaagaccacgctgggcaacgtggtgaaaccccatctctactaaaaaaattcaaaaattagccaagtgtgatggtaggcacctgtagtcccagctactcgggaggctaaggcaggagaattgcttgaacccagaaggtggaggttgcagtgagccgagattgcgccactgcactccatcctaggtgacagagtgagactctgtctcc

SEQ ID NO: 12185 - DNA, 410 bp, Homo sapiens
cacttttcgggggcctgacgtctcgaaacgcatttagattgatgcaggctggggctgacgttctcgtgctgagtaaacagtcaagtgttcttaataggaattgcagtttctcgacatctgttagggaaaagggaatggcgaaacaacaatttagagtgagattggttttgttaaatgcatttaaattccaagattagtggtgttctttctttttcaattagcatttacttgtagaaaggttacagatgaaagggctggggaagagatcgggtggatttttttccttactgagaggacactccaaagcatagtaaagctaaaataggaagagaacgtaagacttaaaggaacttaaaactgatgccaaattgagattgcaaatcttgaagggaaagcatttaaaataaaat

SEQ ID NO: 12186 - DNA, 2724 bp, Homo sapiens
atctgcaagggggaaacaggattttggcagcaatcctttcattactaaagcttcctttcttttcgggtacagtgaaaagagccaaggctgtgtgaccccctcatcacttagccaggcgtatggtcctggtttctgaggctgccagaaagcatcttagcaatttgtgtttggaaggtccatgcctgactattctaggctggaggttcctaaagagtaacaagaggaagagaaacaagaatctctgacacttgttgagaatagagcacagtcccatttgtttgaaaagagacaccaggcagccatgtttatgtgccagaaatgcattccacctcaaggaggacttaatttatggacccgtgtgtgccaggctgagctgggcaagatctttctcaggacaaactctgccatgcagctaaaagcctggaaactaaaggatttcatgtagtaaactatcttccaacccctgtaggcatcagaccacaggatgaggtttcagaaggtcataaggcagaatagttaagcctacagggcttacagtctgacagacctgggttcagttcttgggtcttcatcactagttttgtgacttcgggaagatgactcccggagcctcagtgagcctcagttacttcatatgtaaatgaagtaatactatctacttcacaaggctgttgaaaggattaaatggagaatgggtgtaaaacccttagtgcagtgccgtgcacacaccgtagatgccgaacgtgtgatgttggcactacacaatgtgtaatcccaatcaggcagagctaggcaggcaaatctaatccaggatctttgtaaggggactgagaaccagagactggagaaagccagtgtaaacaccatgagcaaaggagcaagagaaggggcattgtgtaagtaggagatggagcttggacttactaagtggatcagggtagaagaatccagtcaggaccaagggaggagagtccaggaaaatgccatgagcagctctgtagcatgaccttgttgggctgggttaaagtagggtctgccaccagtcatgtgacagaaaggtacctcatgcacttcctccttcccccagaaatcagcctccaggagtgaggaatgagcccagaatgagagtttagagtgctccagagcctttgttagaggtgccctccgacattcagaaaaccaggattccagagacctgggtttgagtcctgactttgcagcatactaactgtgtgatcttgaaccaacatattttcacctaatgaggctgacaatcttccctacttcacaaaatagttatgagagtcaaataaaagtacattttagaaagtgaaatgctgtggacatttaaggtggagccactgtgagagtctagggggatagatggtagtcgtctcagaatgaaacgaatacacccctctcagagccctttccaaggatcccctccttctttcagctccttccctccacctcaatacacactcctgtcccaggaacctaacctcatctagaaataccagggccagcatgccttacacctagaggtttggttggcttcagagaaacttctggaggctaaaagcagccaagaagaatcagccactacatgctgggcctggatgaacagagcagtgagctgtgatggggctggggctggggcccaggaggagcaggcaggagagtttgtatgcaccgtgattcaaatattataacaaaaatcatcgatcatgtgttaggcactttacagttcccaaagcactttcccatccatgccctgatgatctttgacacaacactgtgatgtgggttttattatttccagtacagatgaggaagactgaggcctgcatcagtgaagcaacctatccaagactacatagagaaggcagtaaatggcagggttagtctcagaacaggggagggtctgttccccccgcagtgggcagtcctaattctgaacttcacctatctgggggtgatagaggggaacaagaggaagcctgctgaagagaaaacctaaacatctgttttgtctacgtatgacttcctctgcttgtgggagagaaggaaggaaaggaacacattgttgtcagccccacaaccccaacagaattaaaccctggagcaggttgaacagcagaggcttccctcagatcaaggagccaggagcagatgatctatctctgtggccacacagagagatgtcaccttatgcaatttgcatatcatattcaattcccccaactgctctttctaatttattcaactggggaccaggctggtctcatgccaacctaggagatgtaccatagcagtatgagcagaattcctcaggaggaacaattagcaaaaactgcagttgcctctcgataggcctgagcagagagaggaacaatagctctcacgtctctcctcatcagattctaactaagcagatgttctcatgcttttttcttcttcctatgttctgtatactgacacctcttctcagtggcatatgaaatatgaaatgtcatgtgttgtgagtttgtataaatataaaggaatatatatacacagtagcaaaagagaagatctcatttacaaatatctatggtgtttccttgttctgtgttgatctgttttattgatacaaactgaattttcttaatgtatcttctatctctattatagtggcaatgatggtatatgcattaaagttcttctgaattgtgaaaaaaaaaa

SEQ ID NO: 12187 - DNA, 1558 bp, Homo sapiens
cactatcgtgagtgtatctcatcttccaaatgttttgcctgtctgacttataatgcaagctttcagcggtgggagcagaatcagctatgttcagtactctactggtactcaacaataagatgaaggaaaagaagaggaagaagaaggaggaggaggagaacaagaagaagaaaaggaagaagaagaggaggaggaagaagaaataatgaagcaaggatatcagatttatagggcactattacaccaagaaatattcatattatgggtgttccagaggcagaagacatgggaaaaggtgagaaaaacacatttaataaaagaatagcagaaaacttcgcaagttttgagagaaaggtggacatccaggtctaggaagctcaaagaattccaaatagattcaacccaaacaggtcctctccaaggtacataacagtccaattgtcaacagtcaaagacaaagaattctaaaatcagcaagtgaaaagtgtcaagtcaaacttaagggaatccccattagactaagagcagatttctctacacaaacattacaggccaagagagaatggggcaagatattgaaagtactgggaaaaaacccctgtcaactaggaatattatactcagcaaagctatctccttcagaaataaaggagaaataaagtcccagacaagcaaaacataagggaattcactatcactaacctgattttataagaaatgctcaagggagccttgcatctgaaagtgaaaagataataatgtgaacccaaaatatctgagacaggtcgcagtcaatttagaaagtttattttgccaaggttaaggatgcacccatgacacagcctcaggtggtcctgaggcttggacatgtgcccaaggtggttggggaatagcttgcttttatgcatttcagggagacatgagacacttcaggacaacttgaagtgggggcttccaggtcagaagtagataagagacaaaaggttgcattcttttaagtcctcgatcagctttccactgaatacacaatttagtctggcttggtgcatctgcattgttacataaagaataagacagaggaaacaatcagatatccatttgtctcaggtcaacctcagagggatgactttgaattctgtcctttgcccacaaggaatttccttgagacaaggaaattccaagtctcaaaacactaaaacatcaaaattatgtcaaatatcttatgtgaccacagtggaataaactagacatcaattacaagaggaacatttaaaactatgcaaatacatgggagttagaaaacatgcttctgaatgaccaatgagtgaaggaataaattaggaagggaatttaaaaattccttgaaacaaatgaaaatagaaacacaacataccaaaacctatggggcacagcaaaagaagtgttaaatggcaaatttatagcaatcaatgcctacatgaagacactagaaatatttcaaataaacagcctgatgatgcacaaagatacaaatctaccaaaagaagaaaaaaccaaatccaaaattagtaaaaaaaaa

SEQ ID NO: 12188 - DNA, 5352 bp, Homo sapiens
gcgagacgccctctctcttccagccgcagccgcgttgcgggttcttccctgtggaacagtagagacctagtctgccttctttcacaagataatccttcaattatttgaaggtgattattcagcatatatctcttgagtacctgtgcatgcaagacactgtcctggatattgtgagagatccaaagtttagtatgagatcattttcccttgcctgagttttgagctgattgagaaataagaacctacagatgaagaagcaagacagtacctttaaaaaaattagctttttattcagattctctttgtggccagatgggtttgtatggacaggcttgtccatctgtaacttcattaaggatgacatctgaactggagagcagcctaacgtctatggactggttaccacagctcaccatgagagcagccatccaaaaatctgatgctacacaaaatgcacatggaacaggaatttctaagaagaatgcactccttgacccaaatacaactctggaccaggaagaagtccaacagcacaaagatgggaaacctccatacagttatgccagcctcattacatttgcaattaatagctcacccaaaaagaaaatgactttaagtgaaatttatcagtggatttgtgataacttcccatattatagagaggctggcagtggttggaagaattccatacgacataatctgtcattgaacaaatgtttccttaaagtgcctcgatctaaggatgaccctggaaaggggtcctactgggcaatagacaccaatccgaaggaagatgcgctgcctactcggccaaagaagagggcacgatctgtagaacgggcctcaactccatatagcatagattcagattctttgggaatggagtgtattatttcgggaagtgcctctccaactctggcaatcaacactgtgactaacaaagtaacattgtataacactgatcaggatggtagtgatagcccacgcagtagccttaacaacagtctctcagaccagagtttggcatctgttaatttgaacagtgttggaagtgtgcatagttatacaccggtgacaagccatccagaatcagtctctcaatcattaactcctcagcagcaaccacagtacaaccttccagaaagagacaagcaactacttttctcagaatataattttgaagatcttagtgcctcatttcggagcctttataagtcagtttttgagcagtcacttagtcaacaaggtttgatgaacatcccttctgaatcttcccagcagtcccacacttcatgtacctatcagcactctcccagcagtacagtgagcactcacccacacagcaaccaaagcagcctgtccaacagtcatggcagtggcctcaacaccacaggcagtaattcggttgcacaggtctcactgtctcacccccagatgcacacacagccatctccacatcctccccatcgaccgcatggtttaccgcagcatccgcagcgttccccacacccagcaccacacccacagcaacacagccagctccagtcccctcacccccagcatccctctccacatcaacacatacagcaccatccgaaccatcagcatcagacgttaacacatcaggcacccccacccccacaacaggtatcctgtaattctggtgtttcaaatgattggtatgcgacacttgatatgctaaaagaaagctgtcgaattgccagcagtgttaattggtcagatgtagacctttcacagtttcaaggtctgatggagagtatgagacaggcagatctcaagaactggtctttagaccaggttcagtttgccgatctttgttcttctcttaatcagttctttacacaaactggccttatacattcacagagtaatgttcaacaaaatgtttgtcatggtgccatgcatccaacaaaaccttcccaacacattggaacaggaaatttgtacatagattctaggcaaaatctccctccttcagtgatgccaccccctggttatcctcatatcccacaggcactcagcactccaggaacaacgatggcaggccatcacagagccatgaaccagcagcacatgatgccttcccaagccttccagatgcggcgttccctgcctccagatgacatccaggatgactttgattgggattcaattgtgtagggcttgtttctgcaagacaccagaccctaacgttacctttctgtgcagtgaagggaaaggtttaagagaatccagttgagaaaacaaacttgctaatcactttaccaatgttatcaaaattacttttgaagacaatcagaaggattttagctggataacttactgcttttatctgacccaagcaagtactacatgtttgtctccctgccagctgccctatgtagctcctaactgttgtgtgatttggacggctttttgcatatttgtgtcagtttgatgttaaccacaagtgccagactgatttttcagacggagcctattttgctgcaagcagtttatataaagatacatatgtgtaaatatatgtacaaaaattactgaaaggcttcagttttttctaattggattattatgtcttgaaagttattgtcagtttttattccttgttaggctattttctgcaggatgcttttaactgatgtaggaaactgaaaggaaatagattttttccaaaacccagttccccttatttaatcttttttagaaatgtgggtaatgaattctatctaataagtcaaggaaaccagaatttgacacactccaacaatccaaaggggcatgttgctcctgagcagcatgaagaactgaccaaattggttttgatgcttgggggatcatagagtatttatgtctgcttttctaaatctgcattataatagctctaaaatttgttgattggtaagaaattgggcattgcttggctctttaaacacatcagtgcttccacattcacctatgtatttattattcaaaagtgtcattttaatatttattgctaccttctgtgaatgcttagctcctgtcgggttcattaaggagaaatgtgtctgaaagcacagaactattattatttttttctttttttgagatggagtcttgccctgttgcccaggctggagtgcagtggcacgatctcggctcactgcaacctccgcctcccgggttcaagcaattctcctgcctcagcctcccgagtagctgggagtgcaggtgcacaccgccatgcctggctgattttttgtattttagtagagatggggtttcaccatgttgcctgggctggttgcaaactcttgagctcaggcagtctgcctgcctcagcctcctagagtgctgggattacagacatgagccactgcgcctggcccagcgttacttttcttgataagaatttacagataagacactcagagagacattgtgtcattctctatcatcactccttttaccatgtgaatagatttctctgtcttggcattcttgctgattcagacttattagttaaatcggatttttctggaatttgaatcagatttcatttgggcaacaacagcagggcagggtttctaaagcaggtttccccactcatctaggttgtcttgaaaggaggatagagccacttacagttttatttgcttcagtgtttaatgtagatattatgtggcctgctgtttctgttgtcttgtatgtctgtgtatgcatgacatttggtccctttctttgaaatgcagcccctcttacgggttttttagtggtggtggtttgttttgtttcatatcatatcacagtttgcatggactgattatcttagttttatgataaaactagaagaaatgagggtttttttttaatgaatagattttgaattgattctttagaccccccaaaaagtgtcagttctaatggggaaatatattccatcaagtcaaagagtaataactgctcactagttgctttttagcatctctggtcttatcagccatgctaaatcactttaattagccttagtgattctgtggttgagtaatctctacttgaactaaacaaacatcttttgtttctgtgtgtgtgtgctgtgtgtgagagtgtgcgcgcgcgtgtgtgtgtgtgtgttttaatggagtgttgccttgaatgaatcactgggaagccagccatggtaagggctggtgaggttggggagaaaggaagagctttatgtttctctgttgtttggaccctacttggcatgaaaaaggaagctcagttccagccccttggatcaacgaaaatcagaggattctggaaaggcagccaacttgcgcctcttagaaggatcagaggcaagatgagatggcagcctgcagagtaaatgcttgaaaaaagaggggtgattttcaatggtttgcttaagtcactgttttctagacaccaaaatagctgttttgaaactgttttaattgcttgggtagcaatgtgcactttaaacaatttggatattggaatgcagtctcatactgagtgatttgagtagaaccactgatgatgattttataaattgtgtgaagcgaatttcccatttggcaatcatttactgatttgcagtgatgaatatttttatgagaatttaaacttagcaagaatggccatggaggcaaagccttcacccagacccatcccactctcctgtgatccaggtggtccaggagcccaggacaggccttttctgtgggccctggccagacagggttacctggtgaggtgcagagagtccctctagtggccattttgtatggtagttgctaatgcagaacaagttctgtcttgggcttaaattgactgaagactttagggggaaagaatagtaaatgcatgtaaacaaatggggacactctgttcaggagaataatccgactggcatttgtggcagtttttgaaatgtaaatgtattcatgtgtgttcttgtaaatacgtgtcgctcagatgtcctttgaagtgggagggaatcaatccggggataatttcaaatggaatagagtattttgatattgttcattcagagggtgatgtgtacatatctatattgtatatatgtgatgaaaatgcattggctttttgtgcagatacaacctgctctctgtactgctgttggacagtcagtgttttaatgtttctacagttttgctattgcacgatttcatattttgcctctatgatgaacggcaaccattatttgtaactgtttagtgctgtaaagaaatattccaagtgtcattaggattgttgctgccagaactgatatgcatgaatggcacttaaaataaatatattatgttaactctatttacaaca

SEQ ID NO: 12189 - DNA, 4468 bp, Homo sapiens
  misc_feature (573)..(573): n is a, c, g, or t
gggaaaatacagatttgtgtggcatttcctatctgttcatttattggtactgtaatgtaaagagcagtatcaagtttgatattactaggtgatgtggcaatttggaaactgctagactggaggttagaagacctgggttcaagtcttagattcatcatgataaccttgctaagttatgtcacttctctggttcagtttcttttatttgtaaaatggagagaaataatacctttctgcctgtctcacagagcagattgcccaacacgtgatataatgggtacaaatccccttgtaagacgggacaagaatcagccaatttcaggaataagggcagctcatcgttttcccttaccacacttcaccctttcaccatccaggaattacactgttgtcaatattttataggtgtttcaaatgattggtatgcgacacttgatatgctaaaagaaagctgtcgaattgccagcagtgttaattggtcagatgtagacctttcacagtttcaaggtgagtgttggttctttttgacatataaccaaatacacatgatcctgtttctctgctagattatanctttctttgtagtagaaataaacatcatcttatatagcatttcttttgcagttggtaaaattcataataattttggccacttggtatagcagagggtcacagacaagttctgaaagaaatttgaccacatttaaaataattgggctttgaataatttaaaaaggtcattcttcattgcgtggataaatcactaccataaagtggagtgagtggaaattttgagagctgaaaaaaattatgtcttgctattttccttgcaatgtttattgcataacagtgctaacatatttttaatgctttcctcataggtctgatggagagtatgagacaggcagatctcaagaactggtctttagaccaggttcagtttgccgatctttgttcttctcttaatcagttctttacacaaactggccttatacattcacagagtaatgttcaacaaaatgtttgtcatggtgccatgcatccaacaaaaccttcccaacacattggaacaggaaatttgtacatagattctaggcaaaatctccctccttcagtgatgccaccccctggttatcctcatatcccacaggcactcagcactccaggaacaacgatggcaggccatcacagagccatgaaccagcagcacatgatgccttcccaagccttccagatgcggcgttccctgcctccagatgacatccaggatgactttgattgggattcaattgtgtagggcttgtttctgcaagacaccagaccctaacgttacctttctgtgcagtgaagggaaaggtttaagagaatccagttgagaaaacaaacttgctaatcactttaccaatgttatcaaaattacttttgaagacaatcagaaggattttagctggataacttactgcttttatctgacccaagcaagtactacatgtttgtctccctgccagctgccctatgtagctcctaactgttgtgtgatttggacggctttttgcatatttgtgtcagtttgatgttaaccacaagtgccagactgatttttcagacggagcctattttgctgcaagcagtttatataaagatacatatgtgtaaatatatgtacaaaaattactgaaaggcttcagttttttctaattggattattatgtcttgaaagttattgtcagtttttattccttgttaggctattttctgcaggatgcttttaactgatgtaggaaactgaaaggaaatagattttttccaaaacccagttccccttatttaatcttttttagaaatgtgggtaatgaattctatctaataagtcaaggaaaccagaatttgacacactccaacaatccaaaggggcatgttgctcctgagcagcatgaagaactgaccaaattggttttgatgcttgggggatcatagagtatttatgtctgcttttctaaatctgcattataatagctctaaaatttgttgattggtaagaaattgggcattgcttggctctttaaacacatcagtgcttccacattcacctatgtatttattattcaaaagtgtcattttaatatttattgctaccttctgtgaatgcttagctcctgtcgggttcattaaggagaaatgtgtctgaaagcacagaactattattatttttttctttttttgagatggagtcttgccctgttgcccaggctggagtgcagtggcacgatctcggctcactgcaacctccgcctcccgggttcaagcaattctcctgcctcagcctcccgagtagctgggagtgcaggtgcacaccgccatgcctggctgattttttgtattttagtagagatggggtttcaccatgttgcctgggctggttgcaaactcttgagctcaggcagtctgcctgcctcagcctcctagagtgctgggattacagacatgagccactgcgcctggcccagcgttacttttcttgataagaatttacagataagacactcagagagacattgtgtcattctctatcatcactccttttaccatgtgaatagatttctctgtcttggcattcttgctgattcagacttattagttaaatcggatttttctggaatttgaatcagatttcatttgggcaacaacagcagggcagggtttctaaagcaggtttccccactcatctaggttgtcttgaaaggaggatagagccacttacagttttatttgcttcagtgtttaatgtagatattatgtggcctgctgtttctgttgtcttgtatgtctgtgtatgcatgacatttggtccctttctttgaaatgcagcccctcttacgggttttttagtggtggtggtttgttttgtttcatatcatatcacagtttgcatggactgattatcttagttttatgataaaactagaagaaatgagggtttttttttaatgaatagattttgaattgattctttagaccccccaaaaagtgtcagttctaatggggaaatatattccatcaagtcaaagagtaataactgctcactagttgctttttagcatctctggtcttatcagccatgctaaatcactttaattagccttagtgattctgtggttgagtaatctctacttgaactaaacaaacatcttttgtttctgtgtgtgtgtgctgtgtgtgagagtgtgcgcgcgcgtgtgtgtgtgtgtgttttaatggagtgttgccttgaatgaatcactgggaagccagccatggtaagggctggtgaggttggggagaaaggaagagctttatgtttctctgttgtttggaccctacttggcatgaaaaaggaagctcagttccagccccttggatcaacgaaaatcagaggattctggaaaggcagccaacttgcgcctcttagaaggatcagaggcaagatgagatggcagcctgcagagtaaatgcttgaaaaaagaggggtgattttcaatggtttgcttaagtcactgttttctagacaccaaaatagctgttttgaaactgttttaattgcttgggtagcaatgtgcactttaaacaatttggatattggaatgcagtctcatactgagtgatttgagtagaaccactgatgatgattttataaattgtgtgaagcgaatttcccatttggcaatcatttactgatttgcagtgatgaatatttttatgagaatttaaacttagcaagaatggccatggaggcaaagccttcacccagacccatcccactctcctgtgatccaggtggtccaggagcccaggacaggccttttctgtgggccctggccagacagggttacctggtgaggtgcagagagtccctctagtggccattttgtatggtagttgctaatgcagaacaagttctgtcttgggcttaaattgactgaagactttagggggaaagaatagtaaatgcatgtaaacaaatggggacactctgttcaggagaataatccgactggcatttgtggcagtttttgaaatgtaaatgtattcatgtgtgttcttgtaaatacgtgtcgctcagatgtcctttgaagtgggagggaatcaatccggggataatttcaaatggaatagagtattttgatattgttcattcagagggtgatgtgtacatatctatattgtatatatgtgatgaaaatgcattggctttttgtgcagatacaacctgctctctgtactgctgttggacagtcagtgttttaatgtttctacagttttgctattgcacgatttcatattttgcctctatgatgaacggcaaccattatttgtaactgtttagtgctgtaaagaaatattccaagtgtcattaggattgttgctgccagaactgatatgcatgaatggcacttaaaataaatatattatgttaactctatttacaaca

SEQ ID NO: 12190 - DNA, 843 bp, Homo sapiens
cggacgcgtgggtcgacccacgcgtccgcactgatgatgattttataaattgtgtgaagcgaatttcccatttggcaatcatttactgatttgcagtgatgaatatttttatgagaatttaaacttagcaagaatggccatggaggcaaagccttcacccagacccatcccactctcctgtgatccaggtggtccaggagcccaggacaggccttttctgtgggccctggccagacagggttacctggtgaggtgcagagagtccctctagtggccattttgtatggtagttgctaatgcagaacaagttctgtcttgggcttaaattgactgaagactttagggggaaagaatagtaaatgcatgtaaacaaatggggacactctgttcaggagaataatccgactggcatttgtggcagtttttgaaatgtaaatgtattcatgtgtgttcttgtaaatacgtgtcgctcagatgtcctttgaagtgggagggaatcaatccggggataatttcaaatggaatagagtattttgatattgttcattcagagggtgatgtgtacatatctatattgtatatatgtgatgaaaatgcattggctttttgtgcagatacaacctgctctctgtactgctgttggacagtcagtgttttaatgtttctacagttttgctattgcacgatttcatattttgcctctatgatgaacggcaaccattatttgtaactgtttagtgctgtaaagaaatattccaagtgtcattaggattgttgctgccagaactgatatgcatgaatggcacttaaaataaatatattatgttaactctatttacaaca

SEQ ID NO: 12191 - DNA, 2670 bp, Homo sapiens
  misc_feature (335)..(335): n is a, c, g, or t
tacactggaatgtaattaagtgtgaaattatagggcagattatcagtgctaatagtttagagaaagaatcagtgaagactgacgtagaagtaaattccaaagttcactcgtcgaccaaactacccttctaaacgctccacctactgatagtagtaccataacctgggtagctaccttgagaattagaagggcctttagaggtccaactcctttaaaaagaaagaaagaccaggcacgggaaaggcctccgcagacatgagtctagcacctgggactcatgaagttctgaaaagaggggtgtcctgaaggtccaaggcgcctttgttgggggtccnggaatccgcggtgtgccaggtcggaaaaggcgtccgctttcctggagaggaggctaaggtgccgggcgcttcgattctctttgtggccagatgggtttgtatggacaggcttgtccatctgtaacttcattaaggatgacatctgaactggagagcagcctaacgtctatggactggttaccacagctcaccatgagagcagccatccaaaaatctgatgctacacaaaatgcacatggaacaggaatttctaagaagaatgcactccttgacccaaatacaactctggaccaggaagaagtccaacagcacaaagatgggaaacctccatacagttatgccagcctcattacatttgcaattaatagctcacccaaaaagaaaatgactttaagtgaaatttatcagtggatttgtgataacttcccatattatagagaggctggcagtggttggaagaattccatacgacataatctgtcattgaacaaatgtttccttaaagtgcctcgatctaaggatgaccctggaaaggggtcctactgggcaatagacaccaatccgaaggaagatgtgctgcctactcggccaaagaagagggcacgatctgtagaacgggcctcaactccatatagcatagattcagattctttgggaatggagtgtattatttcgggaagtgcctctccaactctggcaatcaacactgtgactaacaaagtaacattgtataacactgatcaggatggtagtgatagcccacgcagtagccttaacaacagtctctcagaccagagtttggcatctgttaatttgaacagtgttggaagtgtgcatagttatacaccggtgacaagccatccagaatcagtctctcaatcattaactcctcagcagcaaccacagtacaaccttccagaaagagacaagcaactacttttctcagaatataattttgaagatcttagtgcctcatttcggagcctttataagtcagtttttgagcagtcacttagtcaacaaggtttgatgaacatcccttctgaatcttcccagcagtcccacacttcatgtacctatcagcactctcccagcagtacagtgagcactcacccacacagcaaccaaagcagcctgtccaacagtcatggcagtggcctcaacaccacaggcagtaattcggttgcacaggtctcactgtctcacccccagatgcacacacagccatctccacatcctccccatcgaccgcatggtttaccgcagcatccgcagcgttccccacacccagcaccacacccacagcaacacagccagctccagtcccctcacccccagcatccctctccacatcaacacatacagcaccatccgaaccatcagcatcagacgttaacacatcaggcacccccacccccacaacaggtatcctgtaattctggtgtttcaaatgattggtatgcgacacttgatatgctaaaagaaagctgtcgaattgccagcagtgttaattggtcagatgtagacctttcacagtttcaaggtctgatggagagtatgagacaggcagatctcaagaactggtctttagaccaggttcagtttgccgatctttgttcttctcttaatcagttctttacacaaactggccttatacattcacagagtaatgttcaacaaaatgtttgtcatggtgccatgcatccaacaaaaccttcccaacacattggaacaggaaatttgtacatagattctaggcaaaatctccctccttcagtgatgccaccccctggttatcctcatatcccacaggcactcagcactccaggaacaacgatggcaggccatcacagagccatgaaccagcagcacatgatgccttcccaagccttccagatgcggcgttccctgcctccagatgacatccaggatgactttgattgggattcaattgtgtagggcttgtttctgcaagacaccagaccctaacgttacctttctgtgcagtgaagggaaaggtttaagagaatccagttgagaaaacaaacttgctaatcactttaccaatgttatcaaaattacttttgaagacaatcagaaggattttagctggataacttactgcttttatctgacccaagcaagtactacatgtttgtctccctgccagctgccctatgtagctcctaactgttgtgtgatttggacggctttttgcatatttgtgtcagtttgatgttaaccacaagtgccagactgatttttcagacggagcctattttgctgcaagcagtttatataaagatacatatgtgtaaatatatgtacaaaaatt

SEQ ID NO: 12192 - DNA, 517 bp, Homo sapiens
  misc_feature (335)..(335): n is a, c, g, or t
tacactggaatgtaattaagtgtgaaattatagggcagattatcagtgctaatagtttagagaaagaatcagtgaagactgacgtagaagtaaattccaaagttcactcgtcgaccaaactacccttctaaacgctccacctactgatagtagtaccataacctgggtagctaccttgagaattagaagggcctttagaggtccaactcctttaaaaagaaagaaagaccaggcacgggaaaggcctccgcagacatgagtctagcacctgggactcatgaagttctgaaaagaggggtgtcctgaaggtccaaggcgcctttgttgggggtccnggaatccgcggtgtgccaggtcggaaaaggcgtccgctttcctggagaggaggctaaggtgccgggcgcttcggtgaggtggcggatgttggggggcgggggagggcagaaggcaccattccttcggggcatggggccccaggtatccgtgggcagggtccaaagccaccgatccctactgt

SEQ ID NO: 12193 - DNA, 5121 bp, Homo sapiens
  misc_feature (3)..(4): n is a, c, g, or t
  misc_feature (7)..(7): n is a, c, g, or t
ggnncgnggcccggatgttggctgctcttgctgccgccgccgctctcggggctgctcggggcctcgaccgctcgcagtaggcaccgttgggacctttcccgggggggcggagacgcacggagcggccgggggctcggccgggccgtcccggcctgcgcagcctgagattctctttgtggccagatgggtttgtatggacaggcttgtccatctgtaacttcattaaggatgacatctgaactggagagcagcctaacgtctatggactggttaccacagctcaccatgagagcagccatccaaaaatctgatgctacacaaaatgcacatggaacaggaatttctaagaagaatgcactccttgacccaaatacaactctggaccaggaagaagtccaacagcacaaagatgggaaacctccatacagttatgccagcctcattacatttgcaattaatagctcacccaaaaagaaaatgactttaagtgaaatttatcagtggatttgtgataacttcccatattatagagaggctggcagtggttggaagaattccatacgacataatctgtcattgaacaaatgtttccttaaagtgcctcgatctaaggatgaccctggaaaggggtcctactgggcaatagacaccaatccgaaggaagatgcgctgcctactcggccaaagaagagggcacgatctgtagaacgggtaacattgtataacactgatcaggatggtagtgatagcccacgcagtagccttaacaacagtctctcagaccagagtttggcatctgttaatttgaacagtgttggaagtgtgcatagttatacaccggtgacaagccatccagaatcagtctctcaatcattaactcctcagcagcaaccacagtacaaccttccagaaagagacaagcaactacttttctcagaatataattttgaagatcttagtgcctcatttcggagcctttataagtcagtttttgagcagtcacttagtcaacaaggtttgatgaacatcccttctgaatcttcccagcagtcccacacttcatgtacctatcagcactctcccagcagtacagtgagcactcacccacacagcaaccaaagcagcctgtccaacagtcatggcagtggcctcaacaccacaggcagtaattcggttgcacaggtctcactgtctcacccccagatgcacacacagccatctccacatcctccccatcgaccgcatggtttaccgcagcatccgcagcgttccccacacccagcaccacacccacagcaacacagccagctccagtcccctcacccccagcatccctctccacatcaacacatacagcaccatccgaaccatcagcatcagacgttaacacatcaggcacccccacccccacaacaggtatcctgtaattctggtgtttcaaatgattggtatgcgacacttgatatgctaaaagaaagctgtcgaattgccagcagtgttaattggtcagatgtagacctttcacagtttcaaggtctgatggagagtatgagacaggcagatctcaagaactggtctttagaccaggttcagtttgccgatctttgttcttctcttaatcagttctttacacaaactggccttatacattcacagagtaatgttcaacaaaatgtttgtcatggtgccatgcatccaacaaaaccttcccaacacattggaacaggaaatttgtacatagattctaggcaaaatctccctccttcagtgatgccaccccctggttatcctcatatcccacaggcactcagcactccaggaacaacgatggcaggccatcacagagccatgaaccagcagcacatgatgccttcccaagccttccagatgcggcgttccctgcctccagatgacatccaggatgactttgattgggattcaattgtgtagggcttgtttctgcaagacaccagaccctaacgttacctttctgtgcagtgaagggaaaggtttaagagaatccagttgagaaaacaaacttgctaatcactttaccaatgttatcaaaattacttttgaagacaatcagaaggattttagctggataacttactgcttttatctgacccaagcaagtactacatgtttgtctccctgccagctgccctatgtagctcctaactgttgtgtgatttggacggctttttgcatatttgtgtcagtttgatgttaaccacaagtgccagactgatttttcagacggagcctattttgctgcaagcagtttatataaagatacatatgtgtaaatatatgtacaaaaattactgaaaggcttcagttttttctaattggattattatgtcttgaaagttattgtcagtttttattccttgttaggctattttctgcaggatgcttttaactgatgtaggaaactgaaaggaaatagattttttccaaaacccagttccccttatttaatcttttttagaaatgtgggtaatgaattctatctaataagtcaaggaaaccagaatttgacacactccaacaatccaaaggggcatgttgctcctgagcagcatgaagaactgaccaaattggttttgatgcttgggggatcatagagtatttatgtctgcttttctaaatctgcattataatagctctaaaatttgttgattggtaagaaattgggcattgcttggctctttaaacacatcagtgcttccacattcacctatgtatttattattcaaaagtgtcattttaatatttattgctaccttctgtgaatgcttagctcctgtcgggttcattaaggagaaatgtgtctgaaagcacagaactattattatttttttctttttttgagatggagtcttgccctgttgcccaggctggagtgcagtggcacgatctcggctcactgcaacctccgcctcccgggttcaagcaattctcctgcctcagcctcccgagtagctgggagtgcaggtgcacaccgccatgcctggctgattttttgtattttagtagagatggggtttcaccatgttgcctgggctggttgcaaactcttgagctcaggcagtctgcctgcctcagcctcctagagtgctgggattacagacatgagccactgcgcctggcccagcgttacttttcttgataagaatttacagataagacactcagagagacattgtgtcattctctatcatcactccttttaccatgtgaatagatttctctgtcttggcattcttgctgattcagacttattagttaaatcggatttttctggaatttgaatcagatttcatttgggcaacaacagcagggcagggtttctaaagcaggtttccccactcatctaggttgtcttgaaaggaggatagagccacttacagttttatttgcttcagtgtttaatgtagatattatgtggcctgctgtttctgttgtcttgtatgtctgtgtatgcatgacatttggtccctttctttgaaatgcagcccctcttacgggttttttagtggtggtggtttgttttgtttcatatcatatcacagtttgcatggactgattatcttagttttatgataaaactagaagaaatgagggtttttttttaatgaatagattttgaattgattctttagaccccccaaaaagtgtcagttctaatggggaaatatattccatcaagtcaaagagtaataactgctcactagttgctttttagcatctctggtcttatcagccatgctaaatcactttaattagccttagtgattctgtggttgagtaatctctacttgaactaaacaaacatcttttgtttctgtgtgtgtgtgctgtgtgtgagagtgtgcgcgcgcgtgtgtgtgtgtgtgttttaatggagtgttgccttgaatgaatcactgggaagccagccatggtaagggctggtgaggttggggagaaaggaagagctttatgtttctctgttgtttggaccctacttggcatgaaaaaggaagctcagttccagccccttggatcaacgaaaatcagaggattctggaaaggcagccaacttgcgcctcttagaaggatcagaggcaagatgagatggcagcctgcagagtaaatgcttgaaaaaagaggggtgattttcaatggtttgcttaagtcactgttttctagacaccaaaatagctgttttgaaactgttttaattgcttgggtagcaatgtgcactttaaacaatttggatattggaatgcagtctcatactgagtgatttgagtagaaccactgatgatgattttataaattgtgtgaagcgaatttcccatttggcaatcatttactgatttgcagtgatgaatatttttatgagaatttaaacttagcaagaatggccatggaggcaaagccttcacccagacccatcccactctcctgtgatccaggtggtccaggagcccaggacaggccttttctgtgggccctggccagacagggttacctggtgaggtgcagagagtccctctagtggccattttgtatggtagttgctaatgcagaacaagttctgtcttgggcttaaattgactgaagactttagggggaaagaatagtaaatgcatgtaaacaaatggggacactctgttcaggagaataatccgactggcatttgtggcagtttttgaaatgtaaatgtattcatgtgtgttcttgtaaatacgtgtcgctcagatgtcctttgaagtgggagggaatcaatccggggataatttcaaatggaatagagtattttgatattgttcattcagagggtgatgtgtacatatctatattgtatatatgtgatgaaaatgcattggctttttgtgcagatacaacctgctctctgtactgctgttggacagtcagtgttttaatgtttctacagttttgctattgcacgatttcatattttgcctctatgatgaacggcaaccattatttgtaactgtttagtgctgtaaagaaatattccaagtgtcattaggattgttgctgccagaactgatatgcatgaatggcacttaaaataaatatattatgttaactctatttacaaca

SEQ ID NO: 12194 - DNA, 5140 bp, Homo sapiens
gcgagacgccctctctcttccagccgcagccgcgttgcgggttcttccctgtggaacagtagagacctagtctgccttctttcacaagataatccttcaattatttgaaggtgattattcagcatatatctcttgagtacctgtgcatgcaagacactgtcctggatattgtgagagatccaaagattctctttgtggccagatgggtttgtatggacaggcttgtccatctgtaacttcattaaggatgacatctgaactggagagcagcctaacgtctatggactggttaccacagctcaccatgagagcagccatccaaaaatctgatgctacacaaaatgcacatggaacaggaatttctaagaagaatgcactccttgacccaaatacaactctggaccaggaagaagtccaacagcacaaagatgggaaacctccatacagttatgccagcctcattacatttgcaattaatagctcacccaaaaagaaaatgactttaagtgaaatttatcagtggatttgtgataacttcccatattatagagaggctggcagtggttggaagaattccatacgacataatctgtcattgaacaaatgtttccttaaagtgcctcgatctaaggatgaccctggaaaggggtcctactgggcaatagacaccaatccgaaggaagatgcgctgcctactcggccaaagaagagggcacgatctgtagaacgggtaacattgtataacactgatcaggatggtagtgatagcccacgcagtagccttaacaacagtctctcagaccagagtttggcatctgttaatttgaacagtgttggaagtgtgcatagttatacaccggtgacaagccatccagaatcagtctctcaatcattaactcctcagcagcaaccacagtacaaccttccagaaagagacaagcaactacttttctcagaatataattttgaagatcttagtgcctcatttcggagcctttataagtcagtttttgagcagtcacttagtcaacaaggtttgatgaacatcccttctgaatcttcccagcagtcccacacttcatgtacctatcagcactctcccagcagtacagtgagcactcacccacacagcaaccaaagcagcctgtccaacagtcatggcagtggcctcaacaccacaggcagtaattcggttgcacaggtctcactgtctcacccccagatgcacacacagccatctccacatcctccccatcgaccgcatggtttaccgcagcatccgcagcgttccccacacccagcaccacacccacagcaacacagccagctccagtcccctcacccccagcatccctctccacatcaacacatacagcaccatccgaaccatcagcatcagacgttaacacatcaggcacccccacccccacaacaggtatcctgtaattctggtgtttcaaatgattggtatgcgacacttgatatgctaaaagaaagctgtcgaattgccagcagtgttaattggtcagatgtagacctttcacagtttcaaggtctgatggagagtatgagacaggcagatctcaagaactggtctttagaccaggttcagtttgccgatctttgttcttctcttaatcagttctttacacaaactggccttatacattcacagagtaatgttcaacaaaatgtttgtcatggtgccatgcatccaacaaaaccttcccaacacattggaacaggaaatttgtacatagattctaggcaaaatctccctccttcagtgatgccaccccctggttatcctcatatcccacaggcactcagcactccaggaacaacgatggcaggccatcacagagccatgaaccagcagcacatgatgccttcccaagccttccagatgcggcgttccctgcctccagatgacatccaggatgactttgattgggattcaattgtgtagggcttgtttctgcaagacaccagaccctaacgttacctttctgtgcagtgaagggaaaggtttaagagaatccagttgagaaaacaaacttgctaatcactttaccaatgttatcaaaattacttttgaagacaatcagaaggattttagctggataacttactgcttttatctgacccaagcaagtactacatgtttgtctccctgccagctgccctatgtagctcctaactgttgtgtgatttggacggctttttgcatatttgtgtcagtttgatgttaaccacaagtgccagactgatttttcagacggagcctattttgctgcaagcagtttatataaagatacatatgtgtaaatatatgtacaaaaattactgaaaggcttcagttttttctaattggattattatgtcttgaaagttattgtcagtttttattccttgttaggctattttctgcaggatgcttttaactgatgtaggaaactgaaaggaaatagattttttccaaaacccagttccccttatttaatcttttttagaaatgtgggtaatgaattctatctaataagtcaaggaaaccagaatttgacacactccaacaatccaaaggggcatgttgctcctgagcagcatgaagaactgaccaaattggttttgatgcttgggggatcatagagtatttatgtctgcttttctaaatctgcattataatagctctaaaatttgttgattggtaagaaattgggcattgcttggctctttaaacacatcagtgcttccacattcacctatgtatttattattcaaaagtgtcattttaatatttattgctaccttctgtgaatgcttagctcctgtcgggttcattaaggagaaatgtgtctgaaagcacagaactattattatttttttctttttttgagatggagtcttgccctgttgcccaggctggagtgcagtggcacgatctcggctcactgcaacctccgcctcccgggttcaagcaattctcctgcctcagcctcccgagtagctgggagtgcaggtgcacaccgccatgcctggctgattttttgtattttagtagagatggggtttcaccatgttgcctgggctggttgcaaactcttgagctcaggcagtctgcctgcctcagcctcctagagtgctgggattacagacatgagccactgcgcctggcccagcgttacttttcttgataagaatttacagataagacactcagagagacattgtgtcattctctatcatcactccttttaccatgtgaatagatttctctgtcttggcattcttgctgattcagacttattagttaaatcggatttttctggaatttgaatcagatttcatttgggcaacaacagcagggcagggtttctaaagcaggtttccccactcatctaggttgtcttgaaaggaggatagagccacttacagttttatttgcttcagtgtttaatgtagatattatgtggcctgctgtttctgttgtcttgtatgtctgtgtatgcatgacatttggtccctttctttgaaatgcagcccctcttacgggttttttagtggtggtggtttgttttgtttcatatcatatcacagtttgcatggactgattatcttagttttatgataaaactagaagaaatgagggtttttttttaatgaatagattttgaattgattctttagaccccccaaaaagtgtcagttctaatggggaaatatattccatcaagtcaaagagtaataactgctcactagttgctttttagcatctctggtcttatcagccatgctaaatcactttaattagccttagtgattctgtggttgagtaatctctacttgaactaaacaaacatcttttgtttctgtgtgtgtgtgctgtgtgtgagagtgtgcgcgcgcgtgtgtgtgtgtgtgttttaatggagtgttgccttgaatgaatcactgggaagccagccatggtaagggctggtgaggttggggagaaaggaagagctttatgtttctctgttgtttggaccctacttggcatgaaaaaggaagctcagttccagccccttggatcaacgaaaatcagaggattctggaaaggcagccaacttgcgcctcttagaaggatcagaggcaagatgagatggcagcctgcagagtaaatgcttgaaaaaagaggggtgattttcaatggtttgcttaagtcactgttttctagacaccaaaatagctgttttgaaactgttttaattgcttgggtagcaatgtgcactttaaacaatttggatattggaatgcagtctcatactgagtgatttgagtagaaccactgatgatgattttataaattgtgtgaagcgaatttcccatttggcaatcatttactgatttgcagtgatgaatatttttatgagaatttaaacttagcaagaatggccatggaggcaaagccttcacccagacccatcccactctcctgtgatccaggtggtccaggagcccaggacaggccttttctgtgggccctggccagacagggttacctggtgaggtgcagagagtccctctagtggccattttgtatggtagttgctaatgcagaacaagttctgtcttgggcttaaattgactgaagactttagggggaaagaatagtaaatgcatgtaaacaaatggggacactctgttcaggagaataatccgactggcatttgtggcagtttttgaaatgtaaatgtattcatgtgtgttcttgtaaatacgtgtcgctcagatgtcctttgaagtgggagggaatcaatccggggataatttcaaatggaatagagtattttgatattgttcattcagagggtgatgtgtacatatctatattgtatatatgtgatgaaaatgcattggctttttgtgcagatacaacctgctctctgtactgctgttggacagtcagtgttttaatgtttctacagttttgctattgcacgatttcatattttgcctctatgatgaacggcaaccattatttgtaactgtttagtgctgtaaagaaatattccaagtgtcattaggattgttgctgccagaactgatatgcatgaatggcacttaaaataaatatattatgttaactctatttacaaca

SEQ ID NO: 12195 - DNA, 4666 bp, Homo sapiens
ccaccggcagttgtactccggcctgcgcagcctgagattctctttgtggccagatgggtttgtatggacaggcttgtccatctgtaacttcattaagaattccatacgacataatctgtcattgaacaaatgtttccttaaagtgcctcgatctaaggatgaccctggaaaggggtcctactgggcaatagacaccaatccgaaggaagatgcgctgcctactcggccaaagaagagggcacgatctgtagaacgggtaacattgtataacactgatcaggatggtagtgatagcccacgcagtagccttaacaacagtctctcagaccagagtttggcatctgttaatttgaacagtgttggaagtgtgcatagttatacaccggtgacaagccatccagaatcagtctctcaatcattaactcctcagcagcaaccacagtacaaccttccagaaagagacaagcaactacttttctcagaatataattttgaagatcttagtgcctcatttcggagcctttataagtcagtttttgagcagtcacttagtcaacaaggtttgatgaacatcccttctgaatcttcccagcagtcccacacttcatgtacctatcagcactctcccagcagtacagtgagcactcacccacacagcaaccaaagcagcctgtccaacagtcatggcagtggcctcaacaccacaggcagtaattcggttgcacaggtctcactgtctcacccccagatgcacacacagccatctccacatcctccccatcgaccgcatggtttaccgcagcatccgcagcgttccccacacccagcaccacacccacagcaacacagccagctccagtcccctcacccccagcatccctctccacatcaacacatacagcaccatccgaaccatcagcatcagacgttaacacatcaggcacccccacccccacaacaggtatcctgtaattctggtgtttcaaatgattggtatgcgacacttgatatgctaaaagaaagctgtcgaattgccagcagtgttaattggtcagatgtagacctttcacagtttcaaggtctgatggagagtatgagacaggcagatctcaagaactggtctttagaccaggttcagtttgccgatctttgttcttctcttaatcagttctttacacaaactggccttatacattcacagagtaatgttcaacaaaatgtttgtcatggtgccatgcatccaacaaaaccttcccaacacattggaacaggaaatttgtacatagattctaggcaaaatctccctccttcagtgatgccaccccctggttatcctcatatcccacaggcactcagcactccaggaacaacgatggcaggccatcacagagccatgaaccagcagcacatgatgccttcccaagccttccagatgcggcgttccctgcctccagatgacatccaggatgactttgattgggattcaattgtgtagggcttgtttctgcaagacaccagaccctaacgttacctttctgtgcagtgaagggaaaggtttaagagaatccagttgagaaaacaaacttgctaatcactttaccaatgttatcaaaattacttttgaagacaatcagaaggattttagctggataacttactgcttttatctgacccaagcaagtactacatgtttgtctccctgccagctgccctatgtagctcctaactgttgtgtgatttggacggctttttgcatatttgtgtcagtttgatgttaaccacaagtgccagactgatttttcagacggagcctattttgctgcaagcagtttatataaagatacatatgtgtaaatatatgtacaaaaattactgaaaggcttcagttttttctaattggattattatgtcttgaaagttattgtcagtttttattccttgttaggctattttctgcaggatgcttttaactgatgtaggaaactgaaaggaaatagattttttccaaaacccagttccccttatttaatcttttttagaaatgtgggtaatgaattctatctaataagtcaaggaaaccagaatttgacacactccaacaatccaaaggggcatgttgctcctgagcagcatgaagaactgaccaaattggttttgatgcttgggggatcatagagtatttatgtctgcttttctaaatctgcattataatagctctaaaatttgttgattggtaagaaattgggcattgcttggctctttaaacacatcagtgcttccacattcacctatgtatttattattcaaaagtgtcattttaatatttattgctaccttctgtgaatgcttagctcctgtcgggttcattaaggagaaatgtgtctgaaagcacagaactattattatttttttctttttttgagatggagtcttgccctgttgcccaggctggagtgcagtggcacgatctcggctcactgcaacctccgcctcccgggttcaagcaattctcctgcctcagcctcccgagtagctgggagtgcaggtgcacaccgccatgcctggctgattttttgtattttagtagagatggggtttcaccatgttgcctgggctggttgcaaactcttgagctcaggcagtctgcctgcctcagcctcctagagtgctgggattacagacatgagccactgcgcctggcccagcgttacttttcttgataagaatttacagataagacactcagagagacattgtgtcattctctatcatcactccttttaccatgtgaatagatttctctgtcttggcattcttgctgattcagacttattagttaaatcggatttttctggaatttgaatcagatttcatttgggcaacaacagcagggcagggtttctaaagcaggtttccccactcatctaggttgtcttgaaaggaggatagagccacttacagttttatttgcttcagtgtttaatgtagatattatgtggcctgctgtttctgttgtcttgtatgtctgtgtatgcatgacatttggtccctttctttgaaatgcagcccctcttacgggttttttagtggtggtggtttgttttgtttcatatcatatcacagtttgcatggactgattatcttagttttatgataaaactagaagaaatgagggtttttttttaatgaatagattttgaattgattctttagaccccccaaaaagtgtcagttctaatggggaaatatattccatcaagtcaaagagtaataactgctcactagttgctttttagcatctctggtcttatcagccatgctaaatcactttaattagccttagtgattctgtggttgagtaatctctacttgaactaaacaaacatcttttgtttctgtgtgtgtgtgctgtgtgtgagagtgtgcgcgcgcgtgtgtgtgtgtgtgttttaatggagtgttgccttgaatgaatcactgggaagccagccatggtaagggctggtgaggttggggagaaaggaagagctttatgtttctctgttgtttggaccctacttggcatgaaaaaggaagctcagttccagccccttggatcaacgaaaatcagaggattctggaaaggcagccaacttgcgcctcttagaaggatcagaggcaagatgagatggcagcctgcagagtaaatgcttgaaaaaagaggggtgattttcaatggtttgcttaagtcactgttttctagacaccaaaatagctgttttgaaactgttttaattgcttgggtagcaatgtgcactttaaacaatttggatattggaatgcagtctcatactgagtgatttgagtagaaccactgatgatgattttataaattgtgtgaagcgaatttcccatttggcaatcatttactgatttgcagtgatgaatatttttatgagaatttaaacttagcaagaatggccatggaggcaaagccttcacccagacccatcccactctcctgtgatccaggtggtccaggagcccaggacaggccttttctgtgggccctggccagacagggttacctggtgaggtgcagagagtccctctagtggccattttgtatggtagttgctaatgcagaacaagttctgtcttgggcttaaattgactgaagactttagggggaaagaatagtaaatgcatgtaaacaaatggggacactctgttcaggagaataatccgactggcatttgtggcagtttttgaaatgtaaatgtattcatgtgtgttcttgtaaatacgtgtcgctcagatgtcctttgaagtgggagggaatcaatccggggataatttcaaatggaatagagtattttgatattgttcattcagagggtgatgtgtacatatctatattgtatatatgtgatgaaaatgcattggctttttgtgcagatacaacctgctctctgtactgctgttggacagtcagtgttttaatgtttctacagttttgctattgcacgatttcatattttgcctctatgatgaacggcaaccattatttgtaactgtttagtgctgtaaagaaatattccaagtgtcattaggattgttgctgccagaactgatatgcatgaatggcacttaaaataaatatattatgttaactctatttacaaca

SEQ ID NO: 12196 - DNA, 4662 bp, Homo sapiens
agtagaagagatttcactagtgatttaaattcattttcagaaacaaagcacaaaactggatgttcaagaatttgatgagatcccttcaaactgtgttaaagttgctggatatatgagctaataattatttattttgttcttgtattttaggcctcaactccatatagcatagattcagattctttgggaatggagtgtattatttcgggaagtgcctctccaactctggcaatcaacactgtgactaacaaagtaacattgtataacactgatcaggatggtagtgatagcccacgcagtagccttaacaacagtctctcagaccagagtttggcatctgttaatttgaacagtgttggaagtgtgcatagttatacaccggtgacaagccatccagaatcagtctctcaatcattaactcctcagcagcaaccacagtacaaccttccagaaagagacaagcaactacttttctcagaatataattttgaagatcttagtgcctcatttcggagcctttataagtcagtttttgagcagtcacttagtcaacaaggtttgatgaacatcccttctgaatcttcccagcagtcccacacttcatgtacctatcagcactctcccagcagtacagtgagcactcacccacacagcaaccaaagcagcctgtccaacagtcatggcagtggcctcaacaccacaggcagtaattcggttgcacaggtctcactgtctcacccccagatgcacacacagccatctccacatcctccccatcgaccgcatggtttaccgcagcatccgcagcgttccccacacccagcaccacacccacagcaacacagccagctccagtcccctcacccccagcatccctctccacatcaacacatacagcaccatccgaaccatcagcatcagacgttaacacatcaggcacccccacccccacaacaggtatcctgtaattctggtgtttcaaatgattggtatgcgacacttgatatgctaaaagaaagctgtcgaattgccagcagtgttaattggtcagatgtagacctttcacagtttcaaggtctgatggagagtatgagacaggcagatctcaagaactggtctttagaccaggttcagtttgccgatctttgttcttctcttaatcagttctttacacaaactggccttatacattcacagagtaatgttcaacaaaatgtttgtcatggtgccatgcatccaacaaaaccttcccaacacattggaacaggaaatttgtacatagattctaggcaaaatctccctccttcagtgatgccaccccctggttatcctcatatcccacaggcactcagcactccaggaacaacgatggcaggccatcacagagccatgaaccagcagcacatgatgccttcccaagccttccagatgcggcgttccctgcctccagatgacatccaggatgactttgattgggattcaattgtgtagggcttgtttctgcaagacaccagaccctaacgttacctttctgtgcagtgaagggaaaggtttaagagaatccagttgagaaaacaaacttgctaatcactttaccaatgttatcaaaattacttttgaagacaatcagaaggattttagctggataacttactgcttttatctgacccaagcaagtactacatgtttgtctccctgccagctgccctatgtagctcctaactgttgtgtgatttggacggctttttgcatatttgtgtcagtttgatgttaaccacaagtgccagactgatttttcagacggagcctattttgctgcaagcagtttatataaagatacatatgtgtaaatatatgtacaaaaattactgaaaggcttcagttttttctaattggattattatgtcttgaaagttattgtcagtttttattccttgttaggctattttctgcaggatgcttttaactgatgtaggaaactgaaaggaaatagattttttccaaaacccagttccccttatttaatcttttttagaaatgtgggtaatgaattctatctaataagtcaaggaaaccagaatttgacacactccaacaatccaaaggggcatgttgctcctgagcagcatgaagaactgaccaaattggttttgatgcttgggggatcatagagtatttatgtctgcttttctaaatctgcattataatagctctaaaatttgttgattggtaagaaattgggcattgcttggctctttaaacacatcagtgcttccacattcacctatgtatttattattcaaaagtgtcattttaatatttattgctaccttctgtgaatgcttagctcctgtcgggttcattaaggagaaatgtgtctgaaagcacagaactattattatttttttctttttttgagatggagtcttgccctgttgcccaggctggagtgcagtggcacgatctcggctcactgcaacctccgcctcccgggttcaagcaattctcctgcctcagcctcccgagtagctgggagtgcaggtgcacaccgccatgcctggctgattttttgtattttagtagagatggggtttcaccatgttgcctgggctggttgcaaactcttgagctcaggcagtctgcctgcctcagcctcctagagtgctgggattacagacatgagccactgcgcctggcccagcgttacttttcttgataagaatttacagataagacactcagagagacattgtgtcattctctatcatcactccttttaccatgtgaatagatttctctgtcttggcattcttgctgattcagacttattagttaaatcggatttttctggaatttgaatcagatttcatttgggcaacaacagcagggcagggtttctaaagcaggtttccccactcatctaggttgtcttgaaaggaggatagagccacttacagttttatttgcttcagtgtttaatgtagatattatgtggcctgctgtttctgttgtcttgtatgtctgtgtatgcatgacatttggtccctttctttgaaatgcagcccctcttacgggttttttagtggtggtggtttgttttgtttcatatcatatcacagtttgcatggactgattatcttagttttatgataaaactagaagaaatgagggtttttttttaatgaatagattttgaattgattctttagaccccccaaaaagtgtcagttctaatggggaaatatattccatcaagtcaaagagtaataactgctcactagttgctttttagcatctctggtcttatcagccatgctaaatcactttaattagccttagtgattctgtggttgagtaatctctacttgaactaaacaaacatcttttgtttctgtgtgtgtgtgctgtgtgtgagagtgtgcgcgcgcgtgtgtgtgtgtgtgttttaatggagtgttgccttgaatgaatcactgggaagccagccatggtaagggctggtgaggttggggagaaaggaagagctttatgtttctctgttgtttggaccctacttggcatgaaaaaggaagctcagttccagccccttggatcaacgaaaatcagaggattctggaaaggcagccaacttgcgcctcttagaaggatcagaggcaagatgagatggcagcctgcagagtaaatgcttgaaaaaagaggggtgattttcaatggtttgcttaagtcactgttttctagacaccaaaatagctgttttgaaactgttttaattgcttgggtagcaatgtgcactttaaacaatttggatattggaatgcagtctcatactgagtgatttgagtagaaccactgatgatgattttataaattgtgtgaagcgaatttcccatttggcaatcatttactgatttgcagtgatgaatatttttatgagaatttaaacttagcaagaatggccatggaggcaaagccttcacccagacccatcccactctcctgtgatccaggtggtccaggagcccaggacaggccttttctgtgggccctggccagacagggttacctggtgaggtgcagagagtccctctagtggccattttgtatggtagttgctaatgcagaacaagttctgtcttgggcttaaattgactgaagactttagggggaaagaatagtaaatgcatgtaaacaaatggggacactctgttcaggagaataatccgactggcatttgtggcagtttttgaaatgtaaatgtattcatgtgtgttcttgtaaatacgtgtcgctcagatgtcctttgaagtgggagggaatcaatccggggataatttcaaatggaatagagtattttgatattgttcattcagagggtgatgtgtacatatctatattgtatatatgtgatgaaaatgcattggctttttgtgcagatacaacctgctctctgtactgctgttggacagtcagtgttttaatgtttctacagttttgctattgcacgatttcatattttgcctctatgatgaacggcaaccattatttgtaactgtttagtgctgtaaagaaatattccaagtgtcattaggattgttgctgccagaactgatatgcatgaatggcacttaaaataaatatattatgttaactctatttacaaca

SEQ ID NO: 12197 - DNA, 4466 bp, Homo sapiens
  misc_feature (1)..(1): n is a, c, g, or t
nggtggtctagaggatcccatctcaggccaggacgagggcacgatctgtagaacgggtaacattgtataacactgatcaggatggtagtgatagcccacgcagtagccttaacaacagtctctcagaccagagtttggcatctgttaatttgaacagtgttggaagtgtgcatagttatacaccggtgacaagccatccagaatcagtctctcaatcattaactcctcagcagcaaccacagtacaaccttccagaaagagacaagcaactacttttctcagaatataattttgaagatcttagtgcctcatttcggagcctttataagtcagtttttgagcagtcacttagtcaacaaggtttgatgaacatcccttctgaatcttcccagcagtcccacacttcatgtacctatcagcactctcccagcagtacagtgagcactcacccacacagcaaccaaagcagcctgtccaacagtcatggcagtggcctcaacaccacaggcagtaattcggttgcacaggtctcactgtctcacccccagatgcacacacagccatctccacatcctccccatcgaccgcatggtttaccgcagcatccgcagcgttccccacacccagcaccacacccacagcaacacagccagctccagtcccctcacccccagcatccctctccacatcaacacatacagcaccatccgaaccatcagcatcagacgttaacacatcaggcacccccacccccacaacaggtatcctgtaattctggtgtttcaaatgattggtatgcgacacttgatatgctaaaagaaagctgtcgaattgccagcagtgttaattggtcagatgtagacctttcacagtttcaaggtctgatggagagtatgagacaggcagatctcaagaactggtctttagaccaggttcagtttgccgatctttgttcttctcttaatcagttctttacacaaactggccttatacattcacagagtaatgttcaacaaaatgtttgtcatggtgccatgcatccaacaaaaccttcccaacacattggaacaggaaatttgtacatagattctaggcaaaatctccctccttcagtgatgccaccccctggttatcctcatatcccacaggcactcagcactccaggaacaacgatggcaggccatcacagagccatgaaccagcagcacatgatgccttcccaagccttccagatgcggcgttccctgcctccagatgacatccaggatgactttgattgggattcaattgtgtagggcttgtttctgcaagacaccagaccctaacgttacctttctgtgcagtgaagggaaaggtttaagagaatccagttgagaaaacaaacttgctaatcactttaccaatgttatcaaaattacttttgaagacaatcagaaggattttagctggataacttactgcttttatctgacccaagcaagtactacatgtttgtctccctgccagctgccctatgtagctcctaactgttgtgtgatttggacggctttttgcatatttgtgtcagtttgatgttaaccacaagtgccagactgatttttcagacggagcctattttgctgcaagcagtttatataaagatacatatgtgtaaatatatgtacaaaaattactgaaaggcttcagttttttctaattggattattatgtcttgaaagttattgtcagtttttattccttgttaggctattttctgcaggatgcttttaactgatgtaggaaactgaaaggaaatagattttttccaaaacccagttccccttatttaatcttttttagaaatgtgggtaatgaattctatctaataagtcaaggaaaccagaatttgacacactccaacaatccaaaggggcatgttgctcctgagcagcatgaagaactgaccaaattggttttgatgcttgggggatcatagagtatttatgtctgcttttctaaatctgcattataatagctctaaaatttgttgattggtaagaaattgggcattgcttggctctttaaacacatcagtgcttccacattcacctatgtatttattattcaaaagtgtcattttaatatttattgctaccttctgtgaatgcttagctcctgtcgggttcattaaggagaaatgtgtctgaaagcacagaactattattatttttttctttttttgagatggagtcttgccctgttgcccaggctggagtgcagtggcacgatctcggctcactgcaacctccgcctcccgggttcaagcaattctcctgcctcagcctcccgagtagctgggagtgcaggtgcacaccgccatgcctggctgattttttgtattttagtagagatggggtttcaccatgttgcctgggctggttgcaaactcttgagctcaggcagtctgcctgcctcagcctcctagagtgctgggattacagacatgagccactgcgcctggcccagcgttacttttcttgataagaatttacagataagacactcagagagacattgtgtcattctctatcatcactccttttaccatgtgaatagatttctctgtcttggcattcttgctgattcagacttattagttaaatcggatttttctggaatttgaatcagatttcatttgggcaacaacagcagggcagggtttctaaagcaggtttccccactcatctaggttgtcttgaaaggaggatagagccacttacagttttatttgcttcagtgtttaatgtagatattatgtggcctgctgtttctgttgtcttgtatgtctgtgtatgcatgacatttggtccctttctttgaaatgcagcccctcttacgggttttttagtggtggtggtttgttttgtttcatatcatatcacagtttgcatggactgattatcttagttttatgataaaactagaagaaatgagggtttttttttaatgaatagattttgaattgattctttagaccccccaaaaagtgtcagttctaatggggaaatatattccatcaagtcaaagagtaataactgctcactagttgctttttagcatctctggtcttatcagccatgctaaatcactttaattagccttagtgattctgtggttgagtaatctctacttgaactaaacaaacatcttttgtttctgtgtgtgtgtgctgtgtgtgagagtgtgcgcgcgcgtgtgtgtgtgtgtgttttaatggagtgttgccttgaatgaatcactgggaagccagccatggtaagggctggtgaggttggggagaaaggaagagctttatgtttctctgttgtttggaccctacttggcatgaaaaaggaagctcagttccagccccttggatcaacgaaaatcagaggattctggaaaggcagccaacttgcgcctcttagaaggatcagaggcaagatgagatggcagcctgcagagtaaatgcttgaaaaaagaggggtgattttcaatggtttgcttaagtcactgttttctagacaccaaaatagctgttttgaaactgttttaattgcttgggtagcaatgtgcactttaaacaatttggatattggaatgcagtctcatactgagtgatttgagtagaaccactgatgatgattttataaattgtgtgaagcgaatttcccatttggcaatcatttactgatttgcagtgatgaatatttttatgagaatttaaacttagcaagaatggccatggaggcaaagccttcacccagacccatcccactctcctgtgatccaggtggtccaggagcccaggacaggccttttctgtgggccctggccagacagggttacctggtgaggtgcagagagtccctctagtggccattttgtatggtagttgctaatgcagaacaagttctgtcttgggcttaaattgactgaagactttagggggaaagaatagtaaatgcatgtaaacaaatggggacactctgttcaggagaataatccgactggcatttgtggcagtttttgaaatgtaaatgtattcatgtgtgttcttgtaaatacgtgtcgctcagatgtcctttgaagtgggagggaatcaatccggggataatttcaaatggaatagagtattttgatattgttcattcagagggtgatgtgtacatatctatattgtatatatgtgatgaaaatgcattggctttttgtgcagatacaacctgctctctgtactgctgttggacagtcagtgttttaatgtttctacagttttgctattgcacgatttcatattttgcctctatgatgaacggcaaccattatttgtaactgtttagtgctgtaaagaaatattccaagtgtcattaggattgttgctgccagaactgatatgcatgaatggcacttaaaataaatatattatgttaactctatttacaaca

SEQ ID NO: 12198 - DNA, 4219 bp, Homo sapiens
ataaaggctccgaaatgaggcactaagatcttcaaaatataattttgaagatcttagtgcctcatttcggagcctttataagtcagtttttgagcagtcacttagtcaacaaggtttgatgaacatcccttctgaatcttcccagcagtcccacacttcatgtacctatcagcactctcccagcagtacagtgagcactcacccacacagcaaccaaagcagcctgtccaacagtcatggcagtggcctcaacaccacaggcagtaattcggttgcacaggtctcactgtctcacccccagatgcacacacagccatctccacatcctccccatcgaccgcatggtttaccgcagcatccgcagcgttccccacacccagcaccacacccacagcaacacagccagctccagtcccctcacccccagcatccctctccacatcaacacatacagcaccatccgaaccatcagcatcagacgttaacacatcaggcacccccacccccacaacaggtatcctgtaattctggtgtttcaaatgattggtatgcgacacttgatatgctaaaagaaagctgtcgaattgccagcagtgttaattggtcagatgtagacctttcacagtttcaaggtctgatggagagtatgagacaggcagatctcaagaactggtctttagaccaggttcagtttgccgatctttgttcttctcttaatcagttctttacacaaactggccttatacattcacagagtaatgttcaacaaaatgtttgtcatggtgccatgcatccaacaaaaccttcccaacacattggaacaggaaatttgtacatagattctaggcaaaatctccctccttcagtgatgccaccccctggttatcctcatatcccacaggcactcagcactccaggaacaacgatggcaggccatcacagagccatgaaccagcagcacatgatgccttcccaagccttccagatgcggcgttccctgcctccagatgacatccaggatgactttgattgggattcaattgtgtagggcttgtttctgcaagacaccagaccctaacgttacctttctgtgcagtgaagggaaaggtttaagagaatccagttgagaaaacaaacttgctaatcactttaccaatgttatcaaaattacttttgaagacaatcagaaggattttagctggataacttactgcttttatctgacccaagcaagtactacatgtttgtctccctgccagctgccctatgtagctcctaactgttgtgtgatttggacggctttttgcatatttgtgtcagtttgatgttaaccacaagtgccagactgatttttcagacggagcctattttgctgcaagcagtttatataaagatacatatgtgtaaatatatgtacaaaaattactgaaaggcttcagttttttctaattggattattatgtcttgaaagttattgtcagtttttattccttgttaggctattttctgcaggatgcttttaactgatgtaggaaactgaaaggaaatagattttttccaaaacccagttccccttatttaatcttttttagaaatgtgggtaatgaattctatctaataagtcaaggaaaccagaatttgacacactccaacaatccaaaggggcatgttgctcctgagcagcatgaagaactgaccaaattggttttgatgcttgggggatcatagagtatttatgtctgcttttctaaatctgcattataatagctctaaaatttgttgattggtaagaaattgggcattgcttggctctttaaacacatcagtgcttccacattcacctatgtatttattattcaaaagtgtcattttaatatttattgctaccttctgtgaatgcttagctcctgtcgggttcattaaggagaaatgtgtctgaaagcacagaactattattatttttttctttttttgagatggagtcttgccctgttgcccaggctggagtgcagtggcacgatctcggctcactgcaacctccgcctcccgggttcaagcaattctcctgcctcagcctcccgagtagctgggagtgcaggtgcacaccgccatgcctggctgattttttgtattttagtagagatggggtttcaccatgttgcctgggctggttgcaaactcttgagctcaggcagtctgcctgcctcagcctcctagagtgctgggattacagacatgagccactgcgcctggcccagcgttacttttcttgataagaatttacagataagacactcagagagacattgtgtcattctctatcatcactccttttaccatgtgaatagatttctctgtcttggcattcttgctgattcagacttattagttaaatcggatttttctggaatttgaatcagatttcatttgggcaacaacagcagggcagggtttctaaagcaggtttccccactcatctaggttgtcttgaaaggaggatagagccacttacagttttatttgcttcagtgtttaatgtagatattatgtggcctgctgtttctgttgtcttgtatgtctgtgtatgcatgacatttggtccctttctttgaaatgcagcccctcttacgggttttttagtggtggtggtttgttttgtttcatatcatatcacagtttgcatggactgattatcttagttttatgataaaactagaagaaatgagggtttttttttaatgaatagattttgaattgattctttagaccccccaaaaagtgtcagttctaatggggaaatatattccatcaagtcaaagagtaataactgctcactagttgctttttagcatctctggtcttatcagccatgctaaatcactttaattagccttagtgattctgtggttgagtaatctctacttgaactaaacaaacatcttttgtttctgtgtgtgtgtgctgtgtgtgagagtgtgcgcgcgcgtgtgtgtgtgtgtgttttaatggagtgttgccttgaatgaatcactgggaagccagccatggtaagggctggtgaggttggggagaaaggaagagctttatgtttctctgttgtttggaccctacttggcatgaaaaaggaagctcagttccagccccttggatcaacgaaaatcagaggattctggaaaggcagccaacttgcgcctcttagaaggatcagaggcaagatgagatggcagcctgcagagtaaatgcttgaaaaaagaggggtgattttcaatggtttgcttaagtcactgttttctagacaccaaaatagctgttttgaaactgttttaattgcttgggtagcaatgtgcactttaaacaatttggatattggaatgcagtctcatactgagtgatttgagtagaaccactgatgatgattttataaattgtgtgaagcgaatttcccatttggcaatcatttactgatttgcagtgatgaatatttttatgagaatttaaacttagcaagaatggccatggaggcaaagccttcacccagacccatcccactctcctgtgatccaggtggtccaggagcccaggacaggccttttctgtgggccctggccagacagggttacctggtgaggtgcagagagtccctctagtggccattttgtatggtagttgctaatgcagaacaagttctgtcttgggcttaaattgactgaagactttagggggaaagaatagtaaatgcatgtaaacaaatggggacactctgttcaggagaataatccgactggcatttgtggcagtttttgaaatgtaaatgtattcatgtgtgttcttgtaaatacgtgtcgctcagatgtcctttgaagtgggagggaatcaatccggggataatttcaaatggaatagagtattttgatattgttcattcagagggtgatgtgtacatatctatattgtatatatgtgatgaaaatgcattggctttttgtgcagatacaacctgctctctgtactgctgttggacagtcagtgttttaatgtttctacagttttgctattgcacgatttcatattttgcctctatgatgaacggcaaccattatttgtaactgtttagtgctgtaaagaaatattccaagtgtcattaggattgttgctgccagaactgatatgcatgaatggcacttaaaataaatatattatgttaactctatttacaaca

SEQ ID NO: 12199 - DNA, 5329 bp, Homo sapiens
  misc_feature (3)..(4): n is a, c, g, or t
  misc_feature (7)..(7): n is a, c, g, or t
ggnncgnggcccggatgttggctgctcttgctgccgccgccgctctcggggctgctcggggcctcgaccgctcgcagtaggcaccgttgggacctttcccgggggggcggagacgcacggagcggccgggggctcggccgggccgtcccggcctgcgcagcctgagattctctttgtggccagatgggtttgtatggacaggcttgtccatctgtaacttcattaaggatgacatctgaactggagagcagcctaacgtctatggactggttaccacagctcaccatgagagcagccatccaaaaatctgatgctacacaaaatgcacatggaacaggaatttctaagaagaatgcactccttgacccaaatacaactctggaccaggaagaagtccaacagcacaaagatgggaaacctccatacagttatgccagcctcattacatttgcaattaatagctcacccaaaaagaaaatgactttaagtgaaatttatcagtggatttgtgataacttcccatattatagagaggctggcagtggttggaagaattccatacgacataatctgtcattgaacaaatgtttccttaaagtgcctcgatctaaggatgaccctggaaaggggtcctactgggcaatagacaccaatccgaaggaagatgcgctgcctactcggccaaagaagagggcacgatctgtagaacgggtaacattgtataacactgatcaggatggtagtgatagcccacgcagtagccttaacaacagtctctcagaccagagtttggcatctgttaatttgaacagtgttggaagtgtgcatagttatacaccggtgacaagccatccagaatcagtctctcaatcattaactcctcagcagcaaccacagtacaaccttccagaaagagacaagcaactacttttctcagaatataattttgaagatcttagtgcctcatttcggagcctttataagtcagtttttgagcagtcacttagtcaacaaggtttgatgaacatcccttctgaatcttcccagcagtcccacacttcatgtacctatcagcactctcccagcagtacagtgagcactcacccacacagcaaccaaagcagcctgtccaacagtcatggcagtggcctcaacaccacaggcagtaattcggttgcacaggtctcactgtctcacccccagatgcacacacagccatctccacatcctccccatcgaccgcatggtttaccgcagcatccgcagcgttccccacacccagcaccacacccacagcaacacagccagctccagtcccctcacccccagcatccctctccacatcaacacatacagcaccatccgaaccatcagcatcagacgttaacacatcaggcacccccacccccacaacaggtatcctgtaattctggtgtttcaaatgattggtatgcgacacttgatatgctaaaagaaagctgtcgaattgccagcagtgttaattggtcagatgtagacctttcacagtttcaaggtctgatggagagtatgagacaggcagatctcaagaactggtctttagaccaggttcagtttgccgatctttgttcttctcttaatcagttctttacacaaactggccttatacattcacagagtaatgttcaacaaaatgtttgtcatggtgccatgcatccaacaaaaccttcccaacacattggaacaggaaatttgtacatagattctaggcaaaatctccctccttcagtgatgccaccccctggttatcctcatatcccacaggcactcagcactccaggaacaacgatggcaggccatcacagagccatgaaccagcagcacatgatgccttcccaagccttccagatgcggcgttccctgcctccagatgacatccaggatgactttgattgggattcaattgtgtagggcttgtttctgcaagacaccagaccctaacgttacctttctgtgcagtgaagggaaaggtttaagagaatccagttgagaaaacaaacttgctaatcactttaccaatgttatcaaaattacttttgaagacaatcagaaggattttagctggataacttactgcttttatctgacccaagcaagtactacatgtttgtctccctgccagctgccctatgtagctcctaactgttgtgtgatttggacggctttttgcatatttgtgtcagtttgatgttaaccacaagtgccagactgatttttcagacggagcctattttgctgcaagcagtttatataaagatacatatgtgtaaatatatgtacaaaaattactgaaaggcttcagttttttctaattggattattatgtcttgaaagttattgtcagtttttattccttgttaggctattttctgcaggatgcttttaactgatgtaggaaactgaaaggaaatagattttttccaaaacccagttccccttatttaatcttttttagaaatgtgggtaatgaattctatctaataagtcaaggaaaccagaatttgacacactccaacaatccaaaggggcatgttgctcctgagcagcatgaagaactgaccaaattggttttgatgcttgggggatcatagagtatttatgtctgcttttctaaatctgcattataatagctctaaaatttgttgattggtaagaaattgggcattgcttggctctttaaacacatcagtgcttccacattcacctatgtatttattattcaaaagtgtcattttaatatttattgctaccttctgtgaatgcttagctcctgtcgggttcattaaggagaaatgtgtctgaaagcacagaactattattatttttttctttttttgagatggagtcttgccctgttgcccaggctggagtgcagtggcacgatctcggctcactgcaacctccgcctcccgggttcaagcaattctcctgcctcagcctcccgagtagctgggagtgcaggtgcacaccgccatgcctggctgattttttgtattttagtagagatggggtttcaccatgttgcctgggctggttgcaaactcttgagctcaggcagtctgcctgcctcagcctcctagagtgctgggattacagacatgagccactgcgcctggcccagcgttacttttcttgataagaatttacagataagacactcagagagacattgtgtcattctctatcatcactccttttaccatgtgaatagatttctctgtcttggcattcttgctgattcagacttattagttaaatcggatttttctggaatttgaatcagatttcatttgggcaacaacagcagggcagggtttctaaagcaggtttccccactcatctaggttgtcttgaaaggaggatagagccacttacagttttatttgcttcagtgtttaatgtagatattatgtggcctgctgtttctgttgtcttgtatgtctgtgtatgcatgacatttggtccctttctttgaaatgcagcccctcttacgggttttttagtggtggtggtttgttttgtttcatatcatatcacagtttgcatggactgattatcttagttttatgataaaactagaagaaatgagggtttttttttaatgaatagattttgaattgattctttagaccccccaaaaagtgtcagttctaatggggaaatatattccatcaagtcaaagagtaataactgctcactagttgctttttagcatctctggtcttatcagccatgctaaatcactttaattagccttagtgattctgtggttgagtaatctctacttgaactaaacaaacatcttttgtttctgtgtgtgtgtgctgtgtgtgagagtgtgcgcgcgcgtgtgtgtgtgtgtgttttaatggagtgttgccttgaatgaatcactgggaagccagccatggtaagggctggtgaggttggggagaaaggaagagctttatgtttctctgttgtttggaccctacttggcatgaaaaaggaagctcagttccagccccttggatcaacgaaaatcagaggattctggaaaggcagccaacttgcgcctcttagaaggatcagaggcaagatgagatggcagcctgcagagtaaatgcttgaaaaaagaggggtgattttcaatggtttgcttaagtcactgttttctagacaccaaaatagctgttttgaaactgttttaattgcttgggtagcaatgtgcactttaaacaatttggatattggaatgcagtctcatactgagtgatttgagtagaaccactgatgatgattttataaattgtgtgaagcgaatttcccatttggcaatcatttactgatttgcagtgatgaatatttttatgagaatttaaacttagcaagaatggccatggaggcaaagccttcacccagacccatcccactctcctgtgatccaggtggtccaggagcccaggacaggccttttctgtgggccctggccagacagggttacctggtgaggtgcagagagtccctctagtggccattttgtatggtagttgctaatgcagaacaagttctgtcttgggcttaaattgactgaagactttagggggaaagaatagtaaatgcatgtaaacaaatggggacactctgttcaggagaataatccgactggcatttgtggcagtttttgaaatgtaaatgtattcatgtgtgttcttgtaaatacgtgtcgctcagatgtcctttgaagtgggagggaatcaatccggggataatttcaaatggaatagagtattttgatattgttcattcagagggtgatgtgtacatatctatattgtatatatgtgatgaaaatgcattggctttttgtgcagatacaacctgctctctgtactgctgttggacagtcagtgttttaatgtttctacagttttgctattgcacgatttcatattttgcctctatgatgaacggcaaccattatttgtaactgtttagtgctgtaaagaaatattccaagtgtcattaggattgttgctgccagaactgatatgcatgaatggcacttaaaataaatatattatgttaactctatttacaacaaaaaaaacaccaccacacacaacaccacacaacctcaccacaaaacaaaaccaccacacaaccgcacacaaaaagaacaacaggccacacgcagcgaacaacaaaaaaaagagagaagaagacacgaacacgagcggcggggccggcagcaaggagaggcagacgagacagggcgggggggtaggagcggaagcagggctcggcggat

SEQ ID NO: 12200 - DNA, 5016 bp, Homo sapiens
  misc_feature (1121)..(1121): n is a, c, g, or t
gcgagacgccctctctcttccagccgcagccgcgttgcgggttcttccctgtggaacagtagagacctagtctgccttctttcacaagataatccttcaattatttgaaggtgattattcagcatatatctcttgagtacctgtgcatgcaagacactgtcctggatattgtgagagatccaaagattctctttgtggccagatgggtttgtatggacaggcttgtccatctgtaacttcattaaggatgacatctgaactggagagcagcctaacgtctatggactggttaccacagctcaccatgagagcagccatccaaaaatctgatgctacacaaaatgcacatggaacaggaatttctaagaagaatgcactccttgacccaaatacaactctggaccaggaagaagtccaacagcacaaagatgggaaacctccatacagttatgccagcctcattacatttgcaattaatagctcacccaaaaagaaaatgactttaagtgaaatttatcagtggatttgtgataacttcccatattatagagaggctggcagtggttggaagatttcctatctgttcatttattggtactgtaatgtaaagagcagtatcaagtttgatattactaggtgatgtggcaatttggaaactgctagactggaggttagaagacctgggttcaagtcttagattcatcatgataaccttgctaagttatgtcacttctctggttcagtttcttttatttgtaaaatggagagaaataatacctttctgcctgtctcacagagcagattgcccaacacgtgatataatgggtacaaatccccttgtaagacgggacaagaatcagccaatttcaggaataagggcagctcatcgttttcccttaccacacttcaccctttcaccatccaggaattacactgttgtcaatattttataggtgtttcaaatgattggtatgcgacacttgatatgctaaaagaaagctgtcgaattgccagcagtgttaattggtcagatgtagacctttcacagtttcaaggtgagtgttggttctttttgacatataaccaaatacacatgatcctgtttctctgctagattatanctttctttgtagtagaaataaacatcatcttatatagcatttcttttgcagttggtaaaattcataataattttggccacttggtatagcagagggtcacagacaagttctgaaagaaatttgaccacatttaaaataattgggctttgaataatttaaaaaggtcattcttcattgcgtggataaatcactaccataaagtggagtgagtggaaattttgagagctgaaaaaaattatgtcttgctattttccttgcaatgtttattgcataacagtgctaacatatttttaatgctttcctcataggtctgatggagagtatgagacaggcagatctcaagaactggtctttagaccaggttcagtttgccgatctttgttcttctcttaatcagttctttacacaaactggccttatacattcacagagtaatgttcaacaaaatgtttgtcatggtgccatgcatccaacaaaaccttcccaacacattggaacaggaaatttgtacatagattctaggcaaaatctccctccttcagtgatgccaccccctggttatcctcatatcccacaggcactcagcactccaggaacaacgatggcaggccatcacagagccatgaaccagcagcacatgatgccttcccaagccttccagatgcggcgttccctgcctccagatgacatccaggatgactttgattgggattcaattgtgtagggcttgtttctgcaagacaccagaccctaacgttacctttctgtgcagtgaagggaaaggtttaagagaatccagttgagaaaacaaacttgctaatcactttaccaatgttatcaaaattacttttgaagacaatcagaaggattttagctggataacttactgcttttatctgacccaagcaagtactacatgtttgtctccctgccagctgccctatgtagctcctaactgttgtgtgatttggacggctttttgcatatttgtgtcagtttgatgttaaccacaagtgccagactgatttttcagacggagcctattttgctgcaagcagtttatataaagatacatatgtgtaaatatatgtacaaaaattactgaaaggcttcagttttttctaattggattattatgtcttgaaagttattgtcagtttttattccttgttaggctattttctgcaggatgcttttaactgatgtaggaaactgaaaggaaatagattttttccaaaacccagttccccttatttaatcttttttagaaatgtgggtaatgaattctatctaataagtcaaggaaaccagaatttgacacactccaacaatccaaaggggcatgttgctcctgagcagcatgaagaactgaccaaattggttttgatgcttgggggatcatagagtatttatgtctgcttttctaaatctgcattataatagctctaaaatttgttgattggtaagaaattgggcattgcttggctctttaaacacatcagtgcttccacattcacctatgtatttattattcaaaagtgtcattttaatatttattgctaccttctgtgaatgcttagctcctgtcgggttcattaaggagaaatgtgtctgaaagcacagaactattattatttttttctttttttgagatggagtcttgccctgttgcccaggctggagtgcagtggcacgatctcggctcactgcaacctccgcctcccgggttcaagcaattctcctgcctcagcctcccgagtagctgggagtgcaggtgcacaccgccatgcctggctgattttttgtattttagtagagatggggtttcaccatgttgcctgggctggttgcaaactcttgagctcaggcagtctgcctgcctcagcctcctagagtgctgggattacagacatgagccactgcgcctggcccagcgttacttttcttgataagaatttacagataagacactcagagagacattgtgtcattctctatcatcactccttttaccatgtgaatagatttctctgtcttggcattcttgctgattcagacttattagttaaatcggatttttctggaatttgaatcagatttcatttgggcaacaacagcagggcagggtttctaaagcaggtttccccactcatctaggttgtcttgaaaggaggatagagccacttacagttttatttgcttcagtgtttaatgtagatattatgtggcctgctgtttctgttgtcttgtatgtctgtgtatgcatgacatttggtccctttctttgaaatgcagcccctcttacgggttttttagtggtggtggtttgttttgtttcatatcatatcacagtttgcatggactgattatcttagttttatgataaaactagaagaaatgagggtttttttttaatgaatagattttgaattgattctttagaccccccaaaaagtgtcagttctaatggggaaatatattccatcaagtcaaagagtaataactgctcactagttgctttttagcatctctggtcttatcagccatgctaaatcactttaattagccttagtgattctgtggttgagtaatctctacttgaactaaacaaacatcttttgtttctgtgtgtgtgtgctgtgtgtgagagtgtgcgcgcgcgtgtgtgtgtgtgtgttttaatggagtgttgccttgaatgaatcactgggaagccagccatggtaagggctggtgaggttggggagaaaggaagagctttatgtttctctgttgtttggaccctacttggcatgaaaaaggaagctcagttccagccccttggatcaacgaaaatcagaggattctggaaaggcagccaacttgcgcctcttagaaggatcagaggcaagatgagatggcagcctgcagagtaaatgcttgaaaaaagaggggtgattttcaatggtttgcttaagtcactgttttctagacaccaaaatagctgttttgaaactgttttaattgcttgggtagcaatgtgcactttaaacaatttggatattggaatgcagtctcatactgagtgatttgagtagaaccactgatgatgattttataaattgtgtgaagcgaatttcccatttggcaatcatttactgatttgcagtgatgaatatttttatgagaatttaaacttagcaagaatggccatggaggcaaagccttcacccagacccatcccactctcctgtgatccaggtggtccaggagcccaggacaggccttttctgtgggccctggccagacagggttacctggtgaggtgcagagagtccctctagtggccattttgtatggtagttgctaatgcagaacaagttctgtcttgggcttaaattgactgaagactttagggggaaagaatagtaaatgcatgtaaacaaatggggacactctgttcaggagaataatccgactggcatttgtggcagtttttgaaatgtaaatgtattcatgtgtgttcttgtaaatacgtgtcgctcagatgtcctttgaagtgggagggaatcaatccggggataatttcaaatggaatagagtattttgatattgttcattcagagggtgatgtgtacatatctatattgtatatatgtgatgaaaatgcattggctttttgtgcagatacaacctgctctctgtactgctgttggacagtcagtgttttaatgtttctacagttttgctattgcacgatttcatattttgcctctatgatgaacggcaaccattatttgtaactgtttagtgctgtaaagaaatattccaagtgtcattaggattgttgctgccagaactgatatgcatgaatggcacttaaaataaatatattatgttaactctatttacaaca

SEQ ID NO: 12201 - DNA, 3417 bp, Homo sapiens
gtctactgaccccctcccccacagtgagataatgtgtgcctggcatataggaagtacacagtaggggttagtttatttcttactttcttctctacccaagtcgctgctattattgcctctttccttccaggccatcacagagccatgaaccagcagcacatgatgccttcccaagccttccagatgcggcgttccctgcctccagatgacatccaggatgactttgattgggattcaattgtgtagggcttgtttctgcaagacaccagaccctaacgttacctttctgtgcagtgaagggaaaggtttaagagaatccagttgagaaaacaaacttgctaatcactttaccaatgttatcaaaattacttttgaagacaatcagaaggattttagctggataacttactgcttttatctgacccaagcaagtactacatgtttgtctccctgccagctgccctatgtagctcctaactgttgtgtgatttggacggctttttgcatatttgtgtcagtttgatgttaaccacaagtgccagactgatttttcagacggagcctattttgctgcaagcagtttatataaagatacatatgtgtaaatatatgtacaaaaattactgaaaggcttcagttttttctaattggattattatgtcttgaaagttattgtcagtttttattccttgttaggctattttctgcaggatgcttttaactgatgtaggaaactgaaaggaaatagattttttccaaaacccagttccccttatttaatcttttttagaaatgtgggtaatgaattctatctaataagtcaaggaaaccagaatttgacacactccaacaatccaaaggggcatgttgctcctgagcagcatgaagaactgaccaaattggttttgatgcttgggggatcatagagtatttatgtctgcttttctaaatctgcattataatagctctaaaatttgttgattggtaagaaattgggcattgcttggctctttaaacacatcagtgcttccacattcacctatgtatttattattcaaaagtgtcattttaatatttattgctaccttctgtgaatgcttagctcctgtcgggttcattaaggagaaatgtgtctgaaagcacagaactattattatttttttctttttttgagatggagtcttgccctgttgcccaggctggagtgcagtggcacgatctcggctcactgcaacctccgcctcccgggttcaagcaattctcctgcctcagcctcccgagtagctgggagtgcaggtgcacaccgccatgcctggctgattttttgtattttagtagagatggggtttcaccatgttgcctgggctggttgcaaactcttgagctcaggcagtctgcctgcctcagcctcctagagtgctgggattacagacatgagccactgcgcctggcccagcgttacttttcttgataagaatttacagataagacactcagagagacattgtgtcattctctatcatcactccttttaccatgtgaatagatttctctgtcttggcattcttgctgattcagacttattagttaaatcggatttttctggaatttgaatcagatttcatttgggcaacaacagcagggcagggtttctaaagcaggtttccccactcatctaggttgtcttgaaaggaggatagagccacttacagttttatttgcttcagtgtttaatgtagatattatgtggcctgctgtttctgttgtcttgtatgtctgtgtatgcatgacatttggtccctttctttgaaatgcagcccctcttacgggttttttagtggtggtggtttgttttgtttcatatcatatcacagtttgcatggactgattatcttagttttatgataaaactagaagaaatgagggtttttttttaatgaatagattttgaattgattctttagaccccccaaaaagtgtcagttctaatggggaaatatattccatcaagtcaaagagtaataactgctcactagttgctttttagcatctctggtcttatcagccatgctaaatcactttaattagccttagtgattctgtggttgagtaatctctacttgaactaaacaaacatcttttgtttctgtgtgtgtgtgctgtgtgtgagagtgtgcgcgcgcgtgtgtgtgtgtgtgttttaatggagtgttgccttgaatgaatcactgggaagccagccatggtaagggctggtgaggttggggagaaaggaagagctttatgtttctctgttgtttggaccctacttggcatgaaaaaggaagctcagttccagccccttggatcaacgaaaatcagaggattctggaaaggcagccaacttgcgcctcttagaaggatcagaggcaagatgagatggcagcctgcagagtaaatgcttgaaaaaagaggggtgattttcaatggtttgcttaagtcactgttttctagacaccaaaatagctgttttgaaactgttttaattgcttgggtagcaatgtgcactttaaacaatttggatattggaatgcagtctcatactgagtgatttgagtagaaccactgatgatgattttataaattgtgtgaagcgaatttcccatttggcaatcatttactgatttgcagtgatgaatatttttatgagaatttaaacttagcaagaatggccatggaggcaaagccttcacccagacccatcccactctcctgtgatccaggtggtccaggagcccaggacaggccttttctgtgggccctggccagacagggttacctggtgaggtgcagagagtccctctagtggccattttgtatggtagttgctaatgcagaacaagttctgtcttgggcttaaattgactgaagactttagggggaaagaatagtaaatgcatgtaaacaaatggggacactctgttcaggagaataatccgactggcatttgtggcagtttttgaaatgtaaatgtattcatgtgtgttcttgtaaatacgtgtcgctcagatgtcctttgaagtgggagggaatcaatccggggataatttcaaatggaatagagtattttgatattgttcattcagagggtgatgtgtacatatctatattgtatatatgtgatgaaaatgcattggctttttgtgcagatacaacctgctctctgtactgctgttggacagtcagtgttttaatgtttctacagttttgctattgcacgatttcatattttgcctctatgatgaacggcaaccattatttgtaactgtttagtgctgtaaagaaatattccaagtgtcattaggattgttgctgccagaactgatatgcatgaatggcacttaaaataaatatattatgttaactctatttacaaca

SEQ ID NO: 12202 - DNA, 3575 bp, Homo sapiens
tgttcaaaaggccaagaccacaattttagcatctgaaaggagtaatattttcttccccctttctccttattttacctgcttaatttactttcagagtaacaattctgttaagattttagtgctccatttgttttatttgtggtaacatgttttccctctttctgcttttaatctgattaggaaatttgtacatagattctaggcaaaatctccctccttcagtgatgccaccccctggttatcctcatatcccacaggcactcagcactccaggaacaacgatggcaggccatcacagagccatgaaccagcagcacatgatgccttcccaagccttccagatgcggcgttccctgcctccagatgacatccaggatgactttgattgggattcaattgtgtagggcttgtttctgcaagacaccagaccctaacgttacctttctgtgcagtgaagggaaaggtttaagagaatccagttgagaaaacaaacttgctaatcactttaccaatgttatcaaaattacttttgaagacaatcagaaggattttagctggataacttactgcttttatctgacccaagcaagtactacatgtttgtctccctgccagctgccctatgtagctcctaactgttgtgtgatttggacggctttttgcatatttgtgtcagtttgatgttaaccacaagtgccagactgatttttcagacggagcctattttgctgcaagcagtttatataaagatacatatgtgtaaatatatgtacaaaaattactgaaaggcttcagttttttctaattggattattatgtcttgaaagttattgtcagtttttattccttgttaggctattttctgcaggatgcttttaactgatgtaggaaactgaaaggaaatagattttttccaaaacccagttccccttatttaatcttttttagaaatgtgggtaatgaattctatctaataagtcaaggaaaccagaatttgacacactccaacaatccaaaggggcatgttgctcctgagcagcatgaagaactgaccaaattggttttgatgcttgggggatcatagagtatttatgtctgcttttctaaatctgcattataatagctctaaaatttgttgattggtaagaaattgggcattgcttggctctttaaacacatcagtgcttccacattcacctatgtatttattattcaaaagtgtcattttaatatttattgctaccttctgtgaatgcttagctcctgtcgggttcattaaggagaaatgtgtctgaaagcacagaactattattatttttttctttttttgagatggagtcttgccctgttgcccaggctggagtgcagtggcacgatctcggctcactgcaacctccgcctcccgggttcaagcaattctcctgcctcagcctcccgagtagctgggagtgcaggtgcacaccgccatgcctggctgattttttgtattttagtagagatggggtttcaccatgttgcctgggctggttgcaaactcttgagctcaggcagtctgcctgcctcagcctcctagagtgctgggattacagacatgagccactgcgcctggcccagcgttacttttcttgataagaatttacagataagacactcagagagacattgtgtcattctctatcatcactccttttaccatgtgaatagatttctctgtcttggcattcttgctgattcagacttattagttaaatcggatttttctggaatttgaatcagatttcatttgggcaacaacagcagggcagggtttctaaagcaggtttccccactcatctaggttgtcttgaaaggaggatagagccacttacagttttatttgcttcagtgtttaatgtagatattatgtggcctgctgtttctgttgtcttgtatgtctgtgtatgcatgacatttggtccctttctttgaaatgcagcccctcttacgggttttttagtggtggtggtttgttttgtttcatatcatatcacagtttgcatggactgattatcttagttttatgataaaactagaagaaatgagggtttttttttaatgaatagattttgaattgattctttagaccccccaaaaagtgtcagttctaatggggaaatatattccatcaagtcaaagagtaataactgctcactagttgctttttagcatctctggtcttatcagccatgctaaatcactttaattagccttagtgattctgtggttgagtaatctctacttgaactaaacaaacatcttttgtttctgtgtgtgtgtgctgtgtgtgagagtgtgcgcgcgcgtgtgtgtgtgtgtgttttaatggagtgttgccttgaatgaatcactgggaagccagccatggtaagggctggtgaggttggggagaaaggaagagctttatgtttctctgttgtttggaccctacttggcatgaaaaaggaagctcagttccagccccttggatcaacgaaaatcagaggattctggaaaggcagccaacttgcgcctcttagaaggatcagaggcaagatgagatggcagcctgcagagtaaatgcttgaaaaaagaggggtgattttcaatggtttgcttaagtcactgttttctagacaccaaaatagctgttttgaaactgttttaattgcttgggtagcaatgtgcactttaaacaatttggatattggaatgcagtctcatactgagtgatttgagtagaaccactgatgatgattttataaattgtgtgaagcgaatttcccatttggcaatcatttactgatttgcagtgatgaatatttttatgagaatttaaacttagcaagaatggccatggaggcaaagccttcacccagacccatcccactctcctgtgatccaggtggtccaggagcccaggacaggccttttctgtgggccctggccagacagggttacctggtgaggtgcagagagtccctctagtggccattttgtatggtagttgctaatgcagaacaagttctgtcttgggcttaaattgactgaagactttagggggaaagaatagtaaatgcatgtaaacaaatggggacactctgttcaggagaataatccgactggcatttgtggcagtttttgaaatgtaaatgtattcatgtgtgttcttgtaaatacgtgtcgctcagatgtcctttgaagtgggagggaatcaatccggggataatttcaaatggaatagagtattttgatattgttcattcagagggtgatgtgtacatatctatattgtatatatgtgatgaaaatgcattggctttttgtgcagatacaacctgctctctgtactgctgttggacagtcagtgttttaatgtttctacagttttgctattgcacgatttcatattttgcctctatgatgaacggcaaccattatttgtaactgtttagtgctgtaaagaaatattccaagtgtcattaggattgttgctgccagaactgatatgcatgaatggcacttaaaataaatatattatgttaactctatttacaaca

SEQ ID NO: 12203 - DNA, 1805 bp, Homo sapiens
gggacaacagaggatcccagacaacagcagggcagggtttctaaagcaggtttccccactcatctaggttgtcttgaaaggaggatagagccacttacagttttatttgcttcagtgtttaatgtagatattatgtggcctgctgtttctgttgtcttgtatgtctgtgtatgcatgacatttggtccctttctttgaaatgcagcccctcttacgggttttttagtggtggtggtttgttttgtttcatatcatatcacagtttgcatggactgattatcttagttttatgataaaactagaagaaatgagggtttttttttaatgaatagattttgaattgattctttagaccccccaaaaagtgtcagttctaatggggaaatatattccatcaagtcaaagagtaataactgctcactagttgctttttagcatctctggtcttatcagccatgctaaatcactttaattagccttagtgattctgtggttgagtaatctctacttgaactaaacaaacatcttttgtttctgtgtgtgtgtgctgtgtgtgagagtgtgcgcgcgcgtgtgtgtgtgtgtgttttaatggagtgttgccttgaatgaatcactgggaagccagccatggtaagggctggtgaggttggggagaaaggaagagctttatgtttctctgttgtttggaccctacttggcatgaaaaaggaagctcagttccagccccttggatcaacgaaaatcagaggattctggaaaggcagccaacttgcgcctcttagaaggatcagaggcaagatgagatggcagcctgcagagtaaatgcttgaaaaaagaggggtgattttcaatggtttgcttaagtcactgttttctagacaccaaaatagctgttttgaaactgttttaattgcttgggtagcaatgtgcactttaaacaatttggatattggaatgcagtctcatactgagtgatttgagtagaaccactgatgatgattttataaattgtgtgaagcgaatttcccatttggcaatcatttactgatttgcagtgatgaatatttttatgagaatttaaacttagcaagaatggccatggaggcaaagccttcacccagacccatcccactctcctgtgatccaggtggtccaggagcccaggacaggccttttctgtgggccctggccagacagggttacctggtgaggtgcagagagtccctctagtggccattttgtatggtagttgctaatgcagaacaagttctgtcttgggcttaaattgactgaagactttagggggaaagaatagtaaatgcatgtaaacaaatggggacactctgttcaggagaataatccgactggcatttgtggcagtttttgaaatgtaaatgtattcatgtgtgttcttgtaaatacgtgtcgctcagatgtcctttgaagtgggagggaatcaatccggggataatttcaaatggaatagagtattttgatattgttcattcagagggtgatgtgtacatatctatattgtatatatgtgatgaaaatgcattggctttttgtgcagatacaacctgctctctgtactgctgttggacagtcagtgttttaatgtttctacagttttgctattgcacgatttcatattttgcctctatgatgaacggcaaccattatttgtaactgtttagtgctgtaaagaaatattccaagtgtcattaggattgttgctgccagaactgatatgcatgaatggcacttaaaataaatatattatgttaactctatttacaaca

SEQ ID NO: 12204 - DNA, 1207 bp, Homo sapiens
atcccaactctgcatgatgacgtagaacaaagagtaagaggcggggtggggttggggagaaaggaagagctttatgtttctctgttgtttggaccctacttggcatgaaaaaggaagctcagttccagccccttggatcaacgaaaatcagaggattctggaaaggcagccaacttgcgcctcttagaaggatcagaggcaagatgagatggcagcctgcagagtaaatgcttgaaaaaagaggggtgattttcaatggtttgcttaagtcactgttttctagacaccaaaatagctgttttgaaactgttttaattgcttgggtagcaatgtgcactttaaacaatttggatattggaatgcagtctcatactgagtgatttgagtagaaccactgatgatgattttataaattgtgtgaagcgaatttcccatttggcaatcatttactgatttgcagtgatgaatatttttatgagaatttaaacttagcaagaatggccatggaggcaaagccttcacccagacccatcccactctcctgtgatccaggtggtccaggagcccaggacaggccttttctgtgggccctggccagacagggttacctggtgaggtgcagagagtccctctagtggccattttgtatggtagttgctaatgcagaacaagttctgtcttgggcttaaattgactgaagactttagggggaaagaatagtaaatgcatgtaaacaaatggggacactctgttcaggagaataatccgactggcatttgtggcagtttttgaaatgtaaatgtattcatgtgtgttcttgtaaatacgtgtcgctcagatgtcctttgaagtgggagggaatcaatccggggataatttcaaatggaatagagtattttgatattgttcattcagagggtgatgtgtacatatctatattgtatatatgtgatgaaaatgcattggctttttgtgcagatacaacctgctctctgtactgctgttggacagtcagtgttttaatgtttctacagttttgctattgcacgatttcatattttgcctctatgatgaacggcaaccattatttgtaactgtttagtgctgtaaagaaatattccaagtgtcattaggattgttgctgccagaactgatatgcatgaatggcacttaaaataaatatattatgttaactctatttacaaca

SEQ ID NO: 12205 - DNA, 969 bp, Homo sapiens
tgcctgtgttgggttgacagtgagggtaataatgaatagtttatgctgtaatagtttatgctgtaatagtttatgctgtaatagtttatgctgtaatagtttatgctgtaatagtttatgcacagcataaactattgagtgatttgagtagaaccactgatgatgattttataaattgtgtgaagcgaatttcccatttggcaatcatttactgatttgcagtgatgaatatttttatgagaatttaaacttagcaagaatggccatggaggcaaagccttcacccagacccatcccactctcctgtgatccaggtggtccaggagcccaggacaggccttttctgtgggccctggccagacagggttacctggtgaggtgcagagagtccctctagtggccattttgtatggtagttgctaatgcagaacaagttctgtcttgggcttaaattgactgaagactttagggggaaagaatagtaaatgcatgtaaacaaatggggacactctgttcaggagaataatccgactggcatttgtggcagtttttgaaatgtaaatgtattcatgtgtgttcttgtaaatacgtgtcgctcagatgtcctttgaagtgggagggaatcaatccggggataatttcaaatggaatagagtattttgatattgttcattcagagggtgatgtgtacatatctatattgtatatatgtgatgaaaatgcattggctttttgtgcagatacaacctgctctctgtactgctgttggacagtcagtgttttaatgtttctacagttttgctattgcacgatttcatattttgcctctatgatgaacggcaaccattatttgtaactgtttagtgctgtaaagaaatattccaagtgtcattaggattgttgctgccagaactgatatgcatgaatggcacttaaaataaatatattatgttaactctatttacaaca

SEQ ID NO: 12206 - DNA, 566 bp, Homo sapiens
  misc_feature (18)..(18): n is a, c, g, or t
gtaccccgcccaattaanctcactaaagtcgttctgtcttgggcttaaattgactgaagactttagggggaaagaatagtaaatgcatgtaaacaaatggggacactctgttcaggagaataatccgactggcatttgtggcagtttttgaaatgtaaatgtattcatgtgtgttcttgtaaatacgtgtcgctcagatgtcctttgaagtgggagggaatcaatccggggataatttcaaatggaatagagtattttgatattgttcattcagagggtgatgtgtacatatctatattgtatatatgtgatgaaaatgcattggctttttgtgcagatacaacctgctctctgtactgctgttggacagtcagtgttttaatgtttctacagttttgctattgcacgatttcatattttgcctctatgatgaacggcaaccattatttgtaactgtttagtgctgtaaagaaatattccaagtgtcattaggattgttgctgccagaactgatatgcatgaatggcacttaaaataaatatattatgttaactctatttacaaca

SEQ ID NO: 12207 - DNA, 513 bp, Homo sapiens
agctcggtaacaggctcatttcagtttaaatgcatgtaaacaaatggggacactctgttcaggagaataatccgactggcatttgtggcagtttttgaaatgtaaatgtattcatgtgtgttcttgtaaatacgtgtcgctcagatgtcctttgaagtgggagggaatcaatccggggataatttcaaatggaatagagtattttgatattgttcattcagagggtgatgtgtacatatctatattgtatatatgtgatgaaaatgcattggctttttgtgcagatacaacctgctctctgtactgctgttggacagtcagtgttttaatgtttctacagttttgctattgcacgatttcatattttgcctctatgatgaacggcaaccattatttgtaactgtttagtgctgtaaagaaatattccaagtgtcattaggattgttgctgccagaactgatatgcatgaatggcacttaaaataaatatattatgttaactctatttacaaca

SEQ ID NO: 12208 - DNA, 1238 bp, Homo sapiens
  misc_feature (3)..(4): n is a, c, g, or t
  misc_feature (7)..(7): n is a, c, g, or t
ggnncgnggcccggatgttggctgctcttgctgccgccgccgctctcggggctgctcggggcctcgaccgctcgcagtaggcaccgttgggacctttcccgggggggcggagacgcacggagcggccgggggctcggccgggccgtcccggcctgcgcagcctgagattctctttgtggccagatgggtttgtatggacaggcttgtccatctgtaacttcattaaggatgacatctgaactggagagcagcctaacgtctatggactggttaccacagctcaccatgagagcagccatccaaaaatctgatgctacacaaaatgcacatggaacaggaatttctaagaagaatgcactccttgacccaaatacaactctggaccaggaagaagtccaacagcacaaagatgggaaacctccatacagttatgccagcctcattacatttgcaattaatagctcacccaaaaagaaaatgactttaagtgaaatttatcagtggatttgtgataacttcccatattatagagaggctggcagtggttggaagaattccatacgacataatctgtcattgaacaaatgtttccttaaagtgcctcgatctaaggatgaccctggaaaggggtcctactgggcaatagacaccaatccgaaggaagatgcgctgcctactcggccaaagaagagggcacgatctgtagaacgggtaacattgtataacactgatcaggatggtagtgatagcccacgcagtagccttaacaacagtctctcagaccagagtttggcatctgttaatttgaacagtgttggaagtgtgcatagttatacaccggtgacaagccatccagaatcagtctctcaatcattaactcctcagcagcaaccacagtacaaccttccagaaagagacaagcaactacttttctcagaatataattttgaagatcttagtgcctcatttcggagcctttataagtcagtttttgagcagtcacttagtcaacaaggtttgatgaacatcccttctgaatcttcccagcagtcccacacttcatgtacctatcagcactctcccagcagtacagtgagcactcacccacacagcaaccaaagcagcctgtccaacagtcatggcagtggcctcaacaccacaggcagtaattcggttgcacaggtctcactgtctcacccccaggcagcatatgctattgaacttctaactagggatag

SEQ ID NO: 12209 - DNA, 838 bp, Homo sapiens
gcgagacgccctctctcttccagccgcagccgcgttgcgggttcttccctgtggaacagtagagacctagtctgccttctttcacaagataatccttcaattatttgaaggtgattattcagcatatatctcttgagtacctgtgcatgcaagacactgtcctggatattgtgagagatccaaagattctctttgtggccagatgggtttgtatggacaggcttgtccatctgtaacttcattaaggatgacatctgaactggagagcagcctaacgtctatggactggttaccacagctcaccatgagagcagccatccaaaaatctgatgctacacaaaatgcacatggaacaggaatttctaagaagaatgcactccttgacccaaatacaactctggaccaggaagaagtccaacagcacaaagatgggaaacctccatacagttatgccagcctcattacatttgcaattaatagctcacccaaaaagaaaatgactttaagtgaaatttatcagtggatttgtgataacttcccatattatagagaggctggcagtggttggaagaattccatacgacataatctgtcattgaacaaatgtttccttaaagtgcctcgatctaaggatgaccctggaaaggtaggattcatcttcttaaaacagttgaattcttcagtatgtcacttgtcatgtttgaattaagaacttttccagttcattgaataggaacctctgcaaaatagtaagtcctcccccaccctgctctaaagcttgttagagagttttaagctgtgggaacctaactagtgtatagctgttgcacaccacagt

SEQ ID NO: 12210 - DNA, 445 bp, Homo sapiens
atcattatcctgtttaccattctcatgggagccaattcatgttactgaaacaacgtattggagcaaaacagactgtaagagcagtggctacattggcacttttctcgtgtcttccttactgcagcctggtataatggaaggagtgtggatcaagtgaactgacctcagatcctatctttgtcccctactggttgtgtgactttgggtaatttactcatcctcttaaaccgtatccccttacctataaaataaggatcataagagccactttttgaaggcttatggttgaattagtgagataatgtgtgcctggcatataggaagtacacagtaggggttagtttatttcttactttcttctctacccaagtcgctgctattattgcctctttccttccaggccatcacagagccatgaaccagcagcacatgatgccttcccaag

SEQ ID NO: 12211 - DNA, 381 bp, Homo sapiens
agtgttgcttcctggcatcatatgcttttgttatgttaataattttacaaatgtttgtcataaaatacaactgaaatctgaccataaatgatcttgctttgtttttaggtttgatgaacatcccttctgaatcttcccagcagtcccacacttcatgtacctatcagcactctcccagcagtacagtgagcactcacccacacagcaaccaaagcagcctgtccaacagtcatggcagtggcctcaacaccacaggcagtaattcggttgcacaggtctcactgtctcacccccagatgcacacacagccatctccacatcctccccatcgaccgcatggtttaccgcagcatccgcagcgttccccacacccagcaccac

SEQ ID NO: 12212 - DNA, 355 bp, Homo sapiens
gcttcaaggcattattctttctgatcagtttcaaacatttcaaatgattcttataaagaagggtaggagtggggtggatctatgtaacgaatgctttttttttttggtcttagttcaggctgctatagcagaagactgagtggctaataaataacagaaatgtattctccacagttctggaggctggaaagtccaagataagggtgtcagcatggccagattctgtgaatatttgaagagaaaacgaagaggttattaaatgtgtttgggaatatcataattataataggtaagcaatattcatgttgttactattgtgtcttttcctttgtaattattaggaaagctagtggaa

SEQ ID NO: 12213 - DNA, 1194 bp, Homo sapiens
ggtgcaatactgtccacaggtaagataattaaattagctttgtttttaaaagaaaaatcttactagattcttatacaaagtgtggcaaatataaaacttgcttgaaaatacagaaattaaatttttaagagagttaatggtaagtaaacaattttaaagttaattttctatgatatacttacagcacaacttatatttccatgcagaatcttttatttttaagtgtgagtgttaaaggttacaaaataatgaaatgacttcagtggatttaaaattttgaaaaataatgtcttttctatattgattttacaatttggagaaatttttcactcattttttatatattttttagtgggagaggtttagtctacagtttttatttttagtcaccaaactgtagccaactcttgggtcattttctctgaaaaacatttggagatcatgacagcgtttggattaaaacatttctgttactttgcatgcaaactagtttactgtgttcacagagtggccagtcatgggaccataagcaacacctgctctttgagtgtctttcataccgttaccatcagcaccagaaactccaggtgccccaagcttaaagtaaaaatcctaaagtacgttggctcctcccatgcaatgtgctgggtccaaaccatgctgttaaatatcagaagtttctatggttatgattaaaaaattaaatgacaataatagccccaaaactatatatttttgatactatttaaccaagattatcacaaagacacagtatttgacacattgttattcttctatgttttataaatattttaatgtgacaggtagaatctgtactttttctgtagaacgtaatattttgaagtatatatatagttaaattattatttctaggtaattaataatttatctcacattggtcagacatgatggctcatgcttgtaatcccagcaatttgggaggccgaggcaggcagatcacatgaggtcaggagttcgggaccagcctggcgaccatggggaaaccctgtctctactaaaaatacaaaataagcagcgtgtggtgacacatgcctgtaatccagctaccctggaggctaaggcaggaaaatggctcaaatctgggaggtggttgttgcagggagccgagattgcaccactgcactccagactgggggacagagtgactatcaa

SEQ ID NO: 12214 - DNA, 436 bp, Homo sapiens
gtcgtccctggctgttggggaggactttgtctgtctgactgccgctgggctgccttgccccagctccctggggtcctttgctccgtaatccatcagctcttcttttctcttcttcttactcatagtataagacccgactgcccattttttggagatgactaattaattagtaaaatatttggctgggcgcggtggctcacgtctgaaatcccagcactttgggatgcagaggcaggcagatggcttgagttcaggaagttggagaccagcctaggcaacatggtgaaaccctgtctctaccaaaaatacaaaaacttagccaggtgtggtggggcgtgcctgtagtcccagccacttaggaggctgaggcacaagaattgcttgaacccgggaggtggaggttgtagtgagccaagatcgtgcagctgcactccag

SEQ ID NO: 12215 - DNA, 894 bp, Homo sapiens
gaaagaagtcacacatacagtaaaaataattagagaggacctagttcatattgagcaatcttccccaaaccctgaaacaggtcttctttctaacaccagaggtatcttgagtgagtccaacccctgcagtcccctctgtctggaatagatggaggaagtttgctccagccttagaacagcatgggctggcaagcgttctcagagaggtctcgacttcaactctaaagggcctgaggaatatgtgcaactgggtcgggttaaggccaagctgaatcacatgaccagggctctcaccagcgccaaagtcagtggaaggatatcagtccccagagctctgtcacaggccatggatgctccatggaggggtggtgagcatatgaataagaatcaggagaaacatcggtaatggacaggaggcataaataaacaatgtccaccgtcctctaaaacccaggaaagttctcattcaaaagacgatgtcttgaaggaaacataggtacaaatctttgtgactttggattagacattttttaagtaggcacaaacaacccgaaaaatagataaatggacttcattaaaattaaaaacttatatgcttcaaaggacactgtcaaggaagtgaaaagataatccacataatgggagaactatttccaaattatatgtttgacacaggtctagtacctagagtatataaggaattcatataactgagcaataaacgacaaccacatttaacaatggggaaaaaagctgtgagtagaggtttctctaaaggaaacactcaaatggccaagaagcacatgcaaagatgttcaatgtttttcgtcattaggaaaatgtaaatttaaaccaaaatgagataccacttcacacccagcagtatgacttaag

SEQ ID NO: 12216 - DNA, 865 bp, Homo sapiens
cagcatcatatttaaaaaatggacagagatagaaacatagttacagatttaaaaggttctgttgaatattatgcttttttctaatatgtttgaaaatttaaacaaaatggtttttaaggaaaatatacatcaatattgactccaagaaaattaggactcttcaaagactctcataaacacagagaacagggaaaaattagcatgtgatcagttaactattactaatgaagcaccaaatccagtttctttctaaggaaaactttatcaaatgttcaaggaactatttcagttatatagaagtacacatccttggctcacgcctgtaatcccagcactttgggaggctgagatggaaggatcatttgaggccaggagcttgagaccagcctggccaacatgttgaaaccccatttttactcaaaaatacaaaacttagccaggcatggtggcacatgcctgtaatcccagctactggggaggctgaggcaggagaatcacttgaatgcaggaggtggaggttgcagtgagccaagatcacgccatggcacttcagcctgagcgacagaatgagactattaaaaaaaaaaaaaaaaagtccacagtgtagctttgtttggggttaagttagtgttttgaaatgggccttccctgtgctcaaaacatgctcagcaagcagctccccacgctggacagatcgcatatgtggaaggatgaagtttatgtctgtagaactgttattttatgccccacttccttttttcttagatcctgtgtagacgggtctctctgaacattgtgttactttactttactggcataaggaagtaaaatatttcataataaatttgagaaaagtagagtgagc

SEQ ID NO: 12217 - DNA, 450 bp, Homo sapiens
ccatcaaccctaaatttattatgtgggcttatttgagggcactgtaatcccagctactggggaggctgaggcaggagaatcacttgaatgcaggaggtggaggttgcagtgagccaagatcacgccatggcacttcagcctgagcgacagaatgagactattaaaaaaaaaaaaaaaaagtccacagtgtagctttgtttggggttaagttagtgttttgaaatgggccttccctgtgctcaaaacatgctcagcaagcagctccccacgctggacagatcgcatatgtggaaggatgaagtttatgtctgtagaactgttattttatgccccacttccttttttcttagatcctgtgtagacgggtctctctgaacattgtgttactttactttactggcataaggaagtaaaatatttcataataaatttgagaaaagtagagtgagc

SEQ ID NO: 12218 - DNA, 399 bp, Homo sapiens
cgcctgaggcagctgctactccgtgtctctcacagcgtctgtctcccgagtcctcagttgccaatggatgtggcagcccaccccgcaatctgcacagatccccacaccagtgagacaacacagagtccactgtagctgtctccaatacttgaatttttccaaggggaatgatccttccctgaatcatggcttccaagattccctgcccgccttggatcccaagcctcgaaggggaattctgagagctacctgctgctgactttggcttaaggggaggctgtttggtagaaaacaaagagagacagtggagagaggcaagctgggctcaaaggcaggacttatcatcaggcctgtcatcatccctgtggtgttggctacaaattagggagatggcatctg

SEQ ID NO: 12219 - DNA, 303 bp, Homo sapiens
tttttttttgagacagggtttagctgggtcacccaggctggaatgcagaggtgtaggcatggctcactgcagcctggagctcccaggctcaaatgatcctcctgcctcaataccctgagtagctgggacgacaggcactgccaccacgcccagctaaaaacatgaatttcaaagctatataaacctttgctatttcataacttaggtccactaagagaaaagcaagctaaaaatagggccaagggaagaatgtcatcatattcactttgcaaactatgagaaccaatacaaatagcaagacac

SEQ ID NO: 12220 - DNA, 683 bp, Homo sapiens
tgatggtggaacatttaaatgcagctacttgtagcttttggaagtgacgggtggatctgcagtggggaagaagaacgccaggaaagacaagtgaggtttctgggtctctgcaagaataatttccagacacaagccctcccaggttcagtgtcgggaaatgaaagcagcatatgcaaaatgcacggcagaactgaatttccaattcactacagacatgctttggaaaacatgaaagagctatttttggtccagtgatcgattagggttgctatggcaataagaaacacttacaggaacaaaatgaaatgtaagcaaaccaaagtcttaaagagaaagggtcagacacattggggatttcatagtcagtttctgggtggtgctggcagcccttatttctgtctcagcacctgcatagggagagagacgatagtggctgcagtgaatgggggccctggggatgggtctgaggctctctagggcactgcacttcagaagcaggaagtgcgaaacttctggaagaatgtacaccgctcactttgaagactgtcattattgtcatcaaaggatactgtatttccacagcacctagcctgtggcaaaaacgtaagctaaaatgtattaatcctaccctatcccactttacaatgtaaaagaaaaataaaagtattctctatgacagtgta

SEQ ID NO: 12221 - DNA, 354 bp, Homo sapiens
ggcttgataaacaaagtgttaatttctggtcataaagagatattttagacaaattggggaggtggataattccttatttttccagagaccatgtctatgcctctcactttgcttttggccattgctgattgatctcaggattaagaaatcagatgtaagatgggctgactagattgttttctggaaaactggaaacccaaagggagggagaatgactgtacagtgatggaaggtggttggaaccaccctgtcttatagaagcagtgccctagggagaaatctgtgagctcctgctgctgaaataccggtgctgctcaatttccatgctttctgagcttagtgttttggctcttc

SEQ ID NO: 12222 - DNA, 579 bp, Homo sapiens
ggataacacagctgattatttgtaaagctgagattcttgaatacagaggtttgtggcttcaaagggctttctcccaaactctgtactgtgctgcctctgtgtacaaggttgattcttgcagaattgtttaaggaactgaaaactaaaatgtacatttgaataaggttggttaaataaggagtgtcacacacttgatgtgctgatgtgtacatccagggggtttcttcctaatagtaagggacacagcataattgaagtgcatgacgagcccccaaataagggcaagaataaactaagtaaaaattatagtacagtaattataaaaagttcaatatgtgccagtatttacaaccagtatataatgtacttaatagagctcatacagtttggagaggaaaatgtcctaaagtaaataggcaacaaaagtgagtaactgagctttaaaaagcaaatttaaatagtatgtcaagttggcaatttttcagtgagacctttcatatagtgctggtggaagtgtaagtttatggttttctataaagttgtttagcaataaataaaaactttgacgtttggtgaaat

SEQ ID NO: 12223 - DNA, 944 bp, Homo sapiens
taaaataaaataatggctaaaaatagtgacaagacttctaaacatagttacaaaaataacaaatttgcaaaatgattattttaagaaggtatgattttagttgctagctaactaatataactacatagatttataaattaatcaccaattagctatcctcatgatttaagagtgatacccacaagtagccatttgtaatactgttttttagggagtaggatagagagaatgagagtggaaggaaggcactgaagattaattgcatggaatgtacctcactttctactgttcttactcatcttcacagtaactggtagacaaaaagttaagagaaaaactgaaacagagctgcttttgcaactttgttcttgtcatatcttgccctgagattctgagggaataatttattttattttttagacagggtctcactctgtcacccaggcaggaatgtggtggcacagctcactgcagccttgacctcctgagctcaggagatcctcccacctcagcctcatgagtagctgggacgagaggcacacaccaccacacccagctaattttttaaaattattatttgtagagatggagtctcactacattgcccaggctggtcttgaactcttgggctcaagcgatcctctagctttggctttccaaagattaccagcatcatccacagcatctggcccagagggaatattttaaatgctctcctctctctggcttaccctcaagctggcttaacttcagacactgagaagtgagatcacttactaaacatgaagagagctgcattagtctctcatttgtggatacttcctgctccggcctacagttttagggttcccccaaatgaccatctcctcagagcttattctttcatttgccaaacagttgtctcatacgctatttgtgtagaatacagtgggagacaccaagtc

SEQ ID NO: 12224 - DNA, 562 bp, Homo sapiens
gagctggagccggagccaagggagtccaggctgccgggggctgcagacatggagggccagagcagcaggggcagcaggaggccagggacccgggctggcctgggttccctgcccatgccccagggtgttgcccaaactggggcaccctccaagacagagaaactgaggcgctgggcagagaggtacttgcctaaggtcacacagagctgggctttgaatctacacagccagtctcagctcccagctcttgctcctgagtggagctctgggaatgggtggactcaagttttcagctcccagcaaagaagaacgcagccctaggaccctcggaaccaaggttggctctggcacctgtagggccacgggcagctatgtcagcttcctcggaaggaccgaggctggctctggcatctccccgaccaatcctggctccactgtgtacccctgaagggcagaaaacagctactgcccaccgcagctccagcctggccccaacatctgtgggccagctggtgatgtctgcctcagctggaccaaagcctcccccagcgaccacaggctc

SEQ ID NO: 12225 - DNA, 440 bp, Homo sapiens
gagctggagccggagccaagggagtccaggctgccgggggctgcagacatggagggccagagcagcaggggcagcaggaggccagggacccgggctggcctgggttccctgcccatgccccagggtgttgcccaaactggggcaccctccaaggtggactcaagttttcagctcccagcaaagaagaacgcagccctaggaccctcggaaccaaggttggctctggcacctgtagggccacgggcagctatgtcagcttcctcggaaggaccgaggctggctctggcatctccccgaccaatcctggctccactgtgtacccctgaagggcagaaaacagctactgcccaccgcagctccagcctggccccaacatctgtgggccagctggtgatgtctgcctcagctggaccaaagcctcccccagcgaccacaggctc

SEQ ID NO: 12226 - DNA, 187 bp, Homo sapiens
  misc_feature (4)..(4): n is a, c, g, or t
  misc_feature (22)..(22): n is a, c, g, or t
  misc_feature (39)..(39): n is a, c, g, or t
  misc_feature (61)..(61): n is a, c, g, or t
acanaccaattgggcgacaaangtggccaaaattgatangaaattcgaagtagtggccatnagaagtctcagttaagtaaacaatcagcaaagccccacccaggcccccatctgggatgatgggagagctctggcagatgtcccaatcctggaggtcatccattaggaattaaattctccagcctca

SEQ ID NO: 12227 - DNA, 1755 bp, Homo sapiens
cccgctcccagtgcctcacctcctggcctaagccccgcccatgagccatccgaccctgcctccctagggtaacaagggtggcgtgagcgtgcgcctggcggccttcgggcacatgctctgcttcctgaactgccacttgcctgcgcatatggacaaggcggagcagcgcaaagacaacttccagaccatcctcagcctccagcagttccaagggccgggcgcacagggcatcctggatcatgacctcgtgttctggttcggggacctgaacttccgcattgagagctatgacctgcactttgtcaagtttgccatcgacagtgaccagctccatcagctctgggagaaggaccagctcaacatggccaagaacacctggcccattctgaagggctttcaggaggggcccctcaacttcgctcccaccttcaagtttgatgtgggtaccaacaaatacgataccagtgccaagaaacggaagccagcttggacagaccgtatcctatggaaggtcaaggctccaggtgggggtcccagcccctcaggacggaagagccaccgactccaggtgacgcagcacagctaccgcagccacatggaatacacagtcagcgaccacaagcctgtggctgcccagttcctcctgcagtttgccttcagggacgacatgccactggtgcggctggaggtggcagatgagtgggtgcggcccgagcaggcggtggtgaggtaccgcatggaaacagtgttcgcccgcagctcctgggactggatcggcttataccgggtgggtttccgccattgcaaggactatgtggcttatgtctgggccaaacatgaagatgtggatgggaatacctaccaggtaacattcagtgaggaatcactgcccaagggccatggagacttcatcctgggctactatagtcacaaccacagcatcctcatcggcatcactgaacccttccagatctcgctgccttcctcggagttggccagcagcagcacagacagctcaggcaccagctcagagggagaggatgacagcacactggagctccttgcacccaagtcccgcagccccagtcctggcaagtccaagcgacaccgcagccgcagcccgggactggccaggttccctgggcttgccctacggccctcatcccgtgaacgccgtggtgccagccgtagcccctcaccccagagccgccgcctgtcccgagtggctcctgacaggagcagtaatggcagcagccggggcagtagtgaagaggggccctctgggttgcctggcccctgggccttcccaccagctgtgcctcgaagcctgggcctgttgcccgccttgcgcctagagactgtagaccctggtggtggtggctcctggggacctgatcgggaggccctggcgcccaacagcctgtctcctagtccccagggccatcgggggctggaggaagggggcctggggccctgagggtggggtaggcagatgggccaaggtgaccaccattctgcctcaatcttttgcaagcccacctgcctctctcctgctgctcctccagctgtatctgcacctgcctctctgtcctggccaggggtggacaactggggtcccccaaaactcagtcctggcacctcaactgtgacaatcagcaaagccccacccaggcccccatctgggatgatgggagagctctggcagatgtcccaatcctggaggtcatccattaggaattaaattctccagcctca

SEQ ID NO: 12228 - DNA, 1505 bp, Homo sapiens
gagctggagccggagccaagggagtccaggctgccgggggctgcagacatggagggccagagcagcaggggcagcaggaggccagggacccgggctggcctgggttccctgcccatgccccagggtgttgcccaaactggggcaccctccaaggtggactcaagttttcagctcccagcaaagaagaacgcagccctaggaccctcggaaccaaggatcactgtggtcacatggaacgtgggcactgccatgcccccagacgatgtcacatccctcctccacctgggcggtggtgacgacagcgacggcgcagacatgatcgccatagggttgcaggaagtgaactccatgctcaacaagcgactcaaggacgccctcttcacggaccagtggagtgagctgttcatggatgcgctagggcccttcaacttcgtgctggtgagttcggtgaggatgcagggtgtcatcctgctgctgttcgccaagtactaccacctgcccttcctgcgagacgtgcagaccgactgcacgcgcactggcctgggcggctactggggtaacaagggtggcgtgagcgtgcgcctggcggccttcgggcacatgctctgcttcctgaactgccacttgcctgcgcatatggacaaggcggagcagcgcaaagacaacttccagaccatcctcagcctccagcagttccaagggccgggcgcacagggcatcctggatcatgacctcgtgttctggttcggggacctgaacttccgcattgagagctatgacctgcactttgtcaagtttgccatcgacagtgaccagctccatcagctctgggagaaggaccagctcaacatggccaagaacacctggcccattctgaagggctttcaggaggggcccctcaacttcgctcccaccttcaagtttgatgtgggtaccaacaaatacgataccagtgccaagaaacggaagccagcttggacagaccgtatcctatggaaggtcaaggctccaggtgggggtcccagcccctcaggacggaagagccaccgactccaggtgacgcagcacagctaccgcagccacatggaatacacagtcagcgaccacaagcctgtggctgcccagttcctcctgcagtttgccttcagggacgacatgccactggtgcggctggaggtggcagatgagtgggtgcggcccgagcaggcggtggtgaggtaccgcatggaaacagtgttcgcccgcagctcctgggactggatcggcttataccgggtgggtttccgccattgcaaggactatgtggcttatgtctgggccaaacatgaagatgtggatgggaatacctaccaggtaacattcagtgaggaatcactgcccaagggccatggagacttcatcctgggctactatagtcacaaccacagcatccgtagcggcaaaatgattatgagggcgtgatcatgaaaggtgataagctcttctatgcgtccgtagcggggtac

SEQ ID NO: 12229 - DNA, 802 bp, Homo sapiens
gagctggagccggagccaagggagtccaggctgccgggggctgcagacatggagggccagagcagcaggggcagcaggaggccagggacccgggctggcctgggttccctgcccatgccccagggtgttgcccaaactggggcaccctccaaggtggactcaagttttcagctcccagcaaagaagaacgcagccctaggaccctcggaaccaaggatcactgtggtcacatggaacgtgggcactgccatgcccccagacgatgtcacatccctcctccacctgggcggtggtgacgacagcgacggcgcagacatgatcgccatagggttgcaggaagtgaactccatgctcaacaagcgactcaaggacgccctcttcacggaccagtggagtgagctgttcatggatgcgctagggcccttcaacttcgtgctggtgagttcggtgaggatgcagggtgtcatcctgctgctgttcgccaagtactaccacctgcccttcctgcgagacgtgcagaccgactgcacgcgcactggcctgggcggctactggggtaacaagggtggcgtgagcgtgcgcctggcggccttcgggcacatgctctgcttcctgaactgccacttgcctgcgcatatggacaaggcggagcagcgcaaagacaacttccagaccatcctcagcctccagcagttccaagggccgggcgcacagggcatcctggatcatgacctcgtgttctggttcgggacctgaacttccgctattatgagcagtggggaactctagatcagcacacaac

SEQ ID NO: 12230 - DNA, 714 bp, Homo sapiens
gagctggagccggagccaagggagtccaggctgccgggggctgcagacatggagggccagagcagcaggggcagcaggaggccagggacccgggctggcctgggttccctgcccatgccccagggtgttgcccaaactggggcaccctccaaggatcactgtggtcacatggaacgtgggcactgccatgcccccagacgatgtcacatccctcctccacctgggcggtggtgacgacagcgacggcgcagacatgatcgccatagggttgcaggaagtgaactccatgctcaacaagcgactcaaggacgccctcttcacggaccagtggagtgagctgttcatggatgcgctagggcccttcaacttcgtgctggtaacgcacccctcaccccctggacagccagagaccctgctgaattcctggctccagctgtaccctggctcactgtggggcccgctgggcctctgtggctgggtccgtgacatgggtgggtggaggagcagacctgaaggtgggcgcgagggcgggggagttgtgttctgtcccccagccacgtggcctcccgctgcaggtgagttcggtgaggatgcagggtgtcatcctgctgctgttcgccaagtactaccacctgcccttcctgcgagacgtgcagaccgactgcacgcgcactggcctgggcggctactgggtgagcctgtgagcaggcccag

SEQ ID NO: 12231 - DNA, 2243 bp, Homo sapiens
gagctggagccggagccaagggagtccaggctgccgggggctgcagacatggagggccagagcagcaggggcagcaggaggccagggacccgggctggcctgggttccctgcccatgccccagggtgttgcccaaactggggcaccctccaaggtggactcaagttttcagctcccagcaaagaagaacgcagccctaggaccctcggaaccaaggatcactgtggtcacatggaacgtgggcactgccatgcccccagacgatgtcacatccctcctccacctgggcggtggtgacgacagcgacggcgcagacatgatcgccatagggttgcaggaagtgaactccatgctcaacaagcgactcaaggacgccctcttcacggaccagtggagtgagctgttcatggatgcgctagggcccttcaacttcgtgctggtgagttcggtgaggatgcagggtgtcatcctgctgctgttcgccaagtactaccacctgcccttcctgcgagacgtgcagaccgactgcacgcgcactggcctgggcggctactggggtaacaagggtggcgtgagcgtgcgcctggcggccttcgggcacatgctctgcttcctgaactgccacttgcctgcgcatatggacaaggcggagcagcgcaaagacaacttccagaccatcctcagcctccagcagttccaagggccgggcgcacagggcatcctggatcatgacctcgtgttctggttcggggacctgaacttccgcattgagagctatgacctgcactttgtcaagtttgccatcgacagtgaccagctccatcagctctgggagaaggaccagctcaacatggccaagaacacctggcccattctgaagggctttcaggaggggcccctcaacttcgctcccaccttcaagtttgatgtgggtaccaacaaatacgataccagtgccaagaaacggaagccagcttggacagaccgtatcctatggaaggtcaaggctccaggtgggggtcccagcccctcaggacggaagagccaccgactccaggtgacgcagcacagctaccgcagccacatggaatacacagtcagcgaccacaagcctgtggctgcccagttcctcctgcagtttgccttcagggacgacatgccactggtgcggctggaggtggcagatgagtgggtgcggcccgagcaggcggtggtgaggtaccgcatggaaacagtgttcgcccgcagctcctgggactggatcggcttataccgggtgggtttccgccattgcaaggactatgtggcttatgtctgggccaaacatgaagatgtggatgggaatacctaccaggtaacattcagtgaggaatcactgcccaagggccatggagacttcatcctgggctactatagtcacaaccacagcatcctcatcggcatcactgaacccttccagatctcgctgccttcctcggagttggccagcagcagcacagacagctcaggcaccagctcagagggagaggatgacagcacactggagctccttgcacccaagtcccgcagccccagtcctggcaagtccaagcgacaccgcagccgcagcccgggactggccaggttccctgggcttgccctacggccctcatcccgtgaacgccgtggtgccagccgtagcccctcaccccagagccgccgcctgtcccgagtggctcctgacaggagcagtaatggcagcagccggggcagtagtgaagaggggccctctgggttgcctggcccctgggccttcccaccagctgtgcctcgaagcctgggcctgttgcccgccttgcgcctagagactgtagaccctggtggtggtggctcctggggacctgatcgggaggccctggcgcccaacagcctgtctcctagtccccagggccatcgggggctggaggaagggggcctggggccctgagggtggggtaggcagatgggccaaggtgaccaccattctgcctcaatcttttgcaagcccacctgcctctctcctgctgctcctccagctgtatctgcacctgcctctctgtcctggccaggggtggacaactggggtcccccaaaactcagtcctggcacctcaactgtgacaatcagcaaagccccacccaggcccccatctgggatgatgggagagctctggcagatgtcccaatcctggaggtcatccattaggaattaaattctccagcctca

SEQ ID NO: 12232 - DNA, 2325 bp, Homo sapiens
gagctggagccggagccaagggagtccaggctgccgggggctgcagacatggagggccagagcagcaggggcagcaggaggccagggacccgggctggcctgggttccctgcccatgccccagggtgttgcccaaactggggcaccctccaaggtggactcaagttttcagctcccagcaaagaagaacgcagccctaggaccctcggaaccaaggatcactgtggtcacatggaacgtgggcactgccatgcccccagacgatgtcacatccctcctccacctgggcggtggtgacgacagcgacggcgcagacatgatcgccatagggttgcaggaagtgaactccatgctcaacaagcgactcaaggacgccctcttcacggaccagtggagtgagctgttcatggatgcgctagggcccttcaacttcgtgctggtaacgcacccctcaccccctggacagccagagaccctgctgaattcctggctccagctgtaccctggctcactgtggggcccgctgggcctctgtggctgggtccgtgacatgggtgggtggaggagcagacctgaaggtgggcgcgagggcgggggagttgtgttctgtcccccagccacgtggcctcccgctgcagggtaacaagggtggcgtgagcgtgcgcctggcggccttcgggcacatgctctgcttcctgaactgccacttgcctgcgcatatggacaaggcggagcagcgcaaagacaacttccagaccatcctcagcctccagcagttccaagggccgggcgcacagggcatcctggatcatgacctcgtgttctggttcggggacctgaacttccgcattgagagctatgacctgcactttgtcaagtttgccatcgacagtgaccagctccatcagctctgggagaaggaccagctcaacatggccaagaacacctggcccattctgaagggctttcaggaggggcccctcaacttcgctcccaccttcaagtttgatgtgggtaccaacaaatacgataccagtgccaagaaacggaagccagcttggacagaccgtatcctatggaaggtcaaggctccaggtgggggtcccagcccctcaggacggaagagccaccgactccaggtgacgcagcacagctaccgcagccacatggaatacacagtcagcgaccacaagcctgtggctgcccagttcctcctgcagtttgccttcagggacgacatgccactggtgcggctggaggtggcagatgagtgggtgcggcccgagcaggcggtggtgaggtaccgcatggaaacagtgttcgcccgcagctcctgggactggatcggcttataccgggtgggtttccgccattgcaaggactatgtggcttatgtctgggccaaacatgaagatgtggatgggaatacctaccaggtaacattcagtgaggaatcactgcccaagggccatggagacttcatcctgggctactatagtcacaaccacagcatcctcatcggcatcactgaacccttccagatctcgctgccttcctcggagttggccagcagcagcacagacagctcaggcaccagctcagagggagaggatgacagcacactggagctccttgcacccaagtcccgcagccccagtcctggcaagtccaagcgacaccgcagccgcagcccgggactggccaggttccctgggcttgccctacggccctcatcccgtgaacgccgtggtgccagccgtagcccctcaccccagagccgccgcctgtcccgagtggctcctgacaggagcagtaatggcagcagccggggcagtagtgaagaggggccctctgggttgcctggcccctgggccttcccaccagctgtgcctcgaagcctgggcctgttgcccgccttgcgcctagagactgtagaccctggtggtggtggctcctggggacctgatcgggaggccctggcgcccaacagcctgtctcctagtccccagggccatcgggggctggaggaagggggcctggggccctgagggtggggtaggcagatgggccaaggtgaccaccattctgcctcaatcttttgcaagcccacctgcctctctcctgctgctcctccagctgtatctgcacctgcctctctgtcctggccaggggtggacaactggggtcccccaaaactcagtcctggcacctcaactgtgacaatcagcaaagccccacccaggcccccatctgggatgatgggagagctctggcagatgtcccaatcctggaggtcatccattaggaattaaattctccagcctca

SEQ ID NO: 12233 - DNA, 453 bp, Homo sapiens
gcatggtggtgcatgcctgtaatcccagctacttgggaggctgaggcaggagaatcgcttgaactcgggaggcagaggttgcagtgagctgagatcgtaccactgcactccagcctgagtgatacagcaagactctgtctcaaaaaaaacaaaaacaaaaaacaaactccaaagtttatcttccttggaaaatcctgaaagttttctaaaagtgaatgaatgctttatttttacgactttactttgactttagatgtgtctatacgctgcttccatgactaaaagctgtatgattgccttaattatctttgtatgctggaaaaaaatggcagaaatccattttctcttgttattctgagtgttcttttctcaaatcaaagcctgtgtggtggttttcagccacctcaatcttagtggggagattctagtggggatgttattatgttctgggac

SEQ ID NO: 12234 - DNA, 504 bp, Homo sapiens
gtgatgtgtctagtcatgtctgtcttgagatcttgcttaggtttgttgtcatttccaaatctaaagatgtgtcttttatcagttttggaaaatcagcctttatttcttctaatattattttcttccctcttccattatacacagtctggtatctttggtctgatcttttagaaatttaaatagatttattttattctggtctccatttttcttaacctcttttctcatttattttgcctctttatggctcaatctgttttaatatcatttgtgtctgacttagttcactatttctgtcttcagttttataagatatgctgttctattcattgagcttttaatttcatagattatatttttatatttttaaaagttctagttttcaaaatttgctagttcatgttttgagttatgttattgtataacattttaaatatccttacaatatatgctgtttcaggtaattttaatatctgaagcctgtgtgggaggaacaaaaaaaat

SEQ ID NO: 12235 - DNA, 378 bp, Homo sapiens
agagacaggtgtgggttcctgtttgtcctcattctctcccatttcctgtccagcttttccttctgactgctagctttgctctcctttagccacttcagtcccaccactagatgtagaggccacacccttccgtaggtttctttatcagctcccaatatggtgaaaattataattcccataataaatttctttttttttttttttttgagacggagtctcgctctgtcgcccaggctggagtgcagtggcgcgatctcggctcactgcaagctccgcctcccgggttcacgccattctcctgcctcagcctcccgagtagctgggactacaggcgcccgccaccacgcccggctaattttttgtatttttagtagaggc

SEQ ID NO: 12236 - DNA, 328 bp, Homo sapiens
gtatcacgatcacaactggttattattactccctataagtataataattttgctagagacccatactgtccagtgtgccctaaatcatactgctattgtactccctttgttttgaaggactttgcaactggtattgggggagatttttttttttttgagacggagtctcgctctgtcgcccaggctggagtgcagtggcgcgatctcggctcactgcaagctccgcctcccgggttcacgccattctcctgcctcagcctcccgagtagctgggactacaggcgcccgccaccacgcccggctaattttttgtatttttagtagaggc

SEQ ID NO: 12237 - DNA, 348 bp, Homo sapiens
actataaaatggagataatagtagctattcatagagttgtgagttaaatgagttaacctatcataagcacttagaataagtacctggcatgtgataagtgtcgtgtatatctttgttattattattgataggacagtgacgaacattcatgacacagtaatttgcaatttgatgaagcatatattggaattatagggctactaatgaagaatgaggctattgctattgacacaggtcaacaaaattccaaaaaagtagtggactggcatataataggcaaacaattgatacttatacaaataattgaattatgaatgaaagaaaaattagaaataatgaaaaagagaa

SEQ ID NO: 12238 - DNA, 451 bp, Homo sapiens
ttgagtacagagagggattttcttcaacgcatctggtagaaagctagctgtgtaaaacaaaggtagtgaattgtcccttagatatactataaatgtggttttccagggactgtatttctaggatgtgtgaaaaggttatcaatctcattttctttagtatttgaaatccttttacattcgtccctaaagcattttagtataatatgaatttgtctgttaatattgaatcaggttgatcattttgaccactgccttattattctaataatcagtgttttatggttttgtcctcaaaattagttttagacaggtgtggtggctcatgctgtaatcccaacactttgggaggctgaagtgggagggtcacttgagcccaggaggtcaaggttgtgagatcacagctcactgcacctccagcctgggcaacaagagagatgagatcctgtctcaa

SEQ ID NO: 12239 - DNA, 490 bp, Homo sapiens
attcaggattcagggtctttttttgtttgctctaataatccaacgcaccatgaatcaagcttttagtctctgctgccattgtatccttccttttcctccctctgttattgatccttgccacagccactgcaacctcattgaaagagaaactgtcactttaaagaaagaaattgaagataggctgacaccatggaaactacgtcaaacagataagaaaaatggaaggaatactgaaaatgatagatgattggagagatatggagattatattcaaggatttttattaaccactgctggatttgtctatttcagtggctctcaaacagagacaattcccctctccccgaaagggacaacttagcaatgtgtaaagacatttttggttgccacactgggaggaatgctattggtatctagtgcatagaggctgggaatgctgctaaatagcctataatgctcaggacattttcccccaacccctttaaacaaa

SEQ ID NO: 12240 - DNA, 304 bp, Homo sapiens
aataaatcagaagaatgtaggaacaaggagttaataaggatagaagtagacactaatgaattagcacattaaaaaacataaatgataaaattaaaacattatttaaaatgtaaatgtataacattacaaaatatgaaaggctataggcactaatatggagatctttaaagttataaagacatttaatgttcaagtttaggccaaataaatgtgaaaatctgagaaaaataggtgattttttaaaggaaaatacaaaccaccaaacttgaagcacagttagaaaacttgtataaatcagtaacta

SEQ ID NO: 12241 - DNA, 521 bp, Homo sapiens
ttttatgtatgtataaaatgcaatgaaattaatacaaaagtaactggagataatgataataatgtgatagtgttctgcagaattataggctaggctaaaaatctcaaaagtcaagtaagttagtatttgctaaagtcatgtagctgacaatatagtgatgaaagacatatgagaaaacattgtccacatccaaaactgaacttctgtctaactaccctagtgggcctgccctccctgcacctcttattcactatgctgactaatggcatcatccacccaggtcatccaagcctaaaccttggaggtcatcttaagcaccacctccccagacctttacaactgctgaccctcagaactagtcagtcgttaaccagcttctgacattacctaaatttctcccaaacccatcccaattttgtacccaattcttctgacttaatttaagtctatcatttttgtcagaattactagatgaattcttcagtcatatgtatagatatacacgtgctccacaggttaaa

SEQ ID NO: 12242 - DNA, 773 bp, Homo sapiens
tcttcaactaacttgcaaaattggtttttgataaagccgcttatatgcggccagaatggattataaagaccattccaagaagggtagtagcaaatcccttgtaaatagttcacaagtatattaagccatccttgttcaaattatagtgtggttttgaccagactgaaccctgattggtacaggaaacttctatgataaccatccattggtgaatgcaacaactttaaacctcaaattgggcctcagtgctattcattaatttcaatattaatttaccatggtcagatctgcacgctactcaccgcttcacttcaaaacttcccctgtgtcctttaggttccaagtcatccaacttaccaacaacttactaccagaagatgacatcaattgatattctttaaggaaataggagtctccttcaaaatccaaaattttaatactggctttgtccttctattgaccttgctcacacacctttaggcttaaaagaaaatagttggaaatgcccctcaccaataccactccccagtagattggttacttgtacctcctcaaataagctttaataggtttgtatatttcaaggaacttgtccatttcatctaagttatcaactttattagcatatatttattcacaatgttcctttattagccttttaatgtcttcagaacggaaagtgacatctcttctttcttttcttagtaagtcaggctagatgtttatcacacttactaatcatttcaaaaaaccagctattgatttcatcgcag

SEQ ID NO: 12243 - DNA, 500 bp, Homo sapiens
ggtccccaggtgaggtccccaggtgtgatccccaggtgaggtccccaggtgaggtccccaggtgtgatccccaggtgaggtgaccgtcccactttgccctagggctgctccagcttcaacgctgaaagtcccaggtcacaggaaccctcctttgcccctggcagactgaggggctatcaccctattctgggaccaacagtaaagcatcacttgggaagtggatgaagtgtgaattctgggccccaccatagacctgcttaacaggatctctggcggttagggttagggtcaggtctgctgggcagtgataatgcagctaagggcggggtcctgggtccaggtttaatctgggaagggtctgggagggactgggtttaacagaagcacccaggtgccaagcactggggcagagctggaatcccgtcagacggtgggcagacctgcagccgaccaccactctctgccgaggggaggggtcctgacagtgccgtgtccaccag

SEQ ID NO: 12244 - DNA, 489 bp, Homo sapiens
gaatgcaaatgagggtgctatgccttttcctcaactacacaaagcaaatgggtaggtctagtgaaggcagagaggccagctcccttccaggaaaggctttgttctcactacctatgaaggcagcagtgttgacagtgaaagaaaccgtttctcagctctgtttgcccgctgtaggcacaacgatctatgacagagaggctgggaagcatcctttatgtctctagattctctgtgtccctcctacactagataaccatctccaaaaaccatataaccatttcctgtttgttggtctccctgggaggtttttctgccttccacctgcttgagagggcctcttcaatctgatgcagtggtgactggctgagattctcccaagtccacatgctttctaatctcctaccctatcatctgcatgtactcacatcacctctgccatctctctggtgtggttctcagaggcatgaggcagcccagtcaaagccagtc

SEQ ID NO: 12245 - DNA, 499 bp, Homo sapiens
agccttcgggctaggttgagtgagggctcttgggttagttcctgttaggccccggcgggggagtaggttgaagtctcctaagatgcccggtgggctggggcaccgggagctgtgaagggaacgtgagggggcggcgtagtggagacccacggcaggcctgaagaagagcggcggccgagcccgccttccctgcaccatgctcatagaggatgtggatgccctcaagtcctggctggccaagttactggagccgatatgtgatgctgatccttcagccttagccaactatgttgtagcactggtcaagaaggacaaacctgagaaagaattaaaagccttttgtgctgatcaacttgatgtctttttacaaaaagaaacttcaggttttgtggacaaactatttgaaagtctctatactaagaactaccttccacttttggaaccagtaaagcctgagccaaaaccactagtccaagaaaaagaagaaattaaagaagag

SEQ ID NO: 12246 - DNA, 592 bp, Homo sapiens
agccttcgggctaggttgagtgagggctcttgggttagttcctgttaggccccggcgggggagtaggttgaagtctcctaagatgcccggtgggctggggcaccgggagctgtgaagggaacgtgagggggcggcgtagtggagacccacggcaggcctgaagaagagcggcggccgagcccgccttccctgcaccatgctcatagaggatgtggatgccctcaagtcctggctggccaagttactggagccgatatgtgatgctgatccttcagccttagccaactatgttgtagcactggtcaagaaggacaaacctgagaaagaattaaaagccttttgtgctgatcaacttgatgtctttttacaaaaagaaacttcaggttttgtggacaaactatttgaaagtctctatactaagaactaccttccacttttggaaccagtaaagcctgagccaaaaccactagtccaagaaaaagaagaaattaaagaagaggtatttcaggagccagcagaggaagaacgagatggcagaaaaaagaaatatcctagtccccagaagactcgttcagaatctagtgaacgaagg

SEQ ID NO: 12247 - DNA, 438 bp, Homo sapiens
cgagactctgtctccacacagaggaacacttggcatcagggagtctgttgtctgacccgcaactaggcagcctcatacattattttcactaagagaccagtggggctggaaagggacttgtgaggtgctaagtagccagtgagagcttctgggtcctgtcgcagttttgccctttcttccctcaaaaaaaggtctctccacttctctgtgggaaaggcttgggcaagttctctggtttccaatgaggccagagaacctgtgctgatccctaacatcttcacccatcgggggcaaaataagtaaaataaaagtaatgtagcaaatgtttttataaaagtgttaatttaaattaacggactattacctattcttagagctttctcttttgtttttggcattaaaatatcctttctattataaaatgataagttggtgatt

SEQ ID NO: 12248 - DNA, 729 bp, Homo sapiens
gtagagctgatggaggagtaagggacagagaacttaagctttgggctttcttctaccagaaatgccactgcaggcaagtcacttaaccactcaaagatttagtttcttccactacaaaacaggaataacattgcctttgccaactacaaaagctcaaataagaagcatttggggcaaagactgttttgtacaatagaaatgtaagagaacttatctttaatatttaattgcactccattaggtctcttcatgtccccatggcgtggtccccaagtgacttaagatacatttggatgccatctgctcaacaagaagactgactgacaaatttcaagcacacagacagcaacatcaggggacctctctctctcccaaccctggtggcttttgattttacagaaagcaaaagcatctgataaacaaagccctgaggtagtcctgattcctcaattacccctaagtagcaacagatgctgcacagagggacttgcttcagtgaccaatgctctcagtaattagacaatggagggagaaagtaattaggtaaaccacaaagaagtagaaataaactgtatgggatatgttggtcatggatgaaagacaaattaaaaaaaagtataaaggaaacatctaggaaaaaataactaataaataatttgcttaatccatgttgaataatcaatttaagcctgtgaagttaaacctgattaaagatatcccttaattaaa

SEQ ID NO: 12249 - DNA, 458 bp, Homo sapiens
gcctactactactaaattaaaaaacggtcgacaacaaaacatacttagcatattaaagtttatgacagtcctatagtaaagcaataaataaaaactagttagctttgtttaattcagcattgcctcacttagagtatagatatcctatggaacacagtttggtaaatgctgatttagactgttacaaaattggcccctttgctgtttcatccataatttcatctataaagaaaagcttcctttcttaaaaatactttatatatggccagacgcaatagcttacacctgtaatcccagcactttgggaggccgaggcaggcggatcacaaggtcaggaaatcaaaaccatcctggccaacatggtgaaaccctgtctctactaaaatgcaaaaattatctgggcatggtgttacgtgcctgtaatcccagctacttgggaagctgaggcaggagaatcg

SEQ ID NO: 12250 - DNA, 815 bp, Homo sapiens
aaataaaaataaaaaaaaaaaaaaaaaaaaaaaaaaaaaaaaaaaaaaaaaaaaaaaaaaaaaaaaaaaaaaaagaaatctgaaacacttctgatcccaagcatttcagaaaacggatgttcatttgtgtgtgtgtgtgtgtgtaagcaggtgttgctagaaattcacttatatacaagaaaactttttgtgtacatatttgcatatatatgtacaaatgggtagaaacgatacatgattaatcttaatcgggaaggaaaagagatttagggaaggaagcagtaagtgagaacttttattctatttactcctgcacgtttaaatattgtttacagtgagtatatcaacatgtaagtgttaaaagacaataagctactagtgatttttaatataaaattaactataaaatattttaaatattagcaaataatatagcacactcatgaacctaattcccacatttgatagttgttacattttgccatgtttgtttaaaggtctaagtcataaaatcttataaagctaaaccccacccttctctttctcctctctctccaggataattactgttttatagtttgtggatatcattcccttacttgtgtttatacttttaccaagtgtgtatgtattcaaaaaacagttgttttgtgattttaaaatgtaaatgaatggcgttatgctccatgtattctgcaacttttcatcatacattaggttttggcgatttagccataatttggcatgaattcaggtcttttaagttttattccattgtaagaataaacaagtttgttcattcatgtctccattga

SEQ ID NO: 12251 - DNA, 615 bp, Homo sapiens
  misc_feature (512)..(512): n is a, c, g, or t
  misc_feature (544)..(544): n is a, c, g, or t
  misc_feature (585)..(585): n is a, c, g, or t
  misc_feature (593)..(593): n is a, c, g, or t
caccatgttgcccaggctggagtgcagtagctattcataggcacagtcatagcacactgcagcctagaatttctgacctcaagcaatcatcctgcctcagcctcctgagtagctaggactacaggtgcataccaccataaccagctttaattaaatgttttttatttggttattttttttaagttttctgtattcacacaaggggttgcccaaatataattttgctttgactattgagatctagtgaaagtggggtatatgaattctaattgcaaatatccaggctcagaggcccagcaggactttctaacacaatcttttagcggaagttagaaatggtatatagcaggagagtcagatttgagaagcatatgtagattcgaagctgggattacaggtgtaagccactgcaccctgcctattcttataatcatatatttatatttcaaatgggattttaactgggttatttaatagtttaattaggataaagtaattcagggcggggtgtnggtggctcacgcctgtaaatcccagcactttnggcagggctgagggcagggtgggttaccccgagggtccggnagtttcgnggacccagccccaacccaacgt

SEQ ID NO: 12252 - DNA, 2902 bp, Homo sapiens
caccatgttgcccaggctggagtgcagtagctattcataggcacagtcatagcacactgcagcctagaatttctgacctcaagcaatcatcctgcctcagcctcctgagtagctaggactacaggtgcataccaccataaccagctttaattaaatgttttttatttggttattttttttaagttttctgtattcacacaaggggttgcccaaatataattttgctttgactattgagatctagtgaaagtggggtatatgaattctaattgcaaatatccaggctcagaggcccagcaggactttctaacacaatcttttagcggaagttagaaatggtatatagcaggagagtcagatttgagaagcatatgtagattcgaagctgggggaatatggcaggtagtttgtacaacatctaattcagaacattaaaattaagattttagtcaaactgtgtttaagttagttcttattttcctgtagatgcatctcacagcatcagtacaataccaaaaaagcacacaagaataagaatatgtggaatttctatacctattgacaaagcacataatttaaccataaacacaaagccataggtcaacaaagaaatgaagattccagttctgaaggtgagttttctgaagccaaagtggatacatgcaaaattaatatagttttactgtatatcagttgtcaccaatcagaaatggaaaacagatcctatttataattgcaaacaaaactgtaaaatagactttttaaagtctgggaatagacttctaaaataagctataacacttaaaaaggagagatatactatgttcctagataggacaattgaaaattctggagatgacagtttttcaaaaatctattgaggccaggtgcagtggcccatgcctgtagttccagtactttgggaggcctaggtgggtggatcacctgaggttgggagtttgagaccagcctgaccaacatggagaaaccccgtctctactaaaaatacaaaattagccaggcgtggtggtgcatgcctgtaatcccagctactcgggaggctgaggcgtgagaatcgcttgaacccggtaggcagatgttgcagtgagccgagatcgcaccattgcactccagcctaggcaacaagagcgaaactccatctcaaaaatagaaaaaacatttatcgaaatcccaacaagttgacaaatatatccacataaaaatataaaacttctgtattctgtgaaagctactataaataaagtttagagaaagttatttgccacctatgtcatgattgaaatagttaattgatcctgtgaatcagttagcaaaacataactcaatggaaagataggcaaatgatacaaataagaaattcacaaaagaagaaatactaagtctctagtgatgagagaaatgtaaattaaaatgaaacatgtttgttcatcaagttgtcacaagttagacaatcatatccaatatttttaaaggttgtaagactataaggaaatagccactgtcatatcatttttaaaggaatataaattatagggccttttgtttctttgggttttttttttttagagacaagatctctccgtgttgtctaggctggactcaaacttctggactcaagcaatcctcgcaacatcattaatagctgagagtagagacttgagccaccacacctgactatagggcctttttgaaaggaaaattgacatcatcaaaattttaaatatattcagtctatttctcaaaaactcaaagaatactaataaatgtgtactcaggtatatgtacagaaattgctgtaacattataattttaaacaatttaaaacagactgagtttccaaagttagggtacaatgaaagaaaaggtggcttatttatactctggaatattttccaagagttgaaaaggatgaggatacacacacacacacacacacacacacacacacacacacacacacacagtttgggtatccctaatccagaaattcaaatgctccaaagtccaaaactttctgacccaccaacatgactgatgctcaaaggaaatggccactggaagatttcagattttcagatttggagtgctcaaccagtaagtatataatgcaaataatccaaaatacaaaaaaaaaaaaaaagaaatctgaaacacttctgatcccaagcatttcagaaaacggatgttcatttgtgtgtgtgtgtgtgtgtaagcaggtgttgctagaaattcacttatatacaagaaaactttttgtgtacatatttgcatatatatgtacaaatgggtagaaacgatacatgattaatcttaatcgggaaggaaaagagatttagggaaggaagcagtaagtgagaacttttattctatttactcctgcacgtttaaatattgtttacagtgagtatatcaacatgtaagtgttaaaagacaataagctactagtgatttttaatataaaattaactataaaatattttaaatattagcaaataatatagcacactcatgaacctaattcccacatttgatagttgttacattttgccatgtttgtttaaaggtctaagtcataaaatcttataaagctaaaccccacccttctctttctcctctctctccaggataattactgttttatagtttgtggatatcattcccttacttgtgtttatacttttaccaagtgtgtatgtattcaaaaaacagttgttttgtgattttaaaatgtaaatgaatggcgttatgctccatgtattctgcaacttttcatcatacattaggttttggcgatttagccataatttggcatgaattcaggtcttttaagttttattccattgtaagaataaacaagtttgttcattcatgtctccattga

SEQ ID NO: 12253 - DNA, 2027 bp, Homo sapiens
gtttttaaactctacgtcaagtagtctccccaatggtattctgcaatctctgaccattgtaacctcacaaatattctcaaaacctggccctgaattttcaagaacatctctcatacccttattaggattgaatctaaaaaggtcgggcacagtgactcatgcctgtaatcccagctactcgggaggctgaggcgtgagaatcgcttgaacccggtaggcagatgttgcagtgagccgagatcgcaccattgcactccagcctaggcaacaagagcgaaactccatctcaaaaatagaaaaaacatttatcgaaatcccaacaagttgacaaatatatccacataaaaatataaaacttctgtattctgtgaaagctactataaataaagtttagagaaagttatttgccacctatgtcatgattgaaatagttaattgatcctgtgaatcagttagcaaaacataactcaatggaaagataggcaaatgatacaaataagaaattcacaaaagaagaaatactaagtctctagtgatgagagaaatgtaaattaaaatgaaacatgtttgttcatcaagttgtcacaagttagacaatcatatccaatatttttaaaggttgtaagactataaggaaatagccactgtcatatcatttttaaaggaatataaattatagggccttttgtttctttgggttttttttttttagagacaagatctctccgtgttgtctaggctggactcaaacttctggactcaagcaatcctcgcaacatcattaatagctgagagtagagacttgagccaccacacctgactatagggcctttttgaaaggaaaattgacatcatcaaaattttaaatatattcagtctatttctcaaaaactcaaagaatactaataaatgtgtactcaggtatatgtacagaaattgctgtaacattataattttaaacaatttaaaacagactgagtttccaaagttagggtacaatgaaagaaaaggtggcttatttatactctggaatattttccaagagttgaaaaggatgaggatacacacacacacacacacacacacacacacacacacacacacacacagtttgggtatccctaatccagaaattcaaatgctccaaagtccaaaactttctgacccaccaacatgactgatgctcaaaggaaatggccactggaagatttcagattttcagatttggagtgctcaaccagtaagtatataatgcaaataatccaaaatacaaaaaaaaaaaaaaagaaatctgaaacacttctgatcccaagcatttcagaaaacggatgttcatttgtgtgtgtgtgtgtgtgtaagcaggtgttgctagaaattcacttatatacaagaaaactttttgtgtacatatttgcatatatatgtacaaatgggtagaaacgatacatgattaatcttaatcgggaaggaaaagagatttagggaaggaagcagtaagtgagaacttttattctatttactcctgcacgtttaaatattgtttacagtgagtatatcaacatgtaagtgttaaaagacaataagctactagtgatttttaatataaaattaactataaaatattttaaatattagcaaataatatagcacactcatgaacctaattcccacatttgatagttgttacattttgccatgtttgtttaaaggtctaagtcataaaatcttataaagctaaaccccacccttctctttctcctctctctccaggataattactgttttatagtttgtggatatcattcccttacttgtgtttatacttttaccaagtgtgtatgtattcaaaaaacagttgttttgtgattttaaaatgtaaatgaatggcgttatgctccatgtattctgcaacttttcatcatacattaggttttggcgatttagccataatttggcatgaattcaggtcttttaagttttattccattgtaagaataaacaagtttgttcattcatgtctccattga

SEQ ID NO: 12254 - DNA, 2125 bp, Homo sapiens
caccatgttgcccaggctggagtgcagtagctattcataggcacagtcatagcacactgcagcctagaatttctgacctcaagcaatcatcctgcctcagcctcctgagtagctaggactacaggtgcataccaccataaccagctttaattaaatgttttttatttggttattttttttaagttttctgtattcacacaaggggttgcccaaatataattttgctttgactattgagatctagtgaaagtggggtatatgaattctaattgcaaatatccaggctgaggcgtgagaatcgcttgaacccggtaggcagatgttgcagtgagccgagatcgcaccattgcactccagcctaggcaacaagagcgaaactccatctcaaaaatagaaaaaacatttatcgaaatcccaacaagttgacaaatatatccacataaaaatataaaacttctgtattctgtgaaagctactataaataaagtttagagaaagttatttgccacctatgtcatgattgaaatagttaattgatcctgtgaatcagttagcaaaacataactcaatggaaagataggcaaatgatacaaataagaaattcacaaaagaagaaatactaagtctctagtgatgagagaaatgtaaattaaaatgaaacatgtttgttcatcaagttgtcacaagttagacaatcatatccaatatttttaaaggttgtaagactataaggaaatagccactgtcatatcatttttaaaggaatataaattatagggccttttgtttctttgggttttttttttttagagacaagatctctccgtgttgtctaggctggactcaaacttctggactcaagcaatcctcgcaacatcattaatagctgagagtagagacttgagccaccacacctgactatagggcctttttgaaaggaaaattgacatcatcaaaattttaaatatattcagtctatttctcaaaaactcaaagaatactaataaatgtgtactcaggtatatgtacagaaattgctgtaacattataattttaaacaatttaaaacagactgagtttccaaagttagggtacaatgaaagaaaaggtggcttatttatactctggaatattttccaagagttgaaaaggatgaggatacacacacacacacacacacacacacacacacacacacacacacacagtttgggtatccctaatccagaaattcaaatgctccaaagtccaaaactttctgacccaccaacatgactgatgctcaaaggaaatggccactggaagatttcagattttcagatttggagtgctcaaccagtaagtatataatgcaaataatccaaaatacaaaaaaaaaaaaaaagaaatctgaaacacttctgatcccaagcatttcagaaaacggatgttcatttgtgtgtgtgtgtgtgtgtaagcaggtgttgctagaaattcacttatatacaagaaaactttttgtgtacatatttgcatatatatgtacaaatgggtagaaacgatacatgattaatcttaatcgggaaggaaaagagatttagggaaggaagcagtaagtgagaacttttattctatttactcctgcacgtttaaatattgtttacagtgagtatatcaacatgtaagtgttaaaagacaataagctactagtgatttttaatataaaattaactataaaatattttaaatattagcaaataatatagcacactcatgaacctaattcccacatttgatagttgttacattttgccatgtttgtttaaaggtctaagtcataaaatcttataaagctaaaccccacccttctctttctcctctctctccaggataattactgttttatagtttgtggatatcattcccttacttgtgtttatacttttaccaagtgtgtatgtattcaaaaaacagttgttttgtgattttaaaatgtaaatgaatggcgttatgctccatgtattctgcaacttttcatcatacattaggttttggcgatttagccataatttggcatgaattcaggtcttttaagttttattccattgtaagaataaacaagtttgttcattcatgtctccattga

SEQ ID NO: 12255 - DNA, 2882 bp, Homo sapiens
caccatgttgcccaggctggagtgcagtagctattcataggcacagtcatagcacactgcagcctagaatttctgacctcaagcaatcatcctgcctcagcctcctgagtagctaggactacaggtgcataccaccataaccagctttaattaaatgttttttatttggttattttttttaagttttctgtattcacacaaggggttgcccaaatataattttgctttgactattgagatctagtgaaagtggggtatatgaattctaattgcaaatatccaggctcagaggcccagcaggactttctaacacaatcttttagcggaagttagaaatggtatatagcaggagagtcagatttgagaagcatatgtagattcgaagctgggggaatatggcaggtagtttgtacaacatctaattcagaacattaaaattaagattttagtcaaactgtgtttaagttagttcttattttcctgtagatgcatctcacagcatcagtacaataccaaaaaagcacacaagaataagaatatgtggaatttctatacctattgacaaagcacataatttaaccataaacacaaagccataggtcaacaaagaaatgaagattccagttctgaaggtgagttttctgaagccaaagtggatacatgcaaaattaatatagttttactgtatatcagttgtcaccaatcagaaatggaaaacagatcctatttataattgcaaacaaaactgtaaaatagactttttaaagtctgggaatagacttctaaaataagctataacacttaaaaaggagagatatactatgttcctagataggacaattgaaaattctggagatgacagtttttcaaaaatctattgaggccaggtgcagtggcccatgcctgtagttccagtactttgggaggcctaggtgggtggatcacctgaggttgggagtttgagaccagcctgaccaacatggagaaaccccgtctctactaaaaatacaaaattagccaggcgtggtggtgcatgcctgtaatcccagctactcgggaggctgaggcgtgagaatcgcttgaacccggtaggcagatgttgcagtgagccgagatcgcaccattgcactccagcctaggcaacaagagcgaaactccatctcaaaaatagaaaaaacatttatcgaaatcccaacaagttgacaaatatatccacataaaaatataaaacttctgtattctgtgaaagctactataaataaagtttagagaaagttatttgccacctatgtcatgattgaaatagttaattgatcctgtgaatcagttagcaaaacataactcaatggaaagataggcaaatgatacaaataagaaattcacaaaagaagaaatactaagtctctagtgatgagagaaatgtaaattaaaatgaaacatgtttgttcatcaagttgtcacaagttagacaatcatatccaatatttttaaaggttgtaagactataaggaaatagccactgtcatatcatttttaaaggaatataaattatagggccttttgtttctttgggttttttttttttagagacaagatctctccgtgttgtctaggctggactcaaacttctggactcaagcaatcctcgcaacatcattaatagctgagagtagagacttgagccaccacacctgactatagggcctttttgaaaggaaaattgacatcatcaaaattttaaatatattcagtctatttctcaaaaactcaaagaatactaataaatgtgtactcaggtatatgtacagaaattgctgtaacattataattttaaacaatttaaaacagactgagtttccaaagttagggtacaatgaaagaaaaggtggcttatttatactctggaatattttccaagagttgaaaaggatgaggatacacacacacacacacacacacacacagtttgggtatccctaatccagaaattcaaatgctccaaagtccaaaactttctgacccaccaacatgactgatgctcaaaggaaatggccactggaagatttcagattttcagatttggagtgctcaaccagtaagtatataatgcaaataatccaaaatacaaaaaaaaaaaaaaagaaatctgaaacacttctgatcccaagcatttcagaaaacggatgttcatttgtgtgtgtgtgtgtgtgtaagcaggtgttgctagaaattcacttatatacaagaaaactttttgtgtacatatttgcatatatatgtacaaatgggtagaaacgatacatgattaatcttaatcgggaaggaaaagagatttagggaaggaagcagtaagtgagaacttttattctatttactcctgcacgtttaaatattgtttacagtgagtatatcaacatgtaagtgttaaaagacaataagctactagtgatttttaatataaaattaactataaaatattttaaatattagcaaataatatagcacactcatgaacctaattcccacatttgatagttgttacattttgccatgtttgtttaaaggtctaagtcataaaatcttataaagctaaaccccacccttctctttctcctctctctccaggataattactgttttatagtttgtggatatcattcccttacttgtgtttatacttttaccaagtgtgtatgtattcaaaaaacagttgttttgtgattttaaaatgtaaatgaatggcgttatgctccatgtattctgcaacttttcatcatacattaggttttggcgatttagccataatttggcatgaattcaggtcttttaagttttattccattgtaagaataaacaagtttgttcattcatgtctccattga

SEQ ID NO: 12256 - DNA, 897 bp, Homo sapiens
  misc_feature (875)..(875): n is a, c, g, or t
caccatgttgcccaggctggagtgcagtagctattcataggcacagtcatagcacactgcagcctagaatttctgacctcaagcaatcatcctgcctcagcctcctgagtagctaggactacaggtgcataccaccataaccagctttaattaaatgttttttatttggttattttttttaagttttctgtattcacacaaggggttgcccaaatataattttgctttgactattgagatctagtgaaagtggggtatatgaattctaattgcaaatatccaggctcagaggcccagcaggactttctaacacaatcttttagcggaagttagaaatggtatatagcaggagagtcagatttgagaagcatatgtagattcgaagctgggggaatatggcaggtagtttgtacaacatctaattcagaacattaaaattaagattttagtcaaactgtgtttaagttagttcttattttcctgtagatgcatctcacagcatcagtacaataccaaaaaagcacacaagaataagaatatgtggaatttctatacctattgacaaagcacataatttaaccataaacacaaagccataggtcaacaaagaaatgaagattccagttctgaaggtgagttttctgaagccaaagtggatacatgcaaaattaatatagttttactgtatatcagttgtcaccaatcagaaatggaaaacagatcctatttataattgcaaacaaaactgtaaaatagactttttaaagtctgggaatagacttctaaaataagctataacacttaaaaaggagaattacttgagccagggaagcagaggttgtggtgagctaagattgtgccactgcactccagcntgagagaacaagactccgtctc

SEQ ID NO: 12257 - DNA, 970 bp, Homo sapiens
tccggaagtgacagtaacagagactgcgcagggggcctgagcgggagagtcctggcgagggcgctggccgagaggtgctcggcttgtagcaggtcccgcactccagcctctcgctgccagggtttgctctctgcttgtcctgggctgaggtgtccatgacggagtcatccaaggaggaaaaaatctgttccgggtgagcccaggccgccccggatatgcgatggctgaggagcagacaccagggaccacactgaggttgggtttcagaccaagacactggattctcctagttaagataaagagctttgggtgcctgacagtgaaaatggtgtaatctgcgttaacagttcacagcttgaaggcatgacaattaaagaacacacatggacttgtggcacatggaaatgtgcgcacagaaaaaggaaatctataattcttttaaagtaggaaggcattcttccttgccaaaatgggtacattctgttcggttatcaagtttgaaaatctacaagaattaaagagactgtgtcactggggtcccatcatagcccttggtgttatagcaatatgttctaccatggccatgattgactctgtgttgtggtattggcccttacatacaactggaggaagtgtgaatttcatcatgttgataaattggactgtcatgattctttataattacttcaatgccatgtttgtcggtccgggctttgtccctctggggtggaaaccggtaagaaagattctgtaagacaatgaactttaatgataatcgtatatttggtttttgccttatctactaaccaataataccaaacacagcctactgtttgtcctcacagagactaagtatattactctaatcactgatcatttaggctcggagactttatttcatatctgtttgaacacattgatccaaaatagcattttccaaagcaattttattgaatatttgctctgcatt

SEQ ID NO: 12258 - DNA, 2202 bp, Homo sapiens
tccggaagtgacagtaacagagactgcgcagggggcctgagcgggagagtcctggcgagggcgctggccgagaggtgctcggcttgtagcaggtcccgcactccagcctctcgctgccagggtttgctctctgcttgtcctgggctgaggtgtccatgacggagtcatccaaggaggaaaaaatctgttccgggtgagcccaggccgccccggatatgcgatggctgaggagcagacaccagggaccacactgaggttgggtttcagaccaagacactggattctcctagttaagataaagagctttgggtgcctgacagtgaaaatggtgtaatctgcgttaacagttcacagcttgaaggcatgacaattaaagaacacacatggacttgtggcacatggaaatgtgcgcacagaaaaaggaaatctataattcttttaaagtaggaaggcattcttccttgccaaaatgggtacattctgttcggttatcaagtttgaaaatctacaagaattaaagagactgtgtcactggggtcccatcatagcccttggtgttatagcaatatgttctaccatggccatgattgactctgtgttgtggtattggcccttacatacaactggaggaagtgtgaatttcatcatgttgataaattggactgtcatgattctttataattacttcaatgccatgtttgtcggtccgggctttgtccctctggggtggaaaccggaaatttctcaggataccatgtatctccagtattgtaaagtctgccaagcatacaaggcaccacgttcacatcactgcagaaagtgtaacagatgtgtgatgaagatggaccatcactgtccttggatcaacaactgttgtggttaccaaaatcatgcttcgttcacactgtttctccttttagcaccactgggttgtatccatgctgctttcatttttgtgatgactatgtacacacagctttatcatcggctctcctttgggtggaacacagtgaagatcgacatgagtgcagcccggagagatcctcttccaattgttccatttggattagctgcatttgctaccaccttgtttgccttgggattagctttaggaacaaccatagctgttgggatgttgttttttatccagatgaaaataattctcagaaacaaaacttctattgagtcatggattgaagagaaggctaaagatcgaattcagtattatcaactagatgaagtctttgtttttccatatgatatgggaagtagatggaggaactttaaacaggtatttacgtggtcaggggtccctgaaggagatggacttgagtggccagtaagagaaggctgtcaccaatacagcttaacaatagaacagttgaaacaaaaagcagataagagagtcagaagtgttcgctataaagtaatagaagattatagtggtgcctgctgccctctgaataaaggaatcaaaaccttcttcacaagtccctgcaccgaagagcctcgaatacagctgcaaaaaggggaattcattttagccacaagaggtttacgatactggttatatggagacaaaattcttgatgattcctttatagaaggtgtttcaagaataaggggttggttccctagaaaatgtgtggaaaagtgtccctgtgatgctgaaacagatcaagccccagagggggagaagaaaaatagatagctgctgttaaaacaaaattatcctttaagtctgcttaattacttgaaaattgtacatattactaaagaattatgcaatgagcctactctggttaagatgttcttttcctcaaaggtgccctagtgccatgatttaaatatttttattaccattttgaaatggagaagccattctgcatatgcctttgaattcctgcccctctttaccacctcttcctccccctcaaaggaaaaacatttcatccaagtaagttaacggcattttctgtaggattttcttatgcactgcacactctggacctcacctgcagatacagttccccccttgccaggagcatctgcatgtggtacttctcttttccctcagttgatatttcttatatgatattctagatactatagaactcaatttgtcagattcagtataacctcagattttgttacctgtcttttaaaaatgcagattttgtcaaatcaaataaagatcaatgg

SEQ ID NO: 12259 - DNA, 2231 bp, Homo sapiens
tccggaagtgacagtaacagagactgcgcagggggcctgagcgggagagtcctggcgagggcgctggccgagaggtgctcggcttgtagcaggtcccgcactccagcctctcgctgccagggtttgctctctgcttgtcctgggctgaggtgtccatgacggagtcatccaaggaggaaaaaatctgttccgggtgagcccaggccgccccggatatgcgatggctgaggagcagacaccagggaccacactgaggttgggtttcagaccaagacactggattctcctagttaagataaagagctttgggtgcctgacagtgaaaatggtgtaatctgcgttaacagttcacagcttgaaggcatgacaattaaagaacacacatggacttgtggcacatggaaatgtgcgcacagaaaaaggaaatctataattcttttaaagtaggaaggcattcttccttgccaaaatgggtacattctgttcggttatcaagtttgaaaatctacaagaattaaagagactgtgtcactggggtcccatcatagcccttggtgttatagcaatatgttctaccatggccatgattgactctgtgttgtggtattggcccttacatacaactggaggaagtgtgaatttcatcatgttgataaattggactgtcatgattctttataattacttcaatgccatgtttgtcggtccgggctttgtccctctggggtggaaaccggaaatttctcaggataccatgtatctccagtattgtaaagtctgccaagcatacaaggcaccacgttcacatcactgcagaaagtgtaacagatgtgtgatgaagatggaccatcactgtccttggatcaacaactgttgtggttaccaaaatcatgcttcgttcacactgtttctccttttagcaccactgggttgtatccatgctgctttcatttttgtgatgactatgtacacacagctttatcatcggctctcctttgggtggaacacagtgaagatcgacatgagtgcagcccggagagatcctcttccaattgttccatttggattagctgcatttgctaccaccttgtttgccttgggattagctttaggaacaaccatagctgttgggatgttgttttttatccagatgaaaataattctcagaaacaaaacttctattgagtcatggattgaagagaaggctaaagatcgaattcagtattatcaactagatgaagtctttgtttttccatatgatatgggaagtagatggaggaactttaaacaggtatttacgtggtcaggggtccctgaaggagatggacttgagtggccagtaagagaaggctgtcaccaatacagcttaacaatagaacagttgaaacaaaaagcagataagagagtcagaagtgttcgctataaagtaatagaagattatagtggtgcctgctgccctctgaataaaggaatcaaaaccttcttcacaagtccctgcaccgaagagcctcgaatacagctgcaaaaaggggaattcattttagccacaagaggtttacgatactggttatatggagacaaaattcttgatgattcctttatagaaggtgtttcaagaataaggggttggttccctagaaaatgtgtggaaaagtgtccctgtgatgctgaaacagatcaagccccagagggggagaagaaaaatagatagctgctgttaaaacaaaattatcctttaagtctgcttaattacttgaaaattgtacatattactaaagaattatgcaatgagcctactctggttaagatgttcttttcctcaaaggtgccctagtgccatgatttaaatatttttattaccattttgaaatggagaagccattctgcatatgcctttgaattcctgcccctctttaccacctcttcctccccctcaaaggaaaaacatttcatccaagtaagttaacggcattttctgtaggattttcttatgcactgcacactctggacctcacctgcagatacagttccccccttgccaggagcatctgcatgtggtacttctcttttccctcagttgatatttcttatatgatattctagatactatagaactcaatttgtcagattcagtataacctcagattttgttacctgtcttttaaaaatgcagattttgtcaaatcaaataaagatcaatggatgttgggtataatcagtttttaaaaaaa

SEQ ID NO: 12260 - DNA, 2583 bp, Homo sapiens
tccggaagtgacagtaacagagactgcgcagggggcctgagcgggagagtcctggcgagggcgctggccgagaggtgctcggcttgtagcaggtcccgcactccagcctctcgctgccagggtttgctctctgcttgtcctgggctgaggtgtccatgacggagtcatccaaggaggaaaaaatctgttccgggtgagcccaggccgccccggatatgcgatggctgaggagcagacaccagggaccacactgaggttgggtttcagaccaagacactggattctcctagttaagataaagagctttgggtgcctgacagtgaaaatggtgtaatctgcgttaacagttcacagcttgaaggcatgacaattaaagaacacacatggacttgtggcacatggaaatgtgcgcacagaaaaaggaaatctataattcttttaaagtaggaaggcattcttccttgccaaaatgggtacattctgttcggttatcaagtttgaaaatctacaagaattaaagagactgtgtcactggggtcccatcatagcccttggtgttatagcaatatgttctaccatggccatgattgactctgtgttgtggtattggcccttacatacaactggaggaagtgtgaatttcatcatgttgataaattggactgtcatgattctttataattacttcaatgccatgtttgtcggtccgggctttgtccctctggggtggaaaccggaaatttctcaggataccatgtatctccagtattgtaaagtctgccaagcatacaaggcaccacgttcacatcactgcagaaagtgtaacagatgtgtgatgaagatggaccatcactgtccttggatcaacaactgttgtggttaccaaaatcatgcttcgttcacactgtttctccttttagcaccactgggttgtatccatgctgctttcatttttgtgatgactatgtacacacagctttatcatcggctctcctttgggtggaacacagtgaagatcgacatgagtgcagcccggagagatcctcttccaattgttccatttggattagctgcatttgctaccaccttgtttgccttgggattagctttaggaacaaccatagctgttgggatgttgttttttatccagatgaaaataattctcagaaacaaaacttctattgagtcatggattgaagagaaggctaaagatcgaattcagtattatcaactagatgaagtctttgtttttccatatgatatgggaagtagatggaggaactttaaacaggtatttacgtggtcaggggtccctgaaggagatggacttgagtggccagtaagagaaggctgtcaccaatacagcttaacatttgtctgccatgtctctacagaatcagtgaatctcagtgttttcacctgagaagcttcatgagggcggagaatatactccctgatccctgggccacagtaagcactctaggaatatacacagatgaggacattagagagtgaatagcgagaagaaaacctcactctcagcctctggttcttagcatagggcctttttttccatgctaaaacaacctgtggcctttaaattatcagcaacttgaaatgctggaaaattggggttttgccatatcactctgacagttgatgaggaaaggcgatttttcaacattgagacaagagacttcatttttttctttttatttcttccaatagaacagttgaaacaaaaagcagataagagagtcagaagtgttcgctataaagtaatagaagattatagtggtgcctgctgccctctgaataaaggaatcaaaaccttcttcacaagtccctgcaccgaagagcctcgaatacagctgcaaaaaggggaattcattttagccacaagaggtttacgatactggttatatggagacaaaattcttgatgattcctttatagaaggtgtttcaagaataaggggttggttccctagaaaatgtgtggaaaagtgtccctgtgatgctgaaacagatcaagccccagagggggagaagaaaaatagatagctgctgttaaaacaaaattatcctttaagtctgcttaattacttgaaaattgtacatattactaaagaattatgcaatgagcctactctggttaagatgttcttttcctcaaaggtgccctagtgccatgatttaaatatttttattaccattttgaaatggagaagccattctgcatatgcctttgaattcctgcccctctttaccacctcttcctccccctcaaaggaaaaacatttcatccaagtaagttaacggcattttctgtaggattttcttatgcactgcacactctggacctcacctgcagatacagttccccccttgccaggagcatctgcatgtggtacttctcttttccctcagttgatatttcttatatgatattctagatactatagaactcaatttgtcagattcagtataacctcagattttgttacctgtcttttaaaaatgcagattttgtcaaatcaaataaagatcaatggatgttgggtataatcagtttttaaaaaaa

SEQ ID NO: 12261 - DNA, 2421 bp, Homo sapiens
tccggaagtgacagtaacagagactgcgcagggggcctgagcgggagagtcctggcgagggcgctggccgagaggtgctcggcttgtagcaggtcccgcactccagcctctcgctgccagggtttgctctctgcttgtcctgggctgaggtgtccatgacggagtcatccaaggaggaaaaaatctgttccgggtgagcccaggccgccccggatatgcgatggctgaggagcagacaccagggaccacactgaggttgggtttcagaccaagacactggattctcctagttaagataaagagctttgggtgcctgacagtgaaaatggtgtaatctgcgttaacagttcacagcttgaaggcatgacaattaaagaacacacatggacttgtggcacatggaaatgtgcgcacagaaaaaggaaatctataattcttttaaagtaggaaggcattcttccttgccaaaatgggtacattctgttcggttatcaagtttgaaaatctacaagaattaaagagactgtgtcactggggtcccatcatagcccttggtgttatagcaatatgttctaccatggccatgattgactctgtgttgtggtattggcccttacatacaactggaggaagtgtgaatttcatcatgttgataaattggactgtcatgattctttataattacttcaatgccatgtttgtcggtccgggctttgtccctctggggtggaaaccggaaatttctcaggataccatgtatctccagtattgtaaagtctgccaagcatacaaggcaccacgttcacatcactgcagaaagtgtaacagatgtgtgatgaagatggaccatcactgtccttggatcaacaactgttgtggttaccaaaatcatgcttcgttcacactgtttctccttttagcaccactgggttgtatccatgctgctttcatttttgtgatgactatgtacacacagctttatcatcggatgaaaataattctcagaaacaaaacttctattgagtcatggattgaagagaaggctaaagatcgaattcagtattatcaactagatgaagtctttgtttttccatatgatatgggaagtagatggaggaactttaaacaggtatttacgtggtcaggggtccctgaaggagatggacttgagtggccagtaagagaaggctgtcaccaatacagcttaacatttgtctgccatgtctctacagaatcagtgaatctcagtgttttcacctgagaagcttcatgagggcggagaatatactccctgatccctgggccacagtaagcactctaggaatatacacagatgaggacattagagagtgaatagcgagaagaaaacctcactctcagcctctggttcttagcatagggcctttttttccatgctaaaacaacctgtggcctttaaattatcagcaacttgaaatgctggaaaattggggttttgccatatcactctgacagttgatgaggaaaggcgatttttcaacattgagacaagagacttcatttttttctttttatttcttccaatagaacagttgaaacaaaaagcagataagagagtcagaagtgttcgctataaagtaatagaagattatagtggtgcctgctgccctctgaataaaggaatcaaaaccttcttcacaagtccctgcaccgaagagcctcgaatacagctgcaaaaaggggaattcattttagccacaagaggtttacgatactggttatatggagacaaaattcttgatgattcctttatagaaggtgtttcaagaataaggggttggttccctagaaaatgtgtggaaaagtgtccctgtgatgctgaaacagatcaagccccagagggggagaagaaaaatagatagctgctgttaaaacaaaattatcctttaagtctgcttaattacttgaaaattgtacatattactaaagaattatgcaatgagcctactctggttaagatgttcttttcctcaaaggtgccctagtgccatgatttaaatatttttattaccattttgaaatggagaagccattctgcatatgcctttgaattcctgcccctctttaccacctcttcctccccctcaaaggaaaaacatttcatccaagtaagttaacggcattttctgtaggattttcttatgcactgcacactctggacctcacctgcagatacagttccccccttgccaggagcatctgcatgtggtacttctcttttccctcagttgatatttcttatatgatattctagatactatagaactcaatttgtcagattcagtataacctcagattttgttacctgtcttttaaaaatgcagattttgtcaaatcaaataaagatcaatggatgttgggtataatcagtttttaaaaaaa

SEQ ID NO: 12262 - DNA, 2329 bp, Homo sapiens
tccggaagtgacagtaacagagactgcgcagggggcctgagcgggagagtcctggcgagggcgctggccgagaggtgctcggcttgtagcaggtcccgcactccagcctctcgctgccagggtttgctctctgcttgtcctgggctgaggtgtccatgacggagtcatccaaggaggaaaaaatctgttccgggtgagcccaggccgccccggatatgcgatggctgaggagcagacaccagggaccacactgaggttgggtttcagaccaagacactggattctcctagttaagataaagagctttgggtgcctgacagtgaaaatggtgtaatctgcgttaacagttcacagcttgaaggcatgacaattaaagaacacacatggacttgtggcacatggaaatgtgcgcacagaaaaaggaaatctataattcttttaaagtaggaaggcattcttccttgccaaaatgggtacattctgttcggttatcaagtttgaaaatctacaagaattaaagagactgtgtcactggggtcccatcatagcccttggtgttatagcaatatgttctaccatggccatgattgactctgtgttgtggtattggcccttacatacaactggaggaagtgtgaatttcatcatgttgataaattggactgtcatgattctttataattacttcaatgccatgtttgtcggtccgggctttgtccctctggggtggaaaccggaaatttctcaggataccatgtatctccagtattgtaaagtctgccaagcatacaaggcaccacgttcacatcactgcagaaagtgtaacagatgtgtgatgaagatggaccatcactgtccttggatcaacaactgttgtggttaccaaaatcatgcttcgttcacactgtttctccttttagcaccactgggttgtatccatgctgctttcatttttgtgatgactatgtacacacagctttatcatcggctctcctttgggtggaacacagtgaagatcgacatgagtgcagcccggagagatcctcttccaattgttccatttggattagctgcatttgctaccaccttgtttgccttgggattagctttaggaacaaccatagctgttgggatgttgttttttatccagatgaaaataattctcagaaacaaaacttctattgagtcatggattgaagagaaggctaaagatcgaattcagtattatcaactagatgaagtctttgtttttccatatgatatgggaagtagatggaggaactttaaacaggtatttacgtggtcaggggtccctgaaggagatggacttgagtggccagtaagagaaggctgtcaccaatacagcttaacatttgtctgccatgtctctacagaatcagtgaatctcagtgttttcacctgagaagcttcatgagggcggagaatatactccctgatccctgggccacaatagaacagttgaaacaaaaagcagataagagagtcagaagtgttcgctataaagtaatagaagattatagtggtgcctgctgccctctgaataaaggaatcaaaaccttcttcacaagtccctgcaccgaagagcctcgaatacagctgcaaaaaggggaattcattttagccacaagaggtttacgatactggttatatggagacaaaattcttgatgattcctttatagaaggtgtttcaagaataaggggttggttccctagaaaatgtgtggaaaagtgtccctgtgatgctgaaacagatcaagccccagagggggagaagaaaaatagatagctgctgttaaaacaaaattatcctttaagtctgcttaattacttgaaaattgtacatattactaaagaattatgcaatgagcctactctggttaagatgttcttttcctcaaaggtgccctagtgccatgatttaaatatttttattaccattttgaaatggagaagccattctgcatatgcctttgaattcctgcccctctttaccacctcttcctccccctcaaaggaaaaacatttcatccaagtaagttaacggcattttctgtaggattttcttatgcactgcacactctggacctcacctgcagatacagttccccccttgccaggagcatctgcatgtggtacttctcttttccctcagttgatatttcttatatgatattctagatactatagaactcaatttgtcagattcagtataacctcagattttgttacctgtcttttaaaaatgcagattttgtcaaatcaaataaagatcaatggatgttgggtataatcagtttttaaaaaaa

SEQ ID NO: 12263 - DNA, 2349 bp, Homo sapiens
tccggaagtgacagtaacagagactgcgcagggggcctgagcgggagagtcctggcgagggcgctggccgagaggtgctcggcttgtagcaggtcccgcactccagcctctcgctgccagggtttgctctctgcttgtcctgggctgaggtgtccatgacggagtcatccaaggaggaaaaaatctgttccgggtgagcccaggccgccccggatatgcgatggctgaggagcagacaccagggaccacactgaggtgggagtcaaggcagggaatataagcacgattttggtggtctttgtcccaccagagtgggagcaggctctcctgaatgttgagaccaacctggcttaccaggatatttcttccttgggttgggtttcagaccaagacactggattctcctagttaagataaagagctttgggtgcctgacagtgaaaatggtgtaatctgcgttaacagttcacagcttgaaggcatgacaattaaagaacacacatggacttgtggcacatggaaatgtgcgcacagaaaaaggaaatctataattcttttaaagtaggaaggcattcttccttgccaaaatgggtacattctgttcggttatcaagtttgaaaatctacaagaattaaagagactgtgtcactggggtcccatcatagcccttggtgttatagcaatatgttctaccatggccatgattgactctgtgttgtggtattggcccttacatacaactggaggaagtgtgaatttcatcatgttgataaattggactgtcatgattctttataattacttcaatgccatgtttgtcggtccgggctttgtccctctggggtggaaaccggaaatttctcaggataccatgtatctccagtattgtaaagtctgccaagcatacaaggcaccacgttcacatcactgcagaaagtgtaacagatgtgtgatgaagatggaccatcactgtccttggatcaacaactgttgtggttaccaaaatcatgcttcgttcacactgtttctccttttagcaccactgggttgtatccatgctgctttcatttttgtgatgactatgtacacacagctttatcatcggctctcctttgggtggaacacagtgaagatcgacatgagtgcagcccggagagatcctcttccaattgttccatttggattagctgcatttgctaccaccttgtttgccttgggattagctttaggaacaaccatagctgttgggatgttgttttttatccagatgaaaataattctcagaaacaaaacttctattgagtcatggattgaagagaaggctaaagatcgaattcagtattatcaactagatgaagtctttgtttttccatatgatatgggaagtagatggaggaactttaaacaggtatttacgtggtcaggggtccctgaaggagatggacttgagtggccagtaagagaaggctgtcaccaatacagcttaacaatagaacagttgaaacaaaaagcagataagagagtcagaagtgttcgctataaagtaatagaagattatagtggtgcctgctgccctctgaataaaggaatcaaaaccttcttcacaagtccctgcaccgaagagcctcgaatacagctgcaaaaaggggaattcattttagccacaagaggtttacgatactggttatatggagacaaaattcttgatgattcctttatagaaggtgtttcaagaataaggggttggttccctagaaaatgtgtggaaaagtgtccctgtgatgctgaaacagatcaagccccagagggggagaagaaaaatagatagctgctgttaaaacaaaattatcctttaagtctgcttaattacttgaaaattgtacatattactaaagaattatgcaatgagcctactctggttaagatgttcttttcctcaaaggtgccctagtgccatgatttaaatatttttattaccattttgaaatggagaagccattctgcatatgcctttgaattcctgcccctctttaccacctcttcctccccctcaaaggaaaaacatttcatccaagtaagttaacggcattttctgtaggattttcttatgcactgcacactctggacctcacctgcagatacagttccccccttgccaggagcatctgcatgtggtacttctcttttccctcagttgatatttcttatatgatattctagatactatagaactcaatttgtcagattcagtataacctcagattttgttacctgtcttttaaaaatgcagattttgtcaaatcaaataaagatcaatggatgttgggtataatcagtttttaaaaaaa

SEQ ID NO: 12264 - DNA, 1746 bp, Homo sapiens
gaatctaataattctaaagcactccttgtatcatgtatctccctttatttcaatatctccttaattctctatacctgtgagataaagtcctgatcccttaacatagttttatgaaatctggccaaaaattaccttccaacttacagtagcatatgaattccttatacattcctgtcacccaactttgcccacaattttttccatcttatatgacctccactctatctaaaattattaagactcgttccagtcttacctcttccataaagtctaacctacccccatagactcatctgaatgtgacatttaatcacatactactctatggtagctcatgaagtctcatatttttatttaattctgctatcttatatctgtaacttcataagattctaggacagagatcatgagttatctttatttctcctattatatctaatatagtgctatttaatagtagctatgtcaaattaagttatgatgacttttattcattcaacttcattattaaatgttcttcattattcatttgtagtttgtctgccatgtctctacagaatcagtgaatctcagtgttttcacctgagaagcttcatgagggcggagaatatactccctgatccctgggccacagtaagcactctaggaatatacacagatgaggacattagagagtgaatagcgagaagaaaacctcactctcagcctctggttcttagcatagggcctttttttccatgctaaaacaacctgtggcctttaaattatcagcaacttgaaatgctggaaaattggggttttgccatatcactctgacagttgatgaggaaaggcgatttttcaacattgagacaagagacttcatttttttctttttatttcttccaatagaacagttgaaacaaaaagcagataagagagtcagaagtgttcgctataaagtaatagaagattatagtggtgcctgctgccctctgaataaaggaatcaaaaccttcttcacaagtccctgcaccgaagagcctcgaatacagctgcaaaaaggggaattcattttagccacaagaggtttacgatactggttatatggagacaaaattcttgatgattcctttatagaaggtgtttcaagaataaggggttggttccctagaaaatgtgtggaaaagtgtccctgtgatgctgaaacagatcaagccccagagggggagaagaaaaatagatagctgctgttaaaacaaaattatcctttaagtctgcttaattacttgaaaattgtacatattactaaagaattatgcaatgagcctactctggttaagatgttcttttcctcaaaggtgccctagtgccatgatttaaatatttttattaccattttgaaatggagaagccattctgcatatgcctttgaattcctgcccctctttaccacctcttcctccccctcaaaggaaaaacatttcatccaagtaagttaacggcattttctgtaggattttcttatgcactgcacactctggacctcacctgcagatacagttccccccttgccaggagcatctgcatgtggtacttctcttttccctcagttgatatttcttatatgatattctagatactatagaactcaatttgtcagattcagtataacctcagattttgttacctgtcttttaaaaatgcagattttgtcaaatcaaataaagatcaatggatgttgggtataatcagtttttaaaaaaa

SEQ ID NO: 12265 - DNA, 2239 bp, Homo sapiens
  misc_feature (2239)..(2239): n is a, c, g, or t
tccggaagtgacagtaacagagactgcgcagggggcctgagcgggagagtcctggcgagggcgctggccgagaggtgctcggcttgtagcaggtcccgcactccagcctctcgctgccagggtttgctctctgcttgtcctgggctgaggtgtccatgacggagtcatccaaggaggaaaaaatctgttccgggtgagcccaggccgccccggatatgcgatggctgaggagcagacaccagggaccacactgaggttgggtttcagaccaagacactggattctcctagttaagataaagagctttgggtgcctgacagtgaaaatggtgtaatctgcgttaacagttcacagcttgaaggcatgacaattaaagaacacacatggacttgtggcacatggaaatgtgcgcacagaaaaaggaaatctataattcttttaaagtaggaaggcattcttccttgccaaaatgggtacattctgttcggttatcaagtttgaaaatctacaagaattaaagagactgtgtcactggggtcccatcatagcccttggtgttatagcaatatgttctaccatggccatgattgactctgtgttgtggtattggcccttacatacaactggaggaagtgtgaatttcatcatgttgataaattggactgtcatgattctttataattacttcaatgccatgtttgtcggtccgggctttgtccctctggggtggaaaccggaaatttctcaggataccatgtatctccagtattgtaaagtctgccaagcatacaaggcaccacgttcacatcactgcagaaagtgtaacagatgtgtgatgaagatggaccatcactgtccttggatcaacaactgttgtggttaccaaaatcatgcttcgttcacactgtttctccttttagcaccactgggttgtatccatgctgctttcatttttgtgatgactatgtacacacagctttatcatcggctctcctttgggtggaacacagtgaagatcgacatgagtgcagcccggagagatcctcttccaattgttccatttggattagctgcatttgctaccaccttgtttgccttgggattagctttaggaacaaccatagctgttgggatgttgttttttatccagatgaaaataattctcagaaacaaaacttctattgagtcatggattgaagagaaggctaaagatcgaattcagtattatcaactagatgaagtctttgtttttccatatgatatgggaagtagatggaggaactttaaacaggtatttacgtggtcaggggtccctgaaggagatggacttgagtggccagtaagagaaggctgtcaccaatacagcttaacaatagaacagttgaaacaaaaagcagataagagagtcagaagtgttcgctataaagtaatagaagattatagtggtgcctgctgccctctgaataaaggaatcaaaaccttcttcacaagtccctgcaccgaagagcctcgaatacagctgcaaaaaggggaattcattttagccacaagaggtttacgatactggttatatggagacaaaattcttgatgattcctttatagaaggtgtttcaagaataaggggttggttccctagaaaatgtgtggaaaagtgtccctgtgatgctgaaacagatcaagccccagagggggagaagaaaaatagatagctgctgttaaaacaaaattatcctttaagtctgcttaattacttgaaaattgtacatattactaaagaattatgcaatgagcctactctggttaagatgttcttttcctcaaaggtgccctagtgccatgatttaaatatttttattaccattttgaaatggagaagccattctgcatatgcctttgaattcctgcccctctttaccacctcttcctccccctcaaaggaaaaacatttcatccaagtaagttaacggcattttctgtaggattttcttatgcactgcacactctggacctcacctgcagatacagttccccccttgccaggagcatctgcatgtggtacttctcttttccctcagttgatatttcttatatgatattctagatactatagaactcaatttgtcagattcagtataacctcagattttgttacctgtcttttaaaaatgcagattttgtcaaatcaaataaagatcaatggcctcgtcggcctcagcggtggagctctgccggcggan

SEQ ID NO: 12266 - DNA, 1778 bp, Homo sapiens
tccggaagtgacagtaacagagactgcgcagggggcctgagcgggagagtcctggcgagggcgctggccgagaggtgctcggcttgtagcaggtcccgcactccagcctctcgctgccagggtttgctctctgcttgtcctgggctgaggtgtccatgacggagtcatccaaggaggaaaaaatctgttccgggtgagcccaggccgccccggatatgcgatggctgaggagcagacaccagggaccacactgaggttgggtttcagaccaagacactggattctcctagttaagataaagagctttgggtgcctgacagtgaaaatggtgtaatctgcgttaacagttcacagcttgaaggcatgacaattaaagaacacacatggacttgtggcacatggaaatgtgcgcacagaaaaaggaaatctataattcttttaaagtaggaaggcattcttccttgccaaaatgggtacattctgttcggttatcaagtttgaaaatctacaagaattaaagagactgtgtcactggggtcccatcatagcccttggtgttatagcaatatgttctaccatggccatgattgactctgtgttgtggtattggcccttacatacaactggaggaagtgtgaatttcatcatgttgataaattggactgtcatgattctttataattacttcaatgccatgtttgtcggtccgggctttgtccctctggggtggaaaccggaaatttctcaggataccatgtatctccagtattgtaaagtctgccaagcatacaaggcaccacgttcacatcactgcagaaagtgtaacagatgtgtgatgaagatggaccatcactgtccttggatcaacaactgttgtggttaccaaaatcatgcttcgttcacactgtttctccttttagcaccactgggttgtatccatgctgctttcatttttgtgatgactatgtacacacagctttatcatcggctctcctttgggtggaacacagtgaagatcgacatgagtgcagcccggagagatcctcttccaattgttccatttggattagctgcatttgctaccaccttgtttgccttgggattagctttaggaacaaccatagctgttgggatgttgttttttatccagatgaaaataattctcagaaacaaaacttctattgagtcatggattgaagagaaggctaaagatcgaattcagtattatcaactagatgaagtctttgtttttccatatgatatgggaagtagatggaggaactttaaacaggtatttacgtggtcaggggtccctgaaggagatggacttgagtggccagtaagagaaggctgtcaccaatacagcttaacatttgtctgccatgtctctacagaatcagtgaatctcagtgttttcacctgagaagcttcatgagggcggagaatatactccctgatccctgggccacagtaagcactctaggaatatacacagatgaggacattagagagtgaatagcgagaagaaaacctcactctcagcctctggttcttagcatagggcctttttttccatgctaaaacaacctgtggcctttaaattatcagcaacttgaaatgctggaaaattggggttttgccatatcactctgacagttgatgaggaaaggcgatttttcaacattgagacaagagacttcatttttttctttttatttcttccatttaagtatctgtctttgatcccggcctcacctgtatctcttcggggatcctct

SEQ ID NO: 12267 - DNA, 1002 bp, Homo sapiens
  misc_feature (846)..(846): n is a, c, g, or t
  misc_feature (851)..(851): n is a, c, g, or t
  misc_feature (913)..(913): n is a, c, g, or t
  misc_feature (981)..(981): n is a, c, g, or t
tccggaagtgacagtaacagagactgcgcagggggcctgagcgggagagtcctggcgagggcgctggccgagaggtgctcggcttgtagcaggtcccgcactccagcctctcgctgccagggtttgctctctgcttgtcctgggctgaggtgtccatgacggagtcatccaaggaggaaaaaatctgttccgggtgagcccaggccgccccggatatgcgatggctgaggagcagacaccagggaccacactgaggttgggtttcagaccaagacactggattctcctagttaagataaagagctttgggtgcctgacagtgaaaatggtgtaatctgcgttaacagttcacagcttgaaggcatgacaattaaagaacacacatggacttgtggcacatggaaatgtgcgcacagaaaaaggaaatctataattcttttaaagtaggaaggcattcttccttgccaaaatgggtacattctgttcggttatcaagtttgaaaatctacaagaattaaagagactgtgtcactggggtcccatcatagcccttggtgttatagcaatatgttctaccatggccatgattgactctgtgttgtggtattggcccttacatacaactggaggaagtgtgaatttcatcatgttgataaattggactgtcatgattctttataattacttcaatgccatgtttgtcggtccgggctttgtccctctggggtggaaaccggaaatttctcaggataccatgtatctccagtattgtaaagtctgccaagcatacaaggcaccacgttcacatcactgcagaaagtgtaacagatgtgtgatgaagatggnccatnactgtccttggttcaagccactgcactccagcctgggtgacaagaggaagaccttgtccccncaaaaagaaaaacattagtttcagtcaaacccacgttcgttccctaccatgtgtagctgtggggcccntacacaaagtgaaattgcctc

SEQ ID NO: 12268 - DNA, 780 bp, Homo sapiens
tccggaagtgacagtaacagagactgcgcagggggcctgagcgggagagtcctggcgagggcgctggccgagaggtgctcggcttgtagcaggtcccgcactccagcctctcgctgccagggtttgctctctgcttgtcctgggctgaggtgtccatgacggagtcatccaaggaggaaaaaatctgttccgggtgagcccaggccgccccggatatgcgatggctgaggagcagacaccagggaccacactgaggttgggtttcagaccaagacactggattctcctagttaagataaagagctttgggtgcctgacagtgaaaatggtgtaatctgcgttaacagttcacagcttgaaggcatgacaattaaagaacacacatggacttgtggcacatggaaatgtgcgcacagaaaaaggaaatctataattcttttaaagtaggaaggcattcttccttgccaaaatgggtacattctgttcggttatcaagtttgaaaatctacaagaattaaagagactgtgtcactggggtcccatcatagcccttggtgttatagcaatatgttctaccatggccatgattgactctgtgttgtggtattggcccttacatacaactggaggaagtgtgaatttcatcatgttgataaattggactgtcatgattctttataattacttcaatgccatgtttgtcggtccgggctttgtccctctggggtggaaaccggtaagaaagattctgtaagacaatgaactttaatgataatcgta

SEQ ID NO: 12269 - DNA, 253 bp, Homo sapiens
cctcatgttttatgtaaatttttcttgttagatgtgtgatgaagatggaccatcactgtccttggatcaacaactgttgtggttaccaaaatcatgcttcgttcacactgtttctccttttagcaccactgggttgtatccatgctgctttcatttttgtgatgactatgtacacacagctttatcatcgggtaagtgaaaatgaaaatgttttgttataaaatcatccatgcaagattaaatggtagttatc

SEQ ID NO: 12270 - DNA, 1790 bp, Homo sapiens
tccggaagtgacagtaacagagactgcgcagggggcctgagcgggagagtcctggcgagggcgctggccgagaggtgctcggcttgtagcaggtcccgcactccagcctctcgctgccagggtttgctctctgcttgtcctgggctgaggtgtccatgacggagtcatccaaggaggaaaaaatctgttccgggtgagcccaggccgccccggatatgcgatggctgaggagcagacaccagggaccacactgaggttgggtttcagaccaagacactggattctcctagttaagataaagagctttgggtgcctgacagtgaaaatggtgtaatctgcgttaacagttcacagcttgaaggcatgacaattaaagaacacacatggacttgtggcacatggaaatgtgcgcacagaaaaaggaaatctataattcttttaaagtaggaaggcattcttccttgccaaaatgggtacattctgttcggttatcaagtttgaaaatctacaagaattaaagagactgtgtcactggggtcccatcatagcccttggtgttatagcaatatgttctaccatggccatgattgactctgtgttgtggtattggcccttacatacaactggaggaagtgtgaatttcatcatgttgataaattggactgtcatgattctttataattacttcaatgccatgtttgtcggtccgggctttgtccctctggggtggaaaccggaaatttctcaggataccatgtatctccagtattgtaaagtctgccaagcatacaaggcaccacgttcacatcactgcagaaagtgtaacagatgtgtgatgaagatggaccatcactgtccttggatcaacaactgttgtggttaccaaaatcatgcttcgttcacactgtttctccttttagcaccactgggttgtatccatgctgctttcatttttgtgatgactatgtacacacagctttatcatcggctctcctttgggtggaacacagtgaagatcgacatgagtgcagcccggagagatcctcttccaattgttccatttggattagctgcatttgctaccaccttgtttgccttgggattagctttaggaacaaccatagctgttgggatgttgttttttatccagatgaaaataattctcagaaacaaaacttctattgagtcatggattgaagagaaggctaaagatcgaattcagtattatcaactagatgaagtctttgtttttccatatgatatgggaagtagatggaggaactttaaacaggtatttacgtggtcaggggtccctgaaggagatggacttgagtggccagtaagagaaggctgtcaccaatacagcttaacaatagaacagttgaaacaaaaagcagataagagagtcagaagtgttcgctataaagtaatagaagattatagtggtgcctgctgccctctgaataaaggaatcaaaaccttcttcacaagtccctgcaccgaagagcctcgaatacagctgcaaaaaggggaattcattttagccacaagaggtttacgatactggttatatggagacaaaattcttgatgattcctttatagaaggtgtttcaagaataaggggttggttccctagaaaatgtgtggaaaagtgtccctgtgatgctgaaacagatcaagccccagagggggagaagaaaaatagatagctgctgttaaaacaaaattatcctttaagtctgcttaattacttgaaaattgtacatattactaaagaattatgcaatg

SEQ ID NO: 12271 - DNA, 2299 bp, Homo sapiens
ggaaatctataattctttttctgtgcacacatggacttgtggcacatggaaatgtgcgcacagaaaaaggaaatctataattcttttaaagtaggaaggcattcttccttgccagaatgtacccattttcgctggccgagaggtgctcggcttgtagcaggtcccgcactccagcctctcgctgccagggtttgctctctgcttgtcctgggctgaggtgtccatgacggagtcatccaaggaggaaaaaatctgttccgggtgagcccaggccgccccggatatgcgatggctgaggagcagacaccagggaccacactgaggttgggtttcagaccaagacactggattctcctagttaagataaagagctttgggtgcctgacagtgaaaatggtgtaatctgcgttaacagttcacagcttgaaggcatgacaattaaagaacacacatggacttgtggcacatggaaatgtgcgcacagaaaaaggaaatctataattcttttaaagtaggaaggcattcttccttgccaaaatgggtacattctgttcggttatcaagtttgaaaatctacaagaattaaagagactgtgtcactggggtcccatcatagcccttggtgttatagcaatatgttctaccatggccatgattgactctgtgttgtggtattggcccttacatacaactggaggaagtgtgaatttcatcatgttgataaattggactgtcatgattctttataattacttcaatgccatgtttgtcggtccgggctttgtccctctggggtggaaaccggaaatttctcaggataccatgtatctccagtattgtaaagtctgccaagcatacaaggcaccacgttcacatcactgcagaaagtgtaacagatgtgtgatgaagatggaccatcactgtccttggatcaacaactgttgtggttaccaaaatcatgcttcgttcacactgtttctccttttagcaccactgggttgtatccatgctgctttcatttttgtgatgactatgtacacacagctttatcatcggctctcctttgggtggaacacagtgaagatcgacatgagtgcagcccggagagatcctcttccaattgttccatttggattagctgcatttgctaccaccttgtttgccttgggattagctttaggaacaaccatagctgttgggatgttgttttttatccagatgaaaataattctcagaaacaaaacttctattgagtcatggattgaagagaaggctaaagatcgaattcagtattatcaactagatgaagtctttgtttttccatatgatatgggaagtagatggaggaactttaaacaggtatttacgtggtcaggggtccctgaaggagatggacttgagtggccagtaagagaaggctgtcaccaatacagcttaacaatagaacagttgaaacaaaaagcagataagagagtcagaagtgttcgctataaagtaatagaagattatagtggtgcctgctgccctctgaataaaggaatcaaaaccttcttcacaagtccctgcaccgaagagcctcgaatacagctgcaaaaaggggaattcattttagccacaagaggtttacgatactggttatatggagacaaaattcttgatgattcctttatagaaggtgtttcaagaataaggggttggttccctagaaaatgtgtggaaaagtgtccctgtgatgctgaaacagatcaagccccagagggggagaagaaaaatagatagctgctgttaaaacaaaattatcctttaagtctgcttaattacttgaaaattgtacatattactaaagaattatgcaatgagcctactctggttaagatgttcttttcctcaaaggtgccctagtgccatgatttaaatatttttattaccattttgaaatggagaagccattctgcatatgcctttgaattcctgcccctctttaccacctcttcctccccctcaaaggaaaaacatttcatccaagtaagttaacggcattttctgtaggattttcttatgcactgcacactctggacctcacctgcagatacagttccccccttgccaggagcatctgcatgtggtacttctcttttccctcagttgatatttcttatatgatattctagatactatagaactcaatttgtcagattcagtataacctcagattttgttacctgtcttttaaaaatgcagattttgtcaaatcaaataaagatcaatggatgttgggtataatcagtttttaaaaaaa

SEQ ID NO: 12272 - DNA, 2203 bp, Homo sapiens
tccggaagtgacagtaacagagactgcgcagggggcctgagcgggagagtcctggcgagggcgctggccgagaggtgctcggcttgtagcaggtcccgcactccagcctctcgctgccagggtttgctctctgcttgtcctgggctgaggtgtccatgacggagtcatccaaggaggaaaaaatctgttccgggtgagcccaggccgccccggatatgcgatggctgaggagcagacaccagggaccacactgaggttgggtttcagaccaagacactggattctcctagttaagataaagagctttgggtgcctgacagtgaaaatggtgtaatctgcgttaacagttcacagcttgaaggcatgacaattaaagaacacacatggacttgtggcacatggaaatgtgcgcacagaaaaaggaaatctataattcttttaaagtaggaaggcattcttccttgccaaaatgggtacattctgttcggttatcaagtttgaaaatctacaagaattaaagagactgtgtcactggggtcccatcatagcccttggtgttatagcaatatgttctaccatggccatgattgactctgtgttgtggtattggcccttacatacaactggaggaagtgtgaatttcatcatgttgataaattggactgtcatgattctttataattacttcaatgccatgtttgtcggtccgggctttgtccctctggggtggaaaccggaaatttctcaggataccatgtatctccagtattgtaaagtctgccaagcatacaaggcaccacgttcacatcactgcagaaagtgtaacagatgtgtgatgaagatggaccatcactgtccttggatcaacaactgttgtggttaccaaaatcatgcttcgttcacactgtttctccttttagcaccactgggttgtatccatgctgctttcatttttgtgatgactatgtacacacagctttatcatcggctctcctttgggtggaacacagtgaagatcgacatgagtgcagcccggagagatcctcttccaattgttccatttggattagctgcatttgctaccaccttgtttgccttgggattagctttaggaacaaccatagctgttgggatgttgttttttatccagatgaaaataattctcagaaacaaaacttctattgagtcatggattgaagagaaggctaaagatcgaattcagtattatcaactagatgaagtctttgtttttccatatgatatgggaagtagatggaggaactttaaacaggtatttacgtggtcaggggtccctgaaggagatggacttgagtggccagtaagagaaggctgtcaccaatacagcttaacaatagaacagttgaaacaaaaagcagataagagagtcagaagtgttcgctataaagtaatagaagattatagtggtgcctgctgccctctgaataaaggaatcaaaaccttcttcacaagtccctgcaccgaagagcctcgaatacagctgcaaaaaggggaattcattttagccacaagaggtttacgatactggttatatggagacaaaattcttgatgattcctttatagaaggtgtttcaagaataaggggttggttccctagaaaatgtgtggaaaagtgtccctgtgatgctgaaacagatcaagccccagagggggagaagaaaaatagatagctgctgttaaaacaaaattatcctttaagtctgcttaattacttgaaaattgtacatattactaaagaattatgcaatgagcctactctggttaagatgttcttttcctcaaaggtgccctagtgccatgatttaaatatttttattaccattttgaaatggagctgcccctctttaccacctcttcctccccctcaaaggaaaaacatttcatccaagtaagttaacggcattttctgtaggattttcttatgcactgcacactctggacctcacctgcagatacagttccccccttgccaggagcatctgcatgtggtacttctcttttccctcagttgatatttcttatatgatattctagatactatagaactcaatttgtcagattcagtataacctcagattttgttacctgtcttttaaaaatgcagattttgtcaaatcaaataaagatcaatggatgttgggtataatcagtttttaaaaaaa

SEQ ID NO: 12273 - DNA, 2142 bp, Homo sapiens
tccggaagtgacagtaacagagactgcgcagggggcctgagcgggagagtcctggcgagggcgctggccgagaggtgctcggcttgtagcaggtcccgcactccagcctctcgctgccagggtttgctctctgcttgtcctgggctgaggtgtccatgacggagtcatccaaggaggaaaaaatctgttccgggtgagcccaggccgccccggatatgcgatggctgaggagcagacaccagggaccacactgaggttgggtttcagaccaagacactggattctcctagttaagataaagagctttgggtgcctgacagtgaaaatggtgtaatctgcgttaacagttcacagcttgaaggcatgacaattaaagaacacacatggacttgtggcacatggaaatgtgcgcacagaaaaaggaaatctataattcttttaaagtaggaaggcattcttccttgccaaaatgggtacattctgttcggttatcaagtttgaaaatctacaagaattaaagagactgtgtcactggggtcccatcatagcccttggtgttatagcaatatgttctaccatggccatgattgactctgtgttgtggtattggcccttacatacaactggaggaagtgtgaatttcatcatgttgataaattggactgtcatgattctttataattacttcaatgccatgtttgtcggtccgggctttgtccctctggggtggaaaccggaaatttctcaggataccatgtatctccagtattgtaaagtctgccaagcatacaaggcaccacgttcacatcactgcagaaagtgtaacagatgtgtgatgaagatggaccatcactgtccttggatcaacaactgttgtggttaccaaaatcatgcttcgttcacactgtttctccttttagcaccactgggttgtatccatgctgctttcatttttgtgatgactatgtacacacagctttatcatcggctctcctttgggtggaacacagtgaagatcgacatgagtgcagcccggagagatcctcttccaattgttccatttggattagctgcatttgctaccaccttgtttgccttgggattagctttaggaacaaccatagctgttgggatgttgttttttatccagatgaaaataattctcagaaacaaaacttctattgagtcatggattgaagagaaggctaaagatcgaattcagtattatcaactagatgaagtctttgtttttccatatgatatgggaagtagatggaggaactttaaacaggtatttacgtggtcaggggtccctgaaggagatggacttgagtggccagtaagagaaggctgtcaccaatacagcttaacatttgtctgccatgtctctacagaatcagtgaatctcagtgttttcacctgagaagcttcatgagggcggagaatatactccctgatccctgggccacagtaagcactctaggaatatacacagatgaggacattagagagtgaatagcgagaagaaaacctcactctcagcctctggttcttagcatagggcctttttttccatgctaaaacaacctgtggcctttaaattatcagcaacttgaaatgctggaaaattggggttttgccatatcactctgacagttgatgaggaaaggcgatttttcaacattgagacaagagacttcatttttttctttttatttcttccaatagaacagttgaaacaaaaagcagataagagagtcagaagtgttcgctataaagtaatagaagattatagtggtgcctgctgccctctgaataaaggaatcaaaaccttcttcacaagtccctgcaccgaagagcctcgaatacagctgcaaaaaggggaattcattttagccacaagaggtttacgatactggttatatggagacaaaattcttgatgattcctttatagaaggtgtttcaagaataaggggttggttccctagaaaatgtgtggaaaagtgtccctgtgatgctgaaacagatcaagccccagagggggagaagaaaaatagatagctgctgttaaaacaaaattatcctttaagtctgcttaattacttgaaaattgtacatattactaaagaattatgcaatg

SEQ ID NO: 12274 - DNA, 272 bp, Homo sapiens
gtgacgaacaaaatgatactcagaagcaattttgtgaagaacagaacactggaatattacacgatgagattctgattcatgaagaaaagcagatagaagtggttgaaaaaatgaattctgagctttctcttagttgtaagaaagaaaaagacttcttgcatgaaaatagtacgttgcgggaagaaattgccatgctaagactggagctagacacaatgaaacatcagagccagctaagaaaaaagaaatatttggaggatattgaaagtgtg

SEQ ID NO: 12275 - DNA, 420 bp, Homo sapiens
ttcagagcaggaaattgagaaactatatcacagatctgatgtccagggccagagaattaacatgttcatctccaagcctggtaccaagtcccttcacaaaaatacagatgccaccttcaggaagcctccacgagaaagtggaggcagccagggaagccttggcaagggaaaccacacagcggcgccgtccccagcgcaagtttgccttggttcaggagctcagtgggcaagccctgggggctggctgggaaaggaagttgatgagcagctacggaggggcgtccagtctgcatgaggactcagagcttctcaggcagagagccatctgagccatcatgtgggccataacgtgactcactctgggtccattgagagcatcatccgcgtgggcctacctcaaacctctttcaccagcactcc

SEQ ID NO: 12276 - DNA, 620 bp, Homo sapiens
aactctggagagactgaaactgcctttggcctctacttggtcttgagatatggtctacaacatttccctttacgtgaatgacagacagccctaaaatctgtcgacaatttgaccccatgcttgggtgcactgtgagcctagtgaattatagcaaggaaaggggatgattatcttaaatcatggacaaaatcctatttgggccagtacactttgcttatgagtagctctacattaaaatttaaatattaggttggcagctattttctttcagcatttagaaatatcaacctgggttgatgcagtggctcatgcctgtaatcccagcaatttgggaggccaacgtgggtggactgcttgagcccaggagtttgagaccagcctgggcaacatagcgagaccatgtctctacaaaaaagtgaaaaaattagccagtcatggtgtcccacacctgtagtcccagctactcgagaggctgaggtgggaggatcgctggagcctggaagattgaggctacagtgagctgtgattgtgccactgcattccagtctgggtaacagagcaagactctgtctcaaaaaacaaaacaaaacaaacaaacaaaaaaaaacaaagaaagaaag

SEQ ID NO: 12277 - DNA, 169 bp, Homo sapiens
gtttcactgctcctgatgtttaacgttatgcaaagacgtgtttctgccaatgaatatcgccttacggttatgcttctgcaaatagcctgctgtgagctgataaagggattaatgcagccaaaattcttaatctgtaaaattacaaattaaattctcatattaaaaatac

SEQ ID NO: 12278 - DNA, 267 bp, Homo sapiens
aatagtggtcaaagcaaggtagtttagaaacatgaaagcaatatgtagagattgaaagtaggtgccctaaacagcagaaatctgggatgttgaagtaaaaacaactgctattcttttattataaaccttttactataaactacttgactttttaaaactttaaatcccatatgcatcacttattttaaaataaaaattgactgggcacggtttctcacatctgcaatcccagtgctttgggaggctgagtcgggaaaatcacttgag

SEQ ID NO: 12279 - DNA, 733 bp, Homo sapiens
ggatgacctaatttagaaactataggagaattaggggaagctctttggaggaagtggtgcctaatgttgacataaaagaaataatgaagcaaggagagggagaccagaattacgggcagaaggaatagcatttgtaaaagtaggttccgggaggtaagaagggcaacttttacatgcctgttataggagctagcataaagtagagttctatggtgagaagagattatttagtgctgccattccagcaataactgagaggtagattttaaaatggcacaaataatacacatttgtttggtgatggggaaataagttcatggaaggctatgagttgtttatgaatagactaggttcatgatattggacttcttaccagtttggccctagttttgttgcagaacagattataactgggatcagagtatttagcaaaggatctatcccaaggctaaagattaacctaagaagaaaagcacgaacatgttaccacaaattctctctgtagtctgaagatacctaataataccaaagaaaggcaggcaaaaatgactgactttcttgctgcaattaagaaattctgctttctgtgaatgaatgcgtggtaaaaaaaaaaaaaatactcatatgttctgaaccgttcctctccctattcagacatgggagcttacagcgtattaagcaagtactttattcattattctgttaaaggcattcccatggacaacacacgggg

SEQ ID NO: 12280 - DNA, 383 bp, Homo sapiens
gttcatttgtataccagtgcacagtaatgctattacatttatgaggttgtgtttactttttaatttggaaggctctgtttctcagaattggttgcaacccgccaggtgtggtggcttacgcctgtaatctcagcactttgggaggctgaggcaggcagatcacttgaggtcaagagtttgagaccaacttggccaacatggtgaaaccccatgtcactactaaaaatgctaacattagctgggcatggtggcgcatgcctcttatcccagctactcgtgaggctgaggcaggagaatcgcttcaacctgggaggcagaggttgcagtgagctgagatcatgcctctaaactccagcctgggcattagagggagactctgtctc

SEQ ID NO: 12281 - DNA, 1815 bp, Homo sapiens
aactcacgcgctggcgggaccctcagggctttaccagcaactaccccagtgccggggagggttctgctgcttcgaaagctgctctacccttctccaaaagaagagccaagagaaggtccttttctacaaatatcagagccatggctcaggagtcagtgatgttcagtgatgtgtccgtagacttctctcaggaggagtgggaatgcctgaatgatgatcagagagatttatacagagatgtgatgttggagaattacagcaacctggtttcaatggggcattctatttctaaaccaaatgtgatctcctacttggagcaagggaaggagccctggttggctgacagagagctaacaagaggccagtggccagtcctggaatcaagatgtgagaccaagaaattatttctgaagaaagaaatttatgaaatagaatcaacccagtgggaaataatggaaaaactcacaagacgtgattttcagtgctccagtttcagagatgattgggaatgtaataggcagtttaagaaagaactcggctctcaggggggacatttcaatcaattggtattcactcatgaagatctgcccactttgagtcaccatccatccttcacattacagcaaatcattaacagtaaaaagaaattctgtgcatctaaagaatataggaaaacctttagacatggctcacagtttgctacacatgagataattcataccattgagaagccttatgaatgtaaggaatgtggaaagtcctttagacatccctcaagactcactcatcatcagaaaattcatactggcaagaaaccctttgaatgtaaggaatgtggaaaaacctttatttgtggctcagaccttactcgacatcacagaattcacactggtgagaaaccctatgaatgtaaggaatgtgggaaagcctttagtagtggttcaaacttcactcgacatcagagaattcacacaggtgagaagccttatgaatgcaaagaatgcgggaaggcctttagtagtggctcaaactttactcaacatcagagaattcatactggggaaaaaccctatgaatgtaaggaatgtggcaatgcctttagtcagagctcacaacttattaaacatcaaagaatccatacaggtgagaaaccttacgaatgtaaggaatgtgaaaaggcttttcgttctggctcagaccttactagacatcagagaattcatactggggagaaaccctatgaatgtaagatatgtgggaaggcttattctcagagttcacagcttattagtcatcatagaattcatactagtgagaaaccctatgaatatagggaatgtggaaagaactttaattatgacccacaacttattcagcatcaaaatttgtactggtgatgaaacagaatatatgaaatgtgtagggaggcttttaattatggctcaaaacagaatttatcttgttaataattcctctagatagaataatgtagaaacattttatttgtggactacagcttattcagcctgggaaaaataatgttggagaaatactctatgaatagaatatactttggaagcccttaactaaacgcttacttctcttgacatcagataattcagtctagcaatatgatagataattcagtctgtcatactgaaaatgacagcacttttaacacctttctaaccttcttaacgtcaaagaatttttgtagaaatgtagtcctgtgattgtcattttttcccctaatttctctaattgttacattcttagtattttaatccatattaaatttatatggctataaatttc

SEQ ID NO: 12282 - DNA, 2447 bp, Homo sapiens
aactcacgcgctggcgggaccctcagggctttaccagcaactaccccagtgccggggagggttctgctgcttcgaaagctgtcctggaatcaagatgtgagaccaagaaattatttctgaagaaagaaatttatgaaatagaatcaacccagtgggaaataatggaaaaactcacaagacgtgattttcagtgctccagtttcagagatgattgggaatgtaataggcagtttaagaaagaactcggctctcaggggggacatttcaatcaattggtattcactcatgaagatctgcccactttgagtcaccatccatccttcacattacagcaaatcattaacagtaaaaagaaattctgtgcatctaaagaatataggaaaacctttagacatggctcacagtttgctacacatgagataattcataccattgagaagccttatgaatgtaaggaatgtggaaagtcctttagacatccctcaagactcactcatcatcagaaaattcatactggcaagaaaccctttgaatgtaaggaatgtggaaaaacctttatttgtggctcagaccttactcgacatcacagaattcacactggtgagaaaccctatgaatgtaaggaatgtgggaaagcctttagtagtggttcaaacttcactcgacatcagagaattcacacaggtgagaagccttatgaatgcaaagaatgcgggaaggcctttagtagtggctcaaactttactcaacatcagagaattcatactggggaaaaaccctatgaatgtaaggaatgtggcaatgcctttagtcagagctcacaacttattaaacatcaaagaatccatacaggtgagaaaccttacgaatgtaaggaatgtgaaaaggcttttcgttctggctcagaccttactagacatcagagaattcatactggggagaaaccctatgaatgtaagatatgtgggaaggcttattctcagagttcacagcttattagtcatcatagaattcatactagtgagaaaccctatgaatatagggaatgtggaaagaactttaattatgacccacaacttattcagcatcaaaatttgtactggtgatgaaacagaatatatgaaatgtgtagggaggcttttaattatggctcaaaacagaatttatcttgttaataattcctctagatagaataatgtagaaacattttatttgtggactacagcttattcagcctgggaaaaataatgttggagaaatactctatgaatagaatatactttggaagcccttaactaaacgcttacttctcttgacatcagataattcagtctagcaatatgatagataattcagtctgtcatactgaaaatgacagcacttttaacacctttctaaccttcttaacgtcaaagaatttttgtagaaatgtagtcctgtgattgtcattttttcccctaatttctctaattgttacattcttagtattttaatccatattaaatttatatggctataaatttcatctgtttacatcctgatttgtatactattttaaaaatacctttagtacctgggagaagtgacctctttatttttgaagatggcttattcttttgttctttataacattaaggctttcttattgtaaaaatgttcatgaacgacattttactcaatagagattcttcattatcttcatggtgttttgttgtgttactgtaatatcacttatgaaatcctattggtggatatcgtagtctcctctagatattttgccataatacatgccaaaatacaagtccctgctggacattctccctaagcacatctttgtatcatatcttttaattgcagaagtaatgtgtgaatatattttccttataaaagatgcaaacattacaaaaaggcaaatgtaccctttgaccatatcccaaaggatagtctttatcagttcattatttattgctgatcatttttctgttcatatatacatgcgtgtctcagtaaaaattataaaatgggggataattataatacctacctcataatgctttgtgaggattaaatgaattaagatcgataaagtgcttagaattgtgcctgacatgataaatacatactcactgaatgttagtcatcgttattatattcatcatcatcagtattattatttgtagaaaggctttttaacttctgcagaacttagtcaccattaggcagggtgtttgactgaagaaagaccctttgaaggtaacaagttaagaaaatttcccatcatcatgtacttactattgaacatgaaataatcctaggtgttgggggggaaagtactgtgaataatgtgtgtgaaggactttattccgactaatactctttttgtcgcattttatacccagtaaaaaagaaaagagaacataagcaaaatattggtgcactaatgagga

SEQ ID NO: 12283 - DNA, 2680 bp, Homo sapiens
ctcggctttgtgcggcggtggagctctacccttctccaaaagaagagccaagagaaggtccttttctacaaatatcagagccatggctcaggagtcagtgatgttcagtgatgtgtccgtagacttctctcaggaggagtgggaatgcctgaatgatgatcagagagatttatacagagatgtgatgttggagaattacagcaacctggtttcaatggggcattctatttctaaaccaaatgtgatctcctacttggagcaagggaaggagccctggttggctgacagagagctaacaagaggccagtggccagtcctggaatcaagatgtgagaccaagaaattatttctgaagaaagaaatttatgaaatagaatcaacccagtgggaaataatggaaaaactcacaagacgtgattttcagtgctccagtttcagagatgattgggaatgtaataggcagtttaagaaagaactcggctctcaggggggacatttcaatcaattggtattcactcatgaagatctgcccactttgagtcaccatccatccttcacattacagcaaatcattaacagtaaaaagaaattctgtgcatctaaagaatataggaaaacctttagacatggctcacagtttgctacacatgagataattcataccattgagaagccttatgaatgtaaggaatgtggaaagtcctttagacatccctcaagactcactcatcatcagaaaattcatactggcaagaaaccctttgaatgtaaggaatgtggaaaaacctttatttgtggctcagaccttactcgacatcacagaattcacactggtgagaaaccctatgaatgtaaggaatgtgggaaagcctttagtagtggttcaaacttcactcgacatcagagaattcacacaggtgagaagccttatgaatgcaaagaatgcgggaaggcctttagtagtggctcaaactttactcaacatcagagaattcatactggggaaaaaccctatgaatgtaaggaatgtggcaatgcctttagtcagagctcacaacttattaaacatcaaagaatccatacaggtgagaaaccttacgaatgtaaggaatgtgaaaaggcttttcgttctggctcagaccttactagacatcagagaattcatactggggagaaaccctatgaatgtaagatatgtgggaaggcttattctcagagttcacagcttattagtcatcatagaattcatactagtgagaaaccctatgaatatagggaatgtggaaagaactttaattatgacccacaacttattcagcatcaaaatttgtactggtgatgaaacagaatatatgaaatgtgtagggaggcttttaattatggctcaaaacagaatttatcttgttaataattcctctagatagaataatgtagaaacattttatttgtggactacagcttattcagcctgggaaaaataatgttggagaaatactctatgaatagaatatactttggaagcccttaactaaacgcttacttctcttgacatcagataattcagtctagcaatatgatagataattcagtctgtcatactgaaaatgacagcacttttaacacctttctaaccttcttaacgtcaaagaatttttgtagaaatgtagtcctgtgattgtcattttttcccctaatttctctaattgttacattcttagtattttaatccatattaaatttatatggctataaatttcatctgtttacatcctgatttgtatactattttaaaaatacctttagtacctgggagaagtgacctctttatttttgaagatggcttattcttttgttctttataacattaaggctttcttattgtaaaaatgttcatgaacgacattttactcaatagagattcttcattatcttcatggtgttttgttgtgttactgtaatatcacttatgaaatcctattggtggatatcgtagtctcctctagatattttgccataatacatgccaaaatacaagtccctgctggacattctccctaagcacatctttgtatcatatcttttaattgcagaagtaatgtgtgaatatattttccttataaaagatgcaaacattacaaaaaggcaaatgtaccctttgaccatatcccaaaggatagtctttatcagttcattatttattgctgatcatttttctgttcatatatacatgcgtgtctcagtaaaaattataaaatgggggataattataatacctacctcataatgctttgtgaggattaaatgaattaagatcgataaagtgcttagaattgtgcctgacatgataaatacatactcactgaatgttagtcatcgttattatattcatcatcatcagtattattatttgtagaaaggctttttaacttctgcagaacttagtcaccattaggcagggtgtttgactgaagaaagaccctttgaaggtaacaagttaagaaaatttcccatcatcatgtacttactattgaacatgaaataatcctaggtgttgggggggaaagtactgtgaataatgtgtgtgaaggactttattccgactaatactctttttgtcgcattttatacccagtaaaaaagaaaagagaacataagcaaaatattggtgcactaatgagga

SEQ ID NO: 12284 - DNA, 2515 bp, Homo sapiens
aactcacgcgctggcgggaccctcagggctttaccagcaactaccccagtgccggggagggttctgctgcttcgaaagctgctctacccttctccaaaagaagagccaagagaaggtccttttctacaaatatcagagccatggctcagtcctggaatcaagatgtgagaccaagaaattatttctgaagaaagaaatttatgaaatagaatcaacccagtgggaaataatggaaaaactcacaagacgtgattttcagtgctccagtttcagagatgattgggaatgtaataggcagtttaagaaagaactcggctctcaggggggacatttcaatcaattggtattcactcatgaagatctgcccactttgagtcaccatccatccttcacattacagcaaatcattaacagtaaaaagaaattctgtgcatctaaagaatataggaaaacctttagacatggctcacagtttgctacacatgagataattcataccattgagaagccttatgaatgtaaggaatgtggaaagtcctttagacatccctcaagactcactcatcatcagaaaattcatactggcaagaaaccctttgaatgtaaggaatgtggaaaaacctttatttgtggctcagaccttactcgacatcacagaattcacactggtgagaaaccctatgaatgtaaggaatgtgggaaagcctttagtagtggttcaaacttcactcgacatcagagaattcacacaggtgagaagccttatgaatgcaaagaatgcgggaaggcctttagtagtggctcaaactttactcaacatcagagaattcatactggggaaaaaccctatgaatgtaaggaatgtggcaatgcctttagtcagagctcacaacttattaaacatcaaagaatccatacaggtgagaaaccttacgaatgtaaggaatgtgaaaaggcttttcgttctggctcagaccttactagacatcagagaattcatactggggagaaaccctatgaatgtaagatatgtgggaaggcttattctcagagttcacagcttattagtcatcatagaattcatactagtgagaaaccctatgaatatagggaatgtggaaagaactttaattatgacccacaacttattcagcatcaaaatttgtactggtgatgaaacagaatatatgaaatgtgtagggaggcttttaattatggctcaaaacagaatttatcttgttaataattcctctagatagaataatgtagaaacattttatttgtggactacagcttattcagcctgggaaaaataatgttggagaaatactctatgaatagaatatactttggaagcccttaactaaacgcttacttctcttgacatcagataattcagtctagcaatatgatagataattcagtctgtcatactgaaaatgacagcacttttaacacctttctaaccttcttaacgtcaaagaatttttgtagaaatgtagtcctgtgattgtcattttttcccctaatttctctaattgttacattcttagtattttaatccatattaaatttatatggctataaatttcatctgtttacatcctgatttgtatactattttaaaaatacctttagtacctgggagaagtgacctctttatttttgaagatggcttattcttttgttctttataacattaaggctttcttattgtaaaaatgttcatgaacgacattttactcaatagagattcttcattatcttcatggtgttttgttgtgttactgtaatatcacttatgaaatcctattggtggatatcgtagtctcctctagatattttgccataatacatgccaaaatacaagtccctgctggacattctccctaagcacatctttgtatcatatcttttaattgcagaagtaatgtgtgaatatattttccttataaaagatgcaaacattacaaaaaggcaaatgtaccctttgaccatatcccaaaggatagtctttatcagttcattatttattgctgatcatttttctgttcatatatacatgcgtgtctcagtaaaaattataaaatgggggataattataatacctacctcataatgctttgtgaggattaaatgaattaagatcgataaagtgcttagaattgtgcctgacatgataaatacatactcactgaatgttagtcatcgttattatattcatcatcatcagtattattatttgtagaaaggctttttaacttctgcagaacttagtcaccattaggcagggtgtttgactgaagaaagaccctttgaaggtaacaagttaagaaaatttcccatcatcatgtacttactattgaacatgaaataatcctaggtgttgggggggaaagtactgtgaataatgtgtgtgaaggactttattccgactaatactctttttgtcgcattttatacccagtaaaaaagaaaagagaacataagcaaaatattggtgcactaatgagga

SEQ ID NO: 12285 - DNA, 1241 bp, Homo sapiens
aactcacgcgctggcgggaccctcagggctttaccagcaactaccccagtgccggggagggttctgctgcttcgaaagctgctctacccttctccaaaagaagagccaagagaaggtccttttctacaaatatcagagccatggctcaggagtcagtgatgttcagtgatgtgtccgtagacttctctcaggaggagtgggaatgcctgaatgatgatcagagagatttatacagagatgtgatgttggagaattacagcaacctggtttcaatggggcattctatttctaaaccaaatgtgatctcctacttggagcaagggaaggagccctggttggctgacagagagctaacaagaggccagtggccagtcctggaatcaagatgtgagaccaagaaattatttctgaagaaagaaatttatgaaatagaatcaacccagtgggaaataatggaaaaactcacaagacgtgattttcagtgctccagtttcagagatgattgggaatgtaataggcagtttaagaaagaactcggctctcaggggggacatttcaatcaattggtattcactcatgaagatctgcccactttgagtcaccatccatccttcacattacagcaaatcattaacagtaaaaagaaattctgtgcatctaaagaatataggaaaacctttagacatggctcacagtttgctacacatgagataattcataccattgagaagccttatgaatgtaaggaatgtggaaagtcctttagacatccctcaagactcactcatcatcagaaaattcatactggcaagaaaccctttgaatgtaaggaatgtggaaaaacctttatttgtggctcagaccttactcgacatcacagaattcacactggtgagaaaccctatgaatgtaaggaatgtgggaaagcctttagtagtggttcaaacttcactcgacatcagagaattcacacagaaaaatggataactatacatttccctgaaatttgcttttttacattcaactgtacattttggattttccttcaatagatgatgatctaacagtctttctgatggttacagtatgttccacagtgttatttaccaatgccttttcaaccactttcccaattgtgatattatggattgtttgcgcttttttgccatctaaaagtaatgctgcaacaaacactttgtattcttgtctgttttatttctataaaataagcttcccaagtc

SEQ ID NO: 12286 - DNA, 458 bp, Homo sapiens
gaaatactgtgaagaaccagcatcttctagtctacctggatatagtcatggttgttatagaaacagtatggggccgaactgtctgccccatacacaagcagccaagcaattctttaattataaaactaaaagccagattctttgttatattttagtatgctatttgcatctatattccatgtatcccttagcaatgttgtattattgacctaaaaaagagtgtcttcttcacaacatggatggtactggacacctttacaatatcacatccctgcctaactggtcagtcccctagacaccatgcaagctattactactaataataaacaaaatctgtgacgacttctaccatttattgagtgcgctacatgttaagtacatcacttggcattttaaaaagacaaaataataaaagtatcttcaagtggagggaataaaaagtaatgtatttgaaaaga

SEQ ID NO: 12287 - DNA, 748 bp, Homo sapiens
cagcgtatttatggtatctcggtgactcctaccttaaccctgttgacttttaagatttcaaggcaaattgagttaggaatctcttcctagcaagaaggccttgtaagtaagaggtccttaaaaataaaagaaaaaaacctaacatgtagactttttctctgcagccccatgtcctggaaccttctgcttttaacctgttaataatggagttatttcgtattgcagtttgcccagttttgtgccaaagagctcgtttttcatactccttccccagacatgaccttgtaaatctttgccggaggtaaaggattagcgtggctgagcagttcgagggagtgaagtgtcttatctctataactttccaaagtggtcctcttctgtgtggtgggtaggttctgtggtattagagtgctgtgtttcagtgatagtgtagcctgctcgatctctaaagtctctgcttagtgttgtttctatataaaaaaaaaaaaagaaactgtggctaccaaccaacttataaacaagttgattggaggcaatccttatttactgtgaggtaagccatgtaataaaatattttaaagctaatgtagcatatcaatttataaaacaagccatgtgctttatcttattcagtttctcccaatgtcagagtgatggttcacaattgtgaatggtgattgagatctggaatgaattcaccagtatttttcaattgtctttttgttgccgtggcatggttgatgtgctt

SEQ ID NO: 12288 - DNA, 384 bp, Homo sapiens
ggatgattcattgagtctatttcaccttatgttatagaggctagcctatcaatgtaaggactgtggaaactcatatgcaattatatttctggttggtaagtgatccaaaaaagatgtaaaagattatttatcccgttagaaaatgaaagtctaggtgggatggctcacacgtgtaatcccagcactttgggatgctgaggcaggcggatcacctgaggtcagaagttcaagaccagcctggccaacatggtaaaaccccatctcgactaaaaattcaaaaattagccaggtactcgggaggctgaggcaggagaattgcttgaacctgggaggcagaggttgcagtgagctgagatcacaccactgaactccagcctgggcgac

SEQ ID NO: 12289 - DNA, 564 bp, Homo sapiens
aaagcttaaatcaagaagaaatatttgatttgatttcttaaatgtcttctcaccatctacagataccatataatgatttacgttaatagaattgttaatattaaaccatcattgcatttctagaacaaactcacttggtcatgctttctatttgctaatattttatttacataatttaaaatctagattataagtgagtctcataagaaaatctgtagttttctttgttagggctatctccgtcaggctttggaatcagcgttatgctggctttgaacagatacatgtgtaagtttccttactttgctctggaatatttcagagggcacagagttttatttcctgaagaattaaaagaatttgcctataaaactgttagggcatgctgctttgagcagcatgaggagtagctgataattagtttctcaaattttttctttggttatcagtctatgtaatttcctatattcttctcctaagtcaaattttgttacgtatattcaaaatatttgtcataaaaatatatttctattttctccctataaagcaataggcagccatgtg

SEQ ID NO: 12290 - DNA, 178 bp, Homo sapiens
cccctaccccactcccagcccttccgtttccctccacgtccccttcccgcgccctcccccacttgaattcttcctcccctccggctggaagaaaagtcggtaatgagaaaccagttcagtgtcagtcggaggaggggggcagataaccccagagatacacggcaatggagagagaact

SEQ ID NO: 12291 - DNA, 675 bp, Homo sapiens
gtattttttgtttcgttttgtttttgtttttgttttttgagacagtgtattaggccattcttgagttactataaagaaattcctgagactgggtaatttataagaggtttagttggttcacagtgctgcaggctgtacaagaggcatagtgccagcatttgcttctggagagtccttaggaagcttacaatcatggtgaaaggaaaagggggaggaggcacatctcacagcaaaagcaggaataagagaaagagagtatggggggaggtgccacatactttaaaatgaccagatcttgcaaaaactcacttggcaccaaggggacagccctagccattcatgagggacctgcccccatgatccaaatacctcccaccagttattacatttcaacatgagatttgggtggggacaaatatccaaaccatatcagactgggtcttaatctgttgtccaggctggaatgcagtcacacaatcacagctcactgcagcctcaacttcctgggctcaagcaatgtcctcatcctcctacctcagcctctcaagtagctgctattacaggcacacgccaccatgcctggctaattttgttgcttttgtagagacaaagttatataccatgttgcccgggcttagctagttatttttaaaaggcttctgaatttcctctctg

SEQ ID NO: 12292 - DNA, 371 bp, Homo sapiens
cacctgagtcctgtacctccgtgtccacccccacacccagtctgtcctccccctagccttccccatctcagccacagcagcagagcccctagaaactccggggaaacccaatcatcagttttgactctcttctccctgtacctctcatatctcatccactggctgctcccgtcaactgttttcaaaatacactgtgagttcaacgaccacttctcccactgtcaccctgaacgaagccaccaaccgctctgacccaggccactgcagtggtttccctgcttaagccactctgcctctctactcagcagccagaagcgctttttaaattaaaatgtccactggaacatgtcaatccctggtgaaaatagccc

SEQ ID NO: 12293 - DNA, 440 bp, Homo sapiens
cacactgctctcctgctggtggaactggcagggctggttccttgttcttcttcttttgattggcatgtcactttctcagtgaggttttctcatccatccatctgcccacccatccatctgatgtctttgctgggtagacaggagtaaacaagtcaaacgcagccaggcgcaattgctcatgcctataatctcagcattttgggagggcaaggcaggtggatcccttgagccaggagttcgagaccagcctgagcaacatggtgagaccccatctatacaaaaaatacaaaaattagctgggggtggtggtgcaccaggaggctgaggtaggagaatcacctgagcctggggaggttgaagctatagtaagccatagtcatgccactgcactccagcctgggtgacagagaccctacctcaaaaacaaaaacaaaaacaaa

SEQ ID NO: 12294 - DNA, 581 bp, Homo sapiens
agatcaaatgctgatttcttcatatatcacaatacatacaaagtcagtgtaagaaagtgttgctaggaagaaatgactttttctaatcccactcctatccttatgtttataccaagtttatagagttgaaactatgttgttctactactttaagccctcctatttagacttaaaagctaggatagatacaaggtatgtggggcaaaatcataggtagagattagtccctaggactgcatcctcgtctcctaccctctcctattattttcttctctttactctccagaattctgataatataagtactggggccagcattcagcttatggttttctactcaagctgtcttgtctcttgtctctgtgtgttttttcgagtatgtcaacagagaagacttcaagtatggtgtggtataatagagaatatagctgatctttatccctagttgctgacacagcttcaaaaaatcttggaatttcctgtgtgacaggagtatctttgttatgctaatgaagtgacttatggtgggcccctagatagcttcaggatggggactggtcaccagaaggaccaaccatgtg

SEQ ID NO: 12295 - DNA, 558 bp, Homo sapiens
cataaacattccaaccatagcacttaagtcacctgctgtgtcccctttcatcccttgtttttcaccaagtagactggctgctcccagagggagaggccatgtctgatttacatcagggctgtcacagatttacacagagggaatccgtggcaagtcccatcactcccactcctggaacttgagtaggtcatctcacctctctgagccgctctttctgataagatttggctctgtttccccacccaaatctcatcttgaattgtaattcccacatgtcaggggagggacacgtaggactggacaggcgggaggtgattggatcacggggtcggattccctcacgttcttgtcgtgatagtgagttctcgcgagaggtgatggttttaaagcgcggcacttcctcattctcgcacacacgccctcctgctgcccatgaagaaggtgtctgctttcccttcgccttccgccatgattgtaagtttcctgaggcctcctagccatgcttcctgttaaatctgcagaactgtgagtcaattaaacctctttcttttataatta

SEQ ID NO: 12296 - DNA, 258 bp, Homo sapiens
cccaatatttgttaaaaagatgattccttctccactgacttacctttggcaaaaataaattaatcagaaatttgtaagcttatatctgaactttctctattccactgctcatgtgtctatccttttgccaatacttatgtttatttagatcttcctcaatgtttgcagttttcagcatgcaattcttacacaaatcttatatctgaactttctctattccactgctcatgtgtctatccttttgccaatacttatgtt

SEQ ID NO: 12297 - DNA, 570 bp, Homo sapiens
tcgtgatcctcccgcctcggcctcccaaagtgctgggattacaggcgtgagccactgcacccagcctctttttttttttgagatggagtttcgctcttgttgcccaggctagagtgcaatggcatgatcttggctcactgcaacctccgcctcctaggttcaagcgattctcctgccccagcctcttgagtagctgggattacaggcacccacgaccatgcctggctaattgcatttttactagagacaggtttcaccatgttggccaggctggtctccaattcctgacctcaggtgatccacccgacttggcctcccaaagttctgggattacattttttttttaaagaaagaataaattaattgtgattaaagttgaaatcaaggcatagtctttccagtctaatttttactgtaatgcttgtatgtcaacagttatgaaggccaggcgcggtggctcacgcctgtaatcctagcagtttgggaggctgaggagggtggatcacttaaggtcaagagttcaagaccagcctggccaatatggtgaaaccccatctctactaaaaatac

SEQ ID NO: 12298 - DNA, 357 bp, Homo sapiens
gatacactcgagaatttctagcgaaagaaaaaaatgaagctaagaaagtggtcgataagtaacaagaaagtgttaaacaaacttgtaaaattataagttaaatctaaaaagttgttgatagcacaatggaaaaaataattaatagaactaaactaaaactaaaatctcaaatgatcttaacatagtggctttggaatggggggataggatatggggaaagtgaaagtagactaatttggaattgtgtcaaatcaataggtaactatccagggagagtatagagatgttgactaataccagatattcatagaaaaatatatgcttaaatgtgtgttaaaatttaaggataatcaccaa

SEQ ID NO: 12299 - DNA, 848 bp, Homo sapiens
acgtgcatggtatttttatcttgacctttgttttgttttgttttaatggtaagtgctactttgtgaaaacattgttgcctttgactgtgttattctatttaaactagcttataagtagatattcacttcagttgcagtatattaaaatactaattggaatcatgtactttaaatatatcaagcagtttctagtttaaattagtctcattaaatactcctttaggttactgggttatatatttcagcttacagaatttgtggaaaaatagtatatatgttatttgataaaatgattcagtttccttatgttttagagactgtcactcatgagtgacatgaaaagaagtagtgagtgagggactcttactctgaatccagataaaatgttcgtagcacatccaatcataaacatcaaaatataattttccattttaatacttccttccttctcttttgtgtggtggaggtggcaaagagaaggtgaacacatgtagcatcgactttttcctctttaaaggacttcttttgtggcttgaatagatcgtggatattaagcaaaataaataaatttacggagcttaattttaatcagtttggctggtttcttacatattttcttgggtttgttggagtccctttccgtatgacttactagagaattctaaagagagtttatgatttgaagcaaaacatgttaaaacaacagctaggattcgagacccagtacaatcttgtttttacatacatgtatttaaaagcttgaacccgggaggcggaggttgcagtgagcggagaccacatcactgcactccagccttgcaacagagtgagactctgtctcaaaaaaa

SEQ ID NO: 12300 - DNA, 1709 bp, Homo sapiens
  misc_feature (46)..(46): n is a, c, g, or t
  misc_feature (404)..(404): n is a, c, g, or t
  misc_feature (476)..(476): n is a, c, g, or t
  misc_feature (497)..(497): n is a, c, g, or t
  misc_feature (666)..(666): n is a, c, g, or t
  misc_feature (675)..(675): n is a, c, g, or t
  misc_feature (859)..(859): n is a, c, g, or t
  misc_feature (1066)..(1066): n is a, c, g, or t
  misc_feature (1170)..(1170): n is a, c, g, or t
  misc_feature (1178)..(1178): n is a, c, g, or t
  misc_feature (1184)..(1184): n is a, c, g, or t
  misc_feature (1193)..(1193): n is a, c, g, or t
atataaaatgctaaataccttcttaaattctttgtaaaatgatatnggtataaatatataaattaaggttaaataaggtgggaaagttaaattataaaatctaaaattacggaaaaatcaaaatagactagaaaagttaacttgatttttaaatagaaatcataaagaaaaataagaaattatgtctctacacagtataaagtgagaataaaacaatagaaatatgacacttcttcaagagtctgtgatattttaaaaataccatcttcaacagaaatattgacaaaacattttccagaagaagaaactaagttaaaatgtagaaatgtgcattcttgtaaatggtagtgaaaagtaaactaggaaatctattttttaaaagtaattcccaatgacatcggggnttttttttgttttgttttgttttgttttgtttttttaataagagacagaatctcactctgtaacccaggctngagtgcagtggcatgatcatngctcattgtaacctcaaactcctgggctcaagagaccttcctgcctcagactcctgaatagctgggactacagccacatgccaccacgccaagccaatttttaaattttttgtggagatggagtctcactatgttgcccaggctcatctcaaactcctgcgctcaagcnatcctctcncctcagcctcccaaagtactgggattacaggggtgagccaccacacctggcccaatgatatcatttttctaaacaatgccttctttgctgttaacattgtaagattgtttgtatactttaaaaggagcaaaatggtcatatgtgggaacagccatagagattcatttcttttgaccaaataatnccactcctattaaagtagacatatatacaaaattatttattaaagcactttttgttagagggcaactgacatatctaacatctggggagtagtctaattgtcatgatacatcacgataagagtcctatgtcatcattaaaattggaacaatgaggccaggcacagtggctcacacctataaatccaccactttgggaggacaaggcnagaggatcgcatgtgggcaggagttcaagactagcctgagcaatatagcaaaatcctatttctacaaaataaaaaataaaaaatgagccaggcgtggtgacatntgcctgtngtctcngctactccngagactgaggtgggagggttactccagcccaggcattcaaggctgcagtgagctatgatcaaaccactatactccagcctgggccacagggtgatcctgcctcaacaaacaaggacaaaattgtaacgatatgtagttagacaatatatacaatcctatacattttgacaaaattgtagcaaagaatatgtagttagacaatacatacaattgtataacattttgacaaaattgtaacaatagtttgacaatatatacaattgtataacattttgacaaaattgtaacaatgatatgtagttagacaatatatacaattgtataacatttaatgttaaataattgcaactgtaaaatacgtatatgtgaaggggatctgaaaatcaactgaatcaaaatgtaaggattactgccactttaaaaatttgctcaaatttatgaatcttatttcactttttaaaatcatgcaaatcatctaagatgctgggacacattcctagccttcccctctgtgcc

SEQ ID NO: 12301 - DNA, 833 bp, Homo sapiens
taagtaaaatgttttctttttttcatttgtctttatgatgtactagtattcaagatttgaaggaaagaattagacagcgtaccaacttaccacttgggccaagtatcgatactcatggggagacttttctatcccaagaagtggtggttaatcttttacaagaaaccaaacaagccttgaaagtatcataaatatatcattcttcaaattgattgtgatgaaaggaaataggattctttctccttagaattttcactgatctataatgggatcaaaaaagtagaaaaatcagtctgcagaatgaaaacagattaatgaaatagctagaaaggaggggagagcatttgtttagttaaatgttaaggtaacttgaaaattgtctatgaaatgctaaaactgtaccagagccttattgcacactcaacattttaagcctgggagcaggggaaggtgggaaaaggttggagtgatagaagtgtttgccttatgatctcttgactccttttacacaagaagcagattggtagagcttaagcaggtgtctgtgctgtggtgctggctctgccaaaaactctcatgtgccctaggaaagttcctttaacttctctgagcccgagtttatctgtaaagtgaagactttttaaatttagtaatctgtatgtctcatctctgagaattctataatgttttcacattgttatatgtgtatatgtacatgttgctcccctctagtcactaagatgccacatatttctacttgagtgaacagattgcaagtccaaatgttcttgtttctaatactaataattgatctcagcaagacataaaaaagt

SEQ ID NO: 12302 - DNA, 912 bp, Homo sapiens
cccagattttcttatgcaggaaagaaacatgaagtaagatttaagccttgaaagtatcataaatatatcattcttcaaattgattgtgatgaaaggaaataggattctttctccttagaattttcactgatctataatgggatcaaaaaagtagaaaaatcagtctgcagaatgaaaacagattaatgaaatagctagaaaggaggggagagcatttgtttagttaaatgttaaggtaacttgaaaattgtctatgaaatgctaaaactgtaccagagccttattgcacactcaacattttaagcctgggagcaggggaaggtgggaaaaggttggagtgatagaagtgtttgccttatgatctcttgactccttttacacaagaagcagattggtagagcttaagcaggtgtctgtgctgtggtgctggctctgccaaaaactctcatgtgccctaggaaagttcctttaacttctctgagcccgagtttatctgtaaagtgaagactttttaaatttagtaatctgtatgtctcatctctgagaattctataatgttttcacattgttatatgtgtatatgtacatgttgctcccctctagtcactaagatgccacatatttctacttgagtgaacagattgcaagtccaaatgttcttgtttctaatactaataattgatctcagcaagacataaaaaagtaaaaaaaaaagtaatcttaccttttattttgaccttggctttaaattattatgatttatcatttcatctttgaatgctgagtgaattacctaaacagaatgtctgttccagttaatcttctctttaaatttttgtagtttaataaacatgtaacaaatcagaagcaagtatatcatgcttatcgatgaactgtagcagattgtaatgg

SEQ ID NO: 12303 - DNA, 275 bp, Homo sapiens
gaagtttaggacacgaagaagaaaagtaactgtttagagtcatatagatagcaagtagaaggttttcaaactcaaacactctgacactagaattcagattttaaccacttattatactgcctctcatttctatacataattacagtgaattatgaatatattttataatccctagactataagccagaggccaggaactgttgttttagtttttcctgcaacacatggtctaatggtattcaatatttatggtaagtataaatgcttaaaatttt

SEQ ID NO: 12304 - DNA, 1214 bp, Homo sapiens
gtagagttgcacagtagaagagggctgcatgtaagaaggcagttctgtctcagaggacaaaaggcctgggagcacccagacagacagtcactgcatggaggtcactcccctcccagtggccactgtggagacatttcacagaaatgcttgctggaccattcaggttcagagttgggacaaaaccgagaactcatggggatattggacaggagttaggaaatgaccttctcacacaactggggcagtgggggagaaccctgggcttgagacttgcaatccaccacttgcccctgcccctgcccctgcagtgtggccgctgttaccttttcctgcaactctgccttcttgagtccaaatgtcttcgaaaggggcaaatgcttcgtaagtgccgacagggtgtgtttcagtgaatgtttgcagtgtgcaccggtctggctgaaggcctcttcccttccccaacaccctcccatcgtgcaaaattaccctgcccagcagggagtgacttgtgtgtctcagaagattttgttgctgtgctctgagttctcactcctcatctcctttgaccagtttcttctaatactccccttgttcacaacacagaacatgagtgctctttcctatcattttgacactaataaacggacagtgattctcagtgtggaaatgagaatgaagttttttttaaagacaggctacaataattcccatgcagagaaccacatgcgatgacactggattccaaacagcaagaacgtatggtgaagatgaggccaacagtgagctgagagaggccagccagggtgtgtttcagtgaagatgagaaacaatcagataacacctgtttcctccaggaaagaaaatgtggccagggaaaagagatgggaggaaggctggtcattgcctattccactgtgcacagtttgaatttggagccatgaaaagtattgcttggttaaattaaaatcattcaaaagataaaacataaacatttaacaccagcacaatatgctgggaaacaaaatgaaaggatttctggtctcggtgctgtaggtcacatagccactctttcctggattgaggctttccagcaaaggggctgggacgtaaggctggcctgctggtgtggacagagattccagcaacatgcatgacctgggggtacaaggattgcttcctaaacaatgataagcacacagccacctaatagtctggat

SEQ ID NO: 12305 - DNA, 386 bp, Homo sapiens
tgattacaaataaaatatgcaaacatcttacatcttacatctatttttctgtaaattaaaatctgtaaataaagctcagattaaatgagaaatagaatattttatttgatcaagtttcaacataatcgtttcagcttttatgggattaaaaatagtcaatcaaaaatattcattgagatcctcacacatttaaggtgatgatttcagtgtcacagggatgcaaagaactataagaccaagcccctactttccagagtttttatttgcatatttttatttatatattattctgtaaaagccaataagtattaaatgccaaagagaagtattcttctggtttaaaaaaaattgttctgcatgttcatagtcaagaaggatcaatttga

SEQ ID NO: 12306 - DNA, 449 bp, Homo sapiens
ggctttgcaaccttggggcagttccttatatatctctgaacctccgtttcttcttctgtaaaacacaggcaagcaatgcttgtctcattgtggtcttgtgcagataaaataaaagaatgcaatgttctacagtagtcattggtgaaactagctcaatttgttacttttctagtgttaaaagatgtgaattttaaaatgagtatttaagtaaaactaggaagaaatcctgggaggagatagaagaaactgattgtgatacagagtaatcagggatggggtgacactttttactgtatacctttttatgttttaatttttagggccaggtatagtggctcatgcctataatctcagcattttaggaagccaaggccagagtatcacttgggcccaggagtttgagaccagcctgggcaacacagggagaccccttctctacaaaaaataca

SEQ ID NO: 12307 - DNA, 356 bp, Homo sapiens
tcccagcagagaaatagtgaacattctaggactgaaaattataatatcaaacaaaaaaattcactggatgagcttaatggtagaatggagatgacagcgcaagagtcagattaatgaaagatcaatagacattattcagtcttgaaaaaattgtgaacagggatgcagggatcagtgggacaatatcagaagctctaatacatgttgtcataggatggggtgggggtgaatgaaaaaataatggctgaaaatatcccaaatttgatgaatgatataaatgtagagtcaagaagctcaatcattaagcaggattaatttaatgaaaaccacacccaggcgcatcttggttaaacttc

SEQ ID NO: 12308 - DNA, 1796 bp, Homo sapiens
  misc_feature (917)..(917): n is a, c, g, or t
  misc_feature (938)..(938): n is a, c, g, or t
  misc_feature (959)..(959): n is a, c, g, or t
  misc_feature (1023)..(1023): n is a, c, g, or t
  misc_feature (1040)..(1040): n is a, c, g, or t
  misc_feature (1062)..(1062): n is a, c, g, or t
  misc_feature (1068)..(1068): n is a, c, g, or t
  misc_feature (1071)..(1071): n is a, c, g, or t
  misc_feature (1073)..(1073): n is a, c, g, or t
  misc_feature (1081)..(1081): n is a, c, g, or t
  misc_feature (1093)..(1093): n is a, c, g, or t
  misc_feature (1106)..(1106): n is a, c, g, or t
  misc_feature (1147)..(1147): n is a, c, g, or t
  misc_feature (1157)..(1157): n is a, c, g, or t
gttggtcttggactcctgacctcatgatccacccaccttggccttacaaagtgctgggatgacaggcatgagccaccgtgcccggccggtcctgctttctagaaaaaactgtagtgcgcgctccagagacgtaacccgttcccacacctgagtgggcaactctagcctttgaacacagccctaggaaatgactgcaaacgagggggaagctttttaaatacaaggaaaaaggcatttgtaccaagctacatcgcagtgaaattatcattggaaaacagtggaaagaggctgtgtgtccccccacgggtcaggcgcagtcccagggaggtctagaccccaagagcagagaggcctacgggaggcacggcttgtgccaggaggtggggtatgcggccaccaggcactctagttacacagcgatgggctgaaggctgtgcatcccgcagggagtgagccctccgaccctggaggagttcaagcagctgcttgtcaggatgcagcgacaggagggacaccgttgcagccgatgcccgagacagccagaggctgccggcatccagcagcagagaggctgggcctggaatggacccccagaagctggccagaggcctggcagttgggaaaggctcggtcgtcctggggagggagcagcaccagcggaggccccgcctgggtcttcatcagagacactccaagctggtgggggattcctgggacagtgtcacccccggcaggccccaggtgcccaccgcccacccggccacagtgggagcagctcgggtcagggaggccgggctgaatgcaaaccactgctgaggagacaaacgcggcgccacgagcaggtcaggagagaactccctcccgcgggccgtccgcggaccctggcgtcagccagcatgtcctgagccacagacgangctgtcccaggtgtgaaaganggtctgtgcctccgagtggangccggtcccacgctgtggactgagctgcatccctcagatgcatctgtttcagccctaaccccantgtgaggggacgtggangtggggcctcaggggtgatganggttanatnangtcagganggaggagacgcnaacacaattggcnggaccttgatcttagacccgcagcctctagaacctgcaganaatgctgganctgcccagggtgtgattcttgttacgtctccccgagctggctgagacatacagctccactccaccggcctgtgcccagagaccccggggtacaggaggaggacgccgcagaggtgcgtgttgatgagtgggtcgcaccagggtggagcctcctagaagggcagggacgcaccatccttggggagtggcctggagaggcctcgggaagggggtccagggtggctgagcctcagccatcaccccatgccgtccagccctgcaagcacatgctgtgccttggacctgccttctgacggggccggggtgcccgtggggtcccagtccccgtacgagcatctcactttcccttccatggtgctgctggtggccgggagaccatatgtcccagccatagtggcagatgctctccaggccggctaggggacaccggccctcatggcaggtgaggaggcagtgcactgttttgggggctctgaagcccggcctgcccgacttgaagtgtccagggcccaccaccttccttcctggttgaggagtttctgggagaatggtcaaatccccaatgtatcaactcagctttatctccaaaacctaccacttcccagagaacaaaattaaagaagatttcccagaaaaatgt

SEQ ID NO: 12309 - DNA, 408 bp, Homo sapiens
gaaaatttgctctcatattctagcctccttagctttgctgtgctctgttcagtgttttcagcttagcaatcactatgatatcttgggtttctcttccttatgctttagtctagaattaatgtccaaataaaaataccagtcaatcattggaataacctcatttgtttctcttgttcagtgattacagtcttgcattaccttttttccaatctctgaaaacagttttttcatacatgttgggttttggtaggatgactactccagtaccatactccatatggcctaaataaatagtcacttgaaagtatttttctaaattttaaatttaccttttttttttttctaccccatgactttttgaaagtgttttaatttggcttaaccacagttacctttatcatttattct

SEQ ID NO: 12310 - DNA, 409 bp, Homo sapiens
cctcccacccaccccccaattaatccctgtgtcttaagacctcagctcaaatgtgactgctgagggaaacttccccagatgcgccctccccagctaggttagatgccgttgagcatcaagtctgcccaacattattgatctcttgagcacctacagtttcacttcttgggatggagcaaggaggccctgttctgaaggagcttaccatctggcctgagagggtgataaagggaagaaaaatgtaaacaaggttcaaactttgataaatgccattaagaaaagtggggtgatgaagttatcattgcactctgttattttccttcatggctatctatcacaacgtgtaattagttgtgtgtgtgtcattatctgatgaatgaatgtcactgtttcccccataacacagtgc

SEQ ID NO: 12311 - DNA, 376 bp, Homo sapiens
ttctttgcatagtcagatgtcaaatatgacttcaaataatccaagaatattgggcaaggaacttcaaaagagtttggctcagtatcgtatctgtagcaaaattagagtttagtacatagctatctcttttgttgcttaaaaccaatctctctctcttccccccacacacaaaaaatccagtatcttaaattttaaagttatcctcctaagtgctcataaaccaatatatgggaatatagttcttgaaatctgaatggctggttgatgtatgaaaatttgataactcattaaaaataacttgttacaaaatattttctgtatgtacaatctcatataatttctacatggccttgtcatacatcttatatagatggga

SEQ ID NO: 12312 - DNA, 819 bp, Homo sapiens
  misc_feature (233)..(233): n is a, c, g, or t
cattcggcactaggctcagctcactgcaacctccgcctcctggggttcaagtgattctcctgcctcagcctcccgagtagctggactacaggcacgcgccacaacacccagctaatttttgtattttagtagagatggggtttcaccatgttggccaggatggtctcgatctcttgacctcgtgatccgcccacctcagcctcccaaaatgctgggattacaggcgtgacacncgcgcctggccagggctaccaatcctttggggctcaaaagatggttatgtgtgtcacagtgtacatcttgggaatgtgcttctattttgtttccttttcatttgtttagtatcagcctcttccaggtatccttttttaaatacctgtatcaagcatgctatgttatttaaattttctccctgaagattacctaagaatatcacctgaggaaggtgctattggcctattacaaatacagaaactgaagctgaaaggttaagcaccttccccacgttcagacagctcaatagcggaagagatggaatataagccctattcttatttcacaaagctgcctccatgctggggcaggtaacgttaaccctaggaaactgcccaaaacccaccaaaagagagaagctcctagggaacagagttgagaatgttcataccctgcccctgccaactgccggtctgcttggttttgtcacactggcatttctggctttggatgaatcaaaggtggctgttactatgctatactccatccttggtacacagagcacctcgccaggcctctcccccaccatcacatccccagtttcca

SEQ ID NO: 12313 - DNA, 614 bp, Homo sapiens
agccgcgggaatatcagtatggtgactccttaccctggggaagtgtacttaggccacggctaggtgaagcccagggatatttctgttcgcccatgcatccgagaaaggagtgttagacctgaccctgttgtttctcccagcagtgagaacgtggccatggacaagaattccaagtagtggcacttctgtagacgacgcggcccttttggggttactacagcccaggaaactcacatgcgacacggcgccagtgaagtccatctagacccccgcagacccaaggtcacaagttgagaaccccctgccgtggacattcttctgcacctagtggtgaagcaggtggagctgcaccttgctccgcccatttggagactggttctgcacatatgagtgtgccctgcagcgatcctgcaatccttcgtgactaacaaggactttctgtgaaaacagatttatcttttcttctctacctttaaggtttcttgctgttgagaatagttaagggacgaggaattcttattgcccccattttacaggcaaagaaactaatgctgaccccaaccttaccgaccacttggaggtccctaaaaacacatgacctttgtgtttctcgg

SEQ ID NO: 12314 - DNA, 899 bp, Homo sapiens
tatagtgtcagtaatccccagggtgtttggggctcagattgcttcctcagagtatatatgcctctaacctaccacttcaataattttctttccttttttcccccgttttttttgtgttttgtttttaaataacgatgccaggagacagaaaaccaacacctactccagaagaggctgttgagattactgctggaataagcccaggataaaatctttatgtcctttcagacaaagcgtagattaaatagtttatctgactcatacgactgcagtttctttcggcctcatccagaaactgatacaaagttgtttttttcttcttcctttttctggtgcttctataatcttagcttatgctcagctgtgaaaaaagtaaatgtccaggcaggcactctctgcaacatagaattaaacatgcttcctgaacattgtttgcactttcatttgacagagagcagaaatacaggtttatgtatccataaatcctgtcatggttgacaaagtaatttaatagtgttttgactcagaaccatccgttaatacgatttgagagacagagtagagtgctcgtgtgtgtgtgcacgtgcgtgtgtgcaggactggatggggtgggtgcagggcaggaagcatgtgacagaacaccaccacgctgcagtttcacaccctccctgcagcaataggttttaactgaaaagctactactcatgctttgcaaattgatagtcccactgaaaaaaaaaaaattaaattcttccaaaaaacactctgaggttttcgtgagcagaattggttgtagaaggggaaatagatcatatagcttaggccatttgaaaggacttgtcagttgactattgctggaatggaaccagtgtctagacttgttctttgtgatgccttta

SEQ ID NO: 12315 - DNA, 296 bp, Homo sapiens
gcattggtgcctgcacacttgagtatgcagtcacctctttgcttcttttcagactggttttcacaggaaaagacattcaccaattggctcagctagagattttgagagcctctcaaacattttctatggatgtgcatgttccattcctctcttttcctgctgagggagaagtttctgggtggtgtgccttctcctgatcctgaagagccatacaggctgctataaacttcccttctctttttcctaggaaaatgtactgaaagactaggatgcaataccaaattaaaattgtatat

SEQ ID NO: 12316 - DNA, 399 bp, Homo sapiens
gtaagtgggtctatagagatggaaagttacaggttccatctagtagaggctactagtttttgaatagagggagagaaatctattccaaaggaattgcttcctcaatccccactggccactgcttgtgcggtgccaggcaagagggtggactacaggggcaggcagtccagctagcggcacagccattcagtgagtcaggagtctttgtgcaaggaaggctgaggtgatgacagagctaacagcaaactcagacaatctgaaaaagaaaagaaaaaatccagaaaaatcaaccacatatgcagatactgaaaactatttttggtgaacccctttgtgcataagagatcatttacaaaatatgtgtgtgcgagataagtctattcctgtaaagaaatctga

SEQ ID NO: 12317 - DNA, 529 bp, Homo sapiens
caaatagagacgggggtctcactatgttgcccaggctggtctcgaattcctgggtgcaagtgatccccctggcttggcctcccaaagtgctgggattataggtgtgacctactgtgcccaacccaacaggcataattctagcatagtccccagtgactcctgcctcctagtattcagtctcgtgcaagcccctccccttgagtgtgggctggatctaacgacttgcttctactcaacagaatgtgcagtcccttaagtgactaggcttcaaaagatggtgacttccgtctttctagcagactctctctattgccacttcagcttgtgtactttgatgaagcaaggcgccatgctggtgaggcccatgtgaccaagaactgagggtggcctctggccaacagccagcgaggcaccgaatcctgccagcactacatgagtttggaagcagatcattctcagctaaactgtgagatgactatagcccagccaacgtaccttgattacagcctgtgagagattctgaaggacc

SEQ ID NO: 12318 - DNA, 352 bp, Homo sapiens
ttttttttttaatttttggaagtgcatagtaggtgtgtatatttatggggcacctgagatactttaatatagtcatacactgtataataatcacatcagggtaaatagggtatccatcgcctcaagaatttatcatttctctgggttacaaacattttaattatactcttttagttatttttacatgtggaataaattattgttgactgtaatcactatgttgtgctatcaaatactagatcttattcattctgcttttgtacccattaacctagataggtttcttaaattgacctacaatggattttatttcaagcttttgtcagctatattctagtggtgctctcaaatc

SEQ ID NO: 12319 - DNA, 450 bp, Homo sapiens
cctgaggaggaacggtgtcaggattcaagctcctgtctgactgctctgggcgctagtcccaacccaacaagactgaggttgagtgtcccatttctggtgtacagccgctttgggcatctctgcgcttaggagtgtgtgccttattcttaaaaagcaagataacagaggcccggtgcggtggctcacacctgtaatcccagcactttcggaggccgaggcgggcggatcatgaggtcaagagatcgagaccatcctggctaacatggtgaaaccccatgtctactaaaaatacgaaaaaattagccgggcgtggtggcgggcgcctgtagtcccagttactgtagaggctgaggcaggagaatagcatgaacccgggaggcggagcttgcagtgagctgagatcacgccactgcactccagcctgggcgacagagtgagactccgtcttta

SEQ ID NO: 12320 - DNA, 427 bp, Homo sapiens
cagtcagttacagatcggactctttgttctattcttttccctgttctcactactgcacttgactagtcttaaaaaaaaataaaatgaataattaataattgttacataaacatttaagaaatatacctttaatgtgcataccttctaatatcactgagattatgaagcagaattttgtttatattcagtgaagcagttttaattgtatttttcagagccatagactacaatatgtcttggtgagctttctcacaagtgtcagttggtcacttggaataagaaggcaaataagctcagaatacatgattgttaatatgagacacaaagtataattttaatgttttaatatctcaaatataattaggaatgataattcatcataaaagtatatatgctcattatgaatttagaaagctgtaaaaaaaaa

SEQ ID NO: 12321 - DNA, 1090 bp, Homo sapiens
attcaatttaaatatctttttcaagacctgaatccctgtattgtaaagggggaaactgaggcacactgacattaaagtggcataacctaggtgaatcaatagcaacatttccaacttttacccttctctagggtaaaatgcttcactgttgctgttaatctctattactatcctgaaacgtttcctgaaatgataataaacagaaaattttaacataagaaagtaaaagatagatgtaaattacatcaaaactatgtatacctattaggatgtctattacaaggacagagaaaagagaaaatagatgccttgtttggttaggggattatgggcaacatcctttatatgctgcttttaaactaagtcaacataggtttttattgcaggaagaagttcacatttgtgtctaccaaatgacaacatgtaaagtttggaattgagttggttttaggtttttctgtgtatcacttggaggttttctgtgtataactttcttgtattacttggagattttcaggttattggcaccacaggagcagcattattgccagcagacccggggagctggttggagagtcattgcgacttaatttaccctgagctaaaattattatgagtgggccttaatataccagttgttcccacctacacatctagccttgcctttgctgggataaatttgtatacccttcagaggttagattcagaagtacctcctttaggaattatttttagaacctagatctgggtgtagccagaacacgctctgcctactctgttgtagcatgtagctagttggttaacttgatattttccatactccaagtttatcggcagaatgaaacgtttttgtctataagtcttcagcatctaacattgcctctagcacttagaaggtcatctattaagagctttccagagaacattccccaaaaggccgatgggaatatctgtttggtgggtgtctccttattgtagaatggatacaacaggttatcaaacttgacaccattatacattcagattgtatttatcattgtttaagaaatatgtgtcttgtttcctcagttacgggaaaagaaaaaaaaaa

SEQ ID NO: 12322 - DNA, 296 bp, Homo sapiens
cagtattcagtgctgtttgaacactatcccatttaatcttcctaataacctgatgaggtaggtattgtttcattttccagatgaggaaactgagcttctatataatcatacaatttgcccaatcatgtgatagataagtgacattatagggattggaatccaagtcttctggactccaaatttcgtattcttcattatttccctgccttcaggatttgaaacctgatcttgctgcttcctggggcagttcaacccctggcagcctcttgtttcctgagttgtcagattgggagaag

SEQ ID NO: 12323 - DNA, 600 bp, Homo sapiens
aatgttttgacacagatagcatcatctccatttctctacattggcatctgggccaatagtccagtgctattataagtgttttagagctaaaagagaacttctggtctatctggaccagtggtttgtgaaatgtttgctcttcagggattctgcaaacttgaatgtgtttttaaaatttgtaacactccaaagaaccattaccaaaatagtcatcatgaaccctcttgagatgtcatgtagaacacacgcaagaccaccagtgcctcagcctgtgctgccagctttgcctgaatgtgtggagacgccagcctgcagcctccatgccacttctattaactaaagagtattatgcagttgtaaggtggactgagtaaactggttgcgcttgtaactgcttcactgggtgaataaaacaatttgttttcaatatttaaaatcaactaaattcacaaatacatgcatactgagtaagattgccaccatcatccttatcctccaatttcaaattattttggaaaggtctaatttttcttaattgagtttataaattttatacatctacattataaaatacttaataaaagattactttgttctgtt

SEQ ID NO: 12324 - DNA, 341 bp, Homo sapiens
agtcaaatgaatttaaatcatctttaggcttaattctgcagtcttcagatccttggcctctttagaatactaataccattgacagcatatatgatggaacagtactggatgatttcttaagaaagtttattaaagtctgaaaacaagtttttggaatataatagatactttagaaatatttggcctactgaaagagtgaataatcaaatgatcctgtattaaaaatggctattataaatgaatgaaaagtgacttagggctagtagaatagaaatttttgtttttaccttagaggaacatttgtctttaaatgtcattttagcaggattgtatatatgacc

SEQ ID NO: 12325 - DNA, 356 bp, Homo sapiens
atcttgcatctacattggaagccaagaagagtccttcacatgccagaaacaatgaggactttatgcgaagtacagagcatgcaggaccaggttagagaaggaccttcgggaccagcccccaagccacctcgcctgggagaggcatggactcacgaaagcaacagctctccaaaacaggaaagaataatccgattggatccctgggaagcagggtgtaaaactgcagaactgagccaagacgtgagtccctgctcccccatccctcctggccattctaaagctcaacatgcactcaagggaaccgtttcccaacctcgttagcaatcccatcagcacccataaatatgtttctattg

SEQ ID NO: 12326 - DNA, 608 bp, Homo sapiens
ctcccaactcgggagcagaaacgccgtggtccagcaggagaagaggaaacaggcgtttctgctcccgagttgggactgtggaatggtgtgggtgctgtggtctgctccatcgctggctcctccctgggtgggaccttgctggccaagcactggaaactgctgcctctgttgaggtcggtgctgcgcttccgcctcgggggcctagcctgtcagactgccttggtcttccacctggacaccctgggggccagcatggacgctggcacaatcttgagagggtcagccttgctgagcctatgtctgcagcacttcttgggaggcctggtcaccacagtcaccttcactgggatgatgcgctgcagccagctggcccccagggccctgcaggccacacactacagccttctggccacgctggagctgctggggaagctgctgctgggcactctggccggaggcctggctgatgggttggggccacatccctgcttcttgctcctgctcatcctctctgcctttcccgttctgtacctggacctagcacccagcacctttctctgagctgagtggctggagtggtcaataaagccacatgtgcctgtggccaa

SEQ ID NO: 12327 - DNA, 543 bp, Homo sapiens
aaatacggctagtacgaggccgcgtgttcatgtggtctgctccatcgctggctcctccctgggtgggaccttgctggccaagcactggaaactgctgcctctgttgaggtcggtgctgcgcttccgcctcgggggcctagcctgtcagactgccttggtcttccacctggacaccctgggggccagcatggacgctggcacaatcttgagagggtcagccttgctgagcctatgtctgcagcacttcttgggaggcctggtcaccacagtcaccttcactgggatgatgcgctgcagccagctggcccccagggccctgcaggccacacactacagccttctggccacgctggagctgctggggaagctgctgctgggcactctggccggaggcctggctgatgggttggggccacatccctgcttcttgctcctgctcatcctctctgcctttcccgttctgtacctggacctagcacccagcacctttctctgagctgagtggctggagtggtcaataaagccacatgtgcctgtggccaa

SEQ ID NO: 12328 - DNA, 1567 bp, Homo sapiens
ggctggtacggcccgggatttggcatgccgggagccgccggccgccggtgtccggaccgctcgcccccgtttggacccgacttcggttcttctggggtgttgatgctcctaaagcccgagagcacgtgtccagaccctagcctgtacgacgctgactctgcccggtcccagaaccaaagccatgccggggtgtggcctctgaccccacgcggaggggacctcgccttgcgggaccccacctggaacccgacctcccagcctcgcagccggcctgagccgccatgcgcgggaagttgctgccgctggccggcctctacctggtgcagggcctgccctacgggctccagtccggcctcctgccagtgctgctgcgtgccggcggcctctcgctgacgcgcgtggggctggccaaggttctgtacgctccgtggctgctcaagctggcttgggccccgctggtggacgcgcagggctcggcgagggcctgggtgacgcgcagcacggcgggcctgggcctggtgtgtgggctgcttgccgggctgccccctcctggagctggccaggccgggctgcccgccgctgtggcggggttgctgctgttgttgaacctgggtgccgccatgcaggatgtggccctggacgcgctggctgtgcagctgctggagccggccgaactggggccgggcaataccgtgcaggtggtcgcgtacaagctgggggccgcgctagctgggggcgcgctgctggcgctgctgcccaccttctcgtggccgcaactctttctgctcctggctgccacctactggctggccgcggccctggcctgggctgcaccagccctgcggcggctcccacagcagcccccttccgagcagcgtccccacaccgcgcaccttctgcgggacgtgctagccgtgccggggaccgtgtggacggcaggctttgtgctcacctacaagctgggtgagcagggtgccagcagcctgtttcctcttctcctgctggaccacggcgtttctgctcccgagttgggactgtggaatggtgtgggtgctgtggtctgctccatcgctggctcctccctgggtgggaccttgctggccaagcactggaaactgctgcctctgttgaggtcggtgctgcgcttccgcctcgggggcctagcctgtcagactgccttggtcttccacctggacaccctgggggccagcatggacgctggcacaatcttgagagggtcagccttgctgagcctatgtctgcagcacttcttgggaggcctggtcaccacagtcaccttcactgggatgatgcgctgcagccagctggcccccagggccctgcaggccacacactacagccttctggccacgctggagctgctggggaagctgctgctgggcactctggccggaggcctggctgatgggttggggccacatccctgcttcttgctcctgctcatcctctctgcctttcccgttctgtacctggacctagcacccagcacctttctctgagctgagtggctggagtggtcaataaagccacatgtgcctgtggccaa

SEQ ID NO: 12329 - DNA, 1419 bp, Homo sapiens
ggctggtacggcccgggatttggcatgccgggagccgccggccgccggtgtccggaccgctcgcccccgtttggacccgacttcggttcttctggggtgttgatgctcctaaagcccgagagcacgtgtccagaccctagcctgtacgacgctgactctgcccggtcccagaaccaaagccatgccggggtgtggcctctgaccccacgcggaggggacctcgccttgcgggaccccacctggaacccgacctcccagcctcgcagccggcctgagccgccatgcgcgggaagttgctgccgctggccggcctctacctggtgcagggcctgccctacgggctccagtccggcctcctgccagtgctgctgcgtgccggcggcctctcgctgacgcgcgtggggctggccaaggttctgtacgctccgtggctgctcaagctggcttgggccccgctggtggacgcgcagggctcggcgagggcctgggtgacgcgcagcacggcgggcctgggcctggtgtgtgggctgcttgccgggctgccccctcctggagctggccaggccgggctgcccgccgctgtggcggggttgctgctgttgttgaacctgggtgccgccatgcaggatgtggccctggacgcgctggctgtgcagctgctggagccggccgaactggggccgggcaataccgtgcaggtggtcgcgtacaagctgggggccgcgctagctgggggcgcgctgctggcgctgctgcccaccttctcgtggccgcaactctttctgctcctggctgccacctactggctggccgcggccctggcctgggctgcaccagccctgcggcggctcccacagcagcccccttccgagcagcgtccccacaccgcgcaccttctgcgggacgtgctagccgtgccggggaccgtgtggacggcaggctttgtgctcacctacaagctgggaaactgctgcctctgttgaggtcggtgctgcgcttccgcctcgggggcctagcctgtcagactgccttggtcttccacctggacaccctgggggccagcatggacgctggcacaatcttgagagggtcagccttgctgagcctatgtctgcagcacttcttgggaggcctggtcaccacagtcaccttcactgggatgatgcgctgcagccagctggcccccagggccctgcaggccacacactacagccttctggccacgctggagctgctggggaagctgctgctgggcactctggccggaggcctggctgatgggttggggccacatccctgcttcttgctcctgctcatcctctctgcctttcccgttctgtacctggacctagcacccagcacctttctctgagctgagtggctggagtggtcaataaagccacatgtgcctgtggccaa

SEQ ID NO: 12330 - DNA, 1650 bp, Homo sapiens
ggctggtacggcccgggatttggcatgccgggagccgccggccgccggtgtccggaccgctcgcccccgtttggacccgacttcggttcttctggggtgttgatgctcctaaagcccgagagcacgtgtccagaccctagcctgtacgacgctgactctgcccggtcccagaaccaaagccatgccggggtgtggcctctgaccccacgcggaggggacctcgccttgcgggaccccacctggaacccgacctcccagcctcgcagccggcctgagccgccatgcgcgggaagttgctgccgctggccggcctctacctggtgcagggcctgccctacgggctccagtccggcctcctgccagtgctgctgcgtgccggcggcctctcgctgacgcgcgtggggctggccaaggttctgtacgctccgtggctgctcaagctggcttgggccccgctggtggacgcgcagggctcggcgagggcctgggtgacgcgcagcacggcgggcctgggcctggtgtgtgggctgcttgccgggctgccccctcctggagctggccaggccgggctgcccgccgctgtggcggggttgctgctgttgttgaacctgggtgccgccatgcaggatgtggccctggacgcgctggctgtgcagctgctggagccggccgaactggggccgggcaataccgtgcaggtggtcgcgtacaagctgggggccgcgctagctgggggcgcgctgctggcgctgctgcccaccttctcgtggccgcaactctttctgctcctggctgccacctactggctggccgcggccctggcctgggctgcaccagccctgcggcggctcccacagcagcccccttccgagcagcgtccccacaccgcgcaccttctgcgggacgtgctagccgtgccggggaccgtgtggacggcaggctttgtgctcacctacaagctgggtgagcagggtgccagcagcctgtttcctcttctcctgctggaccacggcgtttctgctcccgagttgggactgtggaatggtgtgggtgctgtggtctgctccatcgctggctcctccctgggtgggaccttgctggccaagcactggaaactgctgcctctgttgaggtcggtgctgcgcttccgcctcgggggcctagcctgtcagactgccttggtcttccacctggacaccctgggggccagcatggacgctggcacaatcttgagagggtcagccttgctgagcctatgtctgcagcacttcttgggaggcctggtcaccacagtcaccttcactgggatgatgcgctgcagccagctggcccccagggccctgcaggtgagtagatgtagcagggacacaagagagaccacggggctggggctgtgtgggcctgaccttgaccgtgacccccaccccccgccacacactacagccttctggccacgctggagctgctggggaagctgctgctgggcactctggccggaggcctggctgatgggttggggccacatccctgcttcttgctcctgctcatcctctctgcctttcccgttctgtacctggacctagcacccagcacctttctctgagctgagtggctggagtggtcaataaagccacatgtgcctgtggccaa

SEQ ID NO: 12331 - DNA, 1638 bp, Homo sapiens
ggctggtacggcccgggatttggcatgccgggagccgccggccgccggtgtccggaccgctcgcccccgtttggacccgacttcggttcttctggggtgttgatgctcctaaagcccgagagcacgtgtccagaccctagcctgtacgacgctgactctgcccggtcccagaaccaaagccatgccggggtgtggcctctgaccccacgcggaggggacctcgccttgcgggaccccacctggaacccgacctcccagcctcgcagccggcctgagccgccatgcgcgggaagttgctgccgctggccggcctctacctggtgcagggcctgccctacgggctccagtccggcctcctgccagtgctgctgcgtgccggcggcctctcgctgacgcgcgtggggctggccaaggttctgtacgctccgtggctgctcaagctggcttgggccccgctggtggacgcgcagggctcggcgagggcctgggtgacgcgcagcacggcgggcctgggcctggtgtgtgggctgcttgccgggctgccccctcctggagctggccaggccgggctgcccgccgctgtggcggggttgctgctgttgttgaacctgggtgccgccatgcaggatgtggccctggacgcgctggctgtgcagctgctggagccggccgaactggggccgggcaataccgtgcaggtggtcgcgtacaagctgggggccgcgctagctgggggcgcgctgctggcgctgctgcccaccttctcgtggccgcaactctttctgctcctggctgccacctactggctggccgcggccctggcctgggctgcaccagccctgcggcggctcccacagcagcccccttccgagcagcgtccccacaccgcgcaccttctgcgggacgtgctagccgtgccggggaccgtgtggacggcaggctttgtgctcacctacaagctgggtgagcagggtgccagcagcctgtttcctcttctcctgctggaccacggcgtttctgctcccgagttgggactgtggaatggtgtgggtgctgtggtctgctccatcgctggctcctccctgggtgggaccttgctggccaagcactggaaactgctgcctctgttgaggtcggtgctgcgcttccgcctcgggggcctagcctgtcagactgccttggtcttccacctggacaccctgggggccagcatggacgctggcacaatcttgagaggtgaggggctggccttgaggaggaagagaggggccaggagcctggggcactgctgacttctgccctcccagggtcagccttgctgagcctatgtctgcagcacttcttgggaggcctggtcaccacagtcaccttcactgggatgatgcgctgcagccagctggcccccagggccctgcaggccacacactacagccttctggccacgctggagctgctggggaagctgctgctgggcactctggccggaggcctggctgatgggttggggccacatccctgcttcttgctcctgctcatcctctctgcctttcccgttctgtacctggacctagcacccagcacctttctctgagctgagtggctggagtggtcaataaagccacatgtgcctgtggccaa

SEQ ID NO: 12332 - DNA, 1409 bp, Homo sapiens
ggctggtacggcccgggatttggcatgccgggagccgccggccgccggtgtccggaccgctcgcccccgtttggacccgacttcggttcttctggggtgttgatgctcctaaagcccgagagcacgtgtccagaccctagcctgtacgacgctgactctgcccggtcccagaaccaaagccatgccggggtgtggcctctgaccccacgcggaggggacctcgccttgcgggaccccacctggaacccgacctcccagcctcgcagccggcctgagccgccatgcgcgggaagttgctgccgctggccggcctctacctggtgcagggcctgccctacgggctccagtccggcctcctgccagtgctgctgcgtgccggcggcctctcgctgacgcgcgtggggctggccaaggttctgtacgctccgtggctgctcaagctggcttgggccccgctggtggacgcgcagggctcggcgagggcctgggtgacgcgcagcacggcgggcctgggcctggtgtgtgggctgcttgccgggctgccccctcctggagctggccaggccgggctgcccgccgctgtggcggggttgctgctgttgttgaacctgggtgccgccatgcaggatgtggccctggacgcgctggctgtgcagctgctggagccggccgaactggggccgggcaataccgtgcaggtggtcgcgtacaagctgggggccgcgctagctgggggcgcgctgctggcgctgctgcccaccttctcgtggccgcaactctttctgctcctggctgccacctactggctggccgcggccctggcctgggctgcaccagccctgcggcggctcccacagcagcccccttccgagcagcgtccccacaccgcgcaccttctgcgggacgtgctagccgtgccggggaccgtgtggacggcaggctttgtgctcacctacaagctgggtgagcagggtgccagcagcctgtttcctcttctcctgctggaccacggcgtttctgctcccgagttgggactgtggaatggtgtgggtgctgtggtctgctccatcgctggctcctccctgggtgggaccttgctggccaagcactggaaactgctgcctctgttgaggtcggtgctgcgcttccgcctcgggggcctagcctgtcagactgccttggtcttccgccacacactacagccttctggccacgctggagctgctggggaagctgctgctgggcactctggccggaggcctggctgatgggttggggccacatccctgcttcttgctcctgctcatcctctctgcctttcccgttctgtacctggacctagcacccagcacctttctctgagctgagtggctggagtggtcaataaagccacatgtgcctgtggccaa

SEQ ID NO: 12333 - DNA, 1261 bp, Homo sapiens
ggctggtacggcccgggatttggcatgccgggagccgccggccgccggtgtccggaccgctcgcccccgtttggacccgacttcggttcttctggggtgttgatgctcctaaagcccgagagcacgtgtccagaccctagcctgtacgacgctgactctgcccggtcccagaaccaaagccatgccggggtgtggcctctgaccccacgcggaggggacctcgccttgcgggaccccacctggaacccgacctcccagcctcgcagccggcctgagccgccatgcgcgggaagttgctgccgctggccggcctctacctggtgcagggcctgccctacgggctccagtccggcctcctgccagtgctgctgcgtgccggcggcctctcgctgacgcgcgtggggctggccaaggttctgtacgctccgtggctgctcaagctggcttgggccccgctggtggacgcgcagggctcggcgagggcctgggtgacgcgcagcacggcgggcctgggcctggtgtgtgggctgcttgccgggctgccccctcctggagctggccaggccgggctgcccgccgctgtggcggggttgctgctgttgttgaacctgggtgccgccatgcaggatgtggccctggacgcgctggctgtgcagctgctggagccggccgaactggggccgggcaataccgtgcaggtggtcgcgtacaagctgggggccgcgctagctgggggcgcgctgctggcgctgctgcccaccttctcgtggccgcaactctttctgctcctggctgccacctactggctggccgcggccctggcctgggctgcaccagccctgcggcggctcccacagcagcccccttccgagcagcgtccccacaccgcgcaccttctgcgggacgtgctagccgtgccggggaccgtgtggacggcaggctttgtgctcacctacaagctgggaaactgctgcctctgttgaggtcggtgctgcgcttccgcctcgggggcctagcctgtcagactgccttggtcttccgccacacactacagccttctggccacgctggagctgctggggaagctgctgctgggcactctggccggaggcctggctgatgggttggggccacatccctgcttcttgctcctgctcatcctctctgcctttcccgttctgtacctggacctagcacccagcacctttctctgagctgagtggctggagtggtcaataaagccacatgtgcctgtggccaa

SEQ ID NO: 12334 - DNA, 929 bp, Homo sapiens
ggctggtacggcccgggatttggcatgccgggagccgccggccgccggtgtccggaccgctcgcccccgtttggacccgacttcggttcttctggggtgttgatgctcctaaagcccgagagcacgtgtccagaccctagcctgtacgacgctgactctgcccggtcccagaaccaaagccatgccggggtgtggcctctgaccccacgcggaggggacctcgccttgcgggaccccacctggaacccgacctcccagcctcgcagccggcctgagccgccatgcgcgggaagttgctgccgctggccggcctctacctggtgcagggcctgccctacgggctccagtccggcctcctgccagtgctgctgcgtgccggcggcctctcgctgacgcgcgtggggctggccaaggttctgtacgctccgtggctgctcaagctggcttgggccccgctggtggacgcgcagggctcggcgagggcctgggtgacgcgcagcacggcgggcctgggcctggtgtgtgggctgcttgccgggctgccccctcctggagctggccaggccgggctgcccgccgctgtggcggggttgctgctgttgttgaacctgggtgccgccatgcaggatgtggccctggacgcgctggctgtgcagctgctggagccggccgaactggggccgggcaataccgtgcaggtggtcgcgtacaagctgggggccgcgctagctgggggcgcgctgctggcgctgctgcccaccttctcgtggcgaatcttctgtctggtgcactatggtggcgggctggctggtgacagcctggggtcccagagcccttcgagggtccccccggccttgggactgtaccggcgggcggtgcggggtgtggcccaacatggggcgcgtctcttcgggcaggtgcatggggag

SEQ ID NO: 12335 - DNA, 649 bp, Homo sapiens
  misc_feature (2)..(6): n is a, c, g, or t
  misc_feature (31)..(31): n is a, c, g, or t
  misc_feature (184)..(184): n is a, c, g, or t
tnnnnnttccccgagagtgaaggcagctggnttgctcctactttcaggaagggatgcaggctcccctgaggaatatgtcatagttctgagctgccagtggaccgcccttttcccctaccaatattaggtgatcccgttttccccatgacaatgttgtagtgtcccccacccccaccccccaggncaagcactggaaactgctgcctctgttgaggtcggtgctgcgcttccgcctcgggggcctagcctgtcagactgccttggtcttccacctggacaccctgggggccagcatggacgctggcacaatcttgagagggtcagccttgctgagcctatgtctgcagcacttcttgggaggcctggtcaccacagtcaccttcactgggatgatgcgctgcagccagctggcccccagggccctgcaggccacacactacagccttctggccacgctggagctgctggggaagctgctgctgggcactctggccggaggcctggctgatgggttggggccacatccctgcttcttgctcctgctcatcctctctgcctttcccgttctgtacctggacctagcacccagcacctttctctgagctgagtggctggagtggtcaataaagccacatgtgcctgtggccaa

SEQ ID NO: 12336 - DNA, 879 bp, Homo sapiens
ctgcagctctggaacactgaggagagcagggcaggactgagggcccaggtggggagaagggaggtgggggcagatatggaacctcccgtgctcatgccccccccaccacccaaggtgagcagggtgccagcagcctgtttcctcttctcctgctggaccacggcgtttctgctcccgagttgggactgtggaatggtgtgggtgctgtggtctgctccatcgctggctcctccctgggtgggaccttgctggccaagcactggtgagccctccccagtgtaccctgcccacccacttgtacctgagctgcccccaatccactatactgacccatttcccacccccatcccaggaaactgctgcctctgttgaggtcggtgctgcgcttccgcctcgggggcctagcctgtcagactgccttggtcttccacctggacaccctgggggccagcatggacgctggcacaatcttgagaggtgaggggctggccttgaggaggaagagaggggccaggagcctggggcactgctgacttctgccctcccagggtcagccttgctgagcctatgtctgcagcacttcttgggaggcctggtcaccacagtcaccttcactgggatgatgcgctgcagccagctggcccccagggccctgcaggccacacactacagccttctggccacgctggagctgctggggaagctgctgctgggcactctggccggaggcctggctgatgggttggggccacatccctgcttcttgctcctgctcatcctctctgcctttcccgttctgtacctggacctagcacccagcacctttctctgagctgagtggctggagtggtcaataaagccacatgtgcctgtggccaa

SEQ ID NO: 12337 - DNA, 885 bp, Homo sapiens
caggttgggggaggccctggctttttcaatgattgacgttgacatcagtcaggagctgggagttgagacctccagggaagtctcgtccggatccatcgctcttctctcaaggagcacagtcctgggaaaggcctagggacctgtgggccggtgatgcgggcactgcagaccaggccaggccctcgggtaaagctctgaggagaggccaaaaccaggcttcaggttcgggaaggtgactgcttgcaactgcagtagcaggaacatgtcaggtgcttactgggtgagacccagccggggaagcctctccaactcctcctagccctggaaaccagacacccagagccccaggctttctcggcacccagaagaagtggggagcgggcaaagcagaaaacattcaatgcatgatgtaggattgctgcgttggcactaagctgttgtattaagcatgagaggtgtttgtttaacgttggcaaagggatttaacaagaaacaaaaagcttcgcgtccttgttttgaccgtcgacagaagtccaattttcttgcctttctttatccccatttctcctccctccccttcccccatcacatccactttcggtcactcgttgttggtatttggtggcagctcttggtcctattgctgtggatgttccactgaaaacacggggggtagcggggagtggtaaggaaagcaacttttttctaatttttgtattggtatccacaagcgtttgtattttttgaattgcaaacactgtgttttctggtctttgggggttagttgaactttctgtattaccttttggaaaacctgagttttaccacagtcttaagcagatttgaaataaattcttttgacactgccaacaacagaaagacaag

SEQ ID NO: 12338 - DNA, 363 bp, Homo sapiens
aaataattttaaatatattttttcaatctttattataataagtaaatttttgtaaaagttgaaatagtagagataactgtaaaattcctcttggctactattttggctatttttccctccaaggtgaaccactgttgcttatttggtatctgttgcttgtctgtacatgggcatgtgcaaacatgtctgtttatattttagagaaaagtttttaaatagctatatggtatcctgctatatgtattctgtaatctgtgtgtcttatttggcattttgttttgaagttattttctttctttttttttttttgagacggagtctcactctgtcgtccaggctggagtgcagtggctccatctgggc

SEQ ID NO: 12339 - DNA, 389 bp, Homo sapiens
ttattccatttacacaaaattctggaaaaggcaaattatcgtgaaaaaaagatcagttgtcttaggcctgagttggagagaaaagattggctataggggagcacagaggaattttgatgttggtaggaccttgcatatttgtatgtatttgccaaacttattgtactatactctttttcttttcctttttttttttttttttttttttgagacggagtctcgctctgtcccccaggctggagtgcagtgacgcagtctcggctcactgcaagctccgcttcccgggttcacgccattctcctgcctcagccacccgagtagctgggactacaggcgcccgccaccacgcccggctaattttttgtatttttagtagagacggggtttca

SEQ ID NO: 12340 - DNA, 489 bp, Homo sapiens
actgaccttttcaacccctggagcagtggatttgcgtgggccctgggcggtgagggtgaaggctgaagggggctgacaccaggcagaggggctcagggctagatgatcctaggagcggtgagccgcgtctgaagtgtggggggtgcatggggtgagtacggccctggttagcagtgactagtttaaggacagctgaacggaggaacccgggatgatggagtcaagactgtggaggtctcagcactttgggaggccgaggtgggcagattatctgaggcggggagttcgagaccagcctggacaacatggtgaaaccccgtctctactaaaaatacaaaagttatctgggcctggtggcgggtacctgtaatcccagctactcgggaggctggggcaggagaatcacttgaacccggaggtagaggttgcagtgagccgagatcgagccactgcactacagcctgggggacagagcgagactctgtctca

SEQ ID NO: 12341 - DNA, 252 bp, Homo sapiens
ataagccatcacgctcagcttcagcactctatacttagtatttgcatgtaacttttgataaaattttataaaggcatataattaaaatttctgaaaagggcaaagttcaaatgtatttaactatagttacaaatacagtattttaaatggaaccaagagaaaatctttcacaaaacatttttaaaggccaacatctaagtttagctctttttaaggtaacagaattacaaaaattattttaaatatcctaat

SEQ ID NO: 12342 - DNA, 1206 bp, Homo sapiens
gagtagccttaattgtggctactgcaaatagaagtcagtgagccaattctgaataaaatcaagtggtatttttagatgaaagtttttccaaaaagtaacaaaactgattttcttgagtatattgatgtagtgatcttttttctaagagttccaaaaatgtttttaatagtgtcaaatgtaattatttctaggttttgatgggagagagagtagatttttcttgaattaagtgtcatgtcagtcttgagtacaggagggaactagaatgagttgtttaatttcagaaccctggtaaaataacctgtctgctctattgcttcttggttgttattggtgtctttaccaaagacttagagtatttcctctaactgtctatgacttgtaggctcctgagtggatggtaatcaaaaggaggaaggaataagttagatatgcatttcattttctcgttgctcatgtgttgcaagatcacttagtacttagaaaaagaactttacagataccagttgatttcacctcttcaaacttatatatcgtccctttacatttatgcttctcaaagatggtcagaaacactgcattttcacccatgtaaggtgtttaagaaacagattcctgaggggaccctctctctccctgcttcctcattgtgtgggccttgggtagggcctaagaatccgctttttttttggtttagactgagtcttgctcttgttgcttaggctggagtacaatggcataatctcagctcactgcaacctccccctccagggttcaagtgatgtctcctgcctctgcctcccaagtagctgggattacaggcacccactaccacgcctgcctaatttttgtatttttagtagagacagggtttcaccatgttggccaggctggtcttgaaccctgaccttaggtgattgacctgccccggcctcccaaagtgctgggattacaggcatgagccaccaagtccagcctaggaatctgcttttcaaagaggtaccacgctggccattaagtatacggagcagtggttctgtcacaggctacatagtttaggcactagatttagaatttgggttgaggccggtcatggtggctcacacctgtaatcctagcactttgggagaccaaggtgggaggatcatttgagctcaggagtttgaggccagcttggactacatagcaaaaccctatctctattta

SEQ ID NO: 12343 - DNA, 576 bp, Homo sapiens
tttgttcttgcgatagtttactgagaatgatgatttccaatttcatccatgtccctacaaaggacatgaactcatcattttttatggctgcatagtattccatggtgtatatgtgccacattttcttaatccagtctatcattgttggacatttgggtcggttccaagtctttgctattgtgaataatgccgcaataaacatacgtgtgcatgtgtctttatagcagcatgatttatagtcctttgggtggagactggactttcatgtttgccagatagtcctggaaacaggttcccctaaccagcactccaaaaacctcctatcccccaacctcaaatcattttggattgagaataatttctcatatctttaaaagcttctagaaaagaagactattagtggaatgaataagtgtttatgccctaaaagaattagtaaactatcctgaatatgtctgtccagtaaaccagagctgaatgagaaaatgctaaaacattcttgcaacaagtcccctaagtttcttctctgcctgaacagcatagttcatcagcctaataaacagagtcaatctcact

SEQ ID NO: 12344 - DNA, 900 bp, Homo sapiens
gcaatatgtgtgcaggcatcgttagaacctttagatatggtctcacttaatctttacaatcgccccatgaaggtggcagtattatctccatttaatagatgaggaagtctagactggggggttaagaaaccaaagttgtaatttttgtttggccaccagtgaaaaatgaaaactctagaccaaatgatggatttttaaactgtgtttctagcagcgcttaggcttagcaaagatgccggggataggaggagctgctgagagggaaggactggccatcggcacctcagttatggcagctctgccttggcatgctggaagatggactgccctccaatggtgtgccccgatctacagccccaggtggaatacccaacccagagaagaagacgaactgtgagacccagtgcccaaatccccagagcctcagctcaggccctctgacccagaaacagaatggccttcagaccacagaggtggccttctagagacctaatcatcattgccatctctcaagacagtctggacccacagaactacgttcaaaagcttgatgactgctctaccacaggcccagatatttgtcttctagtctccttcccacacttgtgcccttaccctctgagccaggataagccgtggtcaagaggaagcagctttgcctggtggatggcatgatccatacacttgtttccccacctcatttcctgcccccccatccatcactttaaaattatgttttgcagtttacaaagtgcttttaagtctactggctccttaagttcccctaagagcattgtgaagtaagcattatccccattttatagacaaggaaactgaggttcatttgattgagttacatgaataaggccatataagtgttgtagaaggatattggtagct

SEQ ID NO: 12345 - DNA, 828 bp, Homo sapiens
ttgggtggtgacatcacgaagtggctggttatgaaaggagcactgtgccgtagaactgaggaaagcacaggctttgctagagatgttaagtattctctctccctgaaagctggttcttctgaaatcaaaatattcaggggggaaggaaaagaggcacagggcatctgaattccaaaggactagggaagccaccacttcccggataactgcactccctccaccttacacctaaaacaaggttgaagagtcctgtcaaggccatctcaaaaggagaagcaaagcctgcagaggaggccagcctgagtcctggggtgcgaacgggtgctgggctcagcatgaggaggaggagaccctggccacagttccatgaatctttgctcccttccacattatggattctggtgagtgcctgccagaggaatgtctgacagctctaccctcaactggatcatctttagcccaaattacaataatttaagtgaatcaaattactatagatacttcattattaattcactggacatttactgagggcctactctgtgccaggcaatgctctgaacttgccctacctattggatgctacgtgctaaatgttatagacaatgtactctcgtacattctataaattatataggatataatgagtactatattctctatgctttacatgctatattcatcacaccctatagtctacatacaatggataatatacaaaatatattatatatgtattatgtctactagaacagtcttttgccacaataggaatttagtaaatatacattgaatgaatgaatgaatgaatatgatacttaataccat

SEQ ID NO: 12346 - DNA, 5881 bp, Homo sapiens
acagatggcctggatcagtgcaatgtgcaacaagaggactatatcgtctcagtaaaaaccttgaagagatgaacccatttcagagacccagcaagggatcacctgcatatacaggcatcagcagaaacaggaatttgggatttatcctggaggtagtggaagcttttggaggtcttaaccaggacagcacatgtggctttcctgcaatgggatcgtccttcaagaggacctcacaggctctccacccggactgtgacgtaagcagctgcagcagccttggatgtttctggatagccagccccatgagaacagctttaaaataggagactggcattgtgatgaagtgtggacttcgctgtcatatagacctggatttaaatcctggcttcagtgtttatggatgacattggacaagtcatttaacctccttaagtctcagagttctcattacggaaatggagctcttaatagtacctaccccctagtgtggttgtgagggttgagatcatctatgttcaaagtgcttattatacagagacggggacatgtaagtgctacataaatgttagcttttattagtcactggagtggaggagagaggactgttgcctccttgtcaatgtccccatcctgggaagcctgcctgtgtgcaccaaggcccatctgacccatatatcagaaaaggtgcccttctagggagcgacaccccccaccaagccccccagtcgctgtccatgctttcctctaggttcaaaatgcagctgcatctgtgcagaaaccaggtgttgcctgtgagttctgcctcgctggccagaggtggaaggaaggaggaaaggagaggggcctccatacttccagagccccactgggggttaccttcgcttgcccccactctttttgtcttgctctgaggatgccaggactttaaggacattgtcagcgagcacgtaagttcacccagaaagaatctcagtcatctggactgctttgtgctatatgaaaatctctgagaaccttcaagagcccaaaaacagttctcctccatgctgtatgccatggtcagtggttaaagagaacattttgttccactcctccagctctgccttagaaacccaagccctgcactccaaggctcctggcatcgtacaccagcaccagcaattttctgccaaaagcatcagccaaaatctattctatctatttcagttcctctcttttcatcggattgtatttttacaggtgattgctgattctcacactgctcttcagattcatgtacagctgtggtctgaatgtgtgtgttttctcaaaattcaagtttaaaacttaatcctcaatgtgatagtatcaacagctgcggccttttggaaagtgaaggtggagccctcgtgagtgggattagagctcttataaaagagattgaagggagctacctagcccttccatctcttctgccttgtgaggacacagtgttcatcccttttgtcttcccaccatttgaagatgcagaaagaaggtgccatcttggaagcaaagagcagccctcaccagacaccaagtctgctggcaccttgatcttggacttcccagcctccaggactgtgagaaatgaatttctgttgtttataaattacctagtctaaggtatgctgttacagtagcaggaatggactaagacacacattgtcaaaatcttcatgagttaaaggtgaaggtacaatcagaactggtgcatggaattggaaccataggtcttagtaaacactgtaaaaatgcactattcaaatctacagaaaatgctctctcttcaagttcagaaagaagctacaatctgcttttcctttttttctgaagatgtggggaacgaaattggatcttgtgcttttgggtgctaactttgagccctcttcctttacatctaaatgacaatttgtggatcaatgaggatgtgtcaactagccaagatcgaggacctggaggggtgctctgtggaaactgctttaaaatccttcagagggtgggcacggagctctggttctggttgaagagtcctgtcaaggccatctcaaaaggagaagcaaagcctgcagaggaggccagcctgagtcctggggtgcgaacgggtgctgggctcagcatgaggaggaggagaccctggccacagttccatgaatctttgctcccttccacattatggattctggctaagaagattttcatctttcaccacctgttctggattcttggaacaggtaaattcattggcctacgcaagtctgagctctaggtctgaacccgcatggacctgagggtgcaccgagaaaagaaaggctgacaactggatcccgggaatgtcaaggccaccctgggcttgaagggaccggccatgcctccaagccttgcccagagagggggttcaggatgctgcgtggttccaggtgatctattgctttctcgagtttaaagttcagaggatcatgaagtaccacagctggaaggggtgtaagtgacactgcctagcctaactctcttaaaaatcatagccctactcctgcctccccaaatcagatacgacaggcataggctctgactgttccttaagtcttagtggcaatactccctgaccagttttgcggggttgctcccagttccattgcttttgtaacaggtggccagaaagcctggggtcccgtgataagagtttcagttctttccaggatggatggaaagaaggaaggaaggatggatggatggatgaatgaatgagcgggtgagcggatggatggatggatggatggatggatggatagatgggccagagactgggaacggtaatgccggccagacgggtccgagcgcctcgggagccccagccctcctccggctgcggggccgctgctcctgctcccgggccgtcacggagccctgagggagggggcgggcgagcgggggccttggggcggccagggcgctgggagggaggactgggcggtggggaccggaggggagggagggccttggaggcggagaggagggacgggctgggagagggcccggactaggggcggcgggcaccgcaggagctccgcgcggctgcagcgcgggcgggagcggggacgcgatgtcgccgccgccgcctccttgcgggccggggctgcgcctccggggctgagccgccgccagagccgacagccgagcagccgctgggcgctcccgcggcgcaggaggatgggctgcggcgggagccgggcggatgccatcgagccccgctactacgagagctggacccgggagacagaatccacctggctcacctacaccgactcggacgcgccgcccagcgccgccgccccggacagcggccccgaagcgggcggcctgcactcgggcatgctggaagatggactgccctccaatggtgtgccccgatctacagccccaggtggaatacccaacccagagaagaagacgaactgtgagacccagtgcccaaatccccagagcctcagctcaggccctctgacccagaaacagaatggccttcagaccacagaggctaaaagagatgctaagagaatgcctgcaaaagaagtcaccattaatgtaacagatagcatccaacagatggacagaagtcgaagaatcacaaagaactgtgtcaactagcagagagtccaagcagaagggcagatggacttcttcagtgtccttcacggcactggatcccatcaaagaaccttgaagaagtggctgccccttgctggacctgaattctactgagtccctggcaagactgtcttacctggcagcaaactgctgcctgatttgttgggaccttctgagccttctacttatcatgtaaatgtattggcacagtgcttacatatgttaataaactgcaaatgtgcagttcagtttgtctctttgcaactcctgtaatacggtctggtgtaaaagtagtgagttaaagctacaggtcagtttatgaaacagaaaagtaggaatgcattttctgggtgaaagagtcacaccttagtgctataactctcctgcccatgatagtgtattctgtttcaggcaagcttattctttccttctttcattttaaatattgtcattacaaatcttaccaggttcacttaaaagctggctttcatccaactctaaacccacatattgaaaaaatcaaggtacaggaaaactccttgttatccttgtttccttagcttggtatgagacagatcggatccagtttcccatgcaccaacccactgcccatggcatgtctttgggaggtgtctgtgaagcagtcatacctgctcctcatctgcctggaaagtcctcctattccagtgtccatgttggcctccagtccttaatgtcaccatgcttgtggccaatgcatccaaataaggatacccctcagggctcagctagacattgcaattttgcatagctttccagttccctttgcttgtcttcttgactgtcttccctctctatcggggtcacttgcaattgttaatcaaagattgaacactgcgtaggagagggagatgatccagagacatgtggcagcaggcatggcttccccttggcctctctgtacactgccccaggactgtcattttggcatctgcaaaggaatcactttagaaagccagcacctggttgatgtgtattcatactgacattagattgatgtgcactgcattagaaatgaggtagctgacacagaaaaaggatgttttgataggaataattttctagtatgtcttgaaacatgttcatctggaagtattttcctccaaagtaatgtagcatgatttttcaaggattgttaacatgcctgggattgggaaagataggactaaagttgtgccaaactatatcaataaattccatgtttagcagaaataggcagcctattggtgttatgtttatgtaacatagtccagagaactgacatgcaggtcaaaagtcagatacgcaacctccttatctgctaactctgttattcttcaaacacaagtgggtagtgtcatttttccttccttccttccattggcagattgtatatttattcacaaaacattaaatgtccatcctgtgccaggtactatgcagatgttgagggatttggggtctggttagtcgtgactatctatcctgaatctaacagtgacttcataactaggagactgaattagacccttaaggtatagtgtgtgttgcaaatcactctgcaatggaaacttttatattcagggtaggtttgtgtcttaaactaggtgttctaatcaatgtacaagactttaccatacacgcaactatagtttttctaaaccttcatcattttgtgattctttgagaaagggcttttaggaactttatgttctaaaaaatgtttttaacaataataagataaaagaaaaacctgtgattcatatgtccccactggcattactcagcaggagcccccagctgccaaaggttggcagtgatcctgcaagttcaagggctctttctccctggggatgtgctttgtggcttctctttacagctttgtttctgcatcagttcactgctgcatgttgtttggaatttatcaccttaagaaagtgtctctgttttatatagaaacactttctcacttacaggggagaaggaaatgcagggcacatgatctggccctccccagaacaatctggatttcacggagacagcaaccagaagttaaaccatgtgactaaaaatgcatctggctactttttcatgtatgtatgagacagaaactaatccttactatcctattaggataccacttttcattgcaaagtttgtgtcaataaagtcattaattttaaacataaaaaaaaag

SEQ ID NO: 12347 - DNA, 4030 bp, Homo sapiens
ttgggtggtgacatcacgaagtggctggttatgaaaggagcactgtgccgtagaactgaggaaagcacaggctttgctagagatgttaagtattctctctccctgaaagctggttcttctgaaatcaaaatattcaggggggaaggaaaagaggcacagggcatctgaattccaaaggactagggaagccaccacttcccggataactgcactccctccaccttacacctaaaacaaggttgaagagtcctgtcaaggccatctcaaaaggagaagcaaagcctgcagaggaggccagcctgagtcctggggtgcgaacgggtgctgggctcagcatgaggaggaggagaccctggccacagttccatgaatctttgctcccttccacattatggattctggtaaattcattggcctacgcaagtctgagctctaggtctgaacccgcatggacctgagggtgcaccgagaaaagaaaggctgacaactggatcccgggaatgtcaaggccaccctgggcttgaagggaccggccatgcctccaagccttgcccagagagggggttcaggatgctgcgtggttccaggtgatctattgctttctcgagtttaaagttcagaggatcatgaagtaccacagctggaaggggtgtaagtgacactgcctagcctaactctcttaaaaatcatagccctactcctgcctccccaaatcagatacgacaggcataggctctgactgttccttaagtcttagtggcaatactccctgaccagttttgcggggttgctcccagttccattgcttttgtaacaggtggccagaaagcctggggtcccgtgataagagtttcagttctttccaggatggatggaaagaaggaaggaaggatggatggatggatgaatgaatgagcgggtgagcggatggatggatggatggatggatggatggatagatgggccagagactgggaacggtaatgccggccagacgggtccgagcgcctcgggagccccagccctcctccggctgcggggccgctgctcctgctcccgggccgtcacggagccctgagggagggggcgggcgagcgggggccttggggcggccagggcgctgggagggaggactgggcggtggggaccggaggggagggagggccttggaggcggagaggagggacgggctgggagagggcccggactaggggcggcgggcaccgcaggagctccgcgcggctgcagcgcgggcgggagcggggacgcgatgtcgccgccgccgcctccttgcgggccggggctgcgcctccggggctgagccgccgccagagccgacagccgagcagccgctgggcgctcccgcggcgcaggaggatgggctgcggcgggagccgggcggatgccatcgagccccgctactacgagagctggacccgggagacagaatccacctggctcacctacaccgactcggacgcgccgcccagcgccgccgccccggacagcggccccgaagcgggcggcctgcactcgggcatgctggaagatggactgccctccaatggtgtgccccgatctacagccccaggtggaatacccaacccagagaagaagacgaactgtgagacccagtgcccaaatccccagagcctcagctcaggccctctgacccagaaacagaatggccttcagaccacagaggctaaaagagatgctaagagaatgcctgcaaaagaagtcaccattaatgtaacagatagcatccaacagatggacagaagtcgaagaatcacaaagaactgtgtcaactagcagagagtccaagcagaagggcagatggacttcttcagtgtccttcacggcactggatcccatcaaagaaccttgaagaagtggctgccccttgctggacctgaattctactgagtccctggcaagactgtcttacctggcagcaaactgctgcctgatttgttgggaccttctgagccttctacttatcatgtaaatgtattggcacagtgcttacatatgttaataaactgcaaatgtgcagttcagtttgtctctttgcaactcctgtaatacggtctggtgtaaaagtagtgagttaaagctacaggtcagtttatgaaacagaaaagtaggaatgcattttctgggtgaaagagtcacaccttagtgctataactctcctgcccatgatagtgtattctgtttcaggcaagcttattctttccttctttcattttaaatattgtcattacaaatcttaccaggttcacttaaaagctggctttcatccaactctaaacccacatattgaaaaaatcaaggtacaggaaaactccttgttatccttgtttccttagcttggtatgagacagatcggatccagtttcccatgcaccaacccactgcccatggcatgtctttgggaggtgtctgtgaagcagtcatacctgctcctcatctgcctggaaagtcctcctattccagtgtccatgttggcctccagtccttaatgtcaccatgcttgtggccaatgcatccaaataaggatacccctcagggctcagctagacattgcaattttgcatagctttccagttccctttgcttgtcttcttgactgtcttccctctctatcggggtcacttgcaattgttaatcaaagattgaacactgcgtaggagagggagatgatccagagacatgtggcagcaggcatggcttccccttggcctctctgtacactgccccaggactgtcattttggcatctgcaaaggaatcactttagaaagccagcacctggttgatgtgtattcatactgacattagattgatgtgcactgcattagaaatgaggtagctgacacagaaaaaggatgttttgataggaataattttctagtatgtcttgaaacatgttcatctggaagtattttcctccaaagtaatgtagcatgatttttcaaggattgttaacatgcctgggattgggaaagataggactaaagttgtgccaaactatatcaataaattccatgtttagcagaaataggcagcctattggtgttatgtttatgtaacatagtccagagaactgacatgcaggtcaaaagtcagatacgcaacctccttatctgctaactctgttattcttcaaacacaagtgggtagtgtcatttttccttccttccttccattggcagattgtatatttattcacaaaacattaaatgtccatcctgtgccaggtactatgcagatgttgagggatttggggtctggttagtcgtgactatctatcctgaatctaacagtgacttcataactaggagactgaattagacccttaaggtatagtgtgtgttgcaaatcactctgcaatggaaacttttatattcagggtaggtttgtgtcttaaactaggtgttctaatcaatgtacaagactttaccatacacgcaactatagtttttctaaaccttcatcattttgtgattctttgagaaagggcttttaggaactttatgttctaaaaaatgtttttaacaataataagataaaagaaaaacctgtgattcatatgtccccactggcattactcagcaggagcccccagctgccaaaggttggcagtgatcctgcaagttcaagggctctttctccctggggatgtgctttgtggcttctctttacagctttgtttctgcatcagttcactgctgcatgttgtttggaatttatcaccttaagaaagtgtctctgttttatatagaaacactttctcacttacaggggagaaggaaatgcagggcacatgatctggccctccccagaacaatctggatttcacggagacagcaaccagaagttaaaccatgtgactaaaaatgcatctggctactttttcatgtatgtatgagacagaaactaatccttactatcctattaggataccacttttcattgcaaagtttgtgtcaataaagtcattaattttaaacataaaaaaaaag

SEQ ID NO: 12348 - DNA, 4917 bp, Homo sapiens
acagatggcctggatcagtgcaatgtgcaacaagaggactatatcgtctcagtaaaaaccttgaagagatgaacccatttcagagacccagcaagggatcacctgcatatacaggcatcagcagaaacaggaatttgggatttatcctggaggtagtggaagcttttggaggtcttaaccaggacagcacatgtggctttcctgcaatgggatcgtccttcaagaggacctcacaggctctccacccggactgtgacgtaagcagctgcagcagccttggatgtttctggatagccagccccatgagaacagctttaaaataggagactggcattgtgatgaagtgtggacttcgctgtcatatagacctggatttaaatcctggcttcagtgtttatggatgacattggacaagtcatttaacctccttaagtctcagagttctcattacggaaatggagctcttaatagtacctaccccctagtgtggttgtgagggttgagatcatctatgttcaaagtgcttattatacagagacggggacatgtaagtgctacataaatgttagcttttattagtcactggagtggaggagagaggactgttgcctccttgtcaatgtccccatcctgggaagcctgcctgtgtgcaccaaggcccatctgacccatatatcagaaaaggtgcccttctagggagcgacaccccccaccaagccccccagtcgctgtccatgctttcctctaggttcaaaatgcagctgcatctgtgcagaaaccaggtgttgcctgtgagttctgcctcgctggccagaggtggaaggaaggaggaaaggagaggggcctccatacttccagagccccactgggggttaccttcgcttgcccccactctttttgtcttgctctgaggatgccaggactttaaggacattgtcagcgagcacgtaagttcacccagaaagaatctcagtcatctggactgctttgtgctatatgaaaatctctgagaaccttcaagagcccaaaaacagttctcctccatgctgtatgccatggtcagtggttaaagagaacattttgttccactcctccagctctgccttagaaacccaagccctgcactccaaggctcctggcatcgtacaccagcaccagcaattttctgccaaaagcatcagccaaaatctattctatctatttcagttcctctcttttcatcggattgtatttttacaggtgattgctgattctcacactgctcttcagattcatgtacagctgtggtctgaatgtgtgtgttttctcaaaattcaagtttaaaacttaatcctcaatgtgatagtatcaacagctgcggccttttggaaagtgaaggtggagccctcgtgagtgggattagagctcttataaaagagattgaagggagctacctagcccttccatctcttctgccttgtgaggacacagtgttcatcccttttgtcttcccaccatttgaagatgcagaaagaaggtgccatcttggaagcaaagagcagccctcaccagacaccaagtctgctggcaccttgatcttggacttcccagcctccaggactgtgagaaatgaatttctgttgtttataaattacctagtctaaggtatgctgttacagtagcaggaatggactaagacacacattgtcaaaatcttcatgagttaaaggtgaaggtacaatcagaactggtgcatggaattggaaccataggtcttagtaaacactgtaaaaatgcactattcaaatctacagaaaatgctctctcttcaagttcagaaagaagctacaatctgcttttcctttttttctgaagatgtggggaacgaaattggatcttgtgcttttgggtgctaactttgagccctcttcctttacatctaaatgacaatttgtggatcaatgaggatgtgtcaactagccaagatcgaggacctggaggggtgctctgtggaaactgctttaaaatccttcagagggtgggcacggagctctggttctggttgaagagtcctgtcaaggccatctcaaaaggagaagcaaagcctgcagaggaggccagcctgagtcctggggtgcgaacgggtgctgggctcagcatgaggaggaggagaccctggccacagttccatgaatctttgctcccttccacattatggattctggctaagaagattttcatctttcaccacctgttctggattcttggaacaggtaaattcattggcctacgcaagtctgagctctaggtctgaacccgcatggacctgagggtgcaccgagaaaagaaaggctgacaactggatcccgggaatgtcaaggccaccctgggcttgaagggaccggccatgcctccaagccttgcccagagagggggttcaggatgctgcgtggttccaggtgatctattgctttctcgagtttaaagttcagaggatcatgaagtaccacagctggaaggggtgtaagtgacactgcctagcctaactctcttaaaaatcatagccctactcctgcctccccaaatcagatacgacaggcataggctctgactgttccttaagtcttagtggcaatactccctgaccagttttgcggggttgctcccagttccattgcttttgtaacaggtggccagaaagcctggggtcccgtgataagagtttcagttctttccaggatggatggaaagaaggaaggaaggatggatggatggatgaatgaatgagcgggtgagcggatggatggatggatggatggatggatggatagatgggccagagactgggaacggtaatgccggccagacgggtccgagcgcctcgggagccccagccctcctccggctgcggggccgctgctcctgctcccgggccgtcacggagccctgagggagggggcgggcgagcgggggccttggggcggccagggcgctgggagggaggactgggcggtggggaccggaggggagggagggccttggaggcggagaggagggacgggctgggagagggcccggactaggggcggcgggcaccgcaggagctccgcgcggctgcagcgcgggcgggagcggggacgcgatgtcgccgccgccgcctccttgcgggccggggctgcgcctccggggctgagccgccgccagagccgacagccgagcagccgctgggcgctcccgcggcgcaggaggatgggctgcggcgggagccgggcggatgccatcgagccccgctactacgagagctggacccgggagacagaatccacctggctcacctacaccgactcggacgcgccgcccagcgccgccgccccggacagcggccccgaagcgggcggcctgcactcgggcatgctggaagatggactgccctccaatggtgtgccccgatctacagccccaggtggaatacccaacccagagaagaagacgaactgtgagacccagtgcccaaatccccagagcctcagctcaggccctctgacccagaaacagaatggccttcagaccacagaggctaaaagagatgctaagagaatgcctgcaaaagaagtcaccattaatgtaacagatagcatccaacagatggacagaagtcgaagaatcacaaagaactgtgtcaactagcagagagtccaagcagaagggcagatggacttcttcagtgtccttcacggcactggatcccatcaaagaaccttgaagaagtggctgccccttgctggacctgaattctactgagtccctggcaagactgtcttacctggcagcaaactgctgcctgatttgttgggaccttctgagccttctacttatcatgtaaatgtattggcacagtgcttacatatgttaataaactgcaaatgtgcagttcagtttgtctctttgcaactcctgtaatacggtctggtgtaaaagtagtgagttaaagctacaggtcagtttatgaaacagaaaagtaggaatgcattttctgggtgaaagagtcacaccttagtgctataactctcctgcccatgatagtgtattctgtttcaggcaagcttattctttccttctttcattttaaatattgtcattacaaatcttaccaggttcacttaaaagctggctttcatccaactctaaacccacatattgaaaaaatcaaggtacaggaaaactccttgttatccttgtttccttagcttggtatgagacagatcggatccagtttcccatgcaccaacccactgcccatggcatgtctttgggaggtgtctgtgaagcagtcatacctgctcctcatctgcctggaaagtcctcctattccagtgtccatgttggcctccagtccttaatgtcaccatgcttgtggccaatgcatccaaataaggatacccctcagggctcagctagacattgcaattttgcatagctttccagttccctttgcttgtcttcttgactgtcttccctctctatcggggtcacttgcaattgttaatcaaagattgaacactgcgtaggagagggagatgatccagagacatgtggcagcaggcatggcttccccttggcctctctgtacactgccccaggactgtcattttggcatctgcaaaggaatcactttagaaagccagcacctggttgatgtgtattcatactgacattagattgatgtgcactgcattagaaatgaggtagctgacacagaaaaaggatgttttgataggaataattttctagtatgtcttgaaacatgttcatctggaagtattttcctccaaagtaatgtagcatgatttttcaaggattgttaacatgcctgggattgggaaagataggactaaagttgtgccaaactatatcaataaattccatgtttagcagaaa

SEQ ID NO: 12349 - DNA, 5986 bp, Homo sapiens
acagatggcctggatcagtgcaatgtgcaacaagaggactatatcgtctcagtaaaaaccttgaagagatgaacccatttcagagacccagcaagggatcacctgcatatacaggcatcagcagaaacaggaatttgggatttatcctggaggtagtggaagcttttggaggtcttaaccaggacagcacatgtggctttcctgcaatgggatcgtccttcaagaggacctcacaggctctccacccggactgtgacgtaagcagctgcagcagccttggatgtttctggatagccagccccatgagaacagctttaaaataggagactggcattgtgatgaagtgtggacttcgctgtcatatagacctggatttaaatcctggcttcagtgtttatggatgacattggacaagtcatttaacctccttaagtctcagagttctcattacggaaatggagctcttaatagtacctaccccctagtgtggttgtgagggttgagatcatctatgttcaaagtgcttattatacagagacggggacatgtaagtgctacataaatgttagcttttattagtcactggagtggaggagagaggactgttgcctccttgtcaatgtccccatcctgggaagcctgcctgtgtgcaccaaggcccatctgacccatatatcagaaaaggtgcccttctagggagcgacaccccccaccaagccccccagtcgctgtccatgctttcctctaggttcaaaatgcagctgcatctgtgcagaaaccaggtgttgcctgtgagttctgcctcgctggccagaggtggaaggaaggaggaaaggagaggggcctccatacttccagagccccactgggggttaccttcgcttgcccccactctttttgtcttgctctgaggatgccaggactttaaggacattgtcagcgagcacgtaagttcacccagaaagaatctcagtcatctggactgctttgtgctatatgaaaatctctgagaaccttcaagagcccaaaaacagttctcctccatgctgtatgccatggtcagtggttaaagagaacattttgttccactcctccagctctgccttagaaacccaagccctgcactccaaggctcctggcatcgtacaccagcaccagcaattttctgccaaaagcatcagccaaaatctattctatctatttcagttcctctcttttcatcggattgtatttttacaggtgattgctgattctcacactgctcttcagattcatgtacagctgtggtctgaatgtgtgtgttttctcaaaattcaagtttaaaacttaatcctcaatgtgatagtatcaacagctgcggccttttggaaagtgaaggtggagccctcgtgagtgggattagagctcttataaaagagattgaagggagctacctagcccttccatctcttctgccttgtgaggacacagtgttcatcccttttgtcttcccaccatttgaagatgcagaaagaaggtgccatcttggaagcaaagagcagccctcaccagacaccaagtctgctggcaccttgatcttggacttcccagcctccaggactgtgagaaatgaatttctgttgtttataaattacctagtctaaggtatgctgttacagtagcaggaatggactaagacacacattgtcaaaatcttcatgagttaaaggtgaaggtacaatcagaactggtgcatggaattggaaccataggtcttagtaaacactgtaaaaatgcactattcaaatctacagaaaatgctctctcttcaagttcagaaagaagctacaatctgcttttcctttttttctgaagatgtggggaacgaaattggatcttgtgcttttgggtgctaactttgagccctcttcctttacatctaaatgacaatttgtggatcaatgaggatgtgtcaactagccaagatcgaggacctggaggggtgctctgtggaaactgctttaaaatccttcagagggtgggcacggagctctggttctggttgaagagtcctgtcaaggccatctcaaaaggagaagcaaagcctgcagaggaggccagcctgagtcctggggtgcgaacgggtgctgggctcagcatgaggaggaggagaccctggccacagttccatgaatctttgctcccttccacattatggattctggctaagaagattttcatctttcaccacctgttctggattcttggaacaggtaaattcattggcctacgcaagtctgagctctaggtctgaacccgcatggacctgagggtgcaccgagaaaagaaaggctgacaactggatcccgggaatgtcaaggccaccctgggcttgaagggaccggccatgcctccaagccttgcccagagagggggttcaggatgctgcgtggttccaggtgatctattgctttctcgagtttaaagttcagaggatcatgaagtaccacagctggaaggggtgtaagtgacactgcctagcctaactctcttaaaaatcatagccctactcctgcctccccaaatcagatacgacaggcataggctctgactgttccttaagtcttagtggcaatactccctgaccagttttgcggggttgctcccagttccattgcttttgtaacaggtggccagaaagcctggggtcccgtgataagagtttcagttctttccaggatggatggaaagaaggaaggaaggatggatggatggatgaatgaatgagcgggtgagcggatggatggatggatggatggatggatggatagatgggccagagactgggaacggtaatgccggccagacgggtccgagcgcctcgggagccccagccctcctccggctgcggggccgctgctcctgctcccgggccgtcacggagccctgagggagggggcgggcgagcgggggccttggggcggccagggcgctgggagggaggactgggcggtggggaccggaggggagggagggccttggaggcggagaggagggacgggctgggagagggcccggactaggggcggcgggcaccgcaggagctccgcgcggctgcagcgcgggcgggagcggggacgcgatgtcgccgccgccgcctccttgcgggccggggctgcgcctccggggctgagccgccgccagagccgacagccgagcagccgctgggcgctcccgcggcgcaggaggatgggctgcggcgggagccgggcggatgccatcgagccccgctactacgagagctggacccgggagacagaatccacctggctcacctacaccgactcggacgcgccgcccagcgccgccgccccggacagcggccccgaagcgggcggcctgcactcggttctggaggctgagaagtccaagatcaaggcaccaacagattcagtgtctgatgaaggcttgttctctgcttcaaagatggcacctcttgctgtgttctcacatggcatgctggaagatggactgccctccaatggtgtgccccgatctacagccccaggtggaatacccaacccagagaagaagacgaactgtgagacccagtgcccaaatccccagagcctcagctcaggccctctgacccagaaacagaatggccttcagaccacagaggctaaaagagatgctaagagaatgcctgcaaaagaagtcaccattaatgtaacagatagcatccaacagatggacagaagtcgaagaatcacaaagaactgtgtcaactagcagagagtccaagcagaagggcagatggacttcttcagtgtccttcacggcactggatcccatcaaagaaccttgaagaagtggctgccccttgctggacctgaattctactgagtccctggcaagactgtcttacctggcagcaaactgctgcctgatttgttgggaccttctgagccttctacttatcatgtaaatgtattggcacagtgcttacatatgttaataaactgcaaatgtgcagttcagtttgtctctttgcaactcctgtaatacggtctggtgtaaaagtagtgagttaaagctacaggtcagtttatgaaacagaaaagtaggaatgcattttctgggtgaaagagtcacaccttagtgctataactctcctgcccatgatagtgtattctgtttcaggcaagcttattctttccttctttcattttaaatattgtcattacaaatcttaccaggttcacttaaaagctggctttcatccaactctaaacccacatattgaaaaaatcaaggtacaggaaaactccttgttatccttgtttccttagcttggtatgagacagatcggatccagtttcccatgcaccaacccactgcccatggcatgtctttgggaggtgtctgtgaagcagtcatacctgctcctcatctgcctggaaagtcctcctattccagtgtccatgttggcctccagtccttaatgtcaccatgcttgtggccaatgcatccaaataaggatacccctcagggctcagctagacattgcaattttgcatagctttccagttccctttgcttgtcttcttgactgtcttccctctctatcggggtcacttgcaattgttaatcaaagattgaacactgcgtaggagagggagatgatccagagacatgtggcagcaggcatggcttccccttggcctctctgtacactgccccaggactgtcattttggcatctgcaaaggaatcactttagaaagccagcacctggttgatgtgtattcatactgacattagattgatgtgcactgcattagaaatgaggtagctgacacagaaaaaggatgttttgataggaataattttctagtatgtcttgaaacatgttcatctggaagtattttcctccaaagtaatgtagcatgatttttcaaggattgttaacatgcctgggattgggaaagataggactaaagttgtgccaaactatatcaataaattccatgtttagcagaaataggcagcctattggtgttatgtttatgtaacatagtccagagaactgacatgcaggtcaaaagtcagatacgcaacctccttatctgctaactctgttattcttcaaacacaagtgggtagtgtcatttttccttccttccttccattggcagattgtatatttattcacaaaacattaaatgtccatcctgtgccaggtactatgcagatgttgagggatttggggtctggttagtcgtgactatctatcctgaatctaacagtgacttcataactaggagactgaattagacccttaaggtatagtgtgtgttgcaaatcactctgcaatggaaacttttatattcagggtaggtttgtgtcttaaactaggtgttctaatcaatgtacaagactttaccatacacgcaactatagtttttctaaaccttcatcattttgtgattctttgagaaagggcttttaggaactttatgttctaaaaaatgtttttaacaataataagataaaagaaaaacctgtgattcatatgtccccactggcattactcagcaggagcccccagctgccaaaggttggcagtgatcctgcaagttcaagggctctttctccctggggatgtgctttgtggcttctctttacagctttgtttctgcatcagttcactgctgcatgttgtttggaatttatcaccttaagaaagtgtctctgttttatatagaaacactttctcacttacaggggagaaggaaatgcagggcacatgatctggccctccccagaacaatctggatttcacggagacagcaaccagaagttaaaccatgtgactaaaaatgcatctggctactttttcatgtatgtatgagacagaaactaatccttactatcctattaggataccacttttcattgcaaagtttgtgtcaataaagtcattaattttaaacataaaaaaaaag

SEQ ID NO: 12350 - DNA, 5714 bp, Homo sapiens
acagatggcctggatcagtgcaatgtgcaacaagaggactatatcgtctcagtaaaaaccttgaagagatgaacccatttcagagacccagcaagggatcacctgcatatacaggcatcagcagaaacaggaatttgggatttatcctggaggtagtggaagcttttggaggtcttaaccaggacagcacatgtggctttcctgcaatgggatcgtccttcaagaggacctcacaggctctccacccggactgtgacgtaagcagctgcagcagccttggatgtttctggatagccagccccatgagaacagctttaaaataggagactggcattgtgatgaagtgtggacttcgctgtcatatagacctggatttaaatcctggcttcagtgtttatggatgacattggacaagtcatttaacctccttaagtctcagagttctcattacggaaatggagctcttaatagtacctaccccctagtgtggttgtgagggttgagatcatctatgttcaaagtgcttattatacagagacggggacatgtaagtgctacataaatgttagcttttattagtcactggagtggaggagagaggactgttgcctccttgtcaatgtccccatcctgggaagcctgcctgtgtgcaccaaggcccatctgacccatatatcagaaaaggtgcccttctagggagcgacaccccccaccaagccccccagtcgctgtccatgctttcctctaggttcaaaatgcagctgcatctgtgcagaaaccaggtgttgcctgtgagttctgcctcgctggccagaggtggaaggaaggaggaaaggagaggggcctccatacttccagagccccactgggggttaccttcgcttgcccccactctttttgtcttgctctgaggatgccaggactttaaggacattgtcagcgagcacgtaagttcacccagaaagaatctcagtcatctggactgctttgtgctatatgaaaatctctgagaaccttcaagagcccaaaaacagttctcctccatgctgtatgccatggtcagtggttaaagagaacattttgttccactcctccagctctgccttagaaacccaagccctgcactccaaggctcctggcatcgtacaccagcaccagcaattttctgccaaaagcatcagccaaaatctattctatctatttcagttcctctcttttcatcggattgtatttttacaggtgattgctgattctcacactgctcttcagattcatgtacagctgtggtctgaatgtgtgtgttttctcaaaattcaagtttaaaacttaatcctcaatgtgatagtatcaacagctgcggccttttggaaagtgaaggtggagccctcgtgagtgggattagagctcttataaaagagattgaagggagctacctagcccttccatctcttctgccttgtgaggacacagtgttcatcccttttgtcttcccaccatttgaagatgcagaaagaaggtgccatcttggaagcaaagagcagccctcaccagacaccaagtctgctggcaccttgatcttggacttcccagcctccaggactgtgagaaatgaatttctgttgtttataaattacctagtctaaggtatgctgttacagtagcaggaatggactaagacacacattgtcaaaatcttcatgagttaaaggtgaaggtacaatcagaactggtgcatggaattggaaccataggtcttagtaaacactgtaaaaatgcactattcaaatctacagaaaatgctctctcttcaagttcagaaagaagctacaatctgcttttcctttttttctgaagatgtggggaacgaaattggatcttgtgcttttgggtgctaactttgagccctcttcctttacatctaaatgacaatttgtggatcaatgaggatgtgtcaactagccaagatcgaggacctggaggggtgctctgtggaaactgctttaaaatccttcagagggtgggcacggagctctggttctggttgaagagtcctgtcaaggccatctcaaaaggagaagcaaagcctgcagaggaggccagcctgagtcctggggtgcgaacgggtgctgggctcagcatgaggaggaggagaccctggccacagttccatgaatctttgctcccttccacattatggattctggctaagaagattttcatctttcaccacctgttctggattcttggaacaggtaaattcattggcctacgcaagtctgagctctaggtctgaacccgcatggacctgagggtgcaccgagaaaagaaaggctgacaactggatcccgggaatgtcaaggccaccctgggcttgaagggaccggccatgcctccaagccttgcccagagagggggttcaggatgctgcgtggttccaggtgatctattgctttctcgagtttaaagttcagaggatcatgaagtaccacagctggaaggggtgtaagtgacactgcctagcctaactctcttaaaaatcatagccctactcctgcctccccaaatcagatacgacaggcataggctctgactgttccttaagtcttagtggcaatactccctgaccagttttgcggggttgctcccagttccattgcttttgtaacaggtggccagaaagcctggggtcccgtgataagagtttcagttctttccaggatggatggaaagaaggaaggaaggatggatggatggatgaatgaatgagcgggtgagcggatggatggatggatggatggatggatggatagatgggccagagactgggaacggtaatgccggccagacgggtccgagcgcctcgggagccccagccctcctccggctgcggggccgctgctcctgctcccgggccgtcacggagccctgagggagggggcgggcgagcgggggccttggggcggccagggcgctgggagggaggactgggcggtggggaccggaggggagggagggccttggaggcggagaggagggacgggctgggagagggcccggactaggggcggcgggcaccgcaggagctccgcgcggctgcagcgcgggcgggagcggggacgcgatgtcgccgccgccgcctccttgcgggccggggctgcgcctccggggctgagccgccgccagagccgacagccgagcagccgctgggcgctcccgcggcgcaggaggatgggctgcggcgggagccgggcggatgccatcgagccccgctactacgagagctggacccgggagacagaatccacctggctcacctacaccgactcggacgcgccgcccagcgccgccgccccggacagcggccccgaagcgggcggcctgcactcgggctaaaagagatgctaagagaatgcctgcaaaagaagtcaccattaatgtaacagatagcatccaacagatggacagaagtcgaagaatcacaaagaactgtgtcaactagcagagagtccaagcagaagggcagatggacttcttcagtgtccttcacggcactggatcccatcaaagaaccttgaagaagtggctgccccttgctggacctgaattctactgagtccctggcaagactgtcttacctggcagcaaactgctgcctgatttgttgggaccttctgagccttctacttatcatgtaaatgtattggcacagtgcttacatatgttaataaactgcaaatgtgcagttcagtttgtctctttgcaactcctgtaatacggtctggtgtaaaagtagtgagttaaagctacaggtcagtttatgaaacagaaaagtaggaatgcattttctgggtgaaagagtcacaccttagtgctataactctcctgcccatgatagtgtattctgtttcaggcaagcttattctttccttctttcattttaaatattgtcattacaaatcttaccaggttcacttaaaagctggctttcatccaactctaaacccacatattgaaaaaatcaaggtacaggaaaactccttgttatccttgtttccttagcttggtatgagacagatcggatccagtttcccatgcaccaacccactgcccatggcatgtctttgggaggtgtctgtgaagcagtcatacctgctcctcatctgcctggaaagtcctcctattccagtgtccatgttggcctccagtccttaatgtcaccatgcttgtggccaatgcatccaaataaggatacccctcagggctcagctagacattgcaattttgcatagctttccagttccctttgcttgtcttcttgactgtcttccctctctatcggggtcacttgcaattgttaatcaaagattgaacactgcgtaggagagggagatgatccagagacatgtggcagcaggcatggcttccccttggcctctctgtacactgccccaggactgtcattttggcatctgcaaaggaatcactttagaaagccagcacctggttgatgtgtattcatactgacattagattgatgtgcactgcattagaaatgaggtagctgacacagaaaaaggatgttttgataggaataattttctagtatgtcttgaaacatgttcatctggaagtattttcctccaaagtaatgtagcatgatttttcaaggattgttaacatgcctgggattgggaaagataggactaaagttgtgccaaactatatcaataaattccatgtttagcagaaataggcagcctattggtgttatgtttatgtaacatagtccagagaactgacatgcaggtcaaaagtcagatacgcaacctccttatctgctaactctgttattcttcaaacacaagtgggtagtgtcatttttccttccttccttccattggcagattgtatatttattcacaaaacattaaatgtccatcctgtgccaggtactatgcagatgttgagggatttggggtctggttagtcgtgactatctatcctgaatctaacagtgacttcataactaggagactgaattagacccttaaggtatagtgtgtgttgcaaatcactctgcaatggaaacttttatattcagggtaggtttgtgtcttaaactaggtgttctaatcaatgtacaagactttaccatacacgcaactatagtttttctaaaccttcatcattttgtgattctttgagaaagggcttttaggaactttatgttctaaaaaatgtttttaacaataataagataaaagaaaaacctgtgattcatatgtccccactggcattactcagcaggagcccccagctgccaaaggttggcagtgatcctgcaagttcaagggctctttctccctggggatgtgctttgtggcttctctttacagctttgtttctgcatcagttcactgctgcatgttgtttggaatttatcaccttaagaaagtgtctctgttttatatagaaacactttctcacttacaggggagaaggaaatgcagggcacatgatctggccctccccagaacaatctggatttcacggagacagcaaccagaagttaaaccatgtgactaaaaatgcatctggctactttttcatgtatgtatgagacagaaactaatccttactatcctattaggataccacttttcattgcaaagtttgtgtcaataaagtcattaattttaaacataaaaaaaaag

SEQ ID NO: 12351 - DNA, 5414 bp, Homo sapiens
acagatggcctggatcagtgcaatgtgcaacaagaggactatatcgtctcagtaaaaaccttgaagagatgaacccatttcagagacccagcaagggatcacctgcatatacaggcatcagcagaaacaggaatttgggatttatcctggaggtagtggaagcttttggaggtcttaaccaggacagcacatgtggctttcctgcaatgggatcgtccttcaagaggacctcacaggctctccacccggactgtgacgtaagcagctgcagcagccttggatgtttctggatagccagccccatgagaacagctttaaaataggagactggcattgtgatgaagtgtggacttcgctgtcatatagacctggatttaaatcctggcttcagtgtttatggatgacattggacaagtcatttaacctccttaagtctcagagttctcattacggaaatggagctcttaatagtacctaccccctagtgtggttgtgagggttgagatcatctatgttcaaagtgcttattatacagagacggggacatgtaagtgctacataaatgttagcttttattagtcactggagtggaggagagaggactgttgcctccttgtcaatgtccccatcctgggaagcctgcctgtgtgcaccaaggcccatctgacccatatatcagaaaaggtgcccttctagggagcgacaccccccaccaagccccccagtcgctgtccatgctttcctctaggttcaaaatgcagctgcatctgtgcagaaaccaggtgttgcctgtgagttctgcctcgctggccagaggtggaaggaaggaggaaaggagaggggcctccatacttccagagccccactgggggttaccttcgcttgcccccactctttttgtcttgctctgaggatgccaggactttaaggacattgtcagcgagcacgtaagttcacccagaaagaatctcagtcatctggactgctttgtgctatatgaaaatctctgagaaccttcaagagcccaaaaacagttctcctccatgctgtatgccatggtcagtggttaaagagaacattttgttccactcctccagctctgccttagaaacccaagccctgcactccaaggctcctggcatcgtacaccagcaccagcaattttctgccaaaagcatcagccaaaatctattctatctatttcagttcctctcttttcatcggattgtatttttacaggtgattgctgattctcacactgctcttcagattcatgtacagctgtggtctgaatgtgtgtgttttctcaaaattcaagtttaaaacttaatcctcaatgtgatagtatcaacagctgcggccttttggaaagtgaaggtggagccctcgtgagtgggattagagctcttataaaagagattgaagggagctacctagcccttccatctcttctgccttgtgaggacacagtgttcatcccttttgtcttcccaccatttgaagatgcagaaagaaggtgccatcttggaagcaaagagcagccctcaccagacaccaagtctgctggcaccttgatcttggacttcccagcctccaggactgtgagaaatgaatttctgttgtttataaattacctagtctaaggtatgctgttacagtagcaggaatggactaagacacacattgtcaaaatcttcatgagttaaaggtgaaggtacaatcagaactggtgcatggaattggaaccataggtcttagtaaacactgtaaaaatgcactattcaaatctacagaaaatgctctctcttcaagttcagaaagaagctacaatctgcttttcctttttttctgaagatgtggggaacgaaattggatcttgtgcttttgggtgctaactttgagccctcttcctttacatctaaatgacaatttgtggatcaatgaggatgtgtcaactagccaagatcgaggacctggaggggtgctctgtggaaactgctttaaaatccttcagagggtgggcacggagctctggttctggttgaagagtcctgtcaaggccatctcaaaaggagaagcaaagcctgcagaggaggccagcctgagtcctggggtgcgaacgggtgctgggctcagcatgaggaggaggagaccctggccacagttccatgaatctttgctcccttccacattatggattctggctaagaagattttcatctttcaccacctgttctggattcttggaacaggtaaattcattggcctacgcaagtctgagctctaggtctgaacccgcatggacctgagggtgcaccgagaaaagaaaggctgacaactggatcccgggaatgtcaaggccaccctgggcttgaagggaccggccatgcctccaagccttgcccagagagggggttcaggatgctgcgtggttccaggtgatctattgctttctcgagtttaaagttcagaggatcatgaagtaccacagctggaaggggtgtaagtgacactgcctagcctaactctcttaaaaatcatagccctactcctgcctccccaaatcagatacgacaggcataggctctgactgttccttaagtcttagtggcaatactccctgaccagttttgcggggttgctcccagttccattgcttttgtaacaggtggccagaaagcctggggtcccgtgataagagtttcagttctttccaggatggatggaaagaaggaaggaaggatggatggatggatgaatgaatgagcgggtgagcggatggatggatggatggatggatggatggatagatgggccagagactgggaacggtaatgccggccagacgggtccgagcgcctcgggagccccagccctcctccggctgcggggccgctgctcctgctcccgggccgtcacggagccctgagggagggggcgggcgagcgggggccttggggcggccagggcgctgggagggaggactgggcggtggggaccggaggggagggagggccttggaggcggagaggagggacgggctgggagagggcccggactaggggcggcgggcaccgcaggagctccgcgcggctgcagcgcgggcgggagcggggacgcgatgtcgccgccgccgcctccttgcgggccggggctgcgcctccggggctgagccgccgccagagccgacagccgagcagccgctgggcgctcccgcggcgcaggaggatgggctgcggcgggagccgggcggatgccatcgagccccgctactacgagagctggacccgggagacagaatccacctggctcacctacaccgactcggacgcgccgcccagcgccgccgccccggacagcggccccgaagcgggcggcctgcactcgggcatgctggaagatggactgccctccaatggtgtgccccgatctacagccccaggtggaatacccaacccagagaagaagacgaactgtgagacccagtgcccaaatccccagagcctcagctcaggccctctgacccagaaacagaatggccttcagaccacagaggctaaaagagatgctaagagaatgcctgcaaaagaagtcaccattaatgtaacagatagcatccaacagatggacagaagtcgaagaatcacaaagaactgtgtcaactagcagagagtccaagcagaagggcagatggacttcttcagtgtccttcacggcactggatcccatcaaagaaccttgaagaagtggctgccccttgctggacctgaattctactgagtccctggcaagactgtcttacctggcagcaaactgctgcctgatttgttgggaccttctgagccttctacttatcatgtaaatgtattggcacagtgcttacatatgttaataaactgcaaatgtgcagttcagtttgtctctttgcaactcctgtaatacggtctggtgtaaaagtagtgagttaaagctacaggtcagtttatgaaacagaaaagtaggaatgcattttctgggtgaaagagtcacaccttagtgctataactctcctgcccatgatagtgtattctgtttcaggcaagcttattctttccttctttcattttaaatattgtcattacaaatcttaccaggttcacttaaaagctggctttcatccaactctaaacccacatattgaaaaaatcaaggtacaggaaaactccttgttatccttgtttccttagcttggtatgagacagatcggatccagtttcccatgcaccaacccactgcccatggcatgtctttgggaggtgtctgtgaagcagtcatacctgctcctcatctgcctggaaagtcctcctattccagtgtccatgttggcctccagtccttaatgtcaccatgcttgtggccaatgcatccaaataaggatacccctcagggctcagctagacattgcaattttgcatagctttccagttccctttgcttgtcttcttgactgtcttccctctctatcggggtcacttgcaattgttaatcaaagattgaacactgcgtaggagagggagatgatccagagacatgtggcagcaggcatggcttccccttggcctctctgtacactgccccaggactgtcattttggcatctgcaaaggaatcactttagaaagccagcacctggttgatgtgtattcatactgacattagattgatgtgcactgcattagaaatgaggtagctgacacagaaaaaggatgttttgataggaataattttctagtatgtcttgaaacatgttcatctggaagtattttcctccaaagtaatgtagcatgatttttcaaggattgttaacatgcctgggattgggaaagataggactaaagttgtgccaaactatatcaataaattccatgtttagcagaaaaaaaataaaaaaaaaaaagaaaaaaatagaaaaataaaaaaaaaaaaaaaagggggggggcgcgtgataaaaaggtttttcccgggagagggggcccgacaatttttaggggtgttaccaacgggttttttgtgtgtaacaaaaagggtggggccccaataaagggagggggggttataattaataagcgaaagcaggagtgggcgaggcggtttttaaacaagcgggcgtgatcgggtgtgggaacaactcgttttgcgggttggaaaaccttgtggggaaaggggaaacccctttacatttgcttggggggggagaacacaatattgggcaaaaaatatcctctagaggaaaagatttttaaaggagttctagggggacaaaattattaaccatttataggtgttataatgttgtctaaaaaacgagggataattatattgtgggcttaaaaaaatggcaacaggagaaatatctttgtgagaaaatttattcag

SEQ ID NO: 12352 - DNA, 2356 bp, Homo sapiens
gaagaccgcgaatccgtgatccacgcctcagctaaaagagatgctaagagaatgcctgcaaaagaagtcaccattaatgtaacagatagcatccaacagatggacagaagtcgaagaatcacaaagaactgtgtcaactagcagagagtccaagcagaagggcagatggacttcttcagtgtccttcacggcactggatcccatcaaagaaccttgaagaagtggctgccccttgctggacctgaattctactgagtccctggcaagactgtcttacctggcagcaaactgctgcctgatttgttgggaccttctgagccttctacttatcatgtaaatgtattggcacagtgcttacatatgttaataaactgcaaatgtgcagttcagtttgtctctttgcaactcctgtaatacggtctggtgtaaaagtagtgagttaaagctacaggtcagtttatgaaacagaaaagtaggaatgcattttctgggtgaaagagtcacaccttagtgctataactctcctgcccatgatagtgtattctgtttcaggcaagcttattctttccttctttcattttaaatattgtcattacaaatcttaccaggttcacttaaaagctggctttcatccaactctaaacccacatattgaaaaaatcaaggtacaggaaaactccttgttatccttgtttccttagcttggtatgagacagatcggatccagtttcccatgcaccaacccactgcccatggcatgtctttgggaggtgtctgtgaagcagtcatacctgctcctcatctgcctggaaagtcctcctattccagtgtccatgttggcctccagtccttaatgtcaccatgcttgtggccaatgcatccaaataaggatacccctcagggctcagctagacattgcaattttgcatagctttccagttccctttgcttgtcttcttgactgtcttccctctctatcggggtcacttgcaattgttaatcaaagattgaacactgcgtaggagagggagatgatccagagacatgtggcagcaggcatggcttccccttggcctctctgtacactgccccaggactgtcattttggcatctgcaaaggaatcactttagaaagccagcacctggttgatgtgtattcatactgacattagattgatgtgcactgcattagaaatgaggtagctgacacagaaaaaggatgttttgataggaataattttctagtatgtcttgaaacatgttcatctggaagtattttcctccaaagtaatgtagcatgatttttcaaggattgttaacatgcctgggattgggaaagataggactaaagttgtgccaaactatatcaataaattccatgtttagcagaaataggcagcctattggtgttatgtttatgtaacatagtccagagaactgacatgcaggtcaaaagtcagatacgcaacctccttatctgctaactctgttattcttcaaacacaagtgggtagtgtcatttttccttccttccttccattggcagattgtatatttattcacaaaacattaaatgtccatcctgtgccaggtactatgcagatgttgagggatttggggtctggttagtcgtgactatctatcctgaatctaacagtgacttcataactaggagactgaattagacccttaaggtatagtgtgtgttgcaaatcactctgcaatggaaacttttatattcagggtaggtttgtgtcttaaactaggtgttctaatcaatgtacaagactttaccatacacgcaactatagtttttctaaaccttcatcattttgtgattctttgagaaagggcttttaggaactttatgttctaaaaaatgtttttaacaataataagataaaagaaaaacctgtgattcatatgtccccactggcattactcagcaggagcccccagctgccaaaggttggcagtgatcctgcaagttcaagggctctttctccctggggatgtgctttgtggcttctctttacagctttgtttctgcatcagttcactgctgcatgttgtttggaatttatcaccttaagaaagtgtctctgttttatatagaaacactttctcacttacaggggagaaggaaatgcagggcacatgatctggccctccccagaacaatctggatttcacggagacagcaaccagaagttaaaccatgtgactaaaaatgcatctggctactttttcatgtatgtatgagacagaaactaatccttactatcctattaggataccacttttcattgcaaagtttgtgtcaataaagtcattaattttaaacataaaaaaaaag

SEQ ID NO: 12353 - DNA, 3982 bp, Homo sapiens
acagatggcctggatcagtgcaatgtgcaacaagaggactatatcgtctcagtaaaaaccttgaagagatgaacccatttcagagacccagcaagggatcacctgcatatacaggcatcagcagaaacaggaatttgggatttatcctggaggtagtggaagcttttggaggtcttaaccaggacagcacatgtggctttcctgcaatgggatcgtccttcaagaggacctcacaggctctccacccggactgtgacgtaagcagctgcagcagccttggatgtttctggatagccagccccatgagaacagctttaaaataggagactggcattgtgatgaagtgtggacttcgctgtcatatagacctggatttaaatcctggcttcagtgtttatggatgacattggacaagtcatttaacctccttaagtctcagagttctcattacggaaatggagctcttaatagtacctaccccctagtgtggttgtgagggttgagatcatctatgttcaaagtgcttattatacagagacggggacatgtaagtgctacataaatgttagcttttattagtcactggagtggaggagagaggactgttgcctccttgtcaatgtccccatcctgggaagcctgcctgtgtgcaccaaggcccatctgacccatatatcagaaaaggtgcccttctagggagcgacaccccccaccaagccccccagtcgctgtccatgctttcctctaggttcaaaatgcagctgcatctgtgcagaaaccaggtgttgcctgtgagttctgcctcgctggccagaggtggaaggaaggaggaaaggagaggggcctccatacttccagagccccactgggggttaccttcgcttgcccccactctttttgtcttgctctgaggatgccaggactttaaggacattgtcagcgagcacgtaagttcacccagaaagaatctcagtcatctggactgctttgtgctatatgaaaatctctgagaaccttcaagagcccaaaaacagttctcctccatgctgtatgccatggtcagtggttaaagagaacattttgttccactcctccagctctgccttagaaacccaagccctgcactccaaggctcctggcatcgtacaccagcaccagcaattttctgccaaaagcatcagccaaaatctattctatctatttcagttcctctcttttcatcggattgtatttttacaggtgattgctgattctcacactgctcttcagattcatgtacagctgtggtctgaatgtgtgtgttttctcaaaattcaagtttaaaacttaatcctcaatgtgatagtatcaacagctgcggccttttggaaagtgaaggtggagccctcgtgagtgggattagagctcttataaaagagattgaagggagctacctagcccttccatctcttctgccttgtgaggacacagtgttcatcccttttgtcttcccaccatttgaagatgcagaaagaaggtgccatcttggaagcaaagagcagccctcaccagacaccaagtctgctggcaccttgatcttggacttcccagcctccaggactgtgagaaatgaatttctgttgtttataaattacctagtctaaggtatgctgttacagtagcaggaatggactaagacacacattgtcaaaatcttcatgagttaaaggtgaaggtacaatcagaactggtgcatggaattggaaccataggtcttagtaaacactgtaaaaatgcactattcaaatctacagaaaatgctctctcttcaagttcagaaagaagctacaatctgcttttcctttttttctgaagatgtggggaacgaaattggatcttgtgcttttgggtgctaactttgagccctcttcctttacatctaaatgacaatttgtggatcaatgaggatgtgtcaactagccaagatcgaggacctggaggggtgctctgtggaaactgctttaaaatccttcagagggtgggcacggagctctggttctggttgaagagtcctgtcaaggccatctcaaaaggagaagcaaagcctgcagaggaggccagcctgagtcctggggtgcgaacgggtgctgggctcagcatgaggaggaggagaccctggccacagttccatgaatctttgctcccttccacattatggattctggctaagaagattttcatctttcaccacctgttctggattcttggaacaggtaaattcattggcctacgcaagtctgagctctaggtctgaacccgcatggacctgagggtgcaccgagaaaagaaaggctgacaactggatcccgggaatgtcaaggccaccctgggcttgaagggaccggccatgcctccaagccttgcccagagagggggttcaggatgctgcgtggttccaggtgatctattgctttctcgagtttaaagttcagaggatcatgaagtaccacagctggaaggggtgtaagtgacactgcctagcctaactctcttaaaaatcatagccctactcctgcctccccaaatcagatacgacaggcataggctctgactgttccttaagtcttagtggcaatactccctgaccagttttgcggggttgctcccagttccattgcttttgtaacaggtggccagaaagcctggggtcccgtgataagagtttcagttctttccaggatggatggaaagaaggaaggaaggatggatggatggatgaatgaatgagcgggtgagcggatggatggatggatggatggatggatggatagatgggccagagactgggaacggtaatgccggccagacgggtccgagcgcctcgggagccccagccctcctccggctgcggggccgctgctcctgctcccgggccgtcacggagccctgagggagggggcgggcgagcgggggccttggggcggccagggcgctgggagggaggactgggcggtggggaccggaggggagggagggccttggaggcggagaggagggacgggctgggagagggcccggactaggggcggcgggcaccgcaggagctccgcgcggctgcagcgcgggcgggagcggggacgcgatgtcgccgccgccgcctccttgcgggccggggctgcgcctccggggctgagccgccgccagagccgacagccgagcagccgctgggcgctcccgcggcgcaggaggatgggctgcggcgggagccgggcggatgccatcgagccccgctactacgagagctggacccgggagacagaatccacctggctcacctacaccgactcggacgcgccgcccagcgccgccgccccggacagcggccccgaagcgggcggcctgcactcgggcatgctggaagatggactgccctccaatggtgtgccccgatctacagccccaggtggaatacccaacccagagaagaagacgaactgtgagacccagtgcccaaatccccagagcctcagctcaggccctctgacccagaaacagaatggccttcagaccacagaggtggccttctagagacctaatcatcattgccatctctcaagacagtctggacccacagaactacgttcaaaagcttgatgactgctctaccacaggcccagatatttgtcttctagtctccttcccacacttgtgcccttaccctctgagccaggataagccgtggtcaagaggaagcagctttgcctggtggatggcatgatccatacacttgtttccccacctcatttcctgcccccccatccatcactttaaaattatgttttgcagtttacaaagtgcttttaagtctactggctccttaagttcccctaagagcattgtgaagtaagcattatccccattttatagacaaggaaactgaggttcatttgattgagttacatgaataaggccatataagtgttgtagaaggatattggtagct

SEQ ID NO: 12354 - DNA, 987 bp, Homo sapiens
acagatggcctggatcagtgcaatgtgcaacaagaggactatatcgtctcagtaaaaaccttgaagagatgaacccatttcagagacccagcaagggatcacctgcatatacaggcatcagcagaaacaggaatttgggatttatcctggaggtagtggaagcttttggaggtcttaaccaggacagcacatgtggctttcctgcaatgggatcgtccttcaagaggacctcacaggctctccacccggactgtgacgtaagcagctgcagcagccttggatgtttctggatagccagccccatgagaacagctttaaaataggagactggcattgtgatgaagtgtggacttcgctgtcatatagacctggatttaaatcctggcttcagtgtttatggatgacattggacaagtcatttaacctccttaagtctcagagttctcattacggaaatggagctcttaatagtacctaccccctagtgtggttgtgagggttgagatcatctatgttcaaagtgcttattatacagagacggggacatgtaagtgctacataaatgttagcttttattagtcactggagtggaggagagaggactgttgcctccttgtcaatgtccccatcctgggaagcctgcctgtgtgcaccaaggcccatctgacccatatatcagaaaaggtgcccttctagggagcgacaccccccaccaagccccccagtcgctgtccatgctttcctctaggttcaaaatgcagctgcatctgtgcagaaaccaggtgttgcctgtgagttctgcctcgctggccagaggtggaaggaaggaggaaaggagaggggcctccatacttccagagccccactgggggttaccttcgcttgcccccactctttttgtcttgctctgaggatgccaggactttaaggacattgtcagcgagcacgtaagttcacccccagccgggtgacttctcatccattggc

SEQ ID NO: 12355 - DNA, 5119 bp, Homo sapiens
acagatggcctggatcagtgcaatgtgcaacaagaggactatatcgtctcagtaaaaaccttgaagagatgaacccatttcagagacccagcaagggatcacctgcatatacaggcatcagcagaaacaggaatttgggatttatcctggaggtagtggaagcttttggaggtcttaaccaggacagcacatgtggctttcctgcaatgggatcgtccttcaagaggacctcacaggctctccacccggactgtgacgtaagcagctgcagcagccttggatgtttctggatagccagccccatgagaacagctttaaaataggagactggcattgtgatgaagtgtggacttcgctgtcatatagacctggatttaaatcctggcttcagtgtttatggatgacattggacaagtcatttaacctccttaagtctcagagttctcattacggaaatggagctcttaatagtacctaccccctagtgtggttgtgagggttgagatcatctatgttcaaagtgcttattatacagagacggggacatgtaagtgctacataaatgttagcttttattagtcactggagtggaggagagaggactgttgcctccttgtcaatgtccccatcctgggaagcctgcctgtgtgcaccaaggcccatctgacccatatatcagaaaaggtgcccttctagggagcgacaccccccaccaagccccccagtcgctgtccatgctttcctctaggttcaaaatgcagctgcatctgtgcagaaaccaggtgttgcctgtgagttctgcctcgctggccagaggtggaaggaaggaggaaaggagaggggcctccatacttccagagccccactgggggttaccttcgcttgcccccactctttttgtcttgctctgaggatgccaggactttaaggacattgtcagcgagcacgtaagttcacccagaaagaatctcagtcatctggactgctttgtgctatatgaaaatctctgagaaccttcaagagcccaaaaacagttctcctccatgctgtatgccatggtcagtggttaaagagaacattttgttccactcctccagctctgccttagaaacccaagccctgcactccaaggctcctggcatcgtacaccagcaccagcaattttctgccaaaagcatcagccaaaatctattctatctatttcagttcctctcttttcatcggattgtatttttacaggtgattgctgattctcacactgctcttcagattcatgtacagctgtggtctgaatgtgtgtgttttctcaaaattcaagtttaaaacttaatcctcaatgtgatagtatcaacagctgcggccttttggaaagtgaaggtggagccctcgtgagtgggattagagctcttataaaagagattgaagggagctacctagcccttccatctcttctgccttgtgaggacacagtgttcatcccttttgtcttcccaccatttgaagatgcagaaagaaggtgccatcttggaagcaaagagcagccctcaccagacaccaagtctgctggcaccttgatcttggacttcccagcctccaggactgtgagaaatgaatttctgttgtttataaattacctagtctaaggtatgctgttacagtagcaggaatggactaagacacacattgtcaaaatcttcatgagttaaaggtgaaggtacaatcagaactggtgcatggaattggaaccataggtcttagtaaacactgtaaaaatgcactattcaaatctacagaaaatgctctctcttcaagttcagaaagaagctacaatctgcttttcctttttttctgaagatgtggggaacgaaattggatcttgtgcttttgggtgctaactttgagccctcttcctttacatctaaatgacaatttgtggatcaatgaggatgtgtcaactagccaagatcgaggacctggaggggtgctctgtggaaactgctttaaaatccttcagagggtgggcacggagctctggttctggttgaagagtcctgtcaaggccatctcaaaaggagaagcaaagcctgcagaggaggccagcctgagtcctggggtgcgaacgggtgctgggctcagcatgaggaggaggagaccctggccacagttccatgaatctttgctcccttccacattatggattctggctaagaagattttcatctttcaccacctgttctggattcttggaacaggtaaattcattggcctacgcaagtctgagctctaggtctgaacccgcatggacctgagggtgcaccgagaaaagaaaggctgacaactggatcccgggaatgtcaaggccaccctgggcttgaagggaccggccatgcctccaagccttgcccagagagggggttcaggatgctgcgtggttccaggtgatctattgctttctcgagtttaaagttcagaggatcatgaagtaccacagctggaaggggtgtaagtgacactgcctagcctaactctcttaaaaatcatagccctactcctgcctccccaaatcagatacgacaggcataggctctgactgttccttaagtcttagtggcaatactccctgaccagttttgcggggttgctcccagttccattgcttttgtaacaggtggccagaaagcctggggtcccgtgataagagtttcagttctttccaggatggatggaaagaaggaaggaaggatggatggatggatgaatgaatgagcgggtgagcggatggatggatggatggatggatggatggatagatgggccagagactgggaacggtaatgccggccagacgggtccgagcgcctcgggagccccagccctcctccggctgcggggccgctgctcctgctcccgggccgtcacggagccctgagggagggggcgggcgagcgggggccttggggcggccagggcgctgggagggaggactgggcggtggggaccggaggggagggagggccttggaggcggagaggagggacgggctgggagagggcccggactaggggcggcgggcaccgcaggagctccgcgcggctgcagcgcgggcgggagcggggacgcgatgtcgccgccgccgcctccttgcgggccggggctgcgcctccggggctgagccgccgccagagccgacagccgagcagccgctgggcgctcccgcggcgcaggaggatgggctgcggcgggagccgggcggatgccatcgagccccgctactacgagagctggacccgggagacagaatccacctggctcacctacaccgactcggacgcgccgcccagcgccgccgccccggacagcggccccgaagcgggcggcctgcactcgggcatgctggaagatggactgccctccaatggtgtgccccgatctacagccccaggtggaatacccaacccagagaagaagacgaactgtgagacccagtgcccaaatccccagagcctcagctcaggccctctgacccagaaacagaatggccttcagaccacagaggctaaaagagatgctaagagaatgcctgcaaaagaagtcaccattaatgtaacagatagcatccaacagatggacagaagtcgaagaatcacaaagaactgtgtcaactagcagagagtccaagcagaagggcagatggacttcttcagtgtccttcacggcactggatcccatcaaagaaccttgaagaagtggctgccccttgctggacctgaattctactgagtccctggcaagactgtcttacctggcagcaaactgctgcctgatttgttgggaccttctgagccttctacttatcatgtaaatgtattggcacagtgcttacatatgttaataaactgcaaatgtgcagttcagtttgtctctttgcaactcctgtaatacggtctggtgtaaaagtagtgagttaaagctacaggtcagtttatgaaacagaaaagtaggaatgcattttctgggtgaaagagtcacaccttagtgctataactctcctgcccatgatagtgtattctgtttcaggcaagcttattctttccttctttcattttaaatattgtcattacaaatcttaccaggttcacttaaaagctggctttcatccaactctaaacccacatattgaaaaaatcaaggtacaggaaaactccttgttatccttgtttccttagcttggtatgagacagatcggatccagtttcccatgcaccaacccactgcccatggcatgtctttgggaggtgtctgtgaagcagtcatacctgctcctcatctgcctggaaagtcctcctattccagtgtccatgttggcctccagtccttaatgtcaccatgcttgtggccaatgcatccaaataaggatacccctcagggctcagctagacattgcaattttgcatagctttccagttccctttgcttgtcttcttgactgtcttccctctctatcggggtcacttgcaattgttaatcaaagattgaacactgcgtaggagagggagatgatccagagacatgtggcagcaggcatggcttccccttggcctctctgtacactgccccaggactgtcattttggcatctgcaaaggaatcactttagaaagccagcacctggttgatgtgtattcatactgacattagattgatgtgcactgcattagaaatgaggtagctgacacagaaaaaggatgttttgataggaataattttctagtatgtcttgaaacatgttcatctggaagtattttcctccaaagtaatgtagcatgatttttcaaggattgttaacatgcctgggattgggaaagataggactaaagttgtgccaaactatatcaataaattccatgtttagcagaaataggcagcctattggtgttatgtttatgtaacatagtccagagaactgacatgcaggtcaaaagtcagatacgcaacctccttatctgctaactctgttattcttcaaacacaagtgggtagtgtcatttttccttccttccttccattggcagattgtatatttattcacaaaacattaaatgtccatcctgtgccaggta

SEQ ID NO: 12356 - DNA, 3914 bp, Homo sapiens
acagatggcctggatcagtgcaatgtgcaacaagaggactatatcgtctcagtaaaaaccttgaagagatgaacccatttcagagacccagcaagggatcacctgcatatacaggcatcagcagaaacaggaatttgggatttatcctggaggtagtggaagcttttggaggtcttaaccaggacagcacatgtggctttcctgcaatgggatcgtccttcaagaggacctcacaggctctccacccggactgtgacgtaagcagctgcagcagccttggatgtttctggatagccagccccatgagaacagctttaaaataggagactggcattgtgatgaagtgtggacttcgctgtcatatagacctggatttaaatcctggcttcagtgtttatggatgacattggacaagtcatttaacctccttaagtctcagagttctcattacggaaatggagctcttaatagtacctaccccctagtgtggttgtgagggttgagatcatctatgttcaaagtgcttattatacagagacggggacatgtaagtgctacataaatgttagcttttattagtcactggagtggaggagagaggactgttgcctccttgtcaatgtccccatcctgggaagcctgcctgtgtgcaccaaggcccatctgacccatatatcagaaaaggtgcccttctagggagcgacaccccccaccaagccccccagtcgctgtccatgctttcctctaggttcaaaatgcagctgcatctgtgcagaaaccaggtgttgcctgtgagttctgcctcgctggccagaggtggaaggaaggaggaaaggagaggggcctccatacttccagagccccactgggggttaccttcgcttgcccccactctttttgtcttgctctgaggatgccaggactttaaggacattgtcagcgagcacgtaagttcacccagaaagaatctcagtcatctggactgctttgtgctatatgaaaatctctgagaaccttcaagagcccaaaaacagttctcctccatgctgtatgccatggtcagtggttaaagagaacattttgttccactcctccagctctgccttagaaacccaagccctgcactccaaggctcctggcatcgtacaccagcaccagcaattttctgccaaaagcatcagccaaaatctattctatctatttcagttcctctcttttcatcggattgtatttttacaggtgattgctgattctcacactgctcttcagattcatgtacagctgtggtctgaatgtgtgtgttttctcaaaattcaagtttaaaacttaatcctcaatgtgatagtatcaacagctgcggccttttggaaagtgaaggtggagccctcgtgagtgggattagagctcttataaaagagattgaagggagctacctagcccttccatctcttctgccttgtgaggacacagtgttcatcccttttgtcttcccaccatttgaagatgcagaaagaaggtgccatcttggaagcaaagagcagccctcaccagacaccaagtctgctggcaccttgatcttggacttcccagcctccaggactgtgagaaatgaatttctgttgtttataaattacctagtctaaggtatgctgttacagtagcaggaatggactaagacacacattgtcaaaatcttcatgagttaaaggtgaaggtacaatcagaactggtgcatggaattggaaccataggtcttagtaaacactgtaaaaatgcactattcaaatctacagaaaatgctctctcttcaagttcagaaagaagctacaatctgcttttcctttttttctgaagatgtggggaacgaaattggatcttgtgcttttgggtgctaactttgagccctcttcctttacatctaaatgacaatttgtggatcaatgaggatgtgtcaactagccaagatcgaggacctggaggggtgctctgtggaaactgctttaaaatccttcagagggtgggcacggagctctggttctggttgaagagtcctgtcaaggccatctcaaaaggagaagcaaagcctgcagaggaggccagcctgagtcctggggtgcgaacgggtgctgggctcagcatgaggaggaggagaccctggccacagttccatgaatctttgctcccttccacattatggattctggctaagaagattttcatctttcaccacctgttctggattcttggaacaggtaaattcattggcctacgcaagtctgagctctaggtctgaacccgcatggacctgagggtgcaccgagaaaagaaaggctgacaactggatcccgggaatgtcaaggccaccctgggcttgaagggaccggccatgcctccaagccttgcccagagagggggttcaggatgctgcgtggttccaggtgatctattgctttctcgagtttaaagttcagaggatcatgaagtaccacagctggaaggggtgtaagtgacactgcctagcctaactctcttaaaaatcatagccctactcctgcctccccaaatcagatacgacaggcataggctctgactgttccttaagtcttagtggcaatactccctgaccagttttgcggggttgctcccagttccattgcttttgtaacaggtggccagaaagcctggggtcccgtgataagagtttcagttctttccaggatggatggaaagaaggaaggaaggatggatggatggatgaatgaatgagcgggtgagcggatggatggatggatggatggatggatggatagatgggccagagactgggaacggtaatgccggccagacgggtccgagcgcctcgggagccccagccctcctccggctgcggggccgctgctcctgctcccgggccgtcacggagccctgagggagggggcgggcgagcgggggccttggggcggccagggcgctgggagggaggactgggcggtggggaccggaggggagggagggccttggaggcggagaggagggacgggctgggagagggcccggactaggggcggcgggcaccgcaggagctccgcgcggctgcagcgcgggcgggagcggggacgcgatgtcgccgccgccgcctccttgcgggccggggctgcgcctccggggctgagccgccgccagagccgacagccgagcagccgctgggcgctcccgcggcgcaggaggatgggctgcggcgggagccgggcggatgccatcgagccccgctactacgagagctggacccgggagacagaatccacctggctcacctacaccgactcggacgcgccgcccagcgccgccgccccggacagcggccccgaagcgggcggcctgcactcgggcatgctggaagatggactgccctccaatggtgtgccccgatctacagccccaggtggaatacccaacccagagaagaagacgaactgtgagacccagtgcccaaatccccagagcctcagctcaggccctctgacccagaaacagaatggccttcagaccacagaggctaaaagagatgctaagagaatgcctgcaaaagaagtcaccattaatgtaacagatagcatccaacagatggacagaagtcgaagaatcacaaagaactgtgtcaactagcagagagtccaagcagaagggcagatggacttcttcagtgtccttcacggcactggatcccatcaaagaaccttgaagaagtggctgccccttgctggacctgaattctactgagtccctggcaagactgtcttacctggcagcaaactgctgcctgatttgttgggaccttctgagccttctacttatcatgtaaatgtattggcacagtgcttacatatgttaataaactgcaaatgtgcagttca

SEQ ID NO: 12357 - DNA, 1053 bp, Homo sapiens
acagatggcctggatcagtgcaatgtgcaacaagaggactatatcgtctcagtaaaaaccttgaagagatgaacccatttcagagacccagcaagggatcacctgcatatacaggcatcagcagaaacaggaatttgggatttatcctggaggtagtggaagcttttggaggtcttaaccaggacagcacatgtggctttcctgcaatgggatcgtccttcaagaggacctcacaggctctccacccggactgtgacgtaagcagctgcagcagccttggatgtttctggatagccagccccatgagaacagctttaaaataggagactggcattgtgatgaagtgtggacttcgctgtcatatagacctggatttaaatcctggcttcagtgtttatggatgacattggacaagtcatttaacctccttaagtctcagagttctcattacggaaatggagctcttaatagtacctaccccctagtgtggttgtgagggttgagatcatctatgttcaaagtgcttattatacagagacggggacatgtaagtgctacataaatgttagcttttattagtcactggagtggaggagagaggactgttgcctccttgtcaatgtccccatcctgggaagcctgcctgtgtgcaccaaggcccatctgacccatatatcagaaaaggtgcccttctagggagcgacaccccccaccaagccccccagtcgctgtccatgctttcctctaggttcaaaatgcagctgcatctgtgcagaaaccaggtgttgcctgtgagttctgcctcgctggccagaggtggaaggaaggaggaaaggagaggggcctccatacttccagagccccactgggggttaccttcgcttgcccccactctttttgtcttgctctgaggatgccaggactttaaggacattgtcagcgagcacgtaagttcaccccgaaggctgcgccgatgccccagcttccagcagcccaatgctctttggccttgtccaaagcttgctcgctggtcgggagaccggtgggtgggag

SEQ ID NO: 12358 - DNA, 3794 bp, Homo sapiens
  misc_feature (1823)..(1823): n is a, c, g, or t
  misc_feature (2182)..(2182): n is a, c, g, or t
  misc_feature (2184)..(2184): n is a, c, g, or t
  misc_feature (2186)..(2186): n is a, c, g, or t
  misc_feature (2195)..(2195): n is a, c, g, or t
  misc_feature (2203)..(2205): n is a, c, g, or t
  misc_feature (2857)..(2857): n is a, c, g, or t
  misc_feature (2871)..(2871): n is a, c, g, or t
ggcacgaggggaggaggaggggagaggcctggaggacaccaacatgaacaagttgaaatcatcgcagaaggataaagttcgtcagtttatgatcttcacacaatctagtgaaaaaacagcagtaagttgtctttctcaaaatgactggaagttagatgttgcaacagataattttttccaaaatcctgaactttatatacgagagagtgtaaaaggatcattggacaggaagaagttagaacagctgtacaatagatacaaagaccctcaagatgagaataaaattggaatagatggcatacagcagttctgtgatgacctggcactcgatccagccagcattagtgtgttgattattgcatggaagttcagagcagcaacacagtgcgagttctccaaacaggagttcatggatggcatgacagaattaggatgtgacagcatagaaaaactaaaggcccagatacccaagatggaacaagaattgaaagaaccaggacgatttaaggatttttaccagtttacttttaattttgcaaagaatccaggacaaaaaggattagatctagaaatggccattgcctactggaacttagtgcttaatggaagatttaaattcttagacttatggaataaatttttgttggaacatcataaacgatcaataccaaaagacacttggaatcttcttttagacttcagtacgatgattgcagatgacatgtctaattatgatgaagaaggagcatggcctgttcttattgatgactttgtggaatttgcacgccctcaaattgctgggacaaaaagtacaacagtgtagcactaaaggaaccttctagaatgtacatagtctgtacaataaatacaacagaaaattgcacagtcaatttctgctggctggactgaactgaagatcaatcctcacaattcagactgagggttgagacaaaactttaaggatacatcttggaccatatcgtatttcattcttctaatggtggtttgggcttgtcttctagtctgggccgctctaaacatttataattccaacattgtggatttcatcttatatctgtggaccatcctagtttattctcccataagtcttagaagctttatggtgattattttgaggttttcattctcgcataaagcacaatgctgtcttcatcagaaaacagttggcataagaattaaacatatgaacatcacaaaacaatttataaaaacttcttaaatatacgctttgggctagttgcaaagactatgctaatagcacttccagtgagagtgatatatttaagtgtactggatctggaatggtgttttggtttggggggaattttttttttttcctggcaaatcacatgtgttgttgatgtgagtatctgatgaaaaaacaatgtcagaataaccgacatgaaaattttttaggataacttggtgcctacctgaaaaatgtattgtgttttagactcttgatttcaaaaggttccacagaactagtctgcgcttaccttacccatgtttatatatagctgtcctacagggagcttttatttagaaaatgtctgcataatgttagattcttctcctgtctacattatgcactacataattggacttcattatgcttttgaaatgcttatctgcctgtcacataagttaaactatttaatttgttttgaatgttttggattgctacacaatacaatattctaaatttaggcatgagggtttttttgttttatttttactttttttttgtcatcgcactatggaacacaaatggaattctcttaatttataagaagatagtngcagttaaattttgaaaatggttgtaatgagccatgaagttcaatctttataatataggtactgctctttcagacaaatagtccattttcgatgacttattattttgttgaaattgctttaactgctaatcactgtggttgccaaatatttacttcaggagcaaagattttcaaacaagcatacacgatgcaaaataccaatctggcttctagtctctttactgttttcgtttcactcagattagctcagttttctcatcaaagcagaatgctatcttgcgtgtgtgtgtgtgtgtgtgtgtgtgtgtgtgtgtatgtgtgtatatatatatatatatatatatatatatttttttttntntntttttttanattacaannnccatgagctgcttttatgctgaaaatggtcatttccctgttcacttactgacatgtgaagaagggtttcttgctttcttaaacatttccgtaaggcaggctagaaatgtaatacttcaaatgtttgatgattatggtcttttgataggaatagattctgcttgggatatatatccaggcactctctaaggtctagggttgatattaacaaaggaatgtacttagaatagcagtacattttatgcaaatatggaaattattttaagaaacaatgacatatcaaaactgctttttacatgattttgaaatagactagaaagctttccctatagacatattaatattccaatcataactttaattcaagaatgcagttttaccaaaagaaaaatttgaaaatttctattcaggctactggaattggttattaaaagaaaaaggaaaaagaagaatcttgctgctttcagtatttcctgatttttttgtaaatataaagaggaacttcaattatgaaaaatttttaaaagatatatatatctatatatctatatatatgtactgttttgtttcctgtcttgaagattttgagttatggttattggtttcagattgattaattcacatatgctgttgttttctttaaaagtcatatnggttcgtggcctantgccttggattttacatatttttctttttaaatgcaaaaccttttcaacaaaatagtgtttgtcatcaggttggtactaaacatttataattactgtgtaattataaacaaaaatacataaagctttgaatataattatgtagcataaaagttaaggttgttcactatgatggcatcttagaattaaacaaaacttttactagggctgaaaagagaagactgatttaatgtggtgtgattattctgaagataaatgtctggctacagggaatattttgtactaaaaaatgattacacatatggctgtgtgtgtttgagtctgtgtctgtgagagagccagagagagtgagagagattgacagagaaagggagagacacacacacgccccttgaattgctttaactcctaagtgtttcagtcctcattccggtaaactccccatgctgattctttgttttaaactgaaccataggtacagtttcctttttgccaaatgtcaaaacaggtacaaattttaaaatgtaatgctttttaaatagaaaaatgtataaaattagaagtgcccacatataaaaaatacttgagatgaagattatctttagtgaatatcatctgcatatctctgtaagttcaattgtgtttcttacagtccctgtcatattaccaacagaggcaataaaagctgcagtgaaattgccatgactaaatcttttcacatatttcagtgtattttttttatagatttaaaatatacctgaaaacttttctaggaagaataattattcatggaaagagcattgtaatggcatgttttggggagaaaagacatgccaagtcttgtttactacatttaagatgtttacaactatactgggctgctttattaacaatactgtacttgcataatatggcattataagta

SEQ ID NO: 12359 - DNA, 1227 bp, Homo sapiens
ggcacgaggggaggaggaggggagaggcctggaggacaccaacatgaacaagttgaaatcatcgcagaaggataaagttcgtcagtttatgatcttcacacaatctagtgaaaaaacagcagtaagttgtctttctcaaaatgactggaagttagatgttgcaacagataattttttccaaaatcctgaactttatatacgagagagtgtaaaaggatcattggacaggaagaagttagaacagctgtacaatagatacaaagaccctcaagatgagaataaaattggaatagatggcatacagcagttctgtgatgacctggcactcgatccagccagcattagtgtgttgattattgcatggaagttcagagcagcaacacagtgcgagttctccaaacaggagttcatggatggcatgacagaattaggatgtgacagcatagaaaaactaaaggcccagatacccaagatggaacaagaattgaaagaaccaggacgatttaaggatttttaccagtttacttttaattttgcaaagaatccaggacaaaaaggattagatctagaaatggccattgcctactggaacttagtgcttaatggaagatttaaattcttagacttatggaataaatttttgttggaacatcataaacgatcaataccaaaagacacttggaatcttcttttagacttcagtacgatgattgcagatgacatgtctaattatgatgaagaaggagcatggcctgttcttattgatgactttgtggaatttgcacgccctcaaattgctgggacaaaaagtacaacagtgtagcactaaaggaaccttctagaatgtacatagtctgtacaataaatacaacagaaaattgcacagtcaatttctgctggctggactgaactgaagatcaatcctcacaattcagactgagggttgagacaaaactttaaggatacatcttggaccatatcgtatttcattcttctaatggtggtttgggcttgtcttctagtctgggccgctctaaacatttataattccaacattgtggatttcatcttatatctgtggaccatcctagtttattctcccataagtcttagaagctttatggtgattattttgaggttttcattctcgcataaagcacaatgctgtcttcatcagaaaacagttggcataagaattaaacatatgaacatcacaaaacaatttat

SEQ ID NO: 12360 - DNA, 737 bp, Homo sapiens
gagctgagaggcgcgcgtgaacaacaagttgaaatcatcgcagaaggataaagttcgtcagtttatgatcttcacacaatctagtgaaaaaacagcagtaagttgtctttctcaaaatgactggaagttagatgttgcaacagataattttttccaaaatcctgaactttatatacgagagagtgtaaaaggatcattggacaggaagaagttagaacagctgtacaatagatacaaagaccctcaagatgagaataaaattggaatagatggcatacagcagttctgtgatgacctggcactcgatccagccagcattagtgtgttgattattgcatggaagttcagagcagcaacacagtgcgagttctccaaacaggagttcatggatggcatgacagaattaggatgtgacagcatagaaaaactaaaggcccagatacccaagatggaacaagaattgaaagaaccaggacgatttaaggatttttaccagtttacttttaattttgcaaagaatccaggacaaaaaggattagatctacgaaatggacatttgtctactggaagcttagtgctaaaatggaagaatggaaagtacttcagacttagtgggaactaaactagagaggaggggaacagtcaataagacgagacaagcaccaaaaggacaactgggacatcagctgaaagagcaacagaacgacagagtgcacgactgaaatgtgacgagatga

SEQ ID NO: 12361 - DNA, 3146 bp, Homo sapiens
  misc_feature (1823)..(1823): n is a, c, g, or t
  misc_feature (2104)..(2104): n is a, c, g, or t
  misc_feature (2106)..(2106): n is a, c, g, or t
  misc_feature (2108)..(2108): n is a, c, g, or t
  misc_feature (2117)..(2117): n is a, c, g, or t
  misc_feature (2125)..(2127): n is a, c, g, or t
  misc_feature (2835)..(2835): n is a, c, g, or t
  misc_feature (2849)..(2849): n is a, c, g, or t
ggcacgaggggaggaggaggggagaggcctggaggacaccaacatgaacaagttgaaatcatcgcagaaggataaagttcgtcagtttatgatcttcacacaatctagtgaaaaaacagcagtaagttgtctttctcaaaatgactggaagttagatgttgcaacagataattttttccaaaatcctgaactttatatacgagagagtgtaaaaggatcattggacaggaagaagttagaacagctgtacaatagatacaaagaccctcaagatgagaataaaattggaatagatggcatacagcagttctgtgatgacctggcactcgatccagccagcattagtgtgttgattattgcatggaagttcagagcagcaacacagtgcgagttctccaaacaggagttcatggatggcatgacagaattaggatgtgacagcatagaaaaactaaaggcccagatacccaagatggaacaagaattgaaagaaccaggacgatttaaggatttttaccagtttacttttaattttgcaaagaatccaggacaaaaaggattagatctagaaatggccattgcctactggaacttagtgcttaatggaagatttaaattcttagacttatggaataaatttttgttggaacatcataaacgatcaataccaaaagacacttggaatcttcttttagacttcagtacgatgattgcagatgacatgtctaattatgatgaagaaggagcatggcctgttcttattgatgactttgtggaatttgcacgccctcaaattgctgggacaaaaagtacaacagtgtagcactaaaggaaccttctagaatgtacatagtctgtacaataaatacaacagaaaattgcacagtcaatttctgctggctggactgaactgaagatcaatcctcacaattcagactgagggttgagacaaaactttaaggatacatcttggaccatatcgtatttcattcttctaatggtggtttgggcttgtcttctagtctgggccgctctaaacatttataattccaacattgtggatttcatcttatatctgtggaccatcctagtttattctcccataagtcttagaagctttatggtgattattttgaggttttcattctcgcataaagcacaatgctgtcttcatcagaaaacagttggcataagaattaaacatatgaacatcacaaaacaatttataaaaacttcttaaatatacgctttgggctagttgcaaagactatgctaatagcacttccagtgagagtgatatatttaagtgtactggatctggaatggtgttttggtttggggggaattttttttttttcctggcaaatcacatgtgttgttgatgtgagtatctgatgaaaaaacaatgtcagaataaccgacatgaaaattttttaggataacttggtgcctacctgaaaaatgtattgtgttttagactcttgatttcaaaaggttccacagaactagtctgcgcttaccttacccatgtttatatatagctgtcctacagggagcttttatttagaaaatgtctgcataatgttagattcttctcctgtctacattatgcactacataattggacttcattatgcttttgaaatgcttatctgcctgtcacataagttaaactatttaatttgttttgaatgttttggattgctacacaatacaatattctaaatttaggcatgagggtttttttgttttatttttactttttttttgtcatcgcactatggaacacaaatggaattctcttaatttataagaagatagtngcagttaaattttgaaaatggttgtaatgagccatgaagttcaatctttataatataggtactgctctttcagacaaatagtccattttcgatgacttattattttgttgaaattgctttaactgctaatcactgtggttgccaaatatttacttcaggagcaaagattttcaaacaagcatacacgatgcaaaataccaatctggcttctagtctctttactgttttcgtttcactcagattagctcagttttctcatcaaagcagaatgctatcttgtntntntttttttanattacaannnccatgagctgcttttatgctgaaaatggtcatttccctgttcacttactgacatgtgaagaagggtttcttgctttcttaaacatttccgtaaggcaggctagaaatgtaatacttcaaatgtttgatgattatggtcttttgataggaatagattctgcttgggatatatatccaggcactctctaaggtctagggttgatattaacaaaggaatgtacttagaatagcagtacattttatgcaaatatggaaattattttaagaaacaatgacatatcaaaactgctttttacatgattttgaaatagactagaaagctttccctatagacatattaatattccaatcataactttaattcaagaatgcagttttaccaaaagaaaaatttgaaaatttctattcaggctactggaattggttattaaaagaaaaaggaaaaagaagaatcttgctgctttcagtatttcctgatttttttgtaaatataaagaggaacttcaattatgaaaaatttttaaaagatatatatatctatatatctatatatatgtactgttttgtttcctgtcttgaagattttgagttatggttattggtttcagattgattaattcacatatgctgtgttttgaaatgagatcccattagcttttttttttttttttttttttcaatataaagtgttttctttaaaagtcatatnggttcgtggcctantgccttggattttacatatttttctttttaaatgcaaaaccttttcaacaaaatagtgtttgtcatcaggttggtactaaacatttataattactgtgtaattataaacaaaaatacataaagctttgaatataattatgtagcataaaagttaaggttgttcactatgatggcatcttagaattaaacaaaacttttactagggctgaaaagagaagactgatttaatgtggtgtgattattctgaagataaatgtctggctacagggaatattttgtactaaaaaatgattacac

SEQ ID NO: 12362 - DNA, 3649 bp, Homo sapiens
  misc_feature (2326)..(2326): n is a, c, g, or t
  misc_feature (2607)..(2607): n is a, c, g, or t
  misc_feature (2609)..(2609): n is a, c, g, or t
  misc_feature (2611)..(2611): n is a, c, g, or t
  misc_feature (2620)..(2620): n is a, c, g, or t
  misc_feature (2628)..(2630): n is a, c, g, or t
  misc_feature (3338)..(3338): n is a, c, g, or t
  misc_feature (3352)..(3352): n is a, c, g, or t
tacggtttgacagaaatttattgtaattcaactcaatctcattttgtaattgagaatgctgaggctcagggctatgttcatgctttatatactattcacggaatagacaggaaagcggtgggtgattcaataccagcatccctctgtcatcatcggtggaaaatgtctcagtgaggatttccaaaagtatccagggacaaacgtccaggattctagaggaccctctaccttgctacctgtggaactggatcactcattatggttttcatgaattcattctctgcaattgaccggagctgtcaaggacaaacaccccaggctgagccttggtctcatctaggagtggccaagctggggtgggcagggcggtccagggtagacactctgggacagtgggacattgtgacatcatcattggtggtcttggacagtttctcattgctgggtctccactcctagctgttactgcaagtccatgcctctaccatgagggtggaggagttaagatcaacagatccacatgtaccttgaggtgacagactggctctgaacaagttgaaatcatcgcagaaggataaagttcgtcagtttatgatcttcacacaatctagtgaaaaaacagcagtaagttgtctttctcaaaatgactggaagttagatgttgcaacagataattttttccaaaatcctgaactttatatacgagagagtgtaaaaggatcattggacaggaagaagttagaacagctgtacaatagatacaaagaccctcaagatgagaataaaattggaatagatggcatacagcagttctgtgatgacctggcactcgatccagccagcattagtgtgttgattattgcatggaagttcagagcagcaacacagtgcgagttctccaaacaggagttcatggatggcatgacagaattaggatgtgacagcatagaaaaactaaaggcccagatacccaagatggaacaagaattgaaagaaccaggacgatttaaggatttttaccagtttacttttaattttgcaaagaatccaggacaaaaaggattagatctagaaatggccattgcctactggaacttagtgcttaatggaagatttaaattcttagacttatggaataaatttttgttggaacatcataaacgatcaataccaaaagacacttggaatcttcttttagacttcagtacgatgattgcagatgacatgtctaattatgatgaagaaggagcatggcctgttcttattgatgactttgtggaatttgcacgccctcaaattgctgggacaaaaagtacaacagtgtagcactaaaggaaccttctagaatgtacatagtctgtacaataaatacaacagaaaattgcacagtcaatttctgctggctggactgaactgaagatcaatcctcacaattcagactgagggttgagacaaaactttaaggatacatcttggaccatatcgtatttcattcttctaatggtggtttgggcttgtcttctagtctgggccgctctaaacatttataattccaacattgtggatttcatcttatatctgtggaccatcctagtttattctcccataagtcttagaagctttatggtgattattttgaggttttcattctcgcataaagcacaatgctgtcttcatcagaaaacagttggcataagaattaaacatatgaacatcacaaaacaatttataaaaacttcttaaatatacgctttgggctagttgcaaagactatgctaatagcacttccagtgagagtgatatatttaagtgtactggatctggaatggtgttttggtttggggggaattttttttttttcctggcaaatcacatgtgttgttgatgtgagtatctgatgaaaaaacaatgtcagaataaccgacatgaaaattttttaggataacttggtgcctacctgaaaaatgtattgtgttttagactcttgatttcaaaaggttccacagaactagtctgcgcttaccttacccatgtttatatatagctgtcctacagggagcttttatttagaaaatgtctgcataatgttagattcttctcctgtctacattatgcactacataattggacttcattatgcttttgaaatgcttatctgcctgtcacataagttaaactatttaatttgttttgaatgttttggattgctacacaatacaatattctaaatttaggcatgagggtttttttgttttatttttactttttttttgtcatcgcactatggaacacaaatggaattctcttaatttataagaagatagtngcagttaaattttgaaaatggttgtaatgagccatgaagttcaatctttataatataggtactgctctttcagacaaatagtccattttcgatgacttattattttgttgaaattgctttaactgctaatcactgtggttgccaaatatttacttcaggagcaaagattttcaaacaagcatacacgatgcaaaataccaatctggcttctagtctctttactgttttcgtttcactcagattagctcagttttctcatcaaagcagaatgctatcttgtntntntttttttanattacaannnccatgagctgcttttatgctgaaaatggtcatttccctgttcacttactgacatgtgaagaagggtttcttgctttcttaaacatttccgtaaggcaggctagaaatgtaatacttcaaatgtttgatgattatggtcttttgataggaatagattctgcttgggatatatatccaggcactctctaaggtctagggttgatattaacaaaggaatgtacttagaatagcagtacattttatgcaaatatggaaattattttaagaaacaatgacatatcaaaactgctttttacatgattttgaaatagactagaaagctttccctatagacatattaatattccaatcataactttaattcaagaatgcagttttaccaaaagaaaaatttgaaaatttctattcaggctactggaattggttattaaaagaaaaaggaaaaagaagaatcttgctgctttcagtatttcctgatttttttgtaaatataaagaggaacttcaattatgaaaaatttttaaaagatatatatatctatatatctatatatatgtactgttttgtttcctgtcttgaagattttgagttatggttattggtttcagattgattaattcacatatgctgtgttttgaaatgagatcccattagcttttttttttttttttttttttcaatataaagtgttttctttaaaagtcatatnggttcgtggcctantgccttggattttacatatttttctttttaaatgcaaaaccttttcaacaaaatagtgtttgtcatcaggttggtactaaacatttataattactgtgtaattataaacaaaaatacataaagctttgaatataattatgtagcataaaagttaaggttgttcactatgatggcatcttagaattaaacaaaacttttactagggctgaaaagagaagactgatttaatgtggtgtgattattctgaagataaatgtctggctacagggaatattttgtactaaaaaatgattacac

SEQ ID NO: 12363 - DNA, 1729 bp, Homo sapiens
ggcacgaggggaggaggaggggagaggcctggaggacaccaacatgaacaagttgaaatcatcgcagaaggataaagttcgtcagtttatgatcttcacacaatctagtgaaaaaacagcagtaagttgtctttctcaaaatgactggaagttagatgttgcaacagataattttttccaaaatcctgaactttatatacgagagagtgtaaaaggatcattggacaggaagaagttagaacagctgtacaatagatacaaagaccctcaagatgagaataaaattggaatagatggcatacagcagttctgtgatgacctggcactcgatccagccagcattagtgtgttgattattgcatggaagttcagagcagcaacacagtgcgagttctccaaacaggagttcatggatggcatgacagaattaggatgtgacagcatagaaaaactaaaggcccagatacccaagatggaacaagaattgaaagaaccaggacgatttaaggatttttaccagtttacttttaattttgcaaagaatccaggacaaaaaggattagatctagaaatggccattgcctactggaacttagtgcttaatggaagatttaaattcttagacttatggaataaatttttgttggaacatcataaacgatcaataccaaaagacacttggaatcttcttttagacttcagtacgatgattgcagatgacatgtctaattatgatgaagaaggagcatggcctgttcttattgatgactttgtggaatttgcacgccctcaaattgctgggacaaaaagtacaacagtgtagcactaaaggaaccttctagaatgtacatagtctgtacaataaatacaacagaaaattgcacagtcaatttctgctggctggactgaactgaagatcaatcctcacaattcagactgagggttgagacaaaactttaaggatacatcttggaccatatcgtatttcattcttctaatggtggtttgggcttgtcttctagtctgggccgctctaaacatttataattccaacattgtggatttcatcttatatctgtggaccatcctagtttattctcccataagtcttagaagctttatggtgattattttgaggttttcattctcgcataaagcacaatgctgtcttcatcagaaaacagttggcataagaattaaacatatgaacatcacaaaacaatttataaaaacttcttaaatatacgctttgggctagttgcaaagactatgctaatagcacttccagtgagagtgatatatttaagtgtactggatctggaatggtgttttggtttggggggaattttttttttttcctggcaaatcacatgtgttgttgatgtgagtatctgatgaaaaaacaatgtcagaataaccgacatgaaaattttttaggataacttggtgcctacctgaaaaatgtattgtgttttagactcttgatttcaaaaggttccacagaactagtctgcgcttaccttacccatgtttatatatagctgtcctacagggagcttttatttagaaaatgtctgcataatgttagattcttctcctgtctacattatgcactacataattggacttcattatgcttttgaaatgcttatctgcctgtcacataagttaaactatttaatttgttttgaatgttttggattgctacacaatacaatattctaaattt

SEQ ID NO: 12364 - DNA, 3004 bp, Homo sapiens
  misc_feature (1681)..(1681): n is a, c, g, or t
  misc_feature (1962)..(1962): n is a, c, g, or t
  misc_feature (1964)..(1964): n is a, c, g, or t
  misc_feature (1966)..(1966): n is a, c, g, or t
  misc_feature (1975)..(1975): n is a, c, g, or t
  misc_feature (1983)..(1985): n is a, c, g, or t
  misc_feature (2693)..(2693): n is a, c, g, or t
  misc_feature (2707)..(2707): n is a, c, g, or t
ggcacgaggggaggaggaggggagaggcctggaggacaccaacatgaacaagttgaaatcatcgcagaaggataaagttcgtcagtttatgatcttcacacaatctagtgaaaaaacagcaaccctcaagatgagaataaaattggaatagatggcatacagcagttctgtgatgacctggcactcgatccagccagcattagtgtgttgattattgcatggaagttcagagcagcaacacagtgcgagttctccaaacaggagttcatggatggcatgacagaattaggatgtgacagcatagaaaaactaaaggcccagatacccaagatggaacaagaattgaaagaaccaggacgatttaaggatttttaccagtttacttttaattttgcaaagaatccaggacaaaaaggattagatctagaaatggccattgcctactggaacttagtgcttaatggaagatttaaattcttagacttatggaataaatttttgttggaacatcataaacgatcaataccaaaagacacttggaatcttcttttagacttcagtacgatgattgcagatgacatgtctaattatgatgaagaaggagcatggcctgttcttattgatgactttgtggaatttgcacgccctcaaattgctgggacaaaaagtacaacagtgtagcactaaaggaaccttctagaatgtacatagtctgtacaataaatacaacagaaaattgcacagtcaatttctgctggctggactgaactgaagatcaatcctcacaattcagactgagggttgagacaaaactttaaggatacatcttggaccatatcgtatttcattcttctaatggtggtttgggcttgtcttctagtctgggccgctctaaacatttataattccaacattgtggatttcatcttatatctgtggaccatcctagtttattctcccataagtcttagaagctttatggtgattattttgaggttttcattctcgcataaagcacaatgctgtcttcatcagaaaacagttggcataagaattaaacatatgaacatcacaaaacaatttataaaaacttcttaaatatacgctttgggctagttgcaaagactatgctaatagcacttccagtgagagtgatatatttaagtgtactggatctggaatggtgttttggtttggggggaattttttttttttcctggcaaatcacatgtgttgttgatgtgagtatctgatgaaaaaacaatgtcagaataaccgacatgaaaattttttaggataacttggtgcctacctgaaaaatgtattgtgttttagactcttgatttcaaaaggttccacagaactagtctgcgcttaccttacccatgtttatatatagctgtcctacagggagcttttatttagaaaatgtctgcataatgttagattcttctcctgtctacattatgcactacataattggacttcattatgcttttgaaatgcttatctgcctgtcacataagttaaactatttaatttgttttgaatgttttggattgctacacaatacaatattctaaatttaggcatgagggtttttttgttttatttttactttttttttgtcatcgcactatggaacacaaatggaattctcttaatttataagaagatagtngcagttaaattttgaaaatggttgtaatgagccatgaagttcaatctttataatataggtactgctctttcagacaaatagtccattttcgatgacttattattttgttgaaattgctttaactgctaatcactgtggttgccaaatatttacttcaggagcaaagattttcaaacaagcatacacgatgcaaaataccaatctggcttctagtctctttactgttttcgtttcactcagattagctcagttttctcatcaaagcagaatgctatcttgtntntntttttttanattacaannnccatgagctgcttttatgctgaaaatggtcatttccctgttcacttactgacatgtgaagaagggtttcttgctttcttaaacatttccgtaaggcaggctagaaatgtaatacttcaaatgtttgatgattatggtcttttgataggaatagattctgcttgggatatatatccaggcactctctaaggtctagggttgatattaacaaaggaatgtacttagaatagcagtacattttatgcaaatatggaaattattttaagaaacaatgacatatcaaaactgctttttacatgattttgaaatagactagaaagctttccctatagacatattaatattccaatcataactttaattcaagaatgcagttttaccaaaagaaaaatttgaaaatttctattcaggctactggaattggttattaaaagaaaaaggaaaaagaagaatcttgctgctttcagtatttcctgatttttttgtaaatataaagaggaacttcaattatgaaaaatttttaaaagatatatatatctatatatctatatatatgtactgttttgtttcctgtcttgaagattttgagttatggttattggtttcagattgattaattcacatatgctgtgttttgaaatgagatcccattagcttttttttttttttttttttttcaatataaagtgttttctttaaaagtcatatnggttcgtggcctantgccttggattttacatatttttctttttaaatgcaaaaccttttcaacaaaatagtgtttgtcatcaggttggtactaaacatttataattactgtgtaattataaacaaaaatacataaagctttgaatataattatgtagcataaaagttaaggttgttcactatgatggcatcttagaattaaacaaaacttttactagggctgaaaagagaagactgatttaatgtggtgtgattattctgaagataaatgtctggctacagggaatattttgtactaaaaaatgattacac

SEQ ID NO: 12365 - DNA, 3141 bp, Homo sapiens
  misc_feature (1818)..(1818): n is a, c, g, or t
  misc_feature (2099)..(2099): n is a, c, g, or t
  misc_feature (2101)..(2101): n is a, c, g, or t
  misc_feature (2103)..(2103): n is a, c, g, or t
  misc_feature (2112)..(2112): n is a, c, g, or t
  misc_feature (2120)..(2122): n is a, c, g, or t
  misc_feature (2830)..(2830): n is a, c, g, or t
  misc_feature (2844)..(2844): n is a, c, g, or t
ggacgcgtgggtcgaccacgcgtcgcggacgcgtgggtcggaacaagttgaaatcatcgcagaaggataaagttcgtcagtttatgatcttcacacaatctagtgaaaaaacagcagtaagttgtctttctcaaaatgactggaagttagatgttgcaacagataattttttccaaaatcctgaactttatatacgagagagtgtaaaaggatcattggacaggaagaagttagaacagctgtacaatagatacaaagaccctcaagatgagaataaaattggaatagatggcatacagcagttctgtgatgacctggcactcgatccagccagcattagtgtgttgattattgcatggaagttcagagcagcaacacagtgcgagttctccaaacaggagttcatggatggcatgacagaattaggatgtgacagcatagaaaaactaaaggcccagatacccaagatggaacaagaattgaaagaaccaggacgatttaaggatttttaccagtttacttttaattttgcaaagaatccaggacaaaaaggattagatctagaaatggccattgcctactggaacttagtgcttaatggaagatttaaattcttagacttatggaataaatttttgttggaacatcataaacgatcaataccaaaagacacttggaatcttcttttagacttcagtacgatgattgcagatgacatgtctaattatgatgaagaaggagcatggcctgttcttattgatgactttgtggaatttgcacgccctcaaattgctgggacaaaaagtacaacagtgtagcactaaaggaaccttctagaatgtacatagtctgtacaataaatacaacagaaaattgcacagtcaatttctgctggctggactgaactgaagatcaatcctcacaattcagactgagggttgagacaaaactttaaggatacatcttggaccatatcgtatttcattcttctaatggtggtttgggcttgtcttctagtctgggccgctctaaacatttataattccaacattgtggatttcatcttatatctgtggaccatcctagtttattctcccataagtcttagaagctttatggtgattattttgaggttttcattctcgcataaagcacaatgctgtcttcatcagaaaacagttggcataagaattaaacatatgaacatcacaaaacaatttataaaaacttcttaaatatacgctttgggctagttgcaaagactatgctaatagcacttccagtgagagtgatatatttaagtgtactggatctggaatggtgttttggtttggggggaattttttttttttcctggcaaatcacatgtgttgttgatgtgagtatctgatgaaaaaacaatgtcagaataaccgacatgaaaattttttaggataacttggtgcctacctgaaaaatgtattgtgttttagactcttgatttcaaaaggttccacagaactagtctgcgcttaccttacccatgtttatatatagctgtcctacagggagcttttatttagaaaatgtctgcataatgttagattcttctcctgtctacattatgcactacataattggacttcattatgcttttgaaatgcttatctgcctgtcacataagttaaactatttaatttgttttgaatgttttggattgctacacaatacaatattctaaatttaggcatgagggtttttttgttttatttttactttttttttgtcatcgcactatggaacacaaatggaattctcttaatttataagaagatagtngcagttaaattttgaaaatggttgtaatgagccatgaagttcaatctttataatataggtactgctctttcagacaaatagtccattttcgatgacttattattttgttgaaattgctttaactgctaatcactgtggttgccaaatatttacttcaggagcaaagattttcaaacaagcatacacgatgcaaaataccaatctggcttctagtctctttactgttttcgtttcactcagattagctcagttttctcatcaaagcagaatgctatcttgtntntntttttttanattacaannnccatgagctgcttttatgctgaaaatggtcatttccctgttcacttactgacatgtgaagaagggtttcttgctttcttaaacatttccgtaaggcaggctagaaatgtaatacttcaaatgtttgatgattatggtcttttgataggaatagattctgcttgggatatatatccaggcactctctaaggtctagggttgatattaacaaaggaatgtacttagaatagcagtacattttatgcaaatatggaaattattttaagaaacaatgacatatcaaaactgctttttacatgattttgaaatagactagaaagctttccctatagacatattaatattccaatcataactttaattcaagaatgcagttttaccaaaagaaaaatttgaaaatttctattcaggctactggaattggttattaaaagaaaaaggaaaaagaagaatcttgctgctttcagtatttcctgatttttttgtaaatataaagaggaacttcaattatgaaaaatttttaaaagatatatatatctatatatctatatatatgtactgttttgtttcctgtcttgaagattttgagttatggttattggtttcagattgattaattcacatatgctgtgttttgaaatgagatcccattagcttttttttttttttttttttttcaatataaagtgttttctttaaaagtcatatnggttcgtggcctantgccttggattttacatatttttctttttaaatgcaaaaccttttcaacaaaatagtgtttgtcatcaggttggtactaaacatttataattactgtgtaattataaacaaaaatacataaagctttgaatataattatgtagcataaaagttaaggttgttcactatgatggcatcttagaattaaacaaaacttttactagggctgaaaagagaagactgatttaatgtggtgtgattattctgaagataaatgtctggctacagggaatattttgtactaaaaaatgattacac

SEQ ID NO: 12366 - DNA, 883 bp, Homo sapiens
ggcacgaggggaggaggaggggagaggcctggaggacaccaacatgaacaagttgaaatcatcgcagaaggataaagttcgtcagtttatgatcttcacacaatctagtgaaaaaacagcagtaagttgtctttctcaaaatgactggaagttagatgttgcaacagataattttttccaaaatcctgaactttatatacgagagagtgtaaaaggatcattggacaggaagaagttagaacagctgtacaatagatacaaagaccctcaagatgagaataaaattggaatagatggcatacagcagttctgtgatgacctggcactcgatccagccagcattagtgtgttgattattgcatggaagttcagagcagcaacacagtgcgagttctccaaacaggagttcatggatggcatgacagaattaggatgtgacagcatagaaaaactaaaggcccagatacccaagatggaacaagaattgaaagaaccaggacgatttaaggatttttaccagtttacttttaattttgcaaagaatccaggacaaaaaggattagatctagaaatggccattgcctactggaacttagtgcttaatggaagatttaaattcttagacttatggaataaatttttgttggaacatcataaacgatcaataccaaaagacacttggaatcttcttttagacttcagtacgatgattgcagatgacatgtctaattatgatgaagaaggagcatggcctgttcttattgatgactttgtggaatttgcacgccctcaaattgctgggacaaaaagtacaacagtgtagcactaaaggaaccttctagaatgtacatagtctgtacaataaatacaacagaaaattgca

SEQ ID NO: 12367 - DNA, 422 bp, Homo sapiens
agacattgcaagtgttgactctgtgatttaaaagctccatgaccctggaccagttacttaacaatctcaattccttgatctgtggaaaggggattatgatagtacctattttgccaatgagatgcatcctcaaacacttgagatcccagtggctgttacctaccataccttcattatttgactaagaactctttttcgtgtgtttatttctttagtatttacatctgtgaacctcagttttcctattagtaaaatgaaggtcaagtatgacatcttatttgagctgtgagttgacagtgtaacacttctcataaactgcatgcatttgaaatatgaagttgtaaaactctacgattaagctttgtatttctagcaccttggctatactgtttcttattcagttaattgttgcaaaaagaaaa

SEQ ID NO: 12368 - DNA, 419 bp, Homo sapiens
gtatagaaatgcaactgattattgtgtgctgattttgtgtcctgcaactttgctgaattcatttattagttctaacagtacttttgtgtttgggtatgtgttaaatctttggggttttctacatataagatcatttcggccaggtgtagtggcttacacttgtaatcccagcactttgggaggccgagggaggtggatcacctgaggtcaggagttcgaaaccagcctggccaatatggcaaaaccccatctctactaaaaatacaaaaattagctgggcatggtggcaggcacctgtaatcccagctacttgggaggctgaggcacaagcatagcttgaatctgggaggcagagggtgcagtgagccaagattgcaccactgcactccagcctgggtgacagagcgagactacgtctc

SEQ ID NO: 12369 - DNA, 1059 bp, Homo sapiens
tagtaagatttcttgaaacctttgacttagaatgttggctagagggtttcctatactggctttctcctacctgtgtaaatttgagcaaatgtgaatcccagctataacataatgttggactggaacagttctttttgtgttaaactggcataatttctttttttgagtgtattactgtccttggttatgcagtgtagtcttcggacgaattgcattagcatcctcacctagaacagaaatacagaatctcagcctcacccaaacctgaatcagagtctatatccaggtggcttgtgtgcacattaaagagaagcagggtcattgctgtttcaatactaagtcagttgcctaatttttgttagtccatctgttctatttgcaacatacctgatgtttttctcccaagttgacttggagatataaaacctttttgggtggtgcaatctgttaaagttaacatcatagttgtgaatccattctaaggcagaaatttaagaacaagcttcgtcttttgaggaagaccgtaataaaagataatccttcttttaattcgtgtctcttgctttaaagaaaagttaccttgcattatagttaatatttctactggtgtttcctcttagaaacttgagagactattgtcagtgagctgaatgattctgcaaaatcagggaaaagtagtctttagattaataatgtaggattcagaaagtctatagtgtctccctctttgtgggtaggagggaatgggagcagatagaagctaaagataatttatttctgcaggttctggcagtcagaataactggcttttaactttattatgcccgggtacaatgcatattatgtcaaacaaatataacttctttaaatattcacatgtaatcttctcattttgcatgtctagtatttgatgctttgctataaagctacaggtccacaatccctttttcatagaattctgaaatccaaaaagtctttaaaaaaattttttttatagcttccttgatgtggaccttaactgatttgggaaaaaaaaaaaaaaacaaaaaaaacttgacc

SEQ ID NO: 12370 - DNA, 1163 bp, Homo sapiens
atatattttcatcttgacaatgccagaaattcctaaatacatgaattcgagtatgaaattcaatttgaatctgaagctatgaagtctaagttggaatcctgtgtagctttatatatgattgaaaaatcttatgatattatggctaaaaggataacatttatcttcaatctggtattcacaccaaagaaaccattaaggtctcacataacactgaaaatagagtgcgtaacagaagggatctggaagtttcccataatgttgatcgctactgaacctgatacggatgctgtcattgacattgaaggagttggtttatttaaggaatctgtttttgaacttaggctgaaaagtcagacaagaaatcctgagccgttcaccgcacacttcctacctggcagcgatctggagttttttgtaaaacctcaggctggagaacttcttccttttaacacaaacggaactctcatcactgtaggatttaaacctaaaatgtactgtaggaaatataaagcaacattagtaatacagacagaagaaatgtactggaagtatgagatcaatggattaactccaactaccgtgccaccaaaaaatgcaaaagccaaaattgatgctactcacaagacacatgacaacatgccagtccgtccacataattttgtccgtgaaaatactaaactcataagaacaggggtgtcttccaccatcaagggtgctcctttggtgaagaatcaataaaatttttttccaaaatatttcttggtctcaggtagaactttgatgactattatttcatcttttggaatatttctgaggaataatggtttaattataataggccttctatatttccttgtcttttaaaattcaatctgttctctgaatatattatacttcatttgtgagttatgaatgttttttggttgcgaacattggaattggttcacttttaaagtgcaggtgtatatttgtggtaaaacgaaatataatttaaatgacaacagtatttccaataacagcgttgctaataaagctaaatgtctcatgtagatattccttgttagtctttatgttttaattgacaactaaacattgtatatatttatggtatacaacatattttgaatatgcatacattgcagcatggttagcctgagctaatt

SEQ ID NO: 12371 - DNA, 1001 bp, Homo sapiens
atatattttcatcttgacaatgccagaaattcctaaatacatgaattcgagtatgaaattcaatttgaatctgaagctatgaagtctaagttggaatcctgtgtagctttatatatgattgaaaaatcttatgatattatggctaaaaggataacatttatcttcaatctggtattcacaccaaagaaaccattaagaaatcctgagccgttcaccgcacacttcctacctggcagcgatctggagttttttgtaaaacctcaggctggagaacttcttccttttaacacaaacggaactctcatcactgtaggatttaaacctaaaatgtactgtaggaaatataaagcaacattagtaatacagacagaagaaatgtactggaagtatgagatcaatggattaactccaactaccgtgccaccaaaaaatgcaaaagccaaaattgatgctactcacaagacacatgacaacatgccagtccgtccacataattttgtccgtgaaaatactaaactcataagaacaggggtgtcttccaccatcaagggtgctcctttggtgaagaatcaataaaatttttttccaaaatatttcttggtctcaggtagaactttgatgactattatttcatcttttggaatatttctgaggaataatggtttaattataataggccttctatatttccttgtcttttaaaattcaatctgttctctgaatatattatacttcatttgtgagttatgaatgttttttggttgcgaacattggaattggttcacttttaaagtgcaggtgtatatttgtggtaaaacgaaatataatttaaatgacaacagtatttccaataacagcgttgctaataaagctaaatgtctcatgtagatattccttgttagtctttatgttttaattgacaactaaacattgtatatatttatggtatacaacatattttgaatatgcatacattgcagcatggttagcctgagctaatt

SEQ ID NO: 12372 - DNA, 468 bp, Homo sapiens
cgagatagcgccattgtactctggcctggggcacaagagtgaaagtccatctccagaaaaaaaaaaaaaaaaaaaaaacccacaacaacaacgagggccccgcatgtggctgaaaacaacagaaatgtattgtctcgcaggcctgaatgctagaagtccaaaatcagggtgtcagccggacttcgcttcctctgaaacatgcagagagctgatcaaaacagcaaaagcaaagcagtgcccctggcccagttctgaagccaaccttccttaaccacgcagacccatccctggttaggacttgctgtggattctcaggtgactccatctcaggatacagggactgagagggtatatgcaatatctcagacccagaaaccgttgattctgtctaaaagcacagcaataaccacatcccaccctcttgatttaaatgaaagtgtttgggagaataaaagatgaaccttttta

SEQ ID NO: 12373 - DNA, 567 bp, Homo sapiens
acagctttcgggcctaacctctgccaatcgtgatgtatgccaactctggttacagtatcaatgggagaattaaaatgtgtttcaacaaaggcagccatggctttgataatgtcctcatggatatgaagacattcagagctttcgggccagatttcaagaggaatggcctggccgagccttttaacgacatccacatctacccattcatgtgtaagctcctgggagtcacccccaaacccacaacggctccctggcagtcacccaggaaatgctcgtgaactcttacgaccagcagccaggcagagagctgatcaaaacagcaaaagcaaagcagtgcccctggcccagttctgaagccaaccttccttaaccacgcagacccatccctggttaggacttgctgtggattctcaggtgactccatctcaggatacagggactgagagggtatatgcaatatctcagacccagaaaccgttgattctgtctaaaagcacagcaataaccacatcccaccctcttgatttaaatgaaagtgtttgggagaataaaagatgaaccttttta

SEQ ID NO: 12374 - DNA, 872 bp, Homo sapiens
acagctttcgggcctaacctctgccaatcgtgatgtatgccaactctggttacagtatcaatgggagaattaaaatgtgtttcaacaaaggcagccatggctttgataatgtcctcatggatatgaagacattcagagctttcgggccagatttcaagaggaatggcctggccgagccttttaacgacatccacatctacccattcatgtgtaagctcctgggagtcacccccaaacccacaacggctccctggcagtcacccaggaaatgctcgtgaactcttacgaccagcagccaggtgagacacaaaagcagctgccagaaaactgtcagcagagtctgctctgtcctgagatagaaaagaaacaaaaagtggtctcatggtggggaggagggaattcaagcagaacaatcctgattcccagcagctttggagccctaggaacaagatgtcaacagctccaaacagatagcacgggaggtagggaatccctcgacctgctggtaacatttgacatagtgccttttaggcaaagggaaggtgctctatagagaaagtcgggctgtaatccttccggtcctaaggaaatcactgtgtacagtctgcccccaagatgccccttccagatatggaaatcagccctccttcaatagcacagaaagctcttcataggggaggagaaataccctgttcactcgatgctgaaaaaaggagaggggagagtctgaaacgagactgcaaattctcaagacttcaaaccccttcaatctgggtaatacaaaggaagaataaaatcatctcagaatttgctgttgccttctttagtgggttgtttacaaacactggctatctttccttttgccgggagag

SEQ ID NO: 12375 - DNA, 606 bp, Homo sapiens
ctaaagcgttcagaaattggcacccttctttttaaaaagataacatcatgaatatacagttgacccttgaacaatttgggagttaaaggtgccaaccctctgcacagtcaaatctgtgtatgcattttaatgcccccaaacttaaatactgataacctactgttgactggaagcctgaccaataacataaacagttgattaacatattttgtatatgtattatatgctgtattcttgcaataacgtaagctagagaaaagtaaatgctttgaagaaaatcataaggaggagaaaatatatttactattccttatgtgaaagtggatcttcataaaggtcttcatcctcattgttgtcttcacgttgagtaggctgaggagggaagaggaaaaggggctggacttgctgtcccaggggtggcagagatggaagaaaacccacctataagtagactcatgtacttcaaacccatggtgttcatcaactatatattcagtggaaaaatttacttaatattaaaataaacgtcttgaattatcttcacaagtcactggaatatttgcttgctactaagtatgggtaataataaagctgtttatgttcatt

SEQ ID NO: 12376 - DNA, 403 bp, Homo sapiens
aatgaagaaatgggatcttgggtatgcgctgggattagggtggactactcttgtttcttaatgaaataagattggagccagaattagaaggagagacaggtactcatgtggatgcctacttggaacctgggcctctgagacatgtcctgaccaccccccagggcatttgcctccatcttcaccccagattgtgggtttcccatccccctgactttacccctttcaagcctggggttgtctatacccacagcccttagggacttaaagttacggggcttcgttgaatgctccttcccctaggcagctggtaatagaggggtaaagctctgggcccctcctccctgctgccacttatcccagctccaagtttttttaaaaataatattattaaaaatgtaagtta

SEQ ID NO: 12377 - DNA, 764 bp, Homo sapiens
caggcacgaggggagaaaggcaggcagccggcgggcgctgcgtgtgtgtttgagtgtgcgagtgtgagtgagtgtgagtgccgggtcctgcctctcctggtgcccccagcagaggggcccggtggcctggggagggcgggcgggctgctcggaggcagaggcagcaagaggcggcggcggggagagccgagaaggaggaggaggagagaggaaagagcggagcagccattgttgagggaaaccttgcaaacaaagaaggctccggactccccgcggccccccgccccccaggccggccccctggcccccggcccccggcccagtggccattgtaactttcccccgggacagcggccgccgcggggcgggccgaggctgtgcgtgcgagtctttgtgcggccggcggactggagctcccagtcgggcctgcccgtcccactcgggacatgagctgctgaagttgtccccccgtcagccctcacccctgccaggactcctctgggcttgcagtcgctcccccgtacctctcctggccccctcagttctcccaggttgttcctcaaagtcattcaagctgtactcgccgaaggagcccccgaacggcaacgcctttccccccttccatcccggcaccatgctggatagggatgtgggcccaactcccatgtatccgcctacatacctggagccagggattgggaggcacacaccatatggcaaccaaactgactacagcttgagcgacagagtgagactctgtctcg

SEQ ID NO: 12378 - DNA, 598 bp, Homo sapiens
cctattaaaagtccaactgcatatgtaatcctactctgtccttcatagaggggaaggagccacagatgacatcccagttctgccctcctagtgcttgtgactccctctcttccagccccacccccatggtatgtatattccttacaagtcctccacaagagcagctgtctaggatgcggggaggggaggctccttcccttagggagcgtggagagaagggagcagccttgttgctgtatttttggttttgtttcagttgggcaggcatgggatgggagaggggctcagccactttcctccagaatcttccctcagcccctccaactgcatatgtaatcccacaccgtatttcctccactccagctgccacttttggaagggtattgagtcaggagctgagggaaggggtgaggaaggtggacatcccatcccaactgtaatgcctttttttttgggccatttgagtcatgtatggtaccaatcaataaagagacttttcggtttgagagtgtcctggttggtcattgatgcctaataatgactcagtccaaggcaatcttttccccatccttgcagttcctaagactatgaattggat

SEQ ID NO: 12379 - DNA, 392 bp, Homo sapiens
cgaaacccgatcgctacagaaaaatgacaaaaattagctgggcatggtgatgcacacctgtagtcccagctgcttggcagaccggagcaagccaggagacctgagcaagccaggagacctgagcaagcgcaggagcctccgtccagccaagaaagcaaatcggagaaccccacgtcacaggcctcccagtaaaaggccctgctgtggccacccagtgctctgcctacctgccccacccctcacagccccagggagcagaagacagaatgaagagactgagcaagccaggcgaaaccccatcgctacatagatgaatgcagaatagttctatatatctggtcaacgggagacctgagcggtccaggggggatacctgtagataagaccagcag

SEQ ID NO: 12380 - DNA, 1994 bp, Homo sapiens
cgcgcacacacgcagaggccgctcgccttcctgcctggcttccttcctgtctgctccgcgcctgacaggcccctcgccgcagccaggggccgcccgcaccgggccgaggccgggccgggccggcggcgagcgcagcgggggccgcgggcggcggcggcggctcatgcccggcctgtccccgcgaggggcgggcaccgtgactcggctgggcccccagaggcgggcgatgtgaagatgtcagtgggctgtgcctgtcctggttgttcctcaaagtcattcaagctgtactcgccgaaggagcccccgaacggcaacgcctttccccccttccatcccggcaccatgctggatagggatgtgggcccaactcccatgtatccgcctacatacctggagccagggattgggaggcacacaccatatggcaaccaaactgactacagaatatttgagcttaacaaacggcttcagaactggacagaggagtgtgacaatctctggtgggatgcattcacgactgagttctttgaggatgatgccatgttgaccatcactttctgcctggaggatggaccaaagagatataccattggccggaccctgatcccacgctacttccgcagcatctttgaggggggtgctacggagctgtactatgttcttaagcaccccaaggaggcattccacagcaactttgtgtccctcgactgtgaccagggcagcatggtgacccagcatggcaagcccatgttcacccaggtgtgtgtggagggccggttgtacctggagttcatgtttgacgacatgatgcggataaagacgtggcacttcagcatccggcagcaccgagagctcatcccccgcagcatccttgccatgcatgcccaagacccccagatgttggatcagctctccaaaaacatcactcggtgtgggctgtccaattccactctcaactacctccgactctgtgtgatactcgagcccatgcaagagctcatgtcacgccacaagacctacagcctcagcccccgcgactgcctcaagacctgccttttccagaagtggcagcgcatggtagcaccccctgcggagcccacacgtcagcagcccagcaaacggcggaaacggaagatgtcagggggcagcaccatgagctctggtggtggcaacaccaacaacagcaacagcaagaagaagagcccagctagcaccttcgccctctccagccaggtacctgatgtgatggtggtgggggagcccaccctgatgggcggggagttcggggacgaggacgagaggctcatcacccggctggagaacacccagtttgacgcagccaacggcattgacgacgaggacagctttaacaactcccctgcactgggcgccaacagcccctggaacagcaagcctccgtccagccaagaaagcaaatcggagaaccccacgtcacaggcctcccagtaaaaggccctgctgtggccacccagtgctctgcctacctgccccacccctcacagccccagggagcagaagacagaatgaagagactgagcatctaaaatgggcagcctccatccacccgcttcagggaggaactggactctctgggggcaggtgccaagatttgcccccccagtggccctgggctgggcctggcctctacagagccttttagggggagggggtactcatgtggatgcctacttggaacctgggcctctgagacatgtcctgaccaccccccagggcatttgcctccatcttcaccccagattgtgggtttcccatccccctgactttacccctttcaagcctggggttgtctatacccacagcccttagggacttaaagttacggggcttcgttgaatgctccttcccctaggcagctggtaatagaggggtaaagctctgggcccctcctccctgctgccacttatcccagctccaagtttttttaaaaataatattattaaaaatgtaagtta

SEQ ID NO: 12381 - DNA, 2991 bp, Homo sapiens
caggcacgaggggagaaaggcaggcagccggcgggcgctgcgtgtgtgtttgagtgtgcgagtgtgagtgagtgtgagtgccgggtcctgcctctcctggtgcccccagcagaggggcccggtggcctggggagggcgggcgggctgctcggaggcagaggcagcaagaggcggcggcggggagagccgagaaggaggaggaggagagaggaaagagcggagcagccattgttgagggaaaccttgcaaacaaagaaggctccggactccccgcggccccccgccccccaggccggccccctggcccccggcccccggcccagtggccattgtaactttcccccgggacagcggccgccgcggggcgggccgaggctgtgcgtgcgagtctttgtgcggccggcggactggagctcccagtcgggcctgcccgtcccactcgggacatgagctgctgaagttgtccccccgtcagccctcacccctgccaggactcctctgggcttgcagtcgctcccccgtacctctcctggccccctcagttctcccaggttgttcctcaaagtcattcaagctgtactcgccgaaggagcccccgaacggcaacgcctttccccccttccatcccggcaccatgctggatagggatgtgggcccaactcccatgtatccgcctacatacctggagccagggattgggaggcacacaccatatggcaaccaaactgactacagaatatttgagcttaacaaacggcttcagaactggacagaggagtgtgacaatctctggtgggatgcattcacgactgagttctttgaggatgatgccatgttgaccatcactttctgcctggaggatggaccaaagagatataccattggccggaccctgatcccacgctacttccgcagcatctttgaggggggtgctacggagctgtactatgttcttaagcaccccaaggaggcattccacagcaactttgtgtccctcgactgtgaccagggcagcatggtgacccagcatggcaagcccatgttcacccaggtgtgtgtggagggccggttgtacctggagttcatgtttgacgacatgatgcggataaagacgtggcacttcagcatccggcagcaccgagagctcatcccccgcagcatccttgccatgcatgcccaagacccccagatgttggatcagctctccaaaaacatcactcggtgtgggctgtccaattccactctcaactacctccgactctgtgtgatactcgagcccatgcaagagctcatgtcacgccacaagacctacagcctcagcccccgcgactgcctcaagacctgccttttccagaagtggcagcgcatggtagcaccccctgcggagcccacacgtcagcagcccagcaaacggcggaaacggaagatgtcagggggcagcaccatgagctctggtggtggcaacaccaacaacagcaacagcaagaagaagagcccagctagcaccttcgccctctccagccaggtacctgtaagcatctcggctttcttctctcttctgggctgccccaccactcacccctgacccctttccaagcctgagctcactagcaggcgtagaagcaaagacagtttttctcatgtactctgccagcatgggctaactgcttttactggtgagagagttcttgtcaggcacttgcatgggtgtgatcacacagactcagccataggaagctagggcataaagggacagagacacccatgaggacatacggatattcaggacagacagcttggggctcacagaccatccagcacacacactcacactgatagacatgcagactggagtgtttgcagatccagaatacatacccttgcacatgcacacactgccctccctcatgtttttgatatgctccctttcttacatgtggacagaagttgaggagtcccctaaaattttggggagatgggctagggagctaggggagtagagtgacttctagaatgtaatggatatgggctaaaggctttgatgctctggtgttcttcagtaggaaggattccaggagctgagggtgtcaggagttggggttttaaattcgggtatgaggagggggtggggactcttgagcttccagggtgggtactggggctctgggggtatctgccgccctgggccgggcgagcccttgccccgattatgtttggggacctccgccactctcaggatgtgatggtggtgggggagcccaccctgatgggcggggagttcggggacgaggacgagaggctcatcacccggctggagaacacccagtttgacgcagccaacggcattgacgacgaggacagctttaacaactcccctgcactgggcgccaacagcccctggaacagcaagcctccgtccagccaagaaagcaaatcggagaaccccacgtcacaggcctcccagtaaaaggccctgctgtggccacccagtgctctgcctacctgccccacccctcacagccccagggagcagaagacagaatgaagagactgagcatctaaaatgggcagcctccatccacccgcttcagggaggaactggactctctgggggcaggtgccaagatttgcccccccagtggccctgggctgggcctggcctctacagagccttttagggggagggggtactcatgtggatgcctacttggaacctgggcctctgagacatgtcctgaccaccccccagggcatttgcctccatcttcaccccagattgtgggtttcccatccccctgactttacccctttcaagcctggggttgtctatacccacagcccttagggacttaaagttacggggcttcgttgaatgctccttcccctaggcagctggtaatagaggggtaaagctctgggcccctcctccctgctgccacttatcccagctccaagtttttttaaaaataatattattaaaaatgtaagtta

SEQ ID NO: 12382 - DNA, 1843 bp, Homo sapiens
  misc_feature (11)..(11): n is a, c, g, or t
cttatgttccnggcccacggactcctatggtgcttgaagtgcgctacctgccgcaaaacgtcttctctggtgacctcagttctctccatggatagttggctcagaatgtcgctcggaacgtctgtactcgtgcgaacggagtcacctgacagagtacaacgacggtttaaccctgtttcattgacgtcggcatgctggatagggatgtgggcccaactcccatgtatccgcctacatacctggagccagggattgggaggcacacaccatatggcaaccaaactgactacagaatatttgagcttaacaaacggcttcagaactggacagaggagtgtgacaatctctggtgggatgcattcacgactgagttctttgaggatgatgccatgttgaccatcactttctgcctggaggatggaccaaagagatataccattggccggaccctgatcccacgctacttccgcagcatctttgaggggggtgctacggagctgtactatgttcttaagcaccccaaggaggcattccacagcaactttgtgtccctcgactgtgaccagggcagcatggtgacccagcatggcaagcccatgttcacccaggtgtgtgtggagggccggttgtacctggagttcatgtttgacgacatgatgcggataaagacgtggcacttcagcatccggcagcaccgagagctcatcccccgcagcatccttgccatgcatgcccaagacccccagatgttggatcagctctccaaaaacatcactcggtgtgggctgtccaattccactctcaactacctccgactctgtgtgatactcgagcccatgcaagagctcatgtcacgccacaagacctacagcctcagcccccgcgactgcctcaagacctgccttttccagaagtggcagcgcatggtagcaccccctgcggagcccacacgtcagcagcccagcaaacggcggaaacggaagatgtcagggggcagcaccatgagctctggtggtggcaacaccaacaacagcaacagcaagaagaagagcccagctagcaccttcgccctctccagccaggtacctgatgtgatggtggtgggggagcccaccctgatgggcggggagttcggggacgaggacgagaggctcatcacccggctggagaacacccagtttgacgcagccaacggcattgacgacgaggacagctttaacaactcccctgcactgggcgccaacagcccctggaacagcaagcctccgtccagccaagaaagcaaatcggagaaccccacgtcacaggcctcccagtaaaaggccctgctgtggccacccagtgctctgcctacctgccccacccctcacagccccagggagcagaagacagaatgaagagactgagcatctaaaatgggcagcctccatccacccgcttcagggaggaactggactctctgggggcaggtgccaagatttgcccccccagtggccctgggctgggcctggcctctacagagccttttagggggagggggtactcatgtggatgcctacttggaacctgggcctctgagacatgtcctgaccaccccccagggcatttgcctccatcttcaccccagattgtgggtttcccatccccctgactttacccctttcaagcctggggttgtctatacccacagcccttagggacttaaagttacggggcttcgttgaatgctccttcccctaggcagctggtaatagaggggtaaagctctgggcccctcctccctgctgccacttatcccagctccaagtttttttaaaaataatattattaaaaatgtaagtta

SEQ ID NO: 12383 - DNA, 1667 bp, Homo sapiens
aggatccttgctccacttggttgcatatgatgtgggccaactcccaatgtatccgctacatacctggagccagggattgggaggcacacaccatatggcaaccaaactgactacagaatatttgagcttaacaaacggcttcagaactggacagaggagtgtgacaatctctggtgggatgcattcacgactgagttctttgaggatgatgccatgttgaccatcactttctgcctggaggatggaccaaagagatataccattggccggaccctgatcccacgctacttccgcagcatctttgaggggggtgctacggagctgtactatgttcttaagcaccccaaggaggcattccacagcaactttgtgtccctcgactgtgaccagggcagcatggtgacccagcatggcaagcccatgttcacccaggtgtgtgtggagggccggttgtacctggagttcatgtttgacgacatgatgcggataaagacgtggcacttcagcatccggcagcaccgagagctcatcccccgcagcatccttgccatgcatgcccaagacccccagatgttggatcagctctccaaaaacatcactcggtgtgggctgtccaattccactctcaactacctccgactctgtgtgatactcgagcccatgcaagagctcatgtcacgccacaagacctacagcctcagcccccgcgactgcctcaagacctgccttttccagaagtggcagcgcatggtagcaccccctgcggagcccacacgtcagcagcccagcaaacggcggaaacggaagatgtcagggggcagcaccatgagctctggtggtggcaacaccaacaacagcaacagcaagaagaagagcccagctagcaccttcgccctctccagccaggtacctgatgtgatggtggtgggggagcccaccctgatgggcggggagttcggggacgaggacgagaggctcatcacccggctggagaacacccagtttgacgcagccaacggcattgacgacgaggacagctttaacaactcccctgcactgggcgccaacagcccctggaacagcaagcctccgtccagccaagaaagcaaatcggagaaccccacgtcacaggcctcccagtaaaaggccctgctgtggccacccagtgctctgcctacctgccccacccctcacagccccagggagcagaagacagaatgaagagactgagcatctaaaatgggcagcctccatccacccgcttcagggaggaactggactctctgggggcaggtgccaagatttgcccccccagtggccctgggctgggcctggcctctacagagccttttagggggagggggtactcatgtggatgcctacttggaacctgggcctctgagacatgtcctgaccaccccccagggcatttgcctccatcttcaccccagattgtgggtttcccatccccctgactttacccctttcaagcctggggttgtctatacccacagcccttagggacttaaagttacggggcttcgttgaatgctccttcccctaggcagctggtaatagaggggtaaagctctgggcccctcctccctgctgccacttatcccagctccaagtttttttaaaaataatattattaaaaatgtaagtta

SEQ ID NO: 12384 - DNA, 2192 bp, Homo sapiens
caggcacgaggggagaaaggcaggcagccggcgggcgctgcgtgtgtgtttgagtgtgcgagtgtgagtgagtgtgagtgccgggtcctgcctctcctggtgcccccagcagaggggcccggtggcctggggagggcgggcgggctgctcggaggcagaggcagcaagaggcggcggcggggagagccgagaaggaggaggaggagagaggaaagagcggagcagccattgttgagggaaaccttgcaaacaaagaaggctccggactccccgcggccccccgccccccaggccggccccctggcccccggcccccggcccagtggccattgtaactttcccccgggacagcggccgccgcggggcgggccgaggctgtgcgtgcgagtctttgtgcggccggcggactggagctcccagtcgggcctgcccgtcccactcgggacatgagctgctgaagttgtccccccgtcagccctcacccctgccaggactcctctgggcttgcagtcgctcccccgtacctctcctggccccctcagttctcccaggttgttcctcaaagtcattcaagctgtactcgccgaaggagcccccgaacggcaacgcctttccccccttccatcccggcaccatgctggatagggatgtgggcccaactcccatgtatccgcctacatacctggagccagggattgggaggcacacaccatatggcaaccaaactgactacagaatatttgagcttaacaaacggcttcagaactggacagaggagtgtgacaatctctggtgggatgcattcacgactgagttctttgaggatgatgccatgttgaccatcactttctgcctggaggatggaccaaagagatataccattggccggaccctgatcccacgctacttccgcagcatctttgaggggggtgctacggagctgtactatgttcttaagcaccccaaggaggcattccacagcaactttgtgtccctcgactgtgaccagggcagcatggtgacccagcatggcaagcccatgttcacccaggtgtgtgtggagggccggttgtacctggagttcatgtttgacgacatgatgcggataaagacgtggcacttcagcatccggcagcaccgagagctcatcccccgcagcatccttgccatgcatgcccaagacccccagatgttggatcagctctccaaaaacatcactcggtgtgggctgtccaattccactctcaactacctccgactctgtgtgatactcgagcccatgcaagagctcatgtcacgccacaagacctacagcctcagcccccgcgactgcctcaagacctgccttttccagaagtggcagcgcatggtagcaccccctgcggagcccacacgtcagcagcccagcaaacggcggaaacggaagatgtcagggggcagcaccatgagctctggtggtggcaacaccaacaacagcaacagcaagaagaagagcccagctagcaccttcgccctctccagccaggtacctgatgtgatggtggtgggggagcccaccctgatgggcggggagttcggggacgaggacgagaggctcatcacccggctggagaacacccagtttgacgcagccaacggcattgacgacgaggacagctttaacaactcccctgcactgggcgccaacagcccctggaacagcaagcctccgtccagccaagaaagcaaatcggagaaccccacgtcacaggcctcccagtaaaaggccctgctgtggccacccagtgctctgcctacctgccccacccctcacagccccagggagcagaagacagaatgaagagactgagcatctaaaatgggcagcctccatccacccgcttcagggaggaactggactctctgggggcaggtgccaagatttgcccccccagtggccctgggctgggcctggcctctacagagccttttagggggaggggattctctagtacaaagcttaaattagactatagtgtcacttggctgttcttgagcgtcatgccttttagctttcattatcagccctcgtgtattctttcacatggtcctagactaactatatattacctattagctcccctctttatacccggtttgctctggacatgttttataccaacgactctgtttccacattcattatttatcct

SEQ ID NO: 12385 - DNA, 1580 bp, Homo sapiens
caggcacgaggggagaaaggcaggcagccggcgggcgctgcgtgtgtgtttgagtgtgcgagtgtgagtgagtgtgagtgccgggtcctgcctctcctggtgcccccagcagaggggcccggtggcctggggagggcgggcgggctgctcggaggcagaggcagcaagaggcggcggcggggagagccgagaaggaggaggaggagagaggaaagagcggagcagccattgttgagggaaaccttgcaaacaaagaaggctccggactccccgcggccccccgccccccaggccggccccctggcccccggcccccggcccagtggccattgtaactttcccccgggacagcggccgccgcggggcgggccgaggctgtgcgtgcgagtctttgtgcggccggcggactggagctcccagtcgggcctgcccgtcccactcgggacatgagctgctgaagttgtccccccgtcagccctcacccctgccaggactcctctgggcttgcagtcgctcccccgtacctctcctggccccctcagttctcccaggttgttcctcaaagtcattcaagctgtactcgccgaaggagcccccgaacggcaacgcctttccccccttccatcccggcaccatgctggatagggatgtgggcccaactcccatgtatccgcctacatacctggagccagggattgggaggcacacaccatatggcaaccaaactgactacagaatatttgagcttaacaaacggcttcagaactggacagaggagtgtgacaatctctggtgggatgcattcacgactgagttctttgaggatgatgccatgttgaccatcactttctgcctggaggatggaccaaagagatataccattggccggaccctgatcccacgctacttccgcagcatctttgaggggggtgctacggagctgtactatgttcttaagcaccccaaggaggcattccacagcaactttgtgtccctcgactgtgaccagggcagcatggtgacccagcatggcaagcccatgttcacccaggtgtgtgtggagggccggttgtacctggagttcatgtttgacgacatgatgcggataaagacgtggcacttcagcatccggcagcaccgagagctcatcccccgcagcatccttgccatgcatgcccaagacccccagatgttggatcagctctccaaaaacatcactcggtgtgggctgtccaattccactctcaactacctccgactctgtgtgatactcgagcccatgcaagagctcatgtcacgccacaagacctacagcctcagcccccgcgactgcctcaagacctgccttttccagaagtggcagcgcatggtagcaccccctgcggagcccacacgtcagcagcccagcaaacggcggaaacggaagatgtcagggggcagcaccatgagctctggtggtggcaacaccaacaacagcaacagcaagaagaagagtggcgtgaatccgggaggcggtgcttgcggtgagccgggatcgcgccactgcactccagcctaggcgacagagcaagactccgtct

SEQ ID NO: 12386 - DNA, 1604 bp, Homo sapiens
caggcacgaggggagaaaggcaggcagccggcgggcgctgcgtgtgtgtttgagtgtgcgagtgtgagtgagtgtgagtgccgggtcctgcctctcctggtgcccccagcagaggggcccggtggcctggggagggcgggcgggctgctcggaggcagaggcagcaagaggcggcggcggggagagccgagaaggaggaggaggagagaggaaagagcggagcagccattgttgagggaaaccttgcaaacaaagaaggctccggactccccgcggccccccgccccccaggccggccccctggcccccggcccccggcccagtggccattgtaactttcccccgggacagcggccgccgcggggcgggccgaggctgtgcgtgcgagtctttgtgcggccggcggactggagctcccagtcgggcctgcccgtcccactcgggacatgagctgctgaagttgtccccccgtcagccctcacccctgccaggactcctctgggcttgcagtcgctcccccgtacctctcctggccccctcagttctcccaggttgttcctcaaagtcattcaagctgtactcgccgaaggagcccccgaacggcaacgcctttccccccttccatcccggcaccatgctggatagggatgtgggcccaactcccatgtatccgcctacatacctggagccagggattgggaggcacacaccatatggcaaccaaactgactacagaatatttgagcttaacaaacggcttcagaactggacagaggagtgtgacaatctctggtgggatgcattcacgactgagttctttgaggatgatgccatgttgaccatcactttctgcctggaggatggaccaaagagatataccattggccggaccctgatcccacgctacttccgcagcatctttgaggggggtgctacggagctgtactatgttcttaagcaccccaaggaggcattccacagcaactttgtgtccctcgactgtgaccagggcagcatggtgacccagcatggcaagcccatgttcacccaggtgtgtgtggagggccggttgtacctggagttcatgtttgacgacatgatgcggataaagacgtggcacttcagcatccggcagcaccgagagctcatcccccgcagcatccttgccatgcatgcccaagacccccagatgttggatcagctctccaaaaacatcactcggtgtgggctgtccaattccactctcaactacctccgactctgtgtgatactcgagcccatgcaagagctcatgtcacgccacaagacctacagcctcagccctcacccctgccaggactcctctggggttgcagtcgctcccccgtacctctcctggtgcccccagcagaggggcccggtggcctggggagggcgggcgggctgctcggaggcagaggcagcaagaggcggcggcggggagagccgagaaggaggaggaggagagaggaaagagcggagcagccattgttgagggaaaccttgcaaacaaagaaggctccggactccccgcggccccccgccccccaggccggccccctggcccccggcccacggcccagtgg

SEQ ID NO: 12387 - DNA, 1307 bp, Homo sapiens
caggcacgaggggagaaaggcaggcagccggcgggcgctgcgtgtgtgtttgagtgtgcgagtgtgagtgagtgtgagtgccgggtcctgcctctcctggtgcccccagcagaggggcccggtggcctggggagggcgggcgggctgctcggaggcagaggcagcaagaggcggcggcggggagagccgagaaggaggaggaggagagaggaaagagcggagcagccattgttgagggaaaccttgcaaacaaagaaggctccggactccccgcggccccccgccccccaggccggccccctggcccccggcccccggcccagtggccattgtaactttcccccgggacagcggccgccgcggggcgggccgaggctgtgcgtgcgagtctttgtgcggccggcggactggagctcccagtcgggcctgcccgtcccactcgggacatgagctgctgaagttgtccccccgtcagccctcacccctgccaggactcctctgggcttgcagtcgctcccccgtacctctcctggccccctcagttctcccaggttgttcctcaaagtcattcaagctgtactcgccgaaggagcccccgaacggcaacgcctttccccccttccatcccggcaccatgctggatagggatgtgggcccaactcccatgtatccgcctacatacctggagccagggattgggaggcacacaccatatggcaaccaaactgactacagaatatttgagcttaacaaacggcttcagaactggacagaggagtgtgacaatctctggtgggatgcattcacgactgagttctttgaggatgatgccatgttgaccatcactttctgcctggaggatggaccaaagagatataccattggccggaccctgatcccacgctacttccgcagcatctttgaggggggtgctacggagctgtactatgttcttaagcaccccaaggaggcattccacagcaactttgtgtccctcgactgtgaccagggcagcatggtgacccagcatggcaagcccatgttcacccaggtgtgtgtggagggccggttgtacctggagttcatgtttgacgacatgatgcggataaagacgtggcacttcagcatccggcagcaccgagagctcatcccccgcagcatccttgccatgcatgcccaagacccccagatgttggatcagctctccaaaaacatcactcggtgtgggctgtccaattccactctcaactacctccgactctgtgtgatactcgagcccatgcaataaagagacttttcggtttgag

SEQ ID NO: 12388 - DNA, 1740 bp, Homo sapiens
caggcacgaggggagaaaggcaggcagccggcgggcgctgcgtgtgtgtttgagtgtgcgagtgtgagtgagtgtgagtgccgggtcctgcctctcctggtgcccccagcagaggggcccggtggcctggggagggcgggcgggctgctcggaggcagaggcagcaagaggcggcggcggggagagccgagaaggaggaggaggagagaggaaagagcggagcagccattgttgagggaaaccttgcaaacaaagaaggctccggactccccgcggccccccgccccccaggccggccccctggcccccggcccccggcccagtggccattgtaactttcccccgggacagcggccgccgcggggcgggccgaggctgtgcgtgcgagtctttgtgcggccggcggactggagctcccagtcgggcctgcccgtcccactcgggacatgagctgctgaagttgtccccccgtcagccctcacccctgccaggactcctctgggcttgcagtcgctcccccgtacctctcctggccccctcagttctcccaggttgttcctcaaagtcattcaagctgtactcgccgaaggagcccccgaacggcaacgcctttccccccttccatcccggcaccatgctggatagggatgtgggcccaactcccatgtatccgcctacatacctggagccagggattgggaggcacacaccatatggcaaccaaactgactacagaatatttgagcttaacaaacggcttcagaactggacagaggagtgtgacaatctctggtgggatgcattcacgactgagttctttgaggatgatgccatgttgaccatcactttctgcctggaggatggaccaaagagatataccattggccggaccctgatcccacgctacttccgcagcatctttgaggggggtgctacggagctgtactatgttcttaagcaccccaaggaggcattccacagcaactttgtgtccctcgactgtgaccagggcagcatggtgacccagcatggcaagcccatgttcacccaggtgtgtgtggagggccggttgtacctggagttcatgtttgacgacatgatgcggataaagacgtggcacttcagcatccggcagcaccgagagctcatcccccgcagcatccttgccatgcatttctaagcccaccagggaggaacaggcctctgtccccataggtgaggtagaggtagagggtcttcacctgccagtatcccctgccgctccttcctcacagaaggaaggaggaggaggcagccgggatcctcggctctgccagggtgcagccaggagcagggtttcacgcagctggtccagctctgtggctttgctgccttttcctgtgtccagtcccaggaagtgctaacaccacctctctccccactcttccctctggattctggggtcccccacaccgtatttcctccactccagctgccacttttggaagggtattgagtcaggagctgagggaaggggtgaggaaggtggacatcccatcccaactgtaatgcctttttttttttttttttttttttttttttttttctttttttttgggccatttgagtcatgtatggtaccaatcaataaagagacttttcggtttgagagtgtcctggttggtcattgatgcctaataatgactcagtccaaggcaatcttttccccatccttgcagttcctaagactatgaattggat

SEQ ID NO: 12389 - DNA, 1188 bp, Homo sapiens
caggcacgaggggagaaaggcaggcagccggcgggcgctgcgtgtgtgtttgagtgtgcgagtgtgagtgagtgtgagtgccgggtcctgcctctcctggtgcccccagcagaggggcccggtggcctggggagggcgggcgggctgctcggaggcagaggcagcaagaggcggcggcggggagagccgagaaggaggaggaggagagaggaaagagcggagcagccattgttgagggaaaccttgcaaacaaagaaggctccggactccccgcggccccccgccccccaggccggccccctggcccccggcccccggcccagtggccattgtaactttcccccgggacagcggccgccgcggggcgggccgaggctgtgcgtgcgagtctttgtgcggccggcggactggagctcccagtcgggcctgcccgtcccactcgggacatgagctgctgaagttgtccccccgtcagccctcacccctgccaggactcctctgggcttgcagtcgctcccccgtacctctcctggccccctcagttctcccaggttgttcctcaaagtcattcaagctgtactcgccgaaggagcccccgaacggcaacgcctttccccccttccatcccggcaccatgctggatagggatgtgggcccaactcccatgtatccgcctacatacctggagccagggattgggaggcacacaccatatggcaaccaaactgactacagaatatttgagcttaacaaacggcttcagaactggacagaggagtgtgacaatctctggtgggatgcattcacgactgagttctttgaggatgatgccatgttgaccatcactttctgcctggaggatggaccaaagagatataccattggccggaccctgatcccacgctacttccgcagcatctttgaggggggtgctacggagctgtactatgttcttaagcaccccaaggaggcattccacagcaactttgtgtccctcgactgtgaccagggcagcatggtgacccagcatggcaagcccatgttcacccaggtcagcaacccagctggatgtggaacaccatggcacctgggtttgattcccatcctctctcccagtgtatactcacagctgttccccagggaggcataatgtgaactggcaaaataagaagggcgggtaggcatgtt

SEQ ID NO: 12390 - DNA, 558 bp, Homo sapiens
cctattaaaagtccaactgcatatgtaatcctactctgtccttcatagaggggaaggagccacagatgacatcccagttctgccctcctagtgcttgtgactccctctcttccagccccacccccatggtatgtatattccttacaagtcctccacaagagcagctgtctaggatgcggggaggggaggctccttcccttagggagcgtggagagaagggagcagccttgttgctgtatttttggttttgtttcagttgggcaggcatgggatgggagaggggctcagccactttcctccagaatcttccctcagccctccagctgccacttttggaagggtattgagtcaggagctgagggaaggggtgaggaaggtggacatcccatcccaactgtaatgcctttttttttgggccatttgagtcatgtatggtaccaatcaataaagagacttttcggtttgagagtgtcctggttggtcattgatgcctaataatgactcagtccaaggcaatcttttccccatccttgcagttcctaagactatgaattggat

SEQ ID NO: 12391 - DNA, 134 bp, Homo sapiens
taacccttctccaggtgggatcctgcctggaaaggggagggagtagccccctgcccccaataattcctatcttcaacccccattctcatagcctcttcctttacacagcccaactcccatgtatccgcctacat

SEQ ID NO: 12392 - DNA, 339 bp, Homo sapiens
cagttgggcaggcatgggatgggagaggggctcagccactttcctccagaatcttccctcagcccctccaactgcatatgtaatcctactctgtccttcatagaggggaaggagccacagatgacatcccagttctaagcccaccagggaggaacaggcctctgtccccataggtgaggtagaggtagagggtcttcacctgccagtatcccctgccgctccttcctcacagaaggaaggaggaggaggcagccgggatcctcggctctgccagggtgcagccaggagcagggtttcacgcagctggtccagctctgtggctttgctgccttttcctgt

SEQ ID NO: 12393 - DNA, 380 bp, Homo sapiens
tgtatacctcctatgtcgttctaaggtctagaagtgggtctgggagtgccaggggatatctagattggtaggggaggcatctgcctggccccttttgcggtccctttgtcctgaagagtttgtcccatctctacagccattggccggaccctgatcccacgctacttccgcagcatctttgaggggggtgctacggagctgtactatgttcttaagcaccccaaggaggcattccacagcaactttgtgtccctcgactgtgaccagggcagcatggtgacccagcatggcaagcccatgttcacccaggtcagcaacccagctggatgtggaacaccatggcacctgggtttgattcccatcctctctcccagtgtata

SEQ ID NO: 12394 - DNA, 2286 bp, Homo sapiens
caggcacgaggggagaaaggcaggcagccggcgggcgctgcgtgtgtgtttgagtgtgcgagtgtgagtgagtgtgagtgccgggtcctgcctctcctggtgcccccagcagaggggcccggtggcctggggagggcgggcgggctgctcggaggcagaggcagcaagaggcggcggcggggagagccgagaaggaggaggaggagagaggaaagagcggagcagccattgttgagggaaaccttgcaaacaaagaaggctccggactccccgcggccccccgccccccaggccggccccctggcccccggcccccggcccagtggccattgtaactttcccccgggacagcggccgccgcggggcgggccgaggctgtgcgtgcgagtctttgtgcggccggcggactggagctcccagtcgggcctgcccgtcccactcgggacatgagctgctgaagttgtccccccgtcagccctcacccctgccaggactcctctgggcttgcagtcgctcccccgtacctctcctggccccctcagttctcccaggttgttcctcaaagtcattcaagctgtactcgccgaaggagcccccgaacggcaacgcctttccccccttccatcccggcaccatgctggatagggatgtgggcccaactcccatgtatccgcctacatacctggagccagggattgggaggcacacaccatatggcaaccaaactgactacagaatatttgagcttaacaaacggcttcagaactggacagaggagtgtgacaatctctggtgggatgcattcacgactgagttctttgaggatgatgccatgttgaccatcactttctgcctggaggatggaccaaagagatataccattggccggaccctgatcccacgctacttccgcagcatctttgaggggggtgctacggagctgtactatgttcttaagcaccccaaggaggcattccacagcaactttgtgtccctcgactgtgaccagggcagcatggtgacccagcatggcaagcccatgttcacccaggtgtgtgtggagggccggttgtacctggagttcatgtttgacgacatgatgcggataaagacgtggcacttcagcatccggcagcaccgagagctcatcccccgcagcatccttgccatgcatgcccaagacccccagatgttggatcagctctccaaaaacatcactcggtgtgggctgtccaattccactctcaactacctccgactctgtgtgatactcgagcccatgcaagagctcatgtcacgccacaagacctacagcctcagcccccgcgactgcctcaagacctgccttttccagaagtggcagcgcatggtagcaccccctgcggagcccacacgtcagcagcccagcaaacggcggaaacggaagatgtcagggggcagcaccatgagctctggtggtggcaacaccaacaacagcaacagcaagaagaagagcccagctagcaccttcgccctctccagccaggtacctgatgtgatggtggtgggggagcccaccctgatgggcggggagttcggggacgaggacgagaggctcatcacccggctggagaacacccagtttgacgcagccaacggcattgacgacgaggacagctttaacaactcccctgcactgggcgccaacagcccctggaacagcaagcctccgtccagccaagaaagcaaatcggagaaccccacgtcacaggcctcccagtaaaaggccctgctgtggccacccagtgctctgcctacctgccccacccctcacagccccagggagcagaagacagaatgaagagactgagcatctaaaatgggcagcctccatccacccgcttcagggaggaactggactctctgggggcaggtgccaagatttgcccccccagtggccctgggctgggcctggcctctacagagccttttagggggagggggtactcatgtggatgcctacttggaacctgggcctctgagacatgtcctgaccaccccccagggcatttgcctccatcttcaccccagattgtgggtttcccatccccctgactttacccctttcaagcctggggttgtctatacccacagcccttagggacttaaagttacggggcttcgttgaatgctccttcccctaggcagctggtaatagaggggtaaagctctgggcccctcctccctgctgccacttatcccagctccaagtttttttaaaaataatattattaaaaatgtaagtta

SEQ ID NO: 12395 - DNA, 651 bp, Homo sapiens
caggcacgaggggagaaaggcaggcagccggcgggcgctgcgtgtgtgtttgagtgtgcgagtgtgagtgagtgtgagtgccgggtcctgcctctcctggtgcccccagcagaggggcccggtggcctggggagggcgggcgggctgctcggaggcagaggcagcaagaggcggcggcggggagagccgagaaggaggaggaggagagaggaaagagcggagcagccattgttgagggaaaccttgcaaacaaagaaggctccggactccccgcggccccccgccccccaggccggccccctggcccccggcccccggcccagtggccattgtaactttcccccgggacagcggccgccgcggggcgggccgaggctgtgcgtgcgagtctttgtgcggccggcggactggagctcccagtcgggcctgcccgtcccactcgggacatgagctgctgaagttgtccccccgtcagccctcacccctgccaggactcctctgggcttgcagtcgctcccccgtacctctcctggccccctcagttctcccaggtaagtctgggcaccctgcgagcctgttgggggtgggcggaaggccctcagcccggcccgggcctgatctgcgggctgggggagaggtgccccagcccag

SEQ ID NO: 12396 - DNA, 1928 bp, Homo sapiens
cggggagcccggcgggcgccggcgcgtccccccccacccccaccccacgtgtcgtggcagcgcgcgtccgctgggggcggtgagcagcatgagctgctgaagttgtccccccgtcagccctcacccctgccaggactcctctgggcttgcagtcgctcccccgtacctctcctggccccctcagttctcccaggttgttcctcaaagtcattcaagctgtactcgccgaaggagcccccgaacggcaacgcctttccccccttccatcccggcaccatgctggatagggatgtgggcccaactcccatgtatccgcctacatacctggagccagggattgggaggcacacaccatatggcaaccaaactgactacagaatatttgagcttaacaaacggcttcagaactggacagaggagtgtgacaatctctggtgggatgcattcacgactgagttctttgaggatgatgccatgttgaccatcactttctgcctggaggatggaccaaagagatataccattggccggaccctgatcccacgctacttccgcagcatctttgaggggggtgctacggagctgtactatgttcttaagcaccccaaggaggcattccacagcaactttgtgtccctcgactgtgaccagggcagcatggtgacccagcatggcaagcccatgttcacccaggtgtgtgtggagggccggttgtacctggagttcatgtttgacgacatgatgcggataaagacgtggcacttcagcatccggcagcaccgagagctcatcccccgcagcatccttgccatgcatgcccaagacccccagatgttggatcagctctccaaaaacatcactcggtgtgggctgtccaattccactctcaactacctccgactctgtgtgatactcgagcccatgcaagagctcatgtcacgccacaagacctacagcctcagcccccgcgactgcctcaagacctgccttttccagaagtggcagcgcatggtagcaccccctgcggagcccacacgtcagcagcccagcaaacggcggaaacggaagatgtcagggggcagcaccatgagctctggtggtggcaacaccaacaacagcaacagcaagaagaagagcccagctagcaccttcgccctctccagccaggtacctgatgtgatggtggtgggggagcccaccctgatgggcggggagttcggggacgaggacgagaggctcatcacccggctggagaacacccagtttgacgcagccaacggcattgacgacgaggacagctttaacaactcccctgcactgggcgccaacagcccctggaacagcaagcctccgtccagccaagaaagcaaatcggagaaccccacgtcacaggcctcccagtaaaaggccctgctgtggccacccagtgctctgcctacctgccccacccctcacagccccagggagcagaagacagaatgaagagactgagcatctaaaatgggcagcctccatccacccgcttcagggaggaactggactctctgggggcaggtgccaagatttgcccccccagtggccctgggctgggcctggcctctacagagccttttagggggagggggtactcatgtggatgcctacttggaacctgggcctctgagacatgtcctgaccaccccccagggcatttgcctccatcttcaccccagattgtgggtttcccatccccctgactttacccctttcaagcctggggttgtctatacccacagcccttagggacttaaagttacggggcttcgttgaatgctccttcccctaggcagctggtaatagaggggtaaagctctgggcccctcctccctgctgccacttatcccagctccaagtttttttaaaaataatattattaaaaatgtaagtta

SEQ ID NO: 12397 - DNA, 2521 bp, Homo sapiens
caggcacgaggggagaaaggcaggcagccggcgggcgctgcgtgtgtgtttgagtgtgcgagtgtgagtgagtgtgagtgccgggtcctgcctctcctggtgcccccagcagaggggcccggtggcctggggagggcgggcgggctgctcggaggcagaggcagcaagaggcggcggcggggagagccgagaaggaggaggaggagagaggaaagagcggagcagccattgttgagggaaaccttgcaaacaaagaaggctccggactccccgcggccccccgccccccaggccggccccctggcccccggcccccggcccagtggccattgtaactttcccccgggacagcggccgccgcggggcgggccgaggctgtgcgtgcgagtctttgtgcggccggcggactggagctcccagtcgggcctgcccgtcccactcgggacatgagctgctgaagttgtccccccgtcagccctcacccctgccaggactcctctgggcttgcagtcgctcccccgtacctctcctggccccctcagttctcccaggttgttcctcaaagtcattcaagctgtactcgccgaaggagcccccgaacggcaacgcctttccccccttccatcccggcaccatgctggatagggatgtgggcccaactcccatgtatccgcctacatacctggagccagggattgggaggcacacaccatatggcaaccaaactgactacagaatatttgagcttaacaaacggcttcagaactggacagaggagtgtgacaatctctggtgggatgcattcacgactgagttctttgaggatgatgccatgttgaccatcactttctgcctggaggatggaccaaagagatataccattggccggaccctgatcccacgctacttccgcagcatctttgaggggggtgctacggagctgtactatgttcttaagcaccccaaggaggcattccacagcaactttgtgtccctcgactgtgaccagggcagcatggtgacccagcatggcaagcccatgttcacccaggtgtgtgtggagggccggttgtacctggagttcatgtttgacgacatgatgcggataaagacgtggcacttcagcatccggcagcaccgagagctcatcccccgcagcatccttgccatgcatgcccaagacccccagatgttggatcagctctccaaaaacatcactcggtgtgggctgtccaattccactctcaactacctccgactctgtgtgatactcgagcccatgcaagagctcatgtcacgccacaagacctacagcctcagcccccgcgactgcctcaagacctgccttttccagaagtggcagcgcatggtagcaccccctgcggagcccacacgtcagcagcccagcaaacggcggaaacggaagatgtcagggggcagcaccatgagctctggtggtggcaacaccaacaacagcaacagcaagaagaagagcccagctagcaccttcgccctctccagccaggtacctgatgtgatggtggtgggggagcccaccctgatgggcggggagttcggggacgaggacgagaggctcatcacccggctggagaacacccagtttgacgcagccaacggcattgacgacgaggacagctttaacaactcccctgcactgggcgccaacagcccctggaacagcaagcctccgtccagccaagaaagcaaatcggagaaccccacgtcacaggcctcccagtaaaaggccctgctgtggccacccagtgctctgcctacctgccccacccctcacagccccagggagcagaagacagaatgaagagactgagcatctaaaatgggcagcctccatccacccgcttcagggaggaactggactctctgggggcaggtgccaagatttgcccccccagtggccctgggctgggcctggcctctacagagccttttagggggagggggtactcatgtggatgcctacttggaacctgggcctctgagacatgtcctgaccaccccccagggcatttgcctccatcttcaccccagattgtgggtttcccatccccctgactttacccctttcaagcctggggttgtctatacccacagcccttagggacttaaagttacggggcttcgttgaatgctccttcccctaggcagctggtaatagaggggtaaagctctgggcccctcctccctgctgccacttatcccagctccaagtttttttaaaaataatattattaaaaatgtaagttaaaaaaaaaatcactcatgtccccccctcttccccctattaaaagtccagctacctccctactcttggcagatgggggcctagggcctaggtgggggtgagagtgggggagggaggtgtgcataccattttatatggtgtgagagcttcagaccaaggagacatttcaccatctctccccctttcctctggggtgactgcagttgaggaaagcatgccatggggtagggggacatt

SEQ ID NO: 12398 - DNA, 530 bp, Homo sapiens
ttgagtagtttggttctatttctttgtatttgctgctgacaggtgaatgtgaccaactcaagtgcatagagcttcatgactgaagagcactcagaatgcgccgtttcaggctcatactgaaagcattctaggatgctcaccttttggtccagcgagtctgtttctaggaatttaacctaagggagtaattaagaatctacacagtgacttatttatagagatgtttatcacagcattgattgcaatattaaaaaatcagcagggcgaggtggctcacgcctgtaatcctagcactttgggaggctgaggctggtgagttgcttgagctcaggcgttcgagaccagcctgagcagcatggcaaaacctcgtctcttcagaaaatacaaaaattagccaggcattgtgtgtatgcctgtagtcccagctactcaggaggccaaggtgggaggatcacttgagcccgggaggtggaggttatagtgagctgagattgtgcagtgagcctgggtgacaaaatgagaccctgtct

SEQ ID NO: 12399 - DNA, 163 bp, Homo sapiens
tattatcaggaggaatacaccacttcataagatggagaagataccagcttctaggaacaaataatggaaattggctacatattcacatttgctctgtcaaaaatgtctaaggttatttacaagcttttgacaagctgatcaagtttcataagaagtaacgaaa

SEQ ID NO: 12400 - DNA, 383 bp, Homo sapiens
gacagatcatgaggtcaggagtttgagaccagcctgcccaacatggtgaaaccctctctctactaaaaatacaaaaattagccaggcatggtggacatgcctgtaatcccagctactcaggaggctgagacaggagaatttttcgaacccgggagatggaggttgcagtgagccaagattgcaccactgtactccagcctgggtgacagagcaagactctgtctcaaaaaaaaaaaaaaaaaaaaaaaaaaaaagaatggggctgagacagtacaagcagcttggagctctggacttggagcaaacagctatgtttaactccttatcattcaccatctgtgggcatttagcaaggcattttgcaacacttttgctttcttgta

SEQ ID NO: 12401 - DNA, 659 bp, Homo sapiens
aaaagtaagaaacaaacatggtgacagtacagttgtcccagtttaccgcctagacaaagtttccaggtgtaaggcagggagaggaaactcacgcagaatctgggagactctgagttgggcatttggagttgaaactccaggggaccacaatgacttgcaggatggagagaaggctgaacagagagagagctgttggagatctgcagaggatccgccatacgtattcaactgagcgttgggtaggaggacattagggacattgaaggccagggaaagaaccaaatgaaaagattaggaaagagaggctaacccagtgctaactcaaagctggggaagagtgcctgttctcatgagcaagagaggaaagtatcaagattcactgggcattgagtgatatacagaagggttttgcccagtagtgggggataacttgcactagatggagcatgactccaggccttcctaacaaatgtgaagagcaagacccaaaaagataaaaatgtttctaagcaacttaactgcatcccagaataaagttcaagaatatttataagaatacaaaaatatccagcatccaaaaacataaaatcacagtgtctggcattcaatcaaaaattaccaggcaatcaaagaagcctgaaaatagcaatatagttaag

SEQ ID NO: 12402 - DNA, 389 bp, Homo sapiens
taaaattactctgtcagaactatcagtaagcaaataaaggtggcttatccacacacatcttgattttgaatttacatacatttgtcataagtttggtttctattaagtataattgtttaaagaatgtctgtgtagacaaatttgaatagaattaatcatttacctataaatgtgaatttctggaaactgcaaaatgtgaccaccaatgttactttgcacatctcacctgaatagtttcaaacaagcaaaaatgtgaaactgagataagagggacttgaaccccgtaaaagaacagactaaaaatatgttgtgtcttattttaagtaaaactattaatgagaataaaataaattcgaatgtgaaggaatgtcagtatttttcttatattt

SEQ ID NO: 12403 - DNA, 259 bp, Homo sapiens
cctcccagtttttctaatctgattactttgaagcaaatcttggtatagttacttttaaataggaagcagataggcacctttccagaatctatagaacttttccttagaatggcagggcatgagtttgtcagaagccccagatggggtcttcatttcaatcaggtgttatgcttggcaacggtttccctgtggggaactttgagggacttgggaagcattgttatctgtttttgtagctgcatctgcgttaaaaaaaaaa

SEQ ID NO: 12404 - DNA, 391 bp, Homo sapiens
gcacactgaaaaacctaatgaatctggactcaattttccgccacactgctcctgagaactgtcggaaacaatgtctgtggtcggaggtgacggggtggccgccgataggccgcgaggcaccccttcccttcccaccccgggctcccggcccttcccgtcagggttagtggagagagacggacctgtctccacaacctggtgacagcccagcccgctgccacttccctaacaatgatgtcattataggtaaattggcctctatttcagcggggcggtggtgctaattgagtgagaaaatataatacagggagctgttgtctgcagctccggggagggggccgcagcctaaatggcctaccattgttgatgtcagggtaggcagatgttgcct

SEQ ID NO: 12405 - DNA, 490 bp, Homo sapiens
acttgtgacaacaaatgtatgagtttttaaattttttttatgtcaaccaatcatccaagtctctgggcaccaactgagtgttctacaattccagttcagacactgtctggggttagcccagaccccacaggctaaaaactgtctcaagattacccgcagtagaatctccagttaaatcccatgttatcacctgcagttttgaccaaccagctataaattgggggtccccttggtcacttgctagaaggtttcccagaactcaggaaagcatcgtacttactattaacagtttattataaaggatacaacccaggaggagatacacagggtgaagtgctctgggtgtgatgcctccatgctgtctcctggcacactgctctcccagcactttgatgtgttcaccagccaagatgttttctcaactctgtggttcaggagttttgatcgagctttaattacatcgacatgatagattacatcattggctatt

SEQ ID NO: 12406 - DNA, 478 bp, Homo sapiens
aactgcattatatgaagcaaattaagtcactggtttccacgtcctccagtttctgcaataatactacataaacagagaaaaaacaggatccggagacaaagacaagcctggaaataccttcaacactgttaaataggtccatttccttatgctttttctcaataactgaaatttctccatttccctccatttcccatgatgaagtttgcccagaccaattggatgatgatatcacctaggatatcaccaatactatcagctttcttcactctgtgactgtgtagttctgtaggggggttgggtagtttctctggaactaataagaagctagaattgtttgcttcatgaagagtggcatagaacactagaattactctgtgcgtggaagataaatgtcttctcccctccctttgttttattggcaacaattaagctgatttaaaaataaatccatgcttcctctgtgtggactccacac

SEQ ID NO: 12407 - DNA, 548 bp, Homo sapiens
acggagatagcatgctgtggtttacggtcagagtgttttcccaccccctgcccgcgggtccccctgcttcctgggtctacattgtaggtttgagcatgtgtccaacagcccctacctcccagaggggctgctttccagggcctgaccatgactcacacaaagaaggccttagagcccggccgctgggcctcctttggcccgggaagttgtgcgtgtctgtgctaattccaagccccgctgtgtcccgcgtcatcggtgaattcccacagagctgatctccagggcctcctcctgccctcactgcacgcagcacatgcacagcccctcctggcgggtgctgttcttttcacctgctcctcccccacccccaccctctttgcattgttcctgaagcttcaccaaatccccgactcccccgttgtacgaggacaacgagggctggggggactcagccagcccacaaagccctggattttctcaggctcccaaggaagaagagtaggaggggagtggacatacctttttttttttattttacccccttcctt

SEQ ID NO: 12408 - DNA, 335 bp, Homo sapiens
atttttctcaataaatgttgtgaacatatacgaggcatggtggaaggcatgtgtagttaacagttgcttgggaggctgaggcaggaagattgctggagcctaggagttcaaatcctgcctgggcaacacagtgagactctatcttgaagacaaataagattgtgaacatgtgtagcatactagcaggaaaagcaaaatcaaattaaagatgaataatgattcttcatcatagtctacaactaatctactagctgagttagagctatagatctacccataaatatgggaactttgtagatagctcacatcacagtgaaccattttacctagtcagt

SEQ ID NO: 12409 - DNA, 446 bp, Homo sapiens
aaatgtatccttaggcaatttcatccttctctgaacatcacagtgtactaacacaaaatagatggctcagcctactacacacttaggctattgctcctagaccacaaatctatacagcatattactgtactgaatactgtaggcaattgtaatgcaatgatatttgtgtgtctaaacatatctaaacatagaaaaggtacagtaaaaatatagtattatcttatgggactcatatatgtggtctgtcgttgactgaaaagtggcacattactgtggaaagtttctcctcagtacagttttttcttgtggaaatccatgcattcctcctaacaggagatcaatcgtaatttaaaactctgcttatctactaaagatgcagtgaatttggggcttgaattatttgcttttgttggatacttgattaaataaacacgtataatcatttc

SEQ ID NO: 12410 - DNA, 666 bp, Homo sapiens
tggtgacattttgcttatctgagtcacatttcggtaacatatcatcattttgaaagtgcggctatgacgtgctatattaaacaggaacagcctttcagtggatggggattttattaccacagtctttccatagtcatttcaaaatcaaattgttggtgggaggatggattgggttgtgagtaatctacttccatatatcagcctcagaaatggaactatcctttggatattacaggagacactgcagcagattgtttccagaagctggaaaaatatgctcccaggagaatttaatcactgggcttttgctgggggatttttagttggcgggactgtcaaggaaatgtgatgacagaaatataatccttaacacaaactggaatctggctttgaatggcatcttccattccctggattgagtcaaatgtttggccaagcagtcagttatctagctgttactgttgggatgaagaactctgttttcatcaactaccatctcacatttctctaaatacttccaagtagcccagagaaaatttagggtacaggtggctatgggccaatttctaaatagctccaattgaagacataaatctgtgttatgaaaaatgatgagttggtactgtaagattcctgatgcatttggaaattttttcaaaccaaaaa

SEQ ID NO: 12411 - DNA, 555 bp, Homo sapiens
gttgatttatttttttcaactcttagctacctccccacaataatatctattcctatgactatttaatttattgtgcaaatgcagaatactttagggagcaaaaaggagtgctggtataaattacactcaactggtaaaaactatcattgtttgcttctgttctagtcagagggttgtactctactgcagtcatacctgaaggaaggcagtagtagagcaggtgtacctgagggtggaacaacctctgcttggcctcatctaaaagtagataaagggggccgggcacggtggctcacgcctgtaatcccagcactttgggaggccgaggcaggcggatcacgaggtcaggagatcgagaccatcctggctaacacggtgaaatcccatctctactaaaaatacaaaaaattagctgggtgtggtggcagatgcctgtaatcccagctactcgggaggctgaggcaggagaatggcgtgatcctgggaggcggagcttgcagtgagccaggattgtgccaccgcactccagcctgggtgagagagtgagattccgtc

SEQ ID NO: 12412 - DNA, 359 bp, Homo sapiens
tctaatctatctatccatctatcctgtcatcattttttttcttatcacagctcccttagcctagaattcctgttgtgggtattgcatttatatttagaaaacttcaaattgtggcctgattaaatacttctaagtcccaaatgtactccaaagcagatacttaaacagtttatgcctgtagaattttttaatctcagccgaagagcagggtgactggtgtgtgtgtgtgtgtgtgtgtgtgtgtgtgtgtgtatccaagcaaaatgatgattgcctttgttctgacttgtagcgggtagaatccttcctcaattatttttctggggtgtagttgaaataaaaacttcatcattcactca

SEQ ID NO: 12413 - DNA, 738 bp, Homo sapiens
atttgttttgtcttcattctgcatgaagaactgtagggttttccctctccactctatgtaagaaaaatgataattttataatcctttatattctactttttaatttattttggtgcctggttaaaaaaagtacatacttagaaatgtggttggcatgtaagaagggtttaaaagataataaaatcgacaatttaggattgttgtaagtggtgctgaagtagaaaaaaatgaattgtgcttatctaagtacatgataactagatgtggaattagaggatgcaaattgagagatgtagaaaagttatttttttaaaaagaggcatgatttgaggatgatttttatacatggattggattaaattgttcagcaatgcttgcttattggtatcttcagtttcatatgaggataatagtagtatctaaaactcagctgtccctgaaactcttggctgggcagggagtttactaattcctgttaaaagcttgactggaaaattaataattctgaaaaacatgctatcaattcattattctaaaagcttctcctgtatttttcaagtcctgtcaaaagctggctctcatagaaagcaaggaaggtcgccaaaatgagagcaaatagaggccactcaatcagaccttgttataacaaaggtcaccgaccttcacttgtgtgactcacagaagtcacacttgtggcagagactcaaaggtagacagagaagtgggttaactttgtac

SEQ ID NO: 12414 - DNA, 409 bp, Homo sapiens
tttttcgtcatatgagtaaccttattcattttaatatcacatttcctttagtcacataagctcacgcatgcatacagtgtagcatagtgcctaatagttgctaagccctccttaagtatttagtaatggtggtggtaccaccaactaaaataacagagtaggttctcattttattcttagaaagtttttgaacttttcaacaaatagtgctagaagaactgaatagctacacatgaaagagtgaagttgggcactttctcatatcatatacaaaaattaactcaacatttatcaaagacctaaatgtaagagctaaaaactataaaactcttagaagaaaacgtgaatgtaaatctttgtaaccttggcaatgctgttttggatataacacctaaatcacaatcaacca

SEQ ID NO: 12415 - DNA, 441 bp, Homo sapiens
tttagtagagatggggtttcaccgtgttagccaggatggtcttgatctcctgaccttgtgatccacccgccttggcctcccaaagtgctgggattacaggtgtgagccactgcgcaaggctgtaactgtttattttaaaatcatgtttcttgcctttctttccctcactgtctccctccctccctcccttcctccctcccttcctcccttccttcctcgttttttagaaagagggtctagctgtgttgcccaggctggttttggacttaaggattcctcccaccctggcctcccaagtgctaggattataggcatgagcccccatgcccagccttatattgccttttttgattccgtaatggacattatctatttaaggggaaagtttttttccttccactcttctaaggtccagggcccctgtaacagaagattaataat

SEQ ID NO: 12416 - DNA, 439 bp, Homo sapiens
tataacatagtagcccttccccttgccccaggtgatcccccccaccatgtttgccatgttcaatctccaacgagccagtctccatctgaagggccatctcctgcactcctcatcagacataagctcttggacttggtccattttattctcacccgcacttctagaacctaaaacccatcgtggtacttgagaggaactcagtgagtgaatcaaagtggatcacagctcagttttggaaacaaagccaaatcacttacctagattagagctggcgtcagccatctctcctcagataatatttgaaggctcagtacagtggcgcgcacactttgggaggccaagacaggaagatcacttgagcccaggagctcaaggtggtagtgagctgtgattgtgcccctcagcctagatgacagagtgagaccctgtcacttcaaaa

SEQ ID NO: 12417 - DNA, 567 bp, Homo sapiens
agggagagggtccgaaagattcccagagaggtcccagtccggttaagggttgagaacagcagagaacttctaggtagagttgtgtagtggggggagacagatacggaatctgtgtgattgaatatatttggggaggggaggcttagggcctagccctctttcctcttaagcccccagaagacctttcctggggaagggaaggttggtgttgggcctgtcacttggctgaaatatggagtccacaccgcttctccagagtccctcagcagccctccatgtctcggggtctccacacagggaccagctgctgccccgggcttctagccagaattgcccatgccattctctcgattctttctttctctccagctgcttcatgtgagggcttgtcaggccgcgggttggaggccttagggccagaggcggtgggaccgggagaaccggtttggggcccgaacaggaccagagaactagcctgtacatccttcctccctggcacctctttcccactcctcctcactgctcctgctcggggcgcctcaaccccgacaagataggtaccgacta

SEQ ID NO: 12418 - DNA, 1489 bp, Homo sapiens
agggagagggtccgaaagattcccagagaggtcccagtccggttaagggttgagaacagcagagaacttctaggtagagttgtgtagtggggggagacagatacggaatctgtgtgattgaatatatttggggaggggaggcttagggcctagccctctttcctcttaagcccccagaagacctttcctggggaagggaaggttggtgttgggcctgtcacttggctgaaatatggagtccacaccgcttctccagagtccctcagcagccctccatgtctcggggtctccacacagggaccagctgctgccccgggcttctagccagaattgcccatgccattctctcgattctttctttctctccagctgcttcatgtgagggcttgtcaggccgcgggttggaggccttagggccagaggcggtgggaccgggagaaccggtttggggcccgaacaggaccagagaactagcctgtacatccttcctccctggcacctctttcccatcccttctgctcacctcccaacagctctgagaccctcaagtcctagtatgatcttggtgggggcggggggtggctttcccggttccatatttcactcttgccatttggaactcagagaggtcgagttctgagcaccacttggctctcaggacgtggccttatgaggtctaatcctcatccctcctgttgttttctcagccccttccctattcactgtggggttggattcgggtggctcttccgcctgggctgaccagctcaggacttcatttttcctcaacccactctcttctggctgctttaaagaagagtggccgccagtggctcttacttccttttctggctttgttcccatcccccactgccctgcgctaccatcacattcaccctgacctgtcttcttcacactctgaccccaccctcaagtttcagagaccctaatgtcctagggaatggaatttcctggtcacttctcgtcatcattggtcatttcatgccaagtcccacacacacgctttccctccacccagctctggtcaggtccctggaaaagaaacagaaatggccttgttctctccactgcccctttccctctctccttctcctccccctctcttctcttccctcccagcactatccacctctgtccctcagctttgagcagagtgggggatgttgagggagagtccagtcacagtacagcctgcctgctggtgttgggggtttcctctaattcttcatttttccccaacccttaccacctgccaccaccaccatcaggacaaaccctatgactgactcactgacgtcccactgaccacagctcccctctctggacagcgtgttttagcttccgctccttctggttactcctcccttccagtggtgagaagagaagagaaagcccagcctcctgggttctcccctcccctagaagctacatttgagtgtttgtgtgatctcatctcaaggctgttaaa

SEQ ID NO: 12419 - DNA, 1450 bp, Homo sapiens
ctagaggatcccgcaagttaagggctacccctaggtagagttgtgtagtggggggagacagatacggaatctgtgtgattgaatatatttggggaggggaggcttagggcctagccctctttcctcttaagcccccagaagacctttcctggggaagggaaggttggtgttgggcctgtcacttggctgaaatatggagtccacaccgcttctccagagtccctcagcagccctccatgtctcggggtctccacacagggaccagctgctgccccgggcttctagccagaattgcccatgccattctctcgattctttctttctctccagctgcttcatgtgagggcttgtcaggccgcgggttggaggccttagggccagaggcggtgggaccgggagaaccggtttggggcccgaacaggaccagagaactagcctgtacatccttcctccctggcacctctttcccatcccttctgctcacctcccaacagctctgagaccctcaagtcctagtatgatcttggtgggggcggggggtggctttcccggttccatatttcactcttgccatttggaactcagagaggtcgagttctgagcaccacttggctctcaggacgtggccttatgaggtctaatcctcatccctcctgttgttttctcagccccttccctattcactgtggggttggattcgggtggctcttccgcctgggctgaccagctcaggacttcatttttcctcaacccactctcttctggctgctttaaagaagagtggccgccagtggctcttacttccttttctggctttgttcccatcccccactgccctgcgctaccatcacattcaccctgacctgtcttcttcacactctgaccccaccctcaagtttcagagaccctaatgtcctagggaatggaatttcctggtcacttctcgtcatcattggtcatttcatgccaagtcccacacacacgctttccctccacccagctctggtcaggtccctggaaaagaaacagaaatggccttgttctctccactgcccctttccctctctccttctcctccccctctcttctcttccctcccagcactatccacctctgtccctcagctttgagcagagtgggggatgttgagggagagtccagtcacagtacagcctgcctgctggtgttgggggtttcctctaattcttcatttttccccaacccttaccacctgccaccaccaccatcaggacaaaccctatgactgactcactgacgtcccactgaccacagctcccctctctggacagcgtgttttagcttccgctccttctggttactcctcccttccagtggtgagaagagaagagaaagcccagcctcctgggttctcccctcccctagaagctacatttgagtgtttgtgtgatctcatctcaaggctgttaaa

SEQ ID NO: 12420 - DNA, 1360 bp, Homo sapiens
agggagagggtccgaaagattcccagagaggtcccagtccggttaagggttgagaacagcagagaacttctaggtagagttgtgtagtggggggagacagatacggaatctgtgtgattgaatatatttggggaggggaggcttagggcctagccctctttcctcttaagcccccagaagacctttcctggggaagggaaggttggtgttgggcctgtcacttggctgaaatatggagtccacaccgcttctccagagtccctcagcagccctccatgtctcggggtctccacacagggaccagctgctgccccgggcttctagccagaattgcccatgccattctctcgattctttctttctctccagctgcttcatgtgagggcttgtcaggccgcgggttggaggccttagggccagaggcggtgggaccgggagaaccggtttggggcccgaacaggaccagagaactagcctgtacatccttcctccctggcacctctttcccatcccttctgctcacctcccaacagctctgagaccctcaagtcctagtatgatcttggtgggggcggggggtggctttcccggttccatatttcactcttgccatttggaactcagagaggtcgagttctgagcaccacttggctctcaggacgtggccttatgaggtctaatcctcatccctcctgttgttttctcagccccttccctattcactgtggggttggattcgggtggctcttccgcctgggctgaccagctcaggacttcatttttcctcaacccactctcttctggctgctttaaagaagagtggccgccagtggctcttacttccttttctggctttgttcccatcccccactgccctgcgctaccatcacattcaccctgacctgtcttcttcacactctgaccccaccctcaagtttcagagaccctaatgtcctagggaatggaatttcctggtcacttctcctccccctctcttctcttccctcccagcactatccacctctgtccctcagctttgagcagagtgggggatgttgagggagagtccagtcacagtacagcctgcctgctggtgttgggggtttcctctaattcttcatttttccccaacccttaccacctgccaccaccaccatcaggacaaaccctatgactgactcactgacgtcccactgaccacagctcccctctctggacagcgtgttttagcttccgctccttctggttactcctcccttccagtggtgagaagagaagagaaagcccagcctcctgggttctcccctcccctagaagctacatttgagtgtttgtgtgatctcatctcaaggctgttaaa

SEQ ID NO: 12421 - DNA, 1067 bp, Homo sapiens
  misc_feature (93)..(93): n is a, c, g, or t
ctttaatgtgttcattgagcaactaaagaatagactcagatataggaaagtatttatttatttatttatttagagacagggtctggctctgtngtccagatcataactcactgtaacctcgaactcctgacctcaggtgagcgtcctgccttggcctcccaaagtgctgggattacaggcgtgagccactacacccagccaatcagttgcttttaaactacttaaataaaaagagccaacccaaaatcttgtgcatgcttgggaaactggcagtggaatatgagaagtctttatttgtggtgcacacaggtgactcgggctgttgtgtattggttcttgcctcgatctgtagcaagcaatctgttgtttcttgcctgccttttgggaagaaatgaaaaaagaagcagcacgagtctccatacatcatgattgtgatggcactgggcctgagaccttttctgctgtccaggtaaaaatgtgaagaccatggttttgaggtttcttaataaattcaggtgttaagtgccaagtgatgctcccagcccctgagctagagcaactatgctgttcatgtccccaggaatggaagtggaccctagttaggtgctggtggccagccatgtgtacctagggcagggccaggtcgtgtgtgtgtgtgtgtgtgtgtgtgtgtgtgtgtgtgtgtgtgagagagagagagagagagagacagagagagagatagagagaaacataaaggtgatcggcactcagacatcctgtgtggtccacctcacttctcaagcaggtgtctttccagtctacaactcgttgaccacaggtggaattcataagctctgttccctgtcctgcttgggtcctccagagaaagaaatgttgaattatcatcttggtgatggtcaactctgaaagcctaaattttcatgatcaccaaagtgtttggatttaaaagggtggctcactccgtaattccggcactttgggaggctgaggcagaaggatcacttgagcccagaagtttcagactaggctgggcaacaaagcaagacccggtctctaccaaaaaa

SEQ ID NO: 12422 - DNA, 1048 bp, Homo sapiens
  misc_feature (93)..(93): n is a, c, g, or t
ctttaatgtgttcattgagcaactaaagaatagactcagatataggaaagtatttatttatttatttatttagagacagggtctggctctgtngtccagatcataactcactgtaacctcgaactcctgacctcaggtgagcgtcctgccttggcctcccaaagtgctgggattacaggcgtgagccactacacccagccaatcagttgcttttaaactacttaaataaaaagagccaacccaaaatcttgtgcatgcttgggaaactggcagtggaatatgagaagtctttatttgtggtgcacacaggtgactcgggctgttgtgtattggttcttgcctcgatctgtagcaagcaatctgttgtttcttgcctgccttttgggaagaaatgaaaaaagaagcagcacgagtctccatacatcatgattgtgatggcactgggcctgagaccttttctgctgtccaggtaaaaatgtgaagaccatggttttgaggtttcttaataaattcaggtgttaagtgccaagtgatgctcccagcccctgagctagagcaactatgctgttcatgtccccaggaatggaagtggaccctagttaggtgctggtggccagccatgtgtacctagggcagggccaggtcgtgtgtgtgtgtgtgtgtgtgtgtgtgtgtgtgtgtgtgtgtgagagagagagagagagagagacagagagagagatagagagaaacataaaggtgatcggcactcagacatcctgtgtggtccacctcacttctcaagcaggtgtctttccagtctacaactcgttgaccacaggtggaattcataagctctgttccctgtcctgcttgggtcctccagagaaagaaatgttgaattatcatcttggtgatggtcaactctgaaagcctaaattttcatgatcaccaaagtgtttggatttaaaagggtggctcactccgtaattccggcactttgggaggctgaggcagaagtttcagactaggctgggcaacaaagcaagacccggtctctaccaaaaaa

SEQ ID NO: 12423 - DNA, 300 bp, Homo sapiens
agcctcctgagtagctgggattacaggcgtgtgccaccgcctccagctaatttttgtatttttagtagagaccgggcttcaccatgttggccaggctggtctcgaactcctgacctcaggtgagcgtcctgccttggcctcccaaagtgctgggattacaggcgtgagccactacacccagccaatcagttgcttttaaactacttaaataaaaagagccaacccaaaatcttgtgcatgcttgggaaactggcagtggaatatgagaagtctttatttgtggtgcacacaggtgactcg

SEQ ID NO: 12424 - DNA, 243 bp, Homo sapiens
gctatgactgcattacctgaaggacctcatctggtcgacacaagcccatgtggtcagcatttatccacccccacttacagagggggtcaccaccacttatagaagcttacagggtaagtcactcactcatgctcacaaaatgtgtcaagggcagaatccaagcctccacacctcccaaacccaggctctgagccactctgctgctgagaggccattgggtagagtgggtaaatatgcacagcc

SEQ ID NO: 12425 - DNA, 430 bp, Homo sapiens
gctaacacgacaactcacccacattcctgagtaaacaccaagtaaagagggagaggcaggtcacgtgggtagagagtggatgagggggattaaaagcatttcctggacaatccacattcgtataatccagtgttgagcactgtagccctccagctcccatttaggaggtactaagctagtgctgatggcattccacaaagaccacccatatgatgcgcacctgcagcagttggccggagccgtgggcagagcacccctgagaacacactcagcccctcacacccaactcaaggcaccttaactatgagcaaaagactgtttactgtttgttgcatttgttcagtttgtgaacagattctagattgaagctctgcctcaagaagacaggagagaaggccacacaccccataggagaagcatgctagctcgg

SEQ ID NO: 12426 - DNA, 689 bp, Homo sapiens
aaaatacaaaattagtcgggtgtgctggtgggtgcctgtaatctcagctactctgtaggctgaggcaggaaaatcgcttgaacctgggaggcagaggttgtggtgagccaggatcacaccactggactccagcctgggcaagaagagcgaatatttcgtctaaaaaaaaaaaacctgacccaattgtttggagtgtctgttgccaactcccctgagctagtgacctagtgggagcggccggaaaggctgttgccttttggaacttcagcagcccgacagacgactccatcactggccaggtgcctcctcccaaggtgggagacgaatgaggcagtttgtaaaggcttctgaagagtgttagagaaaggtgctgtgcaaatacaggtattgttatttacaagtgatggatggcactgcatcatgtcctggcaaatgtgctgtcgtctgcagtcctctgtagaagtaatccagccttaatgatttgagaccttaccactgctcttgactacaaaatatttgcagagaaatggggtgagactgcttgtttgatgagttattgcaaatgcagattagcagagttagaattagcgagattctttctgtttcatctaacagcagtcatagcattccacagcagaaaagaggacctaattataagcctcgctattactcatttctgccagtctttg

SEQ ID NO: 12427 - DNA, 2094 bp, Homo sapiens
tgagttggttccggctttattttgttattttgctcttttcgtcagttttttcctaatgcttccgtcctgcctgttgtgctagtgaattagtaactttcttgaatctgcgttctttcttcctctgaatatgcaaggtattagctctacttctgttatactactgggtactatatgtatgtactatgtacatttgtagaaatccaaagttggctcggcttcccaaagtgtgagtcactgcacccagccttgctgaattttcttaaaacttttttttttctgacatcttgagttaaaagtcttttgttattctttgagacgggatctggctctctcacccaacctggagtgcaatggtgcaatcacagctccctgtaccctctgcctcctgggctcctgcccaagcctccagagtagcagacactgttggcagatcacaccagttaacttttttaattttttgtagagatggatggagtcttgctgtgttgcctaggccggtctgaactcctgggctgaagcagtccacctgcctcagtctcccaaagtgccaggattccaggcgtgagcccacgtgcccgccaagtctttgtaagcgcatttccggctgtgtttcctgtgtgctcctggctgctccctgcggactttgatgaataatattttcactggcattcatttctaaagaagctgtaatttcatcagagttcctttttaatcgagaagtttgttctgaaacatttgagtaacgtggcctttttgggttccatccactcctctttctagtctccttcccgggcggtcagggagtgttgtctacacggatctctgccttgggggattgagatcttcttgcttgttcacttgggtgcagattttccaggggtcctggggtgattttcctttggctgagtttgctggttggtgtggtgggtaaacaagcggaccccgggggccagttgcccacgtcctgctctgcctttagccagggtgtggcccttcacaagtgacctacctctgcctcagtttctctgtctgtggcgtgaggtggtggtgagattgcctcgaggtttttatgaagattaaatgatttcctatttgtgaggcactttgaggtgttaagttgaatgaatgagaaacaagcaggcagcctgggagattgtgaactccgacatccaagtccggtcgtttttcttgtggattcttgttttctccgtgtctctgtaacctcgcggtgttgcttaggagccgtgctgctggctatgcaggctgatggttcttacgtagttttgatgacttgcaccttttgccagtgtggattctttttttttcttttttcctgttcagtgtgttttcgctctaacccccgattctcttgtactaacatcgctacagttgctgttggtctctgcttccaccctccctgtcatttgtttcagctgtgttacggaggcctttgctttgcttttttgcacacatctcaggttctctttgataggagagtttaacccgttgtctttgttgtgagaatacattttttcccctctccatgagggcttggatccggttttggtgtcttctttctctgctctaatggtttgggaattttgcattctctttctgttcttcttgtggctgcccttaaacttggattccgtgtccgtttgtgggattatccgcgtctataacttcgtgatgagttcctgatctccgtcttccaaaacttgggaagtcatccgagggtttgttccagattgttttgggtaattttaaaattttatttcacactaattttattctaggaatcgcttcttcatcttactgaagttttgatgcgacgttatagttatttaggcttaacgggaggttgcatgggttttgtggccgtttctggtgtcttcctggtgtgtttggatttgtgcttcgccacgtccgcacgtcacttctgagcccagtgcggtggcccctgagctcctgccggtcacgggctgtgtgttgtccccctcacaccagagacagtcgtttcttctcttaactcttaagccctcctcagtcactcggatgaactgattaaattctgtgcttttaatactaagcatt

SEQ ID NO: 12428 - DNA, 2364 bp, Homo sapiens
tgagttggttccggctttattttgttattttgctcttttcgtcagttttttcctaatgcttccgtcctgcctgttgtgctagtgaattagtaactttcttgaatctgcgttctttcttcctctgaatatgcaaggtattagctctacttctgttatactactgggtactatatgtatgtactatgtacatttgtagaaatccaaagttggctcggcttcccaaagtgtgagtcactgcacccagccttgctgaattttcttaaaacttttttttttctgacatcttgagttaaaagtcttttgttattctttgagacgggatctggctctctcacccaacctggagtgcaatggtgcaatcacagctccctgtaccctctgcctcctgggctcctgcccaagcctccagagtagcagacactgttggcagatcacaccagttaacttttttaattttttgtagagatggatggagtcttgctgtgttgcctaggccggtctgaactcctgggctgaagcagtccacctgcctcagtctcccaaagtgccaggattccaggcgtgagcccacgtgcccgccaagtctttgtaagcgcatttccggctgtgtttcctgtgtgctcctggctgctccctgcggactttgatgaataatattttcactggcattcatttctaaagaagctgtaatttcatcagagttcctttttaatcgagaagtttgttctgaaacatttgagtaacgtggcctttttgggttccatccactcctctttctagtctccttcccgggcggtcagggagtgttgtctacacggatctctgccttgggggattgagatcttcttgcttgttcacttgggtgcagattttccaggggtcctggggtgattttcctttggctgagtttgctggttggtgtggtgggtaaacaagcggaccccgggggccagttgcccacgtcctgctctgcctttagccagggtgtggcccttcacaagtgacctacctctgcctcagtttctctgtctgtggcgtgaggtggtggtgagattgcctcgaggtttttatgaagattaaatgatttcctatttgtgaggcactttgaggtgttaagttgaatgaatgagaaacaagcaggcagcctgggagattgtgaactccgacatccaagtccggtcgtttttcttgtggattcttgttttctccgtgtctctgtaacctcgcggtgttgcttaggagccgtgctgctggctatgcaggctgatggttcttacgtagttttgatgacttgcaccttttgccagtgtggattctttttttttcttttttcctgttcagtgtgttttcgctctaacccccgattctcttgtactaacatcgctacagttgctgttggtctctgcttccaccctccctgtcatttgtttcagctgtgttacggaggcctttgctttgcttttttgcacacatctcaggttctctttgataggagagtttaacccgttgtctttgttgtgagaatacattttttcccctctccatgagggcttggatccggttttggtgtcttctttctctgctctaatggtttgggaattttgcattctctttctgttcttcttgtggctgcccttaaacttggattccgtgtccgtttgtgggattatccgcgtctataacttcgtgatgagttcctgatctccgtcttccaaaacttgggaagtcatccgagggtttgttccagattgttttgggtaattttaaaattttatttcacactaattttattctaggaatcgcttcttcatcttactgaagttttgatgcgacgttatagttatttaggcttaacgggaggttgcatgggttttgtggccgtttctggtgtcttcctggtgtgtttggatttgtgcttcgccacgtccgcacgtcacttctgagcccagtgcggtggcccctgagctcctgccggtcacgggctgtgtgttgtccccctcacaccagagacagtcgtttcttctcttaactcttaagccctcctcagtcactcggatgaactgattaaattctgtgcttttaatactaagcattaaaaaaaaaaaaacatatgagggaagcacctgccacccaggcccatgtttctgctctcagccttgtgccctcccccggtggcccctccaaagggcatgaagctgtggatgctgtgcctgtgcctggaggctctggccctcccacccctggctgggctccagctctaggtttgttcagcagccaactcagagcagccgaggctcagggtggcatcagccggccgcgctggcttcacagccgacctcttctccatcatctgacgggcgcagg

SEQ ID NO: 12429 - DNA, 443 bp, Homo sapiens
tatcctgcttccttcaaacctcccatcttttccaaacttaggatctccaggtctctcagtgagtccctctgtgccttggtttctagaatctgttcttaacaaatggttagagaaaataaaaataaatgttccaggtgagaacacacacacaaacttgagccaaagccggaagatgagagggcatgcagtgcagatacttaaggagggaatcccagagagggaggagcatgtgcaaaggccctgaggtgggggtgtgctgggattttcatgggagagcagaaaggaccctgtggctggagtggggagggtggggtgaacagcagatgtagggaggacgcagactctggatcttacccccggggacatggggaagccagtggggtttgggccacagaaacttccgaatcttgtgttttgaagggagcactcagccactggctgct

SEQ ID NO: 12430 - DNA, 523 bp, Homo sapiens
aagaaaatttcaacattttactttttatacatatagaacattactaagctcagcccatttaaaaatctataaagcagttaacccagaaaacaaaacttataaaacatattaataaaagtgaaaacatacaaattagtatctctgtaaaatagtaacagctgtttttgtttgtttgtttttgagacagtctcactctatcacaggtcactgtaacctctgcctcctgggctcaagtgatcctcccacctcaccttccctaatagctgggactacaggcatgtgccaccgtgtccggccaatttctgtattttttatagggacgaggttttgccacgttgcccaggttggtcttgaactccaggctcaaacaatctgcctgcctgggtctctcaaagtgctgggatgagccactgcacccagccccattaaaagtttcaaatacctacaggtcacatatcttggcaatatactatttagccaccaatccacatatataacgtactctcatcatgctccaaaaagg

SEQ ID NO: 12431 - DNA, 500 bp, Homo sapiens
gcgatccccacgcctcatccagtggactgaattctctgtttgtctgttgtggaaataaaaccttctggggatgaatcaaaactatctgacaattacttgaaatgggtgaatagctaaatgtaatgtgccttggatattataactaaaaggtgctataatccagttatattttttatcttttaaggattggttctgaggagcactaccagtaaatattgcaaaaattacataaagctccaaaagctactctgtgtaaacttcttgagtgggaattctcaaccataatatctggaatatgactgataattctggatgttaactgattttatgttctgatgttttgactggttttgggaaaaattttgggaaaaaagagttttcctcgtaaatacccaacaactgggtctctgggtaaaaaggcctaatttatagagattgctaatttccatggtgtaaatatttccacaatgcagattccttccttcctttttttttttttt

SEQ ID NO: 12432 - DNA, 2961 bp, Homo sapiens
ccagagcatattctactgcttcacttttaggaaaaaaaaaaaaagaagcaaatgataccaagacaagctcataacagagatccaatcagcagatgtgtacggatgaaaatacagcttgaaggcaggtccacgcctcctcctggaagccttcccttgactgactcctcgctgagttcacagtgagatgagtcagaaaccggccaaggagggtcccagactctccaaaaaccagaagtactccgaacacttcagcatacactgctgcccgccgttcaccttcctcaattccaagaaggagatagtggatcggaaatacagcatctgtaagagcggctgcttctaccagaagaaagaggaggactggatctgctgcgcctgccagaagaccagaaccagccgccgtgccaagtcccctcagaggcccaagcaacagccagctgcgccccccgcggtggtcagagcgccagccaagccacggtcccctccgaggtctgagcgtcagccacggtcccctccgaggtctgagcgtcagccacggtcccctccgaggtctgagcgtcagccacggtcccctccgaggtctgagcgtcagccacgtccccgcccagaggtccgaccaccgccagccaagcagcgtccccctcagaagtccaagcaacagccgcgcagcagccccctcagagggccaggcgccagccgtggggggtcccccgtcaaagcttctaggttctgattgaaaaggaagatcaggccaaccccaaagaagaagtgaccaaggaggagtttaaactgaatgaacaacctcggctcctggactcattgcttcacaacccatctacccctggatgaagttatctggcttcaaatattatgcaggggcaaacacctgctgatgtggcaactgctgatgctcatggtccccatggcatgggggcctcagggcagcctgcctggagtactttgaagatgtcatcccattgtcttctgacctctataattgccactgagagatctgctgtcagtctgcttatccttccacggactcaagtttcttcaatctgaagatacatgtctttctccagggacatgtggaaaaaaaaaagatgttatacaaccatcaaagtggcaaaaataaaaaaaatcaagtattggcaaagatgtggggaaaattctcataagctactgatgagaatttataaattattatgacacctttgggttgcaatctggggatactggcaaagcagaaaattgtacaacctgtgatcaagcaataataattttaggcacccatcctagagaaaacttgaattcatagaaaaagtaggtacacgtaaatctgttcaaggaatcattgtttggcattgaaaataggagagagatccatgagaaattaccaaaatgtccaccaatagaatgagtgaatcaccctgtggtatatttataaataaaaatattaaatagaaggtaaaacaaatcagacatacacacattagatagataaatttagaggacaaaataaggaacatgaaaagcaaatagtagatggcaaatgtaatataatatactatgcataaattttaacaacacacaatattatattgcatattgcccaataagcagaagccataaggtctcacacttttcttataattcaatagaataaaaatgacaacaaagtaaaagggtatcccaaaaataaaactatccttttggaaaaaaaaagatttaaaataattcctggtttgaagaaataacaaattaaaagctatatataaacggttaacaatattaggtggacatatttgtttgaagagataggtgaaagatagttgaaaagcctgggggtatattcaaggttatatgtcttagaaaacaaaaatacttgtttgggttcagttttggatctgggcttgttcttgtggcttctgatgatttctgacttggggaaaaatggggaagagttgaaatacgtccttccacccaaacctttgtttagtaataggtaggaaaatgaagaagaaaatagaatgttgcagaatgtggagggatgtaaaatggacagtactagggtagaggggaagtcagattagaggaaagaaagagcatcaggaacagtcttgtgctaggagctggtgtggccaagcacagtcggatgcccaaagatccaacaaggccatggctctgtgtccttgagtgggcacaaccattcctagccaagtttaaagaggcaagtaaaaatataggggcaatgtcagatgaagtcttgttcagggtatggggctaggatgagagagaatgccacagagtatgaaggaagagtgatagatccagatgagatacagctcagagtgccacgcccccagaaagaggaatcaggcaagtactgtcccaaggcagctggagggtgagggctgagtgccctggcttcctcacttggggagaccatgggtctctgtagaaattccaatataaaggcagggaaatttgactgcatggagtcttcaggtagaaatgtttctcttgcctaaattcaggtgctaaataaacaacaaaatggtaacctctactatgaagtgtttccaatgatgggatatctgaggccattacattcctgggaataacatggtgaggtgcagggtggtggtggtggtgaaacatacgacagaccactgtaagtgagaacaaattactggcccagcccaacccacaccaaataagaaatttaatatccctttggcctgttttagattttggcaaagccaggcccatagtgcttgctgggctctctcttccacatcatccagaagacacacatttgctatggaatgattgtggaggtgagagtatagtgcatattaattcatgcaaaaagttagatattagcccagaaatgttagtaacaagaaactactgaattctctgtttgtctgttgtggaaataaaaccttctggggatga

SEQ ID NO: 12433 - DNA, 3387 bp, Homo sapiens
ccagagcatattctactgcttcacttttaggaaaaaaaaaaaaagaagcaaatgataccaagacaagctcataacagagatccaatcagcagatgtgtacggatgaaaatacagcttgaaggcaggtccacgcctcctcctggaagccttcccttgactgactcctcgctgagttcacagtgagatgagtcagaaaccggccaaggagggtcccagactctccaaaaaccagaagtactccgaacacttcagcatacactgctgcccgccgttcaccttcctcaattccaagaaggagatagtggatcggaaatacagcatctgtaagagcggctgcttctaccagaagaaagaggaggactggatctgctgcgcctgccagaagaccagaaccagccgccgtgccaagtcccctcagaggcccaagcaacagccagctgcgccccccgcggtggtcagagcgccagccaagccacggtcccctccgaggtctgagcgtcagccacggtcccctccgaggtctgagcgtcagccacggtcccctccgaggtctgagcgtcagccacggtcccctccgaggtctgagcgtcagccacgtccccgcccagaggtccgaccaccgccagccaagcagcgtccccctcagaagtccaagcaacagccgcgcagcagccccctcagagggccaggcgccagccgtggggggtcccccgtcaaagcttctaggttctgattgaaaaggaagatcaggccaaccccaaagaagaagtgaccaaggaggagtttaaactgaatgaacaacctcggctcctggactcattgcttcacaacccatctacccctggatgaagttatctggcttcaaatattatgcaggggcaaacacctgctgatgtggcaactgctgatgctcatggtccccatggcatgggggcctcagggcagcctgcctggagtactttgaagatgtcatcccattgtcttctgacctctataattgccactgagagatctgctgtcagtctgcttatccttccacggactcaagtttcttcaatctgaagatacatgtctttctccagggacatgtggaaaaaaaaaagatgttatacaaccatcaaagtggcaaaaataaaaaaaatcaagtattggcaaagatgtggggaaaattctcataagctactgatgagaatttataaattattatgacacctttgggttgcaatctggggatactggcaaagcagaaaattgtacaacctgtgatcaagcaataataattttaggcacccatcctagagaaaacttgaattcatagaaaaagtaggtacacgtaaatctgttcaaggaatcattgtttggcattgaaaataggagagagatccatgagaaattaccaaaatgtccaccaatagaatgagtgaatcaccctgtggtatatttataaataaaaatattaaatagaaggtaaaacaaatcagacatacacacattagatagataaatttagaggacaaaataaggaacatgaaaagcaaatagtagatggcaaatgtaatataatatactatgcataaattttaacaacacacaatattatattgcatattgcccaataagcagaagccataaggtctcacacttttcttataattcaatagaataaaaatgacaacaaagtaaaagggtatcccaaaaataaaactatccttttggaaaaaaaaagatttaaaataattcctggtttgaagaaataacaaattaaaagctatatataaacggttaacaatattaggtggacatatttgtttgaagagataggtgaaagatagttgaaaagcctgggggtatattcaaggttatatgtcttagaaaacaaaaatacttgtttgggttcagttttggatctgggcttgttcttgtggcttctgatgatttctgacttggggaaaaatggggaagagttgaaatacgtccttccacccaaacctttgtttagtaataggtaggaaaatgaagaagaaaatagaatgttgcagaatgtggagggatgtaaaatggacagtactagggtagaggggaagtcagattagaggaaagaaagagcatcaggaacagtcttgtgctaggagctggtgtggccaagcacagtcggatgcccaaagatccaacaaggccatggctctgtgtccttgagtgggcacaaccattcctagccaagtttaaagaggcaagtaaaaatataggggcaatgtcagatgaagtcttgttcagggtatggggctaggatgagagagaatgccacagagtatgaaggaagagtgatagatccagatgagatacagctcagagtgccacgcccccagaaagaggaatcaggcaagtactgtcccaaggcagctggagggtgagggctgagtgccctggcttcctcacttggggagaccatgggtctctgtagaaattccaatataaaggcagggaaatttgactgcatggagtcttcaggtagaaatgtttctcttgcctaaattcaggtgctaaataaacaacaaaatggtaacctctactatgaagtgtttccaatgatgggatatctgaggccattacattcctgggaataacatggtgaggtgcagggtggtggtggtggtgaaacatacgacagaccactgtaagtgagaacaaattactggcccagcccaacccacaccaaataagaaatttaatatccctttggcctgttttagattttggcaaagccaggcccatagtgcttgctgggctctctcttccacatcatccagaagacacacatttgctatggaatgattgtggaggtgagagtatagtgcatattaattcatgcaaaaagttagatattagcccagaaatgttagtaacaagaaactactgaattctctgtttgtctgttgtggaaataaaaccttctggggatgaatcaaaactatctgacaattacttgaaatgggtgaatagctaaatgtaatgtgccttggatattataactaaaaggtgctataatccagttatattttttatcttttaaggattggttctgaggagcactaccagtaaatattgcaaaaattacataaagctccaaaagctactctgtgtaaacttcttgagtgggaattctcaaccataatatctggaatatgactgataattctggatgttaactgattttatgttctgatgttttgactggttttgggaaaaattttgggaaaaaagagttttcctcgtaaatacccaacaactgggtctctgggtaaaaaggcctaatttatagagattgctaatttccatggtgtaaatatttccacaatgcagattccttccttcctttttttttttttt

SEQ ID NO: 12434 - DNA, 3042 bp, Homo sapiens
atcaaaaacaccttgtgtaatgaaaaacccagatctataacctctccctatatattctgcatgcattgaagtaggctcaaaccctcagggacctggtatagacgcagaatctgtttcacacaacaactgctatttgaaggaaaaaaaaaaaaagaagcaaatgataccaagacaagctcataacagagatccaatcagcagatgtgtacggatgaaaatacagtgagatgagtcagaaaccggccaaggagggtcccagactctccaaaaaccagaagtactccgaacacttcagcatacactgctgcccgccgttcaccttcctcaattccaagaaggagatagtggatcggaaatacagcatctgtaagagcggctgcttctaccagaagaaagaggaggactggatctgctgcgcctgccagaagaccagaaccagccgccgtgccaagtcccctcagaggcccaagcaacagccagctgcgccccccgcggtggtcagagcgccagccaagccacggtcccctccgaggtctgagcgtcagccacggtcccctccgaggtctgagcgtcagccacggtcccctccgaggtctgagcgtcagccacggtcccctccgaggtctgagcgtcagccacgtccccgcccagaggtccgaccaccgccagccaagcagcgtccccctcagaagtccaagcaacagccgcgcagcagccccctcagagggccaggcgccagccgtggggggtcccccgtcaaagcttctaggttctggtaacaccatctcttcccttttgttccccagccctaagattgaaaaggaagatcaggccaaccccaaagaagaagtgaccaaggaggagtttaaactgaatgaacaacctcggctcctggactcattgcttcacaacccatctacccctggatgaagttatctggcttcaaatattatgcaggggcaaacacctgctgatgtggcaactgctgatgctcatggtccccatggcatgggggcctcagggcagcctgcctggagtactttgaagatgtcatcccattgtcttctgacctctataattgccactgagagatctgctgtcagtctgcttatccttccacggactcaagtttcttcaatctgaagatacatgtctttctccagggacatgtggaaaaaaaaaagatgttatacaaccatcaaagtggcaaaaataaaaaaaatcaagtattggcaaagatgtggggaaaattctcataagctactgatgagaatttataaattattatgacacctttgggttgcaatctggggatactggcaaagcagaaaattgtacaacctgtgatcaagcaataataattttaggcacccatcctagagaaaacttgaattcatagaaaaagtaggtacacgtaaatctgttcaaggaatcattgtttggcattgaaaataggagagagatccatgagaaattaccaaaatgtccaccaatagaatgagtgaatcaccctgtggtatatttataaataaaaatattaaatagaaggtaaaacaaatcagacatacacacattagatagataaatttagaggacaaaataaggaacatgaaaagcaaatagtagatggcaaatgtaatataatatactatgcataaattttaacaacacacaatattatattgcatattgcccaataagcagaagccataaggtctcacacttttcttataattcaatagaataaaaatgacaacaaagtaaaagggtatcccaaaaataaaactatccttttggaaaaaaaaagatttaaaataattcctggtttgaagaaataacaaattaaaagctatatataaacggttaacaatattaggtggacatatttgtttgaagagataggtgaaagatagttgaaaagcctgggggtatattcaaggttatatgtcttagaaaacaaaaatacttgtttgggttcagttttggatctgggcttgttcttgtggcttctgatgatttctgacttggggaaaaatggggaagagttgaaatacgtccttccacccaaacctttgtttagtaataggtaggaaaatgaagaagaaaatagaatgttgcagaatgtggagggatgtaaaatggacagtactagggtagaggggaagtcagattagaggaaagaaagagcatcaggaacagtcttgtgctaggagctggtgtggccaagcacagtcggatgcccaaagatccaacaaggccatggctctgtgtccttgagtgggcacaaccattcctagccaagtttaaagaggcaagtaaaaatataggggcaatgtcagatgaagtcttgttcagggtatggggctaggatgagagagaatgccacagagtatgaaggaagagtgatagatccagatgagatacagctcagagtgccacgcccccagaaagaggaatcaggcaagtactgtcccaaggcagctggagggtgagggctgagtgccctggcttcctcacttggggagaccatgggtctctgtagaaattccaatataaaggcagggaaatttgactgcatggagtcttcaggtagaaatgtttctcttgcctaaattcaggtgctaaataaacaacaaaatggtaacctctactatgaagtgtttccaatgatgggatatctgaggccattacattcctgggaataacatggtgaggtgcagggtggtggtggtggtgaaacatacgacagaccactgtaagtgagaacaaattactggcccagcccaacccacaccaaataagaaatttaatatccctttggcctgttttagattttggcaaagccaggcccatagtgcttgctgggctctctcttccacatcatccagaagacacacatttgctatggaatgattgtggaggtgagagtatagtgcatattaattcatgcaaaaagttagatattagcccagaaatgttagtaacaagaaactactgaattctctgtttgtctgttgtggaaataaaaccttctggggatga

SEQ ID NO: 12435 - DNA, 2907 bp, Homo sapiens
ccagagcatattctactgcttcacttttaggaaaaaaaaaaaaagaagcaaatgataccaagacaagctcataacagagatccaatcagcagatgtgtacggatgaaaatacagcttgaaggcaggtccacgcctcctcctggaagccttcccttgactgactcctcgctgagttcacagtgagatgagtcagaaaccggccaaggagggtcccagactctccaaaaaccagaagtactccgaacacttcagcatacactgctgcccgccgttcaccttcctcaattccaagaaggagatagtggatcggaaatacagcatctgtaagagcggctgcttctaccagaagaaagaggaggactggatctgctgcgcctgccagaagaccagaaccagccgccgtgccaagtcccctcagaggcccaagcaacagccagctgcgccccccgcggtggtcagagcgccagccaagccacggtcccctccgaggtctgagcgtcagccacggtcccctccgaggtctgagcgtcagccacggtcccctccgaggtctgagcgtcagccacggtcccctccgaggtctgagcgtcagccacgtccccgcccagaggtccgaccaccgccagccaagcagcgtccccctcagaagtccaagcaacagccgcgcagcagccccctcagagggccaggcgccagccgtggggggtcccccgtcaaagcttctaggttctgattgaaaaggaagatcaggccaaccccaaagaagaagtgaccaaggaggagtttaaactgaatgaacaacctcggctcctggactcattgcttcacaacccatctacccctggatgaagttatctggcttcaaatattatgcaggggcaaacacctgctgatgtggcaactgctgatgctcatggtccccatggcatgggggcctcagggcagcctgcctggagtactttgaagatgtcatcccattgtcttctgacctctataattgccactgagagatctgctgtcagtctgcttatccttccacggactcaagtttcttcaatctgaagatacatgtctttctccagggacatgtggaaaaaaaaaagatgttatacaaccatcaaagtggcaaaaataaaaaaaatcaagtattggcaaagatgtggggaaaattctcataagctactgatgagaatttataaattattatgacacctttgggttgcaatctggggatactggcaaagcagaaaattgtacaacctgtgatcaagcaataataattttaggcacccatcctagagaaaacttgaattcatagaaaaagtaggtacacgtaaatctgttcaaggaatcattgtttggcattgaaaataggagagagatccatgagaaattaccaaaatgtccaccaatagaatgagtgaatcaccctgtggtatatttataaataaaaatattaaatagaaggtaaaacaaatcagacatacacacattagatagataaatttagaggacaaaataaggaacatgaaaagcaaatagtagatggcaaatgtaatataatatactatgcataaattttaacaacacacaatattatattgcatattgcccaataagcagaagccataaggtctcacacttttcttataattcaatagaataaaaatgacaacaaagtaaaagggtatcccaaaaataaaactatccttttggaaaaaaaaagatttaaaataattcctggtttgaagaaataacaaattaaaagctatatataaacggttaacaatattaggtggacatatttgtttgaagagataggtgaaagatagttgaaaagcctgggggtatattcaaggttatatgtcttagaaaacaaaaatacttgtttgggttcagttttggatctgggcttgttcttgtggcttctgatgatttctgacttggggaaaaatggggaagagttgaaatacgtccttccacccaaacctttgtttagtaataggtaggaaaatgaagaagaaaatagaatgttgcagaatgtggagggatcatcaggaacagtcttgtgctaggagctggtgtggccaagcacagtcggatgcccaaagatccaacaaggccatggctctgtgtccttgagtgggcacaaccattcctagccaagtttaaagaggcaagtaaaaatataggggcaatgtcagatgaagtcttgttcagggtatggggctaggatgagagagaatgccacagagtatgaaggaagagtgatagatccagatgagatacagctcagagtgccacgcccccagaaagaggaatcaggcaagtactgtcccaaggcagctggagggtgagggctgagtgccctggcttcctcacttggggagaccatgggtctctgtagaaattccaatataaaggcagggaaatttgactgcatggagtcttcaggtagaaatgtttctcttgcctaaattcaggtgctaaataaacaacaaaatggtaacctctactatgaagtgtttccaatgatgggatatctgaggccattacattcctgggaataacatggtgaggtgcagggtggtggtggtggtgaaacatacgacagaccactgtaagtgagaacaaattactggcccagcccaacccacaccaaataagaaatttaatatccctttggcctgttttagattttggcaaagccaggcccatagtgcttgctgggctctctcttccacatcatccagaagacacacatttgctatggaatgattgtggaggtgagagtatagtgcatattaattcatgcaaaaagttagatattagcccagaaatgttagtaacaagaaactactgaattctctgtttgtctgttgtggaaataaaaccttctggggatga

SEQ ID NO: 12436 - DNA, 2902 bp, Homo sapiens
ccagagcatattctactgcttcacttttaggaaaaaaaaaaaaagaagcaaatgataccaagacaagctcataacagagatccaatcagcagatgtgtacggatgaaaatacagcttgaaggcaggtccacgcctcctcctggaagccttcccttgactgactcctcgctgagttcacagtgagatgagtcagaaaccggccaaggagggtcccagactctccaaaaaccagaagtactccgaacacttcagcatacactgctgcccgccgttcaccttcctcaattccaagaaggagatagtggatcggaaatacagcatctgtaagagcggctgcttctaccagaagaaagaggaggactggatctgctgcgcctgccagaagaccagaaccagccgccgtgccaagtcccctcagaggcccaagcaacagccagctgcgccccccgcggtggtcagagcgccagccaagccacggtcccctccgaggtctgagcgtcagccacggtcccctccgaggtctgagcgtcagccacggtcccctccgaggtctgagcgtcagccacggtcccctccgaggtctgagcgtcagccacgtccccgcccagaggtccgaccaccgccagccaagcagcgtccccctcagaagtccaagcaacagccgcgcagcagccccctcagagggccaggcgccagccgtggggggtcccccgtcaaagcttctaggttctgattgaaaaggaagatcaggccaaccccaaagaagaagtgaccaaggaggagtttaaactgaatgaacaacctcggctcctggactcattgcttcacaacccatctacccctggatgaagttatctggcttcaaatattatgcaggggcaaacacctgctgatgtggcaactgctgatgctcatggtccccatggcatgggggcctcagggcagcctgcctggagtactttgaagatgtcatcccattgtcttctgacctctataattgccactgagagatctgctgtcagtctgcttatccttccacggactcaagtttcttcaatctgaagatacatgtctttctccagggacatgtggaaaaaaaaaagatgttatacaaccatcaaagtggcaaaaaatttataaattattatgacacctttgggttgcaatctggggatactggcaaagcagaaaattgtacaacctgtgatcaagcaataataattttaggcacccatcctagagaaaacttgaattcatagaaaaagtaggtacacgtaaatctgttcaaggaatcattgtttggcattgaaaataggagagagatccatgagaaattaccaaaatgtccaccaatagaatgagtgaatcaccctgtggtatatttataaataaaaatattaaatagaaggtaaaacaaatcagacatacacacattagatagataaatttagaggacaaaataaggaacatgaaaagcaaatagtagatggcaaatgtaatataatatactatgcataaattttaacaacacacaatattatattgcatattgcccaataagcagaagccataaggtctcacacttttcttataattcaatagaataaaaatgacaacaaagtaaaagggtatcccaaaaataaaactatccttttggaaaaaaaaagatttaaaataattcctggtttgaagaaataacaaattaaaagctatatataaacggttaacaatattaggtggacatatttgtttgaagagataggtgaaagatagttgaaaagcctgggggtatattcaaggttatatgtcttagaaaacaaaaatacttgtttgggttcagttttggatctgggcttgttcttgtggcttctgatgatttctgacttggggaaaaatggggaagagttgaaatacgtccttccacccaaacctttgtttagtaataggtaggaaaatgaagaagaaaatagaatgttgcagaatgtggagggatgtaaaatggacagtactagggtagaggggaagtcagattagaggaaagaaagagcatcaggaacagtcttgtgctaggagctggtgtggccaagcacagtcggatgcccaaagatccaacaaggccatggctctgtgtccttgagtgggcacaaccattcctagccaagtttaaagaggcaagtaaaaatataggggcaatgtcagatgaagtcttgttcagggtatggggctaggatgagagagaatgccacagagtatgaaggaagagtgatagatccagatgagatacagctcagagtgccacgcccccagaaagaggaatcaggcaagtactgtcccaaggcagctggagggtgagggctgagtgccctggcttcctcacttggggagaccatgggtctctgtagaaattccaatataaaggcagggaaatttgactgcatggagtcttcaggtagaaatgtttctcttgcctaaattcaggtgctaaataaacaacaaaatggtaacctctactatgaagtgtttccaatgatgggatatctgaggccattacattcctgggaataacatggtgaggtgcagggtggtggtggtggtgaaacatacgacagaccactgtaagtgagaacaaattactggcccagcccaacccacaccaaataagaaatttaatatccctttggcctgttttagattttggcaaagccaggcccatagtgcttgctgggctctctcttccacatcatccagaagacacacatttgctatggaatgattgtggaggtgagagtatagtgcatattaattcatgcaaaaagttagatattagcccagaaatgttagtaacaagaaactactgaattctctgtttgtctgttgtggaaataaaaccttctggggatga

SEQ ID NO: 12437 - DNA, 2662 bp, Homo sapiens
atcaaaaacaccttgtgtaatgaaaaacccagatctataacctctccctatatattctgcatgcattgaagtaggctcaaaccctcagggacctggtatagacgcagaatctgtttcacacaacaactgctatttgaaggaaaaaaaaaaaaagaagcaaatgataccaagacaagctcataacagagatccaatcagcagatgtgtacggatgaaaatacagtgagatgagtcagaaaccggccaaggagggtcccagactctccaaaaaccagaagtactccgaacacttcagcatacactgctgcccgccgttcaccttcctcaattccaagaaggagatagtggatcggaaatacagcatctgtaagagcggctgcttctaccagaagaaagaggaggactggatctgctgcgcctgccagaagaccagattgaaaaggaagatcaggccaaccccaaagaagaagtgaccaaggaggagtttaaactgaatgaacaacctcggctcctggactcattgcttcacaacccatctacccctggatgaagttatctggcttcaaatattatgcaggggcaaacacctgctgatgtggcaactgctgatgctcatggtccccatggcatgggggcctcagggcagcctgcctggagtactttgaagatgtcatcccattgtcttctgacctctataattgccactgagagatctgctgtcagtctgcttatccttccacggactcaagtttcttcaatctgaagatacatgtctttctccagggacatgtggaaaaaaaaaagatgttatacaaccatcaaagtggcaaaaataaaaaaaatcaagtattggcaaagatgtggggaaaattctcataagctactgatgagaatttataaattattatgacacctttgggttgcaatctggggatactggcaaagcagaaaattgtacaacctgtgatcaagcaataataattttaggcacccatcctagagaaaacttgaattcatagaaaaagtaggtacacgtaaatctgttcaaggaatcattgtttggcattgaaaataggagagagatccatgagaaattaccaaaatgtccaccaatagaatgagtgaatcaccctgtggtatatttataaataaaaatattaaatagaaggtaaaacaaatcagacatacacacattagatagataaatttagaggacaaaataaggaacatgaaaagcaaatagtagatggcaaatgtaatataatatactatgcataaattttaacaacacacaatattatattgcatattgcccaataagcagaagccataaggtctcacacttttcttataattcaatagaataaaaatgacaacaaagtaaaagggtatcccaaaaataaaactatccttttggaaaaaaaaagatttaaaataattcctggtttgaagaaataacaaattaaaagctatatataaacggttaacaatattaggtggacatatttgtttgaagagataggtgaaagatagttgaaaagcctgggggtatattcaaggttatatgtcttagaaaacaaaaatacttgtttgggttcagttttggatctgggcttgttcttgtggcttctgatgatttctgacttggggaaaaatggggaagagttgaaatacgtccttccacccaaacctttgtttagtaataggtaggaaaatgaagaagaaaatagaatgttgcagaatgtggagggatgtaaaatggacagtactagggtagaggggaagtcagattagaggaaagaaagagcatcaggaacagtcttgtgctaggagctggtgtggccaagcacagtcggatgcccaaagatccaacaaggccatggctctgtgtccttgagtgggcacaaccattcctagccaagtttaaagaggcaagtaaaaatataggggcaatgtcagatgaagtcttgttcagggtatggggctaggatgagagagaatgccacagagtatgaaggaagagtgatagatccagatgagatacagctcagagtgccacgcccccagaaagaggaatcaggcaagtactgtcccaaggcagctggagggtgagggctgagtgccctggcttcctcacttggggagaccatgggtctctgtagaaattccaatataaaggcagggaaatttgactgcatggagtcttcaggtagaaatgtttctcttgcctaaattcaggtgctaaataaacaacaaaatggtaacctctactatgaagtgtttccaatgatgggatatctgaggccattacattcctgggaataacatggtgaggtgcagggtggtggtggtggtgaaacatacgacagaccactgtaagtgagaacaaattactggcccagcccaacccacaccaaataagaaatttaatatccctttggcctgttttagattttggcaaagccaggcccatagtgcttgctgggctctctcttccacatcatccagaagacacacatttgctatggaatgattgtggaggtgagagtatagtgcatattaattcatgcaaaaagttagatattagcccagaaatgttagtaacaagaaactactgaattctctgtttgtctgttgtggaaataaaaccttctggggatga

SEQ ID NO: 12438 - DNA, 1196 bp, Homo sapiens
  misc_feature (1149)..(1149): n is a, c, g, or t
ccagagcatattctactgcttcacttttaggaaaaaaaaaaaaagaagcaaatgataccaagacaagctcataacagagatccaatcagcagatgtgtacggatgaaaatacagcttgaaggcaggtccacgcctcctcctggaagccttcccttgactgactcctcgctgagttcacagtgagatgagtcagaaaccggccaaggagggtcccagactctccaaaaaccagaagtactccgaacacttcagcatacactgctgcccgccgttcaccttcctcaattccaagaaggagatagtggatcggaaatacagcatctgtaagagcggctgcttctaccagaagaaagaggaggactggatctgctgcgcctgccagaagaccagaaccagccgccgtgccaagtcccctcagaggcccaagcaacagccagctgcgccccccgcggtggtcagagcgccagccaagccacggtcccctccgaggtctgagcgtcagccacggtcccctccgaggtctgagcgtcagccacggtcccctccgaggtctgagcgtcagccacggtcccctccgaggtctgagcgtcagccacgtccccgcccagaggtccgaccaccgccagccaagcagcgtccccctcagaagtccaagcaacagccgcgcagcagccccctcagagggccaggcgccagccgtggggggtcccccgtcaaagcttctaggttctgattgaaaaggaagatcaggccaaccccaaagaagaagtgaccaaggaggagtttaaactgaatgaacaacctcggctcctggactcattgcttcacaacccatctacccctggatgaagttatctggcttcaaatattatgcaggggcaaacacctgctgatgtggcaactgctgatgctcatggtccccatggcatgggggcctcagggcagcctgcctggagtactttgaagatgtcatcccattgtcttctgacctctataattgccactgagagatctgctgtcagtctgcttatccttccacggactcaagtttcttcaatctgaagatacatgtctttctccagggacatgtggaaaaaaaaaagatgttatacaaccatcaaagtggcaaaaataaaaaaaatcaaggtnttttgggccaaaggattttgggggaaaaatttttccattaaggttac

SEQ ID NO: 12439 - DNA, 2797 bp, Homo sapiens
cgctccgcaccccactcttccccctagtcggctccgggttaggctccgacaccggaaggcactccagggagactggaaggtgggtgggggagcagggccttcctacctgtttccagctcctgccagcgtcgcttaagcagcagaggagagccctggctcccgcctccagcttcttttggccctctcagaaccagccgccgtgccaagtcccctcagaggcccaagcaacagccagctgcgccccccgcggtggtcagagcgccagccaagccacggtcccctccgaggtctgagcgtcagccacggtcccctccgaggtctgagcgtcagccacggtcccctccgaggtctgagcgtcagccacggtcccctccgaggtctgagcgtcagccacgtccccgcccagaggtccgaccaccgccagccaagcagcgtccccctcagaagtccaagcaacagccgcgcagcagccccctcagagggccaggcgccagccgtggggggtcccccgtcaaagcttctaggttctggtaacaccatctcttcccttttgttccccagccctaagattgaaaaggaagatcaggccaaccccaaagaagaagtgaccaaggaggagtttaaactgaatgaacaacctcggctcctggactcattgcttcacaacccatctacccctggatgaagttatctggcttcaaatattatgcaggggcaaacacctgctgatgtggcaactgctgatgctcatggtccccatggcatgggggcctcagggcagcctgcctggagtactttgaagatgtcatcccattgtcttctgacctctataattgccactgagagatctgctgtcagtctgcttatccttccacggactcaagtttcttcaatctgaagatacatgtctttctccagggacatgtggaaaaaaaaaagatgttatacaaccatcaaagtggcaaaaataaaaaaaatcaagtattggcaaagatgtggggaaaattctcataagctactgatgagaatttataaattattatgacacctttgggttgcaatctggggatactggcaaagcagaaaattgtacaacctgtgatcaagcaataataattttaggcacccatcctagagaaaacttgaattcatagaaaaagtaggtacacgtaaatctgttcaaggaatcattgtttggcattgaaaataggagagagatccatgagaaattaccaaaatgtccaccaatagaatgagtgaatcaccctgtggtatatttataaataaaaatattaaatagaaggtaaaacaaatcagacatacacacattagatagataaatttagaggacaaaataaggaacatgaaaagcaaatagtagatggcaaatgtaatataatatactatgcataaattttaacaacacacaatattatattgcatattgcccaataagcagaagccataaggtctcacacttttcttataattcaatagaataaaaatgacaacaaagtaaaagggtatcccaaaaataaaactatccttttggaaaaaaaaagatttaaaataattcctggtttgaagaaataacaaattaaaagctatatataaacggttaacaatattaggtggacatatttgtttgaagagataggtgaaagatagttgaaaagcctgggggtatattcaaggttatatgtcttagaaaacaaaaatacttgtttgggttcagttttggatctgggcttgttcttgtggcttctgatgatttctgacttggggaaaaatggggaagagttgaaatacgtccttccacccaaacctttgtttagtaataggtaggaaaatgaagaagaaaatagaatgttgcagaatgtggagggatgtaaaatggacagtactagggtagaggggaagtcagattagaggaaagaaagagcatcaggaacagtcttgtgctaggagctggtgtggccaagcacagtcggatgcccaaagatccaacaaggccatggctctgtgtccttgagtgggcacaaccattcctagccaagtttaaagaggcaagtaaaaatataggggcaatgtcagatgaagtcttgttcagggtatggggctaggatgagagagaatgccacagagtatgaaggaagagtgatagatccagatgagatacagctcagagtgccacgcccccagaaagaggaatcaggcaagtactgtcccaaggcagctggagggtgagggctgagtgccctggcttcctcacttggggagaccatgggtctctgtagaaattccaatataaaggcagggaaatttgactgcatggagtcttcaggtagaaatgtttctcttgcctaaattcaggtgctaaataaacaacaaaatggtaacctctactatgaagtgtttccaatgatgggatatctgaggccattacattcctgggaataacatggtgaggtgcagggtggtggtggtggtgaaacatacgacagaccactgtaagtgagaacaaattactggcccagcccaacccacaccaaataagaaatttaatatccctttggcctgttttagattttggcaaagccaggcccatagtgcttgctgggctctctcttccacatcatccagaagacacacatttgctatggaatgattgtggaggtgagagtatagtgcatattaattcatgcaaaaagttagatattagcccagaaatgttagtaacaagaaactactgaattctctgtttgtctgttgtggaaataaaaccttctggggatga

SEQ ID NO: 12440 - DNA, 2732 bp, Homo sapiens
atcaaaaacaccttgtgtaatgaaaaacccagatctataacctctccctatatattctgcatgcattgaagtaggctcaaaccctcagggacctggtatagacgcagaatctgtttcacacaacaactgctatttgaaggaaaaaaaaaaaaagaagcaaatgataccaagacaagctcataacagagatccaatcagcagatgtgtacggatgaaaatacagtgagatgagtcagaaaccggccaaggagggtcccagactctccaaaaaccagaagtactccgaacacttcagcatacactgctgcccgccgttcaccttcctcaattccaagaaggagatagtggatcggaaatacagcatctgtaagagcggctgcttctaccagaagaaagaggaggactggatctgctgcgcctgccagaagaccagattgaaaaggaagatcaggccaaccccaaagaagaagtgaccaaggaggagtttaaactgaatgaacaacctcggctcctggactcattgcttcacaacccatctacccctggatgaagttatctggcttcaaatattatgcaggggcaaacacctgctgatgtggcaactgctgatgctcatggtccccatggcatgggggcctcagggcagcctgcctggaggcaacagtttactaccatcaagttcagtgctttgactttgatcaactgactgggtttatccaaagtacagtactttgaagatgtcatcccattgtcttctgacctctataattgccactgagagatctgctgtcagtctgcttatccttccacggactcaagtttcttcaatctgaagatacatgtctttctccagggacatgtggaaaaaaaaaagatgttatacaaccatcaaagtggcaaaaataaaaaaaatcaagtattggcaaagatgtggggaaaattctcataagctactgatgagaatttataaattattatgacacctttgggttgcaatctggggatactggcaaagcagaaaattgtacaacctgtgatcaagcaataataattttaggcacccatcctagagaaaacttgaattcatagaaaaagtaggtacacgtaaatctgttcaaggaatcattgtttggcattgaaaataggagagagatccatgagaaattaccaaaatgtccaccaatagaatgagtgaatcaccctgtggtatatttataaataaaaatattaaatagaaggtaaaacaaatcagacatacacacattagatagataaatttagaggacaaaataaggaacatgaaaagcaaatagtagatggcaaatgtaatataatatactatgcataaattttaacaacacacaatattatattgcatattgcccaataagcagaagccataaggtctcacacttttcttataattcaatagaataaaaatgacaacaaagtaaaagggtatcccaaaaataaaactatccttttggaaaaaaaaagatttaaaataattcctggtttgaagaaataacaaattaaaagctatatataaacggttaacaatattaggtggacatatttgtttgaagagataggtgaaagatagttgaaaagcctgggggtatattcaaggttatatgtcttagaaaacaaaaatacttgtttgggttcagttttggatctgggcttgttcttgtggcttctgatgatttctgacttggggaaaaatggggaagagttgaaatacgtccttccacccaaacctttgtttagtaataggtaggaaaatgaagaagaaaatagaatgttgcagaatgtggagggatgtaaaatggacagtactagggtagaggggaagtcagattagaggaaagaaagagcatcaggaacagtcttgtgctaggagctggtgtggccaagcacagtcggatgcccaaagatccaacaaggccatggctctgtgtccttgagtgggcacaaccattcctagccaagtttaaagaggcaagtaaaaatataggggcaatgtcagatgaagtcttgttcagggtatggggctaggatgagagagaatgccacagagtatgaaggaagagtgatagatccagatgagatacagctcagagtgccacgcccccagaaagaggaatcaggcaagtactgtcccaaggcagctggagggtgagggctgagtgccctggcttcctcacttggggagaccatgggtctctgtagaaattccaatataaaggcagggaaatttgactgcatggagtcttcaggtagaaatgtttctcttgcctaaattcaggtgctaaataaacaacaaaatggtaacctctactatgaagtgtttccaatgatgggatatctgaggccattacattcctgggaataacatggtgaggtgcagggtggtggtggtggtgaaacatacgacagaccactgtaagtgagaacaaattactggcccagcccaacccacaccaaataagaaatttaatatccctttggcctgttttagattttggcaaagccaggcccatagtgcttgctgggctctctcttccacatcatccagaagacacacatttgctatggaatgattgtggaggtgagagtatagtgcatattaattcatgcaaaaagttagatattagcccagaaatgttagtaacaagaaactactgaattctctgtttgtctgttgtggaaataaaaccttctggggatga

SEQ ID NO: 12441 - DNA, 2532 bp, Homo sapiens
atttcctttgtgtttttctatgtttcaaaattatctacaatgattaaccagaaaagcaataattatcatacataaaatagaactcttaaagaatatctttcctaggctcgggccaagaaaaaaatatcatattatttttggccagagactaccagaattaagaaattaaagagaaggattttgcagaataacctcaaaggtagtctcaaaatccacaattatactaactgaacacagagaaagagagagagtatacatcacctacctatgtcatgtgtttttctttttctctttgtaaaccagattgaaaaggaagatcaggccaaccccaaagaagaagtgaccaaggaggagtttaaactgaatgaacaacctcggctcctggactcattgcttcacaacccatctacccctggatgaagttatctggcttcaaatattatgcaggggcaaacacctgctgatgtggcaactgctgatgctcatggtccccatggcatgggggcctcagggcagcctgcctggagtactttgaagatgtcatcccattgtcttctgacctctataattgccactgagagatctgctgtcagtctgcttatccttccacggactcaagtttcttcaatctgaagatacatgtctttctccagggacatgtggaaaaaaaaaagatgttatacaaccatcaaagtggcaaaaataaaaaaaatcaagtattggcaaagatgtggggaaaattctcataagctactgatgagaatttataaattattatgacacctttgggttgcaatctggggatactggcaaagcagaaaattgtacaacctgtgatcaagcaataataattttaggcacccatcctagagaaaacttgaattcatagaaaaagtaggtacacgtaaatctgttcaaggaatcattgtttggcattgaaaataggagagagatccatgagaaattaccaaaatgtccaccaatagaatgagtgaatcaccctgtggtatatttataaataaaaatattaaatagaaggtaaaacaaatcagacatacacacattagatagataaatttagaggacaaaataaggaacatgaaaagcaaatagtagatggcaaatgtaatataatatactatgcataaattttaacaacacacaatattatattgcatattgcccaataagcagaagccataaggtctcacacttttcttataattcaatagaataaaaatgacaacaaagtaaaagggtatcccaaaaataaaactatccttttggaaaaaaaaagatttaaaataattcctggtttgaagaaataacaaattaaaagctatatataaacggttaacaatattaggtggacatatttgtttgaagagataggtgaaagatagttgaaaagcctgggggtatattcaaggttatatgtcttagaaaacaaaaatacttgtttgggttcagttttggatctgggcttgttcttgtggcttctgatgatttctgacttggggaaaaatggggaagagttgaaatacgtccttccacccaaacctttgtttagtaataggtaggaaaatgaagaagaaaatagaatgttgcagaatgtggagggatgtaaaatggacagtactagggtagaggggaagtcagattagaggaaagaaagagcatcaggaacagtcttgtgctaggagctggtgtggccaagcacagtcggatgcccaaagatccaacaaggccatggctctgtgtccttgagtgggcacaaccattcctagccaagtttaaagaggcaagtaaaaatataggggcaatgtcagatgaagtcttgttcagggtatggggctaggatgagagagaatgccacagagtatgaaggaagagtgatagatccagatgagatacagctcagagtgccacgcccccagaaagaggaatcaggcaagtactgtcccaaggcagctggagggtgagggctgagtgccctggcttcctcacttggggagaccatgggtctctgtagaaattccaatataaaggcagggaaatttgactgcatggagtcttcaggtagaaatgtttctcttgcctaaattcaggtgctaaataaacaacaaaatggtaacctctactatgaagtgtttccaatgatgggatatctgaggccattacattcctgggaataacatggtgaggtgcagggtggtggtggtggtgaaacatacgacagaccactgtaagtgagaacaaattactggcccagcccaacccacaccaaataagaaatttaatatccctttggcctgttttagattttggcaaagccaggcccatagtgcttgctgggctctctcttccacatcatccagaagacacacatttgctatggaatgattgtggaggtgagagtatagtgcatattaattcatgcaaaaagttagatattagcccagaaatgttagtaacaagaaactactgaattctctgtttgtctgttgtggaaataaaaccttctggggatga

SEQ ID NO: 12442 - DNA, 924 bp, Homo sapiens
atcaaaaacaccttgtgtaatgaaaaacccagatctataacctctccctatatattctgcatgcattgaagtaggctcaaaccctcagggacctggtatagacgcagaatctgtttcacacaacaactgctatttgaaggaaaaaaaaaaaaagaagcaaatgataccaagacaagctcataacagagatccaatcagcagatgtgtacggatgaaaatacagtgagatgagtcagaaaccggccaaggagggtcccagactctccaaaaaccagaagtactccgaacacttcagcatacactgctgcccgccgttcaccttcctcaattccaagaaggagatagtggatcggaaatacagcatctgtaagagcggctgcttctaccagaagaaagaggaggactggatctgctgcgcctgccagaagaccagaaccagccgccgtgccaagtcccctcagaggcccaagcaacagccagctgcgccccccgcggtggtcagagcgccagccaagccacggtcccctccgaggtctgagcgtcagccacggtcccctccgaggtctgagcgtcagccacggtcccctccgaggtctgagcgtcagccacggtcccctccgaggtctgagcgtcagccacgtccccgcccagaggtccgaccaccgccagccaagcagcgtccccctcagaagtccaagcaacagccgcgcagcagccccctcagagggccaggcgccagccgtggggggtcccccgtcaaagcttctaggttctggtaacaccatctcttcccttttgttccccagccctaaggttagtagttgcttcctgtgtttactaacaccgggctgtctccatggccctcttcagccttattacccaacctgtgtaatcagctccctccattaaatcccctctgtttga

SEQ ID NO: 12443 - DNA, 993 bp, Homo sapiens
atcaaaaacaccttgtgtaatgaaaaacccagatctataacctctccctatatattctgcatgcattgaagtaggctcaaaccctcagggacctggtatagacgcagaatctgtttcacacaacaactgctatttgaaggaaaaaaaaaaaaagaagcaaatgataccaagacaagctcataacagagatccaatcagcagatgtgtacggatgaaaatacagtgagatgagtcagaaaccggccaaggagggtcccagactctccaaaaaccagaagtactccgaacacttcagcatacactgctgcccgccgttcaccttcctcaattccaagaaggagatagtggatcggaaatacagcatctgtaagagcggctgcttctaccagaagaaagaggaggactggatctgctgcgcctgccagaagaccagattgaaaaggaagatcaggccaaccccaaagaagaagtgaccaaggaggagtttaaactgaatgaacaacctcggctcctggactcattgcttcacaacccatctacccctggatgaagttatctggcttcaaatattatgcaggggcaaacacctgctgatgtggcaactgctgatgctcatggtccccatggcatgggggcctcagggcagcctgcctggaggtgagcagggctatctctgtgtgttgtactccagtcagggggttccagcagcacccgcaggctctagagctcaatgcacagttctttttgtttcacctgcagtcctttcttctccaggatatgcacaggcctccagggtctttcatggctcagggtcagggtggctcaagtgccaacccacatgttgtcctccaaatattcccttctatccctggcatgctgttgctgagctcaacttttaatttttgactttctcctttgtaattaatctctatctgggtttctctctttctctgtgccatttggtttccttaattagttccctgtgccagccca

SEQ ID NO: 12444 - DNA, 584 bp, Homo sapiens
  misc_feature (2)..(2): n is a, c, g, or t
tngctagacctagtggatttcccgggctgcacgaattctttacgacctggcttcctcacttggggagaccatgggtctctgtagaaattccaatataaaggcagggaaatttgactgcatggagtcttcaggtagaaatgtttctcttgcctaaattcaggtgctaaataaacaacaaaatggtaacctctactatgaagtgtttccaatgatgggatatctgaggccattacattcctgggaataacatggtgaggtgcagggtggtggtggtggtgaaacatacgacagaccactgtaagtgagaacaaattactggcccagcccaacccacaccaaataagaaatttaatatccctttggcctgttttagattttggcaaagccaggcccatagtgcttgctgggctctctcttccacatcatccagaagacacacatttgctatggaatgattgtggaggtgagagtatagtgcatattaattcatgcaaaaagttagatattagcccagaaatgttagtaacaagaaactactgaattctctgtttgtctgttgtggaaataaaaccttctggggatga

SEQ ID NO: 12445 - DNA, 409 bp, Homo sapiens
tgtagagacacggttctgccatgttgaccaggctggtcttgaacgcctggcctcaagtgatccacctgacttggccttccaaagtgctggaattacaggtgtgagccacggtgcctggctgaaggtaataatttctaaaccctaagagaaaggggtgagtttgggtagggaagaagcactttagacattgggaaaaaatctgaatacagtcatgtatgcaaaaacaatgaaaataactttacttttagaagggagacagtagaaccagtgtcgtcgcgttcgggattttagctttcgcatccgttgattttggtacctgggcttttaggtggtttcccgtttatccttccctcagttatcatatctggctaggactatatttttgagcttgggggggcccagtggtgtg

SEQ ID NO: 12446 - DNA, 483 bp, Homo sapiens
gaccagcacatccccacggaggatccagattggaggagaggagaggagagaagtggagagcagagagaagttgggctcttgacctctttcctgtgtctgctgaaagggagagttaagagacatgtaatagtggatgacatcatgggcaagtgcctgaggccttcctgtgcagcacaaagcctgtataatcctgtagtttggggagaggaagttgagagacctacttacacattctaaacatcttaaatgaagtcgctcatagctttgttcttctcaaatgtggaacttattttacatctggggtcactgtgagttctaggcaatgtgaagctataactcagagccataaatttattcatataaatgaagaaccaaattcaaggggaaaatatctctcattgtatatattatctgtaacaagcaaaacaaatttatagcattttttctaacctctgggggcagaaaattctcaaaagtttccag

SEQ ID NO: 12447 - DNA, 233 bp, Homo sapiens
tttttggatagagagaggactcactatgttgcccaggctggtctcaaactcctgggctcaagatatccccctaccttaccctcccaaagtgccgggattataggcatgagccgctgtgcccagcctaaagtcaaatatttcattaaattttacaaatcttggagactttgaatattccaagtgaagtttaccaaacagggatacctttaatttttttttagcacagattatct

SEQ ID NO: 12448 - DNA, 389 bp, Homo sapiens
attatgtcttctgtaacttggctcacttaatagctattgaattgcactggtacaggatggatgaggactcataacttctttgccaaggcaaatgctgaactaggttgttctcaggatgtaactaattaatttgacttagggattttaaaaaagtgttttgtctgttttagctgtttcatttagtttgctcttacacattaagatttctactcagtactctagtatcctgaattatttggattaaaggtgcttatatgaacgtcagtaattaggaaaaaaaccttttatgtccagtgtaatggaattaggaaatttgagctactcttaaatgtatctccttaaatcgccttatttaatacaaccctgaactattaaatgtatctttactg

SEQ ID NO: 12449 - DNA, 177 bp, Homo sapiens
aaagttctaaagagagaaaaaaagcacttccattgatcccctgcccccctggattagtcccatccatgggaagttatctatatcttatacatttatgtacatatcttccatttttgaaagataggtttataaaataataaaaatttcagaaataaatagcatgtagataggtaacat

SEQ ID NO: 12450 - DNA, 520 bp, Homo sapiens
tatatatcttaatcatgagacgaggcagcactatgcacattgtgcataatatgtgagacattgaatggtataaaataaattttaacttttatctaaggtttacaggaaaagcagcaatacctatgattaagccacccgacttaaatgagtgtttttaagatgtggtgcttgcacataagcggaggagtggtggtaacaacccttgtacagttcacaaatccaggactggcaggaaggtagacaagtgtcattctcagatttcagaacccagcctgaaagtgagaggacgtcaggcaacaataccatgcaacgacagcgtgcaacaaatacacaactggattatctttttaagggagaagcttgtttgggtttctaattgcttttaatgaaccaagtattgattactgttttacccaaaactgtaccaaaatatgtgtaaaactgataagataatttatagctttctagttatggaaaagcttgcaaattaaataattcaaatctcaatttaagaactgta

SEQ ID NO: 12451 - DNA, 293 bp, Homo sapiens
ggcaatttgatgttgtgacatccaggtggcattttactttcctagtttgtttttattctacagaaatattgatttacggtggattggatgggagaagatccatcaccacattgtttgagaagcctggctctagaaaaatgtaccctcagatgttaccagttgttgctagctgctgaggatgctggtgatttttagttttcatttcttggtgttttctgaaatatttacaatgaccatctgttataattttcatgggatgggggtggggaatgaagtctgttgtaaaaaaaaaa

SEQ ID NO: 12452 - DNA, 480 bp, Homo sapiens
ggctggatgattctttgttgcggggtggggatggaggcattgtcctgtgcattgtaagatgcttaacagtgtccctggcctctacttactagaccccagtagtaccacgactcctcccctctagttgtgacaactaaaaatgtctcttgatattgccaaatgttccctagttgaaatctactggcctaaagaatctaattgttgggcacatttgaaaggtatggggttgtttattgttgttgttttgtttttgagacagagtctcactctgtggcccaggctggagtgcggtgtggcaggatcatggcttactgcagcctcgacctccccggtccaagcaatcctcccacctcatcctcctgagtagctgggagctatggaaggggaattgcttgaacccgggaggcggagattgcagtgagccaagatggcgccaccgcactccagcctggcgaccagagcgagactctccaaaaaaaa

SEQ ID NO: 12453 - DNA, 367 bp, Homo sapiens
ggtggtgtcttactctgtcacccagcctggagtgcagtggtatgatcttggctcactgcaacctccatctcagggttccaatgattctcctgcctcagcctcctgagtaactgggattacaggtgcctgtcaccattgctggctaatttttgtatttttaatagagatggggttttgccatgttggcctggctagtctcgaacacctgacctcaggtgatccgcctgcctcagcctcccaaagtgctgggattacaggcgtgagccaccatgcccagcctcttttttcttttctttgagacaggtcctcacattgtcacccaggctgcaaggtggagtgcagtggcacaatgatggctcactgtaga

SEQ ID NO: 12454 - DNA, 1661 bp, Homo sapiens
agattgcacaggaggaggcggtagcggaacctttctcctccgcctggttctcgcttccacccgggcccagttggggacggacgcactagaggcgacctaaacatggagacagcgggcgctgcaactgggcagccggcctctgggctggaggctccggggtccacgaatgaccggcttttcctggttaaaggtggaattttccttggtaccgttgctgcagcgggaatgctagctggatttattacaacattatcattggctaaaaagaaaagccctgaatggttcaataagggaagtatggccacggctgcattaccggaaagcgggtcttcccttgccttgcgagctctgggctggggctccctgtatgcatggtgtggggttggtgtgattagcttcgcagtctggaaagctttaggagttcacagtatgaacgactttcgaagtaaaatgcaatcaatatttccaacaattcccaagaactccgaatcggctgttgagtgggaggaaacattgaaatccaaatgagatgagcatggatgaatttcaaaatgcttgttacagaaaggggtggctctggagacaccatgacagcaaaaggactgggactgatttctcccaggaacatgggcagattgctgactgaaccagtgcactggatagcattcagcctcatcacaggagagtatgtgtgtgcgtgctgggggagggtaaagttttcccacagttaagaagactatttaaaaatagtaattacaggaataacttccttatgtggaggggaccccataggaaatgattctgtttgtaacagttgaagcaaatttcatactaaaaaagtttataataaaagtatgataagaaaatatttataaaacagaccccctaatagcaatagtactgcaatgtgtctaattaaaggagtttcaagagcctttcttgtcaatatatgacagaacttggaagtcttattctgattagccagactacaaagtgacagtcacctggtaagtcctgtatggtaggaagtgggtgtggctctcgggtcctaaatgtggtctgtgctttacagccatcacacacatgctagttatttacctgatgcccttgcttgaaggccctataaattcttatacttaaaacaaaaagccagtaatgagttgtgatcaccccaaaaggcacagttgggctaaaataatgatatcaggggtaaacatatttttttgagaagttggtctggatctctgaacactgacaatttgtcattttgtctcagttgtcaaagtaaaaaaagcccagttgtcatccgtcttcaatatttttaaccagaaagtcacctgagtacggagtcccaatataaagtatttgggaccacctccctaacaaagctgttagggtaaattctgtgtgcacgcccaactccctcctgtcttccacagtctcctacaaaaaaaacagatggagaataatgtctacatgcaattgtttttactgcaattgtattttaaaatattttcaagaagagaaatactttaatatgtcaatatgtccagagaaaaaacctgtagttaaatatcagttgtgcaatttcttcctacttgcctaggctctaattagtcagcaatcaggtttaataaaggacatttgaaatttcaaaaaaa

SEQ ID NO: 12455 - DNA, 1552 bp, Homo sapiens
ggcacgagcattcgtggaccccggagcctccagcccagaggccggctgcccagttgcagcgcccgctgtctccatgtttaggtggaattttccttggtaccgttgctgcagcgggaatgctagctggatttattacaacattatcattggctaaaaagaaaagccctgaatggttcaataagggaagtatggccacggctgcattaccggaaagcgggtcttcccttgccttgcgagctctgggctggggctccctgtatgcatggtgtggggttggtgtgattagcttcgcagtctggaaagctttaggagttcacagtatgaacgactttcgaagtaaaatgcaatcaatatttccaacaattcccaagaactccgaatcggctgttgagtgggaggaaacattgaaatccaaatgagatgagcatggatgaatttcaaaatgcttgttacagaaaggggtggctctggagacaccatgacagcaaaaggactgggactgatttctcccaggaacatgggcagattgctgactgaaccagtgcactggatagcattcagcctcatcacaggagagtatgtgtgtgcgtgctgggggagggtaaagttttcccacagttaagaagactatttaaaaatagtaattacaggaataacttccttatgtggaggggaccccataggaaatgattctgtttgtaacagttgaagcaaatttcatactaaaaaagtttataataaaagtatgataagaaaatatttataaaacagaccccctaatagcaatagtactgcaatgtgtctaattaaaggagtttcaagagcctttcttgtcaatatatgacagaacttggaagtcttattctgattagccagactacaaagtgacagtcacctggtaagtcctgtatggtaggaagtgggtgtggctctcgggtcctaaatgtggtctgtgctttacagccatcacacacatgctagttatttacctgatgcccttgcttgaaggccctataaattcttatacttaaaacaaaaagccagtaatgagttgtgatcaccccaaaaggcacagttgggctaaaataatgatatcaggggtaaacatatttttttgagaagttggtctggatctctgaacactgacaatttgtcattttgtctcagttgtcaaagtaaaaaaagcccagttgtcatccgtcttcaatatttttaaccagaaagtcacctgagtacggagtcccaatataaagtatttgggaccacctccctaacaaagctgttagggtaaattctgtgtgcacgcccaactccctcctgtcttccacagtctcctacaaaaaaaacagatggagaataatgtctacatgcaattgtttttactgcaattgtattttaaaatattttcaagaagagaaatactttaatatgtcaatatgtccagagaaaaaacctgtagttaaatatcagttgtgcaatttcttcctacttgcctaggctctaattagtcagcaatcaggtttaataaaggacatttgaaatttcaaaaaaa

SEQ ID NO: 12456 - DNA, 822 bp, Homo sapiens
agattgcacaggaggaggcggtagcggaacctttctcctccgcctggttctcgcttccacccgggcccagttggggacggacgcactagaggcgacctaaacatggagacagcgggcgctgcaactgggcagccggcctctgggctggaggctccggggtccacgaatgaccggcttttcctggttaaaggtggaattttccttggtaccgttgctgcagcgggaatgctagctggatttattacaacattatcattggctaaaaagaaaagccctgaatggttcaataagggaagtatggccacggctgcattaccggaaagcgggtcttcccttgccttgcgagctctgggctggggctccctgtatgcatggtgtggggttggtgtgattagcttcgcagtctggaaagctttaggagttcacagtaattttctgaaaaaattggaacaatcttttatgtgcgtttgctgtcaggagctagtttaccagcctgtgacaactgagtgcttccacaatgtctgtaaagattgcctacagcgctcctttaaggcacaggttttctcctgccctgcttgccggcatgatctttggccagaattacatcatgattcccaatgagattctgcagactctacttgaccttttcttccctggctacagcaaaggacgatgatctgcctgctttcactgtgttgttcatggtggctttttggacaataaagaatctaaaatgggtggggagggtggcaagaaactggtggactgtatctctcacgtctgaagcagtaatcctctatccacatagccatcatctgctgt

SEQ ID NO: 12457 - DNA, 1891 bp, Homo sapiens
gaaggaagcccccagccccttccaggccctgttctcagatatcccgcccaggtacccgttccaagccctgccaccgcactacgggaggccctaccctttcctgctgcagcccacggccgccgccgacgcggacggcttggcccctgatgtgccgctcccggctgatgggcccgagcgcctggcactctcacccgaagacaagcccatccgcttgtccccctccaagatcacagagccgctgcgggagggcccggaggaagaaccgctggctgagcgggaggtgaaggcagaggtggaggacatggacgagggccccacagagctgccgcctctggagtcgccgctgccactgcccgccgcggaagccatggctacccccagccctgcagggggttgtggaggtggcctgttggaggcccaggcgctgagtgccaccgggcagagctgcgcagagccctctgagtgtccagactttgtggaggggcctgaaccacgggtggattccccgggccggacagaaccctgcaccgccgccctggacctgggggtgcagctgacacccgagacactggtggaggccaaggaggagccggtggaggtgcctgtggcggtgcccgtggtggaggcagtgcccgaggaaggcctggcgcaggtggcaccgagcgagtcccagcccaccctagaaatgtcagactgtgacgtgcccgccggggagggacagtgcccgagcctggagccccaagaggccgtgcctgtactcggcagcacctgcttcctggaagaggcaagctctgaccagttcctgcccagtctggaggacccactggctggcatgaacgccctggcggcagctgcggagctgccccaggccaggcctctgccctccccgggtgctgctggagcccaggccttggagaagctggaagcagccgagagccttgtcttggagcagagcttcctgcatggcatcaccctgctaagtgagatcgcagagctggagctggagaggaggagccaagagatgggagcccaccccaaggcctcccaccgtgcatgggacagggcagcccgatgccagctggcctacctgactgtgccaggggccctgcccccaccctctcaggatggcctagacttggggaacagagccgggtggggttgcagcccggagtgtctgtcaaaggcaccaggtggagagggcccggcacaggcccaccctggtccaaaccctcacactacagaaaaccccaatggtgctgaaactgtcgcccggccacgcctggcccctccccacccaggagggaggtggcacttcttaacctgtacagttttattgtaccaagagactcgccccgcccctgtatcataagcctttaaatggagtcaactttttaattatatatataaagataaatatatataaatatatatataaactttttaaaactgtgaaaaatagctatgaaattataaaaaaaaaacattctgacgtgcagaatattattttttatttcctgttagattatagtgtctagcaccggcttcaccggcctcccagtccccagcacaccccccgcccaccccgccaagtgtactgtactcaccccccaggatagagaagtgtttgttagggagagaagagggagaggcaggagccggcccaagcccagggtccctgcttgggccccagaaagcacttaaccaggccccaagccttcaagggaaaccaaggcctcaaccagacaatcttgagggaaggaaaagccagactttgggtttgttttttgggggaattattggttttttttttttatgtttcttttggaattttgtttgttggcaaattctgtgtgatcttttttcataaaaaaaaagaaaagatttaattgga

SEQ ID NO: 12458 - DNA, 466 bp, Homo sapiens
agatgctgctgaagtttctctaagaagggaacggaggcacctgccatagtgatggactgaggtatggtagtgagtactgagtgctgagtgctgatactgagcacagagtactgagtattgagcaccgagtactgagcatgggccagctgggttttgggcccatttcaccttccccctggcctctggggtgcccctaactgggatccctgccatgcacatgacagattccccctgcggcctgactgtggctccaggtttccagagagggtccccaacccggcaggacccctgttcaggtcctaagtcatttgtcggccatgttctgtccccagaaccgcggcaaggggggtgccgtgagcaagctgatggagagcatggcagccgaggaggactttgaacccaaccaagactcgagcttctctgaggacgagcacctgccgcgtggcggggctgtggagcggccgct

SEQ ID NO: 12459 - DNA, 886 bp, Homo sapiens
ctcaccccccaggatagagtacagtacacttggtggggtgggcggggggtgtgctggggactgggaggccggtgaagccggtgctagacactataatctaacaggatagagaagtgtttgttagggagagaagagggagaggcaggagccggcccaagcccaggtccctgcttgggccccagaaagcacttaaccaggccccaagccttcaagggaaaccaaggcctcaaccagacaatcttgagggaaggaaaagccagactttgggtttgttttttgggggaattattggttttttttttatgtttcttttggaattttgtttgttggcaaattctgtgtgatcttttttcataaaaaaaaagaaaagatttaatggggacaacacattaacaacaaaagacaaaaaaaaaaaaaaacaaaaaaaaacccaaaaccaaaaacgcttgcaggaagagagagaaggggtgttttgttcctcctgggagggcgcacttagggtggcacagaacttgggggtgagtgagtgagggggacaggggtgctgcctgtgctttccctgccgtttgatggctcctctctgctgcttcctcctccagaagaagaaagggaaagaggctgggccaggagctgggctgccgccgccccgagctcctgccttgccctctgaggccagggctcctcacgccagctccctgaccgctgccaaaaggagcaaagccaaggccaaagggaaggaggtgaagaaggagaaccgcggcaaggggggtgccgtgagcaagctgatggagagcatggcagccgaggaggactttgaacccaaccaagactcgagcttctctgaggacgagcacctgccgcgtggcggggctgtggagcggccgct

SEQ ID NO: 12460 - DNA, 429 bp, Homo sapiens
ctttagagacaaggtctcgctctgttgcccaggccagaggactgtggcaccatcaccactaaaagcctttacctcctgggctcacgttatcctcctacctcagcctccccaaatagctggatcttcagacacatgtcactgcacctggctaatttattgtttgtagagaggggatctcgctatgttgcccaggctgatcttgaactcctgacctttagtgattcttctgccccaacctcccaaaatgctgagattacaggcatgagccaccatgcttgaccacccgtatcttacagaggtccttactctcttttctcctgtctcagaagacgactttaaaagtgaataagatacctgggaccccaaaggaagacagtgatagtgaccatagttatcaaagtattgaaaagacccttctgtgatatggta

SEQ ID NO: 12461 - DNA, 342 bp, Homo sapiens
agtcgtgctagaacaaccacagaaacagcttaatggcaatgccggcttgcctcactgggagggtgctaggggaagaattacacatcctcttcatgccactgacatgctctttatactacaacagccgggccaggcatggtggctcatgcctgtaatcccagcactttgggaggccgaggtgggcagatcacctgaggtcaggagttcaagaccagcctggtcaacatggtgaaactccgtttctactaaaaataaaaaaattagctgggtgtgttggggggcacctaccacacattaacagtgtctgttcttgggatgctgagatgtggggtgattttcctt

SEQ ID NO: 12462 - DNA, 314 bp, Homo sapiens
cccatccccaaggactctgacaaagcaaaagaaaaagcaagtgccagagaaagtaactgcataccaaaagtcaggtttacattataaagtccctcaactggctgggcacagtggctcatgcctgtaatcccagcactttgggaggccgaggtgggcagatcacctgaggtcaggagttcaagaccagcctggtcaacatggtgaaactccgtttctactaaaaataaaaaaattagctgggtgtgttggggggcacctaccacacattaacagtgtctgttcttgggatgctgagatgtggggtgattttcctt

SEQ ID NO: 12463 - DNA, 7182 bp, Homo sapiens
  misc_feature (5629)..(5629): n is a, c, g, or t
  misc_feature (6098)..(6098): n is a, c, g, or t
gaaggaagcccccagccccttccaggccctgttctcagatatcccgcccaggtacccgttccaagccctgccaccgcactacgggaggccctaccctttcctgctgcagcccacggccgccgccgacgcggacggcttggcccctgatgtgccgctcccggctgatgggcccgagcgcctggcactctcacccgaagacaagcccatccgcttgtccccctccaagatcacagagccgctgcgggagggcccggaggaagaaccgctggctgagcgggaggtgaaggcagaggtggaggacatggacgagggccccacagagctgccgcctctggagtcgccgctgccactgcccgccgcggaagccatggctacccccagccctgcagggggttgtggaggtggcctgttggaggcccaggcgctgagtgccaccgggcagagctgcgcagagccctctgagtgtccagactttgtggaggggcctgaaccacgggtggattccccgggccggacagaaccctgcaccgccgccctggacctgggggtgcagctgacacccgagacactggtggaggccaaggaggagccggtggaggtgcctgtggcggtgcccgtggtggaggcagtgcccgaggaaggcctggcgcaggtggcaccgagcgagtcccagcccaccctagaaatgtcagactgtgacgtgcccgccggggagggacagtgcccgagcctggagccccaagaggccgtgcctgtactcggcagcacctgcttcctggaagaggcaagctctgaccagttcctgcccagtctggaggacccactggctggcatgaacgccctggcggcagctgcggagctgccccaggccaggcctctgccctccccgggtgctgctggagcccaggccttggagaagctggaagcagccgagagccttgtcttggagcagagcttcctgcatggcatcaccctgctaagtgagatcgcagagctggagctggagaggaggagccaagagatgggaggtgcggagcgggccctggtggcgcggccctccctggagagtctgctggcagctggcagccacatgctgagggaggtgctggatgggcccgtggtggacccactcaagaacctgcggctcccgcgggagctgaagcccaacaagaagtacagctggatgcgcaagaaggaggagcggatgtatgccatgaagtcctccctggaggacatggacgccctggagctggacttccggatgcggctggccgaggtgcagcgccagtacaaggagaagcagcgtgagctggtgaagctgcagcgccgccgggactccgaggacaggcgcgaggaaccccatagaagcttggcacgcagaggccctggcaggccgcggaaacggacccacgccccgagcgccctgtcgcccccccgcaagagagggaagagcggccacagtagcggaaagctgagcagcaagtctctgctgacatcagatgattatgagctgggagcagggataagaaagagacacaaggggtctgaggaggaacatgatgccctcatcggaatggggaaagccagggggaggaaccagacttgggatgaacatgaggcctcgtcggacttcatcagtcagctaaagattaagaagaagaagatggccagcgaccaggagcagttggcaagcaagctcgacaaggccctctccctcaccaagcaggacaagttgaagtcgcccttcaagttttcggacagtgctggggggaaatcgaaaactagcgggggctgcggcaggtacttgactccttacgacagcctgctggggaagaacaggaaggcgctggccaagggcctcggcctgtctctgaaatcctccagagaaggtaaacacaaaagggcagccaaaaccaggaagatggaggtggggttcaaggccagaggccagcccaagtcggcccattccccgtttgcctcggaagtgagcagctactcttacaatacggactcagaggaagacgaagaattcctgaaggacgagtggcccgcccaaggcccctccagctccaaactgacgccttccctcctgtgtagcatggtggcaaagaacagcaaggcagctggtggccccaagctgaccaagaggggcctggcggccccccggactctgaaacccaagccggccaccagcaggaagcagccgttttgtctgctgcttcgagaggccgaggcgcgttcctccttcagcgactcttcggaggaatcgtttgaccaagatgagagctcggaggaggaggacgaggaggaggagctcgaggaggaggacgaggccagcggtggtggctacaggctgggtgcccgggagcgggccctgtcaccgggcctggaggagagtgggctgggcctgctggcacgcttcgccgccagcgccctccccagccccacggtgggtccatccctgtctgtggtacagctggaggccaagcagaaggcccggaagaaagaggagcggcagagcctgctgggcacagagttcgagtacaccgactcagagagcgaggtcaaggtgcgcaagcggtcgcctgcggggctgctgcggcccaagaaggggctgggggagccgggaccctccctggccgcacccacgcctggcgcccgcggtcccgaccccagcagcccagacaaggccaagctggcggtggagaaggggcgcaaggcccggaagctgcggggccccaaggagcctggcttcgaggcggggcccgaggccagcgacgacgacctgtggacgcggcgccgcagcgagcgcatcttcctgcacgacgcctcggctgctgcacctgcgcccgtcagcaccgcgcccgccaccaagaccagccgctgcgccaagggcggccccctgagcccgcgcaaggacgccgggcgtgcaaaggacaggaaggaccccaggaagaagaagaaagggaaagaggctgggccaggagctgggctgccgccgccccgagctcctgccttgccctctgaggccagggctcctcctcctcctcctcctcctcctcctcatcctcctcttcctcctcctcctcttcctcctcctcctcttcctcttcgtcttcctcctcttcctcctcctcctcttcctcgtcctcatcctcctcctcctcctcctcttcctcctcttcttcctccaccacagacgaggactcttcctgcagctcggacgatgaggcagcccccgcccccacggctggcccttccgcgcaggcggcgctccccaccaaggccaccaagcaggccggcaaggcgcggccctcggcccactccccaggcaagaagacgcccgcgccccagccccaggcgcctcctccgcagcccacacagcctctgcagcccaaggctcaggccggggccaagagccgacccaagaagagagagggcgtccacctccccaccaccaaggagctggccaagcggcagcgcctgccgtccgtggagaaccggcccaagatcgccgccttcctgccagcccggcagctctggaagtggttcggcaagcccacccagcggcgtggcatgaagggcaaggcccgcaagctcttctacaaggccatcgtgcgcggcaaggagatgatccgtatcggggactgtgccgtgttcctctctgccggccgccccaacctgccctacatcggccgcatccagagcatgtgggagtcgtggggcaacaacatggtggtccgcgtcaagtggttctaccaccccgaggagaccagcccgggcaagcagttccaccagggccagcactgggaccagaagtccagccgcagcctcccggcggccctgcgggtctccagccagaggaaggacttcatggagcgcgcgctataccagtcctcgcatgtggacgaaaatgacgtgcagacggtgtcgcacaagtgcctggtggtgggcctggagcagtatgagcagatgctgaagaccaagaagtaccaggacagcgagggcctgtactacctcgcgggcacctacgagcccaccacgggcatgatcttctccacggacggcgtgcccgtgctctgctgagcccgccgggccctgcgggccacctgtgccccgagggcggccagggacccatctccatcactgccatggcgcggagaccacgtgcgttgtgtgcatgcgagcgctcctgcaggcgtgtgcatggggccaggtgtgcacgtggatgcccgggtgagtgtgtgtgcatgcacgtgtgtgcacgcatgtgcacatgcctccagccccaccttccaacccctcagtgcccccaggacaggggcccctcttagctatcagggtatggccggaccggcccttcctgcccagcacgttgcaagcacttggccaggccggccctccaggctgctgctgcgtgggggcccgggtgcccccaggtccatgcagactggggattcggtggggaggggcgcttctaaggaaccaaactgacgctcactctgggcttcccaagcacccttagcacggagcccaccccaaggcctcccaccgtgcatgggacagggcagcccgatgccagctggcctacctgactgtgccaggggccctgcccccaccctctcaggatggcctagacttggggaacagagccgggtggggttgcagcccggagtgtctgtcaaaggcaccaggtggagagggcccggcacaggcccaccctggtccaaaccctcacactacagaaaaccccaatggtgctgaaactgtcgcccggccacgcctggcccctccccacccaggagggaggtggcacttcttaacctgtacagttttattgtaccaagagactcgccccgcccctgtatcataagcctttaaatggagtcaactttttaattatatatataaagataaatatatataaatatatatataaactttttaaaactgtgaaaaatagctatgaaattataaaaaaaaaacattctgacgtgcagaatattattttttatttcctgttagattatagtgtctagcaccggcttcaccggcctcccagtccccagcacaccccccgcccaccccgccaagtgtactgtactcaccccccaggatagagaagtgtttgttagggagagaagagggagaggcaggagccggcccaagcccagggtccctgcttgggccccagaaagcacttaaccaggccccaagccttcaagggaaaccaaggcctcaaccagacaatcttgagggaaggaaaagccagactttgggtttgttttttgggggaattattggttttttttttttatgtttcttttggaattttgtttgttggcaaattctgtgtgatcttttttcataaaaaaaaagaaaagatttaattggaaaaataaaattgtctggagtggtttatttcaggggctggagtaggggtggtgtctgggggcattctgccatatcagggcaccaagaagcaggattcgactggaagaagttgggtgccacgcgtgcaggggcggtgaccccatgcagccatctaaatgagctcatcggctgggcacagtggctcacgcctgtaatgccagcactttgggaggccaaggcaggcggatcacttgangtcaggagttcgagaccagcctggccaatatggtgaaaccccatctctactaaaaatacaaaaaaaaattagccaggtgtggtagagcgtgcctgtaatcccagcactttaggaggccgaggcgggaggatcacttcaggccaggagtttcagaccagcctgagcaatgtggtgaaaccccgtctctactaaaaatacaaaaattagccgggtgtggtggcccacacctgtaatcccagctactcgggaggctgaggtgggaaaatcacagggacccggcgggtggaggttgcagtgagttgagatcgcaccactgcactctggcctgggggtgacagagattgtctcaaaaaaaaaaaaaaaaaaaaaaaaagaaattgaacaaatttacatgagaaaaaattaaaagttaagttggatgggcacggtggctcacgcctgtaatcccagcactttgggaggccaaggnaggcggatcacttgaggtcaggagttcaagaccagcctggccaatatggtgaaaccccatctctactaaaaatacaaaaaaattagccgggtgtggtggagcgtgcctgtaatcccagctacttgggaggctgaggcaggagaatcgcttgaacccacggcaaaggttacagtgagctgagatcgtgccactgccctccagctggggtgacataacgagattccatctcaaaaaaccagtgccaggcatggtggctcatgcctgtaatcccagcactttgggaggctgaggcaggtggatcacctgaggtcgggagttcaagaccagcctgaccaacatggagaaacctcgtctctactaaaagcacaaaattagccgggcatggtggcacatgcctgtaatcccagctactcgggaggctgaggcaggagaatcgcttgaacccggcaggcagaggttgcagtgagctgaaatcgagccattgcactccagcctgggcaacaaaagcgaaactcctccaaaaaaaaaaaaaaaaaaagcaaagctgcacatttccagccatgcctaccacaaaatgatactagaagaaaatgatactaatgctaagagtggccccaagccctcacctagatgggggtggacggcatctctgcactggggcctagggaagctataggtgggggtctggctgcccagtgactgacctggttagtgtgggtggcctgcagaggacattcggggctttgcaaagagggtaacccatggagggcagccagccggcctcgggcaagggaagggcccggcatgggctctgggaaacactctggtgtcacctggcgcagtcttggcccaagtggccgcccacctgggccccagggaggatgcctgccagagcataggtggccctcgtgccctcctttacgggacccacatcaaaacctggaccagccccattccttggggaagctaaggacagaacaggccgggcctcaagtgttccccctgccttggcctcccaaagtgccaggattacaggtatgagtcactgcgcccggcctgttctgtccttggggaagctaaggac

SEQ ID NO: 12464 - DNA, 6311 bp, Homo sapiens
  misc_feature (4758)..(4758): n is a, c, g, or t
  misc_feature (5227)..(5227): n is a, c, g, or t
acaattttatcattattttaatcaagtaacttagctgtttaaacaaatccttaagacagttcaatagagcaaagtgaagaattactctattaggataacctgtgaacaaagttcagattatgtgaatttgtattccattcgaagtttggcaccagactgaacactggtttaagccaaattttttagtgttctagaagccctgaacatgttttccctcagattaaaagtagaacctttataatagaacctcattagcttgacactgagtatgctgagtgcaacttagcttaggtcaccagtatctcctacagaattccagttaatgaaagcagatcagccttgcggcaaagaatttgaaacctaggcaacatacaagtttgaagaaaaaaaaatcctctttggtgtgacaaagcacattccctccaggtatatggctcctgctccacttgcacccgaatcttgatcaaaggcagctggagaccaattcttgtctctccaataagattgctaggtttcaattccttaaaatatcaagccaaccaagttttattacatcaaatgtttctatcatttcaatgtgaaaatttttttacgcctatttgttattaaggtctcattatctgtgaaataatcacaaaaaaacagaggtgaatggtataagccactgctccaaaattaaccctatcgattctcgattcccactgtgcactttgtgaaaagggtaactgccaagaggtttaaccttgaagatgattactcaaacagtcagaacccataatatgagtttagatcaggcaaggagttcatgaggaagttatcaactcttgtgtgtccaaatctaaagccctgcatgggctctgtcaggtccttgtcacctgcactcaggtggccatcagacttcttgggtgcctggctatattcaatgtgaagtaaaaaatatcccaagtcttacaccaaaatagaggctctgacttagaagtatgcttttagctttctttttaaataagacattctggaagaaaaaaaaaagaaaaaggaaagaaaatcaagtttgaaacacagttaacacttattttggcaagaaagcaaccaaaatctaaaaagcataaactatgtgtccaaatgtaaaaggcattacagaacaaactgcaagaggggaaaattaaagccacactgaacgaaaaaatacagtatgtctaacattttggaattgtaatttaaaccctaagggcaaaagctgaaaaatcatgcttaggttgctagttaagtgcacccttccttgtttctcccaaataaaatcagtttattaattgcaccccaaagcaagttctctcagtacaaagtaactactacgtacacacaaaatgcttgttaatgtaataatttccctggctcatccaacgtgcaatgcacacgacttcaaagacaatttggggcaagtgtacatgaaatgagaaaacagctctccaagtttcaaatcctgctcttacattatttataggacactgaggtcatatttacttcttggttaagatgttgcactgtcatttcattatcagtctacctcacaatgtacattaccagatgccaatttgaggaactacagagataaaactttagtactttcttaatgggctgaataaattaattacaattaagtttgctttacatcctgttgaggacctctttgcagccccaggacctaacaatatctggcaggctccaagaatgctcatcaggtgaaatgatggcagaacatttaaagtaaggagccagttacttcagcttaagtcattcagagccaaacatctgaagaacgaccaaaatcaaacctttatttttataactgtataaatgtgatccaaatgtgtccaccactagtttttcaaaaagaaacatgctataaataagcaaactacatctgctcactgatgtgtatggactccctagatgtctcattgggcttaataacagaccactcacagtaatagatttttagtgtaaagtgtagcatgatgttaagccattttagcttttgcacatacatgttgcacttctggctgataatggaggaaaatttgcagcattatactgttaagctaggttgcatccatccctttaaatggcatcaatatcgatgtcgtcatccttgttgtctgactttacagtctcaactttcggtacactggcagccttcgaatacaccctcctcctcctcttcctcctcctcctcttcctcttcgtcttcctcctcttcctcctcctcctcttcctcgtcctcatcctcctcctcctcctcctcttcctcctcttcttcctccaccacagacgaggactcttcctgcagctcggacgatgaggcagcccccgcccccacggctggcccttccgcgcaggcggcgctccccaccaaggccaccaagcaggccggcaaggcgcggccctcggcccactccccaggcaagaagacgcccgcgccccagccccaggcgcctcctccgcagcccacacagcctctgcagcccaaggctcaggccggggccaagagccgacccaagaagagagagggcgtccacctccccaccaccaaggagctggccaagcggcagcgcctgccgtccgtggagaaccggcccaagatcgccgccttcctgccagcccggcagctctggaagtggttcggcaagcccacccagcggcgtggcatgaagggcaaggcccgcaagctcttctacaaggccatcgtgcgcggcaaggagatgatccgtatcggggactgtgccgtgttcctctctgccggccgccccaacctgccctacatcggccgcatccagagcatgtgggagtcgtggggcaacaacatggtggtccgcgtcaagtggttctaccaccccgaggagaccagcccgggcaagcagttccaccagggccagcactgggaccagaagtccagccgcagcctcccggcggccctgcgggtctccagccagaggaaggacttcatggagcgcgcgctataccagtcctcgcatgtggacgaaaatgacgtgcagacggtgtcgcacaagtgcctggtggtgggcctggagcagtatgagcagatgctgaagaccaagaagtaccaggacagcgagggcctgtactacctcgcgggcacctacgagcccaccacgggcatgatcttctccacggacggcgtgcccgtgctctgctgagcccgccgggccctgcgggccacctgtgccccgagggcggccagggacccatctccatcactgccatggcgcggagaccacgtgcgttgtgtgcatgcgagcgctcctgcaggcgtgtgcatggggccaggtgtgcacgtggatgcccgggtgagtgtgtgtgcatgcacgtgtgtgcacgcatgtgcacatgcctccagccccaccttccaacccctcagtgcccccaggacaggggcccctcttagctatcagggtatggccggaccggcccttcctgcccagcacgttgcaagcacttggccaggccggccctccaggctgctgctgcgtgggggcccgggtgcccccaggtccatgcagactggggattcggtggggaggggcgcttctaaggaaccaaactgacgctcactctgggcttcccaagcacccttagcacggagcccaccccaaggcctcccaccgtgcatgggacagggcagcccgatgccagctggcctacctgactgtgccaggggccctgcccccaccctctcaggatggcctagacttggggaacagagccgggtggggttgcagcccggagtgtctgtcaaaggcaccaggtggagagggcccggcacaggcccaccctggtccaaaccctcacactacagaaaaccccaatggtgctgaaactgtcgcccggccacgcctggcccctccccacccaggagggaggtggcacttcttaacctgtacagttttattgtaccaagagactcgccccgcccctgtatcataagcctttaaatggagtcaactttttaattatatatataaagataaatatatataaatatatatataaactttttaaaactgtgaaaaatagctatgaaattataaaaaaaaaacattctgacgtgcagaatattattttttatttcctgttagattatagtgtctagcaccggcttcaccggcctcccagtccccagcacaccccccgcccaccccgccaagtgtactgtactcaccccccaggatagagaagtgtttgttagggagagaagagggagaggcaggagccggcccaagcccagggtccctgcttgggccccagaaagcacttaaccaggccccaagccttcaagggaaaccaaggcctcaaccagacaatcttgagggaaggaaaagccagactttgggtttgttttttgggggaattattggttttttttttttatgtttcttttggaattttgtttgttggcaaattctgtgtgatcttttttcataaaaaaaaagaaaagatttaattggaaaaataaaattgtctggagtggtttatttcaggggctggagtaggggtggtgtctgggggcattctgccatatcagggcaccaagaagcaggattcgactggaagaagttgggtgccacgcgtgcaggggcggtgaccccatgcagccatctaaatgagctcatcggctgggcacagtggctcacgcctgtaatgccagcactttgggaggccaaggcaggcggatcacttgangtcaggagttcgagaccagcctggccaatatggtgaaaccccatctctactaaaaatacaaaaaaaaattagccaggtgtggtagagcgtgcctgtaatcccagcactttaggaggccgaggcgggaggatcacttcaggccaggagtttcagaccagcctgagcaatgtggtgaaaccccgtctctactaaaaatacaaaaattagccgggtgtggtggcccacacctgtaatcccagctactcgggaggctgaggtgggaaaatcacagggacccggcgggtggaggttgcagtgagttgagatcgcaccactgcactctggcctgggggtgacagagattgtctcaaaaaaaaaaaaaaaaaaaaaaaaagaaattgaacaaatttacatgagaaaaaattaaaagttaagttggatgggcacggtggctcacgcctgtaatcccagcactttgggaggccaaggnaggcggatcacttgaggtcaggagttcaagaccagcctggccaatatggtgaaaccccatctctactaaaaatacaaaaaaattagccgggtgtggtggagcgtgcctgtaatcccagctacttgggaggctgaggcaggagaatcgcttgaacccacggcaaaggttacagtgagctgagatcgtgccactgccctccagctggggtgacataacgagattccatctcaaaaaaccagtgccaggcatggtggctcatgcctgtaatcccagcactttgggaggctgaggcaggtggatcacctgaggtcgggagttcaagaccagcctgaccaacatggagaaacctcgtctctactaaaagcacaaaattagccgggcatggtggcacatgcctgtaatcccagctactcgggaggctgaggcaggagaatcgcttgaacccggcaggcagaggttgcagtgagctgaaatcgagccattgcactccagcctgggcaacaaaagcgaaactcctccaaaaaaaaaaaaaaaaaaagcaaagctgcacatttccagccatgcctaccacaaaatgatactagaagaaaatgatactaatgctaagagtggccccaagccctcacctagatgggggtggacggcatctctgcactggggcctagggaagctataggtgggggtctggctgcccagtgactgacctggttagtgtgggtggcctgcagaggacattcggggctttgcaaagagggtaacccatggagggcagccagccggcctcgggcaagggaagggcccggcatgggctctgggaaacactctggtgtcacctggcgcagtcttggcccaagtggccgcccacctgggccccagggaggatgcctgccagagcataggtggccctcgtgccctcctttacgggacccacatcaaaacctggaccagccccattccttggggaagctaaggacagaacaggccgggcctcaagtgttccccctgccttggcctcccaaagtgccaggattacaggtatgagtcactgcgcccggcctgttctgtccttggggaagctaaggac

SEQ ID NO: 12465 - DNA, 5577 bp, Homo sapiens
  misc_feature (4024)..(4024): n is a, c, g, or t
  misc_feature (4493)..(4493): n is a, c, g, or t
gcggccgctgaccccggcccctcgctcctgcatcatcgacaaggatgagctgaaggacggcctgcgtgtgctcatccccatggatgacaagctgctgtacgccgggcacgtgcagaccgtgcactcgccagacatataccgcgtggtggtggagggtgagcggggcaaccggccccacatctactgtctggagcagttgctgcaggaggcgatcatcgatgtgaggccagcctccactcgcttcttgccacaagggaccaggattgcagcctactggagccagcagtaccgctgtctctacccaggcactgtggtccgagggttactggacctggaggacgatggggacttgatcaccgtggagtttgacgacggagacacgggcaggatccccctctcacatatccgcctcctgccccctgactataagatacagtgtgctgagccgtccccggcccttctggtgccaagtgccaagcgccgcagccggaagaccagcaaagacactggggagggcaaagatggtggcacggctgggtcggaggagccaggagccaaggcccgtgggcgtgggcggaaacccagcgccaaggccaagggtgacagagccgctaccctggaggaggggaacccaacagacgaggtccccagtacccccttagccctggagccgagcagcaccccaggttccaagaagagccccccagagcctgtggacaagcgagccaaggcccccaaggcgcgcccggcaccgccgcagcccagtcccgcaccacccgccttcaccagctgcccagcacccgagccatttgcagagctgccagctcctgccacctccctggccccagcacccctcatcaccatgcctgccacacgccccaagcccaagaaggcgcgggcagccgaggagtcgggtgccaagggccctcggaggccgggggaggaggccgagctgcttgtcaaactggaccacgagggtgtcacgtcacccaaaagcaagaaggctaaagaggccctgctgctccgggaggatccgggggcggggggctggcaggagcccaagagcctcctgagcctgggcagctatccccccgcggccggcagcagcgagcccaaggcaccctggcccaaggccaccgacggggacctcgcccaggagcccgggccggggctcacgttcgaggactctgggaaccccaagagcccagacaaggcccaggctgagcaggacggggccgaagagtccgagagcagcagcagcagcagtagtggcagcagtagcagcagcagcagcagcagcagcagcggctcggagacagaaggggaggaggaaggcgacaagaacggggacgggggctgcggcaccgggggccgtaactgcagcgctgccagctccagggcggcctcaccggcctcctcctcctcctcctcatcctctcctcctcctcctcctcctcctcatcctcctcttcctcctcctcctcttcctcctcctcctcttcctcttcgtcttcctcctcttcctcctcctcctcttcctcgtcctcatcctcctcctcctcctcctcttcctcctcttcttcctccaccacagacgaggactcttcctgcagctcggacgatgaggcagcccccgcccccacggctggcccttccgcgcaggcggcgctccccaccaaggccaccaagcaggccggcaaggcgcggccctcggcccactccccaggcaagaagacgcccgcgccccagccccaggcgcctcctccgcagcccacacagcctctgcagcccaaggctcaggccggggccaagagccgacccaagaagagagagggcgtccacctccccaccaccaaggagctggccaagcggcagcgcctgccgtccgtggagaaccggcccaagatcgccgccttcctgccagcccggcagctctggaagtggttcggcaagcccacccagcggcgtggcatgaagggcaaggcccgcaagctcttctacaaggccatcgtgcgcggcaaggagatgatccgtatcggggactgtgccgtgttcctctctgccggccgccccaacctgccctacatcggccgcatccagagcatgtgggagtcgtggggcaacaacatggtggtccgcgtcaagtggttctaccaccccgaggagaccagcccgggcaagcagttccaccagggccagcactgggaccagaagtccagccgcagcctcccggcggccctgcgggtctccagccagaggaaggacttcatggagcgcgcgctataccagtcctcgcatgtggacgaaaatgacgtgcagacggtgtcgcacaagtgcctggtggtgggcctggagcagtatgagcagatgctgaagaccaagaagtaccaggacagcgagggcctgtactacctcgcgggcacctacgagcccaccacgggcatgatcttctccacggacggcgtgcccgtgctctgctgagcccgccgggccctgcgggccacctgtgccccgagggcggccagggacccatctccatcactgccatggcgcggagaccacgtgcgttgtgtgcatgcgagcgctcctgcaggcgtgtgcatggggccaggtgtgcacgtggatgcccgggtgagtgtgtgtgcatgcacgtgtgtgcacgcatgtgcacatgcctccagccccaccttccaacccctcagtgcccccaggacaggggcccctcttagctatcagggtatggccggaccggcccttcctgcccagcacgttgcaagcacttggccaggccggccctccaggctgctgctgcgtgggggcccgggtgcccccaggtccatgcagactggggattcggtggggaggggcgcttctaaggaaccaaactgacgctcactctgggcttcccaagcacccttagcacggagcccaccccaaggcctcccaccgtgcatgggacagggcagcccgatgccagctggcctacctgactgtgccaggggccctgcccccaccctctcaggatggcctagacttggggaacagagccgggtggggttgcagcccggagtgtctgtcaaaggcaccaggtggagagggcccggcacaggcccaccctggtccaaaccctcacactacagaaaaccccaatggtgctgaaactgtcgcccggccacgcctggcccctccccacccaggagggaggtggcacttcttaacctgtacagttttattgtaccaagagactcgccccgcccctgtatcataagcctttaaatggagtcaactttttaattatatatataaagataaatatatataaatatatatataaactttttaaaactgtgaaaaatagctatgaaattataaaaaaaaaacattctgacgtgcagaatattattttttatttcctgttagattatagtgtctagcaccggcttcaccggcctcccagtccccagcacaccccccgcccaccccgccaagtgtactgtactcaccccccaggatagagaagtgtttgttagggagagaagagggagaggcaggagccggcccaagcccagggtccctgcttgggccccagaaagcacttaaccaggccccaagccttcaagggaaaccaaggcctcaaccagacaatcttgagggaaggaaaagccagactttgggtttgttttttgggggaattattggttttttttttttatgtttcttttggaattttgtttgttggcaaattctgtgtgatcttttttcataaaaaaaaagaaaagatttaattggaaaaataaaattgtctggagtggtttatttcaggggctggagtaggggtggtgtctgggggcattctgccatatcagggcaccaagaagcaggattcgactggaagaagttgggtgccacgcgtgcaggggcggtgaccccatgcagccatctaaatgagctcatcggctgggcacagtggctcacgcctgtaatgccagcactttgggaggccaaggcaggcggatcacttgangtcaggagttcgagaccagcctggccaatatggtgaaaccccatctctactaaaaatacaaaaaaaaattagccaggtgtggtagagcgtgcctgtaatcccagcactttaggaggccgaggcgggaggatcacttcaggccaggagtttcagaccagcctgagcaatgtggtgaaaccccgtctctactaaaaatacaaaaattagccgggtgtggtggcccacacctgtaatcccagctactcgggaggctgaggtgggaaaatcacagggacccggcgggtggaggttgcagtgagttgagatcgcaccactgcactctggcctgggggtgacagagattgtctcaaaaaaaaaaaaaaaaaaaaaaaaagaaattgaacaaatttacatgagaaaaaattaaaagttaagttggatgggcacggtggctcacgcctgtaatcccagcactttgggaggccaaggnaggcggatcacttgaggtcaggagttcaagaccagcctggccaatatggtgaaaccccatctctactaaaaatacaaaaaaattagccgggtgtggtggagcgtgcctgtaatcccagctacttgggaggctgaggcaggagaatcgcttgaacccacggcaaaggttacagtgagctgagatcgtgccactgccctccagctggggtgacataacgagattccatctcaaaaaaccagtgccaggcatggtggctcatgcctgtaatcccagcactttgggaggctgaggcaggtggatcacctgaggtcgggagttcaagaccagcctgaccaacatggagaaacctcgtctctactaaaagcacaaaattagccgggcatggtggcacatgcctgtaatcccagctactcgggaggctgaggcaggagaatcgcttgaacccggcaggcagaggttgcagtgagctgaaatcgagccattgcactccagcctgggcaacaaaagcgaaactcctccaaaaaaaaaaaaaaaaaaagcaaagctgcacatttccagccatgcctaccacaaaatgatactagaagaaaatgatactaatgctaagagtggccccaagccctcacctagatgggggtggacggcatctctgcactggggcctagggaagctataggtgggggtctggctgcccagtgactgacctggttagtgtgggtggcctgcagaggacattcggggctttgcaaagagggtaacccatggagggcagccagccggcctcgggcaagggaagggcccggcatgggctctgggaaacactctggtgtcacctggcgcagtcttggcccaagtggccgcccacctgggccccagggaggatgcctgccagagcataggtggccctcgtgccctcctttacgggacccacatcaaaacctggaccagccccattccttggggaagctaaggacagaacaggccgggcctcaagtgttccccctgccttggcctcccaaagtgccaggattacaggtatgagtcactgcgcccggcctgttctgtccttggggaagctaaggac

SEQ ID NO: 12466 - DNA, 3680 bp, Homo sapiens
  misc_feature (2127)..(2127): n is a, c, g, or t
  misc_feature (2596)..(2596): n is a, c, g, or t
agtgacttaaggatcttcccgactagcccgacaggctctggaagtgtttcggcaagcccacccaacggcgtggcatgaagggcaaggcccgcaagctcttctacaaggccatcgtgcgcggcaaggagatgatccgtatcggggactgtgccgtgttcctctctgccggccgccccaacctgccctacatcggccgcatccagagcatgtgggagtcgtggggcaacaacatggtggtccgcgtcaagtggttctaccaccccgaggagaccagcccgggcaagcagttccaccagggccagcactgggaccagaagtccagccgcagcctcccggcggccctgcgggtctccagccagaggaaggacttcatggagcgcgcgctataccagtcctcgcatgtggacgaaaatgacgtgcagacggtgtcgcacaagtgcctggtggtgggcctggagcagtatgagcagatgctgaagaccaagaagtaccaggacagcgagggcctgtactacctcgcgggcacctacgagcccaccacgggcatgatcttctccacggacggcgtgcccgtgctctgctgagcccgccgggccctgcgggccacctgtgccccgagggcggccagggacccatctccatcactgccatggcgcggagaccacgtgcgttgtgtgcatgcgagcgctcctgcaggcgtgtgcatggggccaggtgtgcacgtggatgcccgggtgagtgtgtgtgcatgcacgtgtgtgcacgcatgtgcacatgcctccagccccaccttccaacccctcagtgcccccaggacaggggcccctcttagctatcagggtatggccggaccggcccttcctgcccagcacgttgcaagcacttggccaggccggccctccaggctgctgctgcgtgggggcccgggtgcccccaggtccatgcagactggggattcggtggggaggggcgcttctaaggaaccaaactgacgctcactctgggcttcccaagcacccttagcacggagcccaccccaaggcctcccaccgtgcatgggacagggcagcccgatgccagctggcctacctgactgtgccaggggccctgcccccaccctctcaggatggcctagacttggggaacagagccgggtggggttgcagcccggagtgtctgtcaaaggcaccaggtggagagggcccggcacaggcccaccctggtccaaaccctcacactacagaaaaccccaatggtgctgaaactgtcgcccggccacgcctggcccctccccacccaggagggaggtggcacttcttaacctgtacagttttattgtaccaagagactcgccccgcccctgtatcataagcctttaaatggagtcaactttttaattatatatataaagataaatatatataaatatatatataaactttttaaaactgtgaaaaatagctatgaaattataaaaaaaaaacattctgacgtgcagaatattattttttatttcctgttagattatagtgtctagcaccggcttcaccggcctcccagtccccagcacaccccccgcccaccccgccaagtgtactgtactcaccccccaggatagagaagtgtttgttagggagagaagagggagaggcaggagccggcccaagcccagggtccctgcttgggccccagaaagcacttaaccaggccccaagccttcaagggaaaccaaggcctcaaccagacaatcttgagggaaggaaaagccagactttgggtttgttttttgggggaattattggttttttttttttatgtttcttttggaattttgtttgttggcaaattctgtgtgatcttttttcataaaaaaaaagaaaagatttaattggaaaaataaaattgtctggagtggtttatttcaggggctggagtaggggtggtgtctgggggcattctgccatatcagggcaccaagaagcaggattcgactggaagaagttgggtgccacgcgtgcaggggcggtgaccccatgcagccatctaaatgagctcatcggctgggcacagtggctcacgcctgtaatgccagcactttgggaggccaaggcaggcggatcacttgangtcaggagttcgagaccagcctggccaatatggtgaaaccccatctctactaaaaatacaaaaaaaaattagccaggtgtggtagagcgtgcctgtaatcccagcactttaggaggccgaggcgggaggatcacttcaggccaggagtttcagaccagcctgagcaatgtggtgaaaccccgtctctactaaaaatacaaaaattagccgggtgtggtggcccacacctgtaatcccagctactcgggaggctgaggtgggaaaatcacagggacccggcgggtggaggttgcagtgagttgagatcgcaccactgcactctggcctgggggtgacagagattgtctcaaaaaaaaaaaaaaaaaaaaaaaaagaaattgaacaaatttacatgagaaaaaattaaaagttaagttggatgggcacggtggctcacgcctgtaatcccagcactttgggaggccaaggnaggcggatcacttgaggtcaggagttcaagaccagcctggccaatatggtgaaaccccatctctactaaaaatacaaaaaaattagccgggtgtggtggagcgtgcctgtaatcccagctacttgggaggctgaggcaggagaatcgcttgaacccacggcaaaggttacagtgagctgagatcgtgccactgccctccagctggggtgacataacgagattccatctcaaaaaaccagtgccaggcatggtggctcatgcctgtaatcccagcactttgggaggctgaggcaggtggatcacctgaggtcgggagttcaagaccagcctgaccaacatggagaaacctcgtctctactaaaagcacaaaattagccgggcatggtggcacatgcctgtaatcccagctactcgggaggctgaggcaggagaatcgcttgaacccggcaggcagaggttgcagtgagctgaaatcgagccattgcactccagcctgggcaacaaaagcgaaactcctccaaaaaaaaaaaaaaaaaaagcaaagctgcacatttccagccatgcctaccacaaaatgatactagaagaaaatgatactaatgctaagagtggccccaagccctcacctagatgggggtggacggcatctctgcactggggcctagggaagctataggtgggggtctggctgcccagtgactgacctggttagtgtgggtggcctgcagaggacattcggggctttgcaaagagggtaacccatggagggcagccagccggcctcgggcaagggaagggcccggcatgggctctgggaaacactctggtgtcacctggcgcagtcttggcccaagtggccgcccacctgggccccagggaggatgcctgccagagcataggtggccctcgtgccctcctttacgggacccacatcaaaacctggaccagccccattccttggggaagctaaggacagaacaggccgggcctcaagtgttccccctgccttggcctcccaaagtgccaggattacaggtatgagtcactgcgcccggcctgttctgtccttggggaagctaaggac

SEQ ID NO: 12467 - DNA, 3289 bp, Homo sapiens
  misc_feature (1736)..(1736): n is a, c, g, or t
  misc_feature (2205)..(2205): n is a, c, g, or t
ccccccacctgccatcctgatatccccgcgtgcccgcagcgcgcgctataccagtcctcgcatgtggacgtatgagcagatgctgaagaccaagaagtaccaggacagcgagggcctgtactacctcgcgggcacctacgagcccaccacgggcatgatcttctccacggacggcgtgcccgtgctctgctgagcccgccgggccctgcgggccacctgtgccccgagggcggccagggacccatctccatcactgccatggcgcggagaccacgtgcgttgtgtgcatgcgagcgctcctgcaggcgtgtgcatggggccaggtgtgcacgtggatgcccgggtgagtgtgtgtgcatgcacgtgtgtgcacgcatgtgcacatgcctccagccccaccttccaacccctcagtgcccccaggacaggggcccctcttagctatcagggtatggccggaccggcccttcctgcccagcacgttgcaagcacttggccaggccggccctccaggctgctgctgcgtgggggcccgggtgcccccaggtccatgcagactggggattcggtggggaggggcgcttctaaggaaccaaactgacgctcactctgggcttcccaagcacccttagcacggagcccaccccaaggcctcccaccgtgcatgggacagggcagcccgatgccagctggcctacctgactgtgccaggggccctgcccccaccctctcaggatggcctagacttggggaacagagccgggtggggttgcagcccggagtgtctgtcaaaggcaccaggtggagagggcccggcacaggcccaccctggtccaaaccctcacactacagaaaaccccaatggtgctgaaactgtcgcccggccacgcctggcccctccccacccaggagggaggtggcacttcttaacctgtacagttttattgtaccaagagactcgccccgcccctgtatcataagcctttaaatggagtcaactttttaattatatatataaagataaatatatataaatatatatataaactttttaaaactgtgaaaaatagctatgaaattataaaaaaaaaacattctgacgtgcagaatattattttttatttcctgttagattatagtgtctagcaccggcttcaccggcctcccagtccccagcacaccccccgcccaccccgccaagtgtactgtactcaccccccaggatagagaagtgtttgttagggagagaagagggagaggcaggagccggcccaagcccagggtccctgcttgggccccagaaagcacttaaccaggccccaagccttcaagggaaaccaaggcctcaaccagacaatcttgagggaaggaaaagccagactttgggtttgttttttgggggaattattggttttttttttttatgtttcttttggaattttgtttgttggcaaattctgtgtgatcttttttcataaaaaaaaagaaaagatttaattggaaaaataaaattgtctggagtggtttatttcaggggctggagtaggggtggtgtctgggggcattctgccatatcagggcaccaagaagcaggattcgactggaagaagttgggtgccacgcgtgcaggggcggtgaccccatgcagccatctaaatgagctcatcggctgggcacagtggctcacgcctgtaatgccagcactttgggaggccaaggcaggcggatcacttgangtcaggagttcgagaccagcctggccaatatggtgaaaccccatctctactaaaaatacaaaaaaaaattagccaggtgtggtagagcgtgcctgtaatcccagcactttaggaggccgaggcgggaggatcacttcaggccaggagtttcagaccagcctgagcaatgtggtgaaaccccgtctctactaaaaatacaaaaattagccgggtgtggtggcccacacctgtaatcccagctactcgggaggctgaggtgggaaaatcacagggacccggcgggtggaggttgcagtgagttgagatcgcaccactgcactctggcctgggggtgacagagattgtctcaaaaaaaaaaaaaaaaaaaaaaaaagaaattgaacaaatttacatgagaaaaaattaaaagttaagttggatgggcacggtggctcacgcctgtaatcccagcactttgggaggccaaggnaggcggatcacttgaggtcaggagttcaagaccagcctggccaatatggtgaaaccccatctctactaaaaatacaaaaaaattagccgggtgtggtggagcgtgcctgtaatcccagctacttgggaggctgaggcaggagaatcgcttgaacccacggcaaaggttacagtgagctgagatcgtgccactgccctccagctggggtgacataacgagattccatctcaaaaaaccagtgccaggcatggtggctcatgcctgtaatcccagcactttgggaggctgaggcaggtggatcacctgaggtcgggagttcaagaccagcctgaccaacatggagaaacctcgtctctactaaaagcacaaaattagccgggcatggtggcacatgcctgtaatcccagctactcgggaggctgaggcaggagaatcgcttgaacccggcaggcagaggttgcagtgagctgaaatcgagccattgcactccagcctgggcaacaaaagcgaaactcctccaaaaaaaaaaaaaaaaaaagcaaagctgcacatttccagccatgcctaccacaaaatgatactagaagaaaatgatactaatgctaagagtggccccaagccctcacctagatgggggtggacggcatctctgcactggggcctagggaagctataggtgggggtctggctgcccagtgactgacctggttagtgtgggtggcctgcagaggacattcggggctttgcaaagagggtaacccatggagggcagccagccggcctcgggcaagggaagggcccggcatgggctctgggaaacactctggtgtcacctggcgcagtcttggcccaagtggccgcccacctgggccccagggaggatgcctgccagagcataggtggccctcgtgccctcctttacgggacccacatcaaaacctggaccagccccattccttggggaagctaaggacagaacaggccgggcctcaagtgttccccctgccttggcctcccaaagtgccaggattacaggtatgagtcactgcgcccggcctgttctgtccttggggaagctaaggac

SEQ ID NO: 12468 - DNA, 2885 bp, Homo sapiens
  misc_feature (1332)..(1332): n is a, c, g, or t
  misc_feature (1801)..(1801): n is a, c, g, or t
gcggccgctgaccccggcccctcgctcctgcatcatcgacaaggatgagctgaaggacggcccttcctgcccagcacgttgcaagcacttggccaggccggccctccaggctgctgctgcgtgggggcccgggtgcccccaggtccatgcagactggggattcggtggggaggggcgcttctaaggaaccaaactgacgctcactctgggcttcccaagcacccttagcacggagcccaccccaaggcctcccaccgtgcatgggacagggcagcccgatgccagctggcctacctgactgtgccaggggccctgcccccaccctctcaggatggcctagacttggggaacagagccgggtggggttgcagcccggagtgtctgtcaaaggcaccaggtggagagggcccggcacaggcccaccctggtccaaaccctcacactacagaaaaccccaatggtgctgaaactgtcgcccggccacgcctggcccctccccacccaggagggaggtggcacttcttaacctgtacagttttattgtaccaagagactcgccccgcccctgtatcataagcctttaaatggagtcaactttttaattatatatataaagataaatatatataaatatatatataaactttttaaaactgtgaaaaatagctatgaaattataaaaaaaaaacattctgacgtgcagaatattattttttatttcctgttagattatagtgtctagcaccggcttcaccggcctcccagtccccagcacaccccccgcccaccccgccaagtgtactgtactcaccccccaggatagagaagtgtttgttagggagagaagagggagaggcaggagccggcccaagcccagggtccctgcttgggccccagaaagcacttaaccaggccccaagccttcaagggaaaccaaggcctcaaccagacaatcttgagggaaggaaaagccagactttgggtttgttttttgggggaattattggttttttttttttatgtttcttttggaattttgtttgttggcaaattctgtgtgatcttttttcataaaaaaaaagaaaagatttaattggaaaaataaaattgtctggagtggtttatttcaggggctggagtaggggtggtgtctgggggcattctgccatatcagggcaccaagaagcaggattcgactggaagaagttgggtgccacgcgtgcaggggcggtgaccccatgcagccatctaaatgagctcatcggctgggcacagtggctcacgcctgtaatgccagcactttgggaggccaaggcaggcggatcacttgangtcaggagttcgagaccagcctggccaatatggtgaaaccccatctctactaaaaatacaaaaaaaaattagccaggtgtggtagagcgtgcctgtaatcccagcactttaggaggccgaggcgggaggatcacttcaggccaggagtttcagaccagcctgagcaatgtggtgaaaccccgtctctactaaaaatacaaaaattagccgggtgtggtggcccacacctgtaatcccagctactcgggaggctgaggtgggaaaatcacagggacccggcgggtggaggttgcagtgagttgagatcgcaccactgcactctggcctgggggtgacagagattgtctcaaaaaaaaaaaaaaaaaaaaaaaaagaaattgaacaaatttacatgagaaaaaattaaaagttaagttggatgggcacggtggctcacgcctgtaatcccagcactttgggaggccaaggnaggcggatcacttgaggtcaggagttcaagaccagcctggccaatatggtgaaaccccatctctactaaaaatacaaaaaaattagccgggtgtggtggagcgtgcctgtaatcccagctacttgggaggctgaggcaggagaatcgcttgaacccacggcaaaggttacagtgagctgagatcgtgccactgccctccagctggggtgacataacgagattccatctcaaaaaaccagtgccaggcatggtggctcatgcctgtaatcccagcactttgggaggctgaggcaggtggatcacctgaggtcgggagttcaagaccagcctgaccaacatggagaaacctcgtctctactaaaagcacaaaattagccgggcatggtggcacatgcctgtaatcccagctactcgggaggctgaggcaggagaatcgcttgaacccggcaggcagaggttgcagtgagctgaaatcgagccattgcactccagcctgggcaacaaaagcgaaactcctccaaaaaaaaaaaaaaaaaaagcaaagctgcacatttccagccatgcctaccacaaaatgatactagaagaaaatgatactaatgctaagagtggccccaagccctcacctagatgggggtggacggcatctctgcactggggcctagggaagctataggtgggggtctggctgcccagtgactgacctggttagtgtgggtggcctgcagaggacattcggggctttgcaaagagggtaacccatggagggcagccagccggcctcgggcaagggaagggcccggcatgggctctgggaaacactctggtgtcacctggcgcagtcttggcccaagtggccgcccacctgggccccagggaggatgcctgccagagcataggtggccctcgtgccctcctttacgggacccacatcaaaacctggaccagccccattccttggggaagctaaggacagaacaggccgggcctcaagtgttccccctgccttggcctcccaaagtgccaggattacaggtatgagtcactgcgcccggcctgttctgtccttggggaagctaaggac

SEQ ID NO: 12469 - DNA, 3013 bp, Homo sapiens
  misc_feature (1460)..(1460): n is a, c, g, or t
  misc_feature (1929)..(1929): n is a, c, g, or t
cgaacgctcaggacgatgtagagagatccccggcggcatggggccaggtgtgcacgtggatgcccgggtgagtgtgtgtgcatgcacgtgtgtgcacgcatgtgcacatgcctccagccccaccttccaacccctcagtgcccccaggacaggggcccctcttagctatcagggtatggccggaccggcccttcctgcccagcacgttgcaagcacttggccaggccggccctccaggctgctgctgcgtgggggcccgggtgcccccaggtccatgcagactggggattcggtggggaggggcgcttctaaggaaccaaactgacgctcactctgggcttcccaagcacccttagcacggagcccaccccaaggcctcccaccgtgcatgggacagggcagcccgatgccagctggcctacctgactgtgccaggggccctgcccccaccctctcaggatggcctagacttggggaacagagccgggtggggttgcagcccggagtgtctgtcaaaggcaccaggtggagagggcccggcacaggcccaccctggtccaaaccctcacactacagaaaaccccaatggtgctgaaactgtcgcccggccacgcctggcccctccccacccaggagggaggtggcacttcttaacctgtacagttttattgtaccaagagactcgccccgcccctgtatcataagcctttaaatggagtcaactttttaattatatatataaagataaatatatataaatatatatataaactttttaaaactgtgaaaaatagctatgaaattataaaaaaaaaacattctgacgtgcagaatattattttttatttcctgttagattatagtgtctagcaccggcttcaccggcctcccagtccccagcacaccccccgcccaccccgccaagtgtactgtactcaccccccaggatagagaagtgtttgttagggagagaagagggagaggcaggagccggcccaagcccagggtccctgcttgggccccagaaagcacttaaccaggccccaagccttcaagggaaaccaaggcctcaaccagacaatcttgagggaaggaaaagccagactttgggtttgttttttgggggaattattggttttttttttttatgtttcttttggaattttgtttgttggcaaattctgtgtgatcttttttcataaaaaaaaagaaaagatttaattggaaaaataaaattgtctggagtggtttatttcaggggctggagtaggggtggtgtctgggggcattctgccatatcagggcaccaagaagcaggattcgactggaagaagttgggtgccacgcgtgcaggggcggtgaccccatgcagccatctaaatgagctcatcggctgggcacagtggctcacgcctgtaatgccagcactttgggaggccaaggcaggcggatcacttgangtcaggagttcgagaccagcctggccaatatggtgaaaccccatctctactaaaaatacaaaaaaaaattagccaggtgtggtagagcgtgcctgtaatcccagcactttaggaggccgaggcgggaggatcacttcaggccaggagtttcagaccagcctgagcaatgtggtgaaaccccgtctctactaaaaatacaaaaattagccgggtgtggtggcccacacctgtaatcccagctactcgggaggctgaggtgggaaaatcacagggacccggcgggtggaggttgcagtgagttgagatcgcaccactgcactctggcctgggggtgacagagattgtctcaaaaaaaaaaaaaaaaaaaaaaaaagaaattgaacaaatttacatgagaaaaaattaaaagttaagttggatgggcacggtggctcacgcctgtaatcccagcactttgggaggccaaggnaggcggatcacttgaggtcaggagttcaagaccagcctggccaatatggtgaaaccccatctctactaaaaatacaaaaaaattagccgggtgtggtggagcgtgcctgtaatcccagctacttgggaggctgaggcaggagaatcgcttgaacccacggcaaaggttacagtgagctgagatcgtgccactgccctccagctggggtgacataacgagattccatctcaaaaaaccagtgccaggcatggtggctcatgcctgtaatcccagcactttgggaggctgaggcaggtggatcacctgaggtcgggagttcaagaccagcctgaccaacatggagaaacctcgtctctactaaaagcacaaaattagccgggcatggtggcacatgcctgtaatcccagctactcgggaggctgaggcaggagaatcgcttgaacccggcaggcagaggttgcagtgagctgaaatcgagccattgcactccagcctgggcaacaaaagcgaaactcctccaaaaaaaaaaaaaaaaaaagcaaagctgcacatttccagccatgcctaccacaaaatgatactagaagaaaatgatactaatgctaagagtggccccaagccctcacctagatgggggtggacggcatctctgcactggggcctagggaagctataggtgggggtctggctgcccagtgactgacctggttagtgtgggtggcctgcagaggacattcggggctttgcaaagagggtaacccatggagggcagccagccggcctcgggcaagggaagggcccggcatgggctctgggaaacactctggtgtcacctggcgcagtcttggcccaagtggccgcccacctgggccccagggaggatgcctgccagagcataggtggccctcgtgccctcctttacgggacccacatcaaaacctggaccagccccattccttggggaagctaaggacagaacaggccgggcctcaagtgttccccctgccttggcctcccaaagtgccaggattacaggtatgagtcactgcgcccggcctgttctgtccttggggaagctaaggac

SEQ ID NO: 12470 - DNA, 2767 bp, Homo sapiens
gaaggaagcccccagccccttccaggccctgttctcagatatcccgcccaggtacccgttccaagccctgccaccgcactacgggaggccctaccctttcctgctgcagcccacggccgccgccgacgcggacggcttggcccctgatgtgccgctcccggctgatgggcccgagcgcctggcactctcacccgaagacaagcccatccgcttgtccccctccaagatcacagagccgctgcgggagggcccggaggaagaaccgctggctgagcgggaggtgaaggcagaggtggaggacatggacgagggccccacagagctgccgcctctggagtcgccgctgccactgcccgccgcggaagccatggctacccccagccctgcagggggttgtggaggtggcctgttggaggcccaggcgctgagtgccaccgggcagagctgcgcagagccctctgagtgtccagactttgtggaggggcctgaaccacgggtggattccccgggccggacagaaccctgcaccgccgccctggacctgggggtgcagctgacacccgagacactggtggaggccaaggaggagccggtggaggtgcctgtggcggtgcccgtggtggaggcagtgcccgaggaaggcctggcgcaggtggcaccgagcgagtcccagcccaccctagaaatgtcagactgtgacgtgcccgccggggagggacagtgcccgagcctggagccccaagaggccgtgcctgtactcggcagcacctgcttcctggaagaggcaagctctgaccagttcctgcccagtctggaggacccactggctggcatgaacgccctggcggcagctgcggagctgccccaggccaggcctctgccctccccgggtgctgctggagcccaggccttggagaagctggaagcagccgagagccttgtcttggagcagagcttcctgcatggcatcaccctgctaagtgagatcgcagagctggagctggagaggaggagccaagagatgggaggtgcggagcgggccctggtggcgcggccctccctggagagtctgctggcagctggcagccacatgctgagggaggtgctggatgggcccgtggtggacccactcaagaacctgcggctcccgcgggagctgaagcccaacaagaagtacagctggatgcgcaagaaggaggagcggatgtatgccatgaagtcctccctggaggacatggacgccctggagctggacttccggatgcggctggccgaggtgcagcgccagtacaaggagaagcagcgtgagctggtgaagctgcagcgccgccgggactccgaggacaggcgcgaggaaccccatagaagcttggcacgcagaggccctggcaggccgcggaaacggacccacgccccgagcgccctgtcgcccccccgcaagagagggaagagcggccacagtagcggaaagctgagcagcaagtctctgctgacatcagatgattatgagctgggagcagggataagaaagagacacaaggggtctgaggaggaacatgatgccctcatcggaatggggaaagccagggggaggaaccagacttgggatgaacatgaggcctcgtcggacttcatcagtcagctaaagattaagaagaagaagatggccagcgaccaggagcagttggcaagcaagctcgacaaggccctctccctcaccaagcaggacaagttgaagtcgcccttcaagttttcggacagtgctggggggaaatcgaaaactagcgggggctgcggcaggtacttgactccttacgacagcctgctggggaagaacaggaaggcgctggccaagggcctcggcctgtctctgaaatcctccagagaaggtaaacacaaaagggcagccaaaaccaggaagatggaggtggggttcaaggccagaggccagcccaagtcggcccattccccgtttgcctcggaagtgagcagctactcttacaatacggactcagaggaagacgaagaattcctgaaggacgagtggcccgcccaaggcccctccagctccaaactgacgccttccctcctgtgtagcatggtggcaaagaacagcaaggcagctggtggccccaagctgaccaagaggggcctggcggccccccggactctgaaacccaagccggccaccagcaggaagcagccgttttgtctgctgcttcgagaggccgaggcgcgttcctccttcagcgactcttcggaggaatcgtttgaccaaggttactagctccaaacacaaaataccttccgtgtttcctagcgagagagtgcgtgcgagtgagcgagagggaagcgagtgggcgcacgggagagatggtgggtgaggaggcccgtgcggatggccgcaagaaggctgccatctgggttcttggcagcgtagcctgctgttatcagccgaatgattttgatttttgctttgatttgtactgtatcattgtgataatatccccggctggctctttttgagctgttatatggactgcttttgagtctgcgtttctctccacttgccctcctccctgccctactttttttgatgtaattgtcatattttattgttattttgttatattattcttttttattttgtcttaacttttttttgtttttctatcgattttttttttgttgaatatcttacttataaatattataattaatcaatctctttttctttattatcaactattttattttttggtgtgta

SEQ ID NO: 12471 - DNA, 3276 bp, Homo sapiens
gaaggaagcccccagccccttccaggccctgttctcagatatcccgcccaggtacccgttccaagccctgccaccgcactacgggaggccctaccctttcctgctgcagcccacggccgccgccgacgcggacggcttggcccctgatgtgccgctcccggctgatgggcccgagcgcctggcactctcacccgaagacaagcccatccgcttgtccccctccaagatcacagagccgctgcgggagggcccggaggaagaaccgctggctgagcgggaggtgaaggcagaggtggaggacatggacgagggccccacagagctgccgcctctggagtcgccgctgccactgcccgccgcggaagccatggctacccccagccctgcagggggttgtggaggtggcctgttggaggcccaggcgctgagtgccaccgggcagagctgcgcagagccctctgagtgtccagactttgtggaggggcctgaaccacgggtggattccccgggccggacagaaccctgcaccgccgccctggacctgggggtgcagctgacacccgagacactggtggaggccaaggaggagccggtggaggtgcctgtggcggtgcccgtggtggaggcagtgcccgaggaaggcctggcgcaggtggcaccgagcgagtcccagcccaccctagaaatgtcagactgtgacgtgcccgccggggagggacagtgcccgagcctggagccccaagaggccgtgcctgtactcggcagcacctgcttcctggaagaggcaagctctgaccagttcctgcccagtctggaggacccactggctggcatgaacgccctggcggcagctgcggagctgccccaggccaggcctctgccctccccgggtgctgctggagcccaggccttggagaagctggaagcagccgagagccttgtcttggagcagagcttcctgcatggcatcaccctgctaagtgagatcgcagagctggagctggagaggaggagccaagagatgggaggtgcggagcgggccctggtggcgcggccctccctggagagtctgctggcagctggcagccacatgctgagggaggtgctggatgggcccgtggtggacccactcaagaacctgcggctcccgcgggagctgaagcccaacaagaagtacagctggatgcgcaagaaggaggagcggatgtatgccatgaagtcctccctggaggacatggacgccctggagctggacttccggatgcggctggccgaggtgcagcgccagtacaaggagaagcagcgtgagctggtgaagctgcagcgccgccgggactccgaggacaggcgcgaggaaccccatagaagcttggcacgcagaggccctggcaggccgcggaaacggacccacgccccgagcgccctgtcgcccccccgcaagagagggaagagcggccacagtagcggaaagctgagcagcaagtctctgctgacatcagatgattatgagctgggagcagggataagaaagagacacaaggggtctgaggaggaacatgatgccctcatcggaatggggaaagccagggggaggaaccagacttgggatgaacatgaggcctcgtcggacttcatcagtcagctaaagattaagaagaagaagatggccagcgaccaggagcagttggcaagcaagctcgacaaggccctctccctcaccaagcaggacaagttgaagtcgcccttcaagttttcggacagtgctggggggaaatcgaaaactagcgggggctgcggcaggtacttgactccttacgacagcctgctggggaagaacaggaaggcgctggccaagggcctcggcctgtctctgaaatcctccagagaaggtaaacacaaaagggcagccaaaaccaggaagatggaggtggggttcaaggccagaggccagcccaagtcggcccattccccgtttgcctcggaagtgagcagctactcttacaatacggactcagaggaagacgaagaattcctgaaggacgagtggcccgcccaaggcccctccagctccaaactgacgccttccctcctgtgtagcatggtggcaaagaacagcaaggcagctggtggccccaagctgaccaagaggggcctggcggccccccggactctgaaacccaagccggccaccagcaggaagcagccgttttgtctgctgcttcgagaggccgaggcgcgttcctccttcagcgactcttcggaggaatcgtttgaccaagatgagagctcggaggaggaggacgaggaggaggagctcgaggaggaggacgaggccagcggtggtggctacaggctgggtgcccgggagcgggccctgtcaccgggcctggaggagagtgggctgggcctgctggcacgcttcgccgccagcgccctccccagccccacggtgggtccatccctgtctgtggtacagctggaggccaagcagaaggcccggaagaaagaggagcggcagagcctgctgggcacagagttcgagtacaccgactcagagagcgaggtcaaggtgcgcaagcggtcgcctgcggggctgctgcggcccaagaaggggctgggggagccgggaccctccctggccgcacccacgcctggcgcccgcggtcccgaccccagcagcccagacaaggccaagctggcggtggagaaggggcgcaaggcccggaagctgcggggccccaaggagcctggcttcgaggcggggcccgaggccagcgacgacgacctgtggacgcggcgccgcagcgagcgcatcttcctgcacgacgcctcggctgctgcacctgcgcccgtcagcaccgcgcccgccaccaagaccagccgctgcgccaagggcggccccctgagcccgcgcaaggacgccgggcgtgcaaaggacaggaaggaccccaggaaggttcctgctacagtatcaaaaggcagacactggaagaagaaagggaaagaggctgggccaggagctgggctgccgccgccccgagctcctgccttgccctctgaggccagggctcctcacgccagctccctgaccgctgccaaaaggagcaaagccaaggccaaagggaaggaggtgaagaaggagaaccgcggcaaggggggtgccgtgagcaagctgatggagagcatggcagccgaggaggactttgaacccaaccaagactcgagcttctctgaggacgagcacctgccgcgtggcggggctgtggagcggccgct

SEQ ID NO: 12472 - DNA, 3572 bp, Homo sapiens
gaaggaagcccccagccccttccaggccctgttctcagatatcccgcccaggtacccgttccaagccctgccaccgcactacgggaggccctaccctttcctgctgcagcccacggccgccgccgacgcggacggcttggcccctgatgtgccgctcccggctgatgggcccgagcgcctggcactctcacccgaagacaagcccatccgcttgtccccctccaagatcacagagccgctgcgggagggcccggaggaagaaccgctggctgagcgggaggtgaaggcagaggtggaggacatggacgagggccccacagagctgccgcctctggagtcgccgctgccactgcccgccgcggaagccatggctacccccagccctgcagggggttgtggaggtggcctgttggaggcccaggcgctgagtgccaccgggcagagctgcgcagagccctctgagtgtccagactttgtggaggggcctgaaccacgggtggattccccgggccggacagaaccctgcaccgccgccctggacctgggggtgcagctgacacccgagacactggtggaggccaaggaggagccggtggaggtgcctgtggcggtgcccgtggtggaggcagtgcccgaggaaggcctggcgcaggtggcaccgagcgagtcccagcccaccctagaaatgtcagactgtgacgtgcccgccggggagggacagtgcccgagcctggagccccaagaggccgtgcctgtactcggcagcacctgcttcctggaagaggcaagctctgaccagttcctgcccagtctggaggacccactggctggcatgaacgccctggcggcagctgcggagctgccccaggccaggcctctgccctccccgggtgctgctggagcccaggccttggagaagctggaagcagccgagagccttgtcttggagcagagcttcctgcatggcatcaccctgctaagtgagatcgcagagctggagctggagaggaggagccaagagatgggaggtgcggagcgggccctggtggcgcggccctccctggagagtctgctggcagctggcagccacatgctgagggaggtgctggatgggcccgtggtggacccactcaagaacctgcggctcccgcgggagctgaagcccaacaagaagtacagctggatgcgcaagaaggaggagcggatgtatgccatgaagtcctccctggaggacatggacgccctggagctggacttccggatgcggctggccgaggtgcagcgccagtacaaggagaagcagcgtgagctggtgaagctgcagcgccgccgggactccgaggacaggcgcgaggaaccccatagaagcttggcacgcagaggccctggcaggccgcggaaacggacccacgccccgagcgccctgtcgcccccccgcaagagagggaagagcggccacagtagcggaaagctgagcagcaagtctctgctgacatcagatgattatgagctgggagcagggataagaaagagacacaaggggtctgaggaggaacatgatgccctcatcggaatggggaaagccagggggaggaaccagacttgggatgaacatgaggcctcgtcggacttcatcagtcagctaaagattaagaagaagaagatggccagcgaccaggagcagttggcaagcaagctcgacaaggccctctccctcaccaagcaggacaagttgaagtcgcccttcaagttttcggacagtgctggggggaaatcgaaaactagcgggggctgcggcaggtacttgactccttacgacagcctgctggggaagaacaggaaggcgctggccaagggcctcggcctgtctctgaaatcctccagagaaggtaaacacaaaagggcagccaaaaccaggaagatggaggtggggttcaaggccagaggccagcccaagtcggcccattccccgtttgcctcggaagtgagcagctactcttacaatacggactcagaggaagacgaagaattcctgaaggacgagtggcccgcccaaggcccctccagctccaaactgacgccttccctcctgtgtagcatggtggcaaagaacagcaaggcagctggtggccccaagctgaccaagaggggcctggcggccccccggactctgaaacccaagccggccaccagcaggaagcagccgttttgtctgctgcttcgagaggccgaggcgcgttcctccttcagcgactcttcggaggaatcgtttgaccaagatgagagctcggaggaggaggacgaggaggaggagctcgaggaggaggacgaggccagcggtggtggctacaggctgggtgcccgggagcgggccctgtcaccgggcctggaggagagtgggctgggcctgctggcacgcttcgccgccagcgccctccccagccccacggtgggtccatccctgtctgtggtacagctggaggccaagcagaaggcccggaagaaagaggagcggcagagcctgctgggcacagagttcgagtacaccgactcagagagcgaggtcaaggtgcgcaagcggtcgcctgcggggctgctgcggcccaagaaggggctgggggagccgggaccctccctggccgcacccacgcctggcgcccgcggtcccgaccccagcagcccagacaaggccaagctggcggtggagaaggggcgcaaggcccggaagctgcggggccccaaggagcctggcttcgaggcggggcccgaggccagcgacgacgacctgtggacgcggcgccgcagcgagcgcatcttcctgcacgacgcctcggctgctgcacctgcgcccgtcagcaccgcgcccgccaccaagaccagccgctgcgccaagggcggccccctgagcccgcgcaaggacgccgggcgtgcaaaggacaggaaggaccccaggaaggtaggggccgcgctgggagggggtgccgcagaagggtccctggggttccgtgagggaggggccctctcccctcccagcctagggaagcggcttcactgttaataaccatgtactcggctccaggcccgcccggagcccctgctaggacttagccacagcaggagctgggcacctgttcctttgtttcttaagagtcaactcttgctctgtcaccaggctggagcgcagtggcctgatcatggctcactgcagcctttacctcctgggctcacgttatcctcctacctcagcctccccaaatagctggatcttcagacacatgtcactgcacctggctaatttattgtttgtagagaggggatctcgctatgttgcccaggctgatcttgaactcctgacctttagtgattcttctgccccaacctcccaaaatgctgagattacaggcatgagccaccatgcttgaccacccgtatcttacagaggtccttactctcttttctcctgtctcagaagacgactttaaaagtgaataagatacctgggaccccaaaggaagacagtgatagtgaccatagttatcaaagtattgaaaagacccttctgtgatatggta

SEQ ID NO: 12473 - DNA, 3280 bp, Homo sapiens
gaaggaagcccccagccccttccaggccctgttctcagatatcccgcccaggtacccgttccaagccctgccaccgcactacgggaggccctaccctttcctgctgcagcccacggccgccgccgacgcggacggcttggcccctgatgtgccgctcccggctgatgggcccgagcgcctggcactctcacccgaagacaagcccatccgcttgtccccctccaagatcacagagccgctgcgggagggcccggaggaagaaccgctggctgagcgggaggtgaaggcagaggtggaggacatggacgagggccccacagagctgccgcctctggagtcgccgctgccactgcccgccgcggaagccatggctacccccagccctgcagggggttgtggaggtggcctgttggaggcccaggcgctgagtgccaccgggcagagctgcgcagagccctctgagtgtccagactttgtggaggggcctgaaccacgggtggattccccgggccggacagaaccctgcaccgccgccctggacctgggggtgcagctgacacccgagacactggtggaggccaaggaggagccggtggaggtgcctgtggcggtgcccgtggtggaggcagtgcccgaggaaggcctggcgcaggtggcaccgagcgagtcccagcccaccctagaaatgtcagactgtgacgtgcccgccggggagggacagtgcccgagcctggagccccaagaggccgtgcctgtactcggcagcacctgcttcctggaagaggcaagctctgaccagttcctgcccagtctggaggacccactggctggcatgaacgccctggcggcagctgcggagctgccccaggccaggcctctgccctccccgggtgctgctggagcccaggccttggagaagctggaagcagccgagagccttgtcttggagcagagcttcctgcatggcatcaccctgctaagtgagatcgcagagctggagctggagaggaggagccaagagatgggaggtgcggagcgggccctggtggcgcggccctccctggagagtctgctggcagctggcagccacatgctgagggaggtgctggatgggcccgtggtggacccactcaagaacctgcggctcccgcgggagctgaagcccaacaagaagtacagctggatgcgcaagaaggaggagcggatgtatgccatgaagtcctccctggaggacatggacgccctggagctggacttccggatgcggctggccgaggtgcagcgccagtacaaggagaagcagcgtgagctggtgaagctgcagcgccgccgggactccgaggacaggcgcgaggaaccccatagaagcttggcacgcagaggccctggcaggccgcggaaacggacccacgccccgagcgccctgtcgcccccccgcaagagagggaagagcggccacagtagcggaaagctgagcagcaagtctctgctgacatcagatgattatgagctgggagcagggataagaaagagacacaaggggtctgaggaggaacatgatgccctcatcggaatggggaaagccagggggaggaaccagacttgggatgaacatgaggcctcgtcggacttcatcagtcagctaaagattaagaagaagaagatggccagcgaccaggagcagttggcaagcaagctcgacaaggccctctccctcaccaagcaggacaagttgaagtcgcccttcaagttttcggacagtgctggggggaaatcgaaaactagcgggggctgcggcaggtacttgactccttacgacagcctgctggggaagaacaggaaggcgctggccaagggcctcggcctgtctctgaaatcctccagagaaggtaaacacaaaagggcagccaaaaccaggaagatggaggtggggttcaaggccagaggccagcccaagtcggcccattccccgtttgcctcggaagtgagcagctactcttacaatacggactcagaggaagacgaagaattcctgaaggacgagtggcccgcccaaggcccctccagctccaaactgacgccttccctcctgtgtagcatggtggcaaagaacagcaaggcagctggtggccccaagctgaccaagaggggcctggcggccccccggactctgaaacccaagccggccaccagcaggaagcagccgttttgtctgctgcttcgagaggccgaggcgcgttcctccttcagcgactcttcggaggaatcgtttgaccaagatgagagctcggaggaggaggacgaggaggaggagctcgaggaggaggacgaggccagcggtggtggctacaggctgggtgcccgggagcgggccctgtcaccgggcctggaggagagtgggctgggcctgctggcacgcttcgccgccagcgccctccccagccccacggtgggtccatccctgtctgtggtacagctggaggccaagcagaaggcccggaagaaagaggagcggcagagcctgctgggcacagagttcgagtacaccgactcagagagcgaggtcaaggtgcgcaagcggtcgcctgcggggctgctgcggcccaagaaggggctgggggagccgggaccctccctggccgcacccacgcctggcgcccgcggtcccgaccccagcagcccagacaaggccaagctggcggtggagaaggggcgcaaggcccggaagctgcggggccccaaggagcctggcttcgaggcggggcccgaggccagcgacgacgacctgtggacgcggcgccgcagcgagcgcatcttcctgcacgacgcctcggctgctgcacctgcgcccgtcagcaccgcgcccgccaccaagaccagccgctgcgccaagggcggccccctgagcccgcgcaaggacgccgggcgtgcaaaggacaggaaggaccccaggaaggtaggggccgcgctgggagggggtgccgcagaagggtccctggggttccgtgagggaggggccctctcccctcccagcctagggaagcggcttcactgttaataaccatgtactcggctccaggcccgcccggagcccctgctaggacttagccacagcaggagctgggcacctgttcctttgtttcttaagagtcaactcttgctctgtcaccaggctggagcgcagtggcctgatcatggctcactgctcggccacgaggtaaggacaggatcctgagcaaagtccttgaaccacaaacacttcagtcaagcttgcccttac

SEQ ID NO: 12474 - DNA, 2199 bp, Homo sapiens
gaaggaagcccccagccccttccaggccctgttctcagatatcccgcccaggtacccgttccaagccctgccaccgcactacgggaggccctaccctttcctgctgcagcccacggccgccgccgacgcggacggcttggcccctgatgtgccgctcccggctgatgggcccgagcgcctggcactctcacccgaagacaagcccatccgcttgtccccctccaagatcacagagccgctgcgggagggcccggaggaagaaccgctggctgagcgggaggtgaaggcagaggtggaggacatggacgagggccccacagagctgccgcctctggagtcgccgctgccactgcccgccgcggaagccatggctacccccagccctgcagggggttgtggaggtggcctgttggaggcccaggcgctgagtgccaccgggcagagctgcgcagagccctctgagtgtccagactttgtggaggggcctgaaccacgggtggattccccgggccggacagaaccctgcaccgccgccctggacctgggggtgcagctgacacccgagacactggtggaggccaaggaggagccggtggaggtgcctgtggcggtgcccgtggtggaggcagtgcccgaggaaggcctggcgcaggtggcaccgagcgagtcccagcccaccctagaaatgtcagactgtgacgtgcccgccggggagggacagtgcccgagcctggagccccaagaggccgtgcctgtactcggcagcacctgcttcctggaagaggcaagctctgaccagttcctgcccagtctggaggacccactggctggcatgaacgccctggcggcagctgcggagctgccccaggccaggcctctgccctccccgggtgctgctggagcccaggccttggagaagctggaagcagccgagagccttgtcttggagcagagcttcctgcatggcatcaccctgctaagtgagatcgcagagctggagctggagaggaggagccaagagatgggaggtgcggagcgggccctggtggcgcggccctccctggagagtctgctggcagctggcagccacatgctgagggaggtgctggatgggcccgtggtggacccactcaagaacctgcggctcccgcgggagctgaagcccaacaagaagtacagctggatgcgcaagaaggaggagcggatgtatgccatgaagtcctccctggaggacatggacgccctggagctggacttccggatgcggctggccgaggtgcagcgccagtacaaggagaagcagcgtgagctggtgaagctgcagcgccgccgggactccgaggacaggcgcgaggaaccccatagaagcttggcacgcagaggccctggcaggccgcggaaacggacccacgccccgagcgccctgtcgcccccccgcaagagagggaagagcggccacagtagcggaaagctgagcagcaagtctctgctgacatcagatgattatgagctgggagcagggataagaaagagacacaaggggtctgaggaggaacatgatgccctcatcggaatggggaaagccagggggaggaaccagacttgggatgaacatgaggcctcgtcggacttcatcagtcagctaaagattaagaagaagaagatggccagcgaccaggagcagttggcaagcaagctcgacaaggccctctccctcaccaagcaggacaagttgaagtcgcccttcaagttttcggacagtgctggggggaaatcgaaaactagcgggggctgcggcaggtacttgactccttacgacagcctgctggggaagaacaggaaggcgctggccaagggcctcggcctgtctctgaaatcctccagagaaggtaaacacaaaagggcagccaaaaccaggaagatggaggtggggttcaaggccagaggccagcccaagtcggcccattccccgtttgcctcggaagtgagcagctactcttacatcacgttttctgcccacccagagaccccaggcttggttcgggctctctttgggcacgggttcggtggaggcttcccgaggaacattttgtaaatggaattctgtcgtgtgggcgtgtgacttgatgtttgtaccgcgattttggtaataccaagctttattaaacatatcgagttcatttttaactaaaaaaaaat

SEQ ID NO: 12475 - DNA, 283 bp, Homo sapiens
gcttgggtgactgagaccccatctcaaaaaaaaaacaaaaacaaaaacaaaactcacagaagcaggcctttctgataaaagccacagctcatctctgccaggaagcccccgccccagcttctcatctgttttgttttgcagacagagccgctaccctggaggaggggaacccaacagacgaggtccccagtacccccttagccctggagccgagcagcaccccaggttccaagaagagccccccagagcctgtggacaagcgagccaaggcccccaaggcgcg

SEQ ID NO: 12476 - DNA, 296 bp, Homo sapiens
aacagtgtctgttcttgggatgctgagatgtggggtgattttccttgggtgtctgagcctccatttgtcaacaatgaatctgttctgttccaggttcctgctacagtatcaaaaggcagacactgggtgagcctctggtattatagctggatataatagctgggtattcagctgttcagatgccaggaattggaaaccctgggcctccaacagaaggaactcttgggaaaggcccaaagaggcaatgtagtccagtggttaaggagccagaactgaagctaaagctacgtccccag

SEQ ID NO: 12477 - DNA, 4524 bp, Homo sapiens
acaattttatcattattttaatcaagtaacttagctgtttaaacaaatccttaagacagttcaatagagcaaagtgaagaattactctattaggataacctgtgaacaaagttcagattatgtgaatttgtattccattcgaagtttggcaccagactgaacactggtttaagccaaattttttagtgttctagaagccctgaacatgttttccctcagattaaaagtagaacctttataatagaacctcattagcttgacactgagtatgctgagtgcaacttagcttaggtcaccagtatctcctacagaattccagttaatgaaagcagatcagccttgcggcaaagaatttgaaacctaggcaacatacaagtttgaagaaaaaaaaatcctctttggtgtgacaaagcacattccctccaggtatatggctcctgctccacttgcacccgaatcttgatcaaaggcagctggagaccaattcttgtctctccaataagattgctaggtttcaattccttaaaatatcaagccaaccaagttttattacatcaaatgtttctatcatttcaatgtgaaaatttttttacgcctatttgttattaaggtctcattatctgtgaaataatcacaaaaaaacagaggtgaatggtataagccactgctccaaaattaaccctatcgattctcgattcccactgtgcactttgtgaaaagggtaactgccaagaggtttaaccttgaagatgattactcaaacagtcagaacccataatatgagtttagatcaggcaaggagttcatgaggaagttatcaactcttgtgtgtccaaatctaaagccctgcatgggctctgtcaggtccttgtcacctgcactcaggtggccatcagacttcttgggtgcctggctatattcaatgtgaagtaaaaaatatcccaagtcttacaccaaaatagaggctctgacttagaagtatgcttttagctttctttttaaataagacattctggaagaaaaaaaaaagaaaaaggaaagaaaatcaagtttgaaacacagttaacacttattttggcaagaaagcaaccaaaatctaaaaagcataaactatgtgtccaaatgtaaaaggcattacagaacaaactgcaagaggggaaaattaaagccacactgaacgaaaaaatacagtatgtctaacattttggaattgtaatttaaaccctaagggcaaaagctgaaaaatcatgcttaggttgctagttaagtgcacccttccttgtttctcccaaataaaatcagtttattaattgcaccccaaagcaagttctctcagtacaaagtaactactacgtacacacaaaatgcttgttaatgtaataatttccctggctcatccaacgtgcaatgcacacgacttcaaagacaatttggggcaagtgtacatgaaatgagaaaacagctctccaagtttcaaatcctgctcttacattatttataggacactgaggtcatatttacttcttggttaagatgttgcactgtcatttcattatcagtctacctcacaatgtacattaccagatgccaatttgaggaactacagagataaaactttagtactttcttaatgggctgaataaattaattacaattaagtttgctttacatcctgttgaggacctctttgcagccccaggacctaacaatatctggcaggctccaagaatgctcatcaggtgaaatgatggcagaacatttaaagtaaggagccagttacttcagcttaagtcattcagagccaaacatctgaagaacgaccaaaatcaaacctttatttttataactgtataaatgtgatccaaatgtgtccaccactagtttttcaaaaagaaacatgctataaataagcaaactacatctgctcactgatgtgtatggactccctagatgtctcattgggcttaataacagaccactcacagtaatagatttttagtgtaaagtgtagcatgatgttaagccattttagcttttgcacatacatgttgcacttctggctgataatggaggaaaatttgcagcattatactgttaagctaggttgcatccatccctttaaatggcatcaatatcgatgtcgtcatccttgttgtctgactttacagtctcaactttcggtacactggcagccttcgaatacaccctcctcctcctcttcctcctcctcctcttcctcttcgtcttcctcctcttcctcctcctcctcttcctcgtcctcatcctcctcctcctcctcctcttcctcctcttcttcctccaccacagacgaggactcttcctgcagctcggacgatgaggcagcccccgcccccacggctggcccttccgcgcaggcggcgctccccaccaaggccaccaagcaggccggcaaggcgcggccctcggcccactccccaggcaagaagacgcccgcgccccagccccaggcgcctcctccgcagcccacacagcctctgcagcccaaggctcaggccggggccaagagccgacccaagaagagagagggcgtccacctccccaccaccaaggagctggccaagcggcagcgcctgccgtccgtggagaaccggcccaagatcgccgccttcctgccagcccggcagctctggaagtggttcggcaagcccacccagcggcgtggcatgaagggcaaggcccgcaagctcttctacaaggccatcgtgcgcggcaaggagatgatccgtatcggggactgtgccgtgttcctctctgccggccgccccaacctgccctacatcggccgcatccagagcatgtgggagtcgtggggcaacaacatggtggtccgcgtcaagtggttctaccaccccgaggagaccagcccgggcaagcagttccaccagggccagcactgggaccagaagtccagccgcagcctcccggcggccctgcgggtctccagccagaggaaggacttcatggagcgcgcgctataccagtcctcgcatgtggacgaaaatgacgtgcagacggtgtcgcacaagtgcctggtggtgggcctggagcagtatgagcagatgctgaagaccaagaagtaccaggacagcgagggcctgtactacctcgcgggcacctacgagcccaccacgggcatgatcttctccacggacggcgtgcccgtgctctgctgagcccgccgggccctgcgggccacctgtgccccgagggcggccagggacccatctccatcactgccatggcgcggagaccacgtgcgttgtgtgcatgcgagcgctcctgcaggcgtgtgcatggggccaggtgtgcacgtggatgcccgggtgagtgtgtgtgcatgcacgtgtgtgcacgcatgtgcacatgcctccagccccaccttccaacccctcagtgcccccaggacaggggcccctcttagctatcagggtatggccggaccggcccttcctgcccagcacgttgcaagcacttggccaggccggccctccaggctgctgctgcgtgggggcccgggtgcccccaggtccatgcagactggggattcggtggggaggggcgcttctaaggaaccaaactgacgctcactctgggcttcccaagcacccttagcacggagcccaccccaaggcctcccaccgtgcatgggacagggcagcccgatgccagctggcctacctgactgtgccaggggccctgcccccaccctctcaggatggcctagacttggggaacagagccgggtggggttgcagcccggagtgtctgtcaaaggcaccaggtggagagggcccggcacaggcccaccctggtccaaaccctcacactacagaaaaccccaatggtgctgaaactgtcgcccggccacgcctggcccctccccacccaggagggaggtggcacttcttaacctgtacagttttattgtaccaagagactcgccccgcccctgtatcataagcctttaaatggagtcaactttttaattatatatataaagataaatatatataaatatatatataaactttttaaaactgtgaaaaatagctatgaaattataaaaaaaaaacattctgacgtgcagaatattattttttatttcctgttagattatagtgtctagcaccggcttcaccggcctcccagtccccagcacaccccccgcccaccccgccaagtgtactgtactcaccccccaggatagagaagtgtttgttagggagagaagagggagaggcaggagccggcccaagcccagggtccctgcttgggccccagaaagcacttaaccaggccccaagccttcaagggaaaccaaggcctcaaccagacaatcttgagggaaggaaaagccagactttgggtttgttttttgggggaattattggttttttttttttatgtttcttttggaattttgtttgttggcaaattctgtgtgatcttttttcataaaaaaaaagaaaagatttaattgga

SEQ ID NO: 12478 - DNA, 4825 bp, Homo sapiens
  misc_feature (3272)..(3272): n is a, c, g, or t
  misc_feature (3741)..(3741): n is a, c, g, or t
ctcaccccccaggatagagtacagtacacttggtggggtgggcggggggtgtgctggggactgggaggccggtgaagccggtgctagacactataatctaacaggatagagaagtgtttgttagggagagaagagggagaggcaggagccggcccaagcccaggtccctgcttgggccccagaaagcacttaaccaggccccaagccttcaagggaaaccaaggcctcaaccagacaatcttgagggaaggaaaagccagactttgggtttgttttttgggggaattattggttttttttttatgtttcttttggaattttgtttgttggcaaattctgtgtgatcttttttcataaaaaaaaagaaaagatttaatggggacaacacattaacaacaaaagacaaaaaaaaaaaaaaacaaaaaaaaacccaaaaccaaaaacgcttgcaggaagagagagaaggggtgttttgttcctcctgggagggcgcacttagggtggcacagaacttgggggtgagtgagtgagggggacaggggtgctgcctgtgctttccctgccgtttgatggctcctctctgctgcttcctcctccagaagaagaaagggaaagaggctgggccaggagctgggctgccgccgccccgagctcctgccttgccctctgaggccagggctcctcctcctcctcctcctcctcctcctcatcctcctcttcctcctcctcctcttcctcctcctcctcttcctcttcgtcttcctcctcttcctcctcctcctcttcctcgtcctcatcctcctcctcctcctcctcttcctcctcttcttcctccaccacagacgaggactcttcctgcagctcggacgatgaggcagcccccgcccccacggctggcccttccgcgcaggcggcgctccccaccaaggccaccaagcaggccggcaaggcgcggccctcggcccactccccaggcaagaagacgcccgcgccccagccccaggcgcctcctccgcagcccacacagcctctgcagcccaaggctcaggccggggccaagagccgacccaagaagagagagggcgtccacctccccaccaccaaggagctggccaagcggcagcgcctgccgtccgtggagaaccggcccaagatcgccgccttcctgccagcccggcagctctggaagtggttcggcaagcccacccagcggcgtggcatgaagggcaaggcccgcaagctcttctacaaggccatcgtgcgcggcaaggagatgatccgtatcggggactgtgccgtgttcctctctgccggccgccccaacctgccctacatcggccgcatccagagcatgtgggagtcgtggggcaacaacatggtggtccgcgtcaagtggttctaccaccccgaggagaccagcccgggcaagcagttccaccagggccagcactgggaccagaagtccagccgcagcctcccggcggccctgcgggtctccagccagaggaaggacttcatggagcgcgcgctataccagtcctcgcatgtggacgaaaatgacgtgcagacggtgtcgcacaagtgcctggtggtgggcctggagcagtatgagcagatgctgaagaccaagaagtaccaggacagcgagggcctgtactacctcgcgggcacctacgagcccaccacgggcatgatcttctccacggacggcgtgcccgtgctctgctgagcccgccgggccctgcgggccacctgtgccccgagggcggccagggacccatctccatcactgccatggcgcggagaccacgtgcgttgtgtgcatgcgagcgctcctgcaggcgtgtgcatggggccaggtgtgcacgtggatgcccgggtgagtgtgtgtgcatgcacgtgtgtgcacgcatgtgcacatgcctccagccccaccttccaacccctcagtgcccccaggacaggggcccctcttagctatcagggtatggccggaccggcccttcctgcccagcacgttgcaagcacttggccaggccggccctccaggctgctgctgcgtgggggcccgggtgcccccaggtccatgcagactggggattcggtggggaggggcgcttctaaggaaccaaactgacgctcactctgggcttcccaagcacccttagcacggagcccaccccaaggcctcccaccgtgcatgggacagggcagcccgatgccagctggcctacctgactgtgccaggggccctgcccccaccctctcaggatggcctagacttggggaacagagccgggtggggttgcagcccggagtgtctgtcaaaggcaccaggtggagagggcccggcacaggcccaccctggtccaaaccctcacactacagaaaaccccaatggtgctgaaactgtcgcccggccacgcctggcccctccccacccaggagggaggtggcacttcttaacctgtacagttttattgtaccaagagactcgccccgcccctgtatcataagcctttaaatggagtcaactttttaattatatatataaagataaatatatataaatatatatataaactttttaaaactgtgaaaaatagctatgaaattataaaaaaaaaacattctgacgtgcagaatattattttttatttcctgttagattatagtgtctagcaccggcttcaccggcctcccagtccccagcacaccccccgcccaccccgccaagtgtactgtactcaccccccaggatagagaagtgtttgttagggagagaagagggagaggcaggagccggcccaagcccagggtccctgcttgggccccagaaagcacttaaccaggccccaagccttcaagggaaaccaaggcctcaaccagacaatcttgagggaaggaaaagccagactttgggtttgttttttgggggaattattggttttttttttttatgtttcttttggaattttgtttgttggcaaattctgtgtgatcttttttcataaaaaaaaagaaaagatttaattggaaaaataaaattgtctggagtggtttatttcaggggctggagtaggggtggtgtctgggggcattctgccatatcagggcaccaagaagcaggattcgactggaagaagttgggtgccacgcgtgcaggggcggtgaccccatgcagccatctaaatgagctcatcggctgggcacagtggctcacgcctgtaatgccagcactttgggaggccaaggcaggcggatcacttgangtcaggagttcgagaccagcctggccaatatggtgaaaccccatctctactaaaaatacaaaaaaaaattagccaggtgtggtagagcgtgcctgtaatcccagcactttaggaggccgaggcgggaggatcacttcaggccaggagtttcagaccagcctgagcaatgtggtgaaaccccgtctctactaaaaatacaaaaattagccgggtgtggtggcccacacctgtaatcccagctactcgggaggctgaggtgggaaaatcacagggacccggcgggtggaggttgcagtgagttgagatcgcaccactgcactctggcctgggggtgacagagattgtctcaaaaaaaaaaaaaaaaaaaaaaaaagaaattgaacaaatttacatgagaaaaaattaaaagttaagttggatgggcacggtggctcacgcctgtaatcccagcactttgggaggccaaggnaggcggatcacttgaggtcaggagttcaagaccagcctggccaatatggtgaaaccccatctctactaaaaatacaaaaaaattagccgggtgtggtggagcgtgcctgtaatcccagctacttgggaggctgaggcaggagaatcgcttgaacccacggcaaaggttacagtgagctgagatcgtgccactgccctccagctggggtgacataacgagattccatctcaaaaaaccagtgccaggcatggtggctcatgcctgtaatcccagcactttgggaggctgaggcaggtggatcacctgaggtcgggagttcaagaccagcctgaccaacatggagaaacctcgtctctactaaaagcacaaaattagccgggcatggtggcacatgcctgtaatcccagctactcgggaggctgaggcaggagaatcgcttgaacccggcaggcagaggttgcagtgagctgaaatcgagccattgcactccagcctgggcaacaaaagcgaaactcctccaaaaaaaaaaaaaaaaaaagcaaagctgcacatttccagccatgcctaccacaaaatgatactagaagaaaatgatactaatgctaagagtggccccaagccctcacctagatgggggtggacggcatctctgcactggggcctagggaagctataggtgggggtctggctgcccagtgactgacctggttagtgtgggtggcctgcagaggacattcggggctttgcaaagagggtaacccatggagggcagccagccggcctcgggcaagggaagggcccggcatgggctctgggaaacactctggtgtcacctggcgcagtcttggcccaagtggccgcccacctgggccccagggaggatgcctgccagagcataggtggccctcgtgccctcctttacgggacccacatcaaaacctggaccagccccattccttggggaagctaaggacagaacaggccgggcctcaagtgttccccctgccttggcctcccaaagtgccaggattacaggtatgagtcactgcgcccggcctgttctgtccttggggaagctaaggac

SEQ ID NO: 12479 - DNA, 2817 bp, Homo sapiens
gaaggaagcccccagccccttccaggccctgttctcagatatcccgcccaggtacccgttccaagccctgccaccgcactacgggaggccctaccctttcctgctgcagcccacggccgccgccgacgcggacggcttggcccctgatgtgccgctcccggctgatgggcccgagcgcctggcactctcacccgaagacaagcccatccgcttgtccccctccaagatcacagagccgctgcgggagggcccggaggaagaaccgctggctgagcgggaggtgaaggcagaggtggaggacatggacgagggccccacagagctgccgcctctggagtcgccgctgccactgcccgccgcggaagccatggctacccccagccctgcagggggttgtggaggtggcctgttggaggcccaggcgctgagtgccaccgggcagagctgcgcagagccctctgagtgtccagactttgtggaggggcctgaaccacgggtggattccccgggccggacagaaccctgcaccgccgccctggacctgggggtgcagctgacacccgagacactggtggaggccaaggaggagccggtggaggtgcctgtggcggtgcccgtggtggaggcagtgcccgaggaaggcctggcgcaggtggcaccgagcgagtcccagcccaccctagaaatgtcagactgtgacgtgcccgccggggagggacagtgcccgagcctggagccccaagaggccgtgcctgtactcggcagcacctgcttcctggaagaggcaagctctgaccagttcctgcccagtctggaggacccactggctggcatgaacgccctggcggcagctgcggagctgccccaggccaggcctctgccctccccgggtgctgctggagcccaggccttggagaagctggaagcagccgagagccttgtcttggagcagagcttcctgcatggcatcaccctgctaagtgagatcgcagagctggagctggagaggaggagccaagagatgggaggtgcggagcgggccctggtggcgcggccctccctggagagtctgctggcagctggcagccacatgctgagggaggtgctggatgggcccgtggtggacccactcaagaacctgcggctcccgcgggagctgaagcccaacaagaagtacagctggatgcgcaagaaggaggagcggatgtatgccatgaagtcctccctggaggacatggacgccctggagctggacttccggatgcggctggccgaggtgcagcgccagtacaaggagaagcagcgtgagctggtgaagctgcagcgccgccgggactccgaggacaggcgcgaggaaccccatagaagcttggcacgcagaggccctggcaggccgcggaaacggacccacgccccgagcgccctgtcgcccccccgcaagagagggaagagcggccacagtagcggaaagctgagcagcaagtctctgctgacatcagatgattatgagctgggagcagggataagaaagagacacaaggggtctgaggaggaacatgatgccctcatcggaatggggaaagccagggggaggaaccagacttgggatgaacatgaggcctcgtcggacttcatcagtcagctaaagattaagaagaagaagatggccagcgaccaggagcagttggcaagcaagctcgacaaggccctctccctcaccaagcaggacaagttgaagtcgcccttcaagttttcggacagtgctggggggaaatcgaaaactagcgggggctgcggcaggtacttgactccttacgacagcctgctggggaagaacaggaaggcgctggccaagggcctcggcctgtctctgaaatcctccagagaaggtaaacacaaaagggcagccaaaaccaggaagatggaggtggggttcaaggccagaggccagcccaagtcggcccattccccgtttgcctcggaagtgagcagctactcttacaatacggactcagaggaagacgaagaattcctgaaggacgagtggcccgcccaaggcccctccagctccaaactgacgccttccctcctgtgtagcatggtggcaaagaacagcaaggcagctggtggccccaagctgaccaagaggggcctggcggccccccggactctgaaacccaagccggccaccagcaggaagcagccgttttgtctgctgcttcgagaggccgaggcgcgttcctccttcagcgactcttcggaggaatcgtttgaccaaggttactagctccaaacacaaaataccttccgtgtttcctagcgagagagtgcgtgcgagtgagcgagagggaagcgagtgggcgcacgggagagatggtgggtgaggaggcccgtgcggatggccgcaagaaggctgccatctgggttcttggcagcgtagcctgctgttatcagccgaatgattttgatttttgctttgatttgtactgtatcattgtgataatatccccggctggctctttttgagctgttatatggactgcttttgagtctgcgtttctctccacttgccctcctccctgccctcctccccctcccccgagttccccccacccccgcactcacgttttctgcccacccagagaccccaggcttggttcgggctctctttgggcacgggttcggtggaggcttcccgaggaacattttgtaaatggaattctgtcgtgtgggcgtgtgacttgatgtttgtaccgcgattttggtaataccaagctttattaaacatatcgagttcatttttaactaaaaaaaaat

SEQ ID NO: 12480 - DNA, 4115 bp, Homo sapiens
  misc_feature (3977)..(3977): n is a, c, g, or t
  misc_feature (3982)..(3982): n is a, c, g, or t
  misc_feature (3985)..(3985): n is a, c, g, or t
  misc_feature (3989)..(3989): n is a, c, g, or t
  misc_feature (3998)..(3998): n is a, c, g, or t
  misc_feature (4003)..(4003): n is a, c, g, or t
  misc_feature (4035)..(4035): n is a, c, g, or t
  misc_feature (4085)..(4085): n is a, c, g, or t
gaaggaagcccccagccccttccaggccctgttctcagatatcccgcccaggtacccgttccaagccctgccaccgcactacgggaggccctaccctttcctgctgcagcccacggccgccgccgacgcggacggcttggcccctgatgtgccgctcccggctgatgggcccgagcgcctggcactctcacccgaagacaagcccatccgcttgtccccctccaagatcacagagccgctgcgggagggcccggaggaagaaccgctggctgagcgggaggtgaaggcagaggtggaggacatggacgagggccccacagagctgccgcctctggagtcgccgctgccactgcccgccgcggaagccatggctacccccagccctgcagggggttgtggaggtggcctgttggaggcccaggcgctgagtgccaccgggcagagctgcgcagagccctctgagtgtccagactttgtggaggggcctgaaccacgggtggattccccgggccggacagaaccctgcaccgccgccctggacctgggggtgcagctgacacccgagacactggtggaggccaaggaggagccggtggaggtgcctgtggcggtgcccgtggtggaggcagtgcccgaggaaggcctggcgcaggtggcaccgagcgagtcccagcccaccctagaaatgtcagactgtgacgtgcccgccggggagggacagtgcccgagcctggagccccaagaggccgtgcctgtactcggcagcacctgcttcctggaagaggcaagctctgaccagttcctgcccagtctggaggacccactggctggcatgaacgccctggcggcagctgcggagctgccccaggccaggcctctgccctccccgggtgctgctggagcccaggccttggagaagctggaagcagccgagagccttgtcttggagcagagcttcctgcatggcatcaccctgctaagtgagatcgcagagctggagctggagaggaggagccaagagatgggaggtgcggagcgggccctggtggcgcggccctccctggagagtctgctggcagctggcagccacatgctgagggaggtgctggatgggcccgtggtggacccactcaagaacctgcggctcccgcgggagctgaagcccaacaagaagtacagctggatgcgcaagaaggaggagcggatgtatgccatgaagtcctccctggaggacatggacgccctggagctggacttccggatgcggctggccgaggtgcagcgccagtacaaggagaagcagcgtgagctggtgaagctgcagcgccgccgggactccgaggacaggcgcgaggaaccccatagaagcttggcacgcagaggccctggcaggccgcggaaacggacccacgccccgagcgccctgtcgcccccccgcaagagagggaagagcggccacagtagcggaaagctgagcagcaagtctctgctgacatcagatgattatgagctgggagcagggataagaaagagacacaaggggtctgaggaggaacatgatgccctcatcggaatggggaaagccagggggaggaaccagacttgggatgaacatgaggcctcgtcggacttcatcagtcagctaaagattaagaagaagaagatggccagcgaccaggagcagttggcaagcaagctcgacaaggccctctccctcaccaagcaggacaagttgaagtcgcccttcaagttttcggacagtgctggggggaaatcgaaaactagcgggggctgcggcaggtacttgactccttacgacagcctgctggggaagaacaggaaggcgctggccaagggcctcggcctgtctctgaaatcctccagagaaggtaaacacaaaagggcagccaaaaccaggaagatggaggtggggttcaaggccagaggccagcccaagtcggcccattccccgtttgcctcggaagtgagcagctactcttacaatacggactcagaggaagacgaagaattcctgaaggacgagtggcccgcccaaggcccctccagctccaaactgacgccttccctcctgtgtagcatggtggcaaagaacagcaaggcagctggtggccccaagctgaccaagaggggcctggcggccccccggactctgaaacccaagccggccaccagcaggaagcagccgttttgtctgctgcttcgagaggccgaggcgcgttcctccttcagcgactcttcggaggaatcgtttgaccaagatgagagctcggaggaggaggacgaggaggaggagctcgaggaggaggacgaggccagcggtggtggctacaggctgggtgcccgggagcgggccctgtcaccgggcctggaggagagtgggctgggcctgctggcacgcttcgccgccagcgccctccccagccccacggtgggtccatccctgtctgtggtacagctggaggccaagcagaaggcccggaagaaagaggagcggcagagcctgctgggcacagagttcgagtacaccgactcagagagcgaggtcaaggtgcgcaagcggtcgcctgcggggctgctgcggcccaagaaggggctgggggagccgggaccctccctggccgcacccacgcctggcgcccgcggtcccgaccccagcagcccagacaaggccaagctggcggtggagaaggggcgcaaggcccggaagctgcggggccccaaggagcctggcttcgaggcggggcccgaggccagcgacgacgacctgtggacgcggcgccgcagcgagcgcatcttcctgcacgacgcctcggctgctgcacctgcgcccgtcagcaccgcgcccgccaccaagaccagccgctgcgccaagggcggccccctgagcccgcgcaaggacgccgggcgtgcaaaggacaggaaggaccccaggaagaagaagaaagggaaagaggctgggccaggagctgggctgccgccgccccgagctcctgccttgccctctgaggccagggctcctcctcctcctcctcctcctcctcctcatcctcctcttcctcctcctcctcttcctcctcctcctcttcctcttcgtcttcctcctcttcctcctcctcctcttcctcgtcctcatcctcctcctcctcctcctcttcctcctcttcttcctccaccacagacgaggactcttcctgcagctcggacgatgaggcagcccccgcccccacggctggcccttccgcgcaggcggcgctccccaccaaggccaccaagcaggccggcaaggcgcggccctcggcccactccccaggcaagaagacgcccgcgccccagccccaggcgcctcctccgcagcccacacagcctctgcagcccaaggctcaggccggggccaagagccgacccaagaagagagagggcgtccacctccccaccaccaaggagctggccaagcggcagcgcctgccgtccgtggagaaccggcccaagatcgccgccttcctgccagcccggcagctctggaagtggttcggcaagcccacccagcggcgtggcatgaagggcaaggcccgcaagctcttctacaaggccatcgtgcgcggcaaggagatgatccgtatcggggactgtgccgtgttcctctctgccggccgccccaacctgccctacatcggccgcatccagagcatgtgggagtcgtggggcaacaacatggtggtccgcgtcaagtggttctaccaccccgaggagaccagcccgggcaagcagttccaccagggccagcactgggaccagaagtccagccgcgccgtgctgatcccctcaccttcactgggtgttcggtgttctccgcctcgggctgtcacaaatcgtgctgctgtgagccactgcgtgcaggtctcatcctgggtgtattttacaaacggactggatgtgagtgggtgaggagtgaagancttgngtnacangtgtttgtnttttnggttggttttggttttttgtttttggtttgtnttgtttttttttgtgggttgttttttttttgtttttagggggtttggagnttggttttgtgtatttaaaaatgtgtggag

SEQ ID NO: 12481 - DNA, 3243 bp, Homo sapiens
gaaggaagcccccagccccttccaggccctgttctcagatatcccgcccaggtacccgttccaagccctgccaccgcactacgggaggccctaccctttcctgctgcagcccacggccgccgccgacgcggacggcttggcccctgatgtgccgctcccggctgatgggcccgagcgcctggcactctcacccgaagacaagcccatccgcttgtccccctccaagatcacagagccgctgcgggagggcccggaggaagaaccgctggctgagcgggaggtgaaggcagaggtggaggacatggacgagggccccacagagctgccgcctctggagtcgccgctgccactgcccgccgcggaagccatggctacccccagccctgcagggggttgtggaggtggcctgttggaggcccaggcgctgagtgccaccgggcagagctgcgcagagccctctgagtgtccagactttgtggaggggcctgaaccacgggtggattccccgggccggacagaaccctgcaccgccgccctggacctgggggtgcagctgacacccgagacactggtggaggccaaggaggagccggtggaggtgcctgtggcggtgcccgtggtggaggcagtgcccgaggaaggcctggcgcaggtggcaccgagcgagtcccagcccaccctagaaatgtcagactgtgacgtgcccgccggggagggacagtgcccgagcctggagccccaagaggccgtgcctgtactcggcagcacctgcttcctggaagaggcaagctctgaccagttcctgcccagtctggaggacccactggctggcatgaacgccctggcggcagctgcggagctgccccaggccaggcctctgccctccccgggtgctgctggagcccaggccttggagaagctggaagcagccgagagccttgtcttggagcagagcttcctgcatggcatcaccctgctaagtgagatcgcagagctggagctggagaggaggagccaagagatgggaggtgcggagcgggccctggtggcgcggccctccctggagagtctgctggcagctggcagccacatgctgagggaggtgctggatgggcccgtggtggacccactcaagaacctgcggctcccgcgggagctgaagcccaacaagaagtacagctggatgcgcaagaaggaggagcggatgtatgccatgaagtcctccctggaggacatggacgccctggagctggacttccggatgcggctggccgaggtgcagcgccagtacaaggagaagcagcgtgagctggtgaagctgcagcgccgccgggactccgaggacaggcgcgaggaaccccatagaagcttggcacgcagaggccctggcaggccgcggaaacggacccacgccccgagcgccctgtcgcccccccgcaagagagggaagagcggccacagtagcggaaagctgagcagcaagtctctgctgacatcagatgattatgagctgggagcagggataagaaagagacacaaggggtctgaggaggaacatgatgccctcatcggaatggggaaagccagggggaggaaccagacttgggatgaacatgaggcctcgtcggacttcatcagtcagctaaagattaagaagaagaagatggccagcgaccaggagcagttggcaagcaagctcgacaaggccctctccctcaccaagcaggacaagttgaagtcgcccttcaagttttcggacagtgctggggggaaatcgaaaactagcgggggctgcggcaggtacttgactccttacgacagcctgctggggaagaacaggaaggcgctggccaagggcctcggcctgtctctgaaatcctccagagaaggtaaacacaaaagggcagccaaaaccaggaagatggaggtggggttcaaggccagaggccagcccaagtcggcccattccccgtttgcctcggaagtgagcagctactcttacaatacggactcagaggaagacgaagaattcctgaaggacgagtggcccgcccaaggcccctccagctccaaactgacgccttccctcctgtgtagcatggtggcaaagaacagcaaggcagctggtggccccaagctgaccaagaggggcctggcggccccccggactctgaaacccaagccggccaccagcaggaagcagccgttttgtctgctgcttcgagaggccgaggcgcgttcctccttcagcgactcttcggaggaatcgtttgaccaagatgagagctcggaggaggaggacgaggaggaggagctcgaggaggaggacgaggccagcggtggtggctacaggctgggtgcccgggagcgggccctgtcaccgggcctggaggagagtgggctgggcctgctggcacgcttcgccgccagcgccctccccagccccacggtgggtccatccctgtctgtggtacagctggaggccaagcagaaggcccggaagaaagaggagcggcagagcctgctgggcacagagttcgagtacaccgactcagagagcgaggtcaaggtgcgcaagcggtcgcctgcggggctgctgcggcccaagaaggggctgggggagccgggaccctccctggccgcacccacgcctggcgcccgcggtcccgaccccagcagcccagacaaggccaagctggcggtggagaaggggcgcaaggcccggaagctgcggggccccaaggagcctggcttcgaggcggggcccgaggccagcgacgacgacctgtggacgcggcgccgcagcgagcgcatcttcctgcacgacgcctcggctgctgcacctgcgcccgtcagcaccgcgcccgccaccaagaccagccgctgcgccaagggcggccccctgagcccgcgcaaggacgccgggcgtgcaaaggacaggaaggaccccaggaagaagaagaaagggaaagaggctgggccaggagctgggctgccgccgccccgagctcctgccttgccctctgaggccagggctcctcacgccagctccctgaccgctgccaaaaggagcaaagccaaggccaaagggaaggaggtgaagaaggagaaccgcggcaaggggggtgccgtgagcaagctgatggagagcatggcagccgaggaggactttgaacccaaccaagactcgagcttctctgaggacgagcacctgccgcgtggcggggctgtggagcggccgct

SEQ ID NO: 12482 - DNA, 3208 bp, Homo sapiens
gaaggaagcccccagccccttccaggccctgttctcagatatcccgcccaggtacccgttccaagccctgccaccgcactacgggaggccctaccctttcctgctgcagcccacggccgccgccgacgcggacggcttggcccctgatgtgccgctcccggctgatgggcccgagcgcctggcactctcacccgaagacaagcccatccgcttgtccccctccaagatcacagagccgctgcgggagggcccggaggaagaaccgctggctgagcgggaggtgaaggcagaggtggaggacatggacgagggccccacagagctgccgcctctggagtcgccgctgccactgcccgccgcggaagccatggctacccccagccctgcagggggttgtggaggtggcctgttggaggcccaggcgctgagtgccaccgggcagagctgcgcagagccctctgagtgtccagactttgtggaggggcctgaaccacgggtggattccccgggccggacagaaccctgcaccgccgccctggacctgggggtgcagctgacacccgagacactggtggaggccaaggaggagccggtggaggtgcctgtggcggtgcccgtggtggaggcagtgcccgaggaaggcctggcgcaggtggcaccgagcgagtcccagcccaccctagaaatgtcagactgtgacgtgcccgccggggagggacagtgcccgagcctggagccccaagaggccgtgcctgtactcggcagcacctgcttcctggaagaggcaagctctgaccagttcctgcccagtctggaggacccactggctggcatgaacgccctggcggcagctgcggagctgccccaggccaggcctctgccctccccgggtgctgctggagcccaggccttggagaagctggaagcagccgagagccttgtcttggagcagagcttcctgcatggcatcaccctgctaagtgagatcgcagagctggagctggagaggaggagccaagagatgggaggtgcggagcgggccctggtggcgcggccctccctggagagtctgctggcagctggcagccacatgctgagggaggtgctggatgggcccgtggtggacccactcaagaacctgcggctcccgcgggagctgaagcccaacaagaagtacagctggatgcgcaagaaggaggagcggatgtatgccatgaagtcctccctggaggacatggacgccctggagctggacttccggatgcggctggccgaggtgcagcgccagtacaaggagaagcagcgtgagctggtgaagctgcagcgccgccgggactccgaggacaggcgcgaggaaccccatagaagcttggcacgcagaggccctggcaggccgcggaaacggacccacgccccgagcgccctgtcgcccccccgcaagagagggaagagcggccacagtagcggaaagctgagcagcaagtctctgctgacatcagatgattatgagctgggagcagggataagaaagagacacaaggggtctgaggaggaacatgatgccctcatcggaatggggaaagccagggggaggaaccagacttgggatgaacatgaggcctcgtcggacttcatcagtcagctaaagattaagaagaagaagatggccagcgaccaggagcagttggcaagcaagctcgacaaggccctctccctcaccaagcaggacaagttgaagtcgcccttcaagttttcggacagtgctggggggaaatcgaaaactagcgggggctgcggcaggtacttgactccttacgacagcctgctggggaagaacaggaaggcgctggccaagggcctcggcctgtctctgaaatcctccagagaaggtaaacacaaaagggcagccaaaaccaggaagatggaggtggggttcaaggccagaggccagcccaagtcggcccattccccgtttgcctcggaagtgagcagctactcttacaatacggactcagaggaagacgaagaattcctgaaggacgagtggcccgcccaaggcccctccagctccaaactgacgccttccctcctgtgtagcatggtggcaaagaacagcaaggcagctggtggccccaagctgaccaagaggggcctggcggccccccggactctgaaacccaagccggccaccagcaggaagcagccgttttgtctgctgcttcgagaggccgaggcgcgttcctccttcagcgactcttcggaggaatcgtttgaccaagatgagagctcggaggaggaggacgaggaggaggagctcgaggaggaggacgaggccagcggtggtggctacaggctgggtgcccgggagcgggccctgtcaccgggcctggaggagagtgggctgggcctgctggcacgcttcgccgccagcgccctccccagccccacggtgggtccatccctgtctgtggtacagctggaggccaagcagaaggcccggaagaaagaggagcggcagagcctgctgggcacagagttcgagtacaccgactcagagagcgaggtcaaggtgcgcaagcggtcgcctgcggggctgctgcggcccaagaaggggctgggggagccgggaccctccctggccgcacccacgcctggcgcccgcggtcccgaccccagcagcccagacaaggccaagctggcggtggagaaggggcgcaaggcccggaagctgcggggccccaaggagcctggcttcgaggcggggcccgaggccagcgacgacgacctgtggacgcggcgccgcagcgagcgcatcttcctgcacgacgcctcggctgctgcacctgcgcccgtcagcaccgcgcccgccaccaagaccagccgctgcgccaagggcggccccctgagcccgcgcaaggacgccgggcgtgcaaaggacaggaaggaccccaggaagaagaagaaagggaaagaggctgggccaggagctgggctgccgccgccccgagctcctgccttgccctctgaggccagggctcctcacgccagctccctgaccgctgccaaaaggagcaaagccaaggccaaagggaaggaggtgaagaaggaggtgaggctcaccgtgccctggttgggggctgtggggggctcagccatgctcctgtggtcagggcagggggctccacctgctcctctgtattcaccctcc

SEQ ID NO: 12483 - DNA, 1891 bp, Homo sapiens
gaaggaagcccccagccccttccaggccctgttctcagatatcccgcccaggtacccgttccaagccctgccaccgcactacgggaggccctaccctttcctgctgcagcccacggccgccgccgacgcggacggcttggcccctgatgtgccgctcccggctgatgggcccgagcgcctggcactctcacccgaagacaagcccatccgcttgtccccctccaagatcacagagccgctgcgggagggcccggaggaagaaccgctggctgagcgggaggtgaaggcagaggtggaggacatggacgagggccccacagagctgccgcctctggagtcgccgctgccactgcccgccgcggaagccatggctacccccagccctgcagggggttgtggaggtggcctgttggaggcccaggcgctgagtgccaccgggcagagctgcgcagagccctctgagtgtccagactttgtggaggggcctgaaccacgggtggattccccgggccggacagaaccctgcaccgccgccctggacctgggggtgcagctgacacccgagacactggtggaggccaaggaggagccggtggaggtgcctgtggcggtgcccgtggtggaggcagtgcccgaggaaggcctggcgcaggtggcaccgagcgagtcccagcccaccctagaaatgtcagactgtgacgtgcccgccggggagggacagtgcccgagcctggagccccaagaggccgtgcctgtactcggcagcacctgcttcctggaagaggcaagctctgaccagttcctgcccagtctggaggacccactggctggcatgaacgccctggcggcagctgcggagctgccccaggccaggcctctgccctccccgggtgctgctggagcccaggccttggagaagctggaagcagccgagagccttgtcttggagcagagcttcctgcatggcatcaccctgctaagtgagatcgcagagctggagctggagaggaggagccaagagatgggaggtgcggagcgggccctggtggcgcggccctccctggagagtctgctggcagctggcagccacatgctgagggaggtgctggatgggcccgtggtggacccactcaagaacctgcggctcccgcgggagctgaagcccaacaagaagtacagctggatgcgcaagaaggaggagcggatgtatgccatgaagtcctccctggaggacatggacgccctggagctggacttccggatgcggctggccgaggtgcagcgccagtacaaggagaagcagcgtgagctggtgaagctgcagcgccgccgggactccgaggacaggcgcgaggaaccccatagaagcttggcacgcagaggccctggcaggccgcggaaacggacccacgccccgagcgccctgtcgcccccccgcaagagagggaagagcggccacagtagcggaaagctgagcagcaagtctctgctgacatcagatgattatgagctgggagcagggataagaaagagacacaaggggtctgaggaggaacatgatgccctcatcggaatggggaaagccagggggaggaaccagacttgggatgaacatgaggcctcgtcggacttcatcagtcagctaaagattaagaagaagaagatggccagcgaccaggagcagttggcaagcaagctcgacaaggccctctccctcaccaagcaggacaagttgaagtcgcccttcaagttttcggacagtgctggggggaaatcgaaaactagcgggggctgcggcaggtacttgactccttacgacagcctgctggggaagaacaggaaggcgcatagccgtagtcgtcgcagggcagcttcccgtcccacccgcagg

SEQ ID NO: 12484 - DNA, 464 bp, Homo sapiens
gagaagacaaatcctcattggaagaagacaccttcattctaggcctcagatagtttctgttaaacaattttacaaggacaagtagccatagggaaaagataagcctgaaagtaagtaagtcatgataagtaagcagaaactagaactgcaaggctatgttattactagtcacagattataaaactatgcctgctatcttctgaggaaataaaaggtaagcttgaaaatttctataggaatggacttagcaatagtgacaggtaattcagaactgtccttccactgatgacaataaaactagataaaatatgaaataaaactgaactgcaaacagagtagtgaataattactgggccaagatccagaaatttggcattttgggactaggtaccgttgatgatcaaaaagaagtggacatgagtttgattagtacttttgagactgtttgcaggactggtgagaaa

SEQ ID NO: 12485 - DNA, 375 bp, Homo sapiens
ggttgtgtcgttttgcacggaatagtagggagaagcctcctgatttgtttctctcgtggaaatttgatctgtatctgctaaaaaatgtttatcccttcttctgtaaaagggactctttcccctacggtgagtagtatatagtgaatatcaatgctgatacatttaaactgtggaggcatcaggggaccaacctgcagtgatgctaagtggaactgacaagataatgacatgcgggttattgttgattaatccagttcactggagaatcattgggaaatgcatttatcctttcacctgaccctcccaaccccacaaaaatgatttacagtaatcttggagtcacccagtcctttcttccacatcttccagaactta

SEQ ID NO: 12486 - DNA, 828 bp, Homo sapiens
cagctactcaggaggctgagacaggagaataacttgaacccaggaggcggaggttgcagtgagccgagattgcgtcactgcactccagcctgggtgacagagcgtgactccgtctcaaaaacaaagcacaaaagaaccacagatagaaggagcagctactctccttggtgctgagatagagtgccaaaggaagaggctcccactcactcatcctcagggctgagatctggccttcttggaaagggaacaacggtgctcactgagtggccgagaatttgctgtggtatgtcaccagacgaacttgcatggtatttgtactcccatgtgctggggaggtatctcatgggagacttcacacaacagaaccgtttgagagagtctctggagcaggctgctggccaccgagtactttaggatgctgggcactgcaggagcatgctgaggggatgcaccttctctcctacagcgtctcccccaggaccctgtactgacccatgctgcatgccctctgcctcctactaaatggctcccaaacagctgcaatttcacaaccaaagttttttacttgaaacagcatgttactccttgctaatctaattgagtgtgtattaatcggctacactggtcacacatttgattgggtaagacctaaagtaggctctgcttaacagtgagtccgttcatgtgacctataaaatctctctcagagactcctttccagtccatctttgtcagctgtcttgtctagagctttcaactagctcatagcctccagataacaaggtcattacctttagattaatacgtgcaagttaatacaaaaaaaaa

SEQ ID NO: 12487 - DNA, 294 bp, Homo sapiens
ctggctaatctaaatttaattctggatcttgtaatatatagtttaggagttcatttaaatttaatttacatagggtgaaaataagctttgacctttataattgctgtatcagtaaagtcacaggttcattgacttgttagccaatttttcctgtgttacttttcttctggttttgttgttgttgtttcagtttgtaatatacagatttaagaacaagtgtctggatatccacaaaggcatcacagacagctgacatgtggatctgcttttgtttgtaattaaaatgggcttaaa

SEQ ID NO: 12488 - DNA, 598 bp, Homo sapiens
tgtcaaatacatatgataatttcctaaagcactttttcaaaacatgtgtatttggggtcccccaataggtcaaatttcattttctgggggtaaggacccaggaagtgcatttcaaaaaagtttttcaggtaatttaataaatcctccctccaccctcagcccatttttttttccttcaggaaactgcttgccaagaagctaggcttttccctcccaatgtcatcactcagaaaatgacagtgagaaagacatggtttgtccatcagagctgggtcagagcatttatcagaagagaccagatggcctgaggtcttccctcagtgggtggatggccaaagggcaagtagcaatatttttacagcttcattctttgggcatttcccccatgcaaatgcataagaatgagaaataagtcagcacaatgcagggatttttttgtttgtttaatgtcagatcacatcatttgctgctgcacagccaaccattggcttgctttgaggaaggtggctccttggggagaaggggatctgagagaagcacagcaagaccagggcagaagtggggagtgaacccagcacatagagcgcagaccagtgtc

SEQ ID NO: 12489 - DNA, 3600 bp, Homo sapiens
agcggagttcaagttgcatacatgctgagccagcagctagaaccagaagccgaaagaactgttcacatggagctgtttattttccggcctgaggttgccgagacaattggcgagctgtcttgaatatatctctatcaattaaaacagcagctgagataaataatgcacctttgccggaactgccacagggactgcaggctcaggcttctcaagccagctcaccgtccagctgagcgagatgtcagcccaaggaaggaacttagatgccttggaaattgatgcctcacagttattttctccagaggaggtgcagggtctgggctagggaaacggaaaggactctgttgcatttaataaagcctgtatcctatggcagcagccactaaggagctcaccagaataagccaatgccattcctcatttggcctgagcagctcagagtcaggaagtcagagcgcagaaaatccagcagctgtcagagggctccatgtttggccacggtctgaagcacctgttccacagccgccgtcggtctcgggaaagggagcaccagacgtctcaggattcccagcagcatcagcagcagcagggtatgtccgaccatgactccccagatgagaaggagcgctctccggagatgcatcgcgtctcctacgccatgtccctgcacgacctgcccgcccggcccaccgccttcaaccgcgtgctgcagcagatccgctcccggccctccatcaagcggggcgccagcctgcacagcagcagtgggggcggcagcagcgggagcagcagccggcgcaccaagagtagctccctggagccccagcgtggcagccctcacctgctgcgcaaggccccccaggacagcagcctggccgccatcctgcaccagcaccagtgccgtccccgctcttcctccaccaccgacactgctctgctgctggccgacggcagcaacgtgtacctcctggctgaggaggccgaaggcatcggggacaaggtcgataagggagacctggtggccctgagcctccccgccggccatggtgacaccgacggccccatcagcctggacgtgcccgatggggcaccggacccccagcggaccaaggccgccattgaccacctgcaccagaagatcctgaagatcaccgagcagatcaagattgagcaggaggctcgcgacgacaatgtggcagagtatctgaaactggccaacaacgcggacaagcagcaggtgtcacgcatcaagcaagtgttcgagaagaagaaccagaagtcagcccagaccatcgcccagctgcacaagaagctggagcactaccgccggcgcctgaaggagattgagcagaacgggccctcgcggcagcccaaggacgtgctgcgggacatgcagcaggggctgaaggacgtgggcgccaacgtgcgcgcaggcatcagcggctttgggggtggcgtggtggagggcgtcaagggcagcctctctggcctctcacaggccacccacaccgccgtggtgtccaagccccgggagtttgccagcctcatccgcaacaagtttggcagtgctgacaacatcgcccacctgaaggaccccctggaagatgggccccctgaggaggcagcccgggcactgagcggcagtgccacactcgtctccagccccaagtatggcagcgatgatgagtgctccagcgccagcgccagctcagccggggcaggcagcaactctggggctgggcctggtggggcgctggggagccctaagtccaatgcactgtatggtgctcctggaaacctggatgctctgctggaagagctacgggagatcaaggagggacagtctcacctggaggactccatggaagacctgaagactcagctgcagagggactacacctacatgacccagtgcctgcaggaggagcgctacaggtatgagcggctggaggagcagctcaacgacctgactgagcttcatcagaacgagatgacgaacctgaagcaggagctggccagcatggaggagaaggtggcctaccagtcctatgagagggcacgggacatccaggaggccgtggagtcctgcctgacccgggtcaccaagctggagctgcagcagcaacagcagcaggtggtacagctggagggcgtggagaatgccaacgcgcgggcgctgctgggcaagttcatcaacgtgatcctggcgctcatggccgtgctgctggtgttcgtgtccaccatcgccaacttcatcacgcccctcatgaagacacgcctgcgcatcaccagcaccaccctcctggtcctcgtcctgttcctcctctggaagcactgggactccctcacctacctcctggagcacgtgttgctgcccagctgagtggccagccacaccaaccctgtgctctctggcccccagctggccacacttctccaggagggacccttggacttctttgtgtgtccagtttggcctcctgcccaaactgtccattccagcagctcctgcccccttctctgtacttgcttctgtctgacaccttctccctgttggcctgaagggagcttagaatgcagccctacctggagatagtgcgggcacctgtggccaagtggagcagaggtggacatggggttggattgttttgattatttatagttacacaaggacttctcccagctgaccctcaggatgccccaagtcaggaagaccattaagaataggaggagagggctctgcctcaactttcctaggaaagagcccacctcggagatagctacggtttcctctggtggagatggtgaggatgaaggctggagagtgagggaggaggctctgctggccgcagagaacacagggatgggagggtccctagccttcgggcacctccagggccagagagcaggctcagagcagctagtgtggagctcagcatccccaccccacccctcctccctgtagagctgatttgaggcctccttctggggctgggctctgcaggccaggtgggtgtggcctgtgttttcccttctgttctttctgcctgtactggatctgttattttcagggaaacaggccccagggcccccctgagcctcaccctaagcccttaggcctctgagagtgctgttgggttctatttatttatttatttgttcctttgttccctacccgtgcccccagtgtcttccctgctgagtaccaggagaggtcctgccccatcctctctctgaagccagggcccttccattccatttagcctttggatcatcctggctgggagaagtgggaccgagccacccagccccactatccccaagcagccctacagccgggatgggaggcacgtggcctctcttttatccgtctatttattttgtaagtgtattcgtgtggaggaggttgttgctttatttttttaaggctctggagtgttgtgtatggtttcttttcacatcccagcctcccatgggcacttctaagaagagaggggatttcttggaaaaggagagaggaatcccctagagcagggaaagcagtgcctgccagctgttgtgcaccttcctgagaaataaatatcctctaaattttcaaac

SEQ ID NO: 12490 - DNA, 2672 bp, Homo sapiens
atgaaccaggttgttcagcccttaatgagcagacactctgcatgtagaggcagccaggcccacctctcatgggtcgataagggagacctggtggccctgagcctccccgccggccatggtgacaccgacggccccatcagcctggacgtgcccgatggggcaccggacccccagcggaccaaggccgccattgaccacctgcaccagaagatcctgaagatcaccgagcagatcaagattgagcaggaggctcgcgacgacaatgtggcagagtatctgaaactggccaacaacgcggacaagcagcaggtgtcacgcatcaagcaagtgttcgagaagaagaaccagaagtcagcccagaccatcgcccagctgcacaagaagctggagcactaccgccggcgcctgaaggagattgagcagaacgggccctcgcggcagcccaaggacgtgctgcgggacatgcagcaggggctgaaggacgtgggcgccaacgtgcgcgcaggcatcagcggctttgggggtggcgtggtggagggcgtcaagggcagcctctctggcctctcacaggccacccacaccgccgtggtgtccaagccccgggagtttgccagcctcatccgcaacaagtttggcagtgctgacaacatcgcccacctgaaggaccccctggaagatgggccccctgaggaggcagcccgggcactgagcggcagtgccacactcgtctccagccccaagtatggcagcgatgatgagtgctccagcgccagcgccagctcagccggggcaggcagcaactctggggctgggcctggtggggcgctggggagccctaagtccaatgcactgtatggtgctcctggaaacctggatgctctgctggaagagctacgggagatcaaggagggacagtctcacctggaggactccatggaagacctgaagactcagctgcagagggactacacctacatgacccagtgcctgcaggaggagcgctacaggtatgagcggctggaggagcagctcaacgacctgactgagcttcatcagaacgagatgacgaacctgaagcaggagctggccagcatggaggagaaggtggcctaccagtcctatgagagggcacgggacatccaggaggccgtggagtcctgcctgacccgggtcaccaagctggagctgcagcagcaacagcagcaggtggtacagctggagggcgtggagaatgccaacgcgcgggcgctgctgggcaagttcatcaacgtgatcctggcgctcatggccgtgctgctggtgttcgtgtccaccatcgccaacttcatcacgcccctcatgaagacacgcctgcgcatcaccagcaccaccctcctggtcctcgtcctgttcctcctctggaagcactgggactccctcacctacctcctggagcacgtgttgctgcccagctgagtggccagccacaccaaccctgtgctctctggcccccagctggccacacttctccaggagggacccttggacttctttgtgtgtccagtttggcctcctgcccaaactgtccattccagcagctcctgcccccttctctgtacttgcttctgtctgacaccttctccctgttggcctgaagggagcttagaatgcagccctacctggagatagtgcgggcacctgtggccaagtggagcagaggtggacatggggttggattgttttgattatttatagttacacaaggacttctcccagctgaccctcaggatgccccaagtcaggaagaccattaagaataggaggagagggctctgcctcaactttcctaggaaagagcccacctcggagatagctacggtttcctctggtggagatggtgaggatgaaggctggagagtgagggaggaggctctgctggccgcagagaacacagggatgggagggtccctagccttcgggcacctccagggccagagagcaggctcagagcagctagtgtggagctcagcatccccaccccacccctcctccctgtagagctgatttgaggcctccttctggggctgggctctgcaggccaggtgggtgtggcctgtgttttcccttctgttctttctgcctgtactggatctgttattttcagggaaacaggccccagggcccccctgagcctcaccctaagcccttaggcctctgagagtgctgttgggttctatttatttatttatttgttcctttgttccctacccgtgcccccagtgtcttccctgctgagtaccaggagaggtcctgccccatcctctctctgaagccagggcccttccattccatttagcctttggatcatcctggctgggagaagtgggaccgagccacccagccccactatccccaagcagccctacagccgggatgggaggcacgtggcctctcttttatccgtctatttattttgtaagtgtattcgtgtggaggaggttgttgctttatttttttaaggctctggagtgttgtgtatggtttcttttcacatcccagcctcccatgggcacttctaagaagagaggggatttcttggaaaaggagagaggaatcccctagagcagggaaagcagtgcctgccagctgttgtgcaccttcctgagaaataaatatcctctaaattttcaaac

SEQ ID NO: 12491 - DNA, 2805 bp, Homo sapiens
agcggagttcaagttgcatacatgctgagccagcagctagaaccagaagccgaaagaactgttcacatggagctgtttattttccggcctgaggttgccgagacaattggcgagctgtcttgaatatatctctatcaattaaaacagcagctgagataaataatgcacctttgccggaactgccacagggactgcaggctcaggcttctcaagccagctcaccgtccagctgagcgagatgtcagcccaaggaaggaacttagatgccttggaaattgatgcctcacagttattttctccagaggaggtgcagggtctgggctagggaaacggaaaggactctgttgcatttaataaagcctgtatcctatggcagcagccactaaggagctcaccagaataagccaatgccattcctcatttggcctgagcagctcagagtcaggaagtcagagcgcagaaaatccagcagctgtcagagggctccatgtttggccacggtctgaagcacctgttccacagccgccgtcggtctcgggaaagggagcaccagacgtctcaggattcccggcagcccaaggacgtgctgcgggacatgcagcaggggctgaaggacgtgggcgccaacgtgcgcgcaggcatcagcggctttgggggtggcgtggtggagggcgtcaagggcagcctctctggcctctcacaggccacccacaccgccgtggtgtccaagccccgggagtttgccagcctcatccgcaacaagtttggcagtgctgacaacatcgcccacctgaaggaccccctggaagatgggccccctgaggaggcagcccgggcactgagcggcagtgccacactcgtctccagccccaagtatggcagcgatgatgagtgctccagcgccagcgccagctcagccggggcaggcagcaactctggggctgggcctggtggggcgctggggagccctaagtccaatgcactgtatggtgctcctggaaacctggatgctctgctggaagagctacgggagatcaaggagggacagtctcacctggaggactccatggaagacctgaagactcagctgcagagggactacacctacatgacccagtgcctgcaggaggagcgctacaggtatgagcggctggaggagcagctcaacgacctgactgagcttcatcagaacgagatgacgaacctgaagcaggagctggccagcatggaggagaaggtggcctaccagtcctatgagagggcacgggacatccaggaggccgtggagtcctgcctgacccgggtcaccaagctggagctgcagcagcaacagcagcaggtggtacagctggagggcgtggagaatgccaacgcgcgggcgctgctgggcaagttcatcaacgtgatcctggcgctcatggccgtgctgctggtgttcgtgtccaccatcgccaacttcatcacgcccctcatgaagacacgcctgcgcatcaccagcaccaccctcctggtcctcgtcctgttcctcctctggaagcactgggactccctcacctacctcctggagcacgtgttgctgcccagctgagtggccagccacaccaaccctgtgctctctggcccccagctggccacacttctccaggagggacccttggacttctttgtgtgtccagtttggcctcctgcccaaactgtccattccagcagctcctgcccccttctctgtacttgcttctgtctgacaccttctccctgttggcctgaagggagcttagaatgcagccctacctggagatagtgcgggcacctgtggccaagtggagcagaggtggacatggggttggattgttttgattatttatagttacacaaggacttctcccagctgaccctcaggatgccccaagtcaggaagaccattaagaataggaggagagggctctgcctcaactttcctaggaaagagcccacctcggagatagctacggtttcctctggtggagatggtgaggatgaaggctggagagtgagggaggaggctctgctggccgcagagaacacagggatgggagggtccctagccttcgggcacctccagggccagagagcaggctcagagcagctagtgtggagctcagcatccccaccccacccctcctccctgtagagctgatttgaggcctccttctggggctgggctctgcaggccaggtgggtgtggcctgtgttttcccttctgttctttctgcctgtactggatctgttattttcagggaaacaggccccagggcccccctgagcctcaccctaagcccttaggcctctgagagtgctgttgggttctatttatttatttatttgttcctttgttccctacccgtgcccccagtgtcttccctgctgagtaccaggagaggtcctgccccatcctctctctgaagccagggcccttccattccatttagcctttggatcatcctggctgggagaagtgggaccgagccacccagccccactatccccaagcagccctacagccgggatgggaggcacgtggcctctcttttatccgtctatttattttgtaagtgtattcgtgtggaggaggttgttgctttatttttttaaggctctggagtgttgtgtatggtttcttttcacatcccagcctcccatgggcacttctaagaagagaggggatttcttggaaaaggagagaggaatcccctagagcagggaaagcagtgcctgccagctgttgtgcaccttcctgagaaataaatatcctctaaattttcaaac

SEQ ID NO: 12492 - DNA, 2717 bp, Homo sapiens
ccagtgctgcccagtgtctgtgaccccgggggcctgacacagtccgcagacagctggggcctcagagccccgggtacctcatcgccggcacggcttcgggaaacagtgcccacacaggtcgataagggagacctggtggccctgagcctccccgccggccatggtgacaccgacggccccatcagcctggacgtgcccgatggggcaccggacccccagcggaccaaggccgccattgaccacctgcaccagaagatcctgaagatcaccgagcagatcaagattgagcaggaggctcgcgacgacaatgtggcagagtatctgaaactggccaacaacgcggacaagcagcaggtgtcacgcatcaagcaagtgttcgagaagaagaaccagaagtcagcccagaccatcgcccagctgcacaagaagctggagcactaccgccggcgcctgaaggagattgagcagaacgggccctcgcggcagcccaaggacgtgctgcgggacatgcagcaggggctgaaggacgtgggcgccaacgtgcgcgcaggcatcagcggctttgggggtggcgtggtggagggcgtcaagggcagcctctctggcctctcacaggccacccacaccgccgtggtgtccaagccccgggagtttgccagcctcatccgcaacaagtttggcagtgctgacaacatcgcccacctgaaggaccccctggaagatgggccccctgaggaggcagcccgggcactgagcggcagtgccacactcgtctccagccccaagtatggcagcgatgatgagtgctccagcgccagcgccagctcagccggggcaggcagcaactctggggctgggcctggtggggcgctggggagccctaagtccaatgcactgtatggtgctcctggaaacctggatgctctgctggaagagctacgggagatcaaggagggacagtctcacctggaggactccatggaagacctgaagactcagctgcagagggactacacctacatgacccagtgcctgcaggaggagcgctacaggtatgagcggctggaggagcagctcaacgacctgactgagcttcatcagaacgagatgacgaacctgaagcaggagctggccagcatggaggagaaggtggcctaccagtcctatgagagggcacgggacatccaggaggccgtggagtcctgcctgacccgggtcaccaagctggagctgcagcagcaacagcagcaggtggtacagctggagggcgtggagaatgccaacgcgcgggcgctgctgggcaagttcatcaacgtgatcctggcgctcatggccgtgctgctggtgttcgtgtccaccatcgccaacttcatcacgcccctcatgaagacacgcctgcgcatcaccagcaccaccctcctggtcctcgtcctgttcctcctctggaagcactgggactccctcacctacctcctggagcacgtgttgctgcccagctgagtggccagccacaccaaccctgtgctctctggcccccagctggccacacttctccaggagggacccttggacttctttgtgtgtccagtttggcctcctgcccaaactgtccattccagcagctcctgcccccttctctgtacttgcttctgtctgacaccttctccctgttggcctgaagggagcttagaatgcagccctacctggagatagtgcgggcacctgtggccaagtggagcagaggtggacatggggttggattgttttgattatttatagttacacaaggacttctcccagctgaccctcaggatgccccaagtcaggaagaccattaagaataggaggagagggctctgcctcaactttcctaggaaagagcccacctcggagatagctacggtttcctctggtggagatggtgaggatgaaggctggagagtgagggaggaggctctgctggccgcagagaacacagggatgggagggtccctagccttcgggcacctccagggccagagagcaggctcagagcagctagtgtggagctcagcatccccaccccacccctcctccctgtagagctgatttgaggcctccttctggggctgggctctgcaggccaggtgggtgtggcctgtgttttcccttctgttctttctgcctgtactggatctgttattttcagggaaacaggccccagggcccccctgagcctcaccctaagcccttaggcctctgagagtgctgttgggttctatttatttatttatttgttcctttgttccctacccgtgcccccagtgtcttccctgctgagtaccaggagaggtcctgccccatcctctctctgaagccagggcccttccattccatttagcctttggatcatcctggctgggagaagtgggaccgagccacccagccccactatccccaagcagccctacagccgggatgggaggcacgtggcctctcttttatccgtctatttattttgtaagtgtattcgtgtggaggaggttgttgctttatttttttaaggctctggagtgttgtgtatggtttcttttcacatcccagcctcccatgggcacttctaagaagagaggggatttcttggaaaaggagagaggaatcccctagagcagggaaagcagtgcctgccagctgttgtgcaccttcctgagaaataaatatcctctaaattttcaaac

SEQ ID NO: 12493 - DNA, 3736 bp, Homo sapiens
ggccggccgggagggatgcgctgtgccgcccagctcctctccgtcctgcccatgccctgaagcagaaagtttgggggccgggggttgtctcccttctccctcctgcaatgactgcccaaggactcttgctgcccagcctcgactgtgacctgtcttcgctccccaggtcgaaatgaactattccaagctataaccaaggctcccccttctcgcccctccctcacccgcctttaagaattttttttttaattcaagaaattgtggtctgccatctcccctccttgttaataatttagaccccaggcctcatatgaatataagagggggtgcggtcttccccaagacggcgcgctggaaggacagattccccttgccgacccacatacaccatgaagaggtgcagatcggacgagctgcagcaacaacagggcgaggaggatggagctgggctggaagatgccgcttcccacctgccgggcgcggacctccggcctggggagaccacgggtgctaactctgctggcgggccaacttcagacgccggcgctgccgcggcgcccaacccaggtccccgaagcaagcctcctgatttaaagaaaatccagcagctgtcagagggctccatgtttggccacggtctgaagcacctgttccacagccgccgtcggtctcgggaaagggagcaccagacgtctcaggattcccagcagcatcagcagcagcagggtatgtccgaccatgactccccagatgagaaggagcgctctccggagatgcatcgcgtctcctacgccatgtccctgcacgacctgcccgcccggcccaccgccttcaaccgcgtgctgcagcagatccgctcccggccctccatcaagcggggcgccagcctgcacagcagcagtgggggcggcagcagcgggagcagcagccggcgcaccaagagtagctccctggagccccagcgtggcagccctcacctgctgcgcaaggccccccaggacagcagcctggccgccatcctgcaccagcaccagtgccgtccccgctcttcctccaccaccgacactgctctgctgctggccgacggcagcaacgtgtacctcctggctgaggaggccgaaggcatcggggacaaggtcgataagggagacctggtggccctgagcctccccgccggccatggtgacaccgacggccccatcagcctggacgtgcccgatggggcaccggacccccagcggaccaaggccgccattgaccacctgcaccagaagatcctgaagatcaccgagcagatcaagattgagcaggaggctcgcgacgacaatgtggcagagtatctgaaactggccaacaacgcggacaagcagcaggtgtcacgcatcaagcaagtgttcgagaagaagaaccagaagtcagcccagaccatcgcccagctgcacaagaagctggagcactaccgccggcgcctgaaggagattgagcagaacgggccctcgcggcagcccaaggacgtgctgcgggacatgcagcaggggctgaaggacgtgggcgccaacgtgcgcgcaggcatcagcggctttgggggtggcgtggtggagggcgtcaagggcagcctctctggcctctcacaggccacccacaccgccgtggtgtccaagccccgggagtttgccagcctcatccgcaacaagtttggcagtgctgacaacatcgcccacctgaaggaccccctggaagatgggccccctgaggaggcagcccgggcactgagcggcagtgccacactcgtctccagccccaagtatggcagcgatgatgagtgctccagcgccagcgccagctcagccggggcaggcagcaactctggggctgggcctggtggggcgctggggagccctaagtccaatgcactgtatggtgctcctggaaacctggatgctctgctggaagagctacgggagatcaaggagggacagtctcacctggaggactccatggaagacctgaagactcagctgcagagggactacacctacatgacccagtgcctgcaggaggagcgctacaggtatgagcggctggaggagcagctcaacgacctgactgagcttcatcagaacgagatgacgaacctgaagcaggagctggccagcatggaggagaaggtggcctaccagtcctatgagagggcacgggacatccaggaggccgtggagtcctgcctgacccgggtcaccaagctggagctgcagcagcaacagcagcaggtggtacagctggagggcgtggagaatgccaacgcgcgggcgctgctgggcaagttcatcaacgtgatcctggcgctcatggccgtgctgctggtgttcgtgtccaccatcgccaacttcatcacgcccctcatgaagacacgcctgcgcatcaccagcaccaccctcctggtcctcgtcctgttcctcctctggaagcactgggactccctcacctacctcctggagcacgtgttgctgcccagctgagtggccagccacaccaaccctgtgctctctggcccccagctggccacacttctccaggagggacccttggacttctttgtgtgtccagtttggcctcctgcccaaactgtccattccagcagctcctgcccccttctctgtacttgcttctgtctgacaccttctccctgttggcctgaagggagcttagaatgcagccctacctggagatagtgcgggcacctgtggccaagtggagcagaggtggacatggggttggattgttttgattatttatagttacacaaggacttctcccagctgaccctcaggatgccccaagtcaggaagaccattaagaataggaggagagggctctgcctcaactttcctaggaaagagcccacctcggagatagctacggtttcctctggtggagatggtgaggatgaaggctggagagtgagggaggaggctctgctggccgcagagaacacagggatgggagggtccctagccttcgggcacctccagggccagagagcaggctcagagcagctagtgtggagctcagcatccccaccccacccctcctccctgtagagctgatttgaggcctccttctggggctgggctctgcaggccaggtgggtgtggcctgtgttttcccttctgttctttctgcctgtactggatctgttattttcagggaaacaggccccagggcccccctgagcctcaccctaagcccttaggcctctgagagtgctgttgggttctatttatttatttatttgttcctttgttccctacccgtgcccccagtgtcttccctgctgagtaccaggagaggtcctgccccatcctctctctgaagccagggcccttccattccatttagcctttggatcatcctggctgggagaagtgggaccgagccacccagccccactatccccaagcagccctacagccgggatgggaggcacgtggcctctcttttatccgtctatttattttgtaagtgtattcgtgtggaggaggttgttgctttatttttttaaggctctggagtgttgtgtatggtttcttttcacatcccagcctcccatgggcacttctaagaagagaggggatttcttggaaaaggagagaggaatcccctagagcagggaaagcagtgcctgccagctgttgtgcaccttcctgagaaataaatatcctctaaattttcaaac

SEQ ID NO: 12494 - DNA, 2803 bp, Homo sapiens
atccatgtctttctgaacgacagttctgctgtgagaagctgccattagagagatccagcaggccccaggactcagctggccagccggtgacactgctcactgctcattgtcctcagctgtggacctctgtccccctctgctggccactcacagaatttcctgctggcactgtcaagatgaagtccaaggaggaagagactgctgtcgataagggagacctggtggccctgagcctccccgccggccatggtgacaccgacggccccatcagcctggacgtgcccgatggggcaccggacccccagcggaccaaggccgccattgaccacctgcaccagaagatcctgaagatcaccgagcagatcaagattgagcaggaggctcgcgacgacaatgtggcagagtatctgaaactggccaacaacgcggacaagcagcaggtgtcacgcatcaagcaagtgttcgagaagaagaaccagaagtcagcccagaccatcgcccagctgcacaagaagctggagcactaccgccggcgcctgaaggagattgagcagaacgggccctcgcggcagcccaaggacgtgctgcgggacatgcagcaggggctgaaggacgtgggcgccaacgtgcgcgcaggcatcagcggctttgggggtggcgtggtggagggcgtcaagggcagcctctctggcctctcacaggccacccacaccgccgtggtgtccaagccccgggagtttgccagcctcatccgcaacaagtttggcagtgctgacaacatcgcccacctgaaggaccccctggaagatgggccccctgaggaggcagcccgggcactgagcggcagtgccacactcgtctccagccccaagtatggcagcgatgatgagtgctccagcgccagcgccagctcagccggggcaggcagcaactctggggctgggcctggtggggcgctggggagccctaagtccaatgcactgtatggtgctcctggaaacctggatgctctgctggaagagctacgggagatcaaggagggacagtctcacctggaggactccatggaagacctgaagactcagctgcagagggactacacctacatgacccagtgcctgcaggaggagcgctacaggtatgagcggctggaggagcagctcaacgacctgactgagcttcatcagaacgagatgacgaacctgaagcaggagctggccagcatggaggagaaggtggcctaccagtcctatgagagggcacgggacatccaggaggccgtggagtcctgcctgacccgggtcaccaagctggagctgcagcagcaacagcagcaggtggtacagctggagggcgtggagaatgccaacgcgcgggcgctgctgggcaagttcatcaacgtgatcctggcgctcatggccgtgctgctggtgttcgtgtccaccatcgccaacttcatcacgcccctcatgaagacacgcctgcgcatcaccagcaccaccctcctggtcctcgtcctgttcctcctctggaagcactgggactccctcacctacctcctggagcacgtgttgctgcccagctgagtggccagccacaccaaccctgtgctctctggcccccagctggccacacttctccaggagggacccttggacttctttgtgtgtccagtttggcctcctgcccaaactgtccattccagcagctcctgcccccttctctgtacttgcttctgtctgacaccttctccctgttggcctgaagggagcttagaatgcagccctacctggagatagtgcgggcacctgtggccaagtggagcagaggtggacatggggttggattgttttgattatttatagttacacaaggacttctcccagctgaccctcaggatgccccaagtcaggaagaccattaagaataggaggagagggctctgcctcaactttcctaggaaagagcccacctcggagatagctacggtttcctctggtggagatggtgaggatgaaggctggagagtgagggaggaggctctgctggccgcagagaacacagggatgggagggtccctagccttcgggcacctccagggccagagagcaggctcagagcagctagtgtggagctcagcatccccaccccacccctcctccctgtagagctgatttgaggcctccttctggggctgggctctgcaggccaggtgggtgtggcctgtgttttcccttctgttctttctgcctgtactggatctgttattttcagggaaacaggccccagggcccccctgagcctcaccctaagcccttaggcctctgagagtgctgttgggttctatttatttatttatttgttcctttgttccctacccgtgcccccagtgtcttccctgctgagtaccaggagaggtcctgccccatcctctctctgaagccagggcccttccattccatttagcctttggatcatcctggctgggagaagtgggaccgagccacccagccccactatccccaagcagccctacagccgggatgggaggcacgtggcctctcttttatccgtctatttattttgtaagtgtattcgtgtggaggaggttgttgctttatttttttaaggctctggagtgttgtgtatggtttcttttcacatcccagcctcccatgggcacttctaagaagagaggggatttcttggaaaaggagagaggaatcccctagagcagggaaagcagtgcctgccagctgttgtgcaccttcctgagaaataaatatcctctaaattttcaaac

SEQ ID NO: 12495 - DNA, 2727 bp, Homo sapiens
atgaaccaggttgttcagcccttaatgagcagacactctgcatgtagaggcagccaggcccacctctcatgggtcgataagggagacctggtggccctgagcctccccgccggccatggtgacaccgacggccccatcagcctggacgtgcccgatggggcaccggacccccagcggaccaaggccgccattgaccacctgcaccagaagatcctgaagatcaccgagcagatcaagattgagcaggaggctcgcgacgacaatgtggcagagtatctgaaactggccaacaacgcggacaagcagcaggtgtcacgcatcaagcaagtgttcgagaagaagaaccagaagtcagcccagaccatcgcccagctgcacaagaagctggagcactaccgccggcgcctgaaggagattgagcagaacgggccctcgcggcagcccaaggacgtgctgcgggacatgcagcaggggctgaaggacgtgggcgccaacgtgcgcgcaggcatcagcggctttgggggtggcgtggtggagggcgtcaagggcagcctctctggcctctcacaggccacccacaccgccgtggtgtccaagccccgggagtttgccagcctcatccgcaacaagtttggcagtgctgacaacatcgcccacctgaaggaccccctggaagatgggccccctgaggaggcagcccgggcactgagcggcagtgccacactcgtctccagccccaagtatggcagcgatgatgagtgctccagcgccagcgccagctcagccggggcaggcagcaactctggggctgggcctggtggggcgctggggagccctaagtccaatgcactgtatggtgctcctggaaacctggatgctctgctggaagagctacgggagatcaaggagggacagtctcacctggaggactccatggaagacctgaagactcagctgcagagggactacacctacatgacccagtgcctgcaggaggagcgctacaggtatgagcggctggaggagcagctcaacgacctgactgagcttcatcagaacgagatgacgaacctgaagcaggagctggccagcatggaggagaaggtggcctaccagtcctatgagagggcacgggacatccaggaggccgtggagtcctgcctgacccgggtcaccaagctggagctgcagcagcaacagcagcaggtggtacagctggagggcgtggagaatgccaacgcgcgggcgctgctgggcaagttcatcaacgtgatcctggcgctcatggccgtgctgctggtgttcgtgtccaccatcgccaacttcatcacgcccctcatgaagacacgcctgcgcatcaccagcaccaccctcctggtcctcgtcctgttcctcctctggaagcactgggactccctcacctacctcctggagcacgtgttgctgcccagctgagtggccagccacaccaaccctgtgctctctggcccccagctggccacacttctccaggagggacccttggacttctttgtgtgtccagtttggcctcctgcccaaactgtccattccagcagctcctgcccccttctctgtacttgcttctgtctgacaccttctccctgttggcctgaagggagcttagaatgcagccctacctggagatagtgcgggcacctgtggccaagtggagcagaggtggacatggggttggattgttttgattatttatagttacacaaggacttctcccagctgaccctcaggatgccccaagtcaggaagaccattaagaataggaggagagggctctgcctcaactttcctaggaaagagcccacctcggagatagctacggtttcctctggtggagatggtgaggatgaaggctggagagtgagggaggaggctctgctggccgcagagaacacagggatgggagggtccctagccttcgggcacctccagggccagagagcaggctcagagcagctagtgtggagctcagcatccccaccccacccctcctccctgtagagctgatttgaggcctccttctggggctgggctctgcaggccaggtgggtgtggcctgtgttttcccttctgttctttctgcctgtactggatctgttattttcagggaaacaggccccagggcccccctgagcctcaccctaagcccttaggcctctgagagtgctgttgggttctatttatttatttatttgttcctttgttccctacccgtgcccccagtgtcttccctgctgagtaccaggagaggtcctgccccatcctctctctgaagccagggcccttccattccatttagcctttggatcatcctggctgggagaagtgggaccgagccacccagccccactatccccaagcagccctacagccgggatgggaggcacgtggcctctcttttatccgtctatttattttgtaagtgtattcgtgtggaggaggttgttgctttatttttttaaggctctggagtgttgtgtatggtttcttttcacatcccagcctcccatgggcacttctaagaagagaggggatttcttggaaaaggagagaggaatcccctagagcagggaaagcagtgcctgccagctgttgtgcaccttcctgagaaataaatatcctctaaattttcaaacaaaaaaaataaaaaactttaaggggggcccggtacccaatttgcccttttattga

SEQ ID NO: 12496 - DNA, 3501 bp, Homo sapiens
agtaaaagtccacagttaccgtgagagaaaaaaagaggagaaagcagtgcagccaaactcggaagaaaagagaggaggaaaaggactcgactttcacattggaacaaccttctttccagtgctaaggctctctgatctggggaacaacacctggacatggctccagagatcaacttgccgggcccaatgagcctcattgataacactaaagggcagctggtggtgaatccagaagctctgaagatcctatctgcaattacgcagcctgtggtggtggtggcgattgtgggcctctatcgcacaggcaaatcctacctgatgaacaagctggctgggaagaaaaacggcttctctctaggctccacagtgaagtctcacaccaagggaatctggatgtggtgtgtgcctcatcccaagaagccagaacacaccctagttctgctcgacactgagggcctgggagatatagagaagggtgacaatgagaatgactcctggatctttgccttggccatcctcctgagcagcaccttcgtgtacaatagcatgggaaccatcaaccagcaggccatggaccaacttcactatgtgacagagctgacagatcgaatcaaggcaaactcctcacctggtaacaattctgtagacgactcagctgactttgtgagcttttttccagcatttgtgtggactctcagagatttcaccctggaactggaagtagatggagaacccatcactgctgatgactacttggagctttcgctaaagctaagaaaaggtactgataagaaaagtaaaagctttaatgatcctcggttgtgcatccgaaagttcttccccaagaggaagtgcttcgtcttcgattggcccgctcctaagaagtaccttgctcacctagagcagctaaaggaggaagagctgaaccctgatttcatagaacaagttgcagaattttgttcctacatcctcagccattccaatgtcaagactctttcaggtggcattgcagtcaatgggcctcgtctagagagcctggtgctgacctacgtcaatgccatcggcagtggggatctaccctgcatggagaacgcagtcctggccttggcccagatagagaactcagccgcagtggaaaaggctattgcccactatgaacagcagatgggccagaaggtgcagctgcccacggaaaccctccaggagctgctggacctgcacagggacagtgagagagaggccattgaagtcttcatgaagaactctttcaaggatgtggaccaaatgttccagaggaaattaggggcccagttggaagcaaggcgagatgacttttgtaagcagaattccaaagcatcatcagattgttgcatggctttacttcaggatatatttggccctttagaagaagatgtcaagcagggaacattttctaaaccaggaggttaccgtctctttactcagaagctgcaggagctgaagaataagtactaccaggtgccaaggaaggggatacaggccaaagaggtgctgaaaaaatatttggagtccaaggaggatgtggctgatgcacttctacagactgatcagtcactctcagaaaaggaaaaagcgattgaagtggaacgtataaaggctgaatctgcagaagctgcaaagaaaatgttggaggaaatacaaaagaagaatgaggagatgatggaacagaaagagaagagttatcaggaacatgtgaaacaattgactgagaagatggagagggacagggcccagttaatggcagagcaagagaagaccctcgctcttaaacttcaggaacaggaacgccttctcaaggagggattcgagaatgagagcaagagacttcaaaaagacatatgggatatccagatgagaagcaaatcattggagccaatatgtaacatactctaaaagtccaaggagcaaaatttgcctgtccagctccctctccccaagaaacaacatgaatgagcaacttcagagtgtcaaacaactgccattaaacttaactcaaaatcatgatgcatgcatttttgttgaaccataaagtttgcaaagtaaaggttaagtatgaggtcaatgttttacctacagagcaattcaactcatgcttatttatagtactaacttttaatatgatctttaactaaatcctatatttgaaatcatacacaaggactcaagagagatattgtgtaactaggatgcattttccaatgagatatcttgcagtttctgttctgggtagatttttttctctcatatgcaccacccttactgtatattcagtcctatactcttattcagggatttaactatggtcgtagcatagggctgaagtgttgtgaatatgatgaaaatgtgatgagaccaaacaaaccatggggcacagtagagcatcactcctgccaagtggtctttgtatggcatgctggctgcaaataaaggagatctgggacacttaactaggcttttaaagtacagacagtgcacagttctcatttgggtggaggctgcatgatctgtgggcactagcagagaaagtggttgcctctgtgcagaatgcatttatgagtagaggctccaccttctctgtccatgtaaaccctctaggtaattactgccccattcccaggccacctagatctctcttctctagtctcccttagtcttttctctttcctgaagtttagaaaataacttctacaatcacagaaaggaaagctttaactcaaactcaaattactttccattcttctgaggaccaggactataatcctataaagcctaaaacttgactgcatttttctctctgctcctctgctatgacattatatcctcaaagctactcagggtaaatgacttactaaaaaaaaaaaaatgacagattgaaaaatcaagaataattcattaatacaaaacattatcctactacaattgtttcaggatgtgtattattcagagttcttcatggcaaataacaatctgctcagcaatttaagtaaaaagtaatttactttttaataccattaggttgcacaccgatgctccagaattgtgagggagccatactctacagctattccaccgaggataatactaccattgtaaaggcatctcacgggaaaacaacacagctaccatgaaccagcaccatgatctctggatgaaatgctggaagcttctgcagtgtcagctatgagtaaatggatgccaccaccttcacattttcagtaaacaaatactcccctaccccatgaaaagttgcatctttgagctgctcacatctccagctaagcctcacaaaagtcaatctgcagggaagaatctaaatcatatgcctacccatgggaaagtctgagaattagagtatttttgtcttctacttttggaggaagaaactaataacgtgggaaattttcctgtatgtttagtcaacccgtttttccatgcagatgtatggagataaatcttatagta

SEQ ID NO: 12497 - DNA, 2040 bp, Homo sapiens
agtaaaagtccacagttaccgtgagagaaaaaaagaggagaaagcagtgcagccaaactcggaagaaaagagaggaggaaaaggactcgactttcacattggaacaaccttctttccagtgctaaggctctctgatctggggaacaacacctggacatggctccagagatcaacttgccgggcccaatgagcctcattgataacactaaagggcagctggtggtgaatccagaagctctgaagatcctatctgcaattacgcagcctgtggtggtggtggcgattgtgggcctctatcgcacaggcaaatcctacctgatgaacaagctggctgggaagaaaaacggcttctctctaggctccacagtgaagtctcacaccaagggaatctggatgtggtgtgtgcctcatcccaagaagccagaacacaccctagttctgctcgacactgagggcctgggagatatagagaagggtgacaatgagaatgactcctggatctttgccttggccatcctcctgagcagcaccttcgtgtacaatagcatgggaaccatcaaccagcaggccatggaccaacttcactatgtgacagagctgacagatcgaatcaaggcaaactcctcacctggtaacaattctgtagacgactcagctgactttgtgagcttttttccagcatttgtgtggactctcagagatttcaccctggaactggaagtagatggagaacccatcactgctgatgactacttggagctttcgctaaagctaagaaaaggtactgataagaaaagtaaaagctttaatgatcctcggttgtgcatccgaaagttcttccccaagaggaagtgcttcgtcttcgattggcccgctcctaagaagtaccttgctcacctagagcagctaaaggaggaagagctgaaccctgatttcatagaacaagttgcagaattttgttcctacatcctcagccattccaatgtcaagactctttcaggtggcattgcagtcaatgggcctcgtctagagagcctggtgctgacctacgtcaatgccatcggcagtggggatctaccctgcatggagaacgcagtcctggccttggcccagatagagaactcagccgcagtggaaaaggctattgcccactatgaacagcagatgggccagaaggtgcagctgcccacggaaaccctccaggagctgctggacctgcacagggacagtgagagagaggccattgaagtcttcatgaagaactctttcaaggatgtggaccaaatgttccagaggaaattaggggcccagttggaagcaaggcgagatgacttttgtaagcagaattccaaagcatcatcagattgttgcatggctttacttcaggatatatttggccctttagaagaagatgtcaagcagggaacattttctaaaccaggaggttaccgtctctttactcagaagctgcaggagctgaagaataagtactaccaggtgccaaggaaggggatacaggccaaagaggtgctgaaaaaatatttggagtccaaggaggatgtggctgatgcacttctacagactgatcagtcactctcagaaaaggaaaaagcgattgaagtggaacgtataaaggctgaatctgcagaagctgcaaagaaaatgttggaggaaatacaaaagaagaatgaggagatgatggaacagaaagagaagagttatcaggaacatgtgaaacaattgactgagaagatggagagggacagggcccagttaatggcagagcaagagaagaccctcgctcttaaacttcaggaacaggaacgccttctcaaggagggattcgagaatgagagcaagagacttcaaaaagacatatgggatatccagatgagaagcaaatcattggagccaatatgtaacatactctaaaagtccaaggagcaaaatttgcctgtccagctccctctccccaagaaacaacatgaatgagcaacttcagagtgtcaaacaactgccattaaacttaactcaaaatca

SEQ ID NO: 12498 - DNA, 846 bp, Homo sapiens
aggattacttcctcggtggtactcccccaggacagtgagagagaggccattgaagtcttcatgaagaactctttcaaggatgtggaccaaatgttccagaggaaattaggggcccagttggaagcaaggcgagatgacttttgtaagcagaattccaaagcatcatcagattgttgcatggctttacttcaggatatatttggccctttagaagaagatgtcaagcagggaacattttctaaaccaggaggttaccgtctctttactcagaagctgcaggagctgaagaataagtactaccaggtgccaaggaaggggatacaggccaaagaggtgctgaaaaaatatttggagtccaaggaggatgtggctgatgcacttctacagactgatcagtcactctcagaaaaggaaaaagcgattgaagtggaacgtataaaggctgaatctgcagaagctgcaaagaaaatgttggaggaaatacaaaagaagaatgaggagatgatggaacagaaagagaagagttatcaggaacatgtgaaacaattgactgagaagatggagagggacagggcccagttaatggcagagcaagagaagaccctcgctcttaaacttcaggaacaggaacgccttctcaaggagggattcgagaatgagagcaagagacttcaaaaagacatatgggatatccagatgagaagcaaatcattggagccaatatgtaacatactctaaaagtccaaggagcaaaatttgcctgtccagctccctctccccaagaaacaacatgaatgagcaacttcagagtgtcaaacaactgccattaaacttaactcaaaatca

SEQ ID NO: 12499 - DNA, 844 bp, Homo sapiens
gtgtagtgtatccgggaactccaggcaggctgcctgactccagtgtttgtgctcagaactattcctgaaatgagagacttggaaagataaaagtttcgtatgaaatagtgcccagttggaagcaaggcgagatgacttttgtaagcagaattccaaagcatcatcagattgttgcatggctttacttcaggatatatttggccctttagaagaagatgtcaagcagggaacattttctaaaccaggaggttaccgtctctttactcagaagctgcaggagctgaagaataagtactaccaggtgccaaggaaggggatacaggccaaagaggtgctgaaaaaatatttggagtccaaggaggatgtggctgatgcacttctacagactgatcagtcactctcagaaaaggaaaaagcgattgaagtggaacgtataaaggctgaatctgcagaagctgcaaagaaaatgttggaggaaatacaaaagaagaatgaggagatgatggaacagaaagagaagagttatcaggaacatgtgaaacaattgactgagaagatggagagggacagggcccagttaatggcagagcaagagaagaccctcgctcttaaacttcaggaacaggaacgccttctcaaggagggattcgagaatgagagcaagagacttcaaaaagacatatgggatatccagatgagaagcaaatcattggagccaatatgtaacatactctaaaagtccaaggagcaaaatttgcctgtccagctccctctccccaagaaacaacatgaatgagcaacttcagagtgtcaaacaactgccattaaacttaactcaaaatca

SEQ ID NO: 12500 - DNA, 2262 bp, Homo sapiens
agtaaaagtccacagttaccgtgagagaaaaaaagaggagaaagcagtgcagccaaactcggaagaaaagagaggaggaaaaggactcgactttcacattggaacaaccttctttccagtgctaaggctctctgatctggggaacaacacctggacatggctccagagatcaacttgccgggcccaatgagcctcattgataacactaaagggcagctggtggtgaatccagaagctctgaagatcctatctgcaattacgcagcctgtggtggtggtggcgattgtgggcctctatcgcacaggcaaatcctacctgatgaacaagctggctgggaagaaaaacggcttctctctaggctccacagtgaagtctcacaccaagggaatctggatgtggtgtgtgcctcatcccaagaagccagaacacaccctagttctgctcgacactgagggcctgggagatatagagaagggtgacaatgagaatgactcctggatctttgccttggccatcctcctgagcagcaccttcgtgtacaatagcatgggaaccatcaaccagcaggccatggaccaacttcactatgtgacagagctgacagatcgaatcaaggcaaactcctcacctggtaacaattctgtagacgactcagctgactttgtgagcttttttccagcatttgtgtggactctcagagatttcaccctggaactggaagtagatggagaacccatcactgctgatgactacttggagctttcgctaaagctaagaaaaggtactgataagaaaagtaaaagctttaatgatcctcggttgtgcatccgaaagttcttccccaagaggaagtgcttcgtcttcgattggcccgctcctaagaagtaccttgctcacctagagcagctaaaggaggaagagctgaaccctgatttcatagaacaagttgcagaattttgttcctacatcctcagccattccaatgtcaagactctttcaggtggcattgcagtcaatgggcctcgtctagagagcctggtgctgacctacgtcaatgccatcggcagtggggatctaccctgcatggagaacgcagtcctggccttggcccagatagagaactcagccgcagtggaaaaggctattgcccactatgaacagcagatgggccagaaggtgcagctgcccacggaaaccctccaggagctgctggacctgcacagggacagtgagagagaggccattgaagtcttcatgaagaactctttcaaggatgtggaccaaatgttccagaggaaattaggggcccagttggaagcaaggcgagatgacttttgtaagcagaattccaaagcatcatcagattgttgcatggctttacttcaggatatatttggccctttagaagaagatgtcaagcagggaacattttctaaaccaggaggttaccgtctctttactcagaagctgcaggagctgaagaataagtactaccaggtgccaaggaaggggatacaggccaaagaggtgctgaaaaaatatttggagtccaaggaggatgtggctgatgcacttctacagactgatcagtcactctcagaaaaggaaaaagcgattgaagtggaacgtataaaggctgaatctgcagaagctgcaaagaaaatgttggaggaaatacaaaagaagaatgaggagatgatggaacagaaagagaagagttatcaggaacatgtgaaacaattgactgagaagatggagagggacagggcccagttaatggcagagcaagagaagaccctcgctcttaaacttcaggttgcacaccgatgctccagaattgtgagggagccatactctacagctattccaccgaggataatactaccattgtaaaggcatctcacgggaaaacaacacagctaccatgaaccagcaccatgatctctggatgaaatgctggaagcttctgcagtgtcagctatgagtaaatggatgccaccaccttcacattttcagtaaacaaatactcccctaccccatgaaaagttgcatctttgagctgctcacatctccagctaagcctcacaaaagtcaatctgcagggaagaatctaaatcatatgcctacccatgggaaagtctgagaattagagtatttttgtcttctacttttggaggaagaaactaataacgtgggaaattttcctgtatgtttagtcaacccgtttttccatgcagatgtatggagataaatcttatagta

SEQ ID NO: 12501 - DNA, 1869 bp, Homo sapiens
agtaaaagtccacagttaccgtgagagaaaaaaagaggagaaagcagtgcagccaaactcggaagaaaagagaggaggaaaaggactcgactttcacattggaacaaccttctttccagtgctaaggctctctgatctggggaacaacacctggacatggctccagagatcaacttgccgggcccaatgagcctcattgataacactaaagggcagctggtggtgaatccagaagctctgaagatcctatctgcaattacgcagcctgtggtggtggtggcgattgtgggcctctatcgcacaggcaaatcctacctgatgaacaagctggctgggaagaaaaacggcttctctctaggctccacagtgaagtctcacaccaagggaatctggatgtggtgtgtgcctcatcccaagaagccagaacacaccctagttctgctcgacactgagggcctgggagatatagagaagggtgacaatgagaatgactcctggatctttgccttggccatcctcctgagcagcaccttcgtgtacaatagcatgggaaccatcaaccagcaggccatggaccaacttcactatgtgacagagctgacagatcgaatcaaggcaaactcctcacctggtaacaattctgtagacgactcagctgactttgtgagcttttttccagcatttgtgtggactctcagagatttcaccctggaactggaagtagatggagaacccatcactgctgatgactacttggagctttcgctaaagctaagaaaaggtactgataagaaaagtaaaagctttaatgatcctcggttgtgcatccgaaagttcttccccaagaggaagtgcttcgtcttcgattggcccgctcctaagaagtaccttgctcacctagagcagctaaaggaggaagagctgaaccctgatttcatagaacaagttgcagaattttgttcctacatcctcagccattccaatgtcaagactctttcaggtggcattgcagtcaatgggcctcgtctagagagcctggtgctgacctacgtcaatgccatcggcagtggggatctaccctgcatggagaacgcagtcctggccttggcccagatagagaactcagccgcagtggaaaaggctattgcccactatgaacagcagatgggccagaaggtgcagctgcccacggaaaccctccaggagctgctggacctgcacagggacagtgagagagaggccattgaagtcttcatgaagaactctttcaaggatgtggaccaaatgttccagaggaaattaggggcccagttggaagcaaggcgagatgacttttgtaagcagaattccaaagcatcatcagattgttgcatggctttacttcaggatatatttggccctttagaagaagatgtcaagcagggaacattttctaaaccaggaggttaccgtctctttactcagaagctgcaggagctgaagaataagtactaccaggtgccaaggaaggggatacaggccaaagaggtgctgaaaaaatatttggagtccaaggaggatgtggctgatgcacttctacagactgatcagtcactctcagaaaaggaaaaagcgattgaagtggaacgtataaaggctgaatctgcagaagctgcaaagaaaatgttggaggaaatacaaaagaagaatgaggagatgatggaacagaaagagaagagttatcaggaacatgtgaaacaattgactgagaagatggagagggacagggcccagttaatggcagagcaagagaagaccctcgctcttaaacttcagaacaggaacgccttctccaggagggtttcttagcgatagtgggtaccgagctcg

SEQ ID NO: 12502 - DNA, 923 bp, Homo sapiens
aaatacaaaagaagaatgaggtgatgatggaacagaaagagaagagttatcaggaacacgtgaaacaattgactgagaagatggagagggacagggcccagttaatggcagagcaagagaagaccctcgctcttaaacttcaggaacaggaacgccttctcaaggagggattcgagaatgagagcaagagacttcaaaaagacatatgagatgacttttgtaagcagaattccaaagcatcatcagattgttgcatggctttacttcaggatatatttggccctttagaagaagatgtcaagcagggaacattttctaaaccaggaggttaccgtctctttactcagaagctgcaggagctgaagaataagtactaccaggtgccaaggaaggggatacaggccaaagaggtgctgaaaaaatatttggagtccaaggaggatgtggctgatgcacttctacagactgatcagtcactctcagaaaaggaaaaagcgattgaagtggaacgtataaaggctgaatctgcagaagctgcaaagaaaatgttggaggaaatacaaaagaagaatgaggagatgatggaacagaaagagaagagttatcaggaacatgtgaaacaattgactgagaagatggagagggacagggcccagttaatggcagagcaagagaagaccctcgctcttaaacttcaggaacaggaacgccttctcaaggagggattcgagaatgagagcaagagacttcaaaaagacatatgggatatccagatgagaagcaaatcattggagccaatatgtaacatactctaaaagtccaaggagcaaaatttgcctgtccagctccctctccccaagaaacaacatgaatgagcaacttcagagtgtcaaacaactgccattaaacttaactcaaaatca

SEQ ID NO: 12503 - DNA, 720 bp, Homo sapiens
  misc_feature (34)..(34): n is a, c, g, or t
gttttactccctttggacgactctagaggatccnccaatcccttggagcctttcgctaaagctaagaaaaggtactgataagaaaagtaaaagctttaatgatccacattttctaaaccaggaggttaccgtctctttactcagaagctgcaggagctgaagaataagtactaccaggtgccaaggaaggggatacaggccaaagaggtgctgaaaaaatatttggagtccaaggaggatgtggctgatgcacttctacagactgatcagtcactctcagaaaaggaaaaagcgattgaagtggaacgtataaaggctgaatctgcagaagctgcaaagaaaatgttggaggaaatacaaaagaagaatgaggagatgatggaacagaaagagaagagttatcaggaacatgtgaaacaattgactgagaagatggagagggacagggcccagttaatggcagagcaagagaagaccctcgctcttaaacttcaggaacaggaacgccttctcaaggagggattcgagaatgagagcaagagacttcaaaaagacatatgggatatccagatgagaagcaaatcattggagccaatatgtaacatactctaaaagtccaaggagcaaaatttgcctgtccagctccctctccccaagaaacaacatgaatgagcaacttcagagtgtcaaacaactgccattaaacttaactcaaaatca

SEQ ID NO: 12504 - DNA, 1460 bp, Homo sapiens
agtaaaagtccacagttaccgtgagagaaaaaaagaggagaaagcagtgcagccaaactcggaagaaaagagaggaggaaaaggactcgactttcacattggaacaaccttctttccagtgctaaggctctctgatctggggaacaacacctggacatggctccagagatcaacttgccgggcccaatgagcctcattgataacactaaagggcagctggtggtgaatccagaagctctgaagatcctatctgcaattacgcagcctgtggtggtggtggcgattgtgggcctctatcgcacaggcaaatcctacctgatgaacaagctggctgggaagaaaaacggcttctctctaggctccacagtgaagtctcacaccaagggaatctggatgtggtgtgtgcctcatcccaagaagccagaacacaccctagttctgctcgacactgagggcctgggagatatagagaagggtgacaatgagaatgactcctggatctttgccttggccatcctcctgagcagcaccttcgtgtacaatagcatgggaaccatcaaccagcaggccatggaccaacttcactatgtgacagagctgacagatcgaatcaaggcaaactcctcacctggtaacaattctgtagacgactcagctgactttgtgagcttttttccagcatttgtgtggactctcagagatttcaccctggaactggaagtagatggagaacccatcactgctgatgactacttggagctttcgctaaagctaagaaaaggtactgataagaaaagtaaaagctttaatgatcctcggttgtgcatccgaaagttcttccccaagaggaagtgcttcgtcttcgattggcccgctcctaagaagtaccttgctcacctagagcagctaaaggaggaagagctgaaccctgatttcatagaacaagttgcagaattttgttcctacatcctcagccattccaatgtcaagactctttcaggtggcattgcagtcaatgggcctcgtctagagagcctggtgctgacctacgtcaatgccatcggcagtggggatctaccctgcatggagaacgcagtcctggccttggcccagatagagaactcagccgcagtggaaaaggctattgcccactatgaacagcagatgggccagaaggtgcagctgcccacggaaaccctccaggagctgctggacctgcacagggacagtgagagagaggccattgaagtcttcatgaagaactctttcaaggatgtggaccaaatgttccagaggaaattaggggcccagttggaagcaaggcgagatgacttttgtaagcagaattccaaagcatcatcagattgttgcatggctttacttcaggatatatttggccctttagaagaagatgtcaagcagggatttaggttacatgggggatcctcacgattcgacct

SEQ ID NO: 12505 - DNA, 241 bp, Homo sapiens
tggctgatgcacttctacagactgatcagtcactctcagaaaaggaaaaagcgattgaaggtgagaacagctgaaaacactctacatggtcggaaagctctcaaaatgttagttagcaatattggtccacctggaattattattgtagagaaagaatggcaagtatcattcatagttctatgagagttttcttaactaatctgtatgatcattggttttctggttacccaaggcaaaatta

SEQ ID NO: 12506 - DNA, 884 bp, Homo sapiens
catagaagtcttctctactggggtcgttctggcttttgttagaaactaggtctgagatgtttcttccctgtccattaccattcgatgttcttttattcagagcaatgttgcgtgtattctgaaactggaaactgaaccagttgtttctcctagtcaccaagcatactctcctggctccccaagtacttaaatgttctcatctgtcgcacccctgtatttgcctcacccctgcatggtcggaaatcttcgtttcaggtcagaacagcctggggtctgtgggtaaaatcagcccttctcccaggcctgtgcacacaccccctcagcactccctatgcgcgcgcactagttgttgaagtcttcctgattttatattgagccttcttctatcaattttgagagcaagtattgaaatccctaactatgtttttgttgaattgttcacttttaagtctgtttttgcttcacttgacttttggctcttttgttagactgtttcataattgttacatcgttctgatgtattggttcttttgtcattatgaaatattcctctgtctctattttgtgtcatactaataaaatcactctggttttcttatggttacagtttgtattatgtatcttttccacaattttactttcaactaacttgtgattttgaatctgaagtgggtctcttagatgcatataattaggtcttgcttttttatacagttggataacctgtaccttttaaatttgaatgactttacgcttaaggtaattattgctatggttgcatttatgtctgccattttgagtttttaaaatgttctttacattcctttgttactccttcactgcattcttttgtgttgaataaatatttttagtgtgccatttta

SEQ ID NO: 12507 - DNA, 1167 bp, Homo sapiens
gagaaagaaatgttcaaaagcatttagcaaagaaagtacatgaagtgcagtcagattgctctgggaattcagggatgagagtaactaatttacattttaaaatggtagttcttagaggcccagcaaggaaaggaccatgaaggcagaatgtttcagtgtgtcttgaacagtgagtaggacttataactgatggaaataggggcatttcaggcagaaagaataacttgaagaaaatgaatagggcatgtgcagggaccatgaataggggaatgtcgctgtgtagcacataatacgtgaacaagactgttgtgtactgcagtccaacaggaataaagaaataagactaaaaacttatacagttgactcttgaacaacatgggactgtaggggtccacttagagttttttctaatacattggaaaattttttggagatttgcagcaattggaaaaaactcacagatgaactgtatagcctagaaatatatttttttaattaagaagagttaggcatgtcttgaatgtgtaaaacatgtgtagatacttgtgtattttatcatttactaccacagaatatgcacaaatctattataaaaaattaaaattttatcaaaacttgcctatacaatatgcagatcatacatgaagccattcatagtcaagagaaatgtaaacaaatgtaaagatgcagtattaagtgagagtggcaaaaagttactgtggtatatactatacttctctaataatttcatagccacctcctattgctattgcagtgagttcaggtgctgcaagtatccacttaaaatgccacacattttaatcggcactgatcacctctgtttcagcagtttgtctctgtagtaaattgcctaccacagtaaaaggtaatctcttgtggttctcatgtatttttcatcgtgtttaatgcaatactgtaaactttgaataataccataagactcgtataaagtgatgccactagcactagtgatactggaagtgctcccaagaagaagagaaaagtctgacattacaagaaaaagttgaattgcttggtatgtaccatagattaatgtctgcagctgctattctgccatttcaagaaaaatgaatgatgtctgccatttcaggataaatgaattcagtgtaaggactattgttaaaa

SEQ ID NO: 12508 - DNA, 559 bp, Homo sapiens
caagaaaaagatatgaatgaaattgcatggggaagagtggcctattctaagggaacagcttaactaagtttttattactattggatgttgtaataactatgtatttttttgtatataagctataactcatactatttcagtgggtgatgagtgatgagatgggaagtatatttaaataaaaataacttgctaatataattagatagcattaaggaagtatgagtaaggtatattccttttagcctagaattgcttcctttcatggcttcaagagtaggatttcaaagtcacttattatattattatatacagaaaaatgtaaacttacttaaggtcagactaattccttgcttctgaaatgatgaaagtattaatgctaaaaataatagataacatggaagtttcaaagtgttgttgaaatggatggaaggatgaaggctcattaaactttgtgaacaagaatttagtggaaaaattaagtatggagcagaattttgaagatgtgttgaacatggtttggcagagaaggcagaaaccttcatttagcagaaaccacatg

SEQ ID NO: 12509 - DNA, 1162 bp, Homo sapiens
tttagactcatcactttcgccagtcttctctttctccccccactttttttttttcattttgccacatcatgcgactcggggcgaccgacgtcacttccgtgggcgctttaggtcccacccacgtacttccaggtgcacgtgatactgatggggaagggtcggctgattgctgccagaaatggagagctcgttttaaggaaatgcggcgtctcctgggagtgaagaggcttttgggccaccttgaggcatgacgggtgccgcttcgtttccctgcgaccgctgcctgtttcgactgagcccctcacaggaggacgtggcgggggcagacgggcgcagcctcccgccctctccgtgactcagggaaacggcctcgccgcagagcgctccctcggcagctggctgcagcactcctcccccgccgggcttcagagtgggtggtttcctacagcctagggagggggcctgaaacggggtttaaaatcttccctgccctcacacaagcccttctgactgttggagaacctgacgcgcggattctaactagaactggcactctcttcgggtgttagataattaactcaaaggacagcgaaggccttttatgatgtctttcaagctggccttatgacagcttttcttaacgtttctgcggacattttggcggacttgtgtcggcctagctcagtgatcagtttcgttaaagaatttgagtatccgaacattaaaggattggacctaaattctagcaggaggatttttagccacatcaaataatttacgtctcaaagatttagataattagggtaaggatgcttagtaaaacctgaaggttccatcgcgccactgcactccaacctgggcgacagagcgagactccgtctcaaaaaaaaaacaaacaaaaaaaaacctgaaggttcctggaggaaagagatgaactattagccgtgtatttcggtgggaccacctcaacataggttcctgtaggttagcaatgtagaaatgtagcgcttcaaagccggagcatcctgtcttcaaagagcatgaaggtatcaacggcattcattgtcgattaataataaccttcctggtactttcttgctaaagtataagccataataatatttcataatcgcaccaatacaataaaggatgaaagacgtta

SEQ ID NO: 12510 - DNA, 482 bp, Homo sapiens
tactactactaaattcgcggccgcgtcgacgtatccgaacattaaaggattggacctaaattctagcaggaggatttttagccacatcaaataatttacgtctcaaagatttagataattagggtaaggatgcttagtaaaacctgaaggttccatcgcgccactgcactccaacctgggcgacagagcgagactccgtctcaaaaaaaaaacaaacaaaaaaaaacctgaaggttcctggaggaaagagatgaactattagccgtgtatttcggtgggaccacctcaacataggttcctgtaggttagcaatgtagaaatgtagcgcttcaaagccggagcatcctgtcttcaaagagcatgaaggtatcaacggcattcattgtcgattaataataaccttcctggtactttcttgctaaagtataagccataataatatttcataatcgcaccaatacaataaaggatgaaagacgtta

SEQ ID NO: 12511 - DNA, 1049 bp, Homo sapiens
tttagactcatcactttcgccagtcttctctttctccccccactttttttttttcattttgccacatcatgcgactcggggcgaccgacgtcacttccgtgggcgctttaggtcccacccacgtacttccaggtgcacgtgatactgatggggaagggtcggctgattgctgccagaaatggagagctcgttttaaggaaatgcggcgtctcctgggagtgaagaggcttttgggccaccttgaggcatgacgggtgccgcttcgtttccctgcgaccgctgcctgtttcgactgagcccctcacaggaggacgtggcgggggcagacgggcgcagcctcccgccctctccgtgactcagggaaacggcctcgccgcagagcgctccctcggcagctggctgcagcactcctcccccgccgggcttcagagtgggtggtttcctacagcctagggagggggcctgaaacggggtttaaaatcttccctgccctcacacaagcccttctgactgttggagaacctgacgcgcggattctaactagaactggcactctcttcgggtgttagataattaactcaaaggacagcgaaggccttttatgatgtctttcaagctggccttatgacagcttttcttaacgtttctgcggacattttggcggacttgtgtcggcctagctcagtgatcagtttcgttaaagaatttgagtatccgaacattaaaggattggacctaaattctagcaggaggatttttagccacatcaaataatttacgtctcaaaaaaaaaacaaacaaaaaaaaacctgaaggttcctggaggaaagagatgaactattagccgtgtatttcggtgggaccacctcaacataggttcctgtaggttagcaatgtagaaatgtagcgcttcaaagccggagcatcctgtcttcaaagagcatgaaggtatcaacggcattcattgtcgattaataataaccttctgggtttttattttgggaatgcgttttccatgggcacctaattgtgccgcttctaacaattga

SEQ ID NO: 12512 - DNA, 270 bp, Homo sapiens
ggaagaccagaagaaaggaagagaggagttgcaaaacaaccagaaaataaggaacaaaatggcagtagtaagttcttatcaataataacactgaatgttaatgaactcagttctccaattaaatagcatagaattttctttagccaggcatggtggctcatacttgtaattccagcactttgggaggctgaggtgggaggatcactggatcacttgagcccaggagttcaagaccagcctgggcaacataacaaggctccatctctattt

SEQ ID NO: 12513 - DNA, 325 bp, Homo sapiens
cacttctggccttcctagtcagcctgatgtgggggatttaaggacttcagggaaggtggagcctctgctgtgtgcagctgcgagctcctcattttcctggcaagatagggtgtctccaaggacaggaacctttaagattccagcgcagtgggacaagaggatctcgtgtgctgccgtgtcaaatgctggagcaggggagcgcggggctgttgtggaaacccttgctatttttacctcctgtctccgcagcttctgcctcccactgaaatcccagtgagcagcagcagccccctgggcccctggcgtgccaggtagggctattttt

SEQ ID NO: 12514 - DNA, 452 bp, Homo sapiens
aggaggatatctcagtcaggaaggcgcttggtgtgaatatggattaggccctggctgctgctcaggaagtcaggactgcagtgggggtagagtggaagcaaggaccagttagcccattagcttcgacctgggatgatggagactgagagactggattccagaggagtttagagggtaaacctgacatgcctagtgcttgattggacatggatggggtgaggacaggggcgaggcaggtgtcatggcttccatctcctgcaaaggcagagatggggggctgatttagaggagaaaggtcatgtgtttagactggaactgttaaaggctggaactgttaaaggggaggttctttggagaattccaggcaggtggggatggggatggctgttgggtccagcagggtctggagctcagaggaggggtctggactggagcactgtgatggagacagg

SEQ ID NO: 12515 - DNA, 2098 bp, Homo sapiens
  misc_feature (339)..(339): n is a, c, g, or t
  misc_feature (357)..(357): n is a, c, g, or t
caaccgcgccgtctgtccctggcaagccagcggcggtttaaaggaggtggcgggaagcctgtgtgtgcttcaaatcgtcaccctcatggtcgctccggtttttcacgactgaaaataacatagcaaaataagccaagatgtctgtggatccaatgacctacgaggcccagttctttggcttcacgccacaaacgtgcatgcttcggatctacattgcatttcaagactacctatttgaagtgatgcaggccgttgaacaggttattctgaagaagctggatggcatcccagactgtgacattagcccagtgcagattcgcaaatgcacagagaagtttntttgcttcatgaaagganattttgataacctttttagcaaaatggagcaactgtttttgcagctgattttacgtattccctcaaacatcttgcttcctgaagataaatgtaaggagacaccttatagtgaggaagattttcagcatctccagaaagaaattgaacagttacaggagaagtacaagactgaattatgtactaagcaggcccttcttgcagaattagaagagcaaaaaattgttcaggccaaactcaaacagacgttgactttctttgatgagcttcataatgttggcagagatcatgggactagtgattttagggagagtttagtatccctggttcagaactccagaaaactacagaacattagagacaatgtggaaaaggaatcgaaacgactgaaaatatcttaattgctcagtagtcaaaaggaggagcctgtcaaaaagtagaatcataaggactgttcaaaccataaggactgttcaaatcataccagtgactgttcaaaccaaccatactttttattagatttgctttgtcaactctttcttgtattctgtgttttcctcttttttggtccactttgctgaggtatgaagtgtactactttgaactaggctgaagcatctgagtcttctaataagtgggaagggatccaacaaagaagccatgaccagttaaagatatttgcagagttacaccttggtcataagtcctttgtgaccttgattattttggcttactctttggatgagaccagacaagaaaaggattaaacgggtggctcctttaatattattattattgtttttgagacaaggtccctttctgtcacccaggttagagtagatttcagtggcacaatcttggctcactgcaacctctgtgtcctgggctcaagtgatcctcctgcctcagcctcccaagtagctaggaccacaggtgcgtgtcaccatgcttggctaatttttttgcagaaacgaggcctcactatattgtccaggctgagtggctcttttattaaccagtcattacactgcggaacagccaacatagagtacttgctctcgccctgtgaattttctttcatgagggagtcaatatgtagtggaaagaagcatgtagcaaaaaagacaaccttgatctttaataaaaaagaagttggtttatttccaaaataaatcccctgacaaaaaacctggtgatgttaagcaattgactgtcttagagtccagcagaagaccttagacaaaaaaagcagaacccactggagtagaaaaggaagcatgtagcatatactcagtagtgaaatttaattttactgactgttaggtatctatgccaatttgttttcatacttcagttggttttggaatctgccttatacctaatatttaattatttattcacactcataagcatcaaatatttaatgccctcagtgggaaatttgtgtttaaactcaatggaatctaatatttctttatgtcgttagtccctgtaaaatgttaggtcacccaaggaaaggggagaaatagcaatggttgttcctaaggtattgcttgccctccatgtcttcctaaagagcagaacttggagtttctcctttatgtagagaagaagtaacttagggtgtatttgcaatgaaatattcatagatattgaaagcttgtgtttacatgaaatatgtttattatcaagaattcctttttccaattctgtacattaaatatatgtgttttaaagggtttgg

SEQ ID NO: 12516 - DNA, 2046 bp, Homo sapiens
gacgctcgacgggattgggcgccggcgggtgaggttatcactaggcgccgaggaggggagcgggaagcgcagtgccagcgccacagcccttcaatcattttggttgctatccagcttctccacatcaagtccaacttcagaaaccccaagcctgtagagaaaagttgacctgtgctgactctggtgatggtgactgtctctcactaatttctttgaagtcttcaaggataagcagagttgatccatctgagaaagggatcatgaactagacagaatgaacagccttagaggcacagactcttgaacgggacggtggtggtatgactagtgcagagtgtttagagatcactcagtttttaaagactggcctttatcgtgtctcagtgcagccgaggcagagcctttgaaggatgcgatgttgtcattcttactaatctagtccagccgctgaggtgactttcaacggcagaccgtctcctgagcgccccaggtagagtctccgggaccattatggcagtcaagtggacgggtgggcattcttctcctgtcctctgcctgaatgcaagtaaagaagggctgctggcttctggagcagagggcggagatctcacggcttggggtgaagatggaactccattaggacacacgcggttccaaggggctgatgatgttaccagtgtcttattttctccctcctgtcccaccaagctctatgcctcacatggagaaaccattagtgtactggatgtcaggtccctcaaagattccttggaccattttcatgtgaatgaagaagaaatcaattgtctttcattgaatcaaacggaaaacctgctggcttctgctgacgactctggggcaatcaaaatcctagacttggaaaacaagaaagttatcagatccttgaagagacattccaatatctgctcctcagtggcttttcggcctcagaggcctcagagcctggtgtcatgtggactggatatgcaggtgatgctgtggagtcttcaaaaagcccgaccactctggattacaaatttacaggaggatgaaacagaagaaatggaaggcccacagtcacctggtcagctcttaaaccctgccctagcccattctatctctgtggcttcgtgtggtaatatttttagttgtggtgcagaagatggtaaggttcgaatctttcgggtgatgggagttaagtgtgaacaggaactgggatttaagggccacacttcaggggtatcccaggtctgctttctcccagaatcctatttgctgcttactggagggaatgatgggaagatcacgttgtgggatgcaaacagtgaagttgagaaaaaacagaagagtcccacaaaacgtacccacaggaagaaacctaaaagaggaacttgcaccaagcagggtggaaatactaacgcttcagtaacagatgaggaagaacatggcaacattttaccgaagctaaatattgaacatggagaaaaagtgaactggctcttgggtacaaaaataaagggacaccaaaatgctgggattacaggtgtgagccaccacgcccagcctaattctctttttctaatagttgcactttatcatattttacaaatgtgtgagtctgctatggattagaaattaataagagattttgccacagatagtttgagaagcccagcactgccactcaacaaatgctggtgcattcagatggtgaaatattctgcagctattaaaggagttaaaactgcctccacttacctggaggcccatctgtgacacctttttaggttaaaaggaaaagaaaaacttgcttaggactgaatatgagcggttgcaatttgtaacaatgatgtatatatacatatacattttcatgtatttgtatgaacataaaagtattgaaggatattcatcaaactgctaaaagggttgcttcagagtaacggactcggagaaggcagattaattttctcttaatggaactctgtattgtatcacttgtaaaaataagcatgtgttatctttatgataaaaaagtaaaaacct

SEQ ID NO: 12517 - DNA, 1724 bp, Homo sapiens
gacgctcgacgggattgggcgccggcgggtgaggttatcactaggcgccgaggaggggagcgggaagcgcaggtatgaggctggcgccggtggcttcgatgctgctttccggtgacttcgatgctgttttccagtgctttttcctttttctgtgccagcgccacagcccttcaatcattttggttgctatccagcttctccacatcaagtccaacttcagaaaccccaagcctgtagagaaaagttgacctgtgctgactctggtgatggtgactgtctctcactaatttctttgaagtcttcaaggataagcagagttgatccatctgagaaagggatcatgaactagacagaatgaacagccttagaggcacagactcttgaacgggacggtggtggtatgactagtgcagagtgtttagagatcactcagtttttaaagactggcctttatcgtgtctcagtgcagccgaggcagagcctttgaaggatgcgatgttgtcattcttactaatctagtccagccgctgaggtgactttcaacggcagaccgtctcctgagcgccccaggtagagtctccgggaccattatggcagtcaagtggacgggtgggcattcttctcctgtcctctgcctgaatgcaagtaaagaagggctgctggcttctggagcagagggcggagatctcacggcttggggtgaagatggaactccattaggacacacgcggttccaaggggctgatgatgttaccagtgtcttattttctccctcctgtcccaccaagctctatgcctcacatggagaaaccattagtgtactggatgtcaggtccctcaaagattccttggaccattttcatgtgaatgaagaagaaatcaattgtctttcattgaatcaaacggaaaacctgctggcttctgctgacgactctggggcaatcaaaatcctagacttggaaaacaagaaagttatcagatccttgaagagacattccaatatctgctcctcagtggcttttcggcctcagaggcctcagagcctggtgtcatgtggactggatatgcaggtgatgctgtggagtcttcaaaaagcccgaccactctggattacaaatttacaggaggatgaaacagaagaaatggaaggcccacagtcacctggtcagctcttaaaccctgccctagcccattctatctctgtggcttcgtgtggtaatatttttagttgtggtgcagaagatggtaaggttcgaatctttcgggtgatgggagttaagtgtgaacaggaactgggatttaagggccacacttcaggggtatcccaggtctgctttctcccagaatcctatttgctgcttactggagggaatgatgggaagatcacgttgtgggatgcaaacagtgaagttgagaaaaaacagaagagtcccacaaaacgtacccacaggaagaaacctaaaagaggaacttgcaccaagcagggtggaaatactaacgcttcagtaacagatgaggaagaacatggcaacattttaccgaagctaaatattgaacatggagaaaaagtgaactggctcttgggtacaaaaataaagggacaccaaaatatattagtagctgatcaaactagttgtatatctgtataccccttaaatgaattttaaatccaataaaaacatttgaagaattgtggcaaaactgtttttcagattaaaaaaaaa

SEQ ID NO: 12518 - DNA, 1369 bp, Homo sapiens
  misc_feature (25)..(25): n is a, c, g, or t
ctgccgagagctccaccgctgaggncaacgaggccatttgtttattacatctgtctcctcccatcaagtcgatgtataaaacatgagattacagttgtttcccccacttcacagagtctccgggaccattatggcagtcaagtggacgggtgggcattcttctcctgtcctctgcctgaatgcaagtaaagaagggctgctggcttctggagcagagggcggagatctcacggcttggggtgaagatggaactccattaggacacacgcggttccaaggggctgatgatgttaccagtgtcttattttctccctcctgtcccaccaagctctatgcctcacatggagaaaccattagtgtactggatgtcaggtccctcaaagattccttggaccattttcatgtgaatgaagaagaaatcaattgtctttcattgaatcaaacggaaaacctgctggcttctgctgacgactctggggcaatcaaaatcctagacttggaaaacaagaaagttatcagatccttgaagagacattccaatatctgctcctcagtggcttttcggcctcagaggcctcagagcctggtgtcatgtggactggatatgcaggtgatgctgtggagtcttcaaaaagcccgaccactctggattacaaatttacaggaggatgaaacagaagaaatggaaggcccacagtcacctggtcagctcttaaaccctgccctagcccattctatctctgtggcttcgtgtggtaatatttttagttgtggtgcagaagatggtaaggttcgaatctttcgggtgatgggagttaagtgtgaacaggaactgggatttaagggccacacttcaggggtatcccaggtctgctttctcccagaatcctatttgctgcttactggagggaatgatgggaagatcacgttgtgggatgcaaacagtgaagttgagaaaaaacagaagagtcccacaaaacgtacccacaggaagaaacctaaaagaggaacttgcaccaagcagggtggaaatactaacgcttcagtaacagatgaggaagaacatggcaacattttaccgaagctaaatattgaacatggagaaaaagtgaactggctcttgggtacaaaaataaagggacaccaaaatatattagtagctgatcaaactagttgtatatctgtataccccttaaatgaattttaaatccaataaaaacatttgaagaattgtggcaaaaaaaaatatagaacataaaaaaaaagattaaagaaaaaagaaataacaaaaataaatatatacacgcaaatcagaggaagaggtgaaaaaaaataagacaaaagaggggggtgggccattattcgagtg

SEQ ID NO: 12519 - DNA, 1524 bp, Homo sapiens
gacgctcgacgggattgggcgccggcgggtgaggttatcactaggcgccgaggaggggagcgggaagcgcaggtatgaggctggcgccggtggcttcgatgctgctttccggtgacttcgatgctgttttccagtgctttttcctttttctgtgccagcgccacagcccttcaatcattttggttgctatccagcttctccacatcaagtccaacttcagaaaccccaagcctgtagagaaaagttgacctgtgctgactctggtgatgagtctccgggaccattatggcagtcaagtggacgggtgggcattcttctcctgtcctctgcctgaatgcaagtaaagaagggctgctggcttctggagcagagggcggagatctcacggcttggggtgaagatggaactccattaggacacacgcggttccaaggggctgatgatgttaccagtgtcttattttctccctcctgtcccaccaagctctatgcctcacatggagaaaccattagtgtactggatgtcaggtccctcaaagattccttggaccattttcatgtgaatgaagaagaaatcaattgtctttcattgaatcaaacggaaaacctgctggcttctgctgacgactctggggcaatcaaaatcctagacttggaaaacaagaaagttatcagatccttgaagagacattccaatatctgctcctcagtggcttttcggcctcagaggcctcagagcctggtgtcatgtggactggatatgcaggtgatgctgtggagtcttcaaaaagcccgaccactctggattacaaatttacaggaggatgaaacagaagaaatggaaggcccacagtcacctggtcagctcttaaaccctgccctagcccattctatctctgtggcttcgtgtggtaatatttttagttgtggtgcagaagatggtaaggttcgaatctttcgggtgatgggagttaagtgtgaacaggaactgggatttaagggccacacttcaggggtatcccaggtctgctttctcccagaatcctatttgctgcttactggagggaatgatgggaagatcacgttgtgggatgcaaacagtgaagttgagaaaaaacagaagagtcccacaaaacgtacccacaggaagaaacctaaaagaggaacttgcaccaagcagggtggaaatactaacgcttcagtaacagatgaggaagaacatggcaacattttaccgaagctaaatattgaacatggagaaaaagtgaactggctcttgggtacaaaaataaagggacaccaaaatatattagtagctgatcaaactagttgtatatctgtataccccttaaatgaattttaaatccaataaaaacatttgaagaattgtggcaaaaaaaaatatagaacataaaaaaaaagattaaagaaaaaagaaataacaaaaataaatatatacacgcaaatcagaggaagaggtgaaaaaaaataagacaaaagaggggggtgggccattattcgagtg

SEQ ID NO: 12520 - DNA, 831 bp, Homo sapiens
gacgctcgacgggattgggcgccggcgggtgaggttatcactaggcgccgaggaggggagcgggaagcgcaggtgatgctgtggagtcttcaaaaagcccgaccactctggattacaaatttacaggaggatgaaacagaagaaatggaaggcccacagtcacctggtcagctcttaaaccctgccctagcccattctatctctgtggcttcgtgtggtaatatttttagttgtggtgcagaagatggtaaggttcgaatctttcgggtgatgggagttaagtgtgaacaggaactgggatttaagggccacacttcaggggtatcccaggtctgctttctcccagaatcctatttgctgcttactggagggaatgatgggaagatcacgttgtgggatgcaaacagtgaagttgagaaaaaacagaagagtcccacaaaacgtacccacaggaagaaacctaaaagaggaacttgcaccaagcagggtggaaatactaacgcttcagtaacagatgaggaagaacatggcaacattttaccgaagctaaatattgaacatggagaaaaagtgaactggctcttgggtacaaaaataaagggacaccaaaatatattagtagctgatcaaactagttgtatatctgtataccccttaaatgaattttaaatccaataaaaacatttgaagaattgtggcaaaaaaaaatatagaacataaaaaaaaagattaaagaaaaaagaaataacaaaaataaatatatacacgcaaatcagaggaagaggtgaaaaaaaataagacaaaagaggggggtgggccattattcgagtg

SEQ ID NO: 12521 - DNA, 252 bp, Homo sapiens
gcgccggtggcttcgatgctgctttccggtgacttcgatgctgttttccagtgctttttcctttttctggtctggtggctccgcgtctgctctcctgggctccctttcctgtgacgtttccctgtgtccgttaggtccttgcttcagactccagctcaacgcatgaaacttttctctccttgcttgccgggtcctggctccccaacctttttgtgtagcttgggcagcggaggccgtctttacctggtcagg

SEQ ID NO: 12522 - DNA, 2126 bp, Homo sapiens
gacgctcgacgggattgggcgccggcgggtgaggttatcactaggcgccgaggaggggagcgggaagcgcaggtatgaggctggcgccggtggcttcgatgctgctttccggtgacttcgatgctgttttccagtgctttttcctttttctgtgccagcgccacagcccttcaatcattttggttgctatccagcttctccacatcaagtccaacttcagaaaccccaagcctgtagagaaaagttgacctgtgctgactctggtgatggtgactgtctctcactaatttctttgaagtcttcaaggataagcagagttgatccatctgagaaagggatcatgaactagacagaatgaacagccttagaggcacagactcttgaacgggacggtggtggtatgactagtgcagagtgtttagagatcactcagtttttaaagactggcctttatcgtgtctcagtgcagccgaggcagagcctttgaaggatgcgatgttgtcattcttactaatctagtccagccgctgaggtgactttcaacggcagaccgtctcctgagcgccccaggtagagtctccgggaccattatggcagtcaagtggacgggtgggcattcttctcctgtcctctgcctgaatgcaagtaaagaagggctgctggcttctggagcagagggcggagatctcacggcttggggtgaagatggaactccattaggacacacgcggttccaaggggctgatgatgttaccagtgtcttattttctccctcctgtcccaccaagctctatgcctcacatggagaaaccattagtgtactggatgtcaggtccctcaaagattccttggaccattttcatgtgaatgaagaagaaatcaattgtctttcattgaatcaaacggaaaacctgctggcttctgctgacgactctggggcaatcaaaatcctagacttggaaaacaagaaagttatcagatccttgaagagacattccaatatctgctcctcagtggcttttcggcctcagaggcctcagagcctggtgtcatgtggactggatatgcaggtgatgctgtggagtcttcaaaaagcccgaccactctggattacaaatttacaggaggatgaaacagaagaaatggaaggcccacagtcacctggtcagctcttaaaccctgccctagcccattctatctctgtggcttcgtgtggtaatatttttagttgtggtgcagaagatggtaaggttcgaatctttcgggtgatgggagttaagtgtgaacaggaactgggatttaagggccacacttcaggggtatcccaggtctgctttctcccagaatcctatttgctgcttactggagggaatgatgggaagatcacgttgtgggatgcaaacagtgaagttgagaaaaaacagaagagtcccacaaaacgtacccacaggaagaaacctaaaagaggaacttgcaccaagcagggtggaaatactaacgcttcagtaacagatgaggaagaacatggcaacattttaccgaagctaaatattgaacatggagaaaaagtgaactggctcttgggtacaaaaataaagggacaccaaaatgctgggattacaggtgtgagccaccacgcccagcctaattctctttttctaatagttgcactttatcatattttacaaatgtgtgagtctgctatggattagaaattaataagagattttgccacagatagtttgagaagcccagcactgccactcaacaaatgctggtgcattcagatggtgaaatattctgcagctattaaaggagttaaaactgcctccacttacctggaggcccatctgtgacacctttttaggttaaaaggaaaagaaaaacttgcttaggactgaatatgagcggttgcaatttgtaacaatgatgtatatatacatatacattttcatgtatttgtatgaacataaaagtattgaaggatattcatcaaactgctaaaagggttgcttcagagtaacggactcggagaaggcagattaattttctcttaatggaactctgtattgtatcacttgtaaaaataagcatgtgttatctttatgataaaaaagtaaaaacct

SEQ ID NO: 12523 - DNA, 1829 bp, Homo sapiens
gacgctcgacgggattgggcgccggcgggtgaggttatcactaggcgccgaggaggggagcgggaagcgcaggtatgaggctggcgccggtggcttcgatgctgctttccggtgacttcgatgctgttttccagtgctttttcctttttctgtgccagcgccacagcccttcaatcattttggttgctatccagcttctccacatcaagtccaacttcagaaaccccaagcctgtagagaaaagttgacctgtgctgactctggtgatggtgactgtctctcactaatttctttgaagtcttcaaggataagcagagttgatccatctgagaaagggatcatgaactagacagaatgaacagccttagaggcacagactcttgaacgggacggtggtggtatgactagtgcagagtgtttagagatcactcagtttttaaagactggcctttatcgtgtctcagtgcagccgaggcagagcctttgaaggatgcgatgttgtcattcttactaatctagtccagccgctgaggtgactttcaacggcagaccgtctcctgagcgccccaggtagagtctccgggaccattatggcagtcaagtggacgggtgggcattcttctcctgtcctctgcctgaatgcaagtaaagaagggctgctggcttctggagcagagggcggagatctcacggcttggggtgaagatggaactccattaggacacacgcggttccaaggggctgatgatgttaccagtgtcttattttctccctcctgtcccaccaagctctatgcctcacatggagaaaccattagtgtactggatgtcaggtccctcaaagattccttggaccattttcatgtgaatgaagaagaaatcaattgtctttcattgaatcaaacggaaaacctgctggcttctgctgacgactctggggcaatcaaaatcctagacttggaaaacaagaaagttatcagatccttgaagagacattccaatatctgctcctcagtggcttttcggcctcagaggcctcagagcctggtgtcatgtggactggatatgcaggtgatgctgtggagtcttcaaaaagcccgaccactctggattacaaatttacaggaggatgaaacagaagaaatggaaggcccacagtcacctggtcagctcttaaaccctgccctagcccattctatctctgtggcttcgtgtggtaatatttttagttgtggtgcagaagatggtaaggttcgaatctttcgggtgatgggagttaagtgtgaacaggaactgggatttaagggccacacttcaggggtatcccaggtctgctttctcccagaatcctatttgctgcttactggagggaatgatgggaagatcacgttgtgggatgcaaacagtgaagttgagaaaaaacagaagagtcccacaaaacgtacccacaggaagaaacctaaaagaggaacttgcaccaagcagggtggaaatactaacgcttcagtaacagatgaggaagaacatggcaacattttaccgaagctaaatattgaacatggagaaaaagtgaactggctcttgggtacaaaaataaagggacaccaaaatatattagtagctgatcaaactagttgtatatctgtataccccttaaatgaattttaaatccaataaaaacatttgaagaattgtggcaaaaaaaaatatagaacataaaaaaaaagattaaagaaaaaagaaataacaaaaataaatatatacacgcaaatcagaggaagaggtgaaaaaaaataagacaaaagaggggggtgggccattattcgagtg

SEQ ID NO: 12524 - DNA, 1725 bp, Homo sapiens
  misc_feature (1693)..(1693): n is a, c, g, or t
gacgctcgacgggattgggcgccggcgggtgaggttatcactaggcgccgaggaggggagcgggaagcgcaggtatgaggctggcgccggtggcttcgatgctgctttccggtgacttcgatgctgttttccagtgctttttcctttttctgtgccagcgccacagcccttcaatcattttggttgctatccagcttctccacatcaagtccaacttcagaaaccccaagcctgtagagaaaagttgacctgtgctgactctggtgatggtgactgtctctcactaatttctttgaagtcttcaaggataagcagagttgatccatctgagaaagggatcatgaactagacagaatgaacagccttagaggcacagactcttgaacgggacggtggtggtatgactagtgcagagtgtttagagatcactcagtttttaaagactggcctttatcgtgtctcagtgcagccgaggcagagcctttgaaggatgcgatgttgtcattcttactaatctagtccagccgctgaggtgactttcaacggcagaccgtctcctgagcgccccaggtagagtctccgggaccattatggcagtcaagtggacgggtgggcattcttctcctgtcctctgcctgaatgcaagtaaagaagggctgctggcttctggagcagagggcggagatctcacggcttggggtgaagatggaactccattaggacacacgcggttccaaggggctgatgatgttaccagtgtcttattttctccctcctgtcccaccaagctctatgcctcacatggagaaaccattagtgtactggatgtcaggtccctcaaagattccttggaccattttcatgtgaatgaagaagaaatcaattgtctttcattgaatcaaacggaaaacctgctggcttctgctgacgactctggggcaatcaaaatcctagacttggaaaacaagaaagttatcagatccttgaagagacattccaatatctgctcctcagtggcttttcggcctcagaggcctcagagcctggtgtcatgtggactggatatgcaggtgatgctgtggagtcttcaaaaagcccgaccactctggattacaaatttacaggaggatgaaacagaagaaatggaaggcccacagtcacctggtcagctcttaaaccctgccctagcccattctatctctgtggcttcgtgtggtaatatttttagttgtggtgcagaagatggtaaggttcgaatctttcgggtgatgggagttaagtgtgaacaggaactgggatttaagggccacacttcaggggtatcccaggtctgctttctcccagaatcctatttgctgcttactggagggaatgatgggaagatcacgttgtgggatgcaaacagtgaagttgagaaaaaacagaagagtcccacaaaacgtacccacaggaagaaacctaaaagaggaacttgcaccaagcagggtggaaatactaacgcttcagtaacagatgaggaagaacatggcaacattttaccgaagctaaatattgaacatggagaaaaagtgaactggctcttgggtacaaaaataaagggacaccaaaatatattagtagctgatcaaactagttgtatatctgtataccccttaaatgaattttaaatccaataaaaacgtaccggcaggtntttttttcctgtatctattaaccgaaacctga

SEQ ID NO: 12525 - DNA, 1260 bp, Homo sapiens
gacgctcgacgggattgggcgccggcgggtgaggttatcactaggcgccgaggaggggagcgggaagcgcaggtatgaggctggcgccggtggcttcgatgctgctttccggtgacttcgatgctgttttccagtgctttttcctttttctgtgccagcgccacagcccttcaatcattttggttgctatccagcttctccacatcaagtccaacttcagaaaccccaagcctgtagagaaaagttgacctgtgctgactctggtgatggtgactgtctctcactaatttctttgaagtcttcaaggataagcagagttgatccatctgagaaagggatcatgaactagacagaatgaacagccttagaggcacagactcttgaacgggacggtggtggtatgactagtgcagagtgtttagagatcactcagtttttaaagactggcctttatcgtgtctcagtgcagccgaggcagagcctttgaaggatgcgatgttgtcattcttactaatctagtccagccgctgaggtgactttcaacggcagaccgtctcctgagcgccccaggtagagtctccgggaccattatggcagtcaagtggacgggtgggcattcttctcctgtcctctgcctgaatgcaagtaaagaagggctgctggcttctggagcagagggcggagatctcacggcttggggtgaagatggaactccattaggacacacgcggttccaaggggctgatgatgttaccagtgtcttattttctccctcctgtcccaccaagctctatgcctcacatggagaaaccattagtgtactggatgtcaggtccctcaaagattccttggaccattttcatgtgaatgaagaagaaatcaattgtctttcattgaatcaaacggaaaacctgctggcttctgctgacgactctggggcaatcaaaatcctagacttggaaaacaagaaagttatcagatccttgaagagacattccaatatctgctcctcagtggcttttcggcctcagaggcctcagagcctggtgtcatgtggactggatatgcaggtgatgcttttgcacagagtacttggggaatttctaagtgggatttgctaacaggatcaaattattgatcacacgaaatatctttgctttttctgttttctactaacatatccatttatgaacaataagccttatttctacatttaatgctagtctgataaaacctaatagaatttattcacaaagtaat

SEQ ID NO: 12526 - DNA, 610 bp, Homo sapiens
agagccctttctttggagcattatttgtgatggtttagattctctgtctcttcctaagtgtctctaggcattgagtgtatatttattgttccctttacctaaaatgtccttttctctcctgtcttctgtctggtgattgcccactccttttaggcctggcttaaatatcacctttccttggtaactctccttaacacttcttaacttcctcttacaccaatttaactgcttcctcatctgtgtttccatagtgcttaatacattcttgtatgcataaaaaatcacattgcaatttgtggtttgtttgtttgtttaagccaaggtcttgttctgttgcccaggctggaatgcaatggtgtgaacacagctcagtgcagccttgacctactatgctcaagtgatcctcctgcctcagccccccaagtagcaggaactacagatgtgtgtctccaagcctaatttaaaaattttttttgtagatatgaggtctcactcatatgctgcccagtctagtctcaaactcctgagctcaagctgtcctcccaccttggcctcccaaagtgctaggattataggtgtgagccaccacacccagctcacattgcatttt

SEQ ID NO: 12527 - DNA, 473 bp, Homo sapiens
atcctgcggctttttatcgtcatggtatactgtgtgttttgccggcaaaacaaaatacattaattaagtactaatcgattttatttaaaaaaatgaattaacagcatacaatcaattgcccacttagaaatgcagatcaacagaacataaggtaaccagtggaactacactgagttatatatattccagcccaaagcaaataaacttaaatatttctttaatcttgcctgtgttgcctgggacagcctgattacagggcagaatttgaattatgccaggccttatgaaatgttcagcagggctatagattcctatttctcatttactggatctcaggtgcctgtaatcccagctactctggagactgaggcatgaggatcactttaacctgggaggcggaggttgcagggagccaagattgcgccactgtgctccagcctgggggatagagtgagactcccttcaaaaaaaaa

SEQ ID NO: 12528 - DNA, 371 bp, Homo sapiens
aaaacatcaccactggcctatgcaaggcccgcctgattatacatttatgtgtatgtgtgaatatgtaatatgtacataaagatatatacattcaaatacattcctgtaagcagtatttctgttgtctgtttacatacattttaggattgcatagtttattgtgctctaatgctttctcattctattgtacttttgctcagcatttttttaaaaacttgtctctgttaataggtgcaccttttctctatcttttagtttctcagtattgttctccagagattgactttgagattgcatccagggccttgtcatcacaggataacaccagaatgaatatccttgcatactttcccttgtgtgagaatatcttt

SEQ ID NO: 12529 - DNA, 369 bp, Homo sapiens
actcctcttcattttctattcttgcctggagttagactgtatttctcatgccctaactagacttgttccctggttgtcagtacttttcctgacacatcccacccctgtttggcccctcattttctttagtttactattatttctcctcttcattattctcctaccttatttgatcttcctagtcccagtaagcagagcaactagagggcccaacagagtaccctcatgttttggaagtgtggatagtgactgacggtgaacctacaggccacctgctcatggcacctgctttgtaattcaaaggtgaagtctgtgctttgatacacaaaagtgctgccttggttttatcactaactcccctttaacttc

SEQ ID NO: 12530 - DNA, 333 bp, Homo sapiens
ataatttgagtgtatatggattcctgagttttaaggacctgtctcctttataggctatagcgccttgagagcccagccatctcattccacccaaaactcacagagccctgcttattcactggcagttaactggcactaacagatatcagtaaaattaaaaagtgttggctttattgaagcaaaataacacaagtattttagtgagtagaagaatatatgcatatatattcacacacacatctgtagacatacacttagaggatatagaatttgtgtatacatttctttgcctgtttcccctgatatccatttaaaaagaaatagaaaaactat

SEQ ID NO: 12531 - DNA, 463 bp, Homo sapiens
taagtgtggatgggaagcagttggagggttttgaggaggggtggtgtgatctgacccgcattttagaatcatcccgttggctgaagtgtggaggaaaaaagcagggggcagaagtagaggtgaggggcagccagttaggaggctacaggagtagcccagaccagacaggagggtggctcggccctcagagatcttggtggggcagattagagagtgatcaagttagagctaacaggacttttttttttagactgggtctcgcttgttgcccaggctgtagtgcactggtgcaatcatggctcactgcagccttgacctcctggatcaaggtatcctcccacctctcagctgctcgggaggctggggctggagaattgcttgaacccgggaggcagaagtagcagtgagccgagattgcaccgctgcactccagcctgggcaacagagtgagactccatctcaa

SEQ ID NO: 12532 - DNA, 314 bp, Homo sapiens
gcctgcctcctacacaggtggaaacttgtccttgtgtcctcttctccagcccaaaacttgatccttacatgacagggccaggagacctggatgcagggctcaaagctgcccagactgccgggcgaggtggctcacgcctgtaatcccagtactttgggaggccaagctgggaggatcacaagatcaagaccatcctggccaacatggtgaaaccccatctctactaaaaatacaaaaaattagctgagcgtggtggcacgggcctgtagtcccagcaactcgggaggctgaggcaggagaatcacttgaacccg

SEQ ID NO: 12533 - DNA, 952 bp, Homo sapiens
ttgcagtaattcccaccgtggaggtttgtggaaagaccgctttccatggagagtaaaggccggctggaaagtccccaagcgtcactgctacaacatggtgacctcctggagaacagggacgtgtggtgtttctctttgtatttgtcttttgttcccagaacagggattgtcaatgaggtagatcagattcccattcgacgggcaaccagtcaatgaaacagacacacctgcacagttggaaatggaggatgaagatacaattgatgtgttccaacagcagacgggaggtgtctactgaaaagggaacctgcttctttactccagaactctgttctttaaagaccaagattacattctcaattagaaaactgcaatttggttccaccacatcctgactactaccgtatagttttctctgttctttcatttcccccttccccattcctttattgtacgtaaagtaactggtatatgtgcacaagcatattgcattttttttttttaactaaacagccaatggtatgttttgactgacatcaaggggagacgggatggggaaaaatactgattctgtgaaaataccccctttctccattagtggcatgctcattcagctcctatctttatattccagtaagttattttgctctcactgttttaacaacaacaacaaaacaacaacaacaacataaaaatccttgcataccttgttcaattggagaattttaatgtttttcatttatcattgtaaaaccaaggacaattttataacttttttgtacgtagctgttacatgtagggtaatctgtctttaagtaaggataaattactctaaaacaaaaaagaatcctacatagttttcccttcaagtcaagcgtcttgttgtttaaataaaccccgatgcggccggggacaatttatttaaacgatcctcccacccgcccccacctcg

SEQ ID NO: 12534 - DNA, 400 bp, Homo sapiens
gaatgggctatttctgttgttctgttcatttttgacaggattcagtctccagggagttgaaaaacttgatatcaaagtattatattttacatttttattgtgttttgatcaataccaataatttagaatagttggaagtgttttaagcactgtagtgtatatactattcctaaatccataaattgatgagtgctctgttaattggttgctttcaaaataatggttaaaatatagaaagaatattaaaatccttgaggtctgtacttttttaaactatttaatagcaccaatatctccattatgtggaggtgaagaaggcaagatgtgagccaccatttatagctccttcaagaactggcccacaataattagctttaaaagtagggccaggtgaggtagc

SEQ ID NO: 12535 - DNA, 347 bp, Homo sapiens
gcttgcagctggtactcttgattgcatttcatgctttggcacaaatgcacagaagtacaacacaaaaagggaatggagttctatgttcctgatctcttcacattagacttcatctcaccaaaatggcataaaaggtgtggctacaacatttgcatacaaatttcatgcaaaagaggtaataacattagtagaggaaaagaagatctgccattaacaggtcacttttggatgaatttgtacatgactttaagtgatgatcctcaactcatttaagattaaagagccaagcatattgcagtggacatacagaaaagtcatgataatcattgaggatttactaagactct

SEQ ID NO: 12536 - DNA, 423 bp, Homo sapiens
aggagtaggaggcccacccagtcccaccacacataccgggacatctttgaccacatgggtcctctgccgttcgtattttagcttagatgttcttaactgaactaacttccaattttcatatacactgatcatcttgtccctagcattttccctccaagatcctgctaacaggcaaactagccctttcaaacagttggtacctgagatttctcagagctctcttatcaagagtaaggagtgagattgcagaaggggcagtaatgtcaataccaagttattggaaactacttaaccagccactgcattacatactggagcccgtctaggacacttgcccttggaaatggtggaaagactttgttttatttctatttcatcaacagaacttttgtagcattgaatctaagcaaaggataacatcat

SEQ ID NO: 12537 - DNA, 298 bp, Homo sapiens
gcaattttatgcccaggttagactagggatttggctgatgttctggaatctcattgtactgttaagtaatgagcatgctcaatgacacaccctgtcaggggttgtgagaaagctgcagtgttcagtttcccacccgtttccttttcctgctgtctctctctgactcattcctgcttcttactttcccttttccttctttgtccaaacattacatttctaggcaaagataaaagaggaaatagtgatgtcctgaaagggattcagaacaaagtagcatggcctttggtgaaagcttcac

SEQ ID NO: 12538 - DNA, 801 bp, Homo sapiens
cttcaaaaatttttggctagattagatcctttgcctttccatatgaattttagaatctgcttgtcaacttctgtaaaaaatcctgcaagtatttttgattaggattcattgaatctatacgttaatttgggaagaattatcatcttaaaaatattgagtcttccaacacacatatgtataatttcatcttcttaggtcttctttagttttttttcaccaatgtcttactgttttcagtgtgcaagtcttatacattcttggctaaatttatctttaagtatatcattgtttttgatgtggttataaatgatattggtttttaaatttcaatttccagttgtttgttcctaatatatgaatatgcaatcaattttgtatactgattgggtattcttcaaccttgctaaactccctacttcagttctagtagtttttcgtagattctttaagattttctacatagatgatcatatcttctgagaatatagacagttttacttctttcttttcaacttatattctgttacctttatttatttcactggctagaacttccagtaatacgttgaataaaggtagataaagcagatatttgtgctttagtcctaatcttaggaaaaaaggcattaggtcatttacatgtatgatgtaaatgttatgatgtaaaatgtattttaactgtgatgttaactgtgaattatcttagatgctatatcaggttgaaaattcccttctattctttgttgttgagagatttttataataaatagatattgaattttgtcaaatacttggtataca

SEQ ID NO: 12539 - DNA, 3764 bp, Homo sapiens
ggcctcaacatataattagaataaactgtcttcttgttctactcagggcctttaggtgtgttcattcacggtatggaaatacagtaaatgaaagattccaactagttgtcagtgcttcttgaaattccaaacagaaagatacattggtcaaatccaacacttggcttatcaatattaagtcttttacctaaaggcccagccgtcaccagacaacagaataatcaatctgcctgaaaatccctcctccttgtcctacactttttgcctgtttgggagaatatctttgtactccattctcctccctcagccagttactgggtcacccatccatgtgttcatgaatcaatcatcacggcctgcagagcacctgtcctaaggagggaaaatcctgtcacactgcctctccccattcgtgtgtggttttcttgatcggtgagatctgtctctgaagtcactgccagcctccctgggaacgtctatagtgcctcccctgccttatgtgatgggagttaacaactcagataagtacacctgagagcatttctatcaggtaaactgtcacttaaatggaggtgtccacatcttaattgtttctccttgacacatttctcaatccacgaagccaggagaggtagagtgaaaatcccagccatggatgaatgtactaatttgaaagccaagtgttaagtcggatgttttcccgttacactactactcagccctctcctgcggccacatcaacggatgcaagtcacagtcttaacacagcctgtgggagacaagcagtttgtgtgctcacagtatatattatagtaattagggtgacttagagcaaatactcttcagatcctatgtagtcagtgaaacaaaatggagagcgtattctgatagaaggacgtcgacggtgaatgttctggtggttgttgcctgttaagtaaactttagtgtgtaagttgagtttgtcattaaaatcataaaccagctgcggtaacagacaagcctttggctggggagttttaagcctcggtaactgctataaaactagccatccagttaggatagaatgtgtttctttctggttaaaaaaaggaaaaaccatctaagaaaatatatatgtatgtatgtgtgtatacagtggaattcaaaggaccaaagcaaaatttgaacaggaatctattaatttagaattttataagatatttattaataaatgttatttttaaacattccatttgaacagtattctgtaggatctacttgtttttaaagtgttagtccataataaactactatagttatgtgtattttcatttttcagggtttcaaatggctattctccatcatttggtggaaatgtttgcttagatctctgtgcatagacatttcaaggatttttattgctctgtgagttattttttaatcaacattctgaacagttttttttaaacatttatttctgtgtgttcatttttaaagtaagctctttcatttaggaagcagagttcagctaaagggaatcagtaactctaactggaacagctttcttgtagaagtgtaaaaacagcttcatctctgcctctctccaccccaccccaatttcctagaaagccttgcactattcagctcccttagtgctttttgtcccttcccgaacaatatgcagtagctttaagccattcaagctccattatgcagtatatctgagaagggaaaggaaacaacccatttaaatttgaataaaaccgtgcctatgcgaacagtagcaatttagaatctcttttctgcttttaaaataatttatatttaaaaattgcactttagctttttgatccctttgtatttctcttattctctttctaacctcttctctgtcctcaaacttgcctttgctctcctttacaataccccccacccctcctccaaggctctgagcggcatcatttaaaaattactttacagatatttgcaccaggtacatttatgtgcgtccattggtagcacagctgagacctgtgtctcacatcagcctaggtgaagcctactacaagaatgccaaggagaagagccagtacactatatggtttatactctttatccctttattcatagcatgttttttaaaaatgttatattatgcaacagatgtgaggcagcagctaagctatacttaagaattttctctcaccttccaaaccaaagtgtcctgaataagccaggagacttattcttttgtgcaccctggtgcacatctgactgttgtcctagccatagactctctgaggccactgaaagaacagtggccctatcgatttcattcctaggtctcaaaaatacaatgttgccttgtaacataattagggacagcacctctatttcacaattataatctaaggtaggataagacgacacagcagcaataaacttacaagtaaaattcaataccaaaacaaacacaaagaaatttaaaaaacaaaaaacctagctcatcatgttgtgaaaatgaaaaagtgaatgtccattcaaaatattttactatttcttgtgggagttttttcagtgatgtaatgcttgtagccaaattgcttaaagagtgtttatatatttttttccttataaattgtctattttttaaaaaagctatttaaccacagctgaagtggggggtaaggccaaattgccaacacttgttaaaagattaatactcttaagtggcactctgatacctttccaacttgtcatcagaaaggaatcaataattaccaactgttgtatttagaccaacttacaatatctagctcattagaagccaggatctagaaagctccttctaagccatttaagatattcttacattgagcttcatattatagaactttataggattggatattttacaatagaataatttagcctcaggactgagaatgtggaagctgaataaattagctttaaatacatcattaaaatcttatgcacaataagctcattagattctagttttctcctttagaataccaatgccacagacactacaggagataatgaaaggtatcagttgtgttgagtggagggagtttaagagaaaggacccttcccaaccagcagccagtagaaaatacaacctactcacctttttcccttctaagttctgctaaatcacatctgcctcatagagaaaggaatgttgcctttgagaactgtcttggagaacagataagcttgaaatgttctctctagagaggacatagggtttgggatcctctgaaaaggcccagaaaaatagctcagttcaaatacaatgttctaggacaattggaatataaatattgtccaaaaatataattaaaagaaaaaagtttagcactgtgtaaagtaagtgttaactgaggaagtcccaaaaaggtgctgtcactttaagttctggacttggggttctttgtatttgtaaacagcaaagcatttgtgtttgtttgtctatttgtaaagcaaccaccttccttattggaaggagaaaaaaaggggtacatacatgtaaatacttgctgcagcatttaatatgtttaattttgtgttaagctttttgttgcatcgtgaacacatttattgttaccaatggacaatgagttcattaagactgttcaactaggtcagatttttacatctctttctagcaagaagagacaagattttgtgcatttgtacaaatgttaatatcactgcaattccaatataataaagcactcaaatgcaaataaaaaaaatca

SEQ ID NO: 12540 - DNA, 3710 bp, Homo sapiens
ggcctcaacatataattagaataaactgtcttcttgttctactcagggcctttaggtgtgttcattcacggtatggaaatacagtaaatgaaagattccaactagttgtcagtgcttcttgaaattccaaacagaaagatacattggtcaaatccaacacttggcttatcaatattaagtcttttacctaaaggcccagccgtcaccagacaacagaataatcaatctgcctgaaaatccctcctccttgtcctacactttttgcctgtttgggagaatatctttgtactccattctcctccctcagccagttactgggtcacccatccatgtgttcatgaatcaatcatcacggcctgcagagcacctgtcctaaggagggaaaatcctgtcacactgcctctccccattcgtgtgtggttttcttgatcggtgagatctgtctctgaagtcactgccagcctccctgggaacgtctatagtgcctcccctgccttatgtgatgggagttaacaactcagataagtacacctgagagcatttctatcaggtaaactgtcacttaaatggaggtgtccacatcttaattgtttctccttgacacatttctcaatccacgaagccaggagaggtagagtgaaaatcccagccatggatgaatgtactaatttgaaagccaagtgttaagtcggatgttttcccgttacactactactcagccctctcctgcggccacatcaacggatgcaagtcacagtcttaacacagcctgtgggagacaagcagtttgtgtgctcacagtatatattatagtaattagggtgacttagagcaaatactcttcagatcctatgtagtcagtgaaacaaaatggagagcgtattctgatagaaggacgtcgacggtgaatgttctggtggttgttgcctgttaagtaaactttagtgtgtaagttgagtttgtcattaaaatcataaaccagctgcggtaacagacaagcctttggctggggagttttaagcctcggtaactgctataaaactagccatccagttaggatagaatgtgtttctttctggttaaaaaaaggaaaaaccatctaagaaaatatatatgtatgtatgtgtgtatacagtggaattcaaaggaccaaagcaaaatttgaacaggaatctattaatttagaattttataagatatttattaataaatgttatttttaaacattccatttgaacagtattctgtaggatctacttgtttttaaagtgttagtccataataaactactatagttatgtgtattttcatttttcagggtttcaaatggctattctccatcatttggtggaaatgtttgcttagatctctgtgcatagacatttcaaggatttttattgctctgtgagttattttttaatcaacattctgaacagttttttttaaacatttatttctgtgtgttcatttttaaagtaagctctttcatttaggaagcagagttcagctaaagggaatcagtaactctaactggaacagctttcttgtagaagtgtaaaaacagcttcatctctgcctctctccaccccaccccaatttcctagaaagccttgcactattcagctcccttagtgctttttgtcccttcccgaacaatatgcagtagctttaagccattcaagctccattatgcagtatatctgagaagggaaaggaaacaacccatttaaatttgaataaaaccgtgcctatgcgaacagtagcaatttagaatctcttttctgcttttaaaataatttatatttaaaaattgcactttagctttttgatccctttgtatttctcttattctctttctaacctcttctctgtcctcaaacttgcctttgctctcctttacaataccccccacccctcctccaaggctctgagcggcatcatttaaaaattactttacagatatttgcaccaggtacatttatgtgcgtccattggtagcacagctgagacctgtgtctcacatcagcctaggtgaagcctactacaagaatgccaaggagaagagccagtacactatatggtttatactctttatccctttattcatagcatgttttttaaaaatgttatattatgcaacagatgtgaggcagcagctaagctatacttaagaattttctctcaccttccaaaccaaagtgtcctgaataagccaggagacttattcttttgtgcaccctggtgcacatctgactgttgtcctagccatagactctctgaggccactgaaagaacagtggccctatcgatttcattcctaggtctcaaaaatacaatgttgccttgtaacataattagggacagcacctctatttcacaattataatctaaggtaggataagacgacacagcagcaataaacttacaagtaaaattcaataccaaaacaaacacaaagaaatttaaaaaacaaaaaacctagctcatcatgttgtgaaaatgaaaaagtgaatgtccattcaaaatattttactatttcttgtgggagttttttcagtgatgtaatgcttgtagccaaattgcttaaagagtgtttatatatttttttccttataaattgtctattttttaaaaaagctatttaaccacagctgaagtggggggtaaggccaaattgccaacacttgttaaaagattaatactcttaagtggcactctgatacctttccaacttgtcatcagaaaggaatcaataattaccaactgttgtatttagaccaacttacaatatctagctcattagaagccaggatctagaaagctccttctaagccatttaagatattcttacattgagcttcatattatagaactttataggattggatattttacaatagaataatttagcctcaggactgagaatgtggaagctgaataaattagctttaaatacatcattaaaatcttatgcacaataagctcattagattctagttttctcctttagaataccaatgccacagacactacaggagataatgaaaggtatcagttgtgttgagtggagggagtttaagagaaaggacccttcccaaccagcagccagtagaaaatacaacctactcacctttttcccttctaagttctgctaaatcacatctgcctcatagagaaaggaatgttgcctttgagaactgtcttggagaacagataagcttgaaatgttctctctagagaggacatagggtttgggatcctctgaaaaggcccagaaaaatagctcagttcaaatacaatgttctaggacaattggaatataaatattgtccaaaaatataattaaaagaaaaaagtttagcactgtgtaaagtaagtgttaactgaggaagtcccaaaaaggtgctgtcactttaagttctggacttggggttctttgtatttgtaaacagcaaagcatttgtgtttgtttgtctatttgtaaagcaaccaccttccttattggaaggagaaagtgttaagctttttgttgcatcgtgaacacatttattgttaccaatggacaatgagttcattaagactgttcaactaggtcagatttttacatctctttctagcaagaagagacaagattttgtgcatttgtacaaatgttaatatcactgcaattccaatataataaagcactcaaatgcaaataaaaaaaatca

SEQ ID NO: 12541 - DNA, 2090 bp, Homo sapiens
aggacacacacagcctacacaggcatacacacacaccacatacacactacacaccgggacacacacacaaaaggcctatgcatgtgcacacacatacacacggacacatacatgcacacacacgggcctgcagctctgaaaggactcatgactttggtggcaagaggagctggcggagcccagccagtgggcggggccaggggaggggcgggcaggtaggtgcagccactcctgggaggaccctgcgtggccagacggtgctggtgactcgtccacactgctcgcttcggatactccaggcgtctcccgttgcggccgctccctgccttagaggccagccttggacacttgctgcccctttccagcccggattctgggatccttccctctgagccaacatctgggtcctgccttcgacaccaccccaaggcttcctaccttgcgtgcctggagtctgccccaggggcccttgtcctgggccatggcccagaagggggtcctggggcctgggcagctgggggctgtggccattctgctctatcttggattactccggtcggggacaggagcggaaggggcagaagctccctgcggtgtggccccccaagcacgcatcacaggtggcagcagtgcagtcgccggtcagtggccctggcaggtcagcatcacctatgaaggcgtccatgtgtgtggtggctctctcgtgtctgagcagtgggtgctgtcagctgctcactgcttccccagcgagcaccacaaggaagcctatgaggtcaagctgggggcccaccagctagactcctactccgaggacgccaaggtcagcaccctgaaggacatcatcccccaccccagctacctccaggagggctcccaagggcgacattgcactcctccaactcagcagacccatcaccttctcccgctacatccggcccatctgcctccctgcagccaacgcctccttccccaacggcctccactgcactgtcactggctggggtcatgtggccccctcagtgagcctcctgacgcccaagccactgcagcaactcgaggtgcctctgatcagtcgtgagacgtgtaactgcctgtacaacatcgacgccaagcctgaggagccgcactttgtccaagaggacatggtgtgtgctggctatgtggaggggggcaaggacgcctgccagggtgactctgggggcccactctcctgccctgtggagggtctctggtacctgacgggcattgtgagctggggagatgcctgtggggcccgcaacaggcctggtgtgtacactctggcctccagctatgcctcctggatccaaagcaaggtgacagaactccagcctcgtgtggtgccccaaacccaggagtcccagcccgacagcaacctctgtggcagccacctggccttcagctctgccccagcccagggcttgctgaggcccatccttttcctgcctctgggcctggctctgggcctcctctccccatggctcagcgagcactgagctggccctacttccaggatggatgcatcacactcaaggacaggagcctggtccttccctgatggcctttggacccagggcctgacttgagccactccttccttcaggactctgcgggaggctggggccccatcttgatctttgagcccattcttctgggtgtgctttttgggaccatcactgagagtcaggagttttactgcctgtagcaatggccagagcctctggcccctcacccaccatggaccagcccattggccgagctcctggggagctcctgggacccttggctatgaaaatgagccctggctcccacctgtttctggaagactgctcccggcccgcctgcccagactgatgagcacatctctctgccctctccctgtgttctgggctggggccacctttgtgcagcttcgaggacaggaaaggccccaatcttgcccactggccgctgagcgcccccgagccctgactcctggactccggaggactgagcccccaccggaactgggctggcgcttggatctggggtgggagtaacagggcagaaatgattaaaatgtttgagcacaa

SEQ ID NO: 12542 - DNA, 834 bp, Homo sapiens
  misc_feature (753)..(753): n is a, c, g, or t
  misc_feature (830)..(831): n is a, c, g, or t
gtctgcagccgcggcagtttttagagcacatgccggtcctactgtcacacgggttctgactgacctcgtccacactgctcgcttcggatactccaggcgtctcccgttgcggccgctccctgccttagaggccagccttggacacttgctgcccctttccagcccggattctgggatccttccctctgagccaacatctgggtcctgccttcgacaccaccccaaggcttcctaccttgcgtgcctggagtctgccccaggggcccttgtcctgggccatggcccagaagggggtcctggggcctgggcagctgggggctgtggccattctgctctatcttggattactccggtcggggacaggagcggaaggggcagaagctccctgcggtgtggccccccaagcacgcatcacaggtggcagcagtgcagtcgccggtcagtggccctggcaggtcagcatcacctatgaaggcgtccatgtgtgtggtggctctctcgtgtctgagcagtgggtgctgtcagctgctcactgcttccccagcgagcaccacaaggaagcctatgaggtcaagctgggggcccaccagctagactcctactccgaggacgccaaggtcagcaccctgaaggacatcatcccccaccccagctacctccaggagggctcccaagggcgacattgcactcctccaactcagcagacccatcaccttctcccgctacatccggcccatctgcctcccttggaanccaaacggccttcctttcccccaaacggggctttccaactggcaacttggccacttgggccttggggggtcaatggnnggg

SEQ ID NO: 12543 - DNA, 361 bp, Homo sapiens
tcaagcttctaacgatgtacggggacatggaccagcccattggccgagctcctggggagctcctgggacccttggctatgaaaatgagccctggctcccacctgtttctggaagactgctcccggcccgcctgcccagactgatgagcacatctctctgccctctccctgtgttctgggctggggccacctttgtgcagcttcgaggacaggaaaggccccaatcttgcccactggccgctgagcgcccccgagccctgactcctggactccggaggactgagcccccaccggaactgggctggcgcttggatctggggtgggagtaacagggcagaaatgattaaaatgtttgagcacaa

SEQ ID NO: 12544 - DNA, 287 bp, Homo sapiens
gtgtgaagctggagaggcctgtccgggggcactgagaactccctctggaattcttggggggtgttggggagagactgtgggcctggaaataaaacttgtctcctctaccaccaccctgtaccctagcctgcacctgtccacatctctgcaaagttcagcttccttccccaggtctctgtgcactctgtcctggactccggaggactgagcccccaccggaactgggctggcgcttggatctggggtgggagtaacagggcagaaatgattaaaatgtttgagcacaa

SEQ ID NO: 12545 - DNA, 1887 bp, Homo sapiens
gtctgcagccgcggcagtttttagagcacatgccggtcctactgtcacacgggttctgactgacctcgtccacactgctcgcttcggatactccaggcgtctcccgttgcggccgctccctgccttagaggccagccttggacacttgctgcccctttccagcccggattctgggatccttccctctgagccaacatctgggtcctgccttcgacaccaccccaaggcttcctaccttgcgtgcctggagtctgccccaggggcccttgtcctgggccatggcccagaagggggtcctggggcctgggcagctgggggctgtggccattctgctctatcttggattactccggtcggggacaggagcggaaggggcagaagctccctgcggtgtggccccccaagcacgcatcacaggtggcagcagtgcagtcgccggtcagtggccctggcaggtcagcatcacctatgaaggcgtccatgtgtgtggtggctctctcgtgtctgagcagtgggtgctgtcagctgctcactgcttccccagcgagcaccacaaggaagcctatgaggtcaagctgggggcccaccagctagactcctactccgaggacgccaaggtcagcaccctgaaggacatcatcccccaccccagctacctccaggagggctcccaagggcgacattgcactcctccaactcagcagacccatcaccttctcccgctacatccggcccatctgcctccctgcagccaacgcctccttccccaacggcctccactgcactgtcactggctggggtcatgtggccccctcagtgagcctcctgacgcccaagccactgcagcaactcgaggtgcctctgatcagtcgtgagacgtgtaactgcctgtacaacatcgacgccaagcctgaggagccgcactttgtccaagaggacatggtgtgtgctggctatgtggaggggggcaaggacgcctgccagggtgactctgggggcccactctcctgccctgtggagggtctctggtacctgacgggcattgtgagctggggagatgcctgtggggcccgcaacaggcctggtgtgtacactctggcctccagctatgcctcctggatccaaagcaaggtgacagaactccagcctcgtgtggtgccccaaacccaggagtcccagcccgacagcaacctctgtggcagccacctggccttcagctctgccccagcccagggcttgctgaggcccatccttttcctgcctctgggcctggctctgggcctcctctccccatggctcagcgagcactgagctggccctacttccaggatggatgcatcacactcaaggacaggagcctggtccttccctgatggcctttggacccagggcctgacttgagccactccttccttcaggactctgcgggaggctggggccccatcttgatctttgagcccattcttctgggtgtgctttttgggaccatcactgagagtcaggagttttactgcctgtagcaatggccagagcctctggcccctcacccaccatggaccagcccattggccgagctcctggggagctcctgggacccttggctatgaaaatgagccctggctcccacctgtttctggaagactgctcccggcccgcctgcccagactgatgagcacatctctctgccctctccctgtgttctgggctggggccacctttgtgcagcttcgaggacaggaaaggccccaatcttgcccactggccgctgagcgcccccgagccctgactcctggactccggaggactgagcccccaccggaactgggctggcgcttggatctggggtgggagtaacagggcagaaatgattaaaatgtttgagcacaa

SEQ ID NO: 12546 - DNA, 2416 bp, Homo sapiens
  misc_feature (2372)..(2372): n is a, c, g, or t
aggacacacacagcctacacaggcatacacacacaccacatacacactacacaccgggacacacacacaaaaggcctatgcatgtgcacacacatacacacggacacatacatgcacacacacgggcctgcagctctgaaaggactcatgactttggtggcaagaggagctggcggagcccagccagtgggcggggccaggggaggggcgggcaggtaggtgcagccactcctgggaggaccctgcgtggccagacggtgctggtgactcgtccacactgctcgcttcggatactccaggcgtctcccgttgcggccgctccctgccttagaggccagccttggacacttgctgcccctttccagcccggattctgggatccttccctctgagccaacatctgggtcctgccttcgacaccaccccaaggcttcctaccttgcgtgcctggagtctgccccaggggcccttgtcctgggccatggcccagaagggggtcctggggcctgggcagctgggggctgtggccattctgctctatcttggattactccggtcggggacaggagcggaaggggcagaagctccctgcggtgtggccccccaagcacgcatcacaggtggcagcagtgcagtcgccggtcagtggccctggcaggtcagcatcacctatgaaggcgtccatgtgtgtggtggctctctcgtgtctgagcagtgggtgctgtcagctgctcactgcttccccagcgagcaccacaaggaagcctatgaggtcaagctgggggcccaccagctagactcctactccgaggacgccaaggtcagcaccctgaaggacatcatcccccaccccagctacctccaggagggctcccaagggcgacattgcactcctccaactcagcagacccatcaccttctcccgctacatccggcccatctgcctccctgcagccaacgcctccttccccaacggcctccactgcactgtcactggctggggtcatgtggccccctcagtgagcctcctgacgcccaagccactgcagcaactcgaggtgcctctgatcagtcgtgagacgtgtaactgcctgtacaacatcgacgccaagcctgaggagccgcactttgtccaagaggacatggtgtgtgctggctatgtggaggggggcaaggacgcctgccagggtgactctgggggcccactctcctgccctgtggagggtctctggtacctgacgggcattgtgagctggggagatgcctgtggggcccgcaacaggcctggtgtgtacactctggcctccagctatgcctcctggatccaaagcaaggtgacagaactccagcctcgtgtggtgccccaaacccaggagtcccagcccgacagcaacctctgtggcagccacctggccttcagctctgccccagcccagggcttgctgaggcccatccttttcctgcctctgggcctggctctgggcctcctctccccatggctcagcgagcactgagctggccctacttccaggatggatgcatcacactcaaggacaggagcctggtccttccctgatggcctttggacccagggcctgacttgagccactccttccttcaggactctgcgggaggctggggccccatcttgatctttgagcccattcttctgggtgtgctttttgggaccatcactgagagtcaggagttttactgcctgtagcaatggccagagcctctggcccctcacccaccatggaccagcccattggccgagctcctggggagctcctgggacccttggctatgaaaatgagccctggctcccacctgtttctggaagactgctcccggcccgcctgcccagactgatgagcacatctctctgccctctccctgtgttctgggctggggccacctttgtgcagcttcgaggacaggaaaggccccaatcttgcccactggccgctgagcgcccccgagccctgactcctggactccggaggactgagcccccaccggaactgggctggcgcttggatctggggtgggagtaacagggcagaaatgattaaaatgtttgagcacaaaaaaaaaaaaaaaaaaaaaaaacaaaaaaaacaaaaaaaaaaaaaaaaaaaaaaaactcagcagcgagatttttgttgtggtgcggggcgggaaaaaaggagtaaaaataaagagcggcggcagggtggtaaatataggttgtgtttcgtgcgaacccaccgtgtttttttgtcagacagggggagtaaaacacggcgggggccccccatatgaggggggggggcataaaactgcagataagcgagggttttacccttttatattatgtcgtgtacataacnagttgatgaaatggaagggacgaagtagaagaatacaggatgga

SEQ ID NO: 12547 - DNA, 1996 bp, Homo sapiens
aggacacacacagcctacacaggcatacacacacaccacatacacactacacaccgggacacacacacaaaaggcctatgcatgtgcacacacatacacacggacacatacatgcacacacacgggcctgcagctctgaaaggactcatgactttggtggcaagaggagctggcggagcccagccagtgggcggggccaggggaggggcgggcaggtaggtgcagccactcctgggaggaccctgcgtggccagacggtgctggtgactcgtccacactgctcgcttcggatactccaggcgtctcccgttgcggccgctccctgccttagaggccagccttggacacttgctgcccctttccagcccggattctgggatccttccctctgagccaacatctgggtcctgccttcgacaccaccccaaggcttcctaccttgcgtgcctggagtctgccccaggggcccttgtcctgggccatggcccagaagggggtcctggggcctgggcagctgggggctgtggccattctgctctatcttggattactccggtcggggacaggagcggaaggggcagaagctccctgcggtgtggccccccaagcacgcatcacaggtggcagcagtgcagtcgccggtcagtggccctggcaggtcagcatcacctatgaaggcgtccatgtgtgtggtggctctctcgtgtctgagcagtgggtgctgtcagctgctcactgcttccccagcgagcaccacaaggaagcctatgaggtcaagctgggggcccaccagctagactcctactccgaggacgccaaggtcagcaccctgaaggacatcatcccccaccccagctacctccaggagggctcccaagggcgacattgcactcctccaactcagcagacccatcaccttctcccgctacatccggcccatctgcctccctgcagccaacgcctccttccccaacggcctccactgcactgtcactggctggggtcatgtggccccctcagtgagcctcctgacgcccaagccactgcagcaactcgaggtgcctctgatcagtcgtgagacgtgtaactgcctgtacaacatcgacgccaagcctgaggagccgcactttgtccaagaggacatggtgtgtgctggctatgtggaggggggcaaggacgcctgccagggtgactctgggggcccactctcctgccctgtggagggtctctggtacctgacgggcattgtgagctggggagatgcctgtggggcccgcaacaggcctggtgtgtacactctggcctccagctatgcctcctggatccaaagcaaggtgacagaactccagcctcgtgtggtgccccaaacccaggagtcccagcccgacagcaacctctgtggcagccacctggccttcagctctgccccagcccagggcttgctgaggcccatccttttcctgcctctgggcctggctctgggcctcctctccccatggctcagcgagcactgagctggccctacttccaggatggatgcatcacactcaaggacaggagcctggtccttccctgatggcctttggacccagggcctgacttgagccactccttccttcaggactctgcgggaggctggggccccatcttgatctttgagcccattcttctgggtgtgctttttgggaccatcactgagagtcaggagttttactgcctgtagcaatggccagagcctctggcccctcacccaccatggaccagcccattggccgagctcctggggagctcctgggacccttggctatgaaaatgagccctggcctttgtgcagcttcgaggacaggaaaggccccaatcttgcccactggccgctgagcgcccccgagccctgactcctggactccggaggactgagcccccaccggaactgggctggcgcttggatctggggtgggagtaacagggcagaaatgattaaaatgtttgagcacaa

SEQ ID NO: 12548 - DNA, 1885 bp, Homo sapiens
aggacacacacagcctacacaggcatacacacacaccacatacacactacacaccgggacacacacacaaaaggcctatgcatgtgcacacacatacacacggacacatacatgcacacacacgggcctgcagctctgaaaggactcatgactttggtggcaagaggagctggcggagcccagccagtgggcggggccaggggaggggcgggcaggtaggtgcagccactcctgggaggaccctgcgtggccagacggtgctggtgactcgtccacactgctcgcttcggatactccaggcgtctcccgttgcggccgctccctgccttagaggccagccttggacacttgctgcccctttccagcccggattctgggatccttccctctgagccaacatctgggtcctgccttcgacaccaccccaaggcttcctaccttgcgtgcctggagtctgccccaggggcccttgtcctgggccatggcccagaagggggtcctggggcctgggcagctgggggctgtggccattctgctctatcttggattactccggtcggggacaggagcggaaggggcagaagctccctgcggtgtggccccccaagcacgcatcacaggtggcagcagtgcagtcgccggtcagtggccctggcaggtcagcatcacctatgaaggcgtccatgtgtgtggtggctctctcgtgtctgagcagtgggtgctgtcagctgctcactgcttccccagcgagcaccacaaggaagcctatgaggtcaagctgggggcccaccagctagactcctactccgaggacgccaaggtcagcaccctgaaggacatcatcccccaccccagctacctccaggagggctcccaagggcgacattgcactcctccaactcagcagacccatcaccttctcccgctacatccggcccatctgcctccctgcagccaacgcctccttccccaacggcctccactgcactgtcactggctggggtcatgtggccccctcagtgagcctcctgacgcccaagccactgcagcaactcgaggtgcctctgatcagtcgtgagacgtgtaactgcctgtacaacatcgacgccaagcctgaggagccgcactttgtccaagaggacatggtgtgtgctggctatgtggaggggggcaaggacgcctgccagggtgactctgggggcccactctcctgccctgtggagggtctctggtacctgacgggcattgtgagctggggagatgcctgtggggcccgcaacaggcctggtgtgtacactctggcctccagctatgcctcctggatccaaagcaaggtgacagaactccagcctcgtgtggtgccccaaacccaggagtcccagcccgacagcaacctctgtggcagccacctggccttcagctctgccccagcccagggcttgctgaggcccatccttttcctgcctctgggcctggctctgggcctcctctccccatggctcagcgagcactgagctggccctacttccaggatggatgcatcacactcaaggacaggagcctggtccttccctgatggcctttggacccagggcctgacttgagccactccttccttcaggactctgcgggaggctggggccccatcttgatctttgagcccattcttctgggtgtgctttttgggaccatcactgagagtcaggagttttactgcctgtagcaatggccagagcctctggcccctcacccaccatggaccagcccattggccgagctcctggggagctcctgggacccttggctatgaaaatgagccctggcctggcgcttggatctggggtgggagtaacagggcagaaatgattaaaatgtttgagcacaa

SEQ ID NO: 12549 - DNA, 1599 bp, Homo sapiens
ctaggtagaggcctgggtttaatcggccgagggtggccattctgctctatcttggattactccggtcggggacaggagcggaaggggcagaagctccctgcggtgtggccccccaagcacgcatcacaggtggcagcagtgcagtcgccggtcagtggccctggcaggtcagcatcacctatgaaggcgtccatgtgtgtggtggctctctcgtgtctgagcagtgggtgctgtcagctgctcactgcttccccagcgagcaccacaaggaagcctatgaggtcaagctgggggcccaccagctagactcctactccgaggacgccaaggtcagcaccctgaaggacatcatcccccaccccagctacctccaggagggctcccaagggcgacattgcactcctccaactcagcagacccatcaccttctcccgctacatccggcccatctgcctccctgcagccaacgcctccttccccaacggcctccactgcactgtcactggctggggtcatgtggccccctcagtgagcctcctgacgcccaagccactgcagcaactcgaggtgcctctgatcagtcgtgagacgtgtaactgcctgtacaacatcgacgccaagcctgaggagccgcactttgtccaagaggacatggtgtgtgctggctatgtggaggggggcaaggacgcctgccagggtgactctgggggcccactctcctgccctgtggagggtctctggtacctgacgggcattgtgagctggggagatgcctgtggggcccgcaacaggcctggtgtgtacactctggcctccagctatgcctcctggatccaaagcaaggtgacagaactccagcctcgtgtggtgccccaaacccaggagtcccagcccgacagcaacctctgtggcagccacctggccttcagctctgccccagcccagggcttgctgaggcccatccttttcctgcctctgggcctggctctgggcctcctctccccatggctcagcgagcactgagctggccctacttccaggatggatgcatcacactcaaggacaggagcctggtccttccctgatggcctttggacccagggcctgacttgagccactccttccttcaggactctgcgggaggctggggccccatcttgatctttgagcccattcttctgggtgtgctttttgggaccatcactgagagtcaggagttttactgcctgtagcaatggccagagcctctggcccctcacccaccatggaccagcccattggccgagctcctggggagctcctgggacccttggctatgaaaatgagccctggctcccacctgtttctggaagactgctcccggcccgcctgcccagactgatgagcacatctctctgccctctccctgtgttctgggctggggccacctttgtgcagcttcgaggacaggaaaggccccaatcttgcccactggccgctgagcgcccccgagccctgactcctggactccggaggactgagcccccaccggaactgggctggcgcttggatctggggtgggagtaacagggcagaaatgattaaaatgtttgagcacaa

SEQ ID NO: 12550 - DNA, 1466 bp, Homo sapiens
aggacacacacagcctacacaggcatacacacacaccacatacacactacacaccgggacacacacacaaaaggcctatgcatgtgcacacacatacacacggacacatacatgcacacacacgggcctgcagctctgaaaggactcatgactttggtggcaagaggagctggcggagcccagccagtgggcggggccaggggaggggcgggcaggtaggtgcagccactcctgggaggaccctgcgtggccagacggtgctggtgactcgtccacactgctcgcttcggatactccaggcgtctcccgttgcggccgctccctgccttagaggccagccttggacacttgctgcccctttccagcccggattctgggatccttccctctgagccaacatctgggtcctgccttcgacaccaccccaaggcttcctaccttgcgtgcctggagtctgccccaggggcccttgtcctgggccatggcccagaagggggtcctggggcctgggcagctgggggctgtggccattctgctctatcttggattactccggtcggggacaggagcggaaggggcagaagctccctgcggtgtggccccccaagcacgcatcacaggtggcagcagtgcagtcgccggtcagtggccctggcaggtcagcatcacctatgaaggcgtccatgtgtgtggtggctctctcgtgtctgagcagtgggtgctgtcagctgctcactgcttccccagcgagcaccacaaggaagcctatgaggtcaagctgggggcccaccagctagactcctactccgaggacgccaaggtcagcaccctgaaggacatcatcccccaccccagctacctccaggagggctcccaagggcgacattgcactcctccaactcagcagacccatcaccttctcccgctacatccggcccatctgcctccctgcagccaacgcctccttccccaacggcctccactgcactgtcactggctggggtcatgtggccccctcagtgagcctcctgacgcccaagccactgcagcaactcgaggtgcctctgatcagtcgtgagacgtgtaactgcctgtacaacatcgacgccaacctctggcccctcacccaccatggaccagcccattggccgagctcctggggagctcctgggacccttggctatgaaaatgagccctggctcccacctgtttctggaagactgctcccggcccgcctgcccagactgatgagcacatctctctgccctctccctgtgttctgggctggggccacctttgtgcagcttcgaggacaggaaaggccccaatcttgcccactggccgctgagcgcccccgagccctgactcctggactccggaggactgagcccccaccggaactgggctggcgcttggatctggggtgggagtaacagggcagaaatgattaaaatgtttgagcacaa

SEQ ID NO: 12551 - DNA, 1132 bp, Homo sapiens
cgagctcggttcccttgctcttttgggggctttgctcttttggggtcatgtggccccctcagtgagcctcctgacgcccaagccactgcagcaactcgaggtgcctctgatcagtcgtgagacgtgtaactgcctgtacaacatcgacgccaagcctgaggagccgcactttgtccaagaggacatggtgtgtgctggctatgtggaggggggcaaggacgcctgccagggtgactctgggggcccactctcctgccctgtggagggtctctggtacctgacgggcattgtgagctggggagatgcctgtggggcccgcaacaggcctggtgtgtacactctggcctccagctatgcctcctggatccaaagcaaggtgacagaactccagcctcgtgtggtgccccaaacccaggagtcccagcccgacagcaacctctgtggcagccacctggccttcagctctgccccagcccagggcttgctgaggcccatccttttcctgcctctgggcctggctctgggcctcctctccccatggctcagcgagcactgagctggccctacttccaggatggatgcatcacactcaaggacaggagcctggtccttccctgatggcctttggacccagggcctgacttgagccactccttccttcaggactctgcgggaggctggggccccatcttgatctttgagcccattcttctgggtgtgctttttgggaccatcactgagagtcaggagttttactgcctgtagcaatggccagagcctctggcccctcacccaccatggaccagcccattggccgagctcctggggagctcctgggacccttggctatgaaaatgagccctggctcccacctgtttctggaagactgctcccggcccgcctgcccagactgatgagcacatctctctgccctctccctgtgttctgggctggggccacctttgtgcagcttcgaggacaggaaaggccccaatcttgcccactggccgctgagcgcccccgagccctgactcctggactccggaggactgagcccccaccggaactgggctggcgcttggatctggggtgggagtaacagggcagaaatgattaaaatgtttgagcacaa

SEQ ID NO: 12552 - DNA, 1021 bp, Homo sapiens
  misc_feature (926)..(926): n is a, c, g, or t
  misc_feature (1003)..(1003): n is a, c, g, or t
  misc_feature (1006)..(1006): n is a, c, g, or t
aggacacacacagcctacacaggcatacacacacaccacatacacactacacaccgggacacacacacaaaaggcctatgcatgtgcacacacatacacacggacacatacatgcacacacacgggcctgcagctctgaaaggactcatgactttggtggcaagaggagctggcggagcccagccagtgggcggggccaggggaggggcgggcaggtaggtgcagccactcctgggaggaccctgcgtggccagacggtgctggtgactcgtccacactgctcgcttcggatactccaggcgtctcccgttgcggccgctccctgccttagaggccagccttggacacttgctgcccctttccagcccggattctgggatccttccctctgagccaacatctgggtcctgccttcgacaccaccccaaggcttcctaccttgcgtgcctggagtctgccccaggggcccttgtcctgggccatggcccagaagggggtcctggggcctgggcagctgggggctgtggccattctgctctatcttggattactccggtcggggacaggagcggaaggggcagaagctccctgcggtgtggccccccaagcacgcatcacaggtggcagcagtgcagtcgccggtcagtggccctggcaggtcagcatcacctatgaaggcgtccatgtgtgtggtggctctctcgtgtctgagcagtgggtgctgtcagctgctcactgcttccccagcgagcaccacaaggaagcctatgaggtcaagctgggggcccaccagctagactcctactccgaggacgccaaggtcagcaccctgaaggacatcatcccccaccccagctacctccaggagggctcccaagggcgacattgcactcctcctgtctcaacctcccaagtaggattacaanatgcgccgacgatgcccagaatccagaactttgtctatcactctccccaacaacctagatgtgaaaacagaataaanccnctcgttcctgaatta

SEQ ID NO: 12553 - DNA, 292 bp, Homo sapiens
agtgtcagttctaagtctggaaggaccagttaggagtgaaggtgaggggtcagaggttacatgataaaactaaggtgcaatttgagacctaaaaggggctgatcggaatcaggggttggcagtgggggttggggaacaaggagaggtctcctgggtctcagcctttgccccctgcctgcagcgagcaccacaaggaagcctatgaggtcaagctgggggcccaccagctagactcctactccgaggacgccaaggtcagcaccctgaaggacatcatcccccaccccagcta

SEQ ID NO: 12554 - DNA, 351 bp, Homo sapiens
ttgtgctattcagatatgaattaaaggaggagaagcagttcgagaggtggcgtggagaacctgaaggagcattcagggtttgaggtagcttaattaacaggaaactacaaatgcaggtctggaacacaagaaaagtatggactggaaaataaagatcttggagttgtcagtaaatagatggtagatggaactgctgggagtgagttttgcccaaggaaaacaatatagaatgggatcaagaaagagaagctagcaaaggacaataagaagttgtcagagaagtagggaaagaactagagataggtcttgtaagtccagggagataaatatattttaagtgtcggatacctt

SEQ ID NO: 12555 - DNA, 780 bp, Homo sapiens
  misc_feature (89)..(89): n is a, c, g, or t
cttggccagatggtatcaaactcctgacctcacgtaatccacccaccttggcctcttaaagtggtggaattacaggtgtgaaacacgcnacccagccattagcttgaatttataatgtttataaccttaaacatctgccagacataatattagtttattaaatgagtaaaccccatctctactaaaaatacaaaaaaaattagccaggcatggtggtgcatgcctgtagtcctagctacttgggaggctgaggcaggagaatcactggaacctggaagatggaggttgcagtgagctgagatcactccactgcactccagcctgggtgacagagtaagactccatctcaaataaataaaaaataaatgcttgtaaatagagttttcatatattttaaaatcctgaaatttttaaattaagtaataattgcttgttggatgtctgggccatttctaattaagaaaaaattaagtaaagaaaaacgtgtttctaaaatcatggaggccgggcacaatggcttacacctgtaatcctagcactctgggaggtcaagatgggcagattacttgaggccaggagttcaagaccagcctagccaacatgacaaacacccacctctacagaaaataaaaaattagccgggcatggtagtacatgactgtaatcccaactacctgggaggctgaggcacgagaattgcttgagcctgggaaatggaggttgcagtgaaccaagaccacaccactgccctccagcctgggcaatagagtgaatccatgt

SEQ ID NO: 12556 - DNA, 561 bp, Homo sapiens
  misc_feature (542)..(545): n is a, c, g, or t
  misc_feature (552)..(553): n is a, c, g, or t
catccatgtctgttcttagctaagagttccagcctcagtacagctggattaccctttggacagaagggcagacaacctcaaggtcagcagcaacagaagttgggcctagtagtcagatcacaagtgagtgtggctattcatgagaatagggtggtggtggcatttatcctgcttcccctccataaataaacctggtaattttatttttaatgttacaaaaaaagttgatgctacattaaatgttttaccctcatccattatcataaatctcatactggaggtgtgatctctcttcttgtttctttaattgaaagtaccaatgaatcgaggcctggtggatgatgcctttagagttttttgttttgttttgtttttgttttcttgaatcattgaaacttgtcatttttatctagactcttccacaaatggcaaagtcacttatctgcagaattcccagaatcttcttttgcctttgtgcacctgctaattaccccctctgaactgaatttgaaaaaattaattaaaataaccgaatcaccccnnnnacccccnntagagcca

SEQ ID NO: 12557 - DNA, 934 bp, Homo sapiens
ctgccccactctcctctcacctaccaaaggattttctcaggtgtggttccaagcgataaagttctactgtcctcggccttccctgctggtaattcgcctttcagattagccaataacactgagctgatctctagggttaagaagagaacattgaactcattttgtccccatgtaccccacaggcttgaaacagaaaatgatgtaaacttttgtggcatacattcacccattttcccaccatatctttactatcctgtgttgatttttttttcaaattacaaagacaatacatgttctttgtgggaaatctgaaaaatactaccaaatagaaaataaaaatcacctgaattcaccacgaccacattgtttaaaaccacatttctgggttttaaatcagtcagtggctgggcccaaaggcacttttgggtaagataagtgaagaaatgcccacaaggccaaggtgtcacttaaaaaaacaaacaaaaaaaacaagccaaaaaaaaaaattctgtccgctaatgttttgcacgcatctaggagcagactcactgcaaacctctggttatgccattattcaggggtataaagaaagctttagaagtagcatagtcctgatgcctcctctaatgagttaaagctcttgggggaaattctaaaattgccagaccattttgtttctctgtgctcctacgaaaccagtcgggatactgagtgtttggcaatactgccacctactgaaagctgagcttcagagtgaggtgaaataaagacagaatgtaaaagcatctactttgttttaaacagcaaacaaatggaccagattaacaatgatcccatctggaatttaaaactctgaaagtgtcaacattgaaaggattaagcatatcatccggtcaaacttcccaccctacccacatacccaggcaacgtctat

SEQ ID NO: 12558 - DNA, 377 bp, Homo sapiens
gcaagagcaatttggaggttaacagcaagatggagttgattaggtcagatttctttcactgtcataattttgtcactgttatttttgcaaaggtggtttcaccacaaaaagctttcgtgatctggcccccttgcctacctgattagcttaaccttctgcttttcctcttaaactcatacaggctactgtccattggattatgaattccttgaagtcagaaatgatgtatttccaaggcctagcacagtaactcgcatatgcttggtaaatgctacataaattaattagcaatataaaattctaataaggtcacagtgtgagagaacactgaaaaacatgtgctagtttctcatctctctgctttccattgctaagta

SEQ ID NO: 12559 - DNA, 8437 bp, Homo sapiens
ctcagctccctgtggtgggggatggcagaggcttcccgctccccgcagctggtttgcacagcctcccgactgtgccgtggtgtctccttccctaaagtgggacagtcgtttctgtgtcctgctggcctctgaggaacagacgtgtgtgagaggccttcagggcctgatggctggggtggtgacagtgcctggagaatgggtggggactggaggggccaggtggctaaccactctcctcttccatggcagcggagctggagttcgcccaaatcatcatcatcgtcgtggtggtcacggtgatggtggtggtcatcgtctgcctgctgaaccactacaaagtctccacgcggtccttcatcaaccgcccgaaccagagccggaggcgggaggacgggctgccgcaggaagggtgcctgtggccttcagacagcgccgcaccgcggctgggcgcctcggagatcatgcatgccccgcggtccagggacaggttcacagcgccgtccttcatccagagggatcgcttcagccgcttccagcccacctacccctatgtgcagcacgagattgatcttcctcccaccatctccctgtccgacggtgaagagccacctccttaccaggggccctgcaccctgcagctccgggaccctgaacagcagatggaactcaaccgagagtccgtgagggccccacccaaccgaaccatatttgacagtgatttaatagacattgctatgtatagcgggggtccatgcccacccagcagcaactcgggcatcagtgcaagcacctgcagcagtaacgggaggatggaggggccaccccccacatacagcgaggtgatgggccaccacccaggcgcctctttcctccatcaccagcgcagcaacgcacacaggggcagcagactgcagtttcagcagaacaatgcagagagcacaatagtacccatcaaaggcaaagataggaagcctgggaacctggtctgattccttccaacgtgcacttcagctggagaaagaaaccaagaagggaagcggccgctgggcccctcctgcgcacagtgttgttcagtttcacatggtacaaataagtaaaaccaaatgagcaaacacggtctttgtttctgattccttttaggggaattgcatgcaaactagactgaaatgatacaaacttccatctggtctgaccgcaaacagtgtttatttggggacaggggttgggatgggggtgtgggcaggggaaaacagagaacgggatgctttgaagataccatgaaataaaacccacagaggtatttgatgtatttaattgtgaaaggagactttgcagataaatgaggccagaatggcatgttttataattaactgaataaagaaggaagcattattatatattattgtggggaagaaccagccagttcgctttttctcctaaggtgtggaacttttattttgttttaaaaatatgaatcaaaattcctgtgttgtgtgccaaggtataaagtggagaagttagatgagtgcaaggagctcctttgtgttgtgatgatgtgttttaaaagttgcactatcttaatgttgaaaatatttacaagggaactgttttacgtgaagttctgtatgttgtcttttcacctgtggattgtaatcaggcccaaggaatatcctggagtggtccccagaagcatccaagaaaagatatttggggacgtagcctaacattttaccaacttacgtaaatcaaaaaagtcattattgttgcaggagtttgcatcaaatagcagtgcatcgctgaagcttttggagacttttggatggaagataagatagggaagattaagttccagcatttctgacttgttattttgagttactctgctactcttaggctgcatagtttatgagaaaatgaacacatgcatttatggatccagtatcatgcagtgctgccctcatcctccagcagtgcaatttcttcagtaatttagatttttttcactatagcatgaaatatattcaaatacataccttattttatgcaataaattgtttaaaatgcaaggtggttattctgcatactgttgaaatatgtgactcctcagtatattcccattgcctctccccctttcctcgacagcttagttcagttctgcagggctgctcagttcacaggaggctcccagcagccaccccacatccagcctacacagaactttcgtgtgggagtggtgtgggtggtggttttcttatgctttggaagcccctagaaataatgacggaagaatgccatgttgctgatcgtggtaataagccattgtgggttattgtatgtcactagtattagcatagcattcttaaaggaatgcagtgttcaaaacctacccaaattccccgcaggattttaccaaacccttccccaggccagttttgtactgaaggcaagaactggacagtcagagaacagtggagggggcaagtgactgaagagcaccgggtaaaaagcacaacatgcagttaaaatgcaaactagaaaactaattttaaatattgttagttttaatatttcctgatatttacaaatattcattcttatatacaatgaaaaaaataactttcttctgcagatgtaagcactggcttttataagagcagcagccaacacgtttagcagacactgcgcgtggagaagggcttatctgcagtacactctgccatgtggagggtgggcctctgtggcctcttcacataacaagatgagctggaatgatgattccatgactcccacctatgcagccttaaagccaaatccgcgtgtgtgtgtttgtgtctgtctgtgggtctcgaaggtgatccgtcggtgcggtggctctgtgctgtaactggagagactgttccaaaccccaagagttgtctgatcctagtctgttcccttctgcttcttacctctgtagataggtcactggtttttgtttgtttgttttgaggattggaatttccattacattcatcctttgcacacagtaacatccacagaactagtccaactcttaaaaggagagaggaaaaacacaggcaccagttgtcagctcatgcttacaacctgtgtggaagtatatacagttgagagtcacagtggaggttctgagactggattcagtcttgttccagtgacagttggaaggcctctgctggagagacaccagctctcagggcagagattggcttggggccagaaggaccctccccaaccctggagacaccctgaaggttcactggctctccagattagcctctcttcctctgtcaggcaaagatgaggagcccgtgttcccatcgggccctgctggcagggacttgcagtggattcttggtcaggtgtgcccacagatgcggaggcgaggtgagtgattccatcatttcagttctcacctgcagttttggtgaagcaggagatgcaccccacagctctagctctcaaatggcttcacagtccttacttctctacctgcctcaagaaggggctcagagcagagacttgtgaattccttagtaactgtgagtatatgaatgtgttgcacatgtccacagtattggcgagataattacataattcagatacctttaatcatctttcaagaaagaggctcctcccattcaaccaccctagagaactgcctttgttaaatagttatttaaagactcatacatatcaaaccatgactttgaaaggtcttcgaggctggggctctgtaatgaattagtttaaaagccaaggtcataacatgaattgatggtcaatttcccttcagcagaaggaaaaggtgatttagatcagtagctcttttgaaggttgtggctgacctgttcataccgtgtcgcctcatggctagtgtggcgttgaaagagtagcgactgggaagatacaacttacacagtggggcctattgttctttcaagaaccctttttttagcttatagaacccatgggtccagtttagtaacgagtgatttaggcaatcaatgataggtttataatcttagattattccagcaaagtgtggattgcattgttaggaagaacatttggtgggaatgaacactcctgggcataccgctgacttttgtcccttgttcccggtgtaggagacccaaggcatcttgaatcccatctataagaacacaatcttccagcatacgtttgctttttcagaaactctagcattctctttaaatactgacgcaatccttaatggaaaagagatttcatgaagcaaattatgtatttcaatagttcttctatttttagtgtccaaaatttactaatacagaagcttgacaagcatgtcctcaccctccccaccacataaacacatggacacacacccaagccacaagaaatcccaagagagcagaagcgaatttttaaaagatttatcgtgaggactgcatttccattcactaattttggctcaaacttatgaggcaggaaataggggccaacagtaaatgggggaggcctcctgacaccagcagaggaattttgtacccaggcgaggacttcttgaacttctgcgtatctccgtttgatctctttcacctttatttcatcttcataagaatgagaaaggctcaaaaggaagcacttttagaaatcttctctgacctagaagaatccatccaaatccctgccttcctctctgaaccaacagttcccttctctgacagggggccatcctctatcttccatccagcggctcttccttttaggaaggctctggtgcagagcacttcaaatatgtcctcaggccagatactgattgctagtagagagacacccggcacccagtccgaagccctccctcaaaggaccggcttatggcgttggtcactggcaggctcagagacattctactgtgggcgcagggagcccggccccccatgcagccatgactggatgcgcccccatctcgggggcttgctgcactgcttgtttattgaattttgctacttagaatggcaacattaactttgtgtaccattcattttttaaaaattttccaaagctcggcagtgtatgaaagaaaaaactgggaaagatacttggtttctgttaacttttgtgttgcttgcttaagtgattaaagccagtgcttggagccaagccttcatgccacgaacatgctccacagcctgccctttgctctcctgctcacactgaccaagaatgccgcgtgcttggcctactgaggtgaaaggacaattgaatgacaggtgggcaaagggagaacttccccttcttggtgcgaggaaagtcacaaatttaaaaatgttgcttccagcccagatcctaaatgctagttctcagcagctgcgtggcttaccgttcgccatttccaccaccgccagctgccagcaccgctacagatcacagagatgtgaacagacaatggaaagcactcttagccttgcagtggtctacattttttaggaaccaatatttcagcattctttattacccggcacgctgtgtcctttgcagagttcaagtttatgttactgccagggtcagacagtcatttgctgctgctgctgctgctgctgctgcttctcgaactggatgcattaggaagctgctgtctgagtgtaggaatgtcttgctaagaaagcaatgtcttccttcatccttttctttcttccctctgcgtgtccttgtttttgtgtaatgcgggagagggttagagctatagagattatatatacactatccgtgcacattatatatatgtagatatacccctatcatgtcagagatctgcatgtcagtttttcagcaactaaggtgcctcatgttctgagttcagcagatataggaaccaagccgccccctcctgcacttgatgctcccacctttgttgtgcctcacttaaaatggtgcttttttcagttgtctgtcttttcttatgtttttatttgtaaggtgctgtatataagttgaatatattatgcacatatcctacccaatgggtagaacaaaaagttgttaatactgtaatataatgtatagatgataccaattttaacagaaatggcatagaatttgtgaatgcctatgtgctttgtcctcttttgtaaggaaatttgcaaatggatgcatacagattaaagtctatgtagtttattttcctattaaatatcaatattataacacaagagaaagaagtgtgaacaaacaagcaacagtttatgaccagcgtatatatagcaatggaaagttgcatctttgctgtgaaaacactttaaagaaaatactttttaaaaaatcccacagctttttggttgccactagacgcttcttattttaatcattttagtaatgctcagctggaccagtgttagttatatttgagtcagaaaaatgttgtttttcaacttgctttataatctcctgcatctatctcctgctgtagcatcacgaaggtgtcaggcaacagtgaaaagtgcacatttttgttgttgcagaaactgtgtcagaggaataagtaaatcagcctgcagcagaagactttgttcagctccagaggcatctgtgaccgtctgtgtccaagtctctctgtgcctttttcttttacaaactgaagctgtggagccaatgaagtaacagtagagattgtagggaaagaatacctcaggaaaaacaaatacacttacaagaagaccctgttcttagaaaatgtgtttagttatgggttagcactagaagagacttggctgtcagccagccaagtgaaggacctctcatccattcccattcatgtcccatcataatacggacccaaaaagcaaactcggttttgccatcagttagaaattacgttttggattgtatattgttacatctctcttccagcttagtttttagtgtctgattgtgacctctgcatttatcttcaaataccctaattttaaaacaaaagaacaagaaaagtttataacaccatgttcactaaaaccacggttgaatcttgggtgtgggcatcctttcgagtgttgtccataagagcagttcgtggaattttgcccatctgacccatattatcagcttattctgccaccagagtagagtctaataaattccaaagtttttatttgctccatggtgtatgttctgactttgaaaatgtcagattctataatcatacccctaacatccaggaaacaaatgacagattatctttaaactgaaattgactctacaatgcaacccttaatgctgaatggattaaaaaagtcagcccttttagtatctgtttgaaagggccgtaaaaagttgacacttttgttgttgtggatcctgcgtgtctagacccacgtgttgtttccatcgtatactgtagggtgcaccccttgggattcatcattaagaactgaggctcactgttgtcagaaacaaagctcccaccccccaggttcaaccttgtgggagaactgttgagcatgagaatgttctagactcagaggtactaaaatttgttaccacatcattgcttcctttctacaggacgaattgaggcttaaactttactgttaatgatactggttcattttaatgtgcttgttggtatgttgctatttttcatttcatagctttcaaaaatcatgctaattgtatacttgtctagtttaaggctattttaaaatatgtacaatactattcacagcatttagttcgtttaatttttattataaagcaatctactaaaaaagtacaactgtatttgaacttttcaatagttgtttgtgagctatgataatcaaaagtcattaaagtcttttttaacaaacattcgtgcttacttttcaacataattcccagttatatacagaaaaagatttccacctgtcacgtatctgcctcttttacctgagcaatggtgtagttcttagacctaaggtctgtaattgcaatacttttaaagaaagatgttgctctaagtgctgtttgttagttatgaaatcagatttttctgcttgttcttaatgctgtggtcaaaccatagcacaaaatcattaaaaataatcagcggcatacaaaaatgtcgccttgggtttttgttttgtttttctttgtctttcagcaacaaggcacatgcatggggaaaatgctgtgtgttttaagacctgtctcaaagaaatacttcctgtggctccctagctaaacttcccactcagcttgtagtcactctgacttttcaaaaaaatcactacttcatattctactagaagcaattctggtcagatcatgattcgtttcccaatgctgggttctacacaggtcattcagacagtcatcaggtcccctcatgcaaggagtccccagagaaactgctcaccccacctgaggcgcccagggaggactttctagatgcctcaaa

SEQ ID NO: 12560 - DNA, 8384 bp, Homo sapiens
ctcagctccctgtggtgggggatggcagaggcttcccgctccccgcagctggtttgcacagcctcccgactgtgccgtggtgtctccttccctaaagtgggacagtcgtttctgtgtcctgctggcctctgaggaacagacgtgtgtgagaggccttcagggcctgatggctggggtggtgacagtgcctggagaatgggtggggactggaggggccaggtggctaaccactctcctcttccatggcagcggagctggagttcgcccaaatcatcatcatcgtcgtggtggtcacggtgatggtggtggtcatcgtctgcctgctgaaccactacaaagtctccacgcggtccttcatcaaccgcccgaaccagagccggaggcgggaggacgggctgccgcaggatcatgcatgccccgcggtccagggacaggttcacagcgccgtccttcatccagagggatcgcttcagccgcttccagcccacctacccctatgtgcagcacgagattgatcttcctcccaccatctccctgtccgacggtgaagagccacctccttaccaggggccctgcaccctgcagctccgggaccctgaacagcagatggaactcaaccgagagtccgtgagggccccacccaaccgaaccatatttgacagtgatttaatagacattgctatgtatagcgggggtccatgcccacccagcagcaactcgggcatcagtgcaagcacctgcagcagtaacgggaggatggaggggccaccccccacatacagcgaggtgatgggccaccacccaggcgcctctttcctccatcaccagcgcagcaacgcacacaggggcagcagactgcagtttcagcagaacaatgcagagagcacaatagtacccatcaaaggcaaagataggaagcctgggaacctggtctgattccttccaacgtgcacttcagctggagaaagaaaccaagaagggaagcggccgctgggcccctcctgcgcacagtgttgttcagtttcacatggtacaaataagtaaaaccaaatgagcaaacacggtctttgtttctgattccttttaggggaattgcatgcaaactagactgaaatgatacaaacttccatctggtctgaccgcaaacagtgtttatttggggacaggggttgggatgggggtgtgggcaggggaaaacagagaacgggatgctttgaagataccatgaaataaaacccacagaggtatttgatgtatttaattgtgaaaggagactttgcagataaatgaggccagaatggcatgttttataattaactgaataaagaaggaagcattattatatattattgtggggaagaaccagccagttcgctttttctcctaaggtgtggaacttttattttgttttaaaaatatgaatcaaaattcctgtgttgtgtgccaaggtataaagtggagaagttagatgagtgcaaggagctcctttgtgttgtgatgatgtgttttaaaagttgcactatcttaatgttgaaaatatttacaagggaactgttttacgtgaagttctgtatgttgtcttttcacctgtggattgtaatcaggcccaaggaatatcctggagtggtccccagaagcatccaagaaaagatatttggggacgtagcctaacattttaccaacttacgtaaatcaaaaaagtcattattgttgcaggagtttgcatcaaatagcagtgcatcgctgaagcttttggagacttttggatggaagataagatagggaagattaagttccagcatttctgacttgttattttgagttactctgctactcttaggctgcatagtttatgagaaaatgaacacatgcatttatggatccagtatcatgcagtgctgccctcatcctccagcagtgcaatttcttcagtaatttagatttttttcactatagcatgaaatatattcaaatacataccttattttatgcaataaattgtttaaaatgcaaggtggttattctgcatactgttgaaatatgtgactcctcagtatattcccattgcctctccccctttcctcgacagcttagttcagttctgcagggctgctcagttcacaggaggctcccagcagccaccccacatccagcctacacagaactttcgtgtgggagtggtgtgggtggtggttttcttatgctttggaagcccctagaaataatgacggaagaatgccatgttgctgatcgtggtaataagccattgtgggttattgtatgtcactagtattagcatagcattcttaaaggaatgcagtgttcaaaacctacccaaattccccgcaggattttaccaaacccttccccaggccagttttgtactgaaggcaagaactggacagtcagagaacagtggagggggcaagtgactgaagagcaccgggtaaaaagcacaacatgcagttaaaatgcaaactagaaaactaattttaaatattgttagttttaatatttcctgatatttacaaatattcattcttatatacaatgaaaaaaataactttcttctgcagatgtaagcactggcttttataagagcagcagccaacacgtttagcagacactgcgcgtggagaagggcttatctgcagtacactctgccatgtggagggtgggcctctgtggcctcttcacataacaagatgagctggaatgatgattccatgactcccacctatgcagccttaaagccaaatccgcgtgtgtgtgtttgtgtctgtctgtgggtctcgaaggtgatccgtcggtgcggtggctctgtgctgtaactggagagactgttccaaaccccaagagttgtctgatcctagtctgttcccttctgcttcttacctctgtagataggtcactggtttttgtttgtttgttttgaggattggaatttccattacattcatcctttgcacacagtaacatccacagaactagtccaactcttaaaaggagagaggaaaaacacaggcaccagttgtcagctcatgcttacaacctgtgtggaagtatatacagttgagagtcacagtggaggttctgagactggattcagtcttgttccagtgacagttggaaggcctctgctggagagacaccagctctcagggcagagattggcttggggccagaaggaccctccccaaccctggagacaccctgaaggttcactggctctccagattagcctctcttcctctgtcaggcaaagatgaggagcccgtgttcccatcgggccctgctggcagggacttgcagtggattcttggtcaggtgtgcccacagatgcggaggcgaggtgagtgattccatcatttcagttctcacctgcagttttggtgaagcaggagatgcaccccacagctctagctctcaaatggcttcacagtccttacttctctacctgcctcaagaaggggctcagagcagagacttgtgaattccttagtaactgtgagtatatgaatgtgttgcacatgtccacagtattggcgagataattacataattcagatacctttaatcatctttcaagaaagaggctcctcccattcaaccaccctagagaactgcctttgttaaatagttatttaaagactcatacatatcaaaccatgactttgaaaggtcttcgaggctggggctctgtaatgaattagtttaaaagccaaggtcataacatgaattgatggtcaatttcccttcagcagaaggaaaaggtgatttagatcagtagctcttttgaaggttgtggctgacctgttcataccgtgtcgcctcatggctagtgtggcgttgaaagagtagcgactgggaagatacaacttacacagtggggcctattgttctttcaagaaccctttttttagcttatagaacccatgggtccagtttagtaacgagtgatttaggcaatcaatgataggtttataatcttagattattccagcaaagtgtggattgcattgttaggaagaacatttggtgggaatgaacactcctgggcataccgctgacttttgtcccttgttcccggtgtaggagacccaaggcatcttgaatcccatctataagaacacaatcttccagcatacgtttgctttttcagaaactctagcattctctttaaatactgacgcaatccttaatggaaaagagatttcatgaagcaaattatgtatttcaatagttcttctatttttagtgtccaaaatttactaatacagaagcttgacaagcatgtcctcaccctccccaccacataaacacatggacacacacccaagccacaagaaatcccaagagagcagaagcgaatttttaaaagatttatcgtgaggactgcatttccattcactaattttggctcaaacttatgaggcaggaaataggggccaacagtaaatgggggaggcctcctgacaccagcagaggaattttgtacccaggcgaggacttcttgaacttctgcgtatctccgtttgatctctttcacctttatttcatcttcataagaatgagaaaggctcaaaaggaagcacttttagaaatcttctctgacctagaagaatccatccaaatccctgccttcctctctgaaccaacagttcccttctctgacagggggccatcctctatcttccatccagcggctcttccttttaggaaggctctggtgcagagcacttcaaatatgtcctcaggccagatactgattgctagtagagagacacccggcacccagtccgaagccctccctcaaaggaccggcttatggcgttggtcactggcaggctcagagacattctactgtgggcgcagggagcccggccccccatgcagccatgactggatgcgcccccatctcgggggcttgctgcactgcttgtttattgaattttgctacttagaatggcaacattaactttgtgtaccattcattttttaaaaattttccaaagctcggcagtgtatgaaagaaaaaactgggaaagatacttggtttctgttaacttttgtgttgcttgcttaagtgattaaagccagtgcttggagccaagccttcatgccacgaacatgctccacagcctgccctttgctctcctgctcacactgaccaagaatgccgcgtgcttggcctactgaggtgaaaggacaattgaatgacaggtgggcaaagggagaacttccccttcttggtgcgaggaaagtcacaaatttaaaaatgttgcttccagcccagatcctaaatgctagttctcagcagctgcgtggcttaccgttcgccatttccaccaccgccagctgccagcaccgctacagatcacagagatgtgaacagacaatggaaagcactcttagccttgcagtggtctacattttttaggaaccaatatttcagcattctttattacccggcacgctgtgtcctttgcagagttcaagtttatgttactgccagggtcagacagtcatttgctgctgctgctgctgctgctgctgcttctcgaactggatgcattaggaagctgctgtctgagtgtaggaatgtcttgctaagaaagcaatgtcttccttcatccttttctttcttccctctgcgtgtccttgtttttgtgtaatgcgggagagggttagagctatagagattatatatacactatccgtgcacattatatatatgtagatatacccctatcatgtcagagatctgcatgtcagtttttcagcaactaaggtgcctcatgttctgagttcagcagatataggaaccaagccgccccctcctgcacttgatgctcccacctttgttgtgcctcacttaaaatggtgcttttttcagttgtctgtcttttcttatgtttttatttgtaaggtgctgtatataagttgaatatattatgcacatatcctacccaatgggtagaacaaaaagttgttaatactgtaatataatgtatagatgataccaattttaacagaaatggcatagaatttgtgaatgcctatgtgctttgtcctcttttgtaaggaaatttgcaaatggatgcatacagattaaagtctatgtagtttattttcctattaaatatcaatattataacacaagagaaagaagtgtgaacaaacaagcaacagtttatgaccagcgtatatatagcaatggaaagttgcatctttgctgtgaaaacactttaaagaaaatactttttaaaaaatcccacagctttttggttgccactagacgcttcttattttaatcattttagtaatgctcagctggaccagtgttagttatatttgagtcagaaaaatgttgtttttcaacttgctttataatctcctgcatctatctcctgctgtagcatcacgaaggtgtcaggcaacagtgaaaagtgcacatttttgttgttgcagaaactgtgtcagaggaataagtaaatcagcctgcagcagaagactttgttcagctccagaggcatctgtgaccgtctgtgtccaagtctctctgtgcctttttcttttacaaactgaagctgtggagccaatgaagtaacagtagagattgtagggaaagaatacctcaggaaaaacaaatacacttacaagaagaccctgttcttagaaaatgtgtttagttatgggttagcactagaagagacttggctgtcagccagccaagtgaaggacctctcatccattcccattcatgtcccatcataatacggacccaaaaagcaaactcggttttgccatcagttagaaattacgttttggattgtatattgttacatctctcttccagcttagtttttagtgtctgattgtgacctctgcatttatcttcaaataccctaattttaaaacaaaagaacaagaaaagtttataacaccatgttcactaaaaccacggttgaatcttgggtgtgggcatcctttcgagtgttgtccataagagcagttcgtggaattttgcccatctgacccatattatcagcttattctgccaccagagtagagtctaataaattccaaagtttttatttgctccatggtgtatgttctgactttgaaaatgtcagattctataatcatacccctaacatccaggaaacaaatgacagattatctttaaactgaaattgactctacaatgcaacccttaatgctgaatggattaaaaaagtcagcccttttagtatctgtttgaaagggccgtaaaaagttgacacttttgttgttgtggatcctgcgtgtctagacccacgtgttgtttccatcgtatactgtagggtgcaccccttgggattcatcattaagaactgaggctcactgttgtcagaaacaaagctcccaccccccaggttcaaccttgtgggagaactgttgagcatgagaatgttctagactcagaggtactaaaatttgttaccacatcattgcttcctttctacaggacgaattgaggcttaaactttactgttaatgatactggttcattttaatgtgcttgttggtatgttgctatttttcatttcatagctttcaaaaatcatgctaattgtatacttgtctagtttaaggctattttaaaatatgtacaatactattcacagcatttagttcgtttaatttttattataaagcaatctactaaaaaagtacaactgtatttgaacttttcaatagttgtttgtgagctatgataatcaaaagtcattaaagtcttttttaacaaacattcgtgcttacttttcaacataattcccagttatatacagaaaaagatttccacctgtcacgtatctgcctcttttacctgagcaatggtgtagttcttagacctaaggtctgtaattgcaatacttttaaagaaagatgttgctctaagtgctgtttgttagttatgaaatcagatttttctgcttgttcttaatgctgtggtcaaaccatagcacaaaatcattaaaaataatcagcggcatacaaaaatgtcgccttgggtttttgttttgtttttctttgtctttcagcaacaaggcacatgcatggggaaaatgctgtgtgttttaagacctgtctcaaagaaatacttcctgtggctccctagctaaacttcccactcagcttgtagtcactctgacttttcaaaaaaatcactacttcatattctactagaagcaattctggtcagatcatgattcgtttcccaatgctgggttctacacaggtcattcagacagtcatcaggtcccctcatgcaaggagtccccagagaaactgctcaccccacctgaggcgcccagggaggactttctagatgcctcaaa

SEQ ID NO: 12561 - DNA, 9028 bp, Homo sapiens
ccgagccccggaggaagcaggcgtgtgttgaatttctctctgcccctcaccttggaataaacaggaagcgacaagcacccagcccggcccggcacttgcctttgtgaaggggtctgccctgcacagcctttaggaagcttcctcgggaccccttcccggtgcgccgccccgggtgggcctgggggcgcgccctcggttcaagctctacgttcgtgacatcaaacctcctgttgggccatttccgagaactcccatcagtttctgtatagtgtaaaagtttcagaggcggagcacagagagctgcggctgggacaaggagcacccgcgtgcaggtgcgaccctgcaggatgctggcagcggcgtggccaggggcgcccgtgttctgagggcctgagggccagcccctccacccgcgccatggcctccgcgccctggctggacggctgacgggagcagggaccgccgccgcccaggtgccacacccaggtaccgcccgcccgcgcgagagccgggcaggtgggccgcggatgctcccagaggccggcccagcagagcgatggacttggacaggctaagatggaagtgacctgagcctcgcccggcggcttcctcgacgggacagcgcaagagttggagcacaggcttgtccggggagcagtatgccggaagctggttttcaggccacaaatgctttcacagagtgcaaattcacctgcaccagtggtaaatgcttgtatcttggttcgctggtctgtaaccaacagaacgactgtggggacaacagtgacgaagagaactgtctcctggtgaccgagcacccgcctccgggcatcttcaactcggagctggagttcgcccaaatcatcatcatcgtcgtggtggtcacggtgatggtggtggtcatcgtctgcctgctgaaccactacaaagtctccacgcggtccttcatcaaccgcccgaaccagagccggaggcgggaggacgggctgccgcaggaagggtgcctgtggccttcagacagcgccgcaccgcggctgggcgcctcggagatcatgcatgccccgcggtccagggacaggttcacagcgccgtccttcatccagagggatcgcttcagccgcttccagcccacctacccctatgtgcagcacgagattgatcttcctcccaccatctccctgtccgacggtgaagagccacctccttaccaggggccctgcaccctgcagctccgggaccctgaacagcagatggaactcaaccgagagtccgtgagggccccacccaaccgaaccatatttgacagtgatttaatagacattgctatgtatagcgggggtccatgcccacccagcagcaactcgggcatcagtgcaagcacctgcagcagtaacgggaggatggaggggccaccccccacatacagcgaggtgatgggccaccacccaggcgcctctttcctccatcaccagcgcagcaacgcacacaggggcagcagactgcagtttcagcagaacaatgcagagagcacaatagtacccatcaaaggcaaagataggaagcctgggaacctggtctgattccttccaacgtgcacttcagctggagaaagaaaccaagaagggaagcggccgctgggcccctcctgcgcacagtgttgttcagtttcacatggtacaaataagtaaaaccaaatgagcaaacacggtctttgtttctgattccttttaggggaattgcatgcaaactagactgaaatgatacaaacttccatctggtctgaccgcaaacagtgtttatttggggacaggggttgggatgggggtgtgggcaggggaaaacagagaacgggatgctttgaagataccatgaaataaaacccacagaggtatttgatgtatttaattgtgaaaggagactttgcagataaatgaggccagaatggcatgttttataattaactgaataaagaaggaagcattattatatattattgtggggaagaaccagccagttcgctttttctcctaaggtgtggaacttttattttgttttaaaaatatgaatcaaaattcctgtgttgtgtgccaaggtataaagtggagaagttagatgagtgcaaggagctcctttgtgttgtgatgatgtgttttaaaagttgcactatcttaatgttgaaaatatttacaagggaactgttttacgtgaagttctgtatgttgtcttttcacctgtggattgtaatcaggcccaaggaatatcctggagtggtccccagaagcatccaagaaaagatatttggggacgtagcctaacattttaccaacttacgtaaatcaaaaaagtcattattgttgcaggagtttgcatcaaatagcagtgcatcgctgaagcttttggagacttttggatggaagataagatagggaagattaagttccagcatttctgacttgttattttgagttactctgctactcttaggctgcatagtttatgagaaaatgaacacatgcatttatggatccagtatcatgcagtgctgccctcatcctccagcagtgcaatttcttcagtaatttagatttttttcactatagcatgaaatatattcaaatacataccttattttatgcaataaattgtttaaaatgcaaggtggttattctgcatactgttgaaatatgtgactcctcagtatattcccattgcctctccccctttcctcgacagcttagttcagttctgcagggctgctcagttcacaggaggctcccagcagccaccccacatccagcctacacagaactttcgtgtgggagtggtgtgggtggtggttttcttatgctttggaagcccctagaaataatgacggaagaatgccatgttgctgatcgtggtaataagccattgtgggttattgtatgtcactagtattagcatagcattcttaaaggaatgcagtgttcaaaacctacccaaattccccgcaggattttaccaaacccttccccaggccagttttgtactgaaggcaagaactggacagtcagagaacagtggagggggcaagtgactgaagagcaccgggtaaaaagcacaacatgcagttaaaatgcaaactagaaaactaattttaaatattgttagttttaatatttcctgatatttacaaatattcattcttatatacaatgaaaaaaataactttcttctgcagatgtaagcactggcttttataagagcagcagccaacacgtttagcagacactgcgcgtggagaagggcttatctgcagtacactctgccatgtggagggtgggcctctgtggcctcttcacataacaagatgagctggaatgatgattccatgactcccacctatgcagccttaaagccaaatccgcgtgtgtgtgtttgtgtctgtctgtgggtctcgaaggtgatccgtcggtgcggtggctctgtgctgtaactggagagactgttccaaaccccaagagttgtctgatcctagtctgttcccttctgcttcttacctctgtagataggtcactggtttttgtttgtttgttttgaggattggaatttccattacattcatcctttgcacacagtaacatccacagaactagtccaactcttaaaaggagagaggaaaaacacaggcaccagttgtcagctcatgcttacaacctgtgtggaagtatatacagttgagagtcacagtggaggttctgagactggattcagtcttgttccagtgacagttggaaggcctctgctggagagacaccagctctcagggcagagattggcttggggccagaaggaccctccccaaccctggagacaccctgaaggttcactggctctccagattagcctctcttcctctgtcaggcaaagatgaggagcccgtgttcccatcgggccctgctggcagggacttgcagtggattcttggtcaggtgtgcccacagatgcggaggcgaggtgagtgattccatcatttcagttctcacctgcagttttggtgaagcaggagatgcaccccacagctctagctctcaaatggcttcacagtccttacttctctacctgcctcaagaaggggctcagagcagagacttgtgaattccttagtaactgtgagtatatgaatgtgttgcacatgtccacagtattggcgagataattacataattcagatacctttaatcatctttcaagaaagaggctcctcccattcaaccaccctagagaactgcctttgttaaatagttatttaaagactcatacatatcaaaccatgactttgaaaggtcttcgaggctggggctctgtaatgaattagtttaaaagccaaggtcataacatgaattgatggtcaatttcccttcagcagaaggaaaaggtgatttagatcagtagctcttttgaaggttgtggctgacctgttcataccgtgtcgcctcatggctagtgtggcgttgaaagagtagcgactgggaagatacaacttacacagtggggcctattgttctttcaagaaccctttttttagcttatagaacccatgggtccagtttagtaacgagtgatttaggcaatcaatgataggtttataatcttagattattccagcaaagtgtggattgcattgttaggaagaacatttggtgggaatgaacactcctgggcataccgctgacttttgtcccttgttcccggtgtaggagacccaaggcatcttgaatcccatctataagaacacaatcttccagcatacgtttgctttttcagaaactctagcattctctttaaatactgacgcaatccttaatggaaaagagatttcatgaagcaaattatgtatttcaatagttcttctatttttagtgtccaaaatttactaatacagaagcttgacaagcatgtcctcaccctccccaccacataaacacatggacacacacccaagccacaagaaatcccaagagagcagaagcgaatttttaaaagatttatcgtgaggactgcatttccattcactaattttggctcaaacttatgaggcaggaaataggggccaacagtaaatgggggaggcctcctgacaccagcagaggaattttgtacccaggcgaggacttcttgaacttctgcgtatctccgtttgatctctttcacctttatttcatcttcataagaatgagaaaggctcaaaaggaagcacttttagaaatcttctctgacctagaagaatccatccaaatccctgccttcctctctgaaccaacagttcccttctctgacagggggccatcctctatcttccatccagcggctcttccttttaggaaggctctggtgcagagcacttcaaatatgtcctcaggccagatactgattgctagtagagagacacccggcacccagtccgaagccctccctcaaaggaccggcttatggcgttggtcactggcaggctcagagacattctactgtgggcgcagggagcccggccccccatgcagccatgactggatgcgcccccatctcgggggcttgctgcactgcttgtttattgaattttgctacttagaatggcaacattaactttgtgtaccattcattttttaaaaattttccaaagctcggcagtgtatgaaagaaaaaactgggaaagatacttggtttctgttaacttttgtgttgcttgcttaagtgattaaagccagtgcttggagccaagccttcatgccacgaacatgctccacagcctgccctttgctctcctgctcacactgaccaagaatgccgcgtgcttggcctactgaggtgaaaggacaattgaatgacaggtgggcaaagggagaacttccccttcttggtgcgaggaaagtcacaaatttaaaaatgttgcttccagcccagatcctaaatgctagttctcagcagctgcgtggcttaccgttcgccatttccaccaccgccagctgccagcaccgctacagatcacagagatgtgaacagacaatggaaagcactcttagccttgcagtggtctacattttttaggaaccaatatttcagcattctttattacccggcacgctgtgtcctttgcagagttcaagtttatgttactgccagggtcagacagtcatttgctgctgctgctgctgctgctgctgcttctcgaactggatgcattaggaagctgctgtctgagtgtaggaatgtcttgctaagaaagcaatgtcttccttcatccttttctttcttccctctgcgtgtccttgtttttgtgtaatgcgggagagggttagagctatagagattatatatacactatccgtgcacattatatatatgtagatatacccctatcatgtcagagatctgcatgtcagtttttcagcaactaaggtgcctcatgttctgagttcagcagatataggaaccaagccgccccctcctgcacttgatgctcccacctttgttgtgcctcacttaaaatggtgcttttttcagttgtctgtcttttcttatgtttttatttgtaaggtgctgtatataagttgaatatattatgcacatatcctacccaatgggtagaacaaaaagttgttaatactgtaatataatgtatagatgataccaattttaacagaaatggcatagaatttgtgaatgcctatgtgctttgtcctcttttgtaaggaaatttgcaaatggatgcatacagattaaagtctatgtagtttattttcctattaaatatcaatattataacacaagagaaagaagtgtgaacaaacaagcaacagtttatgaccagcgtatatatagcaatggaaagttgcatctttgctgtgaaaacactttaaagaaaatactttttaaaaaatcccacagctttttggttgccactagacgcttcttattttaatcattttagtaatgctcagctggaccagtgttagttatatttgagtcagaaaaatgttgtttttcaacttgctttataatctcctgcatctatctcctgctgtagcatcacgaaggtgtcaggcaacagtgaaaagtgcacatttttgttgttgcagaaactgtgtcagaggaataagtaaatcagcctgcagcagaagactttgttcagctccagaggcatctgtgaccgtctgtgtccaagtctctctgtgcctttttcttttacaaactgaagctgtggagccaatgaagtaacagtagagattgtagggaaagaatacctcaggaaaaacaaatacacttacaagaagaccctgttcttagaaaatgtgtttagttatgggttagcactagaagagacttggctgtcagccagccaagtgaaggacctctcatccattcccattcatgtcccatcataatacggacccaaaaagcaaactcggttttgccatcagttagaaattacgttttggattgtatattgttacatctctcttccagcttagtttttagtgtctgattgtgacctctgcatttatcttcaaataccctaattttaaaacaaaagaacaagaaaagtttataacaccatgttcactaaaaccacggttgaatcttgggtgtgggcatcctttcgagtgttgtccataagagcagttcgtggaattttgcccatctgacccatattatcagcttattctgccaccagagtagagtctaataaattccaaagtttttatttgctccatggtgtatgttctgactttgaaaatgtcagattctataatcatacccctaacatccaggaaacaaatgacagattatctttaaactgaaattgactctacaatgcaacccttaatgctgaatggattaaaaaagtcagcccttttagtatctgtttgaaagggccgtaaaaagttgacacttttgttgttgtggatcctgcgtgtctagacccacgtgttgtttccatcgtatactgtagggtgcaccccttgggattcatcattaagaactgaggctcactgttgtcagaaacaaagctcccaccccccaggttcaaccttgtgggagaactgttgagcatgagaatgttctagactcagaggtactaaaatttgttaccacatcattgcttcctttctacaggacgaattgaggcttaaactttactgttaatgatactggttcattttaatgtgcttgttggtatgttgctatttttcatttcatagctttcaaaaatcatgctaattgtatacttgtctagtttaaggctattttaaaatatgtacaatactattcacagcatttagttcgtttaatttttattataaagcaatctactaaaaaagtacaactgtatttgaacttttcaatagttgtttgtgagctatgataatcaaaagtcattaaagtcttttttaacaaacattcgtgcttacttttcaacataattcccagttatatacagaaaaagatttccacctgtcacgtatctgcctcttttacctgagcaatggtgtagttcttagacctaaggtctgtaattgcaatacttttaaagaaagatgttgctctaagtgctgtttgttagttatgaaatcagatttttctgcttgttcttaatgctgtggtcaaaccatagcacaaaatcattaaaaataatcagcggcatacaaaaatgtcgccttgggtttttgttttgtttttctttgtctttcagcaacaaggcacatgcatggggaaaatgctgtgtgttttaagacctgtctcaaagaaatacttcctgtggctccctagctaaacttcccactcagcttgtagtcactctgacttttcaaaaaaatcactacttcatattctactagaagcaattctggtcagatcatgattcgtttcccaatgctgggttctacacaggtcattcagacagtcatcaggtcccctcatgcaaggagtccccagagaaactgctcaccccacctgaggcgcccagggaggactttctagatgcctcaaa

SEQ ID NO: 12562 - DNA, 8907 bp, Homo sapiens
ggcagcagggccggtggccgctggagccgcactgcgggcagtccccgcctccgctccgggggggcggcccagcggttcaagctctacgttcgtgacatcaaacctcctgttgggccatttccgagaactcccatcagtttctgtatagtgtaaaagtttcagaggcggagcacagagagctgcggctgggacaaggagcacccgcgtgcaggtgcgaccctgcaggatgctggcagcggcgtggccaggggcgcccgtgttctgagggcctgagggccagcccctccacccgcgccatggcctccgcgccctggctggacggctgacgggagcagggaccgccgccgcccaggtgccacacccaggtaccgcccgcccgcgcgagagccgggcaggtgggccgcggatgctcccagaggccggcccagcagagcgatggacttggacaggctaagatggaagtgacctgagcctcgcccggcggcttcctcgacgggacagcgcaagagttggagcacaggcttgtccggggagcagtatgccggaagctggttttcaggccacaaatgctttcacagagtgcaaattcacctgcaccagtggtaaatgcttgtatcttggttcgctggtctgtaaccaacagaacgactgtggggacaacagtgacgaagagaactgtctcctggtgaccgagcacccgcctccgggcatcttcaactcggagctggagttcgcccaaatcatcatcatcgtcgtggtggtcacggtgatggtggtggtcatcgtctgcctgctgaaccactacaaagtctccacgcggtccttcatcaaccgcccgaaccagagccggaggcgggaggacgggctgccgcaggaagggtgcctgtggccttcagacagcgccgcaccgcggctgggcgcctcggagatcatgcatgccccgcggtccagggacaggttcacagcgccgtccttcatccagagggatcgcttcagccgcttccagcccacctacccctatgtgcagcacgagattgatcttcctcccaccatctccctgtccgacggtgaagagccacctccttaccaggggccctgcaccctgcagctccgggaccctgaacagcagatggaactcaaccgagagtccgtgagggccccacccaaccgaaccatatttgacagtgatttaatagacattgctatgtatagcgggggtccatgcccacccagcagcaactcgggcatcagtgcaagcacctgcagcagtaacgggaggatggaggggccaccccccacatacagcgaggtgatgggccaccacccaggcgcctctttcctccatcaccagcgcagcaacgcacacaggggcagcagactgcagtttcagcagaacaatgcagagagcacaatagtacccatcaaaggcaaagataggaagcctgggaacctggtctgattccttccaacgtgcacttcagctggagaaagaaaccaagaagggaagcggccgctgggcccctcctgcgcacagtgttgttcagtttcacatggtacaaataagtaaaaccaaatgagcaaacacggtctttgtttctgattccttttaggggaattgcatgcaaactagactgaaatgatacaaacttccatctggtctgaccgcaaacagtgtttatttggggacaggggttgggatgggggtgtgggcaggggaaaacagagaacgggatgctttgaagataccatgaaataaaacccacagaggtatttgatgtatttaattgtgaaaggagactttgcagataaatgaggccagaatggcatgttttataattaactgaataaagaaggaagcattattatatattattgtggggaagaaccagccagttcgctttttctcctaaggtgtggaacttttattttgttttaaaaatatgaatcaaaattcctgtgttgtgtgccaaggtataaagtggagaagttagatgagtgcaaggagctcctttgtgttgtgatgatgtgttttaaaagttgcactatcttaatgttgaaaatatttacaagggaactgttttacgtgaagttctgtatgttgtcttttcacctgtggattgtaatcaggcccaaggaatatcctggagtggtccccagaagcatccaagaaaagatatttggggacgtagcctaacattttaccaacttacgtaaatcaaaaaagtcattattgttgcaggagtttgcatcaaatagcagtgcatcgctgaagcttttggagacttttggatggaagataagatagggaagattaagttccagcatttctgacttgttattttgagttactctgctactcttaggctgcatagtttatgagaaaatgaacacatgcatttatggatccagtatcatgcagtgctgccctcatcctccagcagtgcaatttcttcagtaatttagatttttttcactatagcatgaaatatattcaaatacataccttattttatgcaataaattgtttaaaatgcaaggtggttattctgcatactgttgaaatatgtgactcctcagtatattcccattgcctctccccctttcctcgacagcttagttcagttctgcagggctgctcagttcacaggaggctcccagcagccaccccacatccagcctacacagaactttcgtgtgggagtggtgtgggtggtggttttcttatgctttggaagcccctagaaataatgacggaagaatgccatgttgctgatcgtggtaataagccattgtgggttattgtatgtcactagtattagcatagcattcttaaaggaatgcagtgttcaaaacctacccaaattccccgcaggattttaccaaacccttccccaggccagttttgtactgaaggcaagaactggacagtcagagaacagtggagggggcaagtgactgaagagcaccgggtaaaaagcacaacatgcagttaaaatgcaaactagaaaactaattttaaatattgttagttttaatatttcctgatatttacaaatattcattcttatatacaatgaaaaaaataactttcttctgcagatgtaagcactggcttttataagagcagcagccaacacgtttagcagacactgcgcgtggagaagggcttatctgcagtacactctgccatgtggagggtgggcctctgtggcctcttcacataacaagatgagctggaatgatgattccatgactcccacctatgcagccttaaagccaaatccgcgtgtgtgtgtttgtgtctgtctgtgggtctcgaaggtgatccgtcggtgcggtggctctgtgctgtaactggagagactgttccaaaccccaagagttgtctgatcctagtctgttcccttctgcttcttacctctgtagataggtcactggtttttgtttgtttgttttgaggattggaatttccattacattcatcctttgcacacagtaacatccacagaactagtccaactcttaaaaggagagaggaaaaacacaggcaccagttgtcagctcatgcttacaacctgtgtggaagtatatacagttgagagtcacagtggaggttctgagactggattcagtcttgttccagtgacagttggaaggcctctgctggagagacaccagctctcagggcagagattggcttggggccagaaggaccctccccaaccctggagacaccctgaaggttcactggctctccagattagcctctcttcctctgtcaggcaaagatgaggagcccgtgttcccatcgggccctgctggcagggacttgcagtggattcttggtcaggtgtgcccacagatgcggaggcgaggtgagtgattccatcatttcagttctcacctgcagttttggtgaagcaggagatgcaccccacagctctagctctcaaatggcttcacagtccttacttctctacctgcctcaagaaggggctcagagcagagacttgtgaattccttagtaactgtgagtatatgaatgtgttgcacatgtccacagtattggcgagataattacataattcagatacctttaatcatctttcaagaaagaggctcctcccattcaaccaccctagagaactgcctttgttaaatagttatttaaagactcatacatatcaaaccatgactttgaaaggtcttcgaggctggggctctgtaatgaattagtttaaaagccaaggtcataacatgaattgatggtcaatttcccttcagcagaaggaaaaggtgatttagatcagtagctcttttgaaggttgtggctgacctgttcataccgtgtcgcctcatggctagtgtggcgttgaaagagtagcgactgggaagatacaacttacacagtggggcctattgttctttcaagaaccctttttttagcttatagaacccatgggtccagtttagtaacgagtgatttaggcaatcaatgataggtttataatcttagattattccagcaaagtgtggattgcattgttaggaagaacatttggtgggaatgaacactcctgggcataccgctgacttttgtcccttgttcccggtgtaggagacccaaggcatcttgaatcccatctataagaacacaatcttccagcatacgtttgctttttcagaaactctagcattctctttaaatactgacgcaatccttaatggaaaagagatttcatgaagcaaattatgtatttcaatagttcttctatttttagtgtccaaaatttactaatacagaagcttgacaagcatgtcctcaccctccccaccacataaacacatggacacacacccaagccacaagaaatcccaagagagcagaagcgaatttttaaaagatttatcgtgaggactgcatttccattcactaattttggctcaaacttatgaggcaggaaataggggccaacagtaaatgggggaggcctcctgacaccagcagaggaattttgtacccaggcgaggacttcttgaacttctgcgtatctccgtttgatctctttcacctttatttcatcttcataagaatgagaaaggctcaaaaggaagcacttttagaaatcttctctgacctagaagaatccatccaaatccctgccttcctctctgaaccaacagttcccttctctgacagggggccatcctctatcttccatccagcggctcttccttttaggaaggctctggtgcagagcacttcaaatatgtcctcaggccagatactgattgctagtagagagacacccggcacccagtccgaagccctccctcaaaggaccggcttatggcgttggtcactggcaggctcagagacattctactgtgggcgcagggagcccggccccccatgcagccatgactggatgcgcccccatctcgggggcttgctgcactgcttgtttattgaattttgctacttagaatggcaacattaactttgtgtaccattcattttttaaaaattttccaaagctcggcagtgtatgaaagaaaaaactgggaaagatacttggtttctgttaacttttgtgttgcttgcttaagtgattaaagccagtgcttggagccaagccttcatgccacgaacatgctccacagcctgccctttgctctcctgctcacactgaccaagaatgccgcgtgcttggcctactgaggtgaaaggacaattgaatgacaggtgggcaaagggagaacttccccttcttggtgcgaggaaagtcacaaatttaaaaatgttgcttccagcccagatcctaaatgctagttctcagcagctgcgtggcttaccgttcgccatttccaccaccgccagctgccagcaccgctacagatcacagagatgtgaacagacaatggaaagcactcttagccttgcagtggtctacattttttaggaaccaatatttcagcattctttattacccggcacgctgtgtcctttgcagagttcaagtttatgttactgccagggtcagacagtcatttgctgctgctgctgctgctgctgctgcttctcgaactggatgcattaggaagctgctgtctgagtgtaggaatgtcttgctaagaaagcaatgtcttccttcatccttttctttcttccctctgcgtgtccttgtttttgtgtaatgcgggagagggttagagctatagagattatatatacactatccgtgcacattatatatatgtagatatacccctatcatgtcagagatctgcatgtcagtttttcagcaactaaggtgcctcatgttctgagttcagcagatataggaaccaagccgccccctcctgcacttgatgctcccacctttgttgtgcctcacttaaaatggtgcttttttcagttgtctgtcttttcttatgtttttatttgtaaggtgctgtatataagttgaatatattatgcacatatcctacccaatgggtagaacaaaaagttgttaatactgtaatataatgtatagatgataccaattttaacagaaatggcatagaatttgtgaatgcctatgtgctttgtcctcttttgtaaggaaatttgcaaatggatgcatacagattaaagtctatgtagtttattttcctattaaatatcaatattataacacaagagaaagaagtgtgaacaaacaagcaacagtttatgaccagcgtatatatagcaatggaaagttgcatctttgctgtgaaaacactttaaagaaaatactttttaaaaaatcccacagctttttggttgccactagacgcttcttattttaatcattttagtaatgctcagctggaccagtgttagttatatttgagtcagaaaaatgttgtttttcaacttgctttataatctcctgcatctatctcctgctgtagcatcacgaaggtgtcaggcaacagtgaaaagtgcacatttttgttgttgcagaaactgtgtcagaggaataagtaaatcagcctgcagcagaagactttgttcagctccagaggcatctgtgaccgtctgtgtccaagtctctctgtgcctttttcttttacaaactgaagctgtggagccaatgaagtaacagtagagattgtagggaaagaatacctcaggaaaaacaaatacacttacaagaagaccctgttcttagaaaatgtgtttagttatgggttagcactagaagagacttggctgtcagccagccaagtgaaggacctctcatccattcccattcatgtcccatcataatacggacccaaaaagcaaactcggttttgccatcagttagaaattacgttttggattgtatattgttacatctctcttccagcttagtttttagtgtctgattgtgacctctgcatttatcttcaaataccctaattttaaaacaaaagaacaagaaaagtttataacaccatgttcactaaaaccacggttgaatcttgggtgtgggcatcctttcgagtgttgtccataagagcagttcgtggaattttgcccatctgacccatattatcagcttattctgccaccagagtagagtctaataaattccaaagtttttatttgctccatggtgtatgttctgactttgaaaatgtcagattctataatcatacccctaacatccaggaaacaaatgacagattatctttaaactgaaattgactctacaatgcaacccttaatgctgaatggattaaaaaagtcagcccttttagtatctgtttgaaagggccgtaaaaagttgacacttttgttgttgtggatcctgcgtgtctagacccacgtgttgtttccatcgtatactgtagggtgcaccccttgggattcatcattaagaactgaggctcactgttgtcagaaacaaagctcccaccccccaggttcaaccttgtgggagaactgttgagcatgagaatgttctagactcagaggtactaaaatttgttaccacatcattgcttcctttctacaggacgaattgaggcttaaactttactgttaatgatactggttcattttaatgtgcttgttggtatgttgctatttttcatttcatagctttcaaaaatcatgctaattgtatacttgtctagtttaaggctattttaaaatatgtacaatactattcacagcatttagttcgtttaatttttattataaagcaatctactaaaaaagtacaactgtatttgaacttttcaatagttgtttgtgagctatgataatcaaaagtcattaaagtcttttttaacaaacattcgtgcttacttttcaacataattcccagttatatacagaaaaagatttccacctgtcacgtatctgcctcttttacctgagcaatggtgtagttcttagacctaaggtctgtaattgcaatacttttaaagaaagatgttgctctaagtgctgtttgttagttatgaaatcagatttttctgcttgttcttaatgctgtggtcaaaccatagcacaaaatcattaaaaataatcagcggcatacaaaaatgtcgccttgggtttttgttttgtttttctttgtctttcagcaacaaggcacatgcatggggaaaatgctgtgtgttttaagacctgtctcaaagaaatacttcctgtggctccctagctaaacttcccactcagcttgtagtcactctgacttttcaaaaaaatcactacttcatattctactagaagcaattctggtcagatcatgattcgtttcccaatgctgggttctacacaggtcattcagacagtcatcaggtcccctcatgcaaggagtccccagagaaactgctcaccccacctgaggcgcccagggaggactttctagatgcctcaaa

SEQ ID NO: 12563 - DNA, 8629 bp, Homo sapiens
ccgagccccggaggaagcaggcgtgtgttgaatttctctctgcccctcaccttggaataaacaggaagcgacaagcacccagcccggcccggcacttgcctttgtgaaggggtctgccctgcacagcctttaggaagcttcctcgggaccccttcccggtgcgccgccccgggtgggcctgggggcgcgccctcggttcaagctctacgttcgtgacatcaaacctcctgttgggccatttccgagaactcccatcagtttctgtatagtgtaaaagtttcagaggcggagcacagagagctgcggctgggacaaggagcacccgcgtgcaggtgcgaccctgcaggatgctggcagcggcgtggccaggggcgcccgtgttctgagggcctgagggccagcccctccacccgcgccatggcctccgcgccctggctggacggctgacgggagcagggaccgccgccgcccaggtgccacacccaggtaccgcccgcccgcgcgagagccgggcaggtgggccgcggatgctcccagaggccggcccagcagagcgatggacttggacaggctaagatggaagtgacctgagcctcgcccggcggcttcctcgacgggacagcgcaagagttggagcacaggcttgtccggggagcagtatgccggaagctggttttcaggccacaaatgctttcacagagtgcaaattcacctgcaccagtggtaaatgcttgtatcttggttcgctggtctgtaaccaacagaacgactgtggggacaacagtgacgaagagaactgtctcctggtgaccgagcacccgcctccgggcatcttcaactcggagctggagttcgcccaaatcatcatcatcgtcgtggtggtcacggtgatggtggtggtcatcgtctgcctgctgaaccactacaaagtctccacgcggtccttcatcaaccgcccgaaccagagccggaggcgggaggacgggctgccgcaggatcatgcatgccccgcggtccagggacaggttcacagcgccgtccttcatccagagggatcgcttcagccgcttccagcccacctacccctatgtgcagcacgagattgatcttcctcccaccatctccctgtccgacggtgaagagccacctccttaccaggggccctgcaccctgcagctccgggaccctgaacagcagatggaactcaaccgagagtccgtgagggccccacccaaccgaaccatatttgacagtgatttaatagacattgctatgtatagcgggggtccatgcccacccagcagcaactcgggcatcagtgcaagcacctgcagcagtaacgggaggatggaggggccaccccccacatacagcgaggtgatgggccaccacccaggcgcctctttcctccatcaccagcgcagcaacgcacacaggggcagcagactgcagtttcagcagaacaatgcagagagcacaatagtacccatcaaaggcaaagataggaagcctgggaacctggtctgattccttccaacgtgcacttcagctggagaaagaaaccaagaagggaagcggccgctgggcccctcctgcgcacagtgttgttcagtttcacatggtacaaataagtaaaaccaaatgagcaaacacggtctttgtttctgattccttttaggggaattgcatgcaaactagactgaaatgatacaaacttccatctggtctgaccgcaaacagtgtttatttggggacaggggttgggatgggggtgtgggcaggggaaaacagagaacgggatgctttgaagataccatgaaataaaacccacagaggtatttgatgtatttaattgtgaaaggagactttgcagataaatgaggccagaatggcatgttttataattaactgaataaagaaggaagcattattatatattattgtggggaagaaccagccagttcgctttttctcctaaggtgtggaacttttattttgttttaaaaatatgaatcaaaattcctgtgttgtgtgccaaggtataaagtggagaagttagatgagtgcaaggagctcctttgtgttgtgatgatgtgttttaaaagttgcactatcttaatgttgaaaatatttacaagggaactgttttacgtgaagttctgtatgttgtcttttcacctgtggattgtaatcaggcccaaggaatatcctggagtggtccccagaagcatccaagaaaagatatttggggacgtagcctaacattttaccaacttacgtaaatcaaaaaagtcattattgttgcaggagtttgcatcaaatagcagtgcatcgctgaagcttttggagacttttggatggaagataagatagggaagattaagttccagcatttctgacttgttattttgagttactctgctactcttaggctgcatagtttatgagaaaatgaacacatgcatttatggatccagtatcatgcagtgctgccctcatcctccagcagtgcaatttcttcagtaatttagatttttttcactatagcatgaaatatattcaaatacataccttattttatgcaataaattgtttaaaatgcaaggtggttattctgcatactgttgaaatatgtgactcctcagtatattcccattgcctctccccctttcctcgacagcttagttcagttctgcagggctgctcagttcacaggaggctcccagcagccaccccacatccagcctacacagaactttcgtgtgggagtggtgtgggtggtggttttcttatgctttggaagcccctagaaataatgacggaagaatgccatgttgctgatcgtggtaataagccattgtgggttattgtatgtcactagtattagcatagcattcttaaaggaatgcagtgttcaaaacctacccaaattccccgcaggattttaccaaacccttccccaggccagttttgtactgaaggcaagaactggacagtcagagaacagtggagggggcaagtgactgaagagcaccgggtaaaaagcacaacatgcagttaaaatgcaaactagaaaactaattttaaatattgttagttttaatatttcctgatatttacaaatattcattcttatatacaatgaaaaaaataactttcttctgcagatgtaagcactggcttttataagagcagcagccaacacgtttagcagacactgcgcgtggagaagggcttatctgcagtacactctgccatgtggagggtgggcctctgtggcctcttcacataacaagatgagctggaatgatgattccatgactcccacctatgcagccttaaagccaaatccgcgtgtgtgtgtttgtgtctgtctgtgggtctcgaaggtgatccgtcggtgcggtggctctgtgctgtaactggagagactgttccaaaccccaagagttgtctgatcctagtctgttcccttctgcttcttacctctgtagataggtcactggtttttgtttgtttgttttgaggattggaatttccattacattcatcctttgcacacagtaacatccacagaactagtccaactcttaaaaggagagaggaaaaacacaggcaccagttgtcagctcatgcttacaacctgtgtggaagtatatacagttgagagtcacagtggaggttctgagactggattcagtcttgttccagtgacagttggaaggcctctgctggagagacaccagctctcagggcagagattggcttggggccagaaggaccctccccaaccctggagacaccctgaaggttcactggctctccagattagcctctcttcctctgtcaggcaaagatgaggagcccgtgttcccatcgggccctgctggcagggacttgcagtggattcttggtcaggtgtgcccacagatgcggaggcgaggtgagtgattccatcatttcagttctcacctgcagttttggtgaagcaggagatgcaccccacagctctagctctcaaatggcttcacagtccttacttctctacctgcctcaagaaggggctcagagcagagacttgtgaattccttagtaactgtgagtatatgaatgtgttgcacatgtccacagtattggcgagataattacataattcagatacctttaatcatctttcaagaaagaggctcctcccattcaaccaccctagagaactgcctttgttaaatagttatttaaagactcatacatatcaaaccatgactttgaaaggtcttcgaggctggggctctgtaatgaattagtttaaaagccaaggtcataacatgaattgatggtcaatttcccttcagcagaaggaaaaggtgatttagatcagtagctcttttgaaggttgtggctgacctgttcataccgtgtcgcctcatggctagtgtggcgttgaaagagtagcgactgggaagatacaacttacacagtggggcctattgttctttcaagaaccctttttttagcttatagaacccatgggtccagtttagtaacgagtgatttaggcaatcaatgataggtttataatcttagattattccagcaaagtgtggattgcattgttaggaagaacatttggtgggaatgaacactcctgggcataccgctgacttttgtcccttgttcccggtgtaggagacccaaggcatcttgaatcccatctataagaacacaatcttccagcatacgtttgctttttcagaaactctagcattctctttaaatactgacgcaatccttaatggaaaagagatttcatgaagcaaattatgtatttcaatagttcttctatttttagtgtccaaaatttactaatacagaagcttgacaagcatgtcctcaccctccccaccacataaacacatggacacacacccaagccacaagaaatcccaagagagcagaagcgaatttttaaaagatttatcgtgaggactgcatttccattcactaattttggctcaaacttatgaggcaggaaataggggccaacagtaaatgggggaggcctcctgacaccagcagaggaattttgtacccaggcgaggacttcttgaacttctgcgtatctccgtttgatctctttcacctttatttcatcttcataagaatgagaaaggctcaaaaggaagcacttttagaaatcttctctgacctagaagaatccatccaaatccctgccttcctctctgaaccaacagttcccttctctgacagggggccatcctctatcttccatccagcggctcttccttttaggaaggctctggtgcagagcacttcaaatatgtcctcaggccagatactgattgctagtagagagacacccggcacccagtccgaagccctccctcaaaggaccggcttatggcgttggtcactggcaggctcagagacattctactgtgggcgcagggagcccggccccccatgcagccatgactggatgcgcccccatctcgggggcttgctgcactgcttgtttattgaattttgctacttagaatggcaacattaactttgtgtaccattcattttttaaaaattttccaaagctcggcagtgtatgaaagaaaaaactgggaaagatacttggtttctgttaacttttgtgttgcttgcttaagtgattaaagccagtgcttggagccaagccttcatgccacgaacatgctccacagcctgccctttgctctcctgctcacactgaccaagaatgccgcgtgcttggcctactgaggtgaaaggacaattgaatgacaggtgggcaaagggagaacttccccttcttggtgcgaggaaagtcacaaatttaaaaatgttgcttccagcccagatcctaaatgctagttctcagcagctgcgtggcttaccgttcgccatttccaccaccgccagctgccagcaccgctacagatcacagagatgtgaacagacaatggaaagcactcttagccttgcagtggtctacattttttaggaaccaatatttcagcattctttattacccggcacgctgtgtcctttgcagagttcaagtttatgttactgccagggtcagacagtcatttgctgctgctgctgctgctgctgctgcttctcgaactggatgcattaggaagctgctgtctgagtgtaggaatgtcttgctaagaaagcaatgtcttccttcatccttttctttcttccctctgcgtgtccttgtttttgtgtaatgcgggagagggttagagctatagagattatatatacactatccgtgcacattatatatatgtagatatacccctatcatgtcagagatctgcatgtcagtttttcagcaactaaggtgcctcatgttctgagttcagcagatataggaaccaagccgccccctcctgcacttgatgctcccacctttgttgtgcctcacttaaaatggtgcttttttcagttgtctgtcttttcttatgtttttatttgtaaggtgctgtatataagttgaatatattatgcacatatcctacccaatgggtagaacaaaaagttgttaatactgtaatataatgtatagatgataccaattttaacagaaatggcatagaatttgtgaatgcctatgtgctttgtcctcttttgtaaggaaatttgcaaatggatgcatacagattaaagtctatgtagtttattttcctattaaatatcaatattataacacaagagaaagaagtgtgaacaaacaagcaacagtttatgaccagcgtatatatagcaatggaaagttgcatctttgctgtgaaaacactttaaagaaaatactttttaaaaaatcccacagctttttggttgccactagacgcttcttattttaatcattttagtaatgctcagctggaccagtgttagttatatttgagtcagaaaaatgttgtttttcaacttgctttataatctcctgcatctatctcctgctgtagcatcacgaaggtgtcaggcaacagtgaaaagtgcacatttttgttgttgcagaaactgtgtcagaggaataagtaaatcagcctgcagcagaagactttgttcagctccagaggcatctgtgaccgtctgtgtccaagtctctctgtgcctttttcttttacaaactgaagctgtggagccaatgaagtaacagtagagattgtagggaaagaatacctcaggaaaaacaaatacacttacaagaagaccctgttcttagaaaatgtgtttagttatgggttagcactagaagagacttggctgtcagccagccaagtgaaggacctctcatccattcccattcatgtcccatcataatacggacccaaaaagcaaactcggttttgccatcagttagaaattacgttttggattgtatattgttacatctctcttccagcttagtttttagtgtctgattgtgacctctgcatttatcttcaaataccctaattttaaaacaaaagaacaagaaaagtttataacaccatgttcactaaaaccacggttgaatcttgggtgtgggcatcctttcgagtgttgtccataagagcagttcgtggaattttgcccatctgacccatattatcagcttattctgccaccagagtagagtctaataaattccaaagtttttatttgctccatggtgtatgttctgactttgaaaatgtcagattctataatcatacccctaacatccaggaaacaaatgacagattatctttaaactgaaattgactctacaatgcaacccttaatgctgaatggattaaaaaagtcagcccttttagtatctgtttgaaagggccgtaaaaagttgacacttttgttgttgtggatcctgcgtgtctagacccacgtgttgtttccatcgtatactgtagggtgcaccccttgggattcatcattaagaactgaggctcactgttgtcagaaacaaagctcccaccccccaggttcaaccttgtgggagaactgttgagcatgagaatgttctagactcagaggtactaaaatttgttaccacatcattgcttcctttctacaggacgaattgaggcttaaactttactgttaatgatactggttcattttaatgtgcttgttggtatgttgctatttttcatttcatagctttcaaaaatcatgctaattgtatacttgtctagtttaaggctattttaaaatatgtacaatactattcacagcatttagttcgtttaatttttattataaagcaatctactaaaaaagtacaactgtatttgaacttttcaatagttgtttgtgagctatgataatcaaaagtcattaaagtcttttttaacaaacattcgtgcttacttttcaacataattcccagttatatacagaaaaagatttccacctgtcacgtatctgcctcttttacctgagcaatggtgtagttcttagacctaaggtctgtaattgcaatacttttaaagaaagatgttgctctaagtgctgtttgttagttatgaaatcagatttttctgcttgttcttaatgctgtggtcaaaccatagcacaaaatcattaaaaataatcagcggca

SEQ ID NO: 12564 - DNA, 8903 bp, Homo sapiens
actggacgtccgcgagcctgcgccgtcggctggtgccggagtggttatgctgggcgccgagcgcgatgcggttcaagctctacgttcgtgacatcaaacctcctgttgggccatttccgagaactcccatcagtttctgtatagtgtaaaagtttcagaggcggagcacagagagctgcggctgggacaaggagcacccgcgtgcaggtgcgaccctgcaggatgctggcagcggcgtggccaggggcgcccgtgttctgagggcctgagggccagcccctccacccgcgccatggcctccgcgccctggctggacggctgacgggagcagggaccgccgccgcccaggtgccacacccaggtaccgcccgcccgcgcgagagccgggcaggtgggccgcggatgctcccagaggccggcccagcagagcgatggacttggacaggctaagatggaagtgacctgagcctcgcccggcggcttcctcgacgggacagcgcaagagttggagcacaggcttgtccggggagcagtatgccggaagctggttttcaggccacaaatgctttcacagagtgcaaattcacctgcaccagtggtaaatgcttgtatcttggttcgctggtctgtaaccaacagaacgactgtggggacaacagtgacgaagagaactgtctcctggtgaccgagcacccgcctccgggcatcttcaactcggagctggagttcgcccaaatcatcatcatcgtcgtggtggtcacggtgatggtggtggtcatcgtctgcctgctgaaccactacaaagtctccacgcggtccttcatcaaccgcccgaaccagagccggaggcgggaggacgggctgccgcaggaagggtgcctgtggccttcagacagcgccgcaccgcggctgggcgcctcggagatcatgcatgccccgcggtccagggacaggttcacagcgccgtccttcatccagagggatcgcttcagccgcttccagcccacctacccctatgtgcagcacgagattgatcttcctcccaccatctccctgtccgacggtgaagagccacctccttaccaggggccctgcaccctgcagctccgggaccctgaacagcagatggaactcaaccgagagtccgtgagggccccacccaaccgaaccatatttgacagtgatttaatagacattgctatgtatagcgggggtccatgcccacccagcagcaactcgggcatcagtgcaagcacctgcagcagtaacgggaggatggaggggccaccccccacatacagcgaggtgatgggccaccacccaggcgcctctttcctccatcaccagcgcagcaacgcacacaggggcagcagactgcagtttcagcagaacaatgcagagagcacaatagtacccatcaaaggcaaagataggaagcctgggaacctggtctgattccttccaacgtgcacttcagctggagaaagaaaccaagaagggaagcggccgctgggcccctcctgcgcacagtgttgttcagtttcacatggtacaaataagtaaaaccaaatgagcaaacacggtctttgtttctgattccttttaggggaattgcatgcaaactagactgaaatgatacaaacttccatctggtctgaccgcaaacagtgtttatttggggacaggggttgggatgggggtgtgggcaggggaaaacagagaacgggatgctttgaagataccatgaaataaaacccacagaggtatttgatgtatttaattgtgaaaggagactttgcagataaatgaggccagaatggcatgttttataattaactgaataaagaaggaagcattattatatattattgtggggaagaaccagccagttcgctttttctcctaaggtgtggaacttttattttgttttaaaaatatgaatcaaaattcctgtgttgtgtgccaaggtataaagtggagaagttagatgagtgcaaggagctcctttgtgttgtgatgatgtgttttaaaagttgcactatcttaatgttgaaaatatttacaagggaactgttttacgtgaagttctgtatgttgtcttttcacctgtggattgtaatcaggcccaaggaatatcctggagtggtccccagaagcatccaagaaaagatatttggggacgtagcctaacattttaccaacttacgtaaatcaaaaaagtcattattgttgcaggagtttgcatcaaatagcagtgcatcgctgaagcttttggagacttttggatggaagataagatagggaagattaagttccagcatttctgacttgttattttgagttactctgctactcttaggctgcatagtttatgagaaaatgaacacatgcatttatggatccagtatcatgcagtgctgccctcatcctccagcagtgcaatttcttcagtaatttagatttttttcactatagcatgaaatatattcaaatacataccttattttatgcaataaattgtttaaaatgcaaggtggttattctgcatactgttgaaatatgtgactcctcagtatattcccattgcctctccccctttcctcgacagcttagttcagttctgcagggctgctcagttcacaggaggctcccagcagccaccccacatccagcctacacagaactttcgtgtgggagtggtgtgggtggtggttttcttatgctttggaagcccctagaaataatgacggaagaatgccatgttgctgatcgtggtaataagccattgtgggttattgtatgtcactagtattagcatagcattcttaaaggaatgcagtgttcaaaacctacccaaattccccgcaggattttaccaaacccttccccaggccagttttgtactgaaggcaagaactggacagtcagagaacagtggagggggcaagtgactgaagagcaccgggtaaaaagcacaacatgcagttaaaatgcaaactagaaaactaattttaaatattgttagttttaatatttcctgatatttacaaatattcattcttatatacaatgaaaaaaataactttcttctgcagatgtaagcactggcttttataagagcagcagccaacacgtttagcagacactgcgcgtggagaagggcttatctgcagtacactctgccatgtggagggtgggcctctgtggcctcttcacataacaagatgagctggaatgatgattccatgactcccacctatgcagccttaaagccaaatccgcgtgtgtgtgtttgtgtctgtctgtgggtctcgaaggtgatccgtcggtgcggtggctctgtgctgtaactggagagactgttccaaaccccaagagttgtctgatcctagtctgttcccttctgcttcttacctctgtagataggtcactggtttttgtttgtttgttttgaggattggaatttccattacattcatcctttgcacacagtaacatccacagaactagtccaactcttaaaaggagagaggaaaaacacaggcaccagttgtcagctcatgcttacaacctgtgtggaagtatatacagttgagagtcacagtggaggttctgagactggattcagtcttgttccagtgacagttggaaggcctctgctggagagacaccagctctcagggcagagattggcttggggccagaaggaccctccccaaccctggagacaccctgaaggttcactggctctccagattagcctctcttcctctgtcaggcaaagatgaggagcccgtgttcccatcgggccctgctggcagggacttgcagtggattcttggtcaggtgtgcccacagatgcggaggcgaggtgagtgattccatcatttcagttctcacctgcagttttggtgaagcaggagatgcaccccacagctctagctctcaaatggcttcacagtccttacttctctacctgcctcaagaaggggctcagagcagagacttgtgaattccttagtaactgtgagtatatgaatgtgttgcacatgtccacagtattggcgagataattacataattcagatacctttaatcatctttcaagaaagaggctcctcccattcaaccaccctagagaactgcctttgttaaatagttatttaaagactcatacatatcaaaccatgactttgaaaggtcttcgaggctggggctctgtaatgaattagtttaaaagccaaggtcataacatgaattgatggtcaatttcccttcagcagaaggaaaaggtgatttagatcagtagctcttttgaaggttgtggctgacctgttcataccgtgtcgcctcatggctagtgtggcgttgaaagagtagcgactgggaagatacaacttacacagtggggcctattgttctttcaagaaccctttttttagcttatagaacccatgggtccagtttagtaacgagtgatttaggcaatcaatgataggtttataatcttagattattccagcaaagtgtggattgcattgttaggaagaacatttggtgggaatgaacactcctgggcataccgctgacttttgtcccttgttcccggtgtaggagacccaaggcatcttgaatcccatctataagaacacaatcttccagcatacgtttgctttttcagaaactctagcattctctttaaatactgacgcaatccttaatggaaaagagatttcatgaagcaaattatgtatttcaatagttcttctatttttagtgtccaaaatttactaatacagaagcttgacaagcatgtcctcaccctccccaccacataaacacatggacacacacccaagccacaagaaatcccaagagagcagaagcgaatttttaaaagatttatcgtgaggactgcatttccattcactaattttggctcaaacttatgaggcaggaaataggggccaacagtaaatgggggaggcctcctgacaccagcagaggaattttgtacccaggcgaggacttcttgaacttctgcgtatctccgtttgatctctttcacctttatttcatcttcataagaatgagaaaggctcaaaaggaagcacttttagaaatcttctctgacctagaagaatccatccaaatccctgccttcctctctgaaccaacagttcccttctctgacagggggccatcctctatcttccatccagcggctcttccttttaggaaggctctggtgcagagcacttcaaatatgtcctcaggccagatactgattgctagtagagagacacccggcacccagtccgaagccctccctcaaaggaccggcttatggcgttggtcactggcaggctcagagacattctactgtgggcgcagggagcccggccccccatgcagccatgactggatgcgcccccatctcgggggcttgctgcactgcttgtttattgaattttgctacttagaatggcaacattaactttgtgtaccattcattttttaaaaattttccaaagctcggcagtgtatgaaagaaaaaactgggaaagatacttggtttctgttaacttttgtgttgcttgcttaagtgattaaagccagtgcttggagccaagccttcatgccacgaacatgctccacagcctgccctttgctctcctgctcacactgaccaagaatgccgcgtgcttggcctactgaggtgaaaggacaattgaatgacaggtgggcaaagggagaacttccccttcttggtgcgaggaaagtcacaaatttaaaaatgttgcttccagcccagatcctaaatgctagttctcagcagctgcgtggcttaccgttcgccatttccaccaccgccagctgccagcaccgctacagatcacagagatgtgaacagacaatggaaagcactcttagccttgcagtggtctacattttttaggaaccaatatttcagcattctttattacccggcacgctgtgtcctttgcagagttcaagtttatgttactgccagggtcagacagtcatttgctgctgctgctgctgctgctgctgcttctcgaactggatgcattaggaagctgctgtctgagtgtaggaatgtcttgctaagaaagcaatgtcttccttcatccttttctttcttccctctgcgtgtccttgtttttgtgtaatgcgggagagggttagagctatagagattatatatacactatccgtgcacattatatatatgtagatatacccctatcatgtcagagatctgcatgtcagtttttcagcaactaaggtgcctcatgttctgagttcagcagatataggaaccaagccgccccctcctgcacttgatgctcccacctttgttgtgcctcacttaaaatggtgcttttttcagttgtctgtcttttcttatgtttttatttgtaaggtgctgtatataagttgaatatattatgcacatatcctacccaatgggtagaacaaaaagttgttaatactgtaatataatgtatagatgataccaattttaacagaaatggcatagaatttgtgaatgcctatgtgctttgtcctcttttgtaaggaaatttgcaaatggatgcatacagattaaagtctatgtagtttattttcctattaaatatcaatattataacacaagagaaagaagtgtgaacaaacaagcaacagtttatgaccagcgtatatatagcaatggaaagttgcatctttgctgtgaaaacactttaaagaaaatactttttaaaaaatcccacagctttttggttgccactagacgcttcttattttaatcattttagtaatgctcagctggaccagtgttagttatatttgagtcagaaaaatgttgtttttcaacttgctttataatctcctgcatctatctcctgctgtagcatcacgaaggtgtcaggcaacagtgaaaagtgcacatttttgttgttgcagaaactgtgtcagaggaataagtaaatcagcctgcagcagaagactttgttcagctccagaggcatctgtgaccgtctgtgtccaagtctctctgtgcctttttcttttacaaactgaagctgtggagccaatgaagtaacagtagagattgtagggaaagaatacctcaggaaaaacaaatacacttacaagaagaccctgttcttagaaaatgtgtttagttatgggttagcactagaagagacttggctgtcagccagccaagtgaaggacctctcatccattcccattcatgtcccatcataatacggacccaaaaagcaaactcggttttgccatcagttagaaattacgttttggattgtatattgttacatctctcttccagcttagtttttagtgtctgattgtgacctctgcatttatcttcaaataccctaattttaaaacaaaagaacaagaaaagtttataacaccatgttcactaaaaccacggttgaatcttgggtgtgggcatcctttcgagtgttgtccataagagcagttcgtggaattttgcccatctgacccatattatcagcttattctgccaccagagtagagtctaataaattccaaagtttttatttgctccatggtgtatgttctgactttgaaaatgtcagattctataatcatacccctaacatccaggaaacaaatgacagattatctttaaactgaaattgactctacaatgcaacccttaatgctgaatggattaaaaaagtcagcccttttagtatctgtttgaaagggccgtaaaaagttgacacttttgttgttgtggatcctgcgtgtctagacccacgtgttgtttccatcgtatactgtagggtgcaccccttgggattcatcattaagaactgaggctcactgttgtcagaaacaaagctcccaccccccaggttcaaccttgtgggagaactgttgagcatgagaatgttctagactcagaggtactaaaatttgttaccacatcattgcttcctttctacaggacgaattgaggcttaaactttactgttaatgatactggttcattttaatgtgcttgttggtatgttgctatttttcatttcatagctttcaaaaatcatgctaattgtatacttgtctagtttaaggctattttaaaatatgtacaatactattcacagcatttagttcgtttaatttttattataaagcaatctactaaaaaagtacaactgtatttgaacttttcaatagttgtttgtgagctatgataatcaaaagtcattaaagtcttttttaacaaacattcgtgcttacttttcaacataattcccagttatatacagaaaaagatttccacctgtcacgtatctgcctcttttacctgagcaatggtgtagttcttagacctaaggtctgtaattgcaatacttttaaagaaagatgttgctctaagtgctgtttgttagttatgaaatcagatttttctgcttgttcttaatgctgtggtcaaaccatagcacaaaatcattaaaaataatcagcggcatacaaaaatgtcgccttgggtttttgttttgtttttctttgtctttcagcaacaaggcacatgcatggggaaaatgctgtgtgttttaagacctgtctcaaagaaatacttcctgtggctccctagctaaacttcccactcagcttgtagtcactctgacttttcaaaaaaatcactacttcatattctactagaagcaattctggtcagatcatgattcgtttcccaatgctgggttctacacaggtcattcagacagtcatcaggtcccctcatgcaaggagtccccagagaaactgctcaccccacctgaggcgcccagggaggactttctagatgcctcaaa

SEQ ID NO: 12565 - DNA, 8903 bp, Homo sapiens
cggccgcagcgccgcgtcccctctctccccgcgctgaggctgcggaccgggcccggcgggattagcagcggttcaagctctacgttcgtgacatcaaacctcctgttgggccatttccgagaactcccatcagtttctgtatagtgtaaaagtttcagaggcggagcacagagagctgcggctgggacaaggagcacccgcgtgcaggtgcgaccctgcaggatgctggcagcggcgtggccaggggcgcccgtgttctgagggcctgagggccagcccctccacccgcgccatggcctccgcgccctggctggacggctgacgggagcagggaccgccgccgcccaggtgccacacccaggtaccgcccgcccgcgcgagagccgggcaggtgggccgcggatgctcccagaggccggcccagcagagcgatggacttggacaggctaagatggaagtgacctgagcctcgcccggcggcttcctcgacgggacagcgcaagagttggagcacaggcttgtccggggagcagtatgccggaagctggttttcaggccacaaatgctttcacagagtgcaaattcacctgcaccagtggtaaatgcttgtatcttggttcgctggtctgtaaccaacagaacgactgtggggacaacagtgacgaagagaactgtctcctggtgaccgagcacccgcctccgggcatcttcaactcggagctggagttcgcccaaatcatcatcatcgtcgtggtggtcacggtgatggtggtggtcatcgtctgcctgctgaaccactacaaagtctccacgcggtccttcatcaaccgcccgaaccagagccggaggcgggaggacgggctgccgcaggaagggtgcctgtggccttcagacagcgccgcaccgcggctgggcgcctcggagatcatgcatgccccgcggtccagggacaggttcacagcgccgtccttcatccagagggatcgcttcagccgcttccagcccacctacccctatgtgcagcacgagattgatcttcctcccaccatctccctgtccgacggtgaagagccacctccttaccaggggccctgcaccctgcagctccgggaccctgaacagcagatggaactcaaccgagagtccgtgagggccccacccaaccgaaccatatttgacagtgatttaatagacattgctatgtatagcgggggtccatgcccacccagcagcaactcgggcatcagtgcaagcacctgcagcagtaacgggaggatggaggggccaccccccacatacagcgaggtgatgggccaccacccaggcgcctctttcctccatcaccagcgcagcaacgcacacaggggcagcagactgcagtttcagcagaacaatgcagagagcacaatagtacccatcaaaggcaaagataggaagcctgggaacctggtctgattccttccaacgtgcacttcagctggagaaagaaaccaagaagggaagcggccgctgggcccctcctgcgcacagtgttgttcagtttcacatggtacaaataagtaaaaccaaatgagcaaacacggtctttgtttctgattccttttaggggaattgcatgcaaactagactgaaatgatacaaacttccatctggtctgaccgcaaacagtgtttatttggggacaggggttgggatgggggtgtgggcaggggaaaacagagaacgggatgctttgaagataccatgaaataaaacccacagaggtatttgatgtatttaattgtgaaaggagactttgcagataaatgaggccagaatggcatgttttataattaactgaataaagaaggaagcattattatatattattgtggggaagaaccagccagttcgctttttctcctaaggtgtggaacttttattttgttttaaaaatatgaatcaaaattcctgtgttgtgtgccaaggtataaagtggagaagttagatgagtgcaaggagctcctttgtgttgtgatgatgtgttttaaaagttgcactatcttaatgttgaaaatatttacaagggaactgttttacgtgaagttctgtatgttgtcttttcacctgtggattgtaatcaggcccaaggaatatcctggagtggtccccagaagcatccaagaaaagatatttggggacgtagcctaacattttaccaacttacgtaaatcaaaaaagtcattattgttgcaggagtttgcatcaaatagcagtgcatcgctgaagcttttggagacttttggatggaagataagatagggaagattaagttccagcatttctgacttgttattttgagttactctgctactcttaggctgcatagtttatgagaaaatgaacacatgcatttatggatccagtatcatgcagtgctgccctcatcctccagcagtgcaatttcttcagtaatttagatttttttcactatagcatgaaatatattcaaatacataccttattttatgcaataaattgtttaaaatgcaaggtggttattctgcatactgttgaaatatgtgactcctcagtatattcccattgcctctccccctttcctcgacagcttagttcagttctgcagggctgctcagttcacaggaggctcccagcagccaccccacatccagcctacacagaactttcgtgtgggagtggtgtgggtggtggttttcttatgctttggaagcccctagaaataatgacggaagaatgccatgttgctgatcgtggtaataagccattgtgggttattgtatgtcactagtattagcatagcattcttaaaggaatgcagtgttcaaaacctacccaaattccccgcaggattttaccaaacccttccccaggccagttttgtactgaaggcaagaactggacagtcagagaacagtggagggggcaagtgactgaagagcaccgggtaaaaagcacaacatgcagttaaaatgcaaactagaaaactaattttaaatattgttagttttaatatttcctgatatttacaaatattcattcttatatacaatgaaaaaaataactttcttctgcagatgtaagcactggcttttataagagcagcagccaacacgtttagcagacactgcgcgtggagaagggcttatctgcagtacactctgccatgtggagggtgggcctctgtggcctcttcacataacaagatgagctggaatgatgattccatgactcccacctatgcagccttaaagccaaatccgcgtgtgtgtgtttgtgtctgtctgtgggtctcgaaggtgatccgtcggtgcggtggctctgtgctgtaactggagagactgttccaaaccccaagagttgtctgatcctagtctgttcccttctgcttcttacctctgtagataggtcactggtttttgtttgtttgttttgaggattggaatttccattacattcatcctttgcacacagtaacatccacagaactagtccaactcttaaaaggagagaggaaaaacacaggcaccagttgtcagctcatgcttacaacctgtgtggaagtatatacagttgagagtcacagtggaggttctgagactggattcagtcttgttccagtgacagttggaaggcctctgctggagagacaccagctctcagggcagagattggcttggggccagaaggaccctccccaaccctggagacaccctgaaggttcactggctctccagattagcctctcttcctctgtcaggcaaagatgaggagcccgtgttcccatcgggccctgctggcagggacttgcagtggattcttggtcaggtgtgcccacagatgcggaggcgaggtgagtgattccatcatttcagttctcacctgcagttttggtgaagcaggagatgcaccccacagctctagctctcaaatggcttcacagtccttacttctctacctgcctcaagaaggggctcagagcagagacttgtgaattccttagtaactgtgagtatatgaatgtgttgcacatgtccacagtattggcgagataattacataattcagatacctttaatcatctttcaagaaagaggctcctcccattcaaccaccctagagaactgcctttgttaaatagttatttaaagactcatacatatcaaaccatgactttgaaaggtcttcgaggctggggctctgtaatgaattagtttaaaagccaaggtcataacatgaattgatggtcaatttcccttcagcagaaggaaaaggtgatttagatcagtagctcttttgaaggttgtggctgacctgttcataccgtgtcgcctcatggctagtgtggcgttgaaagagtagcgactgggaagatacaacttacacagtggggcctattgttctttcaagaaccctttttttagcttatagaacccatgggtccagtttagtaacgagtgatttaggcaatcaatgataggtttataatcttagattattccagcaaagtgtggattgcattgttaggaagaacatttggtgggaatgaacactcctgggcataccgctgacttttgtcccttgttcccggtgtaggagacccaaggcatcttgaatcccatctataagaacacaatcttccagcatacgtttgctttttcagaaactctagcattctctttaaatactgacgcaatccttaatggaaaagagatttcatgaagcaaattatgtatttcaatagttcttctatttttagtgtccaaaatttactaatacagaagcttgacaagcatgtcctcaccctccccaccacataaacacatggacacacacccaagccacaagaaatcccaagagagcagaagcgaatttttaaaagatttatcgtgaggactgcatttccattcactaattttggctcaaacttatgaggcaggaaataggggccaacagtaaatgggggaggcctcctgacaccagcagaggaattttgtacccaggcgaggacttcttgaacttctgcgtatctccgtttgatctctttcacctttatttcatcttcataagaatgagaaaggctcaaaaggaagcacttttagaaatcttctctgacctagaagaatccatccaaatccctgccttcctctctgaaccaacagttcccttctctgacagggggccatcctctatcttccatccagcggctcttccttttaggaaggctctggtgcagagcacttcaaatatgtcctcaggccagatactgattgctagtagagagacacccggcacccagtccgaagccctccctcaaaggaccggcttatggcgttggtcactggcaggctcagagacattctactgtgggcgcagggagcccggccccccatgcagccatgactggatgcgcccccatctcgggggcttgctgcactgcttgtttattgaattttgctacttagaatggcaacattaactttgtgtaccattcattttttaaaaattttccaaagctcggcagtgtatgaaagaaaaaactgggaaagatacttggtttctgttaacttttgtgttgcttgcttaagtgattaaagccagtgcttggagccaagccttcatgccacgaacatgctccacagcctgccctttgctctcctgctcacactgaccaagaatgccgcgtgcttggcctactgaggtgaaaggacaattgaatgacaggtgggcaaagggagaacttccccttcttggtgcgaggaaagtcacaaatttaaaaatgttgcttccagcccagatcctaaatgctagttctcagcagctgcgtggcttaccgttcgccatttccaccaccgccagctgccagcaccgctacagatcacagagatgtgaacagacaatggaaagcactcttagccttgcagtggtctacattttttaggaaccaatatttcagcattctttattacccggcacgctgtgtcctttgcagagttcaagtttatgttactgccagggtcagacagtcatttgctgctgctgctgctgctgctgctgcttctcgaactggatgcattaggaagctgctgtctgagtgtaggaatgtcttgctaagaaagcaatgtcttccttcatccttttctttcttccctctgcgtgtccttgtttttgtgtaatgcgggagagggttagagctatagagattatatatacactatccgtgcacattatatatatgtagatatacccctatcatgtcagagatctgcatgtcagtttttcagcaactaaggtgcctcatgttctgagttcagcagatataggaaccaagccgccccctcctgcacttgatgctcccacctttgttgtgcctcacttaaaatggtgcttttttcagttgtctgtcttttcttatgtttttatttgtaaggtgctgtatataagttgaatatattatgcacatatcctacccaatgggtagaacaaaaagttgttaatactgtaatataatgtatagatgataccaattttaacagaaatggcatagaatttgtgaatgcctatgtgctttgtcctcttttgtaaggaaatttgcaaatggatgcatacagattaaagtctatgtagtttattttcctattaaatatcaatattataacacaagagaaagaagtgtgaacaaacaagcaacagtttatgaccagcgtatatatagcaatggaaagttgcatctttgctgtgaaaacactttaaagaaaatactttttaaaaaatcccacagctttttggttgccactagacgcttcttattttaatcattttagtaatgctcagctggaccagtgttagttatatttgagtcagaaaaatgttgtttttcaacttgctttataatctcctgcatctatctcctgctgtagcatcacgaaggtgtcaggcaacagtgaaaagtgcacatttttgttgttgcagaaactgtgtcagaggaataagtaaatcagcctgcagcagaagactttgttcagctccagaggcatctgtgaccgtctgtgtccaagtctctctgtgcctttttcttttacaaactgaagctgtggagccaatgaagtaacagtagagattgtagggaaagaatacctcaggaaaaacaaatacacttacaagaagaccctgttcttagaaaatgtgtttagttatgggttagcactagaagagacttggctgtcagccagccaagtgaaggacctctcatccattcccattcatgtcccatcataatacggacccaaaaagcaaactcggttttgccatcagttagaaattacgttttggattgtatattgttacatctctcttccagcttagtttttagtgtctgattgtgacctctgcatttatcttcaaataccctaattttaaaacaaaagaacaagaaaagtttataacaccatgttcactaaaaccacggttgaatcttgggtgtgggcatcctttcgagtgttgtccataagagcagttcgtggaattttgcccatctgacccatattatcagcttattctgccaccagagtagagtctaataaattccaaagtttttatttgctccatggtgtatgttctgactttgaaaatgtcagattctataatcatacccctaacatccaggaaacaaatgacagattatctttaaactgaaattgactctacaatgcaacccttaatgctgaatggattaaaaaagtcagcccttttagtatctgtttgaaagggccgtaaaaagttgacacttttgttgttgtggatcctgcgtgtctagacccacgtgttgtttccatcgtatactgtagggtgcaccccttgggattcatcattaagaactgaggctcactgttgtcagaaacaaagctcccaccccccaggttcaaccttgtgggagaactgttgagcatgagaatgttctagactcagaggtactaaaatttgttaccacatcattgcttcctttctacaggacgaattgaggcttaaactttactgttaatgatactggttcattttaatgtgcttgttggtatgttgctatttttcatttcatagctttcaaaaatcatgctaattgtatacttgtctagtttaaggctattttaaaatatgtacaatactattcacagcatttagttcgtttaatttttattataaagcaatctactaaaaaagtacaactgtatttgaacttttcaatagttgtttgtgagctatgataatcaaaagtcattaaagtcttttttaacaaacattcgtgcttacttttcaacataattcccagttatatacagaaaaagatttccacctgtcacgtatctgcctcttttacctgagcaatggtgtagttcttagacctaaggtctgtaattgcaatacttttaaagaaagatgttgctctaagtgctgtttgttagttatgaaatcagatttttctgcttgttcttaatgctgtggtcaaaccatagcacaaaatcattaaaaataatcagcggcatacaaaaatgtcgccttgggtttttgttttgtttttctttgtctttcagcaacaaggcacatgcatggggaaaatgctgtgtgttttaagacctgtctcaaagaaatacttcctgtggctccctagctaaacttcccactcagcttgtagtcactctgacttttcaaaaaaatcactacttcatattctactagaagcaattctggtcagatcatgattcgtttcccaatgctgggttctacacaggtcattcagacagtcatcaggtcccctcatgcaaggagtccccagagaaactgctcaccccacctgaggcgcccagggaggactttctagatgcctcaaa

SEQ ID NO: 12566 - DNA, 8779 bp, Homo sapiens
acgccttgccagtacagagctcggtggcaagagccgctgggagctgctcccatcagttagaggatgtggagagggagcaccagaagaggacagcccgcagcctggctcgcagcctgagggacgctgtgggtgctcccagccgggcgagcacgctctgggagcggatctgcaggggagaagcacgcgagcctaacgtgagcgtcccgcctgtcgcgtgtcctgccttggtaagcgccctctccggtccttccacactgaaagcttccagcagagatcaagggaaggagtattgtgtgagacttgcagatttcctcctttctgtctggactggtttgatatttgcctgttgaaaagattactgaacgcagtgtgacaagatgagccgtctagctgcgttctgcttgcctgtgtgtgtgacacgtccaggtgtgaggccaaacctgagaagtgcagactgctcactgatagacgttgctgtaaacagtagtgccctgggtgtacagctggtctcaggatcggagaccccggacttattctctgctcggtgacacggccggcttcctgccgcagagctcctggtttctgttgatggcagttgataattggtagccacagtctgcggtcggagccacagcatttgagtctagcacctggggtgggccctgctgatacagtagagagagagtgaacgaggcagacagaaacacaccccccccccctccacgctcacacactctcccacaccccatgccagctataactgcagctctgagctgcctggagaggagattgccggaagctgaagggatgctttgaacgtgggggggctgcgtcacagttggactcccacttgcagaggacctgattatgtccagtgaccacctgaacaacagcacactgaaggaggctcagttcaaagacctgttcttaaaaaaagcggagctggagttcgcccaaatcatcatcatcgtcgtggtggtcacggtgatggtggtggtcatcgtctgcctgctgaaccactacaaagtctccacgcggtccttcatcaaccgcccgaaccagagccggaggcgggaggacgggctgccgcaggaagggtgcctgtggccttcagacagcgccgcaccgcggctgggcgcctcggagatcatgcatgccccgcggtccagggacaggttcacagcgccgtccttcatccagagggatcgcttcagccgcttccagcccacctacccctatgtgcagcacgagattgatcttcctcccaccatctccctgtccgacggtgaagagccacctccttaccaggggccctgcaccctgcagctccgggaccctgaacagcagatggaactcaaccgagagtccgtgagggccccacccaaccgaaccatatttgacagtgatttaatagacattgctatgtatagcgggggtccatgcccacccagcagcaactcgggcatcagtgcaagcacctgcagcagtaacgggaggatggaggggccaccccccacatacagcgaggtgatgggccaccacccaggcgcctctttcctccatcaccagcgcagcaacgcacacaggggcagcagactgcagtttcagcagaacaatgcagagagcacaatagtacccatcaaaggcaaagataggaagcctgggaacctggtctgattccttccaacgtgcacttcagctggagaaagaaaccaagaagggaagcggccgctgggcccctcctgcgcacagtgttgttcagtttcacatggtacaaataagtaaaaccaaatgagcaaacacggtctttgtttctgattccttttaggggaattgcatgcaaactagactgaaatgatacaaacttccatctggtctgaccgcaaacagtgtttatttggggacaggggttgggatgggggtgtgggcaggggaaaacagagaacgggatgctttgaagataccatgaaataaaacccacagaggtatttgatgtatttaattgtgaaaggagactttgcagataaatgaggccagaatggcatgttttataattaactgaataaagaaggaagcattattatatattattgtggggaagaaccagccagttcgctttttctcctaaggtgtggaacttttattttgttttaaaaatatgaatcaaaattcctgtgttgtgtgccaaggtataaagtggagaagttagatgagtgcaaggagctcctttgtgttgtgatgatgtgttttaaaagttgcactatcttaatgttgaaaatatttacaagggaactgttttacgtgaagttctgtatgttgtcttttcacctgtggattgtaatcaggcccaaggaatatcctggagtggtccccagaagcatccaagaaaagatatttggggacgtagcctaacattttaccaacttacgtaaatcaaaaaagtcattattgttgcaggagtttgcatcaaatagcagtgcatcgctgaagcttttggagacttttggatggaagataagatagggaagattaagttccagcatttctgacttgttattttgagttactctgctactcttaggctgcatagtttatgagaaaatgaacacatgcatttatggatccagtatcatgcagtgctgccctcatcctccagcagtgcaatttcttcagtaatttagatttttttcactatagcatgaaatatattcaaatacataccttattttatgcaataaattgtttaaaatgcaaggtggttattctgcatactgttgaaatatgtgactcctcagtatattcccattgcctctccccctttcctcgacagcttagttcagttctgcagggctgctcagttcacaggaggctcccagcagccaccccacatccagcctacacagaactttcgtgtgggagtggtgtgggtggtggttttcttatgctttggaagcccctagaaataatgacggaagaatgccatgttgctgatcgtggtaataagccattgtgggttattgtatgtcactagtattagcatagcattcttaaaggaatgcagtgttcaaaacctacccaaattccccgcaggattttaccaaacccttccccaggccagttttgtactgaaggcaagaactggacagtcagagaacagtggagggggcaagtgactgaagagcaccgggtaaaaagcacaacatgcagttaaaatgcaaactagaaaactaattttaaatattgttagttttaatatttcctgatatttacaaatattcattcttatatacaatgaaaaaaataactttcttctgcagatgtaagcactggcttttataagagcagcagccaacacgtttagcagacactgcgcgtggagaagggcttatctgcagtacactctgccatgtggagggtgggcctctgtggcctcttcacataacaagatgagctggaatgatgattccatgactcccacctatgcagccttaaagccaaatccgcgtgtgtgtgtttgtgtctgtctgtgggtctcgaaggtgatccgtcggtgcggtggctctgtgctgtaactggagagactgttccaaaccccaagagttgtctgatcctagtctgttcccttctgcttcttacctctgtagataggtcactggtttttgtttgtttgttttgaggattggaatttccattacattcatcctttgcacacagtaacatccacagaactagtccaactcttaaaaggagagaggaaaaacacaggcaccagttgtcagctcatgcttacaacctgtgtggaagtatatacagttgagagtcacagtggaggttctgagactggattcagtcttgttccagtgacagttggaaggcctctgctggagagacaccagctctcagggcagagattggcttggggccagaaggaccctccccaaccctggagacaccctgaaggttcactggctctccagattagcctctcttcctctgtcaggcaaagatgaggagcccgtgttcccatcgggccctgctggcagggacttgcagtggattcttggtcaggtgtgcccacagatgcggaggcgaggtgagtgattccatcatttcagttctcacctgcagttttggtgaagcaggagatgcaccccacagctctagctctcaaatggcttcacagtccttacttctctacctgcctcaagaaggggctcagagcagagacttgtgaattccttagtaactgtgagtatatgaatgtgttgcacatgtccacagtattggcgagataattacataattcagatacctttaatcatctttcaagaaagaggctcctcccattcaaccaccctagagaactgcctttgttaaatagttatttaaagactcatacatatcaaaccatgactttgaaaggtcttcgaggctggggctctgtaatgaattagtttaaaagccaaggtcataacatgaattgatggtcaatttcccttcagcagaaggaaaaggtgatttagatcagtagctcttttgaaggttgtggctgacctgttcataccgtgtcgcctcatggctagtgtggcgttgaaagagtagcgactgggaagatacaacttacacagtggggcctattgttctttcaagaaccctttttttagcttatagaacccatgggtccagtttagtaacgagtgatttaggcaatcaatgataggtttataatcttagattattccagcaaagtgtggattgcattgttaggaagaacatttggtgggaatgaacactcctgggcataccgctgacttttgtcccttgttcccggtgtaggagacccaaggcatcttgaatcccatctataagaacacaatcttccagcatacgtttgctttttcagaaactctagcattctctttaaatactgacgcaatccttaatggaaaagagatttcatgaagcaaattatgtatttcaatagttcttctatttttagtgtccaaaatttactaatacagaagcttgacaagcatgtcctcaccctccccaccacataaacacatggacacacacccaagccacaagaaatcccaagagagcagaagcgaatttttaaaagatttatcgtgaggactgcatttccattcactaattttggctcaaacttatgaggcaggaaataggggccaacagtaaatgggggaggcctcctgacaccagcagaggaattttgtacccaggcgaggacttcttgaacttctgcgtatctccgtttgatctctttcacctttatttcatcttcataagaatgagaaaggctcaaaaggaagcacttttagaaatcttctctgacctagaagaatccatccaaatccctgccttcctctctgaaccaacagttcccttctctgacagggggccatcctctatcttccatccagcggctcttccttttaggaaggctctggtgcagagcacttcaaatatgtcctcaggccagatactgattgctagtagagagacacccggcacccagtccgaagccctccctcaaaggaccggcttatggcgttggtcactggcaggctcagagacattctactgtgggcgcagggagcccggccccccatgcagccatgactggatgcgcccccatctcgggggcttgctgcactgcttgtttattgaattttgctacttagaatggcaacattaactttgtgtaccattcattttttaaaaattttccaaagctcggcagtgtatgaaagaaaaaactgggaaagatacttggtttctgttaacttttgtgttgcttgcttaagtgattaaagccagtgcttggagccaagccttcatgccacgaacatgctccacagcctgccctttgctctcctgctcacactgaccaagaatgccgcgtgcttggcctactgaggtgaaaggacaattgaatgacaggtgggcaaagggagaacttccccttcttggtgcgaggaaagtcacaaatttaaaaatgttgcttccagcccagatcctaaatgctagttctcagcagctgcgtggcttaccgttcgccatttccaccaccgccagctgccagcaccgctacagatcacagagatgtgaacagacaatggaaagcactcttagccttgcagtggtctacattttttaggaaccaatatttcagcattctttattacccggcacgctgtgtcctttgcagagttcaagtttatgttactgccagggtcagacagtcatttgctgctgctgctgctgctgctgctgcttctcgaactggatgcattaggaagctgctgtctgagtgtaggaatgtcttgctaagaaagcaatgtcttccttcatccttttctttcttccctctgcgtgtccttgtttttgtgtaatgcgggagagggttagagctatagagattatatatacactatccgtgcacattatatatatgtagatatacccctatcatgtcagagatctgcatgtcagtttttcagcaactaaggtgcctcatgttctgagttcagcagatataggaaccaagccgccccctcctgcacttgatgctcccacctttgttgtgcctcacttaaaatggtgcttttttcagttgtctgtcttttcttatgtttttatttgtaaggtgctgtatataagttgaatatattatgcacatatcctacccaatgggtagaacaaaaagttgttaatactgtaatataatgtatagatgataccaattttaacagaaatggcatagaatttgtgaatgcctatgtgctttgtcctcttttgtaaggaaatttgcaaatggatgcatacagattaaagtctatgtagtttattttcctattaaatatcaatattataacacaagagaaagaagtgtgaacaaacaagcaacagtttatgaccagcgtatatatagcaatggaaagttgcatctttgctgtgaaaacactttaaagaaaatactttttaaaaaatcccacagctttttggttgccactagacgcttcttattttaatcattttagtaatgctcagctggaccagtgttagttatatttgagtcagaaaaatgttgtttttcaacttgctttataatctcctgcatctatctcctgctgtagcatcacgaaggtgtcaggcaacagtgaaaagtgcacatttttgttgttgcagaaactgtgtcagaggaataagtaaatcagcctgcagcagaagactttgttcagctccagaggcatctgtgaccgtctgtgtccaagtctctctgtgcctttttcttttacaaactgaagctgtggagccaatgaagtaacagtagagattgtagggaaagaatacctcaggaaaaacaaatacacttacaagaagaccctgttcttagaaaatgtgtttagttatgggttagcactagaagagacttggctgtcagccagccaagtgaaggacctctcatccattcccattcatgtcccatcataatacggacccaaaaagcaaactcggttttgccatcagttagaaattacgttttggattgtatattgttacatctctcttccagcttagtttttagtgtctgattgtgacctctgcatttatcttcaaataccctaattttaaaacaaaagaacaagaaaagtttataacaccatgttcactaaaaccacggttgaatcttgggtgtgggcatcctttcgagtgttgtccataagagcagttcgtggaattttgcccatctgacccatattatcagcttattctgccaccagagtagagtctaataaattccaaagtttttatttgctccatggtgtatgttctgactttgaaaatgtcagattctataatcatacccctaacatccaggaaacaaatgacagattatctttaaactgaaattgactctacaatgcaacccttaatgctgaatggattaaaaaagtcagcccttttagtatctgtttgaaagggccgtaaaaagttgacacttttgttgttgtggatcctgcgtgtctagacccacgtgttgtttccatcgtatactgtagggtgcaccccttgggattcatcattaagaactgaggctcactgttgtcagaaacaaagctcccaccccccaggttcaaccttgtgggagaactgttgagcatgagaatgttctagactcagaggtactaaaatttgttaccacatcattgcttcctttctacaggacgaattgaggcttaaactttactgttaatgatactggttcattttaatgtgcttgttggtatgttgctatttttcatttcatagctttcaaaaatcatgctaattgtatacttgtctagtttaaggctattttaaaatatgtacaatactattcacagcatttagttcgtttaatttttattataaagcaatctactaaaaaagtacaactgtatttgaacttttcaatagttgtttgtgagctatgataatcaaaagtcattaaagtcttttttaacaaacattcgtgcttacttttcaacataattcccagttatatacagaaaaagatttccacctgtcacgtatctgcctcttttacctgagcaatggtgtagttcttagacctaaggtctgtaattgcaatacttttaaagaaagatgttgctctaagtgctgtttgttagttatgaaatcagatttttctgcttgttcttaatgctgtggtcaaaccatagcacaaaatcattaaaaataatcagcggca

SEQ ID NO: 12567 - DNA, 8726 bp, Homo sapiens
acgccttgccagtacagagctcggtggcaagagccgctgggagctgctcccatcagttagaggatgtggagagggagcaccagaagaggacagcccgcagcctggctcgcagcctgagggacgctgtgggtgctcccagccgggcgagcacgctctgggagcggatctgcaggggagaagcacgcgagcctaacgtgagcgtcccgcctgtcgcgtgtcctgccttggtaagcgccctctccggtccttccacactgaaagcttccagcagagatcaagggaaggagtattgtgtgagacttgcagatttcctcctttctgtctggactggtttgatatttgcctgttgaaaagattactgaacgcagtgtgacaagatgagccgtctagctgcgttctgcttgcctgtgtgtgtgacacgtccaggtgtgaggccaaacctgagaagtgcagactgctcactgatagacgttgctgtaaacagtagtgccctgggtgtacagctggtctcaggatcggagaccccggacttattctctgctcggtgacacggccggcttcctgccgcagagctcctggtttctgttgatggcagttgataattggtagccacagtctgcggtcggagccacagcatttgagtctagcacctggggtgggccctgctgatacagtagagagagagtgaacgaggcagacagaaacacaccccccccccctccacgctcacacactctcccacaccccatgccagctataactgcagctctgagctgcctggagaggagattgccggaagctgaagggatgctttgaacgtgggggggctgcgtcacagttggactcccacttgcagaggacctgattatgtccagtgaccacctgaacaacagcacactgaaggaggctcagttcaaagacctgttcttaaaaaaagcggagctggagttcgcccaaatcatcatcatcgtcgtggtggtcacggtgatggtggtggtcatcgtctgcctgctgaaccactacaaagtctccacgcggtccttcatcaaccgcccgaaccagagccggaggcgggaggacgggctgccgcaggatcatgcatgccccgcggtccagggacaggttcacagcgccgtccttcatccagagggatcgcttcagccgcttccagcccacctacccctatgtgcagcacgagattgatcttcctcccaccatctccctgtccgacggtgaagagccacctccttaccaggggccctgcaccctgcagctccgggaccctgaacagcagatggaactcaaccgagagtccgtgagggccccacccaaccgaaccatatttgacagtgatttaatagacattgctatgtatagcgggggtccatgcccacccagcagcaactcgggcatcagtgcaagcacctgcagcagtaacgggaggatggaggggccaccccccacatacagcgaggtgatgggccaccacccaggcgcctctttcctccatcaccagcgcagcaacgcacacaggggcagcagactgcagtttcagcagaacaatgcagagagcacaatagtacccatcaaaggcaaagataggaagcctgggaacctggtctgattccttccaacgtgcacttcagctggagaaagaaaccaagaagggaagcggccgctgggcccctcctgcgcacagtgttgttcagtttcacatggtacaaataagtaaaaccaaatgagcaaacacggtctttgtttctgattccttttaggggaattgcatgcaaactagactgaaatgatacaaacttccatctggtctgaccgcaaacagtgtttatttggggacaggggttgggatgggggtgtgggcaggggaaaacagagaacgggatgctttgaagataccatgaaataaaacccacagaggtatttgatgtatttaattgtgaaaggagactttgcagataaatgaggccagaatggcatgttttataattaactgaataaagaaggaagcattattatatattattgtggggaagaaccagccagttcgctttttctcctaaggtgtggaacttttattttgttttaaaaatatgaatcaaaattcctgtgttgtgtgccaaggtataaagtggagaagttagatgagtgcaaggagctcctttgtgttgtgatgatgtgttttaaaagttgcactatcttaatgttgaaaatatttacaagggaactgttttacgtgaagttctgtatgttgtcttttcacctgtggattgtaatcaggcccaaggaatatcctggagtggtccccagaagcatccaagaaaagatatttggggacgtagcctaacattttaccaacttacgtaaatcaaaaaagtcattattgttgcaggagtttgcatcaaatagcagtgcatcgctgaagcttttggagacttttggatggaagataagatagggaagattaagttccagcatttctgacttgttattttgagttactctgctactcttaggctgcatagtttatgagaaaatgaacacatgcatttatggatccagtatcatgcagtgctgccctcatcctccagcagtgcaatttcttcagtaatttagatttttttcactatagcatgaaatatattcaaatacataccttattttatgcaataaattgtttaaaatgcaaggtggttattctgcatactgttgaaatatgtgactcctcagtatattcccattgcctctccccctttcctcgacagcttagttcagttctgcagggctgctcagttcacaggaggctcccagcagccaccccacatccagcctacacagaactttcgtgtgggagtggtgtgggtggtggttttcttatgctttggaagcccctagaaataatgacggaagaatgccatgttgctgatcgtggtaataagccattgtgggttattgtatgtcactagtattagcatagcattcttaaaggaatgcagtgttcaaaacctacccaaattccccgcaggattttaccaaacccttccccaggccagttttgtactgaaggcaagaactggacagtcagagaacagtggagggggcaagtgactgaagagcaccgggtaaaaagcacaacatgcagttaaaatgcaaactagaaaactaattttaaatattgttagttttaatatttcctgatatttacaaatattcattcttatatacaatgaaaaaaataactttcttctgcagatgtaagcactggcttttataagagcagcagccaacacgtttagcagacactgcgcgtggagaagggcttatctgcagtacactctgccatgtggagggtgggcctctgtggcctcttcacataacaagatgagctggaatgatgattccatgactcccacctatgcagccttaaagccaaatccgcgtgtgtgtgtttgtgtctgtctgtgggtctcgaaggtgatccgtcggtgcggtggctctgtgctgtaactggagagactgttccaaaccccaagagttgtctgatcctagtctgttcccttctgcttcttacctctgtagataggtcactggtttttgtttgtttgttttgaggattggaatttccattacattcatcctttgcacacagtaacatccacagaactagtccaactcttaaaaggagagaggaaaaacacaggcaccagttgtcagctcatgcttacaacctgtgtggaagtatatacagttgagagtcacagtggaggttctgagactggattcagtcttgttccagtgacagttggaaggcctctgctggagagacaccagctctcagggcagagattggcttggggccagaaggaccctccccaaccctggagacaccctgaaggttcactggctctccagattagcctctcttcctctgtcaggcaaagatgaggagcccgtgttcccatcgggccctgctggcagggacttgcagtggattcttggtcaggtgtgcccacagatgcggaggcgaggtgagtgattccatcatttcagttctcacctgcagttttggtgaagcaggagatgcaccccacagctctagctctcaaatggcttcacagtccttacttctctacctgcctcaagaaggggctcagagcagagacttgtgaattccttagtaactgtgagtatatgaatgtgttgcacatgtccacagtattggcgagataattacataattcagatacctttaatcatctttcaagaaagaggctcctcccattcaaccaccctagagaactgcctttgttaaatagttatttaaagactcatacatatcaaaccatgactttgaaaggtcttcgaggctggggctctgtaatgaattagtttaaaagccaaggtcataacatgaattgatggtcaatttcccttcagcagaaggaaaaggtgatttagatcagtagctcttttgaaggttgtggctgacctgttcataccgtgtcgcctcatggctagtgtggcgttgaaagagtagcgactgggaagatacaacttacacagtggggcctattgttctttcaagaaccctttttttagcttatagaacccatgggtccagtttagtaacgagtgatttaggcaatcaatgataggtttataatcttagattattccagcaaagtgtggattgcattgttaggaagaacatttggtgggaatgaacactcctgggcataccgctgacttttgtcccttgttcccggtgtaggagacccaaggcatcttgaatcccatctataagaacacaatcttccagcatacgtttgctttttcagaaactctagcattctctttaaatactgacgcaatccttaatggaaaagagatttcatgaagcaaattatgtatttcaatagttcttctatttttagtgtccaaaatttactaatacagaagcttgacaagcatgtcctcaccctccccaccacataaacacatggacacacacccaagccacaagaaatcccaagagagcagaagcgaatttttaaaagatttatcgtgaggactgcatttccattcactaattttggctcaaacttatgaggcaggaaataggggccaacagtaaatgggggaggcctcctgacaccagcagaggaattttgtacccaggcgaggacttcttgaacttctgcgtatctccgtttgatctctttcacctttatttcatcttcataagaatgagaaaggctcaaaaggaagcacttttagaaatcttctctgacctagaagaatccatccaaatccctgccttcctctctgaaccaacagttcccttctctgacagggggccatcctctatcttccatccagcggctcttccttttaggaaggctctggtgcagagcacttcaaatatgtcctcaggccagatactgattgctagtagagagacacccggcacccagtccgaagccctccctcaaaggaccggcttatggcgttggtcactggcaggctcagagacattctactgtgggcgcagggagcccggccccccatgcagccatgactggatgcgcccccatctcgggggcttgctgcactgcttgtttattgaattttgctacttagaatggcaacattaactttgtgtaccattcattttttaaaaattttccaaagctcggcagtgtatgaaagaaaaaactgggaaagatacttggtttctgttaacttttgtgttgcttgcttaagtgattaaagccagtgcttggagccaagccttcatgccacgaacatgctccacagcctgccctttgctctcctgctcacactgaccaagaatgccgcgtgcttggcctactgaggtgaaaggacaattgaatgacaggtgggcaaagggagaacttccccttcttggtgcgaggaaagtcacaaatttaaaaatgttgcttccagcccagatcctaaatgctagttctcagcagctgcgtggcttaccgttcgccatttccaccaccgccagctgccagcaccgctacagatcacagagatgtgaacagacaatggaaagcactcttagccttgcagtggtctacattttttaggaaccaatatttcagcattctttattacccggcacgctgtgtcctttgcagagttcaagtttatgttactgccagggtcagacagtcatttgctgctgctgctgctgctgctgctgcttctcgaactggatgcattaggaagctgctgtctgagtgtaggaatgtcttgctaagaaagcaatgtcttccttcatccttttctttcttccctctgcgtgtccttgtttttgtgtaatgcgggagagggttagagctatagagattatatatacactatccgtgcacattatatatatgtagatatacccctatcatgtcagagatctgcatgtcagtttttcagcaactaaggtgcctcatgttctgagttcagcagatataggaaccaagccgccccctcctgcacttgatgctcccacctttgttgtgcctcacttaaaatggtgcttttttcagttgtctgtcttttcttatgtttttatttgtaaggtgctgtatataagttgaatatattatgcacatatcctacccaatgggtagaacaaaaagttgttaatactgtaatataatgtatagatgataccaattttaacagaaatggcatagaatttgtgaatgcctatgtgctttgtcctcttttgtaaggaaatttgcaaatggatgcatacagattaaagtctatgtagtttattttcctattaaatatcaatattataacacaagagaaagaagtgtgaacaaacaagcaacagtttatgaccagcgtatatatagcaatggaaagttgcatctttgctgtgaaaacactttaaagaaaatactttttaaaaaatcccacagctttttggttgccactagacgcttcttattttaatcattttagtaatgctcagctggaccagtgttagttatatttgagtcagaaaaatgttgtttttcaacttgctttataatctcctgcatctatctcctgctgtagcatcacgaaggtgtcaggcaacagtgaaaagtgcacatttttgttgttgcagaaactgtgtcagaggaataagtaaatcagcctgcagcagaagactttgttcagctccagaggcatctgtgaccgtctgtgtccaagtctctctgtgcctttttcttttacaaactgaagctgtggagccaatgaagtaacagtagagattgtagggaaagaatacctcaggaaaaacaaatacacttacaagaagaccctgttcttagaaaatgtgtttagttatgggttagcactagaagagacttggctgtcagccagccaagtgaaggacctctcatccattcccattcatgtcccatcataatacggacccaaaaagcaaactcggttttgccatcagttagaaattacgttttggattgtatattgttacatctctcttccagcttagtttttagtgtctgattgtgacctctgcatttatcttcaaataccctaattttaaaacaaaagaacaagaaaagtttataacaccatgttcactaaaaccacggttgaatcttgggtgtgggcatcctttcgagtgttgtccataagagcagttcgtggaattttgcccatctgacccatattatcagcttattctgccaccagagtagagtctaataaattccaaagtttttatttgctccatggtgtatgttctgactttgaaaatgtcagattctataatcatacccctaacatccaggaaacaaatgacagattatctttaaactgaaattgactctacaatgcaacccttaatgctgaatggattaaaaaagtcagcccttttagtatctgtttgaaagggccgtaaaaagttgacacttttgttgttgtggatcctgcgtgtctagacccacgtgttgtttccatcgtatactgtagggtgcaccccttgggattcatcattaagaactgaggctcactgttgtcagaaacaaagctcccaccccccaggttcaaccttgtgggagaactgttgagcatgagaatgttctagactcagaggtactaaaatttgttaccacatcattgcttcctttctacaggacgaattgaggcttaaactttactgttaatgatactggttcattttaatgtgcttgttggtatgttgctatttttcatttcatagctttcaaaaatcatgctaattgtatacttgtctagtttaaggctattttaaaatatgtacaatactattcacagcatttagttcgtttaatttttattataaagcaatctactaaaaaagtacaactgtatttgaacttttcaatagttgtttgtgagctatgataatcaaaagtcattaaagtcttttttaacaaacattcgtgcttacttttcaacataattcccagttatatacagaaaaagatttccacctgtcacgtatctgcctcttttacctgagcaatggtgtagttcttagacctaaggtctgtaattgcaatacttttaaagaaagatgttgctctaagtgctgtttgttagttatgaaatcagatttttctgcttgttcttaatgctgtggtcaaaccatagcacaaaatcattaaaaataatcagcggca

SEQ ID NO: 12568 - DNA, 8556 bp, Homo sapiens
acgccttgccagtacagagctcggtggcaagagccgctgggagctgctcccatcagttagaggatgtggagagggagcaccagaagaggacagcccgcagcctggctcgcagcctgagggacgctgtgggtgctcccagccgggcgagcacgctctgggagcggatctgcaggggagaagcacgcgagcctaacgtgagcgtcccgcctgtcgcgtgtcctgccttggtaagcgccctctccggtccttccacactgaaagcttccagcagagatcaagggaaggagtattgtgtgagacttgcagatttcctcctttctgtctggactggtttgatatttgcctgttgaaaagattactgaacgcagtgtgacaagatgagccgtctagctgcgttctgcttgcctgtgtgtgtgacacgtccaggtgtgaggccaaacctgagaagtgcagactgctcactgatagacgttgctgtaaacagtagtgccctgggtgtacagctggtctcaggatcggagaccccggacttattctctgctcggtgacacggccggcttcctgccgcagagctcctggtttctgttgatggcagttgataattggtagccacagtctgcggtcggagccacagcatttgagtctagcacctggggtgggccctgctgatacagtagagagagagtgaacgaggcagacagaaacacaccccccccccctccacgctcacacactctcccacaccccatgccagctataactgcagctctgagctgcctggagaggagattgccggaagctgaagggatgctttgaacgtgggggggctgcgtcacagttggactcccacttgcagaggacctgattatgtccagtgaccacctgaacaacagcacactgaaggaggctcagttcaaagacctgttcttaaaaaaagcggagctggagttcgcccaaatcatcatcatcgtcgtggtggtcacggtgatggtggtggtcatcgtctgcctgctgaaccactacaaagtctccacgcggtccttcatcaaccgcccgaaccagagccggaggcgggaggacgggctgccgcaggaagggtgcctgtggccttcagacagcgccgcaccgcggctgggcgcctcggagatcatgcatgccccgcggtccagggacaggttcacagcgccgtccttcatccagagggatcgcttcagccgcttccagcccacctacccctatgtgcagcacgagattgatcttcctcccaccatctccctgtccgacggtgaagagccacctccttaccaggggccctgcaccctgcagctccgggaccctgaacagcagatggaactcaaccgagagtccgtgagggccccacccaaccgaaccatatttgacagtgatttaatagacattgctatgtatagcgggggtccatgcccacccagcagcaactcgggcatcagtgcaagcacctgcagcagtaacgggaggatggaggggccaccccccacatacagcgaggtgatgggccaccacccaggcgcctctttcctccatcaccagcgcagcaacgcacacaggggcagcagactgcagtttcagcagaacaatgcagagagcacaatagtacccatcaaaggcaaagataggaagcctgggaacctggtctgattccttccaacgtgcacttcagctggagaaagaaaccaagaagggaagcggccgctgggcccctcctgcgcacagtgttgttcagtttcacatggtacaaataagtaaaaccaaatgagcaaacacggtctttgtttctgattccttttaggggaattgcatgcaaactagactgaaatgatacaaacttccatctggtctgaccgcaaacagtgtttatttggggacaggggttgggatgggggtgtgggcaggggaaaacagagaacgggatgctttgaagataccatgaaataaaacccacagaggtatttgatgtatttaattgtgaaaggagactttgcagataaatgaggccagaatggcatgttttataattaactgaataaagaaggaagcattattatatattattgtggggaagaaccagccagttcgctttttctcctaaggtgtggaacttttattttgttttaaaaatatgaatcaaaattcctgtgttgtgtgccaaggtataaagtggagaagttagatgagtgcaaggagctcctttgtgttgtgatgatgtgttttaaaagttgcactatcttaatgttgaaaatatttacaagggaactgttttacgtgaagttctgtatgttgtcttttcacctgtggattgtaatcaggcccaaggaatatcctggagtggtccccagaagcatccaagaaaagatatttggggacgtagcctaacattttaccaacttacgtaaatcaaaaaagtcattattgttgcaggagtttgcatcaaatagcagtgcatcgctgaagcttttggagacttttggatggaagataagatagggaagattaagttccagcatttctgacttgttattttgagttactctgctactcttaggctgcatagtttatgagaaaatgaacacatgcatttatggatccagtatcatgcagtgctgccctcatcctccagcagtgcaatttcttcagtaatttagatttttttcactatagcatgaaatatattcaaatacataccttattttatgcaataaattgtttaaaatgcaaggtggttattctgcatactgttgaaatatgtgactcctcagtatattcccattgcctctccccctttcctcgacagcttagttcagttctgcagggctgctcagttcacaggaggctcccagcagccaccccacatccagcctacacagaactttcgtgtgggagtggtgtgggtggtggttttcttatgctttggaagcccctagaaataatgacggaagaatgccatgttgctgatcgtggtaataagccattgtgggttattgtatgtcactagtattagcatagcattcttaaaggaatgcagtgttcaaaacctacccaaattccccgcaggattttaccaaacccttccccaggccagttttgtactgaaggcaagaactggacagtcagagaacagtggagggggcaagtgactgaagagcaccgggtaaaaagcacaacatgcagttaaaatgcaaactagaaaactaattttaaatattgttagttttaatatttcctgatatttacaaatattcattcttatatacaatgaaaaaaataactttcttctgcagatgtaagcactggcttttataagagcagcagccaacacgtttagcagacactgcgcgtggagaagggcttatctgcagtacactctgccatgtggagggtgggcctctgtggcctcttcacataacaagatgagctggaatgatgattccatgactcccacctatgcagccttaaagccaaatccgcgtgtgtgtgtttgtgtctgtctgtgggtctcgaaggtgatccgtcggtgcggtggctctgtgctgtaactggagagactgttccaaaccccaagagttgtctgatcctagtctgttcccttctgcttcttacctctgtagataggtcactggtttttgtttgtttgttttgaggattggaatttccattacattcatcctttgcacacagtaacatccacagaactagtccaactcttaaaaggagagaggaaaaacacaggcaccagttgtcagctcatgcttacaacctgtgtggaagtatatacagttgagagtcacagtggaggttctgagactggattcagtcttgttccagtgacagttggaaggcctctgctggagagacaccagctctcagggcagagattggcttggggccagaaggaccctccccaaccctggagacaccctgaaggttcactggctctccagattagcctctcttcctctgtcaggcaaagatgaggagcccgtgttcccatcgggccctgctggcagggacttgcagtggattcttggtcaggtgtgcccacagatgcggaggcgaggtgagtgattccatcatttcagttctcacctgcagttttggtgaagcaggagatgcaccccacagctctagctctcaaatggcttcacagtccttacttctctacctgcctcaagaaggggctcagagcagagacttgtgaattccttagtaactgtgagtatatgaatgtgttgcacatgtccacagtattggcgagataattacataattcagatacctttaatcatctttcaagaaagaggctcctcccattcaaccaccctagagaactgcctttgttaaatagttatttaaagactcatacatatcaaaccatgactttgaaaggtcttcgaggctggggctctgtaatgaattagtttaaaagccaaggtcataacatgaattgatggtcaatttcccttcagcagaaggaaaaggtgatttagatcagtagctcttttgaaggttgtggctgacctgttcataccgtgtcgcctcatggctagtgtggcgttgaaagagtagcgactgggaagatacaacttacacagtggggcctattgttctttcaagaaccctttttttagcttatagaacccatgggtccagtttagtaacgagtgatttaggcaatcaatgataggtttataatcttagattattccagcaaagtgtggattgcattgttaggaagaacatttggtgggaatgaacactcctgggcataccgctgacttttgtcccttgttcccggtgtaggagacccaaggcatcttgaatcccatctataagaacacaatcttccagcatacgtttgctttttcagaaactctagcattctctttaaatactgacgcaatccttaatggaaaagagatttcatgaagcaaattatgtatttcaatagttcttctatttttagtgtccaaaatttactaatacagaagcttgacaagcatgtcctcaccctccccaccacataaacacatggacacacacccaagccacaagaaatcccaagagagcagaagcgaatttttaaaagatttatcgtgaggactgcatttccattcactaattttggctcaaacttatgaggcaggaaataggggccaacagtaaatgggggaggcctcctgacaccagcagaggaattttgtacccaggcgaggacttcttgaacttctgcgtatctccgtttgatctctttcacctttatttcatcttcataagaatgagaaaggctcaaaaggaagcacttttagaaatcttctctgacctagaagaatccatccaaatccctgccttcctctctgaaccaacagttcccttctctgacagggggccatcctctatcttccatccagcggctcttccttttaggaaggctctggtgcagagcacttcaaatatgtcctcaggccagatactgattgctagtagagagacacccggcacccagtccgaagccctccctcaaaggaccggcttatggcgttggtcactggcaggctcagagacattctactgtgggcgcagggagcccggccccccatgcagccatgactggatgcgcccccatctcgggggcttgctgcactgcttgtttattgaattttgctacttagaatggcaacattaactttgtgtaccattcattttttaaaaattttccaaagctcggcagtgtatgaaagaaaaaactgggaaagatacttggtttctgttaacttttgtgttgcttgcttaagtgattaaagccagtgcttggagccaagccttcatgccacgaacatgctccacagcctgccctttgctctcctgctcacactgaccaagaatgccgcgtgcttggcctactgaggtgaaaggacaattgaatgacaggtgggcaaagggagaacttccccttcttggtgcgaggaaagtcacaaatttaaaaatgttgcttccagcccagatcctaaatgctagttctcagcagctgcgtggcttaccgttcgccatttccaccaccgccagctgccagcaccgctacagatcacagagatgtgaacagacaatggaaagcactcttagccttgcagtggtctacattttttaggaaccaatatttcagcattctttattacccggcacgctgtgtcctttgcagagttcaagtttatgttactgccagggtcagacagtcatttgctgctgctgctgctgctgctgctgcttctcgaactggatgcattaggaagctgctgtctgagtgtaggaatgtcttgctaagaaagcaatgtcttccttcatccttttctttcttccctctgcgtgtccttgtttttgtgtaatgcgggagagggttagagctatagagattatatatacactatccgtgcacattatatatatgtagatatacccctatcatgtcagagatctgcatgtcagtttttcagcaactaaggtgcctcatgttctgagttcagcagatataggaaccaagccgccccctcctgcacttgatgctcccacctttgttgtgcctcacttaaaatggtgcttttttcagttgtctgtcttttcttatgtttttatttgtaaggtgctgtatataagttgaatatattatgcacatatcctacccaatgggtagaacaaaaagttgttaatactgtaatataatgtatagatgataccaattttaacagaaatggcatagaatttgtgaatgcctatgtgctttgtcctcttttgtaaggaaatttgcaaatggatgcatacagattaaagtctatgtagtttattttcctattaaatatcaatattataacacaagagaaagaagtgtgaacaaacaagcaacagtttatgaccagcgtatatatagcaatggaaagttgcatctttgctgtgaaaacactttaaagaaaatactttttaaaaaatcccacagctttttggttgccactagacgcttcttattttaatcattttagtaatgctcagctggaccagtgttagttatatttgagtcagaaaaatgttgtttttcaacttgctttataatctcctgcatctatctcctgctgtagcatcacgaaggtgtcaggcaacagtgaaaagtgcacatttttgttgttgcagaaactgtgtcagaggaataagtaaatcagcctgcagcagaagactttgttcagctccagaggcatctgtgaccgtctgtgtccaagtctctctgtgcctttttcttttacaaactgaagctgtggagccaatgaagtaacagtagagattgtagggaaagaatacctcaggaaaaacaaatacacttacaagaagaccctgttcttagaaaatgtgtttagttatgggttagcactagaagagacttggctgtcagccagccaagtgaaggacctctcatccattcccattcatgtcccatcataatacggacccaaaaagcaaactcggttttgccatcagttagaaattacgttttggattgtatattgttacatctctcttccagcttagtttttagtgtctgattgtgacctctgcatttatcttcaaataccctaattttaaaacaaaagaacaagaaaagtttataacaccatgttcactaaaaccacggttgaatcttgggtgtgggcatcctttcgagtgttgtccataagagcagttcgtggaattttgcccatctgacccatattatcagcttattctgccaccagagtagagtctaataaattccaaagtttttatttgctccatggtgtatgttctgactttgaaaatgtcagattctataatcatacccctaacatccaggaaacaaatgacagattatctttaaactgaaattgactctacaatgcaacccttaatgctgaatggattaaaaaagtcagcccttttagtatctgtttgaaagggccgtaaaaagttgacacttttgttgttgtggatcctgcgtgtctagacccacgtgttgtttccatcgtatactgtagggtgcaccccttgggattcatcattaagaactgaggctcactgttgtcagaaacaaagctcccaccccccaggttcaaccttgtgggagaactgttgagcatgagaatgttctagactcagaggtactaaaatttgttaccacatcattgcttcctttctacaggacgaattgaggcttaaactttactgttaatgatactggttcattttaatgtgcttgttggtatgttgctatttttcatttcatagctttcaaaaatcatgctaattgtatacttgtctagtttaaggctattttaaaatatgtacaatactattcacagcatttagttcgtttaatttttattataaagcaatctactaaaaaagtacaactgtatttgaacttttcaatagttgtttgtgagctatgataatcaaaagtcattaaagtcttttttaacaaaaaaaaaaataaaaaaacttgag

SEQ ID NO: 12569 - DNA, 8069 bp, Homo sapiens
acgccttgccagtacagagctcggtggcaagagccgctgggagctgctcccatcagttagaggatgtggagagggagcaccagaagaggacagcccgcagcctggctcgcagcctgagggacgctgtgggtgctcccagccgggcgagcacgctctgggagcggatctgcaggggagaagcacgcgagcctaacgtgagcgtcccgcctgtcgcgtgtcctgccttgcggagctggagttcgcccaaatcatcatcatcgtcgtggtggtcacggtgatggtggtggtcatcgtctgcctgctgaaccactacaaagtctccacgcggtccttcatcaaccgcccgaaccagagccggaggcgggaggacgggctgccgcaggaagggtgcctgtggccttcagacagcgccgcaccgcggctgggcgcctcggagatcatgcatgccccgcggtccagggacaggttcacagcgccgtccttcatccagagggatcgcttcagccgcttccagcccacctacccctatgtgcagcacgagattgatcttcctcccaccatctccctgtccgacggtgaagagccacctccttaccaggggccctgcaccctgcagctccgggaccctgaacagcagatggaactcaaccgagagtccgtgagggccccacccaaccgaaccatatttgacagtgatttaatagacattgctatgtatagcgggggtccatgcccacccagcagcaactcgggcatcagtgcaagcacctgcagcagtaacgggaggatggaggggccaccccccacatacagcgaggtgatgggccaccacccaggcgcctctttcctccatcaccagcgcagcaacgcacacaggggcagcagactgcagtttcagcagaacaatgcagagagcacaatagtacccatcaaaggcaaagataggaagcctgggaacctggtctgattccttccaacgtgcacttcagctggagaaagaaaccaagaagggaagcggccgctgggcccctcctgcgcacagtgttgttcagtttcacatggtacaaataagtaaaaccaaatgagcaaacacggtctttgtttctgattccttttaggggaattgcatgcaaactagactgaaatgatacaaacttccatctggtctgaccgcaaacagtgtttatttggggacaggggttgggatgggggtgtgggcaggggaaaacagagaacgggatgctttgaagataccatgaaataaaacccacagaggtatttgatgtatttaattgtgaaaggagactttgcagataaatgaggccagaatggcatgttttataattaactgaataaagaaggaagcattattatatattattgtggggaagaaccagccagttcgctttttctcctaaggtgtggaacttttattttgttttaaaaatatgaatcaaaattcctgtgttgtgtgccaaggtataaagtggagaagttagatgagtgcaaggagctcctttgtgttgtgatgatgtgttttaaaagttgcactatcttaatgttgaaaatatttacaagggaactgttttacgtgaagttctgtatgttgtcttttcacctgtggattgtaatcaggcccaaggaatatcctggagtggtccccagaagcatccaagaaaagatatttggggacgtagcctaacattttaccaacttacgtaaatcaaaaaagtcattattgttgcaggagtttgcatcaaatagcagtgcatcgctgaagcttttggagacttttggatggaagataagatagggaagattaagttccagcatttctgacttgttattttgagttactctgctactcttaggctgcatagtttatgagaaaatgaacacatgcatttatggatccagtatcatgcagtgctgccctcatcctccagcagtgcaatttcttcagtaatttagatttttttcactatagcatgaaatatattcaaatacataccttattttatgcaataaattgtttaaaatgcaaggtggttattctgcatactgttgaaatatgtgactcctcagtatattcccattgcctctccccctttcctcgacagcttagttcagttctgcagggctgctcagttcacaggaggctcccagcagccaccccacatccagcctacacagaactttcgtgtgggagtggtgtgggtggtggttttcttatgctttggaagcccctagaaataatgacggaagaatgccatgttgctgatcgtggtaataagccattgtgggttattgtatgtcactagtattagcatagcattcttaaaggaatgcagtgttcaaaacctacccaaattccccgcaggattttaccaaacccttccccaggccagttttgtactgaaggcaagaactggacagtcagagaacagtggagggggcaagtgactgaagagcaccgggtaaaaagcacaacatgcagttaaaatgcaaactagaaaactaattttaaatattgttagttttaatatttcctgatatttacaaatattcattcttatatacaatgaaaaaaataactttcttctgcagatgtaagcactggcttttataagagcagcagccaacacgtttagcagacactgcgcgtggagaagggcttatctgcagtacactctgccatgtggagggtgggcctctgtggcctcttcacataacaagatgagctggaatgatgattccatgactcccacctatgcagccttaaagccaaatccgcgtgtgtgtgtttgtgtctgtctgtgggtctcgaaggtgatccgtcggtgcggtggctctgtgctgtaactggagagactgttccaaaccccaagagttgtctgatcctagtctgttcccttctgcttcttacctctgtagataggtcactggtttttgtttgtttgttttgaggattggaatttccattacattcatcctttgcacacagtaacatccacagaactagtccaactcttaaaaggagagaggaaaaacacaggcaccagttgtcagctcatgcttacaacctgtgtggaagtatatacagttgagagtcacagtggaggttctgagactggattcagtcttgttccagtgacagttggaaggcctctgctggagagacaccagctctcagggcagagattggcttggggccagaaggaccctccccaaccctggagacaccctgaaggttcactggctctccagattagcctctcttcctctgtcaggcaaagatgaggagcccgtgttcccatcgggccctgctggcagggacttgcagtggattcttggtcaggtgtgcccacagatgcggaggcgaggtgagtgattccatcatttcagttctcacctgcagttttggtgaagcaggagatgcaccccacagctctagctctcaaatggcttcacagtccttacttctctacctgcctcaagaaggggctcagagcagagacttgtgaattccttagtaactgtgagtatatgaatgtgttgcacatgtccacagtattggcgagataattacataattcagatacctttaatcatctttcaagaaagaggctcctcccattcaaccaccctagagaactgcctttgttaaatagttatttaaagactcatacatatcaaaccatgactttgaaaggtcttcgaggctggggctctgtaatgaattagtttaaaagccaaggtcataacatgaattgatggtcaatttcccttcagcagaaggaaaaggtgatttagatcagtagctcttttgaaggttgtggctgacctgttcataccgtgtcgcctcatggctagtgtggcgttgaaagagtagcgactgggaagatacaacttacacagtggggcctattgttctttcaagaaccctttttttagcttatagaacccatgggtccagtttagtaacgagtgatttaggcaatcaatgataggtttataatcttagattattccagcaaagtgtggattgcattgttaggaagaacatttggtgggaatgaacactcctgggcataccgctgacttttgtcccttgttcccggtgtaggagacccaaggcatcttgaatcccatctataagaacacaatcttccagcatacgtttgctttttcagaaactctagcattctctttaaatactgacgcaatccttaatggaaaagagatttcatgaagcaaattatgtatttcaatagttcttctatttttagtgtccaaaatttactaatacagaagcttgacaagcatgtcctcaccctccccaccacataaacacatggacacacacccaagccacaagaaatcccaagagagcagaagcgaatttttaaaagatttatcgtgaggactgcatttccattcactaattttggctcaaacttatgaggcaggaaataggggccaacagtaaatgggggaggcctcctgacaccagcagaggaattttgtacccaggcgaggacttcttgaacttctgcgtatctccgtttgatctctttcacctttatttcatcttcataagaatgagaaaggctcaaaaggaagcacttttagaaatcttctctgacctagaagaatccatccaaatccctgccttcctctctgaaccaacagttcccttctctgacagggggccatcctctatcttccatccagcggctcttccttttaggaaggctctggtgcagagcacttcaaatatgtcctcaggccagatactgattgctagtagagagacacccggcacccagtccgaagccctccctcaaaggaccggcttatggcgttggtcactggcaggctcagagacattctactgtgggcgcagggagcccggccccccatgcagccatgactggatgcgcccccatctcgggggcttgctgcactgcttgtttattgaattttgctacttagaatggcaacattaactttgtgtaccattcattttttaaaaattttccaaagctcggcagtgtatgaaagaaaaaactgggaaagatacttggtttctgttaacttttgtgttgcttgcttaagtgattaaagccagtgcttggagccaagccttcatgccacgaacatgctccacagcctgccctttgctctcctgctcacactgaccaagaatgccgcgtgcttggcctactgaggtgaaaggacaattgaatgacaggtgggcaaagggagaacttccccttcttggtgcgaggaaagtcacaaatttaaaaatgttgcttccagcccagatcctaaatgctagttctcagcagctgcgtggcttaccgttcgccatttccaccaccgccagctgccagcaccgctacagatcacagagatgtgaacagacaatggaaagcactcttagccttgcagtggtctacattttttaggaaccaatatttcagcattctttattacccggcacgctgtgtcctttgcagagttcaagtttatgttactgccagggtcagacagtcatttgctgctgctgctgctgctgctgctgcttctcgaactggatgcattaggaagctgctgtctgagtgtaggaatgtcttgctaagaaagcaatgtcttccttcatccttttctttcttccctctgcgtgtccttgtttttgtgtaatgcgggagagggttagagctatagagattatatatacactatccgtgcacattatatatatgtagatatacccctatcatgtcagagatctgcatgtcagtttttcagcaactaaggtgcctcatgttctgagttcagcagatataggaaccaagccgccccctcctgcacttgatgctcccacctttgttgtgcctcacttaaaatggtgcttttttcagttgtctgtcttttcttatgtttttatttgtaaggtgctgtatataagttgaatatattatgcacatatcctacccaatgggtagaacaaaaagttgttaatactgtaatataatgtatagatgataccaattttaacagaaatggcatagaatttgtgaatgcctatgtgctttgtcctcttttgtaaggaaatttgcaaatggatgcatacagattaaagtctatgtagtttattttcctattaaatatcaatattataacacaagagaaagaagtgtgaacaaacaagcaacagtttatgaccagcgtatatatagcaatggaaagttgcatctttgctgtgaaaacactttaaagaaaatactttttaaaaaatcccacagctttttggttgccactagacgcttcttattttaatcattttagtaatgctcagctggaccagtgttagttatatttgagtcagaaaaatgttgtttttcaacttgctttataatctcctgcatctatctcctgctgtagcatcacgaaggtgtcaggcaacagtgaaaagtgcacatttttgttgttgcagaaactgtgtcagaggaataagtaaatcagcctgcagcagaagactttgttcagctccagaggcatctgtgaccgtctgtgtccaagtctctctgtgcctttttcttttacaaactgaagctgtggagccaatgaagtaacagtagagattgtagggaaagaatacctcaggaaaaacaaatacacttacaagaagaccctgttcttagaaaatgtgtttagttatgggttagcactagaagagacttggctgtcagccagccaagtgaaggacctctcatccattcccattcatgtcccatcataatacggacccaaaaagcaaactcggttttgccatcagttagaaattacgttttggattgtatattgttacatctctcttccagcttagtttttagtgtctgattgtgacctctgcatttatcttcaaataccctaattttaaaacaaaagaacaagaaaagtttataacaccatgttcactaaaaccacggttgaatcttgggtgtgggcatcctttcgagtgttgtccataagagcagttcgtggaattttgcccatctgacccatattatcagcttattctgccaccagagtagagtctaataaattccaaagtttttatttgctccatggtgtatgttctgactttgaaaatgtcagattctataatcatacccctaacatccaggaaacaaatgacagattatctttaaactgaaattgactctacaatgcaacccttaatgctgaatggattaaaaaagtcagcccttttagtatctgtttgaaagggccgtaaaaagttgacacttttgttgttgtggatcctgcgtgtctagacccacgtgttgtttccatcgtatactgtagggtgcaccccttgggattcatcattaagaactgaggctcactgttgtcagaaacaaagctcccaccccccaggttcaaccttgtgggagaactgttgagcatgagaatgttctagactcagaggtactaaaatttgttaccacatcattgcttcctttctacaggacgaattgaggcttaaactttactgttaatgatactggttcattttaatgtgcttgttggtatgttgctatttttcatttcatagctttcaaaaatcatgctaattgtatacttgtctagtttaaggctattttaaaatatgtacaatactattcacagcatttagttcgtttaatttttattataaagcaatctactaaaaaagtacaactgtatttgaacttttcaatagttgtttgtgagctatgataatcaaaagtcattaaagtcttttttaacaaacattcgtgcttacttttcaacataattcccagttatatacagaaaaagatttccacctgtcacgtatctgcctcttttacctgagcaatggtgtagttcttagacctaaggtctgtaattgcaatacttttaaagaaagatgttgctctaagtgctgtttgttagttatgaaatcagatttttctgcttgttcttaatgctgtggtcaaaccatagcacaaaatcattaaaaataatcagcggca

SEQ ID NO: 12570 - DNA, 7613 bp, Homo sapiens
  misc_feature (33)..(33): n is a, c, g, or t
  misc_feature (75)..(75): n is a, c, g, or t
caaggggaatatgcacacgtagcacgcacaganactcgcaggagcccaagctttccattacccacagctctccantgctcagccctcctggatgcgctgggatttggcaaggtgagtggtctgtcataaggaatcagaaaagtacacttttttttctggaattggattttcctgtattcttttctttttcctgggagatggtgttcaaactggtaggaacacacaccaagcgtaactttcgttgattctgacacatttatggtcatcatggcgctcaaactgtcttcaagcctctcctcttttccttccagatcatgcatgccccgcggtccagggacaggttcacagcgccgtccttcatccagagggatcgcttcagccggcctctttcctccatcaccagcgcagcaacgcacacaggggcagcagactgcagtttcagcagaacaatgcagagagcacaatagtacccatcaaaggcaaagataggaagcctgggaacctggtctgattccttccaacgtgcacttcagctggagaaagaaaccaagaagggaagcggccgctgggcccctcctgcgcacagtgttgttcagtttcacatggtacaaataagtaaaaccaaatgagcaaacacggtctttgtttctgattccttttaggggaattgcatgcaaactagactgaaatgatacaaacttccatctggtctgaccgcaaacagtgtttatttggggacaggggttgggatgggggtgtgggcaggggaaaacagagaacgggatgctttgaagataccatgaaataaaacccacagaggtatttgatgtatttaattgtgaaaggagactttgcagataaatgaggccagaatggcatgttttataattaactgaataaagaaggaagcattattatatattattgtggggaagaaccagccagttcgctttttctcctaaggtgtggaacttttattttgttttaaaaatatgaatcaaaattcctgtgttgtgtgccaaggtataaagtggagaagttagatgagtgcaaggagctcctttgtgttgtgatgatgtgttttaaaagttgcactatcttaatgttgaaaatatttacaagggaactgttttacgtgaagttctgtatgttgtcttttcacctgtggattgtaatcaggcccaaggaatatcctggagtggtccccagaagcatccaagaaaagatatttggggacgtagcctaacattttaccaacttacgtaaatcaaaaaagtcattattgttgcaggagtttgcatcaaatagcagtgcatcgctgaagcttttggagacttttggatggaagataagatagggaagattaagttccagcatttctgacttgttattttgagttactctgctactcttaggctgcatagtttatgagaaaatgaacacatgcatttatggatccagtatcatgcagtgctgccctcatcctccagcagtgcaatttcttcagtaatttagatttttttcactatagcatgaaatatattcaaatacataccttattttatgcaataaattgtttaaaatgcaaggtggttattctgcatactgttgaaatatgtgactcctcagtatattcccattgcctctccccctttcctcgacagcttagttcagttctgcagggctgctcagttcacaggaggctcccagcagccaccccacatccagcctacacagaactttcgtgtgggagtggtgtgggtggtggttttcttatgctttggaagcccctagaaataatgacggaagaatgccatgttgctgatcgtggtaataagccattgtgggttattgtatgtcactagtattagcatagcattcttaaaggaatgcagtgttcaaaacctacccaaattccccgcaggattttaccaaacccttccccaggccagttttgtactgaaggcaagaactggacagtcagagaacagtggagggggcaagtgactgaagagcaccgggtaaaaagcacaacatgcagttaaaatgcaaactagaaaactaattttaaatattgttagttttaatatttcctgatatttacaaatattcattcttatatacaatgaaaaaaataactttcttctgcagatgtaagcactggcttttataagagcagcagccaacacgtttagcagacactgcgcgtggagaagggcttatctgcagtacactctgccatgtggagggtgggcctctgtggcctcttcacataacaagatgagctggaatgatgattccatgactcccacctatgcagccttaaagccaaatccgcgtgtgtgtgtttgtgtctgtctgtgggtctcgaaggtgatccgtcggtgcggtggctctgtgctgtaactggagagactgttccaaaccccaagagttgtctgatcctagtctgttcccttctgcttcttacctctgtagataggtcactggtttttgtttgtttgttttgaggattggaatttccattacattcatcctttgcacacagtaacatccacagaactagtccaactcttaaaaggagagaggaaaaacacaggcaccagttgtcagctcatgcttacaacctgtgtggaagtatatacagttgagagtcacagtggaggttctgagactggattcagtcttgttccagtgacagttggaaggcctctgctggagagacaccagctctcagggcagagattggcttggggccagaaggaccctccccaaccctggagacaccctgaaggttcactggctctccagattagcctctcttcctctgtcaggcaaagatgaggagcccgtgttcccatcgggccctgctggcagggacttgcagtggattcttggtcaggtgtgcccacagatgcggaggcgaggtgagtgattccatcatttcagttctcacctgcagttttggtgaagcaggagatgcaccccacagctctagctctcaaatggcttcacagtccttacttctctacctgcctcaagaaggggctcagagcagagacttgtgaattccttagtaactgtgagtatatgaatgtgttgcacatgtccacagtattggcgagataattacataattcagatacctttaatcatctttcaagaaagaggctcctcccattcaaccaccctagagaactgcctttgttaaatagttatttaaagactcatacatatcaaaccatgactttgaaaggtcttcgaggctggggctctgtaatgaattagtttaaaagccaaggtcataacatgaattgatggtcaatttcccttcagcagaaggaaaaggtgatttagatcagtagctcttttgaaggttgtggctgacctgttcataccgtgtcgcctcatggctagtgtggcgttgaaagagtagcgactgggaagatacaacttacacagtggggcctattgttctttcaagaaccctttttttagcttatagaacccatgggtccagtttagtaacgagtgatttaggcaatcaatgataggtttataatcttagattattccagcaaagtgtggattgcattgttaggaagaacatttggtgggaatgaacactcctgggcataccgctgacttttgtcccttgttcccggtgtaggagacccaaggcatcttgaatcccatctataagaacacaatcttccagcatacgtttgctttttcagaaactctagcattctctttaaatactgacgcaatccttaatggaaaagagatttcatgaagcaaattatgtatttcaatagttcttctatttttagtgtccaaaatttactaatacagaagcttgacaagcatgtcctcaccctccccaccacataaacacatggacacacacccaagccacaagaaatcccaagagagcagaagcgaatttttaaaagatttatcgtgaggactgcatttccattcactaattttggctcaaacttatgaggcaggaaataggggccaacagtaaatgggggaggcctcctgacaccagcagaggaattttgtacccaggcgaggacttcttgaacttctgcgtatctccgtttgatctctttcacctttatttcatcttcataagaatgagaaaggctcaaaaggaagcacttttagaaatcttctctgacctagaagaatccatccaaatccctgccttcctctctgaaccaacagttcccttctctgacagggggccatcctctatcttccatccagcggctcttccttttaggaaggctctggtgcagagcacttcaaatatgtcctcaggccagatactgattgctagtagagagacacccggcacccagtccgaagccctccctcaaaggaccggcttatggcgttggtcactggcaggctcagagacattctactgtgggcgcagggagcccggccccccatgcagccatgactggatgcgcccccatctcgggggcttgctgcactgcttgtttattgaattttgctacttagaatggcaacattaactttgtgtaccattcattttttaaaaattttccaaagctcggcagtgtatgaaagaaaaaactgggaaagatacttggtttctgttaacttttgtgttgcttgcttaagtgattaaagccagtgcttggagccaagccttcatgccacgaacatgctccacagcctgccctttgctctcctgctcacactgaccaagaatgccgcgtgcttggcctactgaggtgaaaggacaattgaatgacaggtgggcaaagggagaacttccccttcttggtgcgaggaaagtcacaaatttaaaaatgttgcttccagcccagatcctaaatgctagttctcagcagctgcgtggcttaccgttcgccatttccaccaccgccagctgccagcaccgctacagatcacagagatgtgaacagacaatggaaagcactcttagccttgcagtggtctacattttttaggaaccaatatttcagcattctttattacccggcacgctgtgtcctttgcagagttcaagtttatgttactgccagggtcagacagtcatttgctgctgctgctgctgctgctgctgcttctcgaactggatgcattaggaagctgctgtctgagtgtaggaatgtcttgctaagaaagcaatgtcttccttcatccttttctttcttccctctgcgtgtccttgtttttgtgtaatgcgggagagggttagagctatagagattatatatacactatccgtgcacattatatatatgtagatatacccctatcatgtcagagatctgcatgtcagtttttcagcaactaaggtgcctcatgttctgagttcagcagatataggaaccaagccgccccctcctgcacttgatgctcccacctttgttgtgcctcacttaaaatggtgcttttttcagttgtctgtcttttcttatgtttttatttgtaaggtgctgtatataagttgaatatattatgcacatatcctacccaatgggtagaacaaaaagttgttaatactgtaatataatgtatagatgataccaattttaacagaaatggcatagaatttgtgaatgcctatgtgctttgtcctcttttgtaaggaaatttgcaaatggatgcatacagattaaagtctatgtagtttattttcctattaaatatcaatattataacacaagagaaagaagtgtgaacaaacaagcaacagtttatgaccagcgtatatatagcaatggaaagttgcatctttgctgtgaaaacactttaaagaaaatactttttaaaaaatcccacagctttttggttgccactagacgcttcttattttaatcattttagtaatgctcagctggaccagtgttagttatatttgagtcagaaaaatgttgtttttcaacttgctttataatctcctgcatctatctcctgctgtagcatcacgaaggtgtcaggcaacagtgaaaagtgcacatttttgttgttgcagaaactgtgtcagaggaataagtaaatcagcctgcagcagaagactttgttcagctccagaggcatctgtgaccgtctgtgtccaagtctctctgtgcctttttcttttacaaactgaagctgtggagccaatgaagtaacagtagagattgtagggaaagaatacctcaggaaaaacaaatacacttacaagaagaccctgttcttagaaaatgtgtttagttatgggttagcactagaagagacttggctgtcagccagccaagtgaaggacctctcatccattcccattcatgtcccatcataatacggacccaaaaagcaaactcggttttgccatcagttagaaattacgttttggattgtatattgttacatctctcttccagcttagtttttagtgtctgattgtgacctctgcatttatcttcaaataccctaattttaaaacaaaagaacaagaaaagtttataacaccatgttcactaaaaccacggttgaatcttgggtgtgggcatcctttcgagtgttgtccataagagcagttcgtggaattttgcccatctgacccatattatcagcttattctgccaccagagtagagtctaataaattccaaagtttttatttgctccatggtgtatgttctgactttgaaaatgtcagattctataatcatacccctaacatccaggaaacaaatgacagattatctttaaactgaaattgactctacaatgcaacccttaatgctgaatggattaaaaaagtcagcccttttagtatctgtttgaaagggccgtaaaaagttgacacttttgttgttgtggatcctgcgtgtctagacccacgtgttgtttccatcgtatactgtagggtgcaccccttgggattcatcattaagaactgaggctcactgttgtcagaaacaaagctcccaccccccaggttcaaccttgtgggagaactgttgagcatgagaatgttctagactcagaggtactaaaatttgttaccacatcattgcttcctttctacaggacgaattgaggcttaaactttactgttaatgatactggttcattttaatgtgcttgttggtatgttgctatttttcatttcatagctttcaaaaatcatgctaattgtatacttgtctagtttaaggctattttaaaatatgtacaatactattcacagcatttagttcgtttaatttttattataaagcaatctactaaaaaagtacaactgtatttgaacttttcaatagttgtttgtgagctatgataatcaaaagtcattaaagtcttttttaacaaacattcgtgcttacttttcaacataattcccagttatatacagaaaaagatttccacctgtcacgtatctgcctcttttacctgagcaatggtgtagttcttagacctaaggtctgtaattgcaatacttttaaagaaagatgttgctctaagtgctgtttgttagttatgaaatcagatttttctgcttgttcttaatgctgtggtcaaaccatagcacaaaatcattaaaaataatcagcggca

SEQ ID NO: 12571 - DNA, 3007 bp, Homo sapiens
cgagctcggtaccaggggttgttggtttctgttaacttttgtgttgcttgcttaagtgattaaagccagtgcttggagccaagccttcatgccacgaacatgctccacagcctgccctttgctctcctgctcacactgaccaagaatgccgcgtgcttggcctactgaggtgaaaggacaattgaatgacaggtgggcaaagggagaacttccccttcttggtgcgaggaaagtcacaaatttaaaaatgttgcttccagcccagatcctaaatgctagttctcagcagctgcgtggcttaccgttcgccatttccaccaccgccagctgccagcaccgctacagatcacagagatgtgaacagacaatggaaagcactcttagccttgcagtggtctacattttttaggaaccaatatttcagcattctttattacccggcacgctgtgtcctttgcagagttcaagtttatgttactgccagggtcagacagtcatttgctgctgctgctgctgctgctgctgcttctcgaactggatgcattaggaagctgctgtctgagtgtaggaatgtcttgctaagaaagcaatgtcttccttcatccttttctttcttccctctgcgtgtccttgtttttgtgtaatgcgggagagggttagagctatagagattatatatacactatccgtgcacattatatatatgtagatatacccctatcatgtcagagatctgcatgtcagtttttcagcaactaaggtgcctcatgttctgagttcagcagatataggaaccaagccgccccctcctgcacttgatgctcccacctttgttgtgcctcacttaaaatggtgcttttttcagttgtctgtcttttcttatgtttttatttgtaaggtgctgtatataagttgaatatattatgcacatatcctacccaatgggtagaacaaaaagttgttaatactgtaatataatgtatagatgataccaattttaacagaaatggcatagaatttgtgaatgcctatgtgctttgtcctcttttgtaaggaaatttgcaaatggatgcatacagattaaagtctatgtagtttattttcctattaaatatcaatattataacacaagagaaagaagtgtgaacaaacaagcaacagtttatgaccagcgtatatatagcaatggaaagttgcatctttgctgtgaaaacactttaaagaaaatactttttaaaaaatcccacagctttttggttgccactagacgcttcttattttaatcattttagtaatgctcagctggaccagtgttagttatatttgagtcagaaaaatgttgtttttcaacttgctttataatctcctgcatctatctcctgctgtagcatcacgaaggtgtcaggcaacagtgaaaagtgcacatttttgttgttgcagaaactgtgtcagaggaataagtaaatcagcctgcagcagaagactttgttcagctccagaggcatctgtgaccgtctgtgtccaagtctctctgtgcctttttcttttacaaactgaagctgtggagccaatgaagtaacagtagagattgtagggaaagaatacctcaggaaaaacaaatacacttacaagaagaccctgttcttagaaaatgtgtttagttatgggttagcactagaagagacttggctgtcagccagccaagtgaaggacctctcatccattcccattcatgtcccatcataatacggacccaaaaagcaaactcggttttgccatcagttagaaattacgttttggattgtatattgttacatctctcttccagcttagtttttagtgtctgattgtgacctctgcatttatcttcaaataccctaattttaaaacaaaagaacaagaaaagtttataacaccatgttcactaaaaccacggttgaatcttgggtgtgggcatcctttcgagtgttgtccataagagcagttcgtggaattttgcccatctgacccatattatcagcttattctgccaccagagtagagtctaataaattccaaagtttttatttgctccatggtgtatgttctgactttgaaaatgtcagattctataatcatacccctaacatccaggaaacaaatgacagattatctttaaactgaaattgactctacaatgcaacccttaatgctgaatggattaaaaaagtcagcccttttagtatctgtttgaaagggccgtaaaaagttgacacttttgttgttgtggatcctgcgtgtctagacccacgtgttgtttccatcgtatactgtagggtgcaccccttgggattcatcattaagaactgaggctcactgttgtcagaaacaaagctcccaccccccaggttcaaccttgtgggagaactgttgagcatgagaatgttctagactcagaggtactaaaatttgttaccacatcattgcttcctttctacaggacgaattgaggcttaaactttactgttaatgatactggttcattttaatgtgcttgttggtatgttgctatttttcatttcatagctttcaaaaatcatgctaattgtatacttgtctagtttaaggctattttaaaatatgtacaatactattcacagcatttagttcgtttaatttttattataaagcaatctactaaaaaagtacaactgtatttgaacttttcaatagttgtttgtgagctatgataatcaaaagtcattaaagtcttttttaacaaacattcgtgcttacttttcaacataattcccagttatatacagaaaaagatttccacctgtcacgtatctgcctcttttacctgagcaatggtgtagttcttagacctaaggtctgtaattgcaatacttttaaagaaagatgttgctctaagtgctgtttgttagttatgaaatcagatttttctgcttgttcttaatgctgtggtcaaaccatagcacaaaatcattaaaaataatcagcggca

SEQ ID NO: 12572 - DNA, 2869 bp, Homo sapiens
gctgattcttgatgtaccccggtcatcttgctacacgagacaattgaatgacaggtgggcaaagggagaacttccccttcttggtgcgaggaaagtcacaaatttaaaaatgttgcttccagcccagatcctaaatgctagttctcagcagctgcgtggcttaccgttcgccatttccaccaccgccagctgccagcaccgctacagatcacagagatgtgaacagacaatggaaagcactcttagccttgcagtggtctacattttttaggaaccaatatttcagcattctttattacccggcacgctgtgtcctttgcagagttcaagtttatgttactgccagggtcagacagtcatttgctgctgctgctgctgctgctgctgcttctcgaactggatgcattaggaagctgctgtctgagtgtaggaatgtcttgctaagaaagcaatgtcttccttcatccttttctttcttccctctgcgtgtccttgtttttgtgtaatgcgggagagggttagagctatagagattatatatacactatccgtgcacattatatatatgtagatatacccctatcatgtcagagatctgcatgtcagtttttcagcaactaaggtgcctcatgttctgagttcagcagatataggaaccaagccgccccctcctgcacttgatgctcccacctttgttgtgcctcacttaaaatggtgcttttttcagttgtctgtcttttcttatgtttttatttgtaaggtgctgtatataagttgaatatattatgcacatatcctacccaatgggtagaacaaaaagttgttaatactgtaatataatgtatagatgataccaattttaacagaaatggcatagaatttgtgaatgcctatgtgctttgtcctcttttgtaaggaaatttgcaaatggatgcatacagattaaagtctatgtagtttattttcctattaaatatcaatattataacacaagagaaagaagtgtgaacaaacaagcaacagtttatgaccagcgtatatatagcaatggaaagttgcatctttgctgtgaaaacactttaaagaaaatactttttaaaaaatcccacagctttttggttgccactagacgcttcttattttaatcattttagtaatgctcagctggaccagtgttagttatatttgagtcagaaaaatgttgtttttcaacttgctttataatctcctgcatctatctcctgctgtagcatcacgaaggtgtcaggcaacagtgaaaagtgcacatttttgttgttgcagaaactgtgtcagaggaataagtaaatcagcctgcagcagaagactttgttcagctccagaggcatctgtgaccgtctgtgtccaagtctctctgtgcctttttcttttacaaactgaagctgtggagccaatgaagtaacagtagagattgtagggaaagaatacctcaggaaaaacaaatacacttacaagaagaccctgttcttagaaaatgtgtttagttatgggttagcactagaagagacttggctgtcagccagccaagtgaaggacctctcatccattcccattcatgtcccatcataatacggacccaaaaagcaaactcggttttgccatcagttagaaattacgttttggattgtatattgttacatctctcttccagcttagtttttagtgtctgattgtgacctctgcatttatcttcaaataccctaattttaaaacaaaagaacaagaaaagtttataacaccatgttcactaaaaccacggttgaatcttgggtgtgggcatcctttcgagtgttgtccataagagcagttcgtggaattttgcccatctgacccatattatcagcttattctgccaccagagtagagtctaataaattccaaagtttttatttgctccatggtgtatgttctgactttgaaaatgtcagattctataatcatacccctaacatccaggaaacaaatgacagattatctttaaactgaaattgactctacaatgcaacccttaatgctgaatggattaaaaaagtcagcccttttagtatctgtttgaaagggccgtaaaaagttgacacttttgttgttgtggatcctgcgtgtctagacccacgtgttgtttccatcgtatactgtagggtgcaccccttgggattcatcattaagaactgaggctcactgttgtcagaaacaaagctcccaccccccaggttcaaccttgtgggagaactgttgagcatgagaatgttctagactcagaggtactaaaatttgttaccacatcattgcttcctttctacaggacgaattgaggcttaaactttactgttaatgatactggttcattttaatgtgcttgttggtatgttgctatttttcatttcatagctttcaaaaatcatgctaattgtatacttgtctagtttaaggctattttaaaatatgtacaatactattcacagcatttagttcgtttaatttttattataaagcaatctactaaaaaagtacaactgtatttgaacttttcaatagttgtttgtgagctatgataatcaaaagtcattaaagtcttttttaacaaacattcgtgcttacttttcaacataattcccagttatatacagaaaaagatttccacctgtcacgtatctgcctcttttacctgagcaatggtgtagttcttagacctaaggtctgtaattgcaatacttttaaagaaagatgttgctctaagtgctgtttgttagttatgaaatcagatttttctgcttgttcttaatgctgtggtcaaaccatagcacaaaatcattaaaaataatcagcggca

SEQ ID NO: 12573 - DNA, 1633 bp, Homo sapiens
acgccttgccagtacagagctcggtggcaagagccgctgggagctgctcccatcagttagaggatgtggagagggagcaccagaagaggacagcccgcagcctggctcgcagcctgagggacgctgtgggtgctcccagccgggcgagcacgctctgggagcggatctgcaggggagaagcacgcgagcctaacgtgagcgtcccgcctgtcgcgtgtcctgccttggtaagcgccctctccggtccttccacactgaaagcttccagcagagatcaagggaaggagtattgtgtgagacttgcagatttcctcctttctgtctggactggtttgatatttgcctgttgaaaagattactgaacgcagtgtgacaagatgagccgtctagctgcgttctgcttgcctgtgtgtgtgacacgtccaggtgtgaggccaaacctgagaagtgcagactgctcactgatagacgttgctgtaaacagtagtgccctgggtgtacagctggtctcaggatcggagaccccggacttattctctgctcggtgacacggccggcttcctgccgcagagctcctggtttctgttgatggcagttgataattggtagccacagtctgcggtcggagccacagcatttgagtctagcacctggggtgggccctgctgatacagtagagagagagtgaacgaggcagacagaaacacaccccccccccctccacgctcacacactctcccacaccccatgccagctataactgcagctctgagctgcctggagaggagattgccggaagctgaagggatgctttgaacgtgggggggctgcgtcacagttggactcccacttgcagaggacctgattatgtccagtgaccacctgaacaacagcacactgaaggaggctcagttcaaagacctgttcttaaaaaaaggtacatttcccaagaactgctatggatgatgcatgctctttcgggtttgctgtggttcttcttggagtttggtctgaggacagagctgagaagaggagaagctctttctcaagaagtttctttctacctaagaggggtctgtcaactcagaacatttccgggtgggactccctttaggaagatgcatgtcaggctttttcatcttctttcaagcctggaattagtttgttcctgttggaggtgttatgcatgagtacacagtttgttgctttggagttttgtttttttcaaatgtctgtatatgaggctgagacctcccctggaaattctgctacttgttaataattcctttttcttcaccctcatgagctgaaaactgcattttaaagaaaaggtatttctcaggatgtggctggttcattgaacactttcttaggtcatccatgtagtgacaggagctattaggaaggagaactgtgactctgagagatagagagccaaagaaagtgagagacagacagactggctgtgggatgagagcctcagaagccaccactctcccctgtggaaatgaaggttccattccatgtgcagctgtgttttttttctgatgcactttcctaaattaataatgtggaggtggaggtgagggtggattttaaatgaatcctatagggggaattatggcttatgtat

SEQ ID NO: 12574 - DNA, 765 bp, Homo sapiens
cagctgtcggaaggtggcgagcctgaggcgaacaatggcggagctgggcgaagccgatgaagcggagttgcagcgcctggtggccgccgagcagcagaaggcgcagtttactgcacaggccacgtgcccgtagaaaagatactcatccactgtgggttttggtttcgccgtcaccccactgcctcactggattgtgaggatcatatgcgacaatgtatttgaaaacgactagaacattatcggaggaaggtggactctgaagtagtcgctgtagactatggatgtagaacaagggtttggagcccttcggacatggttctaacgcggcctgacttcttgctggctacatgaccttggactacataatcacgcctcttaaatgggaggtgatgacagctatccttgaggaccttagagagaactgatttcttagtacccagcctcacaaatagtgcatcacttcatggagttatgttgggataaatgtgtggagaagccagggaatcgcctagactctcgcactgaaaattgtctctccagctgtgtagaccgcttcattgacaccactcttgccatcaccagtcggtttgcccagattgtacagaaaggagggcagtaggccatcccccaggagaatgacagaagcaaaggacttgttactaagcagatttaagggtcagtgggggaaggctatcaacccattgtcagatcagcatcaggctgttatcaagtctgttggtgctaaaaagtaaaagatgaaatgtt

SEQ ID NO: 12575 - DNA, 1172 bp, Homo sapiens
cagctgtcggaaggtggcgagcctgaggcgaacaatggcggagctgggcgaagccgatgaagcggagttgcagcgcctggtggccgccgagcagcagaaggcgcagtttactgcacaggtgcatcacttcatggagttatgttgggataaatgtgtggagaagccagggaatcgcctagactctcgcactgaaaattgtctctccagctgtgtagaccgcttcattgacaccactcttgccatcaccagtcggtttgcccagattgtacagaaaggagggcagtaggccatcccccaggagaatgacagaagcaaaggacttgttactaagcagatttaagggtcagtgggggaaggctatcaacccattgtcagatcagcatcaggctgttatcaagtctgttggtgctaaaaagtaaaagatgaaatgttcaaagagtgaaaatttatttatttggaattcagaaattccaggttgtatgacatcagttactcaataagtgtgaattctccaactcttcttttaatcccattttagaatttaatatagagatctctgattggcaggaacactagaaataaatgttccatggccagtagtgcaaatgggggattgtaggttttgaaaaaccaccctaagccatattaagggggttggaagaaccatcgaagcctaaggcatagaagaaaatttggggttaagaaagatgaagaacaaaaaacagctttattgcttatacatgaccaagaaaaggaaaacatggcaaaaaaaaaaaaaaaaaggcaagatgtgtattccttgcgaaagaacaagcctgctaatttgggaggaagggaaggtcaggacccaaatagagccaatttcctggagatggcctgttctactggcacattttcctgagtctgtgcttaaaacctttcaggtactttcagggcacagaaacaatgcatgctaaaaaatatatggccaaagctccttccaacaaagatttaacttgctccaggaacaaaataattgctttaggttaagaggtagtaattagagactattctccctttagacccccactaatcccaaaaataaaaatacacaccatggaacactgacaattgagtaccaaagtattaaaatttaaaataaatatcccaaaaggtagcacctgctcatagtt

SEQ ID NO: 12576 - DNA, 432 bp, Homo sapiens
cagctgtcggaaggtggcgagcctgaggcgaacaatggcggagctgggcgaagccgatgaagcggagttgcagcgcctggtggccgccgagcagcagaaggcgcagtttactgcacaggtgcatcacttcatggagttatgttgggataaatgtgtggagaagccagggaatcgcctagactctcgcactgaaaattgtctctccagctgtgtagaccgcttcattgacaccactcttgccatcaccagtcggtttgcccagattgtacagaaaggagggcagtaggccatcccccaggagaatgacagaagcaaaggacttgttactaagcagatttaagggtcagtgggggaaggctatcaacccattgtcagatcagcatcaggctgttatcaagtctgttggtgctaaaaagtaaaagatgaaatgtt

SEQ ID NO: 12577 - DNA, 1505 bp, Homo sapiens
cagctgtcggaaggtggcgagcctgaggcgaacaatggcggagctgggcgaagccgatgaagcggagttgcagcgcctggtggccgccgagcagcagaaggcgcagtttactgcacaggccacgtgcccgtagaaaagatactcatccactgtgggttttggtttcgccgtcaccccactgcctcactggattgtgaggatcatatgcgacaatgtatttgaaaacgactagaacattatcggaggaaggtggactctgaagtagtcgctgtagactatggatgtagaacaagggtttggagcccttcggacatggttctaacgcggcctgacttcttgctggctacatgaccttggactacataatcacgcctcttaaatgggaggtgatgacagctatccttgaggaccttagagagaactgatttcttagtacccagcctcacaaatagtgcatcacttcatggagttatgttgggataaatgtgtggagaagccagggaatcgcctagactctcgcactgaaaattgtctctccagctgtgtagaccgcttcattgacaccactcttgccatcaccagtcggtttgcccagattgtacagaaaggagggcagtaggccatcccccaggagaatgacagaagcaaaggacttgttactaagcagatttaagggtcagtgggggaaggctatcaacccattgtcagatcagcatcaggctgttatcaagtctgttggtgctaaaaagtaaaagatgaaatgttcaaagagtgaaaatttatttatttggaattcagaaattccaggttgtatgacatcagttactcaataagtgtgaattctccaactcttcttttaatcccattttagaatttaatatagagatctctgattggcaggaacactagaaataaatgttccatggccagtagtgcaaatgggggattgtaggttttgaaaaaccaccctaagccatattaagggggttggaagaaccatcgaagcctaaggcatagaagaaaatttggggttaagaaagatgaagaacaaaaaacagctttattgcttatacatgaccaagaaaaggaaaacatggcaaaaaaaaaaaaaaaaaggcaagatgtgtattccttgcgaaagaacaagcctgctaatttgggaggaagggaaggtcaggacccaaatagagccaatttcctggagatggcctgttctactggcacattttcctgagtctgtgcttaaaacctttcaggtactttcagggcacagaaacaatgcatgctaaaaaatatatggccaaagctccttccaacaaagatttaacttgctccaggaacaaaataattgctttaggttaagaggtagtaattagagactattctccctttagacccccactaatcccaaaaataaaaatacacaccatggaacactgacaattgagtaccaaagtattaaaatttaaaataaatatcccaaaaggtagcacctgctcatagtt

SEQ ID NO: 12578 - DNA, 606 bp, Homo sapiens
agcttcgggctaccagaagaatgattggaggatgctgaagaaaacaagaaagaagacaaggataagaatgagggttatggcagttcctgacagagtgggtactgtgaacaaacaccagaggtagaacaagctgtgttatgtgtttgtcaagaattacaagcaatctggtgttgctggtgtatcataggcgaggcaggaagtggtaagaattgagactaccattttaagttcttaggaacaggaggaaggagtcgtgtgttccgtgtttgggagcttgaactgtaatgtgtaagcaatgagacaccattaaagagttttaaggggggccgggcacagtggctcacgcctgtaatcccagcactttgggaggctgaggcgggcggatcacctgaggtcaggagttcaagaccagcctggccaacttggcgaaaccctgtctctactaaaaatagaaaaattagccggacgtggtgacaggcacctgtattcccagctactctggagtctggggcaggagaatcgctcaaacccaggaggtggaagttgcagtaagctgagatcacaccactgtactccagcctgggcgacagagcgagactctatctc

SEQ ID NO: 12579 - DNA, 972 bp, Homo sapiens
ggcacaaggtcatgcttaaaaagaccccttgttctactgcatcccagctccccaccatggggcctcacaggccctggtgaccaagcacatcagacctggttcttgctcagtcctgggagccacagaacccagcacgtactttacccccaagaccagactccagcttggcttttgtcctcctctccaggattggtgacctcctaggtcgtgaagctgtgatgagcaaagacacactcctctccattctcccaacttcaggtccctttgacagtgtcagcaggcatttaaatagcagaccacccacagcagggctggtagatgcagtgaactcaggaagatgcctgcatagactctagtgttaaagacagaatccttacaaggaacccccatagttacctaactgctgtctccagtggtcatagaagtgtgataacccactaatcatcattctctgtctctctgtctttctcatacacacttacacacacatacacacaaccttgttgcttaattttcagagagtctactttcagaaaagccttcaggaatacatcatgtacaaaactgagaaattacctgaagtatctttaaatttagtaaaaagttgcattgttttttgaacatcacacttgaaaagtacatgaatacaaacatacttaggaaaaaaagctttaattaatttaaaaaggagaacaatgctatatgctgtatcccacctttctctgaatgttacattttctcccctatcccaggctgcatctaagaaaactcaaagggaatatgctatctatcttttccgagcaatgaaagctctgggttttttccttgcttttcagggcacaatacttctctttcttcctggttagacaggataagttctgagtcccctggtatcatcagcttacttcttctctgttaaatattcacaaaaaatcactaactttcatgcctcagcaaacctccactgcctaa

SEQ ID NO: 12580 - DNA, 1440 bp, Homo sapiens
caggtgctgacactagaacaggactccactccgacattccgggtacacagaacttcccagtgggaagagctagccacacaggtggcagaagcttggaaaacaacccatcccagccctacgctctctgaatgtgaccttgggtgcaagctgggtttgtatgaacttactggcatttctaacaagacagtgtgtacgggagcatttcaactgcaaagaccactgaactggacactgtcggcgtgacagtatcaagtaaccattaggcagagcaaaacgtaaataaaagtactctgtgatggggtagtcagtcagatgtgtggtggggacactaaaaatctctcatcacctttttagtcaaaagaacagttgttttggtttggctcttctgttttaaaatatcagaacaataataatttcccacagacaaaatcctcaatcctcaccatcctttctatttcctatattcatcataaacttcatgcttgatgttgaaattgttttctgaaaatagagaatacaaagaggagattttaaaatgtcagtggcagccccacactcctttttaatcttatttcctgatatcttgagtttacttggacgtagagttttccttgactatggttatttctggtagtagcagctccagattaggcaatggttttcttcagagatagcttagagtgagccccagaacaaggtcaatgcgaagattgcttgtgtctgcgtgtccagggcacagtgatcctcatcactagccggggggctccgtgaggatctgctcctggtcgtttctgttctgtatcttctctgcagcccttactgaagccgttaccaactggcacaattcaattcctactgtacccatcatgcacagatggctgaagtattgagaacgctccagtgaccgggaggcaatagtctgtctctctgtctttctcatacacacttacacacacatacacacaaccttgttgcttaattttcagagagtctactttcagaaaagccttcaggaatacatcatgtacaaaactgagaaattacctgaagtatctttaaatttagtaaaaagttgcattgttttttgaacatcacacttgaaaagtacatgaatacaaacatacttaggaaaaaaagctttaattaatttaaaaaggagaacaatgctatatgctgtatcccacctttctctgaatgttacattttctcccctatcccaggctgcatctaagaaaactcaaagggaatatgctatctatcttttccgagcaatgaaagctctgggttttttccttgcttttcagggcacaatacttctctttcttcctggttagacaggataagttctgagtcccctggtatcatcagcttacttcttctctgttaaatattcacaaaaaatcactaactttcatgcctcagcaaacctccactgcctaa

SEQ ID NO: 12581 - DNA, 988 bp, Homo sapiens
caggtgctgacactagaacaggactccactccgacattccgggtacacagaacttcccagtgggaagagctagccacacaggtggcagaagcttggaaaacaacccatcccagccctacgctctctgaatgtgaccttgggtgcaagctgggtttgtatgaacttactggcatttctaacaagacagtgtgtacgggagcatttcaactgcaaagaccactgaactggacactgtcggcgtgacagtatcaagtaaccattaggcagagcaaaacgtaaataaaagtactctgtgatggggtagtcagtcagatgtgtggtggggacactaaaaatctctcatcacctttttagtcaaaagaacagttgttttggtttggctcttctgttttaaaatatcagaacaataataatttcccacagacaaaatcctcaatcctcaccatcctttctatttcctatattcatcataaacttcatgcttgatgttgaaattgttttctgaaaatagagaatacaaagaggagattttaaaatgtcagtggcagccccacactcctttttaatcttatttcctgatatcttgagtttacttggacgtagagttttccttgactatggttatttctggtagtagcagctccagattaggcaatggttttcttcagagatagcttagagtgagccccagaacaaggtcaatgcgaagattgcttgtgtctgcgtgtccagggcacagtgatcctcatcactagccggggggctccgtgaggatctgctcctggtcgtttctgttctgtatcttctctgcagcccttactgaagccgttaccaactggcacaattcaattcctactgtacccatcatgcacagatggctgaagtattgagaacgctccagtgaccgggaggcaatagtctgtccacatctaagaacacacttggaataaccttagagaagagagagagagagagaatgcatggttag

SEQ ID NO: 12582 - DNA, 431 bp, Homo sapiens
tgctaattctgttctggggagcatcttgtattgtcactgttttgtactaaatcttcaaatattgtctactgtgtaaggcagaaaaatttcttatcatgcaaaaaccattttgtttccagggtaacaagtaactaagtgcatgcacaacttgttttcccttgtaacattcatgatctcatttacaactctgattttaaaacaaaaaaatctttacaacaagctatatagggacataccagatgttgcagtgattttagctatcaacaaactgttaaccatgtacaatatttaaaataggcttattttgatgtatcgcctattatacaaacacacaaaacatttttggaggcctcagttatgagtgacagagctttctgtgtataatttgtctaaataatttgtctaataaaaatgttttctaaacttgctct

SEQ ID NO: 12583 - DNA, 281 bp, Homo sapiens
atttagcactggactgccaactttaaccctttctttaacattcagcagagggtcagctcaggagctcggagaagctgtccattatagggccatcattttgtcatctccagttatacctgatgttggtttaggctagaattcatcccagccaattagtcagttgagttcagtaaatctgtattttgctgcagctgtggccctagctctgtgctggatactgggaagactcatagtcttggtcccaaaggagcttaaaagccttgccaggaaggatgccataa

SEQ ID NO: 12584 - DNA, 1681 bp, Homo sapiens
tccttaaacttctgaaagttaaaaagtccagataggagtgaggaagctgtacatgaaacataatggacttacattcctagtcagatactaatattctgtagaagatatttctaaaatcttatctttaaaatatgaaataatttttaattggggtggcaacttaaattcaattaaaataactcatgtgtcacaagagtaaattttacataatctgtacgtagttctaatctgtatatagtcttggaggttatgatttgccacagattggttggatcacatacatttaaggatcatattattaaataatatatgcacagacatggagagaattagtttttactaaaacatttatcagaaattttaatactctgcataaccagtattagcattagaaattagccacttttaaaatgagaaaactgtgtcactcttcaatttttttataagccattgaggaaaacattaactcctggatttcagcttcacttttaacctgcagactaaatttctttctcaattatgtcagacacacccaagtcaatcccaacccccttgttaccttgggaagaccgtgctgaaaaaggagatcttccacctaaacagtgttctcttatttgaagcaaatctttttgagaatttgtttacttgatttctttccacaataaactgacagagaacgctactaatgatttttttttttttttggagacggagttttgttcttgttgcccaggctgcagtgcaagggcacaatcttggctcactgcaacctctgcctcacaggttcaagtggttctcctgcctcagcctcttgagtagctgggattacaggcatgcgccaccatgcccggctaatttggtattttcagtagagacggagttgcaccatgttggccaggctggtcttgaattcctgacctcaggtgatccacctgcttcggcctcccaaagtgctaggattacaggtgtgagccaccacgcctggctaattttgtattttaagtagagatggggtttctccaaaggctggtcttgaactcccgacctcaggtgatccgcccaccttggcctcccgaagtgctgggattacaggcgtgagccaccgtgcccggcctgatgtttttgaatgattatgaaaatgggtatacagcattaaaaccttagactgattttaaatatattaatttcttttaaactcaatataatgttaatattactgtagcacttactagcatttctgaaggttggtcttgagataagattgaaaatgacagttgttgattttctgaggtaatatacccaaataaaatatatgtatgtgtacatgaatctaaactgtcttcttctgttcctcattttgctttacttaaataatctttcatattttttaagtgttttgcccatgtgcttgggtagccttgaagtcaccagaataactaggactcaaattcagaccaaaccaggactagctttttgtgccatgagttagccatggtcctggacccagcaaaaagaatgattatgatggtcagagtaagatgagcaattgcaacataatattctctaatattgtatactgtaaatttattcagctgccctcgtttactcacagtttgcttatttgccaccataagaaatggtacaataaaaattcatgtaatcaccccttagatttcagttg

SEQ ID NO: 12585 - DNA, 1640 bp, Homo sapiens
tccttaaacttctgaaagttaaaaagtccagataggagtgaggaagctgtacatgaaacataatggacttacattcctagtcagatactaatattctgtagaagatatttctaaaatcttatctttaaaatatgaaataatttttaattggggtggcaacttaaattcaattaaaataactcatgtgtcacaagagtaaattttacataatctgtacgtagttctaatctgtatatagtcttggaggttatgatttgccacagattggttggatcacatacatttaaggatcatattattaaataatatatgcacagacatggagagaattagtttttactaaaacatttatcagaaattttaatactctgcataaccagtattagcattagaaattagccacttttaaaatgagaaaactgtgtcactcttcaatttttttataagccattgaggaaaacattaactcctggatttcagcttcacttttaacctgcagactaaatttctttctcaattatgtcagacacacccaagtcaatcccaacccccttgttaccttgggaagaccgtgctgaaaaaggagatcttccacctaaacagtgttctcttatttgaagcaaatctttttgagaatttgtttacttgatttctttccacaataaactgacagagaacgctactaatgatttttttttttttttggagacggagttttgttcttgttgcccaggctgcagtgcaagggcacaatcttggctcactgcaacctctgcctcacaggttcaagtggttctcctgcctcagcctcttgagtagctgggattacaggcatgcgccaccatgcccggctaatttggtattttcagtagagacggagttgcaccatgttggccaggctggtcttgaattcctgacctcaggtgatccacctgcttcggcctcccaaagtgctaggattacaggtgtgagccaccacgcctggctaattttgtattttaagtagagatggggtttctccaaaggctggtcttgaactcccgacctcaggtgatccgcccaccttggcctcccgaagtgctgggattacaggcgtgagccaccgtgcccggcctgatgtttttgaatgattatgaaaatgggtatacagcattaaaaccttagactgattttaaatatattaatttcttttaaactcaatataatgttaatattactgtagcacttactagcatttctgaaggttggtcttgagataagattgaaaatgacagttgttgattttctgaggtaatatacccaaataaaatatatgtatgtgtacatgaatctaaactgtcttcttctgttcctcattttgctttacttaaataatctttcatattttttaagtgttttgcccatgtgcttgggtagccttgaagtcaccagaataactaggactcaaattcagaccaaaccaggactagctttttgtgccatgagttagccatggtcctggacccagcaaaaagaatgattatgatggcaaataagcaaactgtgagtaaacgagggcagctgaataaatttacagtatacaatattagagaatattatgttgcaattgctcatcttactctgaccatcataatgtcgac

SEQ ID NO: 12586 - DNA, 764 bp, Homo sapiens
gaatgggaatgcctgggtttgcgtacccctactcatctgatttcttcatctggtccacagaccttaggagtgctttagtgtatgtggtaggcctgggaattcagggattagagaatcagtctctttctctgaagagttccaagtattgggcgttagataagcaaacaattaaaatccagtgtgcttagtgaatggtagaggatactattggatactaggagaacactgaggaggggcttccaagtcctcttggagtggtcacagaataatttctgcaggaagcaacattgggtagaaatttaaaaacaacaataacacttattgtaactttttaatctgtacaaagattccattcttagaaggcttggaaaatatatcaatgtataaaaaatgatttataaatacatgagccaaagataaacattttcatatttctagtctttttatgcatatgtaacaaatatttgcataattgtgatcatactgattataaaattaagtacagtcattcactgcataacagtgtttgagccaacgatggatcatgtattcagcagtggttccataagattataatagagctaaaaaaattccagttgcctagtgaccttgtagctgtctagcgcaatactttactcatgtgtttgtggtgatgctggtgtaaacaaactactgtgctgccagttgtataaaaatatagcacataccaattatgtgtagtatgcaatacttgataatggtaataaatgactgttactgcatta

SEQ ID NO: 12587 - DNA, 540 bp, Homo sapiens
ttccggggttgctggaaacatgtctgcccaaggtcatagcacagtcagagaaaggctggcacatctgggccagccacaagcaccaaaaataaaaagggaagtgggatgtagaggaagaaagttaagctggaaacatttttttcataaaaatgctaatgctgtgaggccacccaggacactaatagaaggagatggaggtgaaataaagaaacgagtttcagctgtttttaggaaagaaatactaaagagaaataattattagatctaaagatgcaataaccagaaagccccctcttgtgggaagagaaggcagccttttctgaagaattgaagtggtcaagagaggatattcagtgtaattctgggagagaaaggaggaacatgaggattcagagatgtgacataagagtcttagagaacttcaaagtgaaaaagcagaagtgagaactgactcggggaaaggaattgataaataagcacgcttaaacaggtgtggtcccaaggagtccatggaaggccagcttactttaaaaaaaaaaa

SEQ ID NO: 12588 - DNA, 444 bp, Homo sapiens
aaaggaatggttaggcttggcagctgggccactgaaactgtttggtatcagtattgcggtggagctgaggactgcaggggaatgcgtgctcccgtcctggtgcagaaaaaataaaagcagccagacagtagctagatggtgttttgtaacttttgggtttggccctgatagtgaaccactgaatgaagatggatgaagggaatgctactaatgggggccccaaagaaaacaaaaatcagacgtgtgctcttcctgttttctgtctttcattctttccctgtactttgtgctcagtactgtgttttgtcattgtgttatgtcgtagttctcagttcacatctgctgtacagtgaccaagctgtgaatcatgtccactcgggaaagaggttgattctgtttaactgacaactgttgcttttgcagatggtcacacggaaaaggaaa

SEQ ID NO: 12589 - DNA, 1161 bp, Homo sapiens
taacatgtgtacttcaaattgtagtagtgactggaaatttaggattctgttgtttcataacacttaaatctgcagcagattttcaggaaaatggtcaagattcacagataattccttccttattccttacagattttacaattgtatggttatttctgaatttggttaatttgtttataagtgtagtggacatttaacagaacagatgcacccgattatctgattagaaatgtgtttcaacacacgggtccctttgcgtgtttccaatctctgttttcggatctgggattctccacctgttacatcgttcactggaactttcctacaaaatacagcctcgctgagaggcgcatcgtggaaaaatgaagcagcctgaagaaactctaatattgggaccgagtggagagatggaagagcatcatcagagtggtgccgccgcacatgcgggaggcgtcccaggcagcattgctctttgtacatgagacaggataccactgtcttttatgcattagactggtaaccagataaaataaccttgtaaaacagatcttttatgtaagaaaaatacaactctcacctcgcaaacattcctgtctgttgcggatgaacctagcagcaggagaggagccagggtcagtccacttggcctgaaagttaacgtcatatattcagatgtcaaggggtttctgtgcatgcttttgaagtattgtgtttgggcttttacaacatgtgcctcactgtttcgcatctacagagagagtgccgctgagagaggagcctgagtggatccgtgcccagatctgcattctctgtcctcaccacttctccctgctggttgatataaatgtggggataacgtcgagcacaaaggagtcaaaaattgatcagggctgggtgtggtggctcacgcctaaaatcctagcactctgggaggccgaggcaggaggactgcccaaggccaggagttaacatagcaggaccctgtctctacaaaaaataaaaaaaatcggctgggcatggtggtgtgcacttgtggtctcagctgtttgagaggctgaggcaggaggatctcttgagcccaggagtttgagcatgcagtgagctgtgatcgtgccactgcacttcatcccaggcgatggagtgagaccccatctcttattt

SEQ ID NO: 12590 - DNA, 501 bp, Homo sapiens
agtgtgggtcattcctgatgtgtcaggtctgataacaacatgaccagtgaataagaagcctttcagcttttctaggggaaaagactctgtagtattgactagtgaggaagaaaaactaaaacctgtgagtatgatgagtagagtatttgttacgtggatttctgagctgtaaagtctactttgttctttatagaaaaataaacacagcctaagataatttgacatctagttttcaaggaagccattaagaagctgtattttggcacatttatttaatttttaattgtgtgttcttttgctttatatatttatatgcatatatgaaccttttgaaatggttttatattttaaaaaagaatatgcattgcagagaagcctgttaaaaactcaatttttcaatgtaaatgtgaaggttagattgtctctcctgttagattgcaattccagaatagagctctacttcctgttgcagtatccttataaataaaataccttttttaa

SEQ ID NO: 12591 - DNA, 554 bp, Homo sapiens
ttttggggggataaggagggagaagttgtggtttgctgatatgatctatctgtcaggagaggggtaagtatgactaccggccctagtgagagactacctacctgggtgagagcccaccttctgccttctatatgcatgtaactaaaggcaaatgacctgtcgaagcctcttctctgtcaaatgggaataagcatggcaccagcctcttagatcattgtgaggattagatagctaaaatgtttaaagtgctagcacagaagcatagcaaggaataaatacatgtgagcttttattattatatcctgcagtttgctgcctaaagccttgaagagctctgctctttttttttgaattaaatgtcctaaagaaatctctctttggcatatatgagaatatctgccaagtccatatttggcttttcaaagataaaatgtttatgcaacaaagaagttcatacacaggcttcattactaaaaattttagtcaactaaatattagtttcatgtcgttcttataaattgctcttgttttcctgagtttcctttcttatttgt

SEQ ID NO: 12592 - DNA, 348 bp, Homo sapiens
ccagtgagtgaaggaaaaaatttaaagtgaaatttaaaaattccttgaaacaaatgtaaatagaaacacaacataccaaaacgtacgggacacagcaaaagctatattacaggcaagtttatagcaataaattcctaggttgaaaaactaaaaagatttcaaatcatcaacttgagatgcatctccagaaaccagaaaactgagaacaaaccaatccaaagttagtaggaaagaaatgataaagatcagagcagaaatgaacaatattgaaactgaaggaaaaaatacaaaagatcaatgaaataaaaagttggttttggaaaagaaaaacaaaattttaaaaacctt

SEQ ID NO: 12593 - DNA, 545 bp, Homo sapiens
tgttttgtttttgagacagagtcttactctgttgccaggctggagtgcagtggctcaatctccgctcactgcaacctccacctcccgagttcaagcaattctcctgcctcagcctcctgagtagctgggactacaggcatgtgccaccaccatgcccagctaatttttgtatttttagtagagacggggtttcaccatgttggccaggatggtctcaatctcttgaccttgtgatccgcccacctcagcctcccaaagtgctgggattacaggcataagccatgcgcccgaccagtattactcacttttataaaatgtcacatggtttaatcactgggagacaaggagacgacacaacttcatgctttgctgtctgtgtatgaactgagtacagatgcgtactgaccagtcattgccttcgaagaagtgacatgatcagtcacagatcatgatgtgcatgtgttatttacttagtgatttatgaactgaagagctagcagggaaatttgtgcttcatgcaattacaggtaatatatcaaggtaac

SEQ ID NO: 12594 - DNA, 409 bp, Homo sapiens
gttgcctttcgaaagaaaacatgattggaatgtgaagaaaaagatactaaaaacaagacaaaaaagtaacactaagtttaaaattttgaaaactctgaattattcaaatttgaattttattcttatttgttaattcttgaaacataacgcttatttcattgaataattgacactgttgttgctactcatgcccacactgaagctcctagacttgtttccttcaagtgaatgtatttagtgtccttaaaaagtaatcctctattttaaaactcatttgctttcagaagataatccttcagaaaattacattgggtttgtattgctctgagaagaatagtggcatattctgtctagttatataaaatctttctgttgtagcttttggttaagcacatgccaaacattttct

SEQ ID NO: 12595 - DNA, 368 bp, Homo sapiens
aagaaaataggtgactttttcactatgtgcttaggtgactgcagatgcccggcaatgttccctcccaggccctcctgggtgagcccgcctcccaggcaggggtcagcatggccggggtccctctgtctgagcccaggattcgtgcaacaccaggaagacaacagttgaaggttccttagtgagctaagggaagtatacacaaacttactacataaacattagaaagtgctgtccgtaaaaaacacgtcttcacagagccaacaagcagagaaatagctgcccagtgttaggaagtgcatcatgatccagaggttcagcccgtgtgcagcgcacagacctgaggccccagagagaccgaggacgcagac

SEQ ID NO: 12596 - DNA, 437 bp, Homo sapiens
gttttctcatgtataagctaaatcatcctttagccttctttctttcaagctaaatgactctggccctttaatctttcctcgtaggacctgttcaccatgccttttatgttctttcccctctttctctctctctctctctctctctctctctctctctttctaagagaaggggtctccactaggagcaatggctcacacctgtaatcccagcactttgggaggcttaagagggcagattgcttaagccaaggagtttgagaccagcctgggcaacatagaaagaccctgttttcaaaaattagctgggcatggtagtgcatgcctgtggtcccagctattcaggagactgaggtggtgaagcttgtgagccaagattgcactactgcactccagctgggcaacaaagcaagactctgtatcaaaaaaaaaaaaaaaaa

SEQ ID NO: 12597 - DNA, 1270 bp, Homo sapiens
aaaaagaaaaggtttgtttttagttctctgcctctgcaagtctttgtgatcacatttgttaaattgaatctgagattcaaatatttcatttaatattttctgggttttgataatgggatattctgtaagataaagcaagtaatcctagagtgatttactttatgtttagccatccaccattttcctatttctctactcctcccattctccatttttaaaaggaaattaacaaatgtcttcctttatccctgcctcagataatttttccctgaactcatcttgtcagcagaaacatttaatgtgaaataattctgtatttctgagacaagatcaacacagtagttctttacattgagctgaggtgaatgtatacttaaaaatactctattttctttttatatgaacttaaaatttttaaaatcatatatgggactccccaatgtgaaaatattagtctggacattctcttgccatcaggtgctatttctaccttagctgtgagttagactaaatccaaatttcgtatcattcatctttttataatatttaacttccctagaatcaccccatttcatgtctttaaccccaacttccaacaacttttctgcttttattttcaaatgtcaaattgtatttttgtgttttattttctcattgaagtgtaaaagtatcacatatatgaaggaatggctggtttagacatttactttggcatagtaaagattgatattgataccacccaccatcctttcctctagccccagaaagaaaagtttgacaactcaaaaacgattaaattatcttatcttgttatttaatagaacaatggaagctgtttcgtcaaaattaaaatactttaccaaaaaaatacttttttgtattttaatctgatagtgaatttggggattatttatgtaaatgtatcataattaatagtaattatgagttatttcactctctgtaatttgtgatacccaagattcatatttatttaatgtgaggtgttttttgaggcttttttgttttatcttgttttcttaactttttacagtgttgttagattatcgcggtcatctcggcatgtgggatcgctcctcctgtaggatcagctgttctctcttagagtcagggacaagggagggttttgctacatggtcgatagttgggataataccgccattattctggaactatctgaaattgctggttttattggtcaaaaatgatcagatgctagcaatttcataatagatatattcaagaaggaacc

SEQ ID NO: 12598 - DNA, 584 bp, Homo sapiens
aagagccaccctctggcctgtgagggcctgctttaaggctacgttaaggacaggaaagtcaatgaaaaatgcatgaagacgcacataggcttctcttagaagaccggcatgaggagcctcttccacgggcatagggacattctagaattagcaagcagcacaaattgtttttctttttcttttttttttttgagatggagtttcactcttgttgcccaggctgctggagtgcagtggcatgatctcggctcaccaaaacctcccgcttcctgggttcaagagattctccctacctcagcctcccagagtagctgggattacaggcatgcgccaccgcacctggctaattttttgtatttttggtagagacggggtttctccatgttggtctccaactcccaacctcaagtgatccgcccgcctcggcctcctaaagtgctgggattacaggtgtgagccactgcgcccggccgcacaaactctttttctagcattgagcattcagccactttccacacaaataactgtttttcagcccccaagagcattttgcaggccatccatgacatccagaaaagttttgc

SEQ ID NO: 12599 - DNA, 498 bp, Homo sapiens
tgcggccaccatgtaagtcggacctgcccttctgccatgattgtaagtttcctgaaggacttccccctctgccatgattgtaagtttcctgaggcctccccagccatgtgaaactgagtcagttaaacctctttcctttaaaaattacccaacctcaggtatttctttatcagtgtgaaaacagactgctatactttctgataatcatgcttaagcaattggggaattcagactagctgggatcaaactatggccccacccttagcagtcatgtgaccttggggaggttacttaccttctccgtctcaacaacttctgtaaaatctgtaacatgagattgtttctgagggttaaatgagcatagcacagtggggacactgtcaggcacacactacttgccagatgtcgagtattcctctttattgaaataggactgtggtaagccactttatggctctcgattgtgtatgagaaaatcatgcttagtgccttgttagt

SEQ ID NO: 12600 - DNA, 1412 bp, Homo sapiens
ccttttccgttgtcccttcgcgccccaaaccacatcctggagcgcactctccagcgtggctggcagcggggacggtgcgccggggcgcaggcccaagagtcgcgtgcgcggccccttgcaccatccccccgggcccacccccgggccgcgctgattgggcaggtagggactctgcccagcggaaagttttgggtgccgggaggaagtctaacctttgggagactccaagacagcagctccgaggtcggcgggggtctgggtggccatggaggagccccctgtgcgagaagaggaagaggaggagggagaggaggacgaggagagggacgaggttgggcccgagggggcgctgggcaagagccccttccagctgaccgccgaggacgtgtatgacatctcctacctgttgggccgcgagcttatggccctgggcagcgacccccgggtgacgcagctgcagttcaaagtcgtccgcgtcctggagatgctggaggcgctggtgaatgagggcagcctggcgctggaggagctgaagatggagagggaccacctcaggaaggaggtggaggggctgcggagacagagccctccggccagcggggaggtgaacctgggcccaaacaaaatggtggttgacctgacagatcccaaccgaccccgcttcactctgcaggagctaagggatgtgctgcaggaacgcaacaaactcaagtcgcagctcctggtggtgcaggaagagctgcagtgctacaagagtggcctgattccaccaagagaaggcccaggaggaagaagagaaaaagatgctgtggttactagtgccaaaaatgctggcaggaacaaggaggagaagacaatcataaaaaagctgttcttttttcgatcggggaaacagacctagatccaaggccacaagtaaggctatggctctgattctagaagacaaccttccaagatgcctggcaaaaccacctccctgtgccacacagacacactaggcctgtgtatttatttccccttcaaagcagactgaggagggaggagacgaggttctcttggcatcactttctccctggctgcagaactagacacccttgaagatttggcctgggccagtgagactgaaatcaagaaaaacagaagggatgtgcagggtgggggggtccacttcctgctcccatgtcaacccccagggcctccagcgtgcagacgcgtgtcctactcatctgctcccacggatgaccctggtcttcaatggttagcagaagggagaaaagaaagcaggaaaatgtgctattgagattccagtggtgacttcactgatatttagtgaatatttgatttagccaacatgcctttctttatgtgattttgtattaaagtaaaatgatttttatactttcaaaaactta

SEQ ID NO: 12601 - DNA, 924 bp, Homo sapiens
ccttttccgttgtcccttcgcgccccaaaccacatcctggagcgcactctccagcgtggctggcagcggggacggtgcgccggggcgcaggcccaagagtcgcgtgcgcggccccttgcaccatccccccgggcccacccccgggccgcgctgattgggcaggtagggactctgcccagcggaaagttttgggtgccgggaggaagtctaacctttgggagactccaagacagcagctccgaggtcggcgggggtctgggtggccatggaggagccccctgtgcgagaagaggaagaggaggagggagaggaggacgaggagagggacgaggttgggcccgagggggcgctgggcaagagccccttccagctgaccgccgaggacgtgtatgacatctcctacctgttgggccgcgagcttatggccctgggcagcgacccccgggtgacgcagctgcagttcaaagtcgtccgcgtcctggagatgctggaggcgctggtgaatgagggcagcctggcgctggaggagctgaagatggagagggaccacctcaggaaggaggtggaggggctgcggagacagagccctccggccagcggggaggtgaacctgggcccaaacaaaatggtggttgacctgacagatcccaaccgaccccgcttcactctgcaggagctaagggatgtgctgcaggaacgcaacaaactcaagtcgcagctcctggtggtgcaggaagagctgcagtgctacaagagctgatttcatcaagagaaggctaaaaaaaaaaaaaaatactaaaaaaatttttgggggggttgggccttaaaaagtttttaacacactttttgggggggggccattggtattgacatgtctaaggggtcctaagagaaaccggggcggactagggtggttttccataa

SEQ ID NO: 12602 - DNA, 1233 bp, Homo sapiens
gagactccatgagagttggctccggaggctcggacgtgagggttctgtggatggtcggatggtgagaggctcctctgtagcggaagataagaggaagaaggaagtgaagggatgaggattgatcgagcgagtagggacagaaggtctgggggccgaggggagcgttgggcaaagagtccagtttgagagttgatcgggcggaagacgtgtatgacatctcctacctgttgggccgcgagcttatggccctgggcagcgacccccgggtgacgcagctgcagttcaaagtcgtccgcgtcctggagatgctggaggcgctggtgaatgagggcagcctggcgctggaggagctgaagatggagagggaccacctcaggaaggaggtggaggggctgcggagacagagccctccggccagcggggaggtgaacctgggcccaaacaaaatggtggttgacctgacagatcccaaccgaccccgcttcactctgcaggagctaagggatgtgctgcaggaacgcaacaaactcaagtcgcagctcctggtggtgcaggaagagctgcagtgctacaagagtggcctgattccaccaagagaaggcccaggaggaagaagagaaaaagatgctgtggttactagtgccaaaaatgctggcaggaacaaggaggagaagacaatcataaaaaagctgttcttttttcgatcggggaaacagacctagatccaaggccacaagtaaggctatggctctgattctagaagacaaccttccaagatgcctggcaaaaccacctccctgtgccacacagacacactaggcctgtgtatttatttccccttcaaagcagactgaggagggaggagacgaggttctcttggcatcactttctccctggctgcagaactagacacccttgaagatttggcctgggccagtgagactgaaatcaagaaaaacagaagggatgtgcagggtgggggggtccacttcctgctcccatgtcaacccccagggcctccagcgtgcagacgcgtgtcctactcatctgctcccacggatgaccctggtcttcaatggttagcagaagggagaaaagaaagcaggaaaatgtgctattgagattccagtggtgacttcactgatatttagtgaatatttgatttagccaacatgcctttctttatgtgattttgtattaaagtaaaatgatttttatactttcaaaaactta

SEQ ID NO: 12603 - DNA, 838 bp, Homo sapiens
aggagttcaaaaccagcgtggccaacatggtgaaaccccgtctctactgaaaatacaaaaaaattagccaagtgtggtggtgggcacctgtaatcccagctactcgggaggctgaggcaggagaatcgcttgagccagagaggtaggggctgcggagacagagccctccggccagcggggagtggcctgattccaccaagagaaggcccaggaggaagaagagaaaaagatgctgtggttactagtgccaaaaatgctggcaggaacaaggaggagaagacaatcataaaaaagctgttcttttttcgatcggggaaacagacctagatccaaggccacaagtaaggctatggctctgattctagaagacaaccttccaagatgcctggcaaaaccacctccctgtgccacacagacacactaggcctgtgtatttatttccccttcaaagcagactgaggagggaggagacgaggttctcttggcatcactttctccctggctgcagaactagacacccttgaagatttggcctgggccagtgagactgaaatcaagaaaaacagaagggatgtgcagggtgggggggtccacttcctgctcccatgtcaacccccagggcctccagcgtgcagacgcgtgtcctactcatctgctcccacggatgaccctggtcttcaatggttagcagaagggagaaaagaaagcaggaaaatgtgctattgagattccagtggtgacttcactgatatttagtgaatatttgatttagccaacatgcctttctttatgtgattttgtattaaagtaaaatgatttttatactttcaaaaactta

SEQ ID NO: 12604 - DNA, 1457 bp, Homo sapiens
gttttatttttttagttattcaatagtaggatacaaacatcgcatagcaacgagtaatgtgattatttgtgctggcatcaggcttggtgaatttatagcatgatatagatagatacaggccttcttatctgaaagcgtaatattggagacaggcatatgtggtggtcatagacagtggtatattatttcatttacttttcagcaattccttgaggtcagtactttgttgtctccattttgtagagaagaaaattgggccgtagggaggtcaaataactggccagaggtcacacactcagtggaagactcagagtctgaaccctggtcagcctgacgttagagccctccgatgggttcagccactgggctatatctgcctctttgtcattctttcacaacagggagggaaagacatcttattcctttaattctttaacactttcttattcctgtaattctttaacaagactgggaaagacatcttattccaggtgagcagaggtgtgggctgcttgggctgtttcttttctctgatgaggtcttgtgaagacggcagaaagccaagcaagtgtcagacaaggtgtgtaaagctctttggcagctctgtgattggagggaacccaggaacagaaaagtttaaggaagtcagagatagagatgttagtaaatgtaataaaatcacttggctgtggaaggtcatttttttcttttaattctagattttttttttcatttttaaactgccctccaccctaaatagcttgtgattgttatattcccttaaaattttcaaatattatttacaagagagctgttttacaggagagctgttttctccatatagctgatgtacagacagcacagccctcttcagatttagtaatgagaccaagaagtctttaaatattggtgaatggcatttgtccatttgaggtgaatcatgaataacttgaacaaaaataaaaaaaaataagcaagactatcatatttgaataatgaggtgctctttttttcccaactgccaaaactttttaatctttgtcaacgattgttctgtcctccgtcttatttaggttgcatctgtgcgactctgagctcaggagccctgacaagcggcatatgaattctgtattcattagtgatcttgatccaaatgcctctgtccctgccacgggggctcaggtgtggaagctgctggctaatcccaccagctgacattcagaggtttaatgactccataggaaggtgaccactcgctgggaggtttgctggcggaacccacacagcagacagtggagatcaaggaagactatccgtgtttagccgaagcaccttcctgtgcaacttgaaccctgttggcatcaaacacagagttttaagtaaatgcaaaattaaaccaaaaaaacctcgaccttcgataactattataaacaatgattttcttatctgttttgatg

SEQ ID NO: 12605 - DNA, 388 bp, Homo sapiens
aaattcagtaaggcattcacagattatcaccacctctgtaagaagtatatagagacacatgtttgaaatatgcataatgagatggagaacagtgtccctctcagttgttgtgttgggctagctcagagaattcagtttctgctgtcatcacagctgggaatgagaaagggagggggctctggttggtctccctctgcctctggagcacacatgcaggacaagaggctgctgtaggagcagctctgaaagctgagttctcgggtccttgtgaaggagggaagcttgcctgccttggagcgtgaaaaagtcttgctggacagaagtctcatggtttaaaaatgggaagggagaggattgagatcacactagaatgcacagaaaattctta

SEQ ID NO: 12606 - DNA, 295 bp, Homo sapiens
aacaatgagtcagaggactgggctctgatcttgagaaagctgattttctctatgaccttcaattagttatataatctttttgtctgtgaatcttttatctaatctgtgatatatggtaactacttttttgtttgttggttgaggactataggaaatacaagatgttattttttctcatatgttgggaagacccattctttctgcatttcttctaagggacctctttctccttaagcacgtggacttcactggcaaacaaaggatgtatttaacctgatgaggaaagtcaattctg

SEQ ID NO: 12607 - DNA, 426 bp, Homo sapiens
acctcaccttggcttataacatgacttatacagaagttctaagcagccctcataaaaattaactttggagtattacctatttaaggactttatgaaacaaatttataacaaatttgaacaaggaatttattacgaattcagaaatctctgtatgagcccttaattattgcttgattaaaatcctgacgaatcacttaggaatacattgttaacagttttctatgttgtctaccaaagtggaagttatctggcaaacagtttacgttgctagctaacagggaagaaaagtttctaatacgtcaccatagctgggctcattggctcgtgcctgtagtcccggctactctggaggctgaggtgagaggatcacttgagccaaagaattcagagccagcctgggcaacatagtgaaaccttgtctctaaa

SEQ ID NO: 12608 - DNA, 343 bp, Homo sapiens
atcctatctggtagggagctgttaaatcatttagttcttggaaagcagtagcacttaatttgtggatactgttatcctaaattagagaagatggtaaaggaaggaatggggtagatcgagcttaagccaggtggtcctggtggacaccagacttgaatggtagcccttttgggggtagtccttgttgcgtggcaatcttccaaccattccaaatgaggggctctggaaaaatggttcccctggtaataagcagtagtcctggggttgtgggggctgggggaggtagggatttacttgtttacccatttaccttgtttggcaataaaattgacatctgataata

SEQ ID NO: 12609 - DNA, 863 bp, Homo sapiens
tgaatccaataatatgtattaaacaacaattcttaaacaagtgggattgctcttaggaatgcaaagatgatccaatatcagaaactttatccatgtaattcacattaagaggctacaggagaaaaaccatatggttccctcaatagaggcagaaaaaaatgatgtgataaagtttaacgcctatgtgtgattttggggtagtggagtacaccacttagcaagccaggactagagaggaacttcttcaacttgatacaagttataaaccaaaacttaacttttcagtaaacttgatagagaaattaaaagtgtatcattctctttaagataaggagtaggccaaggatgtcatcctggccataccctaatacaagaaaaagaaatggggatgtgaggatcaggtaggaagtgataaaacttagtgtagctcatagggttgatggtctccataaaggttctcaaacattttggtgttacgacttgttgtattcttaaaagttattgaaacccccaaagggcttttcttgatagagattctatctgttgatagttaccatcttagaagttaaaactaagaaatgtttaaagcagaactatacaagcacatattccactggggtcatggtgtgctgcctctggaaaactctttatctttgtgagaatgaaagaaaaggcaaataatgtcgagtattattatgaaaatgtttttgacctttcctgaaagggtctggggggctctctggaatccccagactacactttgaaaattactgggctacatggaaaaaaaaaattaaggaacttaacaactaaagagagatttcagatttcagagaggttttggatataagatcagtgtactc

SEQ ID NO: 12610 - DNA, 491 bp, Homo sapiens
cttttttaataagtaaatggagtacagtctagaataatgataagaagtatagtgtagtaaatatataagccagtaacagtcatttatcatcattatcaggttttatgtactgtacacaattgtatgtgcaatactctgtgtacaactagcagagcagtaggtttgtttacaccagcatcaccacaaacatatgagaaatgccttgtgataggacattaacaacggttacaatgtcgctaggtgacagaaatttttcagctccattataatcctgtaagatcaccattgaatacatggtctgtggttgaaccaaactttgttatttggtgcatgactgtatatacatttaaatattttgttatttttattataccactggactgtaaaacctatgaaaacagagatcttatcctttttatttacccctacatccccaacatttggaattatacctggcacgtagtagccactcaataaataattgtgcaata

SEQ ID NO: 12611 - DNA, 686 bp, Homo sapiens
gttaaaaggtaatctgtttagcctccctttccccattctcctgccagaaaagagggagttcaagtcttctttccaggactcctgtgttttggctgagactgattcttcactgtggccttgggagaaaagctgcctaaccagttctgggccctggctagttacaaccatgtgtgagttgtttacagtacgcacaggtatgggctgaagggaaacaaagcttaagggatgactagaaaggcttgctgaaattgctatgggagggccccaccctccaagccatctcccctcacaccccgctcggtttcagtttctgcagcttggttatgcgacattctcttaatccttttttgaatctggtctctacttaagcactcaagaaaactgctccacaaggattgttttagtggggttttaattttttaaaatgttcttgtttatttaaattgcttgaacaagggtttagctgtatgggaagagttcctgcctttagctatacatgtttccacccacttagacatgctgctcacccacagactcatacagcctccacagacacaaagcttctgtgtatcctacatgtacctgcaccccaattctgtcaacctccccacagctcttgactggctgtttatctattccattccactaccttcccaccccagccctcaaagtcccaaacagattga

SEQ ID NO: 12612 - DNA, 304 bp, Homo sapiens
aaatatgtcatctgttttgagtaaattattatataaagtaaaaggcctacaccaaggtattttatttttaatttttaaatttgcatatggatattcaaatgctctagcaacatttgttaaaaagacttgttttttattttatttttgattgtacatatttataaagtatagtgtgatgttgtgatacatggctaacttgtataatgatcaagtcagggtaattagtatttctgtcacctcaaacatttaaatgttcttaccataaggaactgatacatgtttggtcgacgcggccgcccaggaa

SEQ ID NO: 12613 - DNA, 385 bp, Homo sapiens
gtgtggatgctggggtggatacaggaaaccattcccatggctggggagaaaacagagccaggacatgactgcgggctgcatggctccggacccaggtggcgtcttctactataggctgcagctggattcacagcacagccaccttcccggggtgactcaggcctcagggacaagaactggatggcacccagagagcctccaggcatgcccaacagactccaaccaaagccagggaagatggctcacacctgctctgctaggtcagccagcattctgggcattccaaaaattcctccatgctttttgctgccttctcccctgccccgccgccccccttccctaccttttaatgaattaaaggacaggaaggcagaggggctgtgat

SEQ ID NO: 12614 - DNA, 2149 bp, Homo sapiens
gtgttgtccaggctggtctcaaactcttgggctcaagcaatcctcccacctcagcctcccaaagtgctgggattacaagcatgagctactgcacctgccctctgtttcctttggaaatctcttacctttcattagggtttctttcatagcaatttcctttggtttttaagacttctacattgctttttcttttattatctgtgctccgtgaaccttatgaatgctgcttaaaaataatgtcaaaatatgttttagctgcctactcaggtaacgttttcttttgctctcatcttggtttccatatactatttttggttttttgtgagatctaatcaatgatctagtcagaagctacttcactggctaacagtgatcatgttcatgtgctaaaaatgaacttgaaacacggaagtagtggttggtccagtttgaaagctcttattagtattcttcatcctggctgtaataatagccattatttgttatgcctttgttatgtagcagacactcttaaggattttatgtgtattattcaaattgctattactgttctttttatagttgagaatctcaggatacctacatttatcactttttcaatatatatgtatttcttattcttattttgtcttggagtgtttaatgtgttatttcctgttcattactttaatattatggtatctaggcttgtctttattaccatgagcaaggtctccaggagttccacagtactgaaggaaaattttgtcatatccctcagaagaactgaatatttattattggtatgggctcctttgtttattctcttctcccaattaatagattttaaatgaaatcttattagctagaaacaaaagccacttactccttgctgagagccaattacttaaatatatttcttccttataataaaataatttgcttctaggagcagaaatctatcttgccataccctttggtttttaaagatttctcttctatttgcatttctgcactttggtggttctcccatgaagataattatggtgtcataaaattcacattccactggttcctttgaatcttaccaaccactcttgttaacagagacaatgaacctgaactgttttaggactcttgttattactgagacaggtcacaaacatcaaaataggagtccgtggcttgtagtgatgctttttagtcttgtgatagcacaatccatcactttccccaaaattcttgtcatagaacataatgaaaaatatgtaaaatacccatttatgtggcatttcattcacttaagttgcagttaactctaagccaaattataccattttttctctctgtactttagctccttgaatttccttaatctgggaaacttttgttcccacaccaaggaacaaattcagggggtacaagtgcaggtttgttacatgagtatattgagtgatgctgaggtttggggtacagatcccatcaccaggtggtgagcatagtacctaacagatagttctttaatccatgccctcctctctccctccctgctctagtagtccacagtgtctattctggtctgggaaattttcatcactttccaccaatcttctatttattctccaaatgtcttccaaagtatcctgccccaccccctcctcatcctaagagattcctttaacttcaagatcatatccagtgattgctgaaaaatgtctgccatgcacttgctaagctagtgtttttaggcattaacatttattatcacatccatatttatatttttgaaataatttatacttctcactgatatcatctaaacagatgcttctcacagttttatgttttgttttttgtcagggatgaaagacaagtgagtggtatcacttaagggaaagaacagtaggcttaacgaatagcagacctggattctagttctggctttgtcatttactagctctggtaccccaggccagtcacttaccatctctggttcggttctcatctatcaaacaaagaggctagacaagattagaaactaaaggcagaagacaaggtagaaaaatcatatgattttgggaagagcattttgtcctttggtttagaagaccaggctgcccaaaagagcctcctattttatccataacccctgatgataaggttggtggga

SEQ ID NO: 12615 - DNA, 510 bp, Homo sapiens
aacttaagtttacttaaaattttctgaaaagaaatgtacaaagacagccttcaattaaggattaatcactatggcaactgagatgtggtgactgaagggggaggatgtattctcccctcagtttcctgccagctgtcatagtcaacctctgctgcctgaatccaagccaaaatatagactgtgaccaactctaagaaactatatctgtatttttataaattggtacaagtatcagactataaaagaagacttaatcccttgaattggatgacagacacttggcactcttgcaagtgtttgacagagaaataacgggtcgctttgtagtaaaacctggattaatagtaagcccctctttatgttattgcagtgtggtgtaaatgagagaactaagcatgctgtcagcctggggtgggaggtagcgtgggggagtgtcttttatataaccagtgcaggtttaagcactgttcagaatactgtaaatacaaaatattgtgttagtaaaaaaaa

SEQ ID NO: 12616 - DNA, 1459 bp, Homo sapiens
atgtgctgatgtatgtgctctgccagtgtgaagggtgaacagctccaactttatgtccccccagggacatagtatgagatcggaaaatagttcttagtcctgtttgtcttaatttttattggtttccaaggtctcctaggaaggagagcagagctgtgtggtcctaatcatggtgtcgatgccagatttatttgtaggtccagaggtctccctgagaagaggcatttgtgacaaactcaagtgctgggacctgcatgaattgtttatttgcagtgatgcttcatatttcccagcactgttcatggtatcttatttcccaggtccttcattgtagccatgggcactgaaggactgaattggtaggtaggtcactggttgtaagacctactggggccaggtaagaacagtaattggcccagacaggtaggtgtgataaacagagtagaaaagattgtggccaagaagagtgaatgtgtcccatccaaaggtgcatccagatatgtctgtgttactatggcttcatggtttgggggtatatagaaattctcaggacctcagacctttgattctcctttagcaacacacatcgtcagcataaggcatctaaagattttgtggactcataacttatgtactgtttttgagatgattgctgcacgggcaggaaagcaggatttgagagaacatacaccttgccttccagatatgtggtttttgtgattcacccagatctgttgtgccagttaggaattatctttattacttcccgtttattgccactgctgagaaggctgtccttcctaacttgtgaggagatgaatccttaataataagtaaatcttgtgttatcctatagtctggttttccaaaaggagaggtagatgcatatttttgtgtggaaccatttatcttaaaacattgaggtgcagttttcatacacaaaaccttctatctttttaagaactgtctgtatggtttattgcccagttaatgggttttgatagtcatgttatctcagtaagtgtcttgtcttagaaatatgtgtgtataggctgggtgcggtggctcatgcctgtaatcccagcactttgggaggccaaggcaggtggatcacctgaggtcaggagtttgagaccagcctgaccaacatggtgaaatccagtctctacttaaaatacaaaaattagccaggcgtggtggcgtgcatttgtaatcccagctacacaggaggctgaggcaggagaattgcttgaacctggggggcggaggttgcaatgagccaaggtcgcgccattgcactccagcctgggcgacagagtgacacttctcaaaaaacaaaaacaaaaacaaaaagaacagataagaaatacgtgtgtatatattctattttgtgtgttttcattcaccttatttcattcagtcttccaaatgaaatgttcttaattttgatgaagtctaa

SEQ ID NO: 12617 - DNA, 848 bp, Homo sapiens
atgtgctgatgtatgtgctctgccagtgtgaagggtgaacagctccaactttatgtccccccagggacatagtatgagatcggaaaatagttcttagtcctgtttgtcttaatttttattggtttccaaggtctcctaggaaggagagcagagctgtgtggtcctaatcatggtgtcgatgccagatttatttgtaggtccagaggtctccctgagaagaggcatttgtgacaaactcaagtgctgggacctgcatgaattgtttatttgcagtgatgcttcatatttcccagcactgttcatggtatcttatttcccaggtccttcattgtagccatgggcactgaaggactgaattggtaggtaggtcactggttgtaagacctactggggccaggtaagaacagtaattggcccagacaggtaggtgtgataaacagagtagaaaagattgtggccaagaagagtgaatgtgtcccatccaaaggtgcatccagatatgtctgtgttactatggcttcatggtttgggggtatatagaaattctcaggacctcagacctttgattctcctttagcaacacacatcgtcagcataaggcatctaaagattttgtggactcataacttatgtactgtttttgagatgattgctgcacgggcaggaaagcaggatttgagagaacatacaccttgccttccagatatgtggtttttgtgattcacccagatctgttgtgccagttaggaattatctttattacttcccgtttattgccactgctgagaaggctgtccttcctaacttgtgaggagatgaatccttaataataagtaaatcttgtgtta

SEQ ID NO: 12618 - DNA, 482 bp, Homo sapiens
tgttccggcgccacctttaatgggtgttgtgatgtcggttcctgggacccagtttcttcatttacttgtgaaaagaatggtactaaattgtccaaagtccctgcttaaaaatttagcagctgttttttctgtcatttctccattgacagacttggtcgttaaggttattggatcaaaaagagatgaagtatgcttccagttgagaacagcctctgcatgacataaaaatggcgcccacaagaacggaactgttttgatgtcagaagacagtatctattgaacagcattactttcctgagttgggtaggattgccctaaaatgactcgcaaaggcaggcgagaccacagcacacattagtcatcctcgttgccccgctgcggttcggcagctctagtgctgcctgcacagacacttggagctacaacttaagcatttgaaaattgagggaaagtgattaaattggcattgaagaaccctcatt

SEQ ID NO: 12619 - DNA, 2915 bp, Homo sapiens
tccggggcgggaggagaagcgttgggccgcggtcgcggggccgtctcaggctgccgtcccgcccctcccgtccggccgccgccgccgccaccgccgccaccgcctgggggttggttgaggcggacggcggggtccgggccggagtacgtcgttcccgctgcgctaggggaagcgggcagtcagaaaaatgggtaagaagagtcgagtaaaaactcagaaatctggcactggtgctacagcaactgtgtcaccaaaggaaatcttgaacctgaccagtgagctgctgcagaaatgcagcagtccggcgcctggcccaggaaaagagtgggaagagtatgtgcagatccggactctggttgagaaaatacggaaaaagcaaaaaggtctgtccgttacttttgatggaaaaagagaagattactttcctgatctaatgaaatgggcctctgaaaatggggcttctgtcgagggttttgaaatggttaacttcaaagaagagggctttggtttgagagcaacaagagatatcaaggcagaagaattgtttttatgggttccacgaaaattgctaatgactgttgaatctgctaaaaattcagtgttggggcccttatattctcaagaccgaatccttcaagccatgggaaacatcgcactggcctttcatttgctgtgtgagcgagccagccctaactccttctggcagccctatattcaaaccctccccagtgaatatgacactcctctctactttgaagaagatgaagttcggtatcttcagtccacacaagctatacatgatgtcttcagccagtataaaaacacagctcgacagtacgcctacttctataaagtcatccagacccatcctcatgccaacaaactacccttgaaggattctttcacttacgaggactacaggtgggcagtctcttctgttatgacgaggcaaaaccaaattcccacagaggatggttcccgcgtgaccctggctctgattcctttatgggatatgtgtaaccacaccaacggcctgatcactactggttacaacctggaagatgaccgctgtgagtgtgtggctctgcaggattttcgggctggagagcagatttacattttttatggcactcgatccaacgcagagtttgtgatccacagtggttttttctttgacaataactcacacgacagagtgaaaataaagcttggagtgagtaaaagtgacagactctacgccatgaaggccgaggtcttggctcgtgccggcatccccacttccagtgtttttgcattgcattttaccgagccgcccatctctgctcagcttttggcttttctccgagtattctgtatgactgaagaagaactgaaagaacacttgctgggagacagcgctattgatagaatcttcaccttggggaactcggaatttcctgttagctgggacaacgaggtcaaactttggacatttcttgaagatagagcctcacttcttttaaaaacatataaaacaactattgaggaagataaatccgtcttgaaaaaccacgatctttctgttcgtgcaaaaatggccatcaaattgcgcttaggtgagaaagagattttggaaaaagcagtaaagagtgcagctgtcaaccgggaatactatcgccaacagatggaggaaaaggctccgcttcccaaatatgaagagagtaaccttgggctgttggagagcagcgtgggggactcgaggctccccctggtcttgagaaacctcgaggaggaggctggagtgcaggatgccttgaacatcagagaggcaatcagcaaagcaaaggccacagaaaacgggcttgtaaacggtgaaaactctatccctaatgggaccaggtccgaaaatgaaagtctcaatcaagaaagtaaaagagcagttgaagacgccaaaggatcttcttcagacagcactgctggagttaaggagtagctcgaggtgaagctggatgggggatccagtggagcaggagttgacggacagtccgttcacatcgctgtgtttccttgttaacatttttctttctgcagagaggaagatatgtttttgctgctttatataaaaatggtttttttaagttattttaaaaatctagcttccctttttgattaagattgccatcttgcttttaggcaaaacaaaccaattaacaaacaaccacaagaaagggagaagaggtgcctgtgggagattttgcagacctattgtgggtataggtattttcttcctggggaagaattcagttcccgtctcagctgtacttttgtgggcctgtcatcttgatgaccagaatgaaagcttgctctgcctcctgccagccagaattggtggcgggacttggggatacagcgtgaaggtggggaagttgcacagcagaaaacagaattgaagttgggaaactctagagtctgggcaaaatgtttggttttttctcttaaaaaaaataacaccccattaccaaaagaaaaggtaaggtggcaaccttatttttaatagtttgaaatgatgataatcctaattatataaaaatatatatataaacacacatatatatagtgatttctaaagatttgtttacttttgtgttttgttttactgtactaagaacttgtcctttctccttgaatcaaagtaggacatgcatcatcctcctaattttaaatgttggctctgattttaaagtggtgcatttgattccagccttggtaatggagagtttgcaaacacacagcggcccacagcttcacgtggtggtgtgcagtgtgaggcagctccttggctttcctggttttcacaacaagctagagattttcaaagctacacttttgagtaaaaacccttattaaaagaaaaacatgattaataaaaaaaaaaa

SEQ ID NO: 12620 - DNA, 2618 bp, Homo sapiens
tccggggcgggaggagaagcgttgggccgcggtcgcggggccgtctcaggctgccgtcccgcccctcccgtccggccgccgccgccgccaccgccgccaccgcctgggggttggttgaggcggacggcggggtccgggccggagtacgtcgttcccgctgcgctaggggaagcgggcagtcagaaaaatgggtaagaagagtcgagtaaaaactcagaaatctggcactggtgctacagcaactgtgtcaccaaaggaaatcttgaacctgaccagtgagctgctgcagaaatgcagcagtccggcgcctggcccaggaaaagagtgggaagagtatgtgcagatccggactctggttgagaaaatacggaaaaagcaaaaaggtctgtccgttacttttgatggaaaaagagaagattactttcctgatctaatgaaatgggcctctgaaaatggggcttctgtcgagggttttgaaatggttaacttcaaagaagagggctttggtttgagagcaacaagagatatcaaggcagaagaattgtttttatgggttccacgaaaattgctaatgactgttgaatctgctaaaaattcagtgttggggcccttatattctcaagaccgaatccttcaagccatgggaaacatcgcactggcctttcatttgctgtgtgagcgagccagccctaactccttctggcagccctatattcaaaccctccccagtgaatatgacactcctctctactttgaagaagatgaagttcggtatcttcagtccacacaagctatacatgatgtcttcagccagtataaaaacacagctcgacagtacgcctacttctataaagtcatccagacccatcctcatgccaacaaactacccttgaaggattctttcacttacgaggactacaggtgggcagtctcttctgttatgacgaggcaaaaccaaattcccacagaggatggttcccgcgtgaccctggctctgattcctttatgggatatgtgtaaccacaccaacggcctgatcactactggttacaacctggaagatgaccgctgtgagtgtgtggctctgcaggattttcgggctggagagcagatttacattttttatggcactcgatccaacgcagagtttgtgatccacagtggttttttctttgacaataactcacacgacagagtgaaaataaagcttggagtgagtaaaagtgacagactctacgccatgaaggccgaggtcttggctcgtgccggcatccccacttccagtgtttttgcattgcattttaccgagccgcccatctctgctcagcttttggcttttctccgagtattctgtatgactgaagaagaactgaaagaacacttgctgggagacagcgctattgatagaatcttcaccttggggaactcggaatttcctgttagctgggacaacgaggtcaaactttggacatttcttgaagatagagcctcacttcttttaaaaacatataaaacaactattgaggaagataaatccgtcttgaaaaaccacgatctttctgttcgtgcaaaaatggccatcaaattgcgcttaggtgagaaagagattttggaaaaagcagtaaagagtgcagctgtcaaccgggaatactatcgccaacagatggaggaaaaggctccgcttcccaaatatgaagagagtaaccttgggctgttggagagcagcgtgggggactcgaggctccccctggtcttgagaaacctcgaggaggaggctggagtgcaggatgccttgaacatcagagaggcaatcagcaaagcaaaggccacagaaaacgggcttgtaaacggtgaaaactctatccctaatgggaccaggtccgaaaatgaaagtctcaatcaagaaagtaaaagagcagttgaagacgccaaaggatcttcttcagacagcactgctggagttaaggagtagctcgaggtgaagctggatgggggatccagtggagcaggagttgacggacagtccgttcacatcgctgtgtttccttgttaacatttttctttctgcagagaggaagatatgtttttgctgctttatataaaaatggtttttttaagttattttaaaaatctagcttccctttttgattaagattgccatcttgcttttaggcaaaacaaaccaattaacaaacaaccacaagaaagggagaagaggtgcctgtgggagattttgcagacctattgtgggtataggtattttcttcctggggaagaattcagttcccgtctcagctgtacttttgtgggcctgtcatcttgatgaccagaatgaaagcttgctctgcctcctgccagccagaattggtggcgggacttggggatacagcgtgaaggtggggaagttgcacagcagaaaacagaattgaagttgggaaactctagagtctgggcaaaatgtttggttttttctcttaaaaaaaataacaccccattaccaaaagaaaaggtaaggtggcaaccttatttttaatagtttgaaatgatgataatcctaattatataaaaatatatatataaacacacatatatatagtgatttctaaagatttgtttac

SEQ ID NO: 12621 - DNA, 2491 bp, Homo sapiens
tagctagtacgaggctgggtgttaaatcgggcgaggctgcgagggcttccgcaatggttaatgtccaccgagaagggcttcggttggatagccaaatggatataccaaggtccagaggggtatgatgggtttgcgatcactgctatgtgagctgtcgaatgtgctaaaagttcacgtgtggggcccttatattctcaagaccgaatccttcaagccatgggaaacatcgcactggcctttcatttgctgtgtgagcgagccagccctaactccttctggcagccctatattcaaaccctccccagtgaatatgacactcctctctactttgaagaagatgaagttcggtatcttcagtccacacaagctatacatgatgtcttcagccagtataaaaacacagctcgacagtacgcctacttctataaagtcatccagacccatcctcatgccaacaaactacccttgaaggattctttcacttacgaggactacaggtgggcagtctcttctgttatgacgaggcaaaaccaaattcccacagaggatggttcccgcgtgaccctggctctgattcctttatgggatatgtgtaaccacaccaacggcctgatcactactggttacaacctggaagatgaccgctgtgagtgtgtggctctgcaggattttcgggctggagagcagatttacattttttatggcactcgatccaacgcagagtttgtgatccacagtggttttttctttgacaataactcacacgacagagtgaaaataaagcttggagtgagtaaaagtgacagactctacgccatgaaggccgaggtcttggctcgtgccggcatccccacttccagtgtttttgcattgcattttaccgagccgcccatctctgctcagcttttggcttttctccgagtattctgtatgactgaagaagaactgaaagaacacttgctgggagacagcgctattgatagaatcttcaccttggggaactcggaatttcctgttagctgggacaacgaggtcaaactttggacatttcttgaagatagagcctcacttcttttaaaaacatataaaacaactattgaggaagataaatccgtcttgaaaaaccacgatctttctgttcgtgcaaaaatggccatcaaattgcgcttaggtgagaaagagattttggaaaaagcagtaaagagtgcagctgtcaaccgggaatactatcgccaacagatggaggaaaaggctccgcttcccaaatatgaagagagtaaccttgggctgttggagagcagcgtgggggactcgaggctccccctggtcttgagaaacctcgaggaggaggctggagtgcaggatgccttgaacatcagagaggcaatcagcaaagcaaaggccacagaaaacgggcttgtaaacggtgaaaactctatccctaatgggaccaggtccgaaaatgaaagtctcaatcaagaaagtaaaagagcagttgaagacgccaaaggatcttcttcagacagcactgctggagttaaggagtagctcgaggtgaagctggatgggggatccagtggagcaggagttgacggacagtccgttcacatcgctgtgtttccttgttaacatttttctttctgcagagaggaagatatgtttttgctgctttatataaaaatggtttttttaagttattttaaaaatctagcttccctttttgattaagattgccatcttgcttttaggcaaaacaaaccaattaacaaacaaccacaagaaagggagaagaggtgcctgtgggagattttgcagacctattgtgggtataggtattttcttcctggggaagaattcagttcccgtctcagctgtacttttgtgggcctgtcatcttgatgaccagaatgaaagcttgctctgcctcctgccagccagaattggtggcgggacttggggatacagcgtgaaggtggggaagttgcacagcagaaaacagaattgaagttgggaaactctagagtctgggcaaaatgtttggttttttctcttaaaaaaaataacaccccattaccaaaagaaaaggtaaggtggcaaccttatttttaatagtttgaaatgatgataatcctaattatataaaaatatatatataaacacacatatatatagtgatttctaaagatttgtttacttttgtgttttgttttactgtactaagaacttgtcctttctccttgaatcaaagtaggacatgcatcatcctcctaattttaaatgttggctctgattttaaagtggtgcatttgattccagccttggtaatggagagtttgcaaacacacagcggcccacagcttcacgtggtggtgtgcagtgtgaggcagctccttggctttcctggttttcacaacaagctagagattttcaaagctacacttttgagtaaaaacccttattaaaagaaaaacatgattaataaaaaaaaaaa

SEQ ID NO: 12622 - DNA, 2095 bp, Homo sapiens
attatatcttatacattgacaactacataatcccgatctccacacccaccctctagccacttactacccttgacggattctttcacttacgaggacaacaggtgggcagtctcttctgttatgacgaggcaaaaccaaattcccacagaggatggttcccgcgtgaccctggctctgattcctttatgggatatgtgtaaccacaccaacggcctgatcactactggttacaacctggaagatgaccgctgtgagtgtgtggctctgcaggattttcgggctggagagcagatttacattttttatggcactcgatccaacgcagagtttgtgatccacagtggttttttctttgacaataactcacacgacagagtgaaaataaagcttggagtgagtaaaagtgacagactctacgccatgaaggccgaggtcttggctcgtgccggcatccccacttccagtgtttttgcattgcattttaccgagccgcccatctctgctcagcttttggcttttctccgagtattctgtatgactgaagaagaactgaaagaacacttgctgggagacagcgctattgatagaatcttcaccttggggaactcggaatttcctgttagctgggacaacgaggtcaaactttggacatttcttgaagatagagcctcacttcttttaaaaacatataaaacaactattgaggaagataaatccgtcttgaaaaaccacgatctttctgttcgtgcaaaaatggccatcaaattgcgcttaggtgagaaagagattttggaaaaagcagtaaagagtgcagctgtcaaccgggaatactatcgccaacagatggaggaaaaggctccgcttcccaaatatgaagagagtaaccttgggctgttggagagcagcgtgggggactcgaggctccccctggtcttgagaaacctcgaggaggaggctggagtgcaggatgccttgaacatcagagaggcaatcagcaaagcaaaggccacagaaaacgggcttgtaaacggtgaaaactctatccctaatgggaccaggtccgaaaatgaaagtctcaatcaagaaagtaaaagagcagttgaagacgccaaaggatcttcttcagacagcactgctggagttaaggagtagctcgaggtgaagctggatgggggatccagtggagcaggagttgacggacagtccgttcacatcgctgtgtttccttgttaacatttttctttctgcagagaggaagatatgtttttgctgctttatataaaaatggtttttttaagttattttaaaaatctagcttccctttttgattaagattgccatcttgcttttaggcaaaacaaaccaattaacaaacaaccacaagaaagggagaagaggtgcctgtgggagattttgcagacctattgtgggtataggtattttcttcctggggaagaattcagttcccgtctcagctgtacttttgtgggcctgtcatcttgatgaccagaatgaaagcttgctctgcctcctgccagccagaattggtggcgggacttggggatacagcgtgaaggtggggaagttgcacagcagaaaacagaattgaagttgggaaactctagagtctgggcaaaatgtttggttttttctcttaaaaaaaataacaccccattaccaaaagaaaaggtaaggtggcaaccttatttttaatagtttgaaatgatgataatcctaattatataaaaatatatatataaacacacatatatatagtgatttctaaagatttgtttacttttgtgttttgttttactgtactaagaacttgtcctttctccttgaatcaaagtaggacatgcatcatcctcctaattttaaatgttggctctgattttaaagtggtgcatttgattccagccttggtaatggagagtttgcaaacacacagcggcccacagcttcacgtggtggtgtgcagtgtgaggcagctccttggctttcctggttttcacaacaagctagagattttcaaagctacacttttgagtaaaaacccttattaaaagaaaaacatgattaataaaaaaaaaaa

SEQ ID NO: 12623 - DNA, 2861 bp, Homo sapiens
tccggggcgggaggagaagcgttgggccgcggtcgcggggccgtctcaggctgccgtcccgcccctcccgtccggccgccgccgccgccaccgccgccaccgcctgggggttggttgaggcggacggcggggtccgggccggagtacgtcgttcccgctgcgctaggggaagcgggcagtcagaaaaatgggtaagaagagtcgagtaaaaactcagaaatctggcactggtgctacagcaactgtgtcaccaaaggaaatcttgaacctgaccagtgagctgctgcagaaatgcagcagtccggcgcctggcccaggaaaagagtgggaagagtatgtgcagatccggactctggttgagaaaatacggaaaaagcaaaaaggtctgtccgttacttttgatggaaaaagagaagattactttcctgatctaatgaaatgggcctctgaaaatggggcttctgtcgagggttttgaaatggttaacttcaaagaagagggctttggtttgagagcaacaagagatatcaaggcagaagaattgtttttatgggttccacgaaaattgctaatgactgttgaatctgctaaaaattcagtgttggggcccttatattctcaagaccgaatccttcaagccatgggaaacatcgcactggcctttcatttgctgtgtgagcgagccagccctaactccttctggcagccctatattcaaaccctccccagtgaatatgacactcctctctactttgaagaagatgaagttcggtatcttcagtccacacaagctatacatgatgtcttcagccagtataaaaacacagctcgacagtacgcctacttctataaagtcatccagacccatcctcatgccaacaaactacccttgaaggattctttcacttacgaggactacaggtgggcagtctcttctgttatgacgaggcaaaaccaaattcccacagaggatggttcccgcgtgaccctggctctgattcctttatgggatatgtgtaaccacaccaacggcctgatcactactggttacaacctggaagatgaccgctgtgagtgtgtggctctgcaggattttcgggctggagagcagatttacattttttatggcactcgatccaacgcagagtttgtgatccacagtggttttttctttgacaataactcacacgacagagtgaaaataaagcttggagtgagtaaaagtgacagactctacgccatgaaggccgaggtcttggctcgtgccggcatccccacttccagtgtttttgcattgcattttaccgagccgcccatctctgctcagcttttggcttttctccgagtattctgtatgactgaagaagaactgaaagaacacttgctgggagacagcgctattgatagaatcttcaccttggggaactcggaatttcctgttagctgggacaacgaggtcaaactttggacatttcttgaagatagagcctcacttcttttaaaaacatataaaacaactattgaggaagataaatccgtcttgaaaaaccacgatctttctgttcgtgcaaaaatggccatcaaattgcgcttaggtgagaaagagattttggaaaaagcagtaaagagtgcagctgtcaaccgggaatactatcgccaacagatggaggaaaaggctccgcttcccaaatatgaagagagtaaccttgggctgttggagagcagcgtgggggactcgaggctccccctggtcttgagaaacctcgaggaggaggctggagtgcaggatgccttgaacatcagagaggcaatcagcaaagcaaaggccacagaaaacgggcttgtaaacggtgaaaactctatccctaatgggaccaggtccgaaaatgaaagtctcaatcaagaaagtaaaagagcagttgaagacgccaaaggatcttcttcagacagcactgctggagttaaggagtagctcgaggtgaagctggatgggggatccagtggagcaggagttgacggacagtccgttcacatcgctgtgtttccttgttaacatttttctttctgcagagaggaagatatgtttttgctgctttatataaaaatggtttttttaagttattttaaaaatctagcttccctttttgattaagattgccatcttgcttttaggcaaattttgcagacctattgtgggtataggtattttcttcctggggaagaattcagttcccgtctcagctgtacttttgtgggcctgtcatcttgatgaccagaatgaaagcttgctctgcctcctgccagccagaattggtggcgggacttggggatacagcgtgaaggtggggaagttgcacagcagaaaacagaattgaagttgggaaactctagagtctgggcaaaatgtttggttttttctcttaaaaaaaataacaccccattaccaaaagaaaaggtaaggtggcaaccttatttttaatagtttgaaatgatgataatcctaattatataaaaatatatatataaacacacatatatatagtgatttctaaagatttgtttacttttgtgttttgttttactgtactaagaacttgtcctttctccttgaatcaaagtaggacatgcatcatcctcctaattttaaatgttggctctgattttaaagtggtgcatttgattccagccttggtaatggagagtttgcaaacacacagcggcccacagcttcacgtggtggtgtgcagtgtgaggcagctccttggctttcctggttttcacaacaagctagagattttcaaagctacacttttgagtaaaaacccttattaaaagaaaaacatgattaataaaaaaaaaaa

SEQ ID NO: 12624 - DNA, 1434 bp, Homo sapiens
cacgcagtaccgagcacagggcaatatacctcataagagagaatgcggtctggttcaaaaaaaatcaccaagatctttctgttcgtgcaaaaatggccatcaaattgcgcttaggtgagaaagagattttggaaaaagcagtaaagagtgcagctgtcaaccgggaatactatcgccaacagatggaggaaaaggctccgcttcccaaatatgaagagagtaaccttgggctgttggagagcagcgtgggggactcgaggctccccctggtcttgagaaacctcgaggaggaggctggagtgcaggatgccttgaacatcagagaggcaatcagcaaagcaaaggccacagaaaacgggcttgtaaacggtgaaaactctatccctaatgggaccaggtccgaaaatgaaagtctcaatcaagaaagtaaaagagcagttgaagacgccaaaggatcttcttcagacagcactgctggagttaaggagtagctcgaggtgaagctggatgggggatccagtggagcaggagttgacggacagtccgttcacatcgctgtgtttccttgttaacatttttctttctgcagagaggaagatatgtttttgctgctttatataaaaatggtttttttaagttattttaaaaatctagcttccctttttgattaagattgccatcttgcttttaggcaaaacaaaccaattaacaaacaaccacaagaaagggagaagaggtgcctgtgggagattttgcagacctattgtgggtataggtattttcttcctggggaagaattcagttcccgtctcagctgtacttttgtgggcctgtcatcttgatgaccagaatgaaagcttgctctgcctcctgccagccagaattggtggcgggacttggggatacagcgtgaaggtggggaagttgcacagcagaaaacagaattgaagttgggaaactctagagtctgggcaaaatgtttggttttttctcttaaaaaaaataacaccccattaccaaaagaaaaggtaaggtggcaaccttatttttaatagtttgaaatgatgataatcctaattatataaaaatatatatataaacacacatatatatagtgatttctaaagatttgtttacttttgtgttttgttttactgtactaagaacttgtcctttctccttgaatcaaagtaggacatgcatcatcctcctaattttaaatgttggctctgattttaaagtggtgcatttgattccagccttggtaatggagagtttgcaaacacacagcggcccacagcttcacgtggtggtgtgcagtgtgaggcagctccttggctttcctggttttcacaacaagctagagattttcaaagctacacttttgagtaaaaacccttattaaaagaaaaacatgattaataaaaaaaaaaa

SEQ ID NO: 12625 - DNA, 2892 bp, Homo sapiens
tccggggcgggaggagaagcgttgggccgcggtcgcggggccgtctcaggctgccgtcccgcccctcccgtccggccgccgccgccgccaccgccgccaccgcctgggggttggttgaggcggacggcggggtccgggccggagtacgtcgttcccgctgcgctaggggaagcgggcagtcagaaaaatgggtaagaagagtcgagtaaaaactcagaaatctggcactggtgctacagcaactgtgtcaccaaaggaaatcttgaacctgaccagtgagctgctgcagaaatgcagcagtccggcgcctggcccaggaaaagagtgggaagagtatgtgcagatccggactctggttgagaaaatacggaaaaagcaaaaaggtctgtccgttacttttgatggaaaaagagaagattactttcctgatctaatgaaatgggcctctgaaaatggggcttctgtcgagggttttgaaatggttaacttcaaagaagagggctttggtttgagagcaacaagagatatcaaggcagaagaattgtttttatgggttccacgaaaattgctaatgactgttgaatctgctaaaaattcagtgttggggcccttatattctcaagaccgaatccttcaagccatgggaaacatcgcactggcctttcatttgctgtgtgagcgagccagccctaactccttctggcagccctatattcaaaccctccccagtgaatatgacactcctctctactttgaagaagatgaagttcggtatcttcagtccacacaagctatacatgatgtcttcagccagtataaaaacacagctcgacagtacgcctacttctataaagtcatccagacccatcctcatgccaacaaactacccttgaaggattctttcacttacgaggactacaggtgggcagtctcttctgttatgacgaggcaaaaccaaattcccacagaggatggttcccgcgtgaccctggctctgattcctttatgggatatgtgtaaccacaccaacggcctgatcactactggttacaacctggaagatgaccgctgtgagtgtgtggctctgcaggattttcgggctggagagcagatttacattttttatggcactcgatccaacgcagagtttgtgatccacagtggttttttctttgacaataactcacacgacagagtgaaaataaagcttggagtgagtaaaagtgacagactctacgccatgaaggccgaggtcttggctcgtgccggcatccccacttccagtgtttttgcattgcattttaccgagccgcccatctctgctcagcttttggcttttctccgagtattctgtatgactgaagaagaactgaaagaacacttgctgggagacagcgctattgatagaatcttcaccttggggaactcggaatttcctgttagctgggacaacgaggtcaaactttggacatttcttgaagatagagcctcacttcttttaaaaacatataaaacaactattgaggaagataaatccgtcttgaaaaaccacgatctttctgttcgtgcaaaaatggccatcaaattgcgcttaggtgagaaagagattttggaaaaagcagtaaagagtgcagctgtcaaccgggaatactatcgccaacagatggaggaaaaggctccgcttcccaaatatgaagagagtaaccttgggctgttggagagcagcgtgggggactcgaggctccccctggtcttgagaaacctcgaggaggaggctggagtgcaggatgccttgaacatcagagaggcaatcagcaaagcaaaggccacagaaaacgggcttgtaaacggtgaaaactctatccctaatgggaccaggtccgaaaatgaaagtctcaatcaagaaagtaaaagagcagttgaagacgccaaaggatcttcttcagacagcactgctggagttaaggagtagctcgaggtgaagctggatgggggatccagtggagcaggagttgacggacagtccgttcacatcgctgtgtttccttgttaacatttttctttctgcagagaggaagatatgtttttgctgctttatataaaaatggtttttttaagttattttaaaaatctagcttccctttttgattaagattgccatcttgcttttaggcaaaacaaaccaattaacaaacaaccacaagaaagggagaagaggtgcctgtgggagattttgcagacctattgtgggtataggtattttcttcctggggaagaattcagttcccgtctcagctgtacttttgtgggcctgtcatcttgatgaccagaatgaaagcttgctctgcctcctgccagccagaattggtggcgggacttggggatacagcgtgaaggtggggaagttgcacagcagaaaacagaattgaagttgggaaactctagagtctgggcaaaatgtttggttttttctcttaaaaaaaataacaccccattaccaaaagaaaaggtaaggtggcaaccttatttttaatagtttgaaatgatgataatcctaattatataaaaatatatatataaacacacatatatatagtgatttctaaagatttgtttacttttgtgttttgttttactgtactaagaacttgtcctttctccttgaatcaaagtaggacatgcatcatcctcctaattttaaatgttggctctgattttaaagtggtgcatttgattccagccttggtaatggagagtttgcaaacacacagcggcccacagcttcacgtggtggtgtgcagtgtgaggcagctccttggctttcctggttttcacaacaagctagagattttcaaagctacacttttgagtaaaaacccttattaaaagaaa

SEQ ID NO: 12626 - DNA, 3248 bp, Homo sapiens
  misc_feature (2897)..(2897): n is a, c, g, or t
tccggggcgggaggagaagcgttgggccgcggtcgcggggccgtctcaggctgccgtcccgcccctcccgtccggccgccgccgccgccaccgccgccaccgcctgggggttggttgaggcggacggcggggtccgggccggagtacgtcgttcccgctgcgctaggggaagcgggcagtcagaaaaatgggtaagaagagtcgagtaaaaactcagaaatctggcactggtgctacagcaactgtgtcaccaaaggaaatcttgaacctgaccagtgagctgctgcagaaatgcagcagtccggcgcctggcccaggaaaagagtgggaagagtatgtgcagatccggactctggttgagaaaatacggaaaaagcaaaaaggtctgtccgttacttttgatggaaaaagagaagattactttcctgatctaatgaaatgggcctctgaaaatggggcttctgtcgagggttttgaaatggttaacttcaaagaagagggctttggtttgagagcaacaagagatatcaaggcagaagaattgtttttatgggttccacgaaaattgctaatgactgttgaatctgctaaaaattcagtgttggggcccttatattctcaagaccgaatccttcaagccatgggaaacatcgcactggcctttcatttgctgtgtgagcgagccagccctaactccttctggcagccctatattcaaaccctccccagtgaatatgacactcctctctactttgaagaagatgaagttcggtatcttcagtccacacaagctatacatgatgtcttcagccagtataaaaacacagctcgacagtacgcctacttctataaagtcatccagacccatcctcatgccaacaaactacccttgaaggattctttcacttacgaggactacaggtgggcagtctcttctgttatgacgaggcaaaaccaaattcccacagaggatggttcccgcgtgaccctggctctgattcctttatgggatatgtgtaaccacaccaacggcctgatcactactggttacaacctggaagatgaccgctgtgagtgtgtggctctgcaggattttcgggctggagagcagatttacattttttatggcactcgatccaacgcagagtttgtgatccacagtggttttttctttgacaataactcacacgacagagtgaaaataaagcttggagtgagtaaaagtgacagactctacgccatgaaggccgaggtcttggctcgtgccggcatccccacttccagtgtttttgcattgcattttaccgagccgcccatctctgctcagcttttggcttttctccgagtattctgtatgactgaagaagaactgaaagaacacttgctgggagacagcgctattgatagaatcttcaccttggggaactcggaatttcctgttagctgggacaacgaggtcaaactttggacatttcttgaagatagagcctcacttcttttaaaaacatataaaacaactattgaggaagataaatccgtcttgaaaaaccacgatctttctgttcgtgcaaaaatggccatcaaattgcgcttaggtgagaaagagattttggaaaaagcagtaaagagtgcagctgtcaaccgggaatactatcgccaacagatggaggaaaaggctccgcttcccaaatatgaagagagtaaccttgggctgttggagagcagcgtgggggactcgaggctccccctggtcttgagaaacctcgaggaggaggctggagtgcaggatgccttgaacatcagagaggcaatcagcaaagcaaaggccacagaaaacgggcttgtaaacggtgaaaactctatccctaatgggaccaggtccgaaaatgaaagtctcaatcaagaaagtaaaagagcagttgaagacgccaaaggatcttcttcagacagcactgctggagttaaggagtagctcgaggtgaagctggatgggggatccagtggagcaggagttgacggacagtccgttcacatcgctgtgtttccttgttaacatttttctttctgcagagaggaagatatgtttttgctgctttatataaaaatggtttttttaagttattttaaaaatctagcttccctttttgattaagattgccatcttgcttttaggcaaaacaaaccaattaacaaacaaccacaagaaagggagaagaggtgcctgtgggagattttgcagacctattgtgggtataggtattttcttcctggggaagaattcagttcccgtctcagctgtacttttgtgggcctgtcatcttgatgaccagaatgaaagcttgctctgcctcctgccagccagaattggtggcgggacttggggatacagcgtgaaggtggggaagttgcacagcagaaaacagaattgaagttgggaaactctagagtctgggcaaaatgtttggttttttctcttaaaaaaaataacaccccattaccaaaagaaaaggtaaggtggcaaccttatttttaatagtttgaaatgatgataatcctaattatataaaaatatatatataaacacacatatatatagtgatttctaaagatttgtttacttttgtgttttgttttactgtactaagaacttgtcctttctccttgaatcaaagtaggacatgcatcatcctcctaattttaaatgttggctctgattttaaagtggtgcatttgattccagccttggtaatggagagtttgcaaacacacagcggcccacagcttcacgtggtggtgtgcagtgtgaggcagctccttggctttcctggttttcacaacaagctagagattttcaaagctacacttttgagtaaaaacccttattaaaagaaaaaaanaaaaaaaaaaacaacaaaaacaaacaaagacactgtgtgtgtgcgcgcgcgcgcccctgcggccctcggagaaaagagcttttatatagaaccacttgcgcgttgtgggcgcgcgcgcggggcccccgagtgatggcgtatagcgtgtgaacccagtgtggcgcccatatggcgcgtgtttctcctatagaggaggacacctccggggggcccgtgaggacatagggcgcggcgggggggggttttctctctcccacccctattttttaacacagaaacgcgcgcccgcggggggggggccaccccccgagagggggtgtttcttcttggcacaccaaaagctcttccagg

SEQ ID NO: 12627 - DNA, 1463 bp, Homo sapiens
tccggggcgggaggagaagcgttgggccgcggtcgcggggccgtctcaggctgccgtcccgcccctcccgtccggccgccgccgccgccaccgccgccaccgcctgggggttggttgaggcggacggcggggtccgggccggagtacgtcgttcccgctgcgctaggggaagcgggcagtcagaaaaatgggtaagaagagtcgagtaaaaactcagaaatctggcactggtgctacagcaactgtgtcaccaaaggaaatcttgaacctgaccagtgagctgctgcagaaatgcagcagtccggcgcctggcccaggaaaagagtgggaagagtatgtgcagatccggactctggttgagaaaatacggaaaaagcaaaaaggtctgtccgttacttttgatggaaaaagagaagattactttcctgatctaatgaaatgtctcaatcaagaaagtaaaagagcagttgaagacgccaaaggatcttcttcagacagcactgctggagttaaggagtagctcgaggtgaagctggatgggggatccagtggagcaggagttgacggacagtccgttcacatcgctgtgtttccttgttaacatttttctttctgcagagaggaagatatgtttttgctgctttatataaaaatggtttttttaagttattttaaaaatctagcttccctttttgattaagattgccatcttgcttttaggcaaaacaaaccaattaacaaacaaccacaagaaagggagaagaggtgcctgtgggagattttgcagacctattgtgggtataggtattttcttcctggggaagaattcagttcccgtctcagctgtacttttgtgggcctgtcatcttgatgaccagaatgaaagcttgctctgcctcctgccagccagaattggtggcgggacttggggatacagcgtgaaggtggggaagttgcacagcagaaaacagaattgaagttgggaaactctagagtctgggcaaaatgtttggttttttctcttaaaaaaaataacaccccattaccaaaagaaaaggtaaggtggcaaccttatttttaatagtttgaaatgatgataatcctaattatataaaaatatatatataaacacacatatatatagtgatttctaaagatttgtttacttttgtgttttgttttactgtactaagaacttgtcctttctccttgaatcaaagtaggacatgcatcatcctcctaattttaaatgttggctctgattttaaagtggtgcatttgattccagccttggtaatggagagtttgcaaacacacagcggcccacagcttcacgtggtggtgtgcagtgtgaggcagctccttggctttcctggttttcacaacaagctagagattttcaaagctacacttttgagtaaaaacccttattaaaagaaaaacatgattaataaaaaaaaaaa

SEQ ID NO: 12628 - DNA, 2837 bp, Homo sapiens
tccggggcgggaggagaagcgttgggccgcggtcgcggggccgtctcaggctgccgtcccgcccctcccgtccggccgccgccgccgccaccgccgccaccgcctgggggttggttgaggcggacggcggggtccgggccggagtacgtcgttcccgctgcgctaggggaagcgggcagtcagaaaaatgggtaagaagagtcgagtaaaaactcagaaatctggcactggtgctacagcaactgtgtcaccaaaggaaatcttgaacctgaccagtgagctgctgcagaaatgcagcagtccggcgcctggcccaggaaaagagtgggaagagtatgtgcagatccggactctggttgagaaaatacggaaaaagcaaaaaggtctgtccgttacttttgatggaaaaagagaagattactttcctgatctaatgaaatgggcctctgaaaatggggcttctgtcgagggttttgaaatggttaacttcaaagaagagggctttggtttgagagcaacaagagatatcaaggcagaagaattgtttttatgggttccacgaaaattgctaatgactgttgaatctgctaaaaattcagtgttggggcccttatattctcaagaccgaatccttcaagccatgggaaacatcgcactggcctttcatttgctgtgtgagcgagccagccctaactccttctggcagccctatattcaaaccctccccagtgaatatgacactcctctctactttgaagaagatgaagttcggtatcttcagtccacacaagctatacatgatgtcttcagccagtataaaaacacagctcgacagtacgcctacttctataaagtcatccagacccatcctcatgccaacaaactacccttgaaggattctttcacttacgaggactacaggtgggcagtctcttctgttatgacgaggcaaaaccaaattcccacagaggatggttcccgcgtgaccctggctctgattcctttatgggatatgtgtaaccacaccaacggcctgatcactactggttacaacctggaagatgaccgctgtgagtgtgtggctctgcaggattttcgggctggagagcagatttacattttttatggcactcgatccaacgcagagtttgtgatccacagtggttttttctttgacaataactcacacgacagagtgaaaataaagcttggagtgagtaaaagtgacagactctacgccatgaaggccgaggtcttggctcgtgccggcatccccacttccagtgtttttgcattgcattttaccgagccgcccatctctgctcagcttttggcttttctccgagtattctgtatgactgaagaagaactgaaagaacacttgctgggagacagcgctattgatagaatcttcaccttggggaactcggaatttcctgttagctgggacaacgaggtcaaactttggacatttcttgaagatagagcctcacttcttttaaaaacatataaaacaactattgaggaagataaatccgtcttgaaaaaccacgatctttctgttcgtgcaaaaatggccatcaaattgcgcttaggtgagaaagagattttggaaaaagcagtaaagagtgcagctgtcaaccgggaatactatcgccaacagatggaggaaaaggctccgcttcccaaatatgaagagagtaaccttgggctgttggagagcagcgtgggggactcgaggctccccctggtcttgagaaacctcgaggaggaggctggagtgcaggatgccttgaacatcagagaggcaatcagcaaagcaaaggccacagaaaacgggcttgtaaacggtgaaaactctatccctaatgggaccaggtccgaaaatgaaagtctcaatcaagaaagtaaaagagcagttgaagacgccaaaggatcttcttcagacagcactgctggagttaaggagtagctcgaggtgaagctggatgggggatccagtggagcaggagttgacggacagtccgttcacatcgctgtgtttccttgttaacatttttctttctgcagagaggaagatatgtttttgctgctttatataaaaatggtttttttaagttattttaaaaatctagcttccctttttgattaagattgccatcttgcttttaggcaaaacaaaccaattaacaaacaaccacaagaaagggagaagaggtgcctgtgggagattttgcagacctattgtgggtataggtattttcttcctggggaagaattcagttcccgtctcagctgtacttttgtgggcctgtcatcttgatgaccagaatgaaagcttgctctgcctcctgccagccagaattggtggcgggacttggggatacagcgtgaaggtggggaagttgcacagcagaaaacagaattgaagttgggaaactctagagtctgggcaaaatgtttggttttttctcttaaaaaaaataacaccccattaccaaaagaaaaggtaaggtggcaaccttatttttaatagtttgaaatgatgataatcctaattatattttgtgttttgttttactgtactaagaacttgtcctttctccttgaatcaaagtaggacatgcatcatcctcctaattttaaatgttggctctgattttaaagtggtgcatttgattccagccttggtaatggagagtttgcaaacacacagcggcccacagcttcacgtggtggtgtgcagtgtgaggcagctccttggctttcctggttttcacaacaagctagagattttcaaagctacacttttgagtaaaaacccttattaaaagaaa

SEQ ID NO: 12629 - DNA, 2359 bp, Homo sapiens
  misc_feature (2232)..(2233): n is a, c, g, or t
  misc_feature (2242)..(2242): n is a, c, g, or t
tccggggcgggaggagaagcgttgggccgcggtcgcggggccgtctcaggctgccgtcccgcccctcccgtccggccgccgccgccgccaccgccgccaccgcctgggggttggttgaggcggacggcggggtccgggccggagtacgtcgttcccgctgcgctaggggaagcgggcagtcagaaaaatgggtaagaagagtcgagtaaaaactcagaaatctggcactggtgctacagcaactgtgtcaccaaaggaaatcttgaacctgaccagtgagctgctgcagaaatgcagcagtccggcgcctggcccaggaaaagagtgggaagagtatgtgcagatccggactctggttgagaaaatacggaaaaagcaaaaaggtctgtccgttacttttgatggaaaaagagaagattactttcctgatctaatgaaatgggcctctgaaaatggggcttctgtcgagggttttgaaatggttaacttcaaagaagagggctttggtttgagagcaacaagagatatcaaggcagaagaattgtttttatgggttccacgaaaattgctaatgactgttgaatctgctaaaaattcagtgttggggcccttatattctcaagaccgaatccttcaagccatgggaaacatcgcactggcctttcatttgctgtgtgagcgagccagccctaactccttctggcagccctatattcaaaccctccccagtgaatatgacactcctctctactttgaagaagatgaagttcggtatcttcagtccacacaagctatacatgatgtcttcagccagtataaaaacacagctcgacagtacgcctacttctataaagtcatccagacccatcctcatgccaacaaactacccttgaaggattctttcacttacgaggactacaggtgggcagtctcttctgttatgacgaggcaaaaccaaattcccacagaggatggttcccgcgtgaccctggctctgattcctttatgggatatgtgtaaccacaccaacggcctgatcactactggttacaacctggaagatgaccgctgtgagtgtgtggctctgcaggattttcgggctggagagcagatttacattttttatggcactcgatccaacgcagagtttgtgatccacagtggttttttctttgacaataactcacacgacagagtgaaaataaagcttggagtgagtaaaagtgacagactctacgccatgaaggccgaggtcttggctcgtgccggcatccccacttccagtgtttttgcattgcattttaccgagccgcccatctctgctcagcttttggcttttctccgagtattctgtatgactgaagaagaactgaaagaacacttgctgggagacagcgctattgatagaatcttcaccttggggaactcggaatttcctgttagctgggacaacgaggtcaaactttggacatttcttgaagatagagcctcacttcttttaaaaacatataaaacaactattgaggaagataaatccgtcttgaaaaaccacgatctttctgttcgtgcaaaaatggccatcaaattgcgcttaggtgagaaagagattttggaaaaagcagtaaagagtgcagctgtcaaccgggaatactatcgccaacagatggaggaaaaggctccgcttcccaaatatgaagagagtaaccttgggctgttggagagcagcgtgggggactcgaggctccccctggtcttgagaaacctcgaggaggaggctggagtgcaggatgccttgaacatcagagaggcaatcagcaaagcaaaggccacagaaaacgggcttgtaaacggtgaaaactctatccctaatgggaccaggtccgaaaatgaaagtctcaatcaagaaagtaaaagagcagttgaagacgccaaaggatcttcttcagacagcactgctggagttaaggagtagctcgaggtgaagctggatgggggatccagtggagcaggagttgacggacagtccgttcacatcgctgtgtttccttgttaacatttttctttctgcagagaggaagatatgtttttgctgctttatataaaaatggtttttttaagttattttaaaaatctagcttccctttttgattaagattgccatcttgcttttaggcaaaacaaaccaattaacaaaccctccccagtgaatatgacactcctctctactttgannagatgaagntcggtatcttcagtcacacaagctatacatgatgataatccaaagtattcacagcactaatgctgatcaaaatttgctctccaccaggaaatgtaaagccacaatgtctcaaaacaa

SEQ ID NO: 12630 - DNA, 2311 bp, Homo sapiens
tccggggcgggaggagaagcgttgggccgcggtcgcggggccgtctcaggctgccgtcccgcccctcccgtccggccgccgccgccgccaccgccgccaccgcctgggggttggttgaggcggacggcggggtccgggccggagtacgtcgttcccgctgcgctaggggaagcgggcagtcagaaaaatgggtaagaagagtcgagtaaaaactcagaaatctggcactggtgctacagcaactgtgtcaccaaaggaaatcttgaacctgaccagtgagctgctgcagaaatgcagcagtccggcgcctggcccaggaaaagagtgggaagagtatgtgcagatccggactctggttgagaaaatacggaaaaagcaaaaaggtctgtccgttacttttgatggaaaaagagaagattactttcctgatctaatgaaatgggcctctgaaaatggggcttctgtcgagggttttgaaatggttaacttcaaagaagagggctttggtttgagagcaacaagagatatcaaggcagaagaattgtttttatgggttccacgaaaattgctaatgactgttgaatctgctaaaaattcagtgttggggcccttatattctcaagaccgaatccttcaagccatgggaaacatcgcactggcctttcatttgctgtgtgagcgagccagccctaactccttctggcagccctatattcaaaccctccccagtgaatatgacactcctctctactttgaagaagatgaagttcggtatcttcagtccacacaagctatacatgatgtcttcagccagtataaaaacacagctcgacagtacgcctacttctataaagtcatccagacccatcctcatgccaacaaactacccttgaaggattctttcacttacgaggactacaggtgggcagtctcttctgttatgacgaggcaaaaccaaattcccacagaggatggttcccgcgtgaccctggctctgattcctttatgggatatgtgtaaccacaccaacggcctgatcactactggttacaacctggaagatgaccgctgtgagtgtgtggctctgcaggattttcgggctggagagcagatttacattttttatggcactcgatccaacgcagagtttgtgatccacagtggttttttctttgacaataactcacacgacagagtgaaaataaagcttggagtgagtaaaagtgacagactctacgccatgaaggccgaggtcttggctcgtgccggcatccccacttccagtgtttttgcattgcattttaccgagccgcccatctctgctcagcttttggcttttctccgagtattctgtatgactgaagaagaactgaaagaacacttgctgggagacagcgctattgatagaatcttcaccttggggaactcggaatttcctgttagctgggacaacgaggtcaaactttggacatttcttgaagatagagcctcacttcttttaaaaacatataaaacaactattgaggaagataaatccgtcttgaaaaaccacgatctttctgttcgtgcaaaaatggccatcaaattgcgcttaggtgagaaagagattttggaaaaagcagtaaagagtgcagctgtcaaccgggaatactatcgccaacagatggaggaaaaggctccgcttcccaaatatgaagagagtaaccttgggctgttggagagcagcgtgggggactcgaggctccccctggtcttgagaaacctcgaggaggaggctggagtgcaggatgccttgaacatcagagaggcaatcagcaaagcaaaggccacagaaaacgggcttgtaaacggtgaaaactctatccctaatgggaccaggtccgaaaatgaaagtctcaatcaagaaagtaaaagagcagttgaagacgccaaaggatcttcttcagacagcactgctggagttaaggagtagctcgagacttggtcgttaaggttattggatcaaaaagagatgaagtatgcttccagttgagaacagcctctgcatgacataaaaatggcgcccacaagaacggaactgttttgatgtcagaagacagtatctattgaacagcattactttcctgagttgggtaggattgccctaaaatgactcgcaaaggcaggcgagaccacagcacacattagtcatcctcgttgccccgctgcggttcggcagctctagtgctgcctgcacagacacttggagctacaacttaagcatttgaaaattgagggaaagtgattaaattggcattgaagaaccctcatt

SEQ ID NO: 12631 - DNA, 1448 bp, Homo sapiens
tccggggcgggaggagaagcgttgggccgcggtcgcggggccgtctcaggctgccgtcccgcccctcccgtccggccgccgccgccgccaccgccgccaccgcctgggggttggttgaggcggacggcggggtccgggccggagtacgtcgttcccgctgcgctaggggaagcgggcagtcagaaaaatgggtaagaagagtcgagtaaaaactcagaaatctggcactggtgctacagcaactgtgtcaccaaaggaaatcttgaacctgaccagtgagctgctgcagaaatgcagcagtccggcgcctggcccaggaaaagagtgggaagagtatgtgcagatccggactctggttgagaaaatacggaaaaagcaaaaaggtctgtccgttacttttgatggaaaaagagaagattactttcctgatctaatgaaatgggcctctgaaaatggggcttctgtcgagggttttgaaatggttaacttcaaagaagagggctttggtttgagagcaacaagagatatcaaggcagaagaattgtttttatgggttccacgaaaattgctaatgactgttgaatctgctaaaaattcagtgttggggcccttatattctcaagaccgaatccttcaagccatgggaaacatcgcactggcctttcatttgctgtgtgagcgagccagccctaactccttctggcagccctatattcaaaccctccccagtgaatatgacactcctctctactttgaagaagatgaagttcggtatcttcagtccacacaagctatacatgatgtcttcagccagtataaaaacacagctcgacagtacgcctacttctataaagtcatccagacccatcctcatgccaacaaactacccttgaaggattctttcacttacgaggactacaggtgggcagtctcttctgttatgacgaggcaaaaccaaattcccacagaggatggttcccgcgtgaccctggctctgattcctttatgggatatgtgtaaccacaccaacggcctgacaccagaagattccttcgctcttgctgtcgcctctgcctaagaccctccattccttaggcacttacgggactcactcatagacctcctccagcgtggctgccctgagcaccctatgtggaatgactacgcctccagctcatccgccctcctgccctgtcctgttacatttccctctattgtccagatccgcttgtttctgcctttttaaaaaattattgttggttcacccccccgcctcccattagaatggaagatccatgaacgcagggtgattttgggggagggtctgttttgctcattgctatatcgctgtggtttttaatgaattcatgaccggtaaataaatgactgtaaaagccccatgcctaggaaaaaagatcagaaagaaataaaccaaaatgttaacgtga

SEQ ID NO: 12632 - DNA, 1747 bp, Homo sapiens
tccggggcgggaggagaagcgttgggccgcggtcgcggggccgtctcaggctgccgtcccgcccctcccgtccggccgccgccgccgccaccgccgccaccgcctgggggttggttgaggcggacggcggggtccgggccggagtacgtcgttcccgctgcgctaggggaagcgggcagtcagaaaaatgggtaagaagagtcgagtaaaaactcagaaatctggcactggtgctacagcaactgtgtcaccaaaggaaatcttgaacctgaccagtgagctgctgcagaaatgcagcagtccggcgcctggcccaggaaaagagtgggaagagtatgtgcagatccggactctggttgagaaaatacggaaaaagcaaaaaggtctgtccgttacttttgatggaaaaagagaagattactttcctgatctaatgaaatgggcctctgaaaatggggcttctgtcgagggttttgaaatggttaacttcaaagaagagggctttggtttgagagcaacaagagatatcaaggcagaagaattgtttttatgggttccacgaaaattgctaatgactgttgaatctgctaaaaattcagtgttggggcccttatattctcaagaccgaatccttcaagccatgggaaacatcgcactggcctttcatttgctgtgtgagcgagccagccctaactccttctggcagccctatattcaaaccctccccagtgaatatgacactcctctctactttgaagaagatgaagttcggtatcttcagtccacacaagctatacatgatgtcttcagccagtataaaaacacagctcgacagtacgcctacttctataaagtcatccagacccatcctcatgccaacaaactacccttgaaggattctttcacttacgaggactacaggtgggcagtctcttctgttatgacgaggcaaaaccaaattcccacagaggatggttcccgcgtgaccctggctctgattcctttatgggatatgtgtaaccacaccaacggcctgacaccagaagattccttcgctcttgctgtcgcctctgcctaagaccctccattccttaggcacttacgggactcactcatagacctcctccagcgtggctgccctgagcaccctatgtggaatgactacgcctccagctcatccgccctcctgccctgtcctgttacatttccctctattgtccagatccgcttgtttctgcctttttaaaaaattattgttggttcacccccccgcctcccattagaatggaagatccatgaacgcagggtgattttgggggagggtctgttttgctcattgctatatcgctgtggtttttaatgaattcatgaccggtaaataaatgactgtaaaagccccatgcctaggaaaaaagatcagaaagaaataaaccaaaatgttaacgtgaaaaaaataagataatggcctctctgtcctaatgcgtggaccccgcggccgctccccttgagcgaggggtatcatgccactcactcctagccccccgcgttccgcgcacggttgggagagtggaccagactcccaaaggcagtagtcggccttccccgatgcgggtcgacccaccgaaaaactgcgtacacaagcgatctaaggatgcaacgtaacagggcgctagttgcgaaatatctgagatcgccccgtgccagcatataaatctcatctcctataacgcgcaaccggagaggtaag

SEQ ID NO: 12633 - DNA, 1483 bp, Homo sapiens
tccggggcgggaggagaagcgttgggccgcggtcgcggggccgtctcaggctgccgtcccgcccctcccgtccggccgccgccgccgccaccgccgccaccgcctgggggttggttgaggcggacggcggggtccgggccggagtacgtcgttcccgctgcgctaggggaagcgggcagtcagaaaaatgggtaagaagagtcgagtaaaaactcagaaatctggcactggtgctacagcaactgtgtcaccaaaggaaatcttgaacctgaccagtgagctgctgcagaaatgcagcagtccggcgcctggcccaggaaaagagtgggaagagtatgtgcagatccggactctggttgagaaaatacggaaaaagcaaaaaggtctgtccgttacttttgatggaaaaagagaagattactttcctgatctaatgaaatgggcctctgaaaatggggcttctgtcgagggttttgaaatggttaacttcaaagaagagggctttggtttgagagcaacaagagatatcaaggcagaagaattgtttttatgggttccacgaaaattgctaatgactgttgaatctgctaaaaattcagtgttggggcccttatattctcaagaccgaatccttcaagccatgggaaacatcgcactggcctttcatttgctgtgtgagcgagccagccctaactccttctggcagccctatattcaaaccctccccagtgaatatgacactcctctctactttgaagaagatgaagttcggtatcttcagtccacacaagctatacatgatgtcttcagccagtataaaaacacagctcgacagtacgcctacttctataaagtcatccagacccatcctcatgccaacaaactacccttgaaggattctttcacttacgaggactacaggtgggcagtctcttctgttatgacgaggcaaaaccaaattcccacagaggatggttcccgcgtgaccctggctctgattcctttatgggatatgtgtaaccacaccaacggcctggtctgactcacctctggttccctgctattcttcagacaccagaagattccttcgctcttgctgtcgcctctgcctaagaccctccattccttaggcacttacgggactcactcatagacctcctccagcgtggctgccctgagcaccctatgtggaatgactacgcctccagctcatccgccctcctgccctgtcctgttacatttccctctattgtccagatccgcttgtttctgcctttttaaaaaattattgttggttcacccccccgcctcccattagaatggaagatccatgaacgcagggtgattttgggggagggtctgttttgctcattgctatatcgctgtggtttttaatgaattcatgaccggtaaataaatgactgtaaaagccccatgcctaggaaaaaagatcagaaagaaataaaccaaaatgttaacgtga

SEQ ID NO: 12634 - DNA, 1918 bp, Homo sapiens
gagttattttaaattgacggtaagcttgaaatttaagaaatcttcaaatagcttttaatatctgactgtagtgtttttcttcttctttttttgaatgagatcatttgttcccaaactcaattgattattagagttctttttaataaaattaaagcaataatgcttggctttactctaaacaaacaaaaagaattaacccaggaacctctgtagcaaggtgagcagtgccctacccccagccccacagtccacctgatggtgttgaggccgccaccaggccaccgtggtccctagcgaagcttccatccattggcacctcacacactcatctgcacattggtttttgtttagcttccatgtaaatgggataaaacaattcctttttccctaccaagtgttaaaaaaaaaagaggtttatctcaaaataaagaaattgatgacaaccagtgctgtgttttccctaatacgactacatactttttaacctaccacagtcctggcagaaacattgctaacctgtagaaggtttattcaggatgctggtactttgtcttacagtggttatgttcctgacattctgcactctgcactcttgttgaactgtttcccattgtaattataagatctcatgggaaatttactggagtagaatttaagaaattctattttttaacactacaaagttgtttatgatatatattacagttaatgtctttttaaaaataaagtcttgaaatcaaggcttggcttttaagacgagattttcttttttgtgtgtgtctatcctgacgatcatcttcttattgtcagtctaccctgactatcactcagggagtaggtagaatttgtaacccagcaacgctgtctgcttctaacaatatcccaaaaacctgattatggtagtagaaacagaagaatcaagtcagtaacagtaattccaaaccagtgacagcaaggaaatgctaaagaaagtaaggggctggatgaacacctaggctagagattctggtgaatataaactaatttcctagccactcagagaaataaatgtaggaagggttataaggtgtggtactaagctggaagaaacaacacatctttatatcttgcatgatttgttcaaacttaatgtaagcagcaggtttcctttgttgaggatttttcggttgatatgacaaggatacttctaagtgactgttagacagtggtattagttcccatacagagagtatgttggaataatcagtgcttgcatttgaatctgcgactctaccaggtgggatgaaagggcagctggaaattcaggcacaacggagggaagttctttttcagggtccttctgtttgtgtattgaaaaaaaaatctaaaacatttatatttagatgagtcttacagtctcaaaagcccatttttacaatagcagacaagtctctccgaacaacctgtccccccacaccctccgtgcacacaggtctgactcacctctggttccctgctattcttcagacaccagaagattccttcgctcttgctgtcgcctctgcctaagaccctccattccttaggcacttacgggactcactcatagacctcctccagcgtggctgccctgagcaccctatgtggaatgactacgcctccagctcatccgccctcctgccctgtcctgttacatttccctctattgtccagatccgcttgtttctgcctttttaaaaaattattgttggttcacccccccgcctcccattagaatggaagatccatgaacgcagggtgattttgggggagggtctgttttgctcattgctatatcgctgtggtttttaatgaattcatgaccggtaaataaatgactgtaaaagccccatgcctaggaaaaaagatcagaaagaaataaaccaaaatgttaacgtga

SEQ ID NO: 12635 - DNA, 556 bp, Homo sapiens
ttttaaagagctttgtattttctggggactgtgagctgatgttcctactactctaagatgatgaacaaaaagacagaggatggttcccgcgtgaccctggctctgattcctttatgggatatgtgtaaccacaccaacggcctgacaccagaagattccttcgctcttgctgtcgcctctgcctaagaccctccattccttaggcacttacgggactcactcatagacctcctccagcgtggctgccctgagcaccctatgtggaatgactacgcctccagctcatccgccctcctgccctgtcctgttacatttccctctattgtccagatccgcttgtttctgcctttttaaaaaattattgttggttcacccccccgcctcccattagaatggaagatccatgaacgcagggtgattttgggggagggtctgttttgctcattgctatatcgctgtggtttttaatgaattcatgaccggtaaataaatgactgtaaaagccccatgcctaggaaaaaagatcagaaagaaataaaccaaaatgttaacgtga

SEQ ID NO: 12636 - DNA, 681 bp, Homo sapiens
aaagaatgtaatccatcagaacgtgagctccttgtgcttccagtgacaagcgggccacagtgctggtggcatgttgcttccctcacagccctgcccaggggtaggaccaggcccgccccttgatggatgtgctgttgattgtaatatacttctgttgccaaataatggtactgtttaattttccataaaagagagactatattgtctgatatgtaatgttaatggaattctaagaattactagacactattataaattgtagacttacgtatttgtctaaaggtttgatgaagcagggccaaaacattgtttcttcttttttgtttgaaagaagctgaggtttgtttttgctgtttgagtgttcctttggcaacttattatgtgtgaaatgttaaattttaccgattaagatgatggtaactgagacctttctttaaaccagtagcaacatcagtacaaattgctcttcctgtgtatcttgaacctaaaaagaacaatctcttcaaaaacaaaaacaaaaacaaaaaacaactctttggtcattttgacctgtgtggtttaaattcaaatagttcatgaataaaaggagaaaagccaatctgttatagtggattattttgggttctttctgcttcactcttttctgagagcacaggaagctaacagccctgcaaatggtgt

SEQ ID NO: 12637 - DNA, 297 bp, Homo sapiens
ttgagggtttttttaattacacaaaccaccttgagggagtcaaaagaacataggactgagaggcaggaggcctgagtcctaggtcgctgcttgcctcttgagtgaactatcactgccctatttgtaaaatgaggagggtctatagatagcctccagctctaaagctctataccactgaactctacatgagtactctaaagattatttagaggcatcctgttgagatttctgatctccctggctaccacaaacattaattgaaaagctgttttatgctagaagctgagcctagtgcaa

SEQ ID NO: 12638 - DNA, 364 bp, Homo sapiens
gaaggatattacacagaatattacacatatcataggtatacagcttgatgaattttcacaaactaaacatacctgtgtagcttgcagtcagatcaagaaactgaatactgccagcatctcagaagccatccatgtgaccccttcaagtcattattctttctggggtaatgatcatcccattgtcaatacattttttaaacatgttttaaaattgagttcataaccagatttaagccatacaaaaatttcagtctcattaaactattttgttggctaattaatttgcttgcttatctcatttattttatttactacaaatgtcctttgactgtgaaatgaaaattaaacttaaaaagatgagttt

SEQ ID NO: 12639 - DNA, 492 bp, Homo sapiens
cagaagtgtaaatgctagctcaattatggagatctggaaaggcagtctgtggagtctggattgactctctcgggaagtatagagaccctaaaggtggatgaactgatagcctcccaccccatcaaaatacaaggcataaacatgtatgcagtgttttttatcttataatatcggcaaattgaaaaattgagtctctctgcatggaaaaggaaaaatagcactaggcatcatttaataaaaaactctctttttaattaaaattaaatgtccactgtaagaaaaaaacaagtggtgagcaacaaatacccacagccttgtttaaccacctgtgatgaattataattaggatttgaaaattattgaacttttttccccctgttcaccttgggctctctgaaggtgaatttccaagagtgcaggagggaatgaatattaaaaagtttgttttatacttggatgccagagctcccatctcatttttccattaaagct

SEQ ID NO: 12640 - DNA, 423 bp, Homo sapiens
cagtggcgacgagatctcagttcactgcagcctccacctctcaggctcaagcgattctcgtgcctcagcttctgaagtaactgggattgcaggggtgcgccaccacacctgggtagtttttatatttttagtagagacaaggtttcatcattttagccaggctggtcttgactcccggcctgaagtgatctgcctgcctcggccttccaaagtgctgggattacaggcatgagccactgcacccggcctgagaacacattcttatgtgactccctagattgttgcagataaaatgagaaaagtaccacaattttctgttttgtttcagtacataagcatttatcaacattcatctttataagtgaaccccaagggcattgctagtcctgggacagaggaacttcaccatcttttgtttgtttt

SEQ ID NO: 12641 - DNA, 115 bp, Homo sapiens
cgatctttaggccctttttccagctaagacttgagaagaaaaacactagtaaaccttacatagagggcttgcttacagagtaaatgtaacaagtttctttgatgtgtgaccaaaa

SEQ ID NO: 12642 - DNA, 350 bp, Homo sapiens
tttggtgttgggaggaatctcatgggcatttttttaggatttgattattttctgttgtatctcattgtcgtctttttaatagctgtagacatctaatcctgagctagtgttttactgttctgttactcataaaaattctgaaatgcaggggttaagaatagacaatcaagtcttaagtgctttgcaaaatgaatttattcctttgagaattaaagtgatgtcctgaaggaagtcacagttaatggtcagtttcctttagggaaatattcttgaagaattagagtgctgctctcacatatctttgatggaaaccaaacaactcctgggttaatgtttagttaaatgaacca

SEQ ID NO: 12643 - DNA, 443 bp, Homo sapiens
atcacttttatctctttaatagaaattggttaaattataatcaatataaggaggttacaaaactccatatacaacactgtatacattttcttggaaaaatatgtgcaactgctctgcaaaatacatgattaactagcctgtgtgatgggataacattgtagtttcttaatttcttgtcctttcttgtatttcccacagtattgatgtatatcttctgcgttcaaaagcaattttttaaagcctcataacgtggtaacaaaatactatgcacgttacaaaattcagaacacggaaacaagaagctcgctttttttttccccctatttcggtttggccctttagatttcccctcccccaccggggcgggacttcccgccgacttctttcaggttctcagttcggtccgccaactgtcgtataaaggcgctgcctcaggccagagt

SEQ ID NO: 12644 - DNA, 527 bp, Homo sapiens
tacagcaatgtattaacaggtaatgttgcaaatcagtcaaggggccaagtgaggaggaatccagaggagtagaaagaatactaattttctgccaaattttacactcagaggaaattaatccatcatagaagtcttccatgaaaaaaataaaaaaggtactcagtatgacccagaatagccatgaggttaaaacacatacacacacacacacagcaattgccacttccactagagtttgacagttatagatttgggtaattatagtagaaattgcgcgtttggaaacacactaagaccacaccctaagactgagaatctggactttaaacgctgatcattaattaaaaggacaacgcagtatctaagttggaagatctggccgcgcaggtggaaggcgaagtgatggggagcgataaagacaccaacttcaaaaccagggaccaggagggctgggtgtcgaggcgaggcgaggcgaagcccgggggataagggggtgtggagctggggacgggaacaggggatgagga

SEQ ID NO: 12645 - DNA, 745 bp, Homo sapiens
tgttccaaggaaccagtaattaatgcatggttataggtatacctggcttcaaaaaaaagaagtagccgtggaaagctatatgagaaaatcacaattttctgaatcaaatatttgtaaaaccatttggctatttaaagactcttagggtaaatactccctggaaaagcaagcaatccagacttatctggtctgcaaaccttgatttcagcttaatatcctttcctgaatctaattcattttcacccactaaggtcatttcatttaagatccattgtttttgaaattttgaagtagcccagtttggcagctctcagcacctgcctctgccctctcctatacttcaactatattgaactctagcttcaatctagttcctactaatccatggcaaaagttattaactgataagcccaatcttgttcagcacgttcttctaaatgcctgacctaaataacttctgcttgggttaacttgtgttcattctcaccttaggcctcagtgtggaaaggtaacacttaccttctgtgcaattgtcctttgtacaactgaagactgttaataaattcaggtctcacctccatgtctgaaaaggctatagtagctattcatggagatgggaatttgtctaattacctagccagagtttgcatatttaaggtaatatattcagctaccgtatcttttattcatagtgcctgttttccagcctttgatcagttttgtagttcccgtggataaactccaa

SEQ ID NO: 12646 - DNA, 595 bp, Homo sapiens
gcaatttgcttccggttgtatttctcaggaagtccgatgacactcggctgtccaggccaggcgctggaagtcccccaggaggaccagctcggtctcccacctcttgagtgcacagctccttggcccctgagtaccccaccacccccatttccagccttcttccttacaaacacgaagggtgggaggaaccagaaaacaggggatcccgcagccctaggctagttctgatcgctttcaggtgtctgcagaggcaagttgctggttgtcacctgtaaaatggggaggataaaaacacctcccagattttgttctagatcctagggggatgtgaggctcaagggagataaaggacactggagagcaccctagaaatgacaggatgaaggcgatggtgacaaatatccgagcgaaacgcttgacaatgagaacagacaagtgcaggtctccaggagtgccgcgagcgcccgcgggttctgagagcgctcaaagccgccgagtcaggctgcccagcccgccgggcctcgccgcagtgatcctcattcccgaatctggcagcgctgtcaaaggcttgtattaggaggtgaacggcggccgc

SEQ ID NO: 12647 - DNA, 1382 bp, Homo sapiens
caggttgagtccttccacctcattatcatcctaggtaggagtggaagatgaataccagcctgtgagccaatgctttcatttttggctgcagccaactggttgtctaaggctgggaaggggttaagatgcccccggagcttgccgcgagggcagctgcctcagcgggcactccgcctggatgggaatataagcactcttggtgttgcccaggcagagagggcagtgtggagggaagttgctagaaaaaggcaggggacataatccatactggcctctttcccaggcacatcacagtggcagaattatttatgattctgacccaatggggatccctctacttggggagactgccaacccacgccctcctgaatggcaacgtcctcccacagagacagaggggaacaagtagcatttatggagcggcacagaggaaagagtgtgggctttggagacagcacagcagcactcacatcccggcccagacacttcctgtgtgaccttgagccagttgatgaacctgtctgggcctctgtttcctcatctgttatcggcgaaaatgtttcggaggacacctattgtataatgttgctatgcagattaaatgcactagcagaggcaaagtgcatagcttagaggaaggaagtactcgctaagtggtagctggtgtgataggtgggccaagtcctggcaggagctgggcttgctggctgccctgttttgctgaaacagcagcatcaccatcagcagcaactgtggaaatatagacccttgataaatacaggtgaataaaatgaatgattagaaactggacctgccactctgcagaacccaggcactgctccccagcagctggtgcctcaaagcagctgctaacatggcaggagacagtcagaccagcagtgaatagctatgcttcgtaagacttcatacacaaggcaggcgtgtggactgaccagaaaggtggcagtcactgtccatcaagagaatccccacctgttttccaatatgtcagccaggaggctcgcactcccaaaaggaatgttctcagccagctccctgactgtccccacctctgacagtggactctcttgggtctctcaaaaggctcctcctcctcagccatggggtgaaggaatcctgtttgccggggaggcgggatgctgcccagggtggctgttttgggagagcgagcaggatgagatagtgcctatgagtgatctttggagatggaggtgctatggccacctgtggggactgcctgggtgcctcctggccactgtcaacttccttgctcacactgaggttctgtgattctcctctgagcatttccatggataatttttttttttcagagacactattaaagattttaaaaattgcaa

SEQ ID NO: 12648 - DNA, 714 bp, Homo sapiens
atagtagattacttcattataaggattacataaaattcaatgattactgacctagttaagctacctctgaatgtgaaaggacaagtataggtgcacctactttaaattgcacaatataaatcttttcatttattcaaataatatttgaagttcagttaggttttgcaaaattactcgtttggatgtgttaagaaatcatgtaaactcttcctttgactttgggggaatgaacatgagatttgtttattcttggggggcagttaattttgtattctagaaggggggttaatgtataatatattttagctaagagaaatcagtttaagataaccaacttttcttaatctaacattttggcttatttctgtcatctggtcattctcatacaaataatacaaagctaaatatacataataccatatgcacatatatgtatatgtatacattatatgtaatacataaaacaaagctaaatttgtattatggatttaggagtgtaatggaaaatacccctttaagaggaaaagcacaaaactgaattagtcaagaaaataataaatgtttgcaataagtgtcatgaccgggtatagtggctcagtgctttgggaggccgaggcaggatgattgcttgagcccagaactttgaggctgcagtagacaccaattacactactgcactccagcctgggtgacatagtagaccctatcttttaa

SEQ ID NO: 12649 - DNA, 498 bp, Homo sapiens
gggactgaacaagattacagtatagggcttatattgtatgagtcttagagaagttggattctacatagctggtggccttgtagctgtgtcaaaaaaaagaactggctaaatacagacatttgtaaaacatagtcatgcttaagagactagggaaatgagtaacagtagaagaatttgtctttctctctctctctctcttttttttccttcactttgttctggaatttaaaaagtgtctagagcccattactttagccttagctttttggacagcgttatcttataactttccttgaagtgagctgctaagcagaagaaaacttgtttctttttctttttaacctttaccacaattctgtgggccaaagggatcaggagacagacatagagcagtagaaaacctgagacagagaaaagaagaatgagagagactcataacagatggtaaagtagaggaggggtgagggatttgccaagaggtgacaaaagtgaaaaaaa

SEQ ID NO: 12650 - DNA, 1209 bp, Homo sapiens
tgggggttataatatacccttcgaggccatctatctccctcatcacacatacaccaacttaatataaacccttttcagagaagataaaggaattagctgtttaatgactacattgtggtgaagttttaaagccactaaatgggaggtccattcccatggcaccattgctagcagcccaaacacagtctgcagaaacactcatttcagtggctgacttcagtcagtaattgatacagcaaaatttcattctaacatttcaaagctgtctcacagaatttctgagaaaaaagtgttcccaatcactgatttcatcatatcgcgtcaatattacttcagcacctttaatgaggaaatcattgaaacacactcatcatctttggctagagagatttatgttactcagaggttttgcagctggtgtggcagtgggtggcaatagtgaatttgcagttttgaaaaaaattaaaaagttacgagaagaaaagagaataaacaaagagaaagggaaatgaagcaagaacaaaagagactcaatcatagtgttagaaaattcctgcaaacttcttgatcctgaagtctccaaaaaacctcagacctcccaccgatgttacagtatctttcatctggggctcaatctaagaatcttttcggttcctggtaattcctctgagtgcttcatgtctgtcatcacagttttattaaagaactttacttgtgtttggaaagattgtgtgcatgcgtgtctgtagccagttgcagacgtattgtctcagtaagaaaataaatcctatttgttttatgaaatcagtacacaaataacagttgccacagtgtaccagtatttcaatttctaaagaataccatagagtctgaattagaacctttaactagattgcaaaggaatatactaaattgaaaacttgtaaaagggaagtaataaacaccataatcctagataagatcctatggtctttcagagtttttccatatacagtaattatttgatgtacagtaattattgataaccaaaatgacaaaaactgaatctactcttcaaattcaaccatgtatcttaaaaaggagtaaaatgtactgttttcagtgtttcctttggtttcttacagtttataattttataaattaacttcatagaacatattttataaatgttctgtctctcctaacataaattttgaattataccattgt

SEQ ID NO: 12651 - DNA, 291 bp, Homo sapiens
tttttttttaatcataactgtgtttacgatttcggtttaaaatatcaattttggccaggcacagtgggtcatgcctatgatcccagtactttgggaggctgagtcaggaggactacatgagaccaggagttcgagaccagtctggaaaacataaagagacccccatctcttcaaaaatagaaacaaaaaataaatatcacttacacttaccacttacagtactgtgttctactttgactgaaattatttacaaaagagttttttgtttgttttttgtttttttgagacaga

SEQ ID NO: 12652 - DNA, 535 bp, Homo sapiens
aacttgtactttccttgcctttactgtggagttgaccattttttcagagagcctcggttgcttttagtgggaaatggtatttagaagccatggatgctaaatatgctctttgtaactgaagtaccattatttatagtccctttcagcagacagaggtagtagatatatgtatgtacacatagacacatacacacacacacccatgtacttctataaatagctatttctttatctgtctgtatatttatatatattaaagcctatgagatcatatcagtatctttcattccaatccaataccacatgttttatttaactttctcccctttcctgttctctgaacagtgagaaacctggttcctattatccataacacacattttcacttaattgctcagtcctagagtgtacagaaagttgtttcagaattactaacccaggccgggcgcgatggctcacacctgtaatcccagtactttgggaggccgaggcgggccgatcatgaggtcaggagatcaagaccatcctggctaac

SEQ ID NO: 12653 - DNA, 340 bp, Homo sapiens
ttgtggaaatctattttccttgaatgtagctcctctaaggtacttaaaattatagctttagtcttgtttacaaaatttacttcaggtgctgaagtaaatcccattcaacattaagagaatcttcatgaatgtagcagtataattggacctggtggccctctctgaatattattgagaaaggttgtggtcatttctttctattttttaatagagacagggtcttgctctgttgcccaggctggggtgggaggatcacttgagcccgggaggcagaggttgcagtgagccaagatcacgccactgcactccagcctgggtgacagagtgagaccctgtatca

SEQ ID NO: 12654 - DNA, 437 bp, Homo sapiens
aaattgtgttgagttggtggcagaagaggcacaatctgatggaatgaaggaaataatgtattcttgattggtctggtctttgcattcctcatatgtgtcttccattttctttttattaaatatctctttattttttccattaatatactttactcagatcactgtgactgcttaatagatactacacagtaatagtagctgttttcatgtgggagataaaaggatgaactagtcagagatgaatgttaattgggtgcatctaataagcctgagatttcctgcttcagtgtcatcatgggagttgaggcagagcatttggaccttcctagcatgtcacctactgaatgctcttgacccgttctgaattgcctacactgggcagtgcaggcatgacagagtctgcgaccaggtagcccttcaagctgcattggaggcat

SEQ ID NO: 12655 - DNA, 420 bp, Homo sapiens
gtcttctgcatcagtcatgctgggagctgcagattggtgctgttcctattcggccatcttggaatggactccatataaacttttaaattagtgtgtcaatatctatgattagccttctgggatttttaaccgcaattttttgagtactgtattagtttattctcatgttgctataaagaacttcctgagactgggtaatttataaagaggcttaattgactcacatttctgcacagctggggaggcctcaggaaacttacaatcatggtggaagaggaagcaaacatgtctttcttcacatggtggcaggaatgagaagtgcagaacaaaagggggaaaagccccttataaaaccatcggatctcattgtgccattgcactccagcctgggcaacagagcgagacttagtctcaaaaaaa

SEQ ID NO: 12656 - DNA, 287 bp, Homo sapiens
ttctcttcatcagggtccgcatggaatctttcttatattttaccctttcctacatgtagccttgaatgtcctttccacgaatatgctcccacggctgggagcattttcttttcttttcgtcacctttgatttttgggattagattaataggggaaaaagtccctggctttaaagaaaacaaaagtagaattcttcaaaaataaatttcatactgggaacagaaaggaactaaatgcttcataaaacagggaaaaagaaattaagatcatcctagaaataaactaaga

SEQ ID NO: 12657 - DNA, 438 bp, Homo sapiens
cacctacccaggaaaacaacattttctttttttttctgagacagagtcttactctgttgcccaggctggagttcagtggcgcgatctcggctcactgcaacctccgcctcccgggttcaatcaattctcctgcctcagcctcctgagtatctgggattacaggcgtccgccaccatgcccggctaatttttgtatttttagtagagatggggtttcaccatgttggccagactggtcttgaactcctgggtgcaagtgatccacctgcctcaacctcccaaagttctgggattgcaggcgtgaggcaccgagcccagccacaacctcttttatctacagtaaccagcctggggtgccaacctgctataagtcaaacttgcaggaagccaggtgctatctctagtgacaatctaggaagctagtaattggcactgtggc

SEQ ID NO: 12658 - DNA, 354 bp, Homo sapiens
ctatagtgagggaggatttccattctaaataccttattttgagggatttataaaacttagttgtaaaagagaaagcccacatagtgggaataaattgcttcagccatttttagtatttgagagcactagggaagatgtttagtagctgtgtggatgccttttttcacaccctgtctattgaatgctgcatccattcacgaagttaaatgttacatgcagttagtccttaatgtggactggatctgtacttttgttttggattaaaacatttaaagatttttgaagtgcagctactccccacgtgcatttgatacacataaaagtcatactgtgtgtgcacaaagagtacatgga

SEQ ID NO: 12659 - DNA, 418 bp, Homo sapiens
tgtgctgccacccaggctggagtgcagtggcagcacaatcataacttactctgcagcttctaactcctgggctcaagcaatcctcttgcctcaccctcctgagtagatgggactacaggtgtgtgccaccatgcctggctaattttttgtactttttgtagagatgaggtttcaccatgtttcccaggatagtcttaaactcctgggctcagaacaatccacccgcctcagcttcccaaagtgctgagattacaggcatgagccaccactcccggcctggattgtgattttaaactcagagagctattgacagattcttctgaaaatgggttgtcctcatttgcattctccccactagtgtggcttctctctctgtagtctacactcatgccttccctcatgacttaaagaatatttt

SEQ ID NO: 12660 - DNA, 444 bp, Homo sapiens
cagatgtgcagtgtcttaagagaaatctaattaaggctatgttcttagactgaaagcttgaatttactcagcatcaagcctgcatcacttttatccctcctatccatttaatttaccattactagaatattttaaaaatgccttttgtggctgaaaactcaatgctgaaatgcttatgtattacacagaggcatgtttttcactgtaggaaatactatgttttcttttcttttctttttttttttgagacggagtttttgttctgttgcccaggctggaatgcaatggcacaatcttggctcactgcaacctctgcctcctaggttcaagcaattctcctgcctcaacctcctgactagctgggattacaggcgcccaccaccatgcccagctaattttttaatttttagtagagatgagtttttaccatgttggccaggctgg

SEQ ID NO: 12661 - DNA, 672 bp, Homo sapiens
  misc_feature (669)..(669): n is a, c, g, or t
atgattttaggagcgtgtctagaaaggctggacttatgcagctgccgttatcctatggggactgcaaatgttacttgttaatgcagtaaaatgttgaaggggtttgtagaagacactgttggcaacttacctgtatccgtcacttttaccatttcagtgtacacactaccgttttcagctgccagcatctgcacttcttgcctgagggctttctttgctgcttgactacagttttccactcccatggcagttggaagtgctggggaattcaagctccatcccacagcagctctaaacaataactggcaagactctgtgtctgaataccacagctccctcccatctggggtgagagaactctgaggcatgtagtttacactggctcccagagtccccccagcagaattctgctccagagataagcctgataacacatgcctctattggccaccttcccttccttgtctccctttcccactccccaaccaatgttttccttcacctcccagtaaattcctgtacacagatccttgtctccgggtctgcttctgggaaaactgaaactaagttagaattcttctgagatttttagataaggatgtctgctattctattacgattcagcattttactctaggtctttagctatgtactaaaacaagaaaaaanaaa

SEQ ID NO: 12662 - DNA, 353 bp, Homo sapiens
taccttctaaatattcctcaaatccatctacttttattcattcctatctctatcatcatctcttgcctggacttttgccatggcctcgctgtttgtctatctgagctcattctggcttcttgcttgttagttcctcaccctgcacccagagtgatcttttcaaaatatgtggttatgttataccctgcataaagcccttcatggcccttaagataaggcaaactccttaacatgcccaaaggcctggcatgatttggctcccatcaaacatatagcacactcatcattgctccagctccaccaatctttttatattgctctgttccttctgcctctaggtctttgcaagtggg

SEQ ID NO: 12663 - DNA, 304 bp, Homo sapiens
atttcctttttgaattgcatattcagccctttgcccattttttctgttggtatgtttgtttttattgttaatttgtaagaattttaaaaactcattttgaattatactattttctgactccagtataaatcagaagttttcagatacatttctaattttatcaactgtggaggattacaagtagaaatataagtgcaaattgaggatgctgctttaatggttccttctttagtgaggttttgaattactacatcatagtacttagggagtcttttggacatttactatcccctcctatgttctg

SEQ ID NO: 12664 - DNA, 411 bp, Homo sapiens
gagactacacctatgaaaacaatttctgctgaaatacccctccagagagctttctaactggagctttaaagttcaccaggcggagcaaagttgagcaaaggcagaaatgggaaggtattgcaaggaaatggaaaaagaggaaaggacaggataaaacctgaagacctggccaggcaaggcgacttatgcctgtaatcccagcactttgggaggccgaggcaggcggatctcctgaggtcaggagttcgagacttgccatggccaacatggtgaaaccttatctctacaaaaatacaaaaattagctgggcatgatggcaggtgcccataatcccagctattcaggaggctgaggtgggagaatcacttgaatccaggaggtggaggttacagtgagctgagattgtgccat

SEQ ID NO: 12665 - DNA, 287 bp, Homo sapiens
atattgatcagaatgaccctctggaagaggaagcaaaatgccacatgtgagaggctttgatgtatgattgggccagtactatggcaaattaattgagacaaagctaagttttccagaaaaggcttacttagctcagtatgtatcatttgctacagtgaaagtctgcatgcaacattccccaatgagtatatattgtttgctagtaaaaattcatttcattcaacaaatatttattgagtgtctacttttgccaaatcttctaaaagcagtctgtggagtttcttatg

SEQ ID NO: 12666 - DNA, 386 bp, Homo sapiens
gcagtatgcgggcaccatcggcctcacccgagggacttcccaaacccctctttcaccccttatgacaaggtaacctttaaaccatttaaagcagggatccccaactccccaggcagcgaaccttagcggtcggtggctgttaggaaacctgcgacacagcaggaggtgactggcaggcaagcgagtactaccgcctgagctccgcttatctgacgtgacttagattctcataagagcgccaaacctatcgtgaactgcgcatgcgagggatctaccttgcgcacttctcctgagaatctgacgcctgatgatctgaggtaggacagcttcatcgccaaatcatccctgtctccccaaccccccacccatggaaaaattgccttccc

SEQ ID NO: 12667 - DNA, 437 bp, Homo sapiens
caagctcttgctctgttacccaggctggagtatggtggcacaatcatagctcaccacaaccttgaactcctgggcttaagagatcttcccacctcagcctcttgagtagctgagactacagggcacaccactttgcccagctaatttaaacaattttttgtagagacaggatcttactatgttgcccaggctggtctcaaactcctggcttcaaatgatcttcctctaaacattttatcatttattaatcctccctgcctgtgtctattattatattcatatctctacactgcaaattttgggtctcaatttttactgtgcctttgtttttactagtgtctgctgttgcaaaaagaagaaaacattctctgcctgagttttaatttttgtccaaagttaattttaatctatacaattaaaaccttttgcctatcaaa

SEQ ID NO: 12668 - DNA, 794 bp, Homo sapiens
tgtccttatttaaaatctctggaagccccacttagtggcttccatccatgtctcatgggacagaactgaatcacatagccatcccttgctgtaagagagttggggaaagtattttaagctgggacatcccagccctgagtgaagtcagggatctgttaggaagaatggatgctaggtaggtaaatggcaatgtctgacaaagacatggtaggccagtctgaaaaatgtaaagctgggctgcgcgcggtggctcacgcctgaaatcccagcactttgggaggccgaggcgggcggatcctgaggtcaggagatcgagaccatcctggttaacgtggtgaaaccccgtctctactaaacatataaaaaattagccgggcttggtggcgggcgcctgtagtcccagctactgaggcaggagagtggcatgaacccgggaggcggagattgcagtgagccgagatcgcgccactgcactccagcctgggtgacaaggcaagactccgtctcaaaaaaaaaaagaaaaatataaagctggatctatacctcactccttataccaaagtacattacccttgtatcaaatattttaaaaactggaataagcttttcatataatctttgagaagatggggctttcaaagcgttaaatgaaacacagaagccatggccaggcacggtggctcatgcctgtaatcccagctctcagggaggcaagaggcaggagcatagcttgagcccaggcgttcaagacctgcctgggcaatatagcgagaccccgttctccccaaaaagga

SEQ ID NO: 12669 - DNA, 452 bp, Homo sapiens
ttgcaaacagtccataagctcccagattgaggctgcaaacccagacatggtggtttcttggacttttccatgaaccccagcttctgctccagtgcctcaggctagagtcagtggggactattttgtctgattctctgactataaacttccaggccttcactctcccagccttgatgttcgtgtaagctccaaatcctatacgaaatgccttcattcattcctccatgatctgcagtggttgggttaggaaaacagagtgacacgggaggcgtgaggatggtatcctgatctttcactctcctctctcctacacagaagaacctggcccatagaaggaagtgtttcagaagattctggtgaggcatggaggtaagcaccaaaacagccccctctacacctcaacgcacacacatgcatgctcattctctctctctctctctctcatcttcctc

SEQ ID NO: 12670 - DNA, 561 bp, Homo sapiens
atctactcctagaccggcaaattatcctgttacaataaaatactaaaatgcttaaattctctggttttaaaggttatttgctttaaagcataagaaaccaactacagctaacttaagaaaaaataaatttattataagaacatagaatgactggaagggtagcaaaccttcagggactaggacgcagttacttgtgctaagaaccatctgattaggaaactggatccttctttgttcttctactcaagttcaaatttcagaaagaaagcattttctagctaacttgagtcacattttttgctcccctcattttttaagggacagggtcttaccctgtcacccaggctggggtgcagtggcactatcacaactcatgcagcctcgaactcctggactcaaggaatcctcctgccttagcctcctgagcagctggcactacaggtgtaagctaccacacctagctaattttttcaattttcgtagagacaggatctcgctatgttgctcaggctggtctgaaactcctggtctcaaatgatcttcccacctggacttcccaaa

SEQ ID NO: 12671 - DNA, 619 bp, Homo sapiens
gaaacagaagcaaaaacaccaataatgagcactgaatacatttatgtttcgggattacaattaaaacaactattggaattatggttgcgaaacaaaacaaatgctataaaccattataaagcagaaactgtaaaacccaatgaaggtaagaatgcgttaagtatcttgattttctcatttttttgtagttgaaggccaagaaaagatacgtttaaagtctgtagcccagctattagggatacaaataagtgtgaagttatacaagaaccctctagagagaggctgttggccagaggtagcatctgcttctttggtggtcttggagcttgagagtgttgatgtcatttggtgtgtggggaccaaagataatgagcaaactgtaaaatgcttgactgtcttggacaaagacgatttttctcatacaaacactcacagtgtccctacggaacagtaaagcagtagaactaataatagcaataaccagcccaaattgaatggaggagagaagagagaggatttgggagaaagtggttttgtcattactcttggtgaagagtcaattgattatatccgaagaaatgtaggattgaataaattatatacaaatatgagtgttctt

SEQ ID NO: 12672 - DNA, 686 bp, Homo sapiens
tggctgtcagttacttaaccacagaaaatcactgaaatgatgactggagaaaacatcaaaagtgtgctaaccaatagcactttttgtgatgatgaaaatattctgtatctgtgtcctccaagacagccactagccacatgtggttaagaagtcttttaaaatggccgagcatggtggcttatgcctgtaatcccagcactatgggaggttgaggcaggtggatcacctgaggtcaggagttcgagaccagcctggccagcatggtgaaaccccttctctactaaaaatacaaaaattagtcaggcatggtgtcacttgggaggctgagagaggagaatctcttgaacccaggaggcggaggttgcagtgagccaagatcgtgccggtgtactccagcctggacgacaagagtgaagacttcgtctcaaaaaaggaaaaagaaaaaaataaatctttaaaaataactagttgctgggtgtggtggctcacgcctataatcccagcactttgggagtccaaggtggaaagatttcttgagctcaggaatttgagaccagcctgggcaacaaagcaagacctcatctctgctaagaataagagaaaattagctaggcatggtggcagatgcctgtagtcccagttagtcaggaggcagaggtgggaggattgattgagcccaggagagc

SEQ ID NO: 12673 - DNA, 400 bp, Homo sapiens
tgtagttttccattcccctagtggccaccaggatgtgagctgtaccttcacctagcctgcccttaagtcagctcctctaccaactctaccttgctgtttcagattggtaggctgattaaaactctctaaagccagaggaggcctgcattccaccctcagctgagtgtgagccccgtgtgacctaggaagtcagcagcacagactttggggccagatagtctggtggaaccccagcccctgccattgatgttatgtacatcctgggacgtgttacttaccctctctgttcttcagttttctcctctgtgaaatggggagaaatagcacctactgcatagtggctgtgaggattaggtgaattagtatgtgagaacatttcaaacagtccaggaagcactat

SEQ ID NO: 12674 - DNA, 420 bp, Homo sapiens
gcctggccttaacctagggacataaagtcacagtagctctataggtgtttaaacacatagttctacatgtatctggttagttgaacccttctttttttttttaaattcatggaatggctgacttatttatttcatgtaacataatcttgaaaatacaaagtactctccctcctattttctagtccagtgaaggtgatcactttcctctttcatttaccttggttacttgtttcctgccctgaggtgaggctacttgtagggctgattaaggtgagatattttctcctttttgaggctctacttatgagctagaataataaaaattcaagaattgtgccgaattttcttttgttgatgactgtgatttagtctgttatgtaactacaatgtataatttacacatcctgaagatcatcagtc

SEQ ID NO: 12675 - DNA, 557 bp, Homo sapiens
agaacccagcaggcaataaaacacaaattgcatttacaaattaagtgcccataccatacttatggggttagaaaagcaaataccagtactatattttgttgaatactaataactaaaaatccacactataaaacaaataataaatgaattccagtagagtgtatgcaatcaaaagcaacaatattagtaaaacctcgtacaaaggaaacagtaaaatcctataaatgtacgtgaattctcttccaggtaacctgaatatttgtgaaactcacctctttgctgtgatgtattggggatcacactttgtcatcagggcaatattgctattctcctactattgtccattgaatgcagatggcagatttgttagttgaattttctattgcagtagcattgcttattttaagaatatttttagtagctactaagtgactataagttaccacggctcaccccagactcaaagcaagttttttgtgggcggggggggggggttgggggtggaggtgggaattggggtggggagttaagtggatacagtttatgtgcagacaaaa

SEQ ID NO: 12676 - DNA, 2161 bp, Homo sapiens
tgaaccttgtggcttctcttcaaatgggctaattgagagcgtggagttaagaggagaatcagctttcagtggcattcctaatgggcagtggatgacccagtcatttacagaccaaattccttcctttagtaatcactgtggaacacaagaacaggaagaagaaagccatgcttaagaatggtgcttctcagctctgcttaaatgctgcagttttaatgcagttgtcaacaagtagaacctcagtttgctaactgaagtgttttattagtattttactctagtggtgtaattgtaatgtagaacagttgtgtggtagtgtgaaccgtatgaacctaagtagtttggaagaaaaagtagggtttttgtatactagcttttgtatttgaattaattatcattccagctttttatatactatatttcatttatgaagaaattgattttctttttgggagtcacttttaatctgtaattttaaaatacaagtctgaatatttatagttgattcttaactgtgcataaacctagatataccattatcccttttatacctaagaagggcatgctaataattaccactgtcaaagaggcaaaggtgttgatttttgtatatgaagttaagcctcagtggagtctcatttgttagtttttagtggtaactaagcgtaaactcagggttccctgagctatatgcacactcagacctctttgctttaccagtggtgtttgtgagttgctcagtagtaaaaactggcccttacctgacagagccctggtttgacctgctcagccctgtgtgttaatcctctagtagccaattaactactctggggtggcaggttccagagaatgcagtagaccttttgccactcatctgtgttttacttgagacatgtaaatatgatagggaaggaactgaatttctccattcatatttataaccattctagttttatcttccttggctttaagagtgtgccatggaaagtgataagaaatgaacttctaggctaagcaaaaagatgctggagatatttgatactctcatttaaactggtgctttatgtacatgagatgtactaaaataagtaatatagaatttttcttgctaggtaaatccagtaagccaataattttaaagattctttatctgcatcattgctgtttgttactataaattaaatgaacctcatggaaaggttgaggtgtatacctttgtgattttctaatgagttttccatggtgctacaaataatccagactaccaggtctggtagatattaaagctgggtactaagaaatgttatttgcatcctctcagttactcctgaatattctgatttcatacgtacccagggagcatgctgtttgtcaatcaatataaaatatttatgaggtctcccccacccccaggaggttatatgattgctcttctctttataataagagaaacaaattcttattgtgaatcttaacatgctttttagctgtggctatgatggattttattttttcctaggtcaagctgtgtaaaagtcatttatgttatttaaatgatgtactgtactgctgtttacatggacgttttgtgcgggtgctttgaagtgccttgcatcagggattaggagcaattaaattattttttcacgggactgtgtaaagcatgtaactaggtattgctttggtatataactattgtagctttacaagagattgtttatttgaatggggaaaataccctttaaattatgacggacatccactagagatgggttgaggattttccaagcgtgtaataatgatgtttttcctaacatgacagatgagtagtaaatgttgatatatcctatacatgacagtgtgagacttgttcattgaagataatattgacgatgtaaaatgcatttgaaagtctgatgggtttacaataaaagatattaagaatgttatcttaaagaaaggaagaaaaatgcggggataagaaggggggggcaaacacggactcgaagggcacaggacataggaggtccgaaccaaggttctggaacaaggggaaacacgcggacccaaaggaacgatcattggaaaccaggtacaggtagaacgacaaggggcaaagaggcaaagacgaacgggcgcaggacgacacatggaaaacggg

SEQ ID NO: 12677 - DNA, 1433 bp, Homo sapiens
cgtgatgctgcggcgttctagaggatcccgccactgacagagccctggtttgacctgctcagccctgtgtgttaatcctctagtagccaattaactactctggggtggcaggttccagagaatgcagtagaccttttgccactcatctgtgttttacttgagacatgtaaatatgatagggaaggaactgaatttctccattcatatttataaccattctagttttatcttccttggctttaagagtgtgccatggaaagtgataagaaatgaacttctaggctaagcaaaaagatgctggagatatttgatactctcatttaaactggtgctttatgtacatgagatgtactaaaataagtaatatagaatttttcttgctaggtaaatccagtaagccaataattttaaagattctttatctgcatcattgctgtttgttactataaattaaatgaacctcatggaaaggttgaggtgtatacctttgtgattttctaatgagttttccatggtgctacaaataatccagactaccaggtctggtagatattaaagctgggtactaagaaatgttatttgcatcctctcagttactcctgaatattctgatttcatacgtacccagggagcatgctgtttgtcaatcaatataaaatatttatgaggtctcccccacccccaggaggttatatgattgctcttctctttataataagagaaacaaattcttattgtgaatcttaacatgctttttagctgtggctatgatggattttattttttcctaggtcaagctgtgtaaaagtcatttatgttatttaaatgatgtactgtactgctgtttacatggacgttttgtgcgggtgctttgaagtgccttgcatcagggattaggagcaattaaattattttttcacgggactgtgtaaagcatgtaactaggtattgctttggtatataactattgtagctttacaagagattgtttatttgaatggggaaaataccctttaaattatgacggacatccactagagatgggttgaggattttccaagcgtgtaataatgatgtttttcctaacatgacagatgagtagtaaatgttgatatatcctatacatgacagtgtgagacttgttcattgaagataatattgacgatgtaaaatgcatttgaaagtctgatgggtttacaataaaagatattaagaatgttatcttaaagaaaggaagaaaaatgcggggataagaaggggggggcaaacacggactcgaagggcacaggacataggaggtccgaaccaaggttctggaacaaggggaaacacgcggacccaaaggaacgatcattggaaaccaggtacaggtagaacgacaaggggcaaagaggcaaagacgaacgggcgcaggacgacacatggaaaacggg

SEQ ID NO: 12678 - DNA, 503 bp, Homo sapiens
  misc_feature (473)..(473): n is a, c, g, or t
  misc_feature (502)..(502): n is a, c, g, or t
cactttatttacatgtttgtctcttattaaatcagctccctatgggtaggaaccttgtcttaattatccttgaatcctcagcatttttcacagggcatggaacacagtagacatttaataaacatttactgactaaatctgagaggaagaggatcctctctcaatatcagaaaactacttgccacacgacagttcggatcttagtccacttagtctatcttagtcagcttgggctgctataacaaaataccatacactgggtggcttacacaacagaaacttacttctattaaaggttggaagttcgagatcaggatgccagcattgttgggctctggtgaagtctctctccctgggcttgccaatggccacattctcaccctctcactcatgtgtcatcacttgatgccgagagagagcaagcaagctctctggtgtctcttcttataagggtactctaatcacagcatgangggcctaccctcatgacctcatccaaatng

SEQ ID NO: 12679 - DNA, 542 bp, Homo sapiens
tcttaggctgctactgagctcttgaggaaacaacagcggccagaggagcttcctgaaagcgtaactgattcatttatgcatactgcaggcagttatcactatcctgagagtcatcctattggaaatgttgataaggaatttgttcttgactttagctgcagtcatcagtgacaccacctcagctctggatggcacttaagtcagcctcaattcattggccagggtggttatgggtgatagaattgctcttcctctttgtgggccaaattggagtcagtgcaatcactaatacatcccactgtgactggattaatgtctcagaccgagtacagggtcaatacagaaacttgagaatgccacttggctttctaaggtagatcctgatggtttatgattgttggtttttttttcctaccttgttggatacaggcccttggatatggctgaagtcagtactgattggtcttatcctgttacatagagttctgttgatagtacctttaattaaatgtaataaaatactttgaatggacctggttcca

SEQ ID NO: 12680 - DNA, 2478 bp, Homo sapiens
cgacctcctccccgcacactttgaacgccgcgcctgaggccagctggcacatgcgcatgcgtgtctctggtgcctgctctccccaccaaagcaagaagcggcgggtacttgaagcggagtgagccggaagtcgctttgcctgcccatttccacgctgtaccggcggaaattcaagcactggaagagaggttccggggctgggctggcctgactgaaggcggcggaatggagacgcggaccgaggacgggggcctcacccgccgccccacgctggcctcttcttgggatgttgcaggcggggccctgacccacagcctcctcctcacccgggccggtctcggccccggtgacttcgactgggaggagctgctggcaccgcctgctccaggtcaggatctggtgattttgaagagaaaccacaacaacaaagatgaaaacccctgcttcctttacctgaggtgtggccctgatggaggtgaagaaatcgcttctattggcattttaagttcagcaagaaatatggaagtgtacttaggagaggagtactgtggaaccagtaggggcaagaatgtttgtactgtcctggatgacagtgaacatgaaaagatcattttgtataaaaaaaatctaaaattggagtcctccacacatgcttgtaaaataaagttgctctcctttggcgaaaggcagtgtgtgttcatcagtaaagttgtggtacacatgagatcagtttttgcaaattcttcaacaagctctcctgctctaggatcaaggatagaccttgacaaggtccaaaccataatggagtccatggggtcaaagttatctcctggagctcagcagttgatggatatggttaggtgtcagcagcggaattgtattcccattggagagcagcttcagtcggtgttgggcaattctggatacaagcatatgattggactacaatcctcatctaccttaggaaccttaaacaagtcgtcctccacaccttttccttttagaactggattgacatctgggaacgtgactgaaaacttacaaacttacattgataaaagtacacaactgcctggtggagagaattctaccaagcttgatgagtgtaaagttatgcctcaaaaccattcctttcttgaaaatgatcttaaaaatgcaatggcctctttcttaccaaagaaagtaagtgacaactcaaatatacccaactccgagttgctgccttttctccagaatttatgtagtcaagttaatcatctccatgtgggaaataagaccgagtgtcaggaaaacatcaccaagcatggtgaacgcattcttggtgttggaatggaagagcaatctatttgctcctacttggaaaagattctttctaaaaatatggaactgatggaaaagaaacttatggattacattgatcagcgaatacatgaactccaggagcacattgatgataagattgctttgttactggatttgctgcaaaatcctaactccccgcccactgggatacctctaagacattatgactctggagaaagactttcaaatggagaaagataagctctcaacataaacagtgtactgcagatatttattacatatttattacaaagccaaaacccaaaaatatttataaaaagcaagtatttaatgtcctttgagggatcattgtcttacacaaagtgacctcagttttcgtttttactacacttgttattttaaatccagtactgtacactgagttaatatgatacagtcaaattatttttgctcacgatatttttcagtcttacagaaatgtatgtatatttgtgttaagagtttaaaatgcttgaggatttctaatacagttcattagtttgtattgtatatgtgtttaagtataatttttatttatacaaagatcttatagtcttagaagtatgaaaaataatgcttaagagtatttgatttttttctttttctaattatcttggaaaattggatacttaagacttggagcctttacttcagattaccagtttacattttgtattgcttgtgtgagataatgaataagatgtgatatttggcatgtgtaaacttagttcactctggggttgttaatattatttgtttcattacagagtagctgtaggtaggaaagtaaacatcagaactagcctagtccttgttacgattagtactttggatttgatttttcctgtaaaacagatgcagtcatcttgtttgacctcagtaaccccagacagtttaagaaaacctctccttttgagctgatacaggttttttccccagaatccttttctggcatgtttattgtatgaaataatgaggctctccatggaaggatgaacacatatgagtcaagggattgcaattctctctgatagacttagttttcagaccttataactattgtatatgcattgaagggtgatatatttgcatataaaaataaatgcacctgctctg

SEQ ID NO: 12681 - DNA, 758 bp, Homo sapiens
agacggagtcttatcacccaggctggagtgcagttgcgcaatctcagctcactgcagcctctgtctcccgggttcaagcaatcctcccagaatggaagagcaatctatttgctcctacttggaaaagattctttctaaaaatatggaactgatggaaaagaaacttatggattacattgatcagcgaatacatgaactccaggagcacattgatgataagattgctttgttactggatttgctgcaaaatcctaactccccgcccactgggatacctctaagacattatgactctggagaaagactttcaaatggagaaagataagctctcaacataaacagtaaacaggatgcctgtgatgaaaagttccttttgtaaccagtccagaggagactggttacaaccacgatagctgaccaaacgactttaaaaagacctcagcctttttataatcttatttctgtgctaaataacgctcctgctagctccatgacagttgacaatcgccatgacagtgaccagaagaagccatgaaaggacaaaaaggaaggcagcactctggttttaggaagttcactgcccatttctgaaaaatccaggaatattcctccctttgcttgaatgtgaaacacctttattagaaaaattatattttaaccccctcactcctcattagttgaaaagttgatttgtgagccatactcctgcttctcaattcagtggcgattgaataaaacctgcagtgtttgtcactctt

SEQ ID NO: 12682 - DNA, 3088 bp, Homo sapiens
cgacctcctccccgcacactttgaacgccgcgcctgaggccagctggcacatgcgcatgcgtgtctctggtgcctgctctccccaccaaagcaagaagcggcgggtacttgaagcggagtgagccggaagtcgctttgcctgcccatttccacgctgtaccggcggaaattcaagcactggaagagaggttccggggctgggctggcctgactgaaggcggcggaatggagacgcggaccgaggacgggggcctcacccgccgccccacgctggcctcttcttgggatgttgcaggcggggccctgacccacagcctcctcctcacccgggccggtctcggccccggtgacttcgactgggaggagctgctggcaccgcctgctccaggtcaggatctggtgattttgaagagaaaccacaacaacaaagatgaaaacccctgcttcctttacctgaggtgtggccctgatggaggtgaagaaatcgcttctattggcattttaagttcagcaagaaatatggaagtgtacttaggagaggagtactgtggaaccagtaggggcaagaatgtttgtactgtcctggatgacagtgaacatgaaaagatcattttgtataaaaaaaatctaaaattggagtcctccacacatgcttgtaaaataaagttgctctcctttggcgaaaggcagtgtgtgttcatcagtaaagttgtggtacacatgagatcagtttttgcaaattcttcaacaagctctcctgctctaggatcaaggatagaccttgacaaggtccaaaccataatggagtccatggggtcaaagttatctcctggagctcagcagttgatggatatggttaggtgtcagcagcggaattgtattcccattggagagcagcttcagtcggtgttgggcaattctggatacaagcatatgattggactacaatcctcatctaccttaggaaccttaaacaagtcgtcctccacaccttttccttttagaactggattgacatctgggaacgtgactgaaaacttacaaacttacattgataaaagtacacaactgcctggtggagagaattctaccaagcttgatgagtgtaaagttatgcctcaaaaccattcctttcttgaaaatgatcttaaaaatgcaatggcctctttcttaccaaagaaagtaagtgacaactcaaatatacccaactccgagttgctgccttttctccagaatttatgtagtcaagttaatcatctccatgtgggaaataagaccgagtgtcaggaaaacatcaccaagcatggtgaacgcattcttggtgttggaatggaagagcaatctatttgctcctacttggaaaagattctttctaaaaatatggaactgatggaaaagaaacttatggattacattgatcagcgaatacatgaactccaggagcacattgatgataagattgctttgttactggatttgctgcaaaatcctaactccccgcccactgggatacctctaagacattatgactctggagaaagactttcaaatggagaaagataagctctcaacataaacagtgtactgcagatatttattacatatttattacaaagccaaaacccaaaaatatttataaaaagcaagtatttaatgtcctttgagggatcattgtcttacacaaagtgacctcagttttcgtttttactacacttgttattttaaatccagtactgtacactgagttaatatgatacagtcaaattatttttgctcacgatatttttcagtcttacagaaatgtatgtatatttgtgttaagagtttaaaatgcttgaggatttctaatacagttcattagtttgtattgtatatgtgtttaagtataatttttatttatacaaagatcttatagtcttagaagtatgaaaaataatgcttaagagtatttgatttttttctttttctaattatcttggaaaattggatacttaagacttggagcctttacttcagattaccagtttacattttgtattgcttgtgtgagataatgaataagatgtgatatttggcatgtgtaaacttagttcactctggggttgttaatattatttgtttcattacagagtagctgtaggtaggaaagtaaacatcagaactagcctagtccttgttacgattagtactttggatttgatttttcctgtaaaacagatgcagtcatcttgtttgacctcagtaaccccagacagtttaagaaaacctctccttttgagctgatacaggttttttccccagaatccttttctggcatgtttattgtatgaaataatgaggctctccatggaaggatgaacacatatgagtcaagggattgcaattctctctgatagacttagttttcagaccttataactattgtatatgcattgaagggtgatatatttgcatataaaaataaatgcacctgctctggaactacttgtctttagttagtagaactgttttatttcaactaatctttacttcaaatgtcttattttttagaaaaagggtatctcatactcatttaatattttggcaaatttcttctttaaaaatgttacctgatgtaattcctgcgtgacatagctgaatttttaccctgccctaactctgcttatctttaagaaacaggatgcctgtgatgaaaagttccttttgtaaccagtccagaggagactggttacaaccacgatagctgaccaaacgactttaaaaagacctcagcctttttataatcttatttctgtgctaaataacgctcctgctagctccatgacagttgacaatcgccatgacagtgaccagaagaagccatgaaaggacaaaaaggaaggcagcactctggttttaggaagttcactgcccatttctgaaaaatccaggaatattcctccctttgcttgaatgtgaaacacctttattagaaaaattatattttaaccccctcactcctcattagttgaaaagttgatttgtgagccatactcctgcttctcaattcagtggcgattgaataaaacctgcagtgtttgtcactctt

SEQ ID NO: 12683 - DNA, 349 bp, Homo sapiens
ttgtaagaagacagagcacagttgtggagacaaatctcagcaatatatgttggctgcttgttttataagcttggttgtttttgttattagggaaaatttacacatttttaaaaatgtatttttagaatggaagagcaatctatttgctcctacttggaaaagattctttctaaaaatatggaactgatggaaaagaaacttatggattacattgatcagcgaatacatgaactccaggagcacattgatgataagattgctttgttactggatttgctgcaaaatcctaactccccgcccactgggatacctctaagacattatgactctggagaaagactttcaaatg

SEQ ID NO: 12684 - DNA, 454 bp, Homo sapiens
gcggccgccgcttcacctacccctcactgctggtcagccacaggcgcatgcactcgggggagcggcctttcccctgccccgagtgtggcatgcgcttcaagaggaagttcgcagtggaagcgcaccagtggatccaccgctcctgctccggggggcggcggggccggaggcctgggatccgggctgtgcctcgggcccccgtccgaggtgaccgggacccgcctgtgctcttccggcactacccagacatcttcgaggagtgcggctgagcggcaccgcaggctggagttgagcctgaccttggcacgaaggactgacggatccctgaggtgggccactgagtcggggactccggaactgaaattcatgccctgggctttcctcaaggatccctcaagtttccaacttgtaaaaagaaaagtgcctgtaaagattcgaatagattagacttgcc

SEQ ID NO: 12685 - DNA, 445 bp, Homo sapiens
tgactcaacacagccattcccctagaagttacagtgtcacccttcagagatctaccccgtgtgcacacatagagaagaggcttaggttgttagagtcagcatgttaaatcatttcctgaaatgcgactgtaactagaacccagctgacttcccccacagccattcttacctattttattactgtctggcataattaccagcatgtaaactccaagaaggtgcttcatcttcttccagtgcctagcataggcatagggtgcatagtgatggctttaaagtggaagggattccaaggttcgcctcatttagggatggagctattgttataatcagttttctgaaatcattgctgacttcctctcacatttcacaggaagctagacttcttaaagcttaaggtttccttggtgggttttatttaaattgaattaaaatatttatttta

SEQ ID NO: 12686 - DNA, 326 bp, Homo sapiens
cttaatgtgggaaccgtaaaagcaaatgtgaatatggcatttcaagactacataactgagaagcaagccaaactataaaataaattaattcctgtagaataaatacagagaaagcaaatgtaactgtaaaaatggagcaaaacatgttgcaaaatcctgtgaatgtgaatagatttctatatagccatagaacttgtagattaacaaatggttcaagaagaactggtacaatggagacagaaaaatgacttccaatgttacaactgcttatagaaaagataaatattcacttatgtacaacaagcaataaaaaaggaagacgtcta

SEQ ID NO: 12687 - DNA, 381 bp, Homo sapiens
aagaaacctagagcttctctggttctagttttttccaaaggctcattttccagcttttccttccattctgagagctatacccatagcttcccattaattcctttattgtttggttaatttggcctaatactgtgactcagtctctgtcacttgccaccctagaaccctagccagcacagaaatgacggagtgaaaccacctccacacaaaccagtgctgcttcctctcttcacagttgcagattctgtctctagtggcagcattaagggagattgtgtcatcaagcctgctttgctctaagatgctgactttaacagattagaaatgttccccgcacagcccacgcttctgctaataaatgattccatatctatcatgaat

SEQ ID NO: 12688 - DNA, 526 bp, Homo sapiens
ccctgatggtcccatccccactccagggatcacgtgacttggcaaaccaagatgggggatgatacccccagagcctggctccaaggcctcctgaagaggccatccttgcaacagaggaagggaaggcaggaaggccggttctgctcaaatgggaccccaggagaccaaagccctgagccgtgaatccagctcttccacttactactgtatggtgccaggcaaactgcacaacctggagtttttagtaaggttcctttgggatgcttgtcagcagcgaatacaatgtctgttcaacgtttgtcatcagctctcacctgggagaagccttgttactgtggggaaagggaaccaagtgaagggaacggacatccgatgagagcctgccatgtgccaggcaccattctaggtgctttgcattcctaatctcatcataatcccacaaccacctaacctttatctccattttacagagaaatcaaggacaggaaccaagtctgaaatagaaccccaagcagaatctcttttc

SEQ ID NO: 12689 - DNA, 222 bp, Homo sapiens
tttcttaacttgggtgagatgagttgtaattcaggtgtttttatgtcctcaaactatttcaaactcagagatgatcggatgacctttttgaacatgactattaatatttttaaaaacagaaacggttttccttctttgaagaaatggtacaaaaggggaagattttcattgacttttttgggaacatgttcaaatagttaagaacctaaggttccagttgca

SEQ ID NO: 12690 - DNA, 454 bp, Homo sapiens
aaaacaaacaaaacgaaaactataatagcgttagctgtaattcattaaatatttccatggtgctgggtagtgtgagaggcaatttataaatgtccagctctgataacaaccaggaaaggcaggtagtattattcctattttatagatgaaaaagttgaggctctggaaaatgaatgatcttgtgggccgggcatggtggcttatgcctgtaatcccagcactttgggaggctgaagcgggtggatcacttgaggtcaggagttccacacaagcctgccaacatagtgaaaccccatctctactaaaaatacaaaaatcagttgggcatggtggcacgtgcctgtagtcccaattactcaggaggctgaggcaggagaatcgcttgaacctgggaagtgaagattgcagtgagccgagatcgtatcactggactccagcctgggcgacagtacga

SEQ ID NO: 12691 - DNA, 516 bp, Homo sapiens
catacctgaccttctccatttcctcaacttcttcaagcccctcactttacagatgaggaaatggaggtggtccagagagggtctgggattcccaaggtcacacagcccagaagagatggggctgggttaagaactcgagtcttccacctttctgttcaaggctgtttgtctacccagaggaaggaggcactgctgaatggctatggcctggctaagaaggtgattagtcagtagggtgtgaaaattctacttcaaggggttcggattggtgatcatggggattggcatggctgggttcccgtccaaggtgtgggcagagcttctaccaaacttcaacatggagggctgacttgaagctccctgtccccctcactcttgccccaagaaaagaggccaaagcaagagcagattccctaggcaagagcagcagcacaactaggaaaccccaaagcccatgctccgacaggtggcccttcacagggggcagcgggacaggcatcttgaagggcatatgtc

SEQ ID NO: 12692 - DNA, 1553 bp, Homo sapiens
accacaccctggcaccgtcatttcccactccgtggcgatgctgatcctcataggctccctggactctgatcctggaacccctccctctgcgccgcagctggacgccacctccgacggacacagccagccccttcctgctgccaagagatggccctctgggaccctatacggactccgccacttgagagcagtcctaggcccggcaggaacaccagacatgaacaggttgaagaactggagcgaagtgcacacctcaccatccttcagtctaaggaagaagggcaagccctgggaccaagagctctcccgccttctccctcgagcagcagcaaggaccctgacgctgtccccgataactccctaggggctcctgcctgcccaagcggctgagaaccagcgccccgatgcctgaggctgggagcctgagccccttcagctttgaggggggtgatactccaggctgtttggggtgggagccaaaaagagttgagaggccagggcccttggtggaaaggggcaccagccttggtctgagatagtcacaacccaggtgacgatgccctctcagccaacactgccaacctgaccctgtcatcccgattgacagcgccacttcaggtggctgggtgactaaagggcttgtcttggtggggtctcccacccctccaagacccattctgcacagtccctccagggtttgggcaggagatggccaatcatgcgcccacctctccagtgctgcctgcagtcagctcggcctccccgacctgcagccccagactctgctctcccagcactgactcactcctgcctgggaggggaatgcagcattcatgctgtgtgtcctggtattgggaggtttctgggaagggcagaggataaatgtggccctgcctgctcccaggtatacctaggaccacctggccagatccgctcccagacggccttggactgcttgcatttccccggagaaaaaggggttaataaatgggccatcctttcctgagctctgggtatactaccagtcacagaacgtcagagctggaagaagccttagagctcaacttcttcaagcccctcactttacagatgaggaaatggaggtggtccagagagggtctgggattcccaaggtcacacagcccagaagagatggggctgggttaagaactcgagtcttccacctttctgttcaaggctgtttgtctacccagaggaaggaggcactgctgaatggctatggcctggctaagaaggtgattagtcagtagggtgtgaaaattctacttcaaggggttcggattggtgatcatggggattggcatggctgggttcccgtccaaggtgtgggcagagcttctaccaaacttcaacatggagggctgacttgaagctccctgtccccctcactcttgccccaagaaaagaggccaaagcaagagcagattccctaggcaagagcagcagcacaactaggaaaccccaaagcccatgctccgacaggtggcccttcacagggggcagcgggacaggcatcttgaagggcatatgtc

SEQ ID NO: 12693 - DNA, 363 bp, Homo sapiens
gatgctgatcctcataggctccctggactctgatcctggaacccctccctctgcgccgcagctggacgccacctccgacggacacagccagccccttcctgctgccaaggtggcctgacactgtgccagagagtggctggttttaaatacctactttaaacagtgccctttttgtaggaggtaggatattttatattctgccgcaggatagaacccacgcaggattttctttaaattgagaggcaccaggcagtaacttccatgatgacactgacgcctatacctgagctctaggctgcctggagggaaggaacaggcccatgggaagaagggggttttaaaaacatgtcttcaactcagcag

SEQ ID NO: 12694 - DNA, 208 bp, Homo sapiens
gactcactcctgcctgggaggggaatgcagcattcatgctgtgtgtcctggtattgggaggtttctgggaagggcagaggataaatgtggccctgcctgctcccaggtatacctaggaccacctggccagatccgctcccagacggccttggactgcttgcatttccccggagaaaaaggggttaataaatgggccatcctttcctga

SEQ ID NO: 12695 - DNA, 382 bp, Homo sapiens
aaggcaagtctgttagtgatgaacttcctcagcttttgtcagggaaatttttatgtttccttcatttttaaagggcagttttgccaggtatagtgttcttagatagcattctttttccctttcatccctttgaatatgtcatgttactgccttctggcttgcaaagtttgagctgaaaaagtcaattgatagtttaatagggattcccttgtttgtaatgagtcattttcttcttgcttctttaaaaattctctttttttgaattaaaaaaaagaataaaaaagacttaaaaattctctttttttgaataaagacttaaactgtctttattctttattactattattattttcttcctccgactgggtgatttcacgtggcc

SEQ ID NO: 12696 - DNA, 1256 bp, Homo sapiens
gtgctaagagtagaattcccatcagaaaggaacatttctattttctgtccttatctcttggtcaaaacttcaaaacttgctattagtgtggtattttaacacttttttaaataaaaggctctggaaagatctctttaaaaatagaacatggattgcctgtgttagaaaaggataaagataggattttagatgttctttgcattatctgagctgaggttaccaccccgaggagaatgtgccctatttttagaaacataacttggttgtttttcccccccgatacatggtctctcactgtcgcccaggctggactgcagtggcgcgatcttgtctcgttgctacctccacctcctaggctcaagcaattctcctgcctcagcctcttgagtagctgggattacaggcacccaccaccatgcccggctaatttttgtatttttagtagagatgggatttcaccacattggtcaggctggtctcctgacctcaagtgatttgcccgccttggtctcccaaagtgctgggattacaggtgtgagccaccatgcccattatgaatttaggatattcacaggtcatgaagaatatgcatttgaacaattccagtgaaaattttacaagctgacaatacagaaaaatatgccatgtttccccactccattttttttctttattggtgaactataaatatgtgggaatgctatggtataagatgaagagaattcagatataaaaatgaaaacttcttgatagcctttcatgccttataacccttgggttgtgggtggcaggcgatgacgggcagagagataatttaaatacaaaattaggatctagaacttaggcaagaatttattggctggagatataacttagagtaatcactgttataagcaaaatcctggaagtagccaaacatgtagggagaaagtacacaggataggaaagatgagaagggatagaatcttggagacgctgacgtctgaggacaagctatgccttcaagaggcataaggcaaaaatgcatgacccaatgaacccagccctgctgtgaaaggcctcctttcactgagtcatatctgtgggctcctgcactttgttccctggcttcttgccttaattcccttggatttcaggacttttttgttagggaatcacaatctgtgcctgacttcccatggatcccccaagatagatcttgctcagcgaagacatgggcaataaaagcttaaaaggaatggtcagagttaaaaaaa

SEQ ID NO: 12697 - DNA, 330 bp, Homo sapiens
gtgctaagagtagaattcccatcagaaaggaacatttctattttctgtccttatctcttggtcaaaacttcaaaacttgctattagtgtggtattttaacacttttttaaataaaaggctctggaaagatctctttaaaaatagaacatggattgcctgtgttagaaaaggataaagataggattttagatgttctttgcattatctgagctgaggcaggagaatggcgtgaacccgggaggcagaggttgcagtgagctgagatcgcgccactgcactccagcctgggcgacagagcgagactccatctcaaaaaaaaaaagtcgacgc

SEQ ID NO: 12698 - DNA, 224 bp, Homo sapiens
aatttcacttttgtggatagttaagtataacatggtttagtataaaatctggtcttcctctagatttctaagtcactagaagaatttcttggcaaattgattgttcaaggccagttttgttagttgtaaggtggaagccaccccaatcctctcccagtgtttcataggcattttcagacctggatgctattatagttcctcctctagttttccagtagagaatt

SEQ ID NO: 12699 - DNA, 435 bp, Homo sapiens
agtcttcatggttattaaatcatttcttcccaggtcattctcatatcttaaaaagtagagaaagtagggctgagtgagtgaaagcgcctgttgccattgcattttcccaccatctgccactatgaggactcatcttggccctaatctcaccccaacttctgcagtaaaatacctgggctggccagtgattgaactttcctctcaaacattagctgacctttactgagttctttgtctcaaatcaccattactagcacctttgcgcacttcagtcttttctcatagggcctacatgatttaacaagtaaaattggggacccaaagtagaatgttttcagtaagaaatgaaggcgcctaggaaggggactttttatgtcctgtgtatttctcttctgtcactggcaataaaaagccctcaggaaaggtcacttgctt

SEQ ID NO: 12700 - DNA, 1087 bp, Homo sapiens
gcttatttctctgacagggcaataaagatagactccatttattgtgtttcaagaggattaagcgtaaacacatctatgatacagaatccttaattttgcactttttttgaatatttgtacagaagttgtaaattttttggaagagaaattatatttgtagcaaaaaaagacagcaataaatggaatcagtgccatgctcttgaaataatgtactaagtcttagaagttgatgataatatatattttttaaaatcccaactgaagtttttgtgaagttcgttgtcctggtcctcaaattgtttgtgggtacactctgtaaacctacaacagggcctgccaaaaaatcggagggttcctcctcatctccatctcacaaatctcaatttgatggaaatgttcattttagtgtaatttcagattcgttgccagagattcaggtgatagtaataagtgtcattctgcttctgctgaaaaatgaaaagggtcctgaagtgtggacactgattgggagtgtgacattgtatcagaaatgaccgaattctattcccaataccagtttttccttccagacatttctttagattgtcttttacttagtgcttctctatgatcctgaatattatttgatttttatcttcttgctctttttattaaaatctgggcactctaaaaatgaaaacaaatttctatttgcaatgttcacttttaaaaataaaattaatggtgctacgaagaattctttttaatatccttttttttctacaaagactgtttatatgtaaggataaattctattttaaaggttatgtgtattttttctagatgtgaactatttataattacttatgtacaggagcttgtaaactaggcccaatagaaatatttttaggatctatatggctactttagcacataattgtttctttaaagagtattgtatgatcagtgttatttggttaatttgtgcaatttgttttattttatcttaaatgaaaattatgtaaaatgtccttgtctttcagactttaaaaaatctttttgtttcctttctgaataaaagttatatcacatttgcaccctctgaaaa

SEQ ID NO: 12701 - DNA, 546 bp, Homo sapiens
tctctacaaaaaagcaaaaaataattagcctggcatggtggcacacacctgtagtcctagctactctggaggctacagtaagctgtgatggtgccactgtactccgcgacagagtgataccctgtctctaaaacaaaacaaaacccacaactaactggtcaccattggagtatttagtgaaccaattattctgagaactggtcagtaaagggaaagaattattcgtcctgtttttaactgaaccacttggtaatcaaatagtagattaaaggaaatgtctctttttatagaggtattctagctaataaatgaaggaacaataatagaatgagaatattaccatttggtgacctctcataaattaatggagctaggcattactcatcaacaattgctaatatctcaaaaggaaagacaaccagatgacaatgacatgtacctcctggcagttcataataccactgtgaagtagttttcctccctaccctcctagaagtactgaatgtgattaagcttttagattcaactaccaatttataggaatta

SEQ ID NO: 12702 - DNA, 822 bp, Homo sapiens
cattttcctaacccagcagagactgttaatggccccttaccctgggtgaagcacttacccttggaatagaactctaaaaagtatgcaaaatcttctttgtacagggtggtgagccgcctgccagtggaggacagcacccctcagcaccacccaccctcgttcagagcacaccgtgagccctcttcggccattctgtggtgttttaatattgcgatggtttatgggatgttttaagtgttgttcttgtgtttgttttcctttgactttctgagtttttcacatgcattaacttgcggtatttttctgttaaaatgttaaccgtccttcccctagcaaatttaaaaacagaaagacaatgttgtaccagttaccattccaggtttgagcatcacaagcttttgagcgcatggaactccataaactaacaaattacataaactaaagggggattttctttcttcttttgtttggtagaaaattatccttttctaaaaactgaacaatggcacaattgtttgctatgcgcacccgtccaggactgaaccatgcataggcaaaacgagtggagcacagcgtccagcccagtgtgtttccagttctgagtcagggtgatctgtggacgggaccccagcaccaggtctacgggtgccagatcagtagggcctgtgatctcctgtcagtgtcctcagctaatgtgaacagtgttggtctgctggttagaaactagaataatgatattttcaggaaagaaatcagctcagctctccactcattgccaaatgtcacccaaaaagggtttagttttaaggagaaaaaaaaaaa

SEQ ID NO: 12703 - DNA, 318 bp, Homo sapiens
catcacacctagctaaggatgcatgtgttttgataaacagtatgttctcaacctttgtttgaggaagagctagtcacaaaaatcaaataatcacatgtctgaaagaagtcctaaggttcagtctaacctctcccttgtaatgatgatgaaagcaaacccagagaggttaaacagtggcctgcagtgcggcttaactccaacgggagtgccatcctttctcagcacttaccacatctcccttctatactctaggcacctggtgggcaggctctcctttgcctgtatacagctggccttcagtaaatgtgtataagtcag

SEQ ID NO: 12704 - DNA, 268 bp, Homo sapiens
cgcaatattggctcagtgcagtctccgcctcccgggttcaagccattctcctgcctcagcctcccaagtagctgggactacaggtgtgcgccactcagctctaaattttagaccttgtaaatgctggtcaagaaagagaacaaaggccaggtgcagtggctcacgcttgtaatcccagcactttgggaggctaaggcaagcagattgcttgagcccaggagttcaaaacaagcctgggcaacatcatgagaccttgtctctactagta

SEQ ID NO: 12705 - DNA, 1874 bp, Homo sapiens
caaaatactaagatgaagagttaaggttcgttctcattacaaatcgagttcagcgtgtgtgtgtgtgtgtgtgtgtgtgtgtgtgtgtgtgtaatctttagtggctttaaagaataatattgccatttgtctactttgcaaataaagataacagaacacctttaaaatatatgtatgtgtacatatgtgtgtgtagatatagagagagagagatacggagagacagacagacagagagagagacagagagagagatgctttcccaagaggaaatgcatatgtaccttgatttaagcaaaactgataacagaaaattgaacttaatgaaagaaaaaagtctggatatggttactcactttacatagagtaagatttttaaaactaattttgcttagtagttaattttacaaaaatgaagagaaacaccctttaagtgtactcgtaatttaaaacacctttgaaatgtaattgtccaaatgtaatgctgctatgtatattatttgggttccagatttttccctttaaaattctcaaaacactcagtgtccttacaactgcagctaaaatggttaatcattctggcaagaaggtgacagtgtgtatattggaaaggcagacattcacatttgaaaatattttgcattattgttagctaaaatcaacctctccttgaatgtagatacaatatatggttttgcagtcaattctgaatggaaaaaaagaatcaagtctgaaatttatgtgaaatgtggcttcagatcatttgaacgatatgtagaaatctagatgaacatatcattagaggtgaaagcaaaatttgaaagcctaatgagatgaagcaacattatctctctctaatctgccaacaatattccctagattgtgttgccactgtattgattctgagtaatttggcttgtttatgcgtgatttaaatgcatgtggctgaatgcagtaatttttcaagttattgagtagtagagaattcaccactattcactgtctcccagagatgaacatataaaagaaaaaaaattctacttcatatatgtaagaataaagcaactaaatgatacaaaagtaaaaacttccaccagaatcagagatattccgacaagtgaattgtgagtctaacacgggaggacaaagctaggctcttgcaaggacagagcacacatggatcatgctgtatgagctcactttgtgtccctggaattagtgtttttttgtgtgtgatctaactggcaagtttaatgaatagccaaaatctatgttattcttgaggctcctaaaattatgtgtgaaccccaagttctgtctagtattatatccctaaaatgcttttaatagtggtatgttacaagtggcataagaagatcctgtttttaaatttgtcaggcattttattattcagtacataatatgtatagatctgagtgctgttttccttgcattgtctattatttttaccttgtctttcccctaagagaatttgaagaaaatcttcaccaatatttctagtgttgatggtaattaggaaaatagtagttgagagatgtaagaatagattgagaagagtgagtaaaatgggtgaaatgacaagtgggaaccatgtagctgagatgtatttgtttagatgaaaagtctacactggttcttaatgtgaaaatcaaaccatgtatctaccttaagaacaatgttgttgtttttaatttattgtagcgatttagtttttttcacgtaatatttctattttctttgcagattgtttttaatttaaattgtggaatttttacttctcaaaatgtattaagtactgtattttttgaaatcttatttttaaataaatattttttaaaaacgtaaaaaaaaat

SEQ ID NO: 12706 - DNA, 307 bp, Homo sapiens
ggaagtggtggatatggtcgcagagggttctaaaaacagcagaaaagggctacagctcttagcatgaagagatgcataggacaagatgggggaaggggtgaggagattccatacctttcctggtgtgcagctgtccagaaacctccacctgttcagctatctggaagtgccccaaacccagtccttttaagggttttatggaagctgcattatgtaggcacaactatggcggcggcctggttatagtagtagagggggctatggtggtggtggaccaggatatggaaaccaaggtggtggatatggt

SEQ ID NO: 12707 - DNA, 1070 bp, Homo sapiens
ggaagtggtggatatggtcgcagagggttctaaaaacagcagaaaagggctacagctcttagcatgaagagatgcataggacaagatgggggaaggggtgaggagattccatacctttcctggtgtgcagctgtccagaaacctccacctgttcagctatctggaagtgccccaaacccagtccttttaagggttttatggaagctgcattatgtaggcacaactgattaaaccactggccattggaaatcagtcagcctctctgccctccttggaggttgggagatgggacagaaagtcctaaccttctaatcctcccttggtttttcagtgaccagcccctaccctgaagctacctaagtgcgccagccaccaatcattagcatacaaaatgacaccactttggaaaggccaaagattttaggagttgtatgccaggaagggagttgaagaccaactatatatttcacaatatcacagctgcccagagtgagatcggcagcctttaaggtattcatccagctgaatgttcccacatgccctcaagtacttaccacccaactctgtagcagtgcacagtggacataaggtggtgttggcagtctcagtcctatttaatgatggccagagatacctcctggtcagccaaagccctggctgactgccaggcagttgcgcagtagctcttcctgtagtgaaactgttcttcttatcattgttgactaaactctgttggaagttgtctcactagccatatgagccacagctgtctctatcctgaatagcttaatgagccataggttgctgactcctggactgcaggaaccttttagttgcctctcgccacagttgaatttccttctggacctccatctctcttcatcacagttgtcaacacttgagccttctcccatgttacttcttatgcagtgtcccttctacttaactgtaagttttataaaagcagaaaaccgtcttattcagttttttgcttatgcagtaaacattgaataattgtcaaatgaataaataattgtcaaataaatgaatatattgaataccagcctttg

SEQ ID NO: 12708 - DNA, 112 bp, Homo sapiens
ggatattgcaagggatacagatgaagagatgcataggacaagatgggggaaggggtgaggagattccatacctttcctggtgtgcagctgtccagaaacctccacctgttca

SEQ ID NO: 12709 - DNA, 307 bp, Homo sapiens
ctctcctatttgacctctgaaagatattttagttataccaatgcccttcacctggggtttctcccagtccttagcttggctgatactgttctctcctggttctcctcctgctgtcctaagacactttaaggagcatttttatcatgggcaaatggaaataaaacacctatttcacagagtttttacatgaatgaaaaaggtcatatattcaaaaacacttggcaaatgtctgtttcattgaaagtgctcactggtttttattactcttgttatctctttccactccccatattctgtgctttaaaaa

SEQ ID NO: 12710 - DNA, 177 bp, Homo sapiens
gcggccgactactactactactgctcgaattcaagcttctaacgatgtacggggacatgaatgaaaaaggtcatatattcaaaaacacttggcaaatgtctgtttcattgaaagtgctcactggtttttattactcttgttatctctttccactccccatattctgtgctttaaaaa

SEQ ID NO: 12711 - DNA, 433 bp, Homo sapiens
tttcaaattatctaaatatggttttctttgtctttttctttcaactttgtcgaagtttgttttttcctaatttgtgcaattactaattatatgactcttggataagttactttacctttagaaatcaattttctgatttttacaatggaataacaatagtggctactttctgggttgttgtaaggattggatttttttaaatgcacatagcacatgcctagcatatagttatggatctgtagtaatagatgttagctatttttcttcttcttcttttttttttttattttttttgagatggagtttctctcttgtctcccaggctggaatgcagtggtgcgatcttggctcactgcaaactctgcctcccaggagaatcacttgaacccgggaggcggaggttgcagtgagccgacattgtgccactgcactc

SEQ ID NO: 12712 - DNA, 457 bp, Homo sapiens
gcaataaatgttaattacctacaggttgtgtttgctccatgttttcagcattgtgccggcactgaataaaaccaagcagctccagcttcttggggctgctctggccactagagccaggcagtcaactagctgctcttacactgcatacctgtgtctgagtactcatttcatccgtagccagggtctgcaggacacacccagcattctaggaatttaagcaaactaccatacccatgtaccagacttagctatgaaaaatgctcatcataaagttattaggatagtgaatgaatggaaatcttattgcccaatggagactggttcaataaacgatttccactgattgaataagtacgatacaaccatttaaaaatccaccaagatttcagaaatcaccactaaagaacttattaatgtaaccaaacaccacctgttcccaaaaacacctatagaaatt

SEQ ID NO: 12713 - DNA, 567 bp, Homo sapiens
agggttcctcccctttttagactatttagggtaacttctgggcattgctatgggtatttgtagactgtcatggtgctggtgaaagtgtcttttagcatgctaacacattataattagtgtacaacgaggagtgaggacaaccagacatcactttcatcaccatcttggttttggccggcttctttactgcatcctgttttatcatcaggtcattgtgacctatattttgtgccgacctgctatctcatcctgtgagtaacaatgccaaacctcctgggaatgcagcccagtaggtctcagccttattttacccagcccctattcaagatggtgttgctgtggtttcaacacctctgacataaccaacaaaaactgagtcaattccttggagtatgtagttgtgaaatttaatctaatctatccaagaatgagctccatggcctacttagttgcaacaaaaatagttaagaatgatgtaatataaaggcatgtacattatgcctctccttatatacatgatcatatatacttataatgcatcaactatttctggagggatacagcaaa

SEQ ID NO: 12714 - DNA, 4195 bp, Homo sapiens
tgcaactagagtttcttcaatattttctaggtgtgtataggacaaattctacgaataatacaactacttggaaccacaccacgactaagagctgtcactttgcgcttgctgacatctttgtgggaaaagcaggaccgagtctatcctgaactgcagcgtttcatggctgtgtctgatgtaccttctctttcggtgggcaaggaagtccaatgggagaaactgattgcaaaagcagcatcaatcagagatatatgtaagcagaggccatatcaacatggtgcagatatgttggcagctatttctcaagtgttgaatgaatgcaccaagcctgatcaagctactccagcagccttggtattacagggtcttcatgcactctgtcaagctgaggttgtttgcattcgctccacttggaatgctctctctccaaagctgagttgtgacacaagacctctcattctgaagacactgagtgaactattttctctagttccttccttaacggtcaatacaactgaatatgagaattttaaagttcaagtcctcagcttcctctggactcatactcaaaacaaggacccaattgtagcaaatgctgcatatagatccctggccaactttagtgcaggagaacacaccattcttcatctgcctgaaaagataagaccagaaattcccattcctgaagagttagatgacgatgaagatgttgaggatgtggatctttcagttcctggctcttgctatctcaaactgttgtcactcactccccctttggttttaccagctttggaggaattttttacatcacttgtgaagcaagaaatggtgaatatgcctcgtgggatatatcactctgcattaaaaggaggtgcccgctcagaccaaggaaagactgtagcaggaatccccaattttatattgaaaatgtatgaaacaaacaagcaaccaggactgaaacctggccttgcaggtggtatgttattttgctatgatgtttccatgtatcagagtaaagatggaaaaccattgaacagactgatggccagcagagggcgaagtttcaagcagacttcacttgctcttgtacatgaggttcatatccagctttcagagtggcaccgtgcaatttttcttccacaggcctggcttgcatacatgaatcgagcttatcatgccattttacagggaagactaggagagctggagttgcagttaaaacatggaaaagaagaacctgaggaggtgcagtacaaaaaaagcacagcctggctctgggttagagacatgctgactgatgagatcaccaaggcagctgcaaaggagagtccggtagtgaaaggcaatgcgctgttagctctaagcagccttgctgtcgtcgtatctagacatgaagccagcctctcctcagactctgacgggctcctggaggttcaacctaatttcctttcaatgaaagagtgggtttccatggtacttgatacactcttggtcattgtggatagccattaccaacccagagggcaacttctctcctggttttattataagtcctattctggtgaaaacacagctagtgccattgcccgttctgctgccgccacggctttgtctctccttgtgccagttttcattatctcttgcaaagagaaggttgaggaaatcctgaacatgctgactgccaggttacctgggaaaccaagtgctgatgagtctcaagccgtgcaaatccacatgggccttgctttagggatgtttctctctcgcttgtgtgaagagaaactcagtgatatatctggccaagagatgaaccttcttctgatgaagtcgttggatgccctggaaaattgctgctttgacactagtcttgaatacaacacgggctgtatattgggagttggacttgttctgtccctcatgagccacagcagccaaatgcagtcccgcgttcacgtagcagcattgctccggaagctgtctgcgcacgtagatgacagcgggagccagagcagaacgtttcaggaggtccttgcctacacacttagctgtgtatgtacatcagcgttcagtgctggaattattgaggctacagaggctgaggatgttatgaacaagcttcgactgttagtggagaatagccagcagacttcaggttttgccctggctttaggaaacatagttcatggattgtctgtgtgtggacatggaaaagctgaagacttgggcagcaaactactccctgcctggatcagaattgttctaacagagggcactcccacaatgctttgtctggcagctcttcatggcatggtggccttggtaggctctgaaggggatgtaatgcagctgaaatcagaagccatccagacctctcattttcaaggcagacttaatgaagtcattagaaccttaactcaggtcattagtgtctctggggtgattggtctccagtcaaatgcagtctggcttcttggacatcttcatctatctactctatcctcaagtcaaagtagagcctctgttcctactgactatagctacttgcctgaaagcagttttattggagcagctattggcttcttcattacaggaggaaaaaaaggtcctgaatctgtgcctccttcccttcttaaagtagtgatgaaacccatagcaactgttggagaaagctaccaatatcctcctgtgaactgggctgcacttctctctccacttatgaggctaaattttggtgaagagatccagcaactgtgccttgaaattatggtgacccaggcacagtcatcccagaatgcagctgcactattgggcttgtgggtgacaccaccactgatccacagtctgagtctgaataccaagagatatctcctgatatctgcacctctgtggataaaacacatctctgatgaacagatcctgggttttgttgaaaatttaatggtggcagtttttaaagcagcttccccacttggaagtcctgagctatgcccaagtgctttacacggtctgagccaggccatgaaactgcccagccctgcccaccacctctggagtctgctctctgaagctactgggaaaatttttgacctcctgccaaataagattcggagaaaggatctagagctgtatatcagcatagcaaaatgcctcttagaaatgacagatgatgatgccaatcggatcgcccaggttactaagagcaacatagaaaaagctgcctttgtcaaactgtacttagtctctcaaggacgattccccttggtgaacctgaccgatatgctgagcgttgctgtgcagcaccgtgagaaagaggtgttggcctggatgattctgcacagcttataccaggcacggattgtgagccatgccaatacgggcgttttgaagagaatggagtggctcttggaactgatgggttatattagaaatgttgcttaccagtcaacatcctttcacaatacggctcttgacgaggctttggacttcttcttgctgatatttgcaaccgcagtggttgcatgggctgaccacactgcccctctcctcctcggcctcagtgccagttggttgccatggcatcaggagaatggcccggctgggccagtaccaagcttccttggcaggagtccaatgcacagggtcactctgcaggaggttctcactctccttcccaatagcatggctctgctgctgcagaaagagccatggaaggaacagacccagaagttcattgactggctattcagcatcatggaaagccctaaagaagccctctcagcacagtccagggatcttttgaaagccaccctgctgtccttgagagttctcccagagtttaagaagaaagctgtatggaccagagcatatggttggtgaacagttttgcagtaaccagcagcattctcagctggatgaggaaaaccatataagtggaagaagtttttcagaattcatgcctggtattgctgagacatgatgcagagagttaagggtcatgaaaagatggccacatcactgacagcttgacacatgcctcctaagagaggagtgcattgctttagtacccgggccagttgagactgaaacaggaacttggattttctttatttggcttgagttcaatgtggagattttctttgtgaaagcttgaagatattatcttctccctgctaaattccagtaaaataatgttgtc

SEQ ID NO: 12715 - DNA, 1982 bp, Homo sapiens
tggtaatgactggattctggcactttatggttatagaaaccacttttatatattttgatttcctcccctaatgcttaattatctccatgtggacattatgatagagtgtcattgaaggtattaaaaatgtaattaattgcttaacagttatatcttgtgaaaacaatgtggaaatctttttacatttttaatttttggttcaaacaaacctaactaatcaaagagcagccacaaaaatcctcaaaatgcaaattagacacaataatgtacagctaccaattacagattttagtgtttttgtattccacagcaacaaactgccaagtcttaaaaaaaaagaagtcaactaaagcattctgttgttccctgagctctactgtatattctactggaagattttaagctctgtcatggacatatgactagaatcacaaattttttaaaaagtgttcagacaaggcaaatatctaactatgagctatagaagttaaatatattgagtatgtcagtgtttgcattttatttttggatggtatagaattttattagttttctataataatcattgcttatactggcttacagtgatttactgtattaacataagctttttatacagatctgagattgtatctaataagatgactagagtcatgaccatttagttaatctaaaaaatgaatagatttttaaaaaattaatttcagtggtcttttatgttatagagtgatggagtctaacaaaattttaaaatcttgtcacaaaaaaggatacagaaaagattttgcataatgttttattattatcctctctatgatcttttcgcttatcatttcagataagaccagaaattcccattcctgaagagttagatgacgatgaagatgttgaggatgtggatctttcagttcctggctcttgctatctcaaactgttgtcactcactccccctttggttttaccaggtgactcctatttggtagtagagaagctagcattttttagtggttcgatttgtctgattgtattcttttgtgataggtacatagtatagtttaaccttatgtgcttattttttaaccagaatgttaaatgcacccatctgttctattgaaacagcttgaggtagtatggtgtttaaatcatacgaaaaaacgttacatctgagtaggattgaacaagaaaactagtgtaaacaattgtgttcactgataattaaaattcatttaaaaggctaaatgtattccacaagatgaatttgcactggtactctaggtcattgatttaaacaatacttctttcttacataagccaagtgaaaagatcattagactattcagagatttactgagtagtttcattattatacatttattctttctatagagttatgccaaagatgttactgatatttatttcagagctataaattaatgcttttaaaagatggatcaaattgtatggtcattcagctttgatgtaaagcttatagggcctttatcttttaaaaagtaggctgggtatgatggctcacgcctgtaatcccaacactttgggaggctgagagaggcagattgcttgaggtcaggagttaaatacaaaattagcctggtgtggtggtgcatgctgtagttccagctatttgggtggctgaggcacaagaatcacttgaagctgggaggtggaggttgcagggagctgggatcatgccactgcattccagcctaggtgacagcctaggtgacagcctaggtgtctcaaaaaaaaaaaaaaaagtattctaatgcttatatgtggtaattattctatatgtatattgtgtttagaagtactcacttgcccctattactatatgccctacccaagaaatggtagacgataccatttgaaaaatatgtttgattgtggactgtgattaggaacttacattattttattttgaatgttattttctgatcattaaaaagttatttacaaattcc

SEQ ID NO: 12716 - DNA, 615 bp, Homo sapiens
tgcaactagagtttcttcaatattttctaggtgtgtataggacaaattctacgaataatacaactacttggaaccacaccacgactaagagctgtcactttgcgcttgctgacatctttgtgggaaaagcaggaccgagtctatcctgaactgcagcgtttcatggctgtgtctgatgtaccttctctttcggtgggcaaggaagtccaatgggagaaactgattgcaaaagcagcatcaatcagagatatatgtaagcagaggccatatcaacatggtgcagatatgttggcagctatttctcaagtgttgaatgaatgcaccaagcctgatcaagctactccagcagccttggtattacagggtcttcatgcactctgtcaagctgaggttgtttgcattcgctccacttggaatgctctctctccaaagctgagttgtgacacaagacctctcattctgaagacactgagtgaactattttctctagttccttccttaacggtcaatacaactgaatatgaggtatgcatttggagctcagcacattgcctgcttcttcatgggaaagatgtgtgttataataacttttggaataaatattcctaatctgtt

SEQ ID NO: 12717 - DNA, 4373 bp, Homo sapiens
tggtaatgactggattctggcactttatggttatagaaaccacttttatatattttgatttcctcccctaatgcttaattatctccatgtggacattatgatagagtgtcattgaaggtattaaaaatgtaattaattgcttaacagttatatcttgtgaaaacaatgtggaaatctttttacatttttaatttttggttcaaacaaacctaactaatcaaagagcagccacaaaaatcctcaaaatgcaaattagacacaataatgtacagctaccaattacagattttagtgtttttgtattccacagcaacaaactgccaagtcttaaaaaaaaagaagtcaactaaagcattctgttgttccctgagctctactgtatattctactggaagattttaagctctgtcatggacatatgactagaatcacaaattttttaaaaagtgttcagacaaggcaaatatctaactatgagctatagaagttaaatatattgagtatgtcagtgtttgcattttatttttggatggtatagaattttattagttttctataataatcattgcttatactggcttacagtgatttactgtattaacataagctttttatacagatctgagattgtatctaataagatgactagagtcatgaccatttagttaatctaaaaaatgaatagatttttaaaaaattaatttcagtggtcttttatgttatagagtgatggagtctaacaaaattttaaaatcttgtcacaaaaaaggatacagaaaagattttgcataatgttttattattatcctctctatgatcttttcgcttatcatttcagataagaccagaaattcccattcctgaagagttagatgacgatgaagatgttgaggatgtggatctttcagttcctggctcttgctatctcaaactgttgtcactcactccccctttggttttaccagctttggaggaattttttacatcacttgtgaagcaagaaatggtgaatatgcctcgtgggatatatcactctgcattaaaaggaggtgcccgctcagaccaaggaaagactgtagcaggaatccccaattttatattgaaaatgtatgaaacaaacaagcaaccaggactgaaacctggccttgcaggtggtatgttattttgctatgatgtttccatgtatcagagtaaagatggaaaaccattgaacagactgatggccagcagagggcgaagtttcaagcagacttcacttgctcttgtacatgaggttcatatccagctttcagagtggcaccgtgcaatttttcttccacaggcctggcttgcatacatgaatcgagcttatcatgccattttacagggaagactaggagagctggagttgcagttaaaacatggaaaagaagaacctgaggaggtgcagtacaaaaaaagcacagcctggctctgggttagagacatgctgactgatgagatcaccaaggcagctgcaaaggagagtccggtagtgaaaggcaatgcgctgttagctctaagcagccttgctgtcgtcgtatctagacatgaagccagcctctcctcagactctgacgggctcctggaggttcaacctaatttcctttcaatgaaagagtgggtttccatggtacttgatacactcttggtcattgtggatagccattaccaacccagagggcaacttctctcctggttttattataagtcctattctggtgaaaacacagctagtgccattgcccgttctgctgccgccacggctttgtctctccttgtgccagttttcattatctcttgcaaagagaaggttgaggaaatcctgaacatgctgactgccaggttacctgggaaaccaagtgctgatgagtctcaagccgtgcaaatccacatgggccttgctttagggatgtttctctctcgcttgtgtgaagagaaactcagtgatatatctggccaagagatgaaccttcttctgatgaagtcgttggatgccctggaaaattgctgctttgacactagtcttgaatacaacacgggctgtatattgggagttggacttgttctgtccctcatgagccacagcagccaaatgcagtcccgcgttcacgtagcagcattgctccggaagctgtctgcgcacgtagatgacagcgggagccagagcagaacgtttcaggaggtccttgcctacacacttagctgtgtatgtacatcagcgttcagtgctggaattattgaggctacagaggctgaggatgttatgaacaagcttcgactgttagtggagaatagccagcagacttcaggttttgccctggctttaggaaacatagttcatggattgtctgtgtgtggacatggaaaagctgaagacttgggcagcaaactactccctgcctggatcagaattgttctaacagagggcactcccacaatgctttgtctggcagctcttcatggcatggtggccttggtaggctctgaaggggatgtaatgcagctgaaatcagaagccatccagacctctcattttcaaggcagacttaatgaagtcattagaaccttaactcaggtcattagtgtctctggggtgattggtctccagtcaaatgcagtctggcttcttggacatcttcatctatctactctatcctcaagtcaaagtagagcctctgttcctactgactatagctacttgcctgaaagcagttttattggagcagctattggcttcttcattacaggaggaaaaaaaggtcctgaatctgtgcctccttcccttcttaaagtagtgatgaaacccatagcaactgttggagaaagctaccaatatcctcctgtgaactgggctgcacttctctctccacttatgaggctaaattttggtgaagagatccagcaactgtgccttgaaattatggtgacccaggcacagtcatcccagaatgcagctgcactattgggcttgtgggtgacaccaccactgatccacagtctgagtctgaataccaagagatatctcctgatatctgcacctctgtggataaaacacatctctgatgaacagatcctgggttttgttgaaaatttaatggtggcagtttttaaagcagcttccccacttggaagtcctgagctatgcccaagtgctttacacggtctgagccaggccatgaaactgcccagccctgcccaccacctctggagtctgctctctgaagctactgggaaaatttttgacctcctgccaaataagattcggagaaaggatctagagctgtatatcagcatagcaaaatgcctcttagaaatgacagatgatgatgccaatcggatcgcccaggttactaagagcaacatagaaaaagctgcctttgtcaaactgtacttagtctctcaaggacgattccccttggtgaacctgaccgatatgctgagcgttgctgtgcagcaccgtgagaaagaggtgttggcctggatgattctgcacagcttataccaggcacggattgtgagccatgccaatacgggcgttttgaagagaatggagtggctcttggaactgatgggttatattagaaatgttgcttaccagtcaacatcctttcacaatacggctcttgacgaggctttggacttcttcttgctgatatttgcaaccgcagtggttgcatgggctgaccacactgcccctctcctcctcggcctcagtgccagttggttgccatggcatcaggagaatggcccggctgggccagtaccaagcttccttggcaggagtccaatgcacagggtcactctgcaggaggttctcactctccttcccaatagcatggctctgctgctgcagaaagagccatggaaggaacagacccagaagttcattgactggctattcagcatcatggaaagccctaaagaagccctctcagcacagtccagggatcttttgaaagccaccctgctgtccttgagagttctcccagagtttaagaagaaagctgtatggaccagagcatatggttggtgaacagttttgcagtaaccagcagcattctcagctggatgaggaaaaccatataagtggaagaagtttttcagaattcatgcctggtattgctgagacatgatgcagagagttaagggtcatgaaaagatggccacatcactgacagcttgacacatgcctcctaagagaggagtgcattgctttagtacccgggccagttgagactgaaacaggaacttggattttctttatttggcttgagttcaatgtggagattttctttgtgaaagcttgaagatattatcttctccctgctaaattccagtaaaataatgttgtc

SEQ ID NO: 12718 - DNA, 441 bp, Homo sapiens
gtaaaaaagcaattgtgtgaggcaggcataacttcaacagtttacactggtttaagttatttcatttgaggggtggtaccttattaagtcctatcttctaggcatagtcttatttgtttcttaagtttccttataataaaatatagtactcttaattaatggcttcatataggttggagtcttgttaggtgttgaccttttctatttgcttcacaggttgtttgcattcgctccacttggaatgctctctctccaaagctgagttgtgacacaagacctctcattctgaagacactgagtgaactattttctctagttccttccttaacggtcaatacaactgaatatgaggtatgcatttggagctcagcacattgcctgcttcttcatgggaaagatgtgtgttataataacttttggaataaatattcctaatctgtt

SEQ ID NO: 12719 - DNA, 717 bp, Homo sapiens
ggcccggcaataccaggtgatgctggggtgatgctgatgcccttccaaggttgagacctagtctctactctgatgtcagctctccgagagacactctggcctgctttgttcccttccctgtcccctccccggagcccggcggccggcgtgtctgcggctgtggaacctgcagggctgggtgcgcgcgcgatggggccgctgcctgctctgagcgacccggtgcgcgtgtggccgtggtgcggcgactgccaggacattgcttgaaaccaggctgtgtgctgccgtctatgccagatataccttcgatgctcctgtacagaagaggtgactgtctgtgcctagcttcctagagctggaagccgacacaagagtgtgggagaagcattcttcttggcctcaagctacttctgtaaattatgaccacccatcgcaaatcatactcagatcttggactgcccttcaggaaacgctatcgatgtactaacgtcctccttactggtgtgccagaatggtagcttttgacagagacgatgttcttcaacaaggcaagtcaaggtccaaggacggatttggcataaacttctgcggtctttaagtagaggcgatgaacagccactatactatttgtactcgcacaaagctggaaagcaagtaatggcgtccgcaaccgcttggtcggaatgggccattaggttcacaactccttgaatgatttaa

SEQ ID NO: 12720 - DNA, 1907 bp, Homo sapiens
ggcccggcaataccaggtgatgctggggtgatgctgatgcccttccaaggttgagacctagtctctactctgatgtcagctctccgagagacactctggcctgctttgttcccttccctgtccccagtgtctggcatcgagtaggctgccataaatatctctggagtgcatagtaacagtgatgatgataatagcagctagccattgattgaagacctcttgtgtgccggtctctgcgttaaacatttctggaggcttaactcatttaaggagctaccccagccatcattttctcagatggtgaaactgaggttcagagaggccaagcgccgtacccaaaggtcactcagcgggagagctggcaggaaacctcgcgtctgccggtgccggcgccgcccctgcccctccccggagcccggcggccgcgcgtgtccgcggccctgcgagggctccccggctccggacagcccagggcggccgggggaggagtgcgctgcgacggccgtggcgaaagtgcggttgtggatgcgcggagaggccggcagcggtggcagcggcagcggaggaggaagctgagcagggcggcggcggcggtggaacctgcggggctggggcgcgcgccatgggccgcctgcactgcactgaggacccggtgccggaggccgtgggcggcgacatgcagcagctgaaccagctgggcgcgcagcagttctcagccctgacagaggtgcttttccacttcctaactgagccaaaagaggtggaaagatttctggctcagctctctgaatttgccaccaccaatcagatcagtcttggctccctcagaagcatcgtgaaaagcctccttctggttccaaatggtgctttgaagaagagtctcacagccaagcaggtccaggcggatttcataactctgggtcttagtgaggagaaagccacttacttttctgaaaagtggaagcagaatgctcccacccttgctcgatgggccataggtcagactctgatgattaaccagctcatagatatggagtggaaatttggagtgacatctgggagcagcgaattggagaaagtgggaagtatatttttacaactaaagttggtggttaagaaaggaaatcaaaccgaaaatgtgtatatagaattaaccttgcctcagttctacagcttcctgcacgagatggagcgagtcagaaccagcatggagtgtttctgctgatttctgtccctgcatctcccctggccccgttccctgccctcctcccttccctgggtgactgctctgagaggcacttcactcacaggcctgtgggatgctccatggggccctgctggctccatggggcccaggtgcaaagggtttctgaaaaacagcaggattaagtactgaaagagcccaacacaattaccctgtaaactctctgttagggcaaccaccaccacctgtcttccaggacacatttttagatactctgacaggccactgcatctcagattcaggggagaaaataagttgtcacctccccttcaaagttccagagtaaacaaatggtgccatcattcaagataacatgctgatcaccctcctcccaaaaagcaagagcttgtttatggctgaggaatcggcggattgtctgaatgacacatatacagagcccccacggatttctgcacactctgggtctgtgctggtggaacattgccaatcagttcttaatgaggcacctgtgtgtaaatacatgcttggtcttctctgcagagaactgaggctaaactctgtccctacttctggttttgccctgtcatgtcgtaacgaggtgggccttttgaggccattttagtttgagttcgagccaaccacctctgttggttagatgatgaataaaaaggttctgaagaaa

SEQ ID NO: 12721 - DNA, 1522 bp, Homo sapiens
tcaggctggtacaccccgggggttctgggatctggcggtctgtgcgttctgctgcctgcgagggctccccggctccggacagcccagggcggccgggggaggagtgcgctgcgacggccgtggcgaaagtgcggttgtggatgcgcggagaggccggcagcggtggcagcggcagcggaggaggaagctgagcagggcggcggcggcggtggaacctgcggggctggggcgcgcgccatgggccgcctgcactgcactgaggacccggtgccggaggccgtgggcggcgacatgcagcagctgaaccagctgggcgcgcagcagttctcagccctgacagaggtgcttttccacttcctaactgagccaaaagaggtggaaagatttctggctcagctctctgaatttgccaccaccaatcagatcagtcttggctccctcagaagcatcgtgaaaagcctccttctggttccaaatggtgctttgaagaagagtctcacagccaagcaggtccaggcggatttcataactctgggtcttagtgaggagaaagccacttacttttctgaaaagtggaagcagaatgctcccacccttgctcgatgggccataggtcagactctgatgattaaccagctcatagatatggagtggaaatttggagtgacatctgggagcagcgaattggagaaagtgggaagtatatttttacaactaaagttggtggttaagaaaggaaatcaaaccgaaaatgtgtatatagaattaaccttgcctcagttctacagcttcctgcacgagatggagcgagtcagaaccagcatggagtgtttctgctgatttctgtccctgcatctcccctggccccgttccctgccctcctcccttccctgggtgactgctctgagaggcacttcactcacaggcctgtgggatgctccatggggccctgctggctccatggggcccaggtgcaaagggtttctgaaaaacagcaggattaagtactgaaagagcccaacacaattaccctgtaaactctctgttagggcaaccaccaccacctgtcttccaggacacatttttagatactctgacaggccactgcatctcagattcaggggagaaaataagttgtcacctccccttcaaagttccagagtaaacaaatggtgccatcattcaagataacatgctgatcaccctcctcccaaaaagcaagagcttgtttatggctgaggaatcggcggattgtctgaatgacacatatacagagcccccacggatttctgcacactctgggtctgtgctggtggaacattgccaatcagttcttaatgaggcacctgtgtgtaaatacatgcttggtcttctctgcagagaactgaggctaaactctgtccctacttctggttttgccctgtcatgtcgtaacgaggtgggccttttgaggccattttagtttgagttcgagccaaccacctctgttggttagatgatgaataaaaaggttctgaagaaa

SEQ ID NO: 12722 - DNA, 1225 bp, Homo sapiens
  misc_feature (1163)..(1163): n is a, c, g, or t
ggcccggcaataccaggtgatgctggggtgatgctgatgcccttccaaggttgagacctagtctctactctgatgtcagctctccgagagacactctggcctgctttgttcccttccctgtccccagtgtctggcatcgagtaggctgccataaatatctctggagtgcatagtaacagtgatgatgataatagcagctagccattgattgaagacctcttgtgtgccggtctctgcgttaaacatttctggaggcttaactcatttaaggagctaccccagccatcattttctcagatggtgaaactgaggttcagagaggccaagcgccgtacccaaaggtcactcagcgggagagctggcaggaaacctcgcgtctgccggtgccggcgccgcccctgcccctccccggagcccggcggccgcgcgtgtccgcggccctgcgagggctccccggctccggacagcccagggcggccgggggaggagtgcgctgcgacggccgtggcgaaagtgcggttgtggatgcgcggagaggccggcagcggtggcagcggcagcggaggaggaagctgagcagggcggcggcggcggtggaacctgcggggctggggcgcgcgccatgggccgcctgcactgcactgaggacccggtgccggaggccgtgggcggcgacatgcagcagctgaaccagctgggcgcgcagcagttctcagccctgacagaggtgcttttccacttcctaactgagccaaaagaggtggaaagatttctggctcagctctctgaatttgccaccaccaatcagatcagtcttggctccctcagaagcatcgtgaaaagcctccttctggttccaaatggtgctttgaagaagagtctcacagccaagcaggtccaggcggatttcataactctgggtcttagtgaggagaaagccacttacttttctgaaaagtggaagcagaatgctcccacccttgctcgatgggccataggtcagactctgatgattaaccagctcatagatatggagtggaaatttggagtgacatctgggagcagcgaattggagaaagtgggaagtatatttttacaactaaagttggtggttaagaaaggaaatcaaaccgaaaatgtgtatataggtgagtctgaattcncacttgagcctcttcaccttttttgtgttctcttgcaatcaggggcttggttgacgctcaca

SEQ ID NO: 12723 - DNA, 1937 bp, Homo sapiens
ggcccggcaataccaggtgatgctggggtgatgctgatgcccttccaaggttgagacctagtctctactctgatgtcagctctccgagagacactctggcctgctttgttcccttccctgtccccagtgtctggcatcgagtaggctgccataaatatctctggagtgcatagtaacagtgatgatgataatagcagctagccattgattgaagacctcttgtgtgccggtctctgcgttaaacatttctggaggcttaactcatttaaggagctaccccagccatcattttctcagatggtgaaactgaggttcagagaggccaagcgccgtacccaaaggtcactcagcgggagagctggcaggaaacctcgcgtctgccggtgccggcgccgcccctgcccctccccggagcccggcggccgcgcgtgtccgcggccctgcgagggctccccggctccggacagcccagggcggccgggggaggagtgcgctgcgacggccgtggcgaaagtgcggttgtggatgcgcggagaggccggcagcggtggcagcggcagcggaggaggaagctgagcagggcggcggcggcggtggaacctgcggggctggggcgcgcgccatgggccgcctgcactgcactgaggacccggtgccggaggccgtgggcggcgacatgcagcagctgaaccagctgggcgcgcagcagttctcagccctgacagaggtgcttttccacttcctaactgagccaaaagaggcccgggttttcactgttctctctctgcaggtggaaagatttctggctcagctctctgaatttgccaccaccaatcagatcagtcttggctccctcagaagcatcgtgaaaagcctccttctggttccaaatggtgctttgaagaagagtctcacagccaagcaggtccaggcggatttcataactctgggtcttagtgaggagaaagccacttacttttctgaaaagtggaagcagaatgctcccacccttgctcgatgggccataggtcagactctgatgattaaccagctcatagatatggagtggaaatttggagtgacatctgggagcagcgaattggagaaagtgggaagtatatttttacaactaaagttggtggttaagaaaggaaatcaaaccgaaaatgtgtatatagaattaaccttgcctcagttctacagcttcctgcacgagatggagcgagtcagaaccagcatggagtgtttctgctgatttctgtccctgcatctcccctggccccgttccctgccctcctcccttccctgggtgactgctctgagaggcacttcactcacaggcctgtgggatgctccatggggccctgctggctccatggggcccaggtgcaaagggtttctgaaaaacagcaggattaagtactgaaagagcccaacacaattaccctgtaaactctctgttagggcaaccaccaccacctgtcttccaggacacatttttagatactctgacaggccactgcatctcagattcaggggagaaaataagttgtcacctccccttcaaagttccagagtaaacaaatggtgccatcattcaagataacatgctgatcaccctcctcccaaaaagcaagagcttgtttatggctgaggaatcggcggattgtctgaatgacacatatacagagcccccacggatttctgcacactctgggtctgtgctggtggaacattgccaatcagttcttaatgaggcacctgtgtgtaaatacatgcttggtcttctctgcagagaactgaggctaaactctgtccctacttctggttttgccctgtcatgtcgtaacgaggtgggccttttgaggccattttagtttgagttcgagccaaccacctctgttggttagatgatgaataaaaaggttctgaagaaa

SEQ ID NO: 12724 - DNA, 883 bp, Homo sapiens
ggcccggcaataccaggtgatgctggggtgatgctgatgcccttccaaggttgagacctagtctctactctgatgtcagctctccgagagacactctggcctgctttgttcccttccctgtccccagtgtctggcatcgagtaggctgccataaatatctctggagtgcatagtaacagtgatgatgataatagcagctagccattgattgaagacctcttgtgtgccggtctctgcgttaaacatttctggaggcttaactcatttaaggagctaccccagccatcattttctcagatggtgaaactgaggttcagagaggccaagcgccgtacccaaaggtcactcagcgggagagctggcaggaaacctcgcgtctgccggtgccggcgccgcccctgcccctccccggagcccggcggccgcgcgtgtccgcggccctgcgagggctccccggctccggacagcccagggcggccgggggaggagtgcgctgcgacggccgtggcgaaagtgcggttgtggatgcgcggagaggccggcagcggtggcagcggcagcggaggaggaagctgagcagggcggcggcggcggtggaacctgcggggctggggcgcgcgccatgggccgcctgcactgcactgaggacccggtgccggaggccgtgggcggcgacatgcagcagctgaaccagctgggcgcgcagcagttctcagccctgacagaggtgcttttccacttcctaactgagccaaaagaggtccctacttctggttttgccctgtcatgtcgtaacgaggtgggccttttgaggccattttagtttgagttcgagccaaccacctctgttggttagatgatgaataaaaaggttctgaagaaa

SEQ ID NO: 12725 - DNA, 409 bp, Homo sapiens
tgtcctctatactataataccattttttgtacatttgatgtagacacacccagaatagtctagtaggcagttggctacatgtatctgaagcttagaagagatatagactaaaaatatagatttggaagtcattagcatgtagtagtaattacctcatactctcttgctttgctttctagacctctgacccctccttctgtcatcatccatccaatcctccctcccaccatcattcaacaaatatttattgaacacctactatatgtaagacacttttctaagtgctggtgatacatcaggagacaaaaaagacaaaaattctgccttcgtggggtttatattctacaaattatatagttggttaaaaggtaataactccagtatgggcaacatggcaaaatcctgtctt

SEQ ID NO: 12726 - DNA, 499 bp, Homo sapiens
tccagaattaacttgctactaagattcttgcaaactgatggcttaggacttcttttcatcatcatcttggccactcccctcatgtctcttcctatgctgagtctcttttcctggtccctgtatatctcttcgttgcttatctttaattctcatttggggatcactttcttcagtaactttctgagaagacaatccatggcatgtggcctgcactggttattctctgtttgcttctccagtcttgttctccgtctttttcttcttgtgctgtgcccctggaggctgacatgtctgtattctatcacctggggtacacatcttccagtagggactggccaatgcgaggcaatggtagggagatcagagggcagtgggaagagacttgaaggaatcactgaaggattatcagagatttacatttagggcaggtggtgatgaccatcacagctgctgatttggatgtgctgtcttctctggaaaatcagcatggcccctggca

SEQ ID NO: 12727 - DNA, 923 bp, Homo sapiens
aaaaggctgtcacactgaccctttgcccttgctggcagaaggcagccatctcacccaaaaaggcagaggatccactgagctgttaacacttaagccatatgcagacagccaagctaaaagagcacccaaacacttcctctgggacttcaggggtcactggcacccctccccagatgttgctgcgggaccagtacagagttcactcctgctggtgcccgaaggcatttgcccgagctgccgtacccactcacctgtttgctccctccagcaaggggtggaacacagcagatttgagtgagtggagttggctgactccagtgctcatatactcccatatctgcccatgaaggggtcagggaaatatcctgcttcaaaaggacatcatcaagaaagtgaaaggaaaaaaatgaaaagacccacagaatgggaaaagatatttttaaagtacatatgtgataagaaaattatatctagaatgtgtaaagaagtcttacaactgaataataaaaatataaatattccaataagaagggaaaataggattttaacaggcctttctctaaagaagacatgcaaatggataattagcacatgaaaaaaagctgagggtcattagtcattagggaaatgcaaatcaaaaccatagcatacccgttcatacccataacaatacctaaagtaaaagggacagatgttagtgtctgtgaggttggagggaaactggaaccctcattcgctgcttgtgggaatgtgaaatggtgcagccactttgaaaatgagtctggcagttccttaaatgaataaacaagattaccataggactcaataatcccactcctaaatatatgcccaggaggaatgaaaacatgtttacacagaaacttatacatgaatatttatagcagcattatttataatagcca

SEQ ID NO: 12728 - DNA, 406 bp, Homo sapiens
gtgatggtgtgtgcctgtaaccccagcttctcaggaggctgaggcatgagaatagctgaggcatgagaagagcccagaaggcagaggttgcagtgagccgagatcccaccactgcactccagctggggaaacagagcaagactctgtctcaaaaaaattaaaaaaaataaaataaacttgtaaatattatacacttagcatataacccagccattctacttctgggttccccccaagagaaacacaagcttaggtccacacactaccctatacacaaatacgcagagaagctgcttacttaccatcaaatacatatgaggatatttacttccagttttgtttgaaataatatgaaactgaataaatcatgatataaccatacaatggaatgcagtgtaattattag

SEQ ID NO: 12729 - DNA, 92 bp, Homo sapiens
tgctgcataaaagtcaagttacgcttgcagaaaactttcctaactactaaaataaataaaaatcaaaagcttatagctgtattgcctacagg

SEQ ID NO: 12730 - DNA, 442 bp, Homo sapiens
tcctctcctactcccatcatctgggcctggaagattggaacagggctcccatctcaaccctcagggatggacaaatatagaataagagaagggaggaaagccatgggccctgtgaaaagactcagcagttctcataaaggaatcaacacaaatgtttcccttgagacaaacttcctaccagaatcaacagaaatctttagaaaaatctccaatttgtgtgcccattaagattcgagggggtatttattgtatacctgaaaaaggcatcctctgagattgaaaaagatgattttcagctgaaaagtgcaactgttacatttcagaaggcaatggaagcaggaaataacagattgaagacgcagaaaaatggagtggagtcctttaaaagatgggtaccaagaaaccccccataattcataagaaaagaataaaagatgaatgt

SEQ ID NO: 12731 - DNA, 2331 bp, Homo sapiens
caattctctaggttgcaaattgggaggattaggaacaagtaagagagttccatgcaggatggacaagaaagaaaagttttataccaaaaattgtatttcatggcattagggcagtctactggggtaaggcactatgcagtactaggcaattagaattctattcactagctatgtgcacaagcggctcctgacctggtcattttggctgtaaaactattcatgcctggacagtttttgacggtgcagtcttgctatatggtgtgagaaatggctgtaggaaacaacactcaacgaagttattccatcatcccgtgttttatatttgttgagcttgtcatcatggctgggacagtgctgcttgcctactacttcgaatgcactgacacttttcaggtgcatatccaaggattcttctgtcaggacggagacttaatgaagccttacccagggacagaggaagaaagcttcatcacccctctggtgctctattgtgtgctggctgccaccccaactgctattatttttattggtgagatatccatgtatttcataaaatcaacaagagaatccctgattgctcaggagaaaacaattctgaccggagaatgctgttacctgaaccccttacttcgaaggatcataagattcacaggggtgtttgcatttggactttttgctactgacatttttgtaaacgccggacaagtggtcactgggcacttaacgccatacttcctgactgtgtgcaagccaaactacaccagtgcagactgccaagcgcaccaccagtttataaacaatgggaacatttgtactggggacctggaagtgatagaaaaggctcggagatcctttccctccaaacacgctgctctgagcatttactccgccttatatgccacgatgtatattacaagcacaatcaagacgaagagcagtcgactggccaagccggtgctgtgcctcggaactctctgcacagccttcctgacaggcctcaaccgggtctctgagtatcggaaccactgctcggacgtgattgctggtttcatcctgggcactgcagtggccctgtttctgggaatgtgtgtggttcataactttaaaggaacgcaaggatctccttccaaacccaagcctgaggatccccgtggagtacccctaatggctttcccaaggatagaaagccctctggaaaccttaagtgcacagaatcactctgcgtccatgaccgaagttacctgagacgactgatgtgtcacaagctgttttttaaaatcatcttccaattctatacttcaaaacacacagttgctcaatgtcaaactgtgatgacaaatattacgtttatctagttagaagctaatgttttgtacattttttgtatgaggaagtgatgtagcttgccctgattttttttttttttttggtcagctttaatatatttatgccagaattttaaaaccaacaaaattttcttgttcaagcgtgcattgaagaaccacatttattcaatggttgacgttgttttgtgatatttgtacacaaattttcttttctcagttttataaacacagaatataacaattcactttaaacttttattaccacagttgctgcctcctccagaatttttgaattttaataaaaggcaaacttttgagctgcaggaaggacaatgttggttaataataaatctcaaagtcaattgtagaaaaaaaattgtcttcaaaaagaatgttgcactctgatctcttaacaaattgttacgttcaaagtttaaagtgatatattaacaaagtcacctagttatacaaacaattgtcagagaattctggatttggagggtattggggttatatgattctttcttagataatggcctctactaaataactcaagatctttctggaatgtcttctggcaggcaggtgccactgtcagcttttctccaaaaagcagccaacatcagcctcccctgtcaactcaacagttttgtatctcatattatatggactttatatgaaaatgaatattttacagtttgcacagtattattttacagaaaaggaatcagagaatctacaacatagggccccagaacaacagtttcactttgtggcttttaattattctagaattttaactgcatctcatttttctagcatggtgagaactaatatgtaactcctttgattgaaggagctcttttgtccgtacctatcagaatgttttcttgacacttccatgttggctcttctcagctttttttgtacatattttttttttctaaagagaagaaaaagttatcacaaaatgtaaaaaaactca

SEQ ID NO: 12732 - DNA, 710 bp, Homo sapiens
caattctctaggttgcaaattgggaggattaggaacaagtaagagagttccatgcaggatggacaagaaagaaaagttttataccaaaaattgtatttcatggcattagggcagtctactggggtaaggcactatgcagtactaggcaattagaattctattcactagctatgtgcacaagcggctcctgacctggtcattttggctgtaaaactattcatgcctggacagtttttgacggtgcagtcttgctatatggtgtgagaaatggctgtaggaaacaacactcaacgaagttattccatcatcccgtgttttatatttgttgaggaggaagcaaccctcaaagtgagatgtttaatttattgctggaagctgtagtctccgaagattttcagctctctaatgtgtgaatgaagagcttggccggtggagcagcaacaaggagatgaattagttcttctgtagcttaccctgacacaaacataaatagaagtctaaaaatctgggagaggaaagatggtttattctttttcttgttgtattgttgttcttattttgcatggaaattctcttagaactgtcttagaaataggcaggcaaaagggaagggaagtaggacacagaagacattgagtgggaaggaggtgaatctcaaagtggctctcatgattctcatgtatttcattcaccaaacacttattgtttac

SEQ ID NO: 12733 - DNA, 2503 bp, Homo sapiens
ctccgccccctccgcgccagccttttgctctttcctttcattaaacaaacaggagatcctgaaacctggaccctgtgcaagctgcagcgccaggaggaggcagcggaggaagcagagcgcgggatgggcgcccagcggcatctgtgatcccgcgcacctccgccccacgggcgcgcgcacaaacacggacacacacatacacacactcgcgcacacactcgcacaaacacacactcgtacacgcccgcgccgctcgctcgccggcttgctctcccacgcaagcggaatgcagcagcgcctggagagcgtgtctcggaccgccgcctgaatgtacctcgctcccgggagccggacggcccagtagggcgcactggaggacgctccgctgcgggagcctggacagtttttgacggtgcagtcttgctatatggtgtgagaaatggctgtaggaaacaacactcaacgaagttattccatcatcccgtgttttatatttgttgagcttgtcatcatggctgggacagtgctgcttgcctactacttcgaatgcactgacacttttcaggtgcatatccaaggattcttctgtcaggacggagacttaatgaagccttacccagggacagaggaagaaagcttcatcacccctctggtgctctattgtgtgctggctgccaccccaactgctattatttttattggtgagatatccatgtatttcataaaatcaacaagagaatccctgattgctcaggagaaaacaattctgaccggagaatgctgttacctgaaccccttacttcgaaggatcataagattcacaggggtgtttgcatttggactttttgctactgacatttttgtaaacgccggacaagtggtcactgggcacttaacgccatacttcctgactgtgtgcaagccaaactacaccagtgcagactgccaagcgcaccaccagtttataaacaatgggaacatttgtactggggacctggaagtgatagaaaaggctcggagatcctttccctccaaacacgctgctctgagcatttactccgccttatatgccacgatgtatattacaagcacaatcaagacgaagagcagtcgactggccaagccggtgctgtgcctcggaactctctgcacagccttcctgacaggcctcaaccgggtctctgagtatcggaaccactgctcggacgtgattgctggtttcatcctgggcactgcagtggccctgtttctgggaatgtgtgtggttcataactttaaaggaacgcaaggatctccttccaaacccaagcctgaggatccccgtggagtacccctaatggctttcccaaggatagaaagccctctggaaaccttaagtgcacagaatcactctgcgtccatgaccgaagttacctgagacgactgatgtgtcacaagctgttttttaaaatcatcttccaattctatacttcaaaacacacagttgctcaatgtcaaactgtgatgacaaatattacgtttatctagttagaagctaatgttttgtacattttttgtatgaggaagtgatgtagcttgccctgattttttttttttttttggtcagctttaatatatttatgccagaattttaaaaccaacaaaattttcttgttcaagcgtgcattgaagaaccacatttattcaatggttgacgttgttttgtgatatttgtacacaaattttcttttctcagttttataaacacagaatataacaattcactttaaacttttattaccacagttgctgcctcctccagaatttttgaattttaataaaaggcaaacttttgagctgcaggaaggacaatgttggttaataataaatctcaaagtcaattgtagaaaaaaaattgtcttcaaaaagaatgttgcactctgatctcttaacaaattgttacgttcaaagtttaaagtgatatattaacaaagtcacctagttatacaaacaattgtcagagaattctggatttggagggtattggggttatatgattctttcttagataatggcctctactaaataactcaagatctttctggaatgtcttctggcaggcaggtgccactgtcagcttttctccaaaaagcagccaacatcagcctcccctgtcaactcaacagttttgtatctcatattatatggactttatatgaaaatgaatattttacagtttgcacagtattattttacagaaaaggaatcagagaatctacaacatagggccccagaacaacagtttcactttgtggcttttaattattctagaattttaactgcatctcatttttctagcatggtgagaactaatatgtaactcctttgattgaaggagctcttttgtccgtacctatcagaatgttttcttgacacttccatgttggctcttctcagctttttttgtacatattttttttttctaaagagaagaaaaagttatcacaaaatgtaaaaaaactca

SEQ ID NO: 12734 - DNA, 2083 bp, Homo sapiens
tgatggagggagtgtgctctgaggggcaagggctgctccgaagccctgctaatgtctctgtgtggccatgctgtattttcagcttgtcatcatggctgggacagtgctgcttgcctactacttcgaatgcactgacacttttcaggtgcatatccaaggattcttctgtcaggacggagacttaatgaagccttacccagggacagaggaagaaagcttcatcacccctctggtgctctattgtgtgctggctgccaccccaactgctattatttttattggtgagatatccatgtatttcataaaatcaacaagagaatccctgattgctcaggagaaaacaattctgaccggagaatgctgttacctgaaccccttacttcgaaggatcataagattcacaggggtgtttgcatttggactttttgctactgacatttttgtaaacgccggacaagtggtcactgggcacttaacgccatacttcctgactgtgtgcaagccaaactacaccagtgcagactgccaagcgcaccaccagtttataaacaatgggaacatttgtactggggacctggaagtgatagaaaaggctcggagatcctttccctccaaacacgctgctctgagcatttactccgccttatatgccacgatgtatattacaagcacaatcaagacgaagagcagtcgactggccaagccggtgctgtgcctcggaactctctgcacagccttcctgacaggcctcaaccgggtctctgagtatcggaaccactgctcggacgtgattgctggtttcatcctgggcactgcagtggccctgtttctgggaatgtgtgtggttcataactttaaaggaacgcaaggatctccttccaaacccaagcctgaggatccccgtggagtacccctaatggctttcccaaggatagaaagccctctggaaaccttaagtgcacagaatcactctgcgtccatgaccgaagttacctgagacgactgatgtgtcacaagctgttttttaaaatcatcttccaattctatacttcaaaacacacagttgctcaatgtcaaactgtgatgacaaatattacgtttatctagttagaagctaatgttttgtacattttttgtatgaggaagtgatgtagcttgccctgattttttttttttttttggtcagctttaatatatttatgccagaattttaaaaccaacaaaattttcttgttcaagcgtgcattgaagaaccacatttattcaatggttgacgttgttttgtgatatttgtacacaaattttcttttctcagttttataaacacagaatataacaattcactttaaacttttattaccacagttgctgcctcctccagaatttttgaattttaataaaaggcaaacttttgagctgcaggaaggacaatgttggttaataataaatctcaaagtcaattgtagaaaaaaaattgtcttcaaaaagaatgttgcactctgatctcttaacaaattgttacgttcaaagtttaaagtgatatattaacaaagtcacctagttatacaaacaattgtcagagaattctggatttggagggtattggggttatatgattctttcttagataatggcctctactaaataactcaagatctttctggaatgtcttctggcaggcaggtgccactgtcagcttttctccaaaaagcagccaacatcagcctcccctgtcaactcaacagttttgtatctcatattatatggactttatatgaaaatgaatattttacagtttgcacagtattattttacagaaaaggaatcagagaatctacaacatagggccccagaacaacagtttcactttgtggcttttaattattctagaattttaactgcatctcatttttctagcatggtgagaactaatatgtaactcctttgattgaaggagctcttttgtccgtacctatcagaatgttttcttgacacttccatgttggctcttctcagctttttttgtacatattttttttttctaaagagaagaaaaagttatcacaaaatgtaaaaaaactca

SEQ ID NO: 12735 - DNA, 2574 bp, Homo sapiens
gggattcggaatttatttcgttttctttgcttcttctgtgacccttacttctttcgcctaccggctcagcctgttcggcgtcttgcagcagtgcctgcgatcccgcgtgagtccgtcgctccctccgcgaaaacctggactctttcccagaagccttgggctccagcaccatgcctgctgcagccgccaaagagcgggaagccacaggctctgcgggtcttggttacagcgtctctggtcgtgccgggcctccttctgcatctgttccacggcccggccatctccctcgtgcagcccagaacaattgggaggaagcgttggcgggcggagggggatgcctgttgggcttttccactagttactgagtgttttttgcgaagagtacgttgctatcagtggcgtccgggtcgtctctccctctcttccttttggtccccataaatgagctgttctcggctctgggaaagaaaagccctccagcgattatgcggatctaattaagtcaatcaggaaactgccggagagcggcactggcttgaagcggagtttgtcctgaggcacagcggaacgattgcacgcggccttttcagcggttcgagctcggccagcgccgggctgcaaacggaagcctgagctgggcttggggaactacgcccgcagatttctctaattttattcacaaaactggacaccctcagggaaagcggcaaagccggcgcgagcctccttcccactctggacctagctgcagctccaaagcgagatagctgtctagcctcagccggtacagctcccggcccctttctccacccggatctgcggctgctcagaagcgatcagctcccttagcccaggtgggaggcgggagactccagatcctgtgacccgcggaggcagacctcagacatgttccccatgcacagaaatgactggggctccagtgtgtgcaccttcaactctgaagcccacctgcccacttcaggcgctggcgcggagataaccaccacgcgtctgccgggcaaagttcgagagtgaatttacatcttctctttccgctactcctggccactgtcccctcccagccccatctcccccgcccccaaccctggactatgtggtaggggactcgcttaagcacccaagtactgcgcggttgttgagaccaaggcgagctgcggagcctgtgggctgttgttcgtgggaagagggttgcgacctcaggagagaccgaaaacagcgccacttgaaacccgccggtcctgaagatcacagagttcccggagtggtagggaaggctccacgctcttgagagcagaggcggccaggggcagtgggggacgcttccaggtatgtgggaaggagaacttcatgtctaagtgcgctcttgtgggtttctcggccagctgggccgagcctctctttctctgtcctcatgtgtctgtcctctggacaacagtggctctgtatggcggattgcgaccctgagtgacgggcgcctgtcttgcatcctgtgtcctgtgtcctcccctccagacctcatgcttggtgtccacagagtggacccaggactgcctggaaggcttatcatccaggcccgcgacttccccccagagtctgaagccttgcgacctggtcggggacgacaaacctgctcggggtcaacagcgagaccctagtggggaatgaggatgggtgagggtgcgcctgggttgagggtctgtgactgtagcatggaaaaggagttcatgcagggatcgcactgagggacagccaagaatactccagcggcagcctccctcctaccaattacacgccgcctgctggcacagtggcacctcgggaacaggacgcccttccgggccctgaattggggcagcgcaggagggagggtgcagagccatagcgacctgtgtgtaccatagacatgcacatgcgctcaccttcacgtgtaacccttctgagtcccagacagggtaactggcgaggccgtaagtaccctcgtgggggcggaaatattgccgcgtccctgagtcctctgggcagatgcagagccgcgtaagcctcatagaagcaaagccaggggaacagtgggagctctggcctcgcggtgcggacgctagtaatggattcctggggaacagcgacctctggaggagcctctcatccacacagagtcaggaactaaaggactggttctgagacaaagcaccctttcctcaccctactcccattccacccgcttggaaaagttatccagagacttttaacctccggactccactcttcgcttatgtttgcttttttttccaacctgtacccacgcttcaaaatccctgctccagtcctgcctcttccagaaagaagccttctggccagcccagttcctcttcccctcttcctgttctgagctcattctcaggccacactgcacagccaacctgcttcctgcctgctcttctccaaaaagactgtgaatccactccacccacgccttgtgttgcatgctgggcatgccgttccctgccccaacccaccccaccccccagtgaataaagactgaagttattcattcca

SEQ ID NO: 12736 - DNA, 521 bp, Homo sapiens
ccacgcgtcgaaaggactggttctgagacaaagcaccctttcctcaccctactcccattcctttagttcctgactctgtggggaacagcgacctctggaggagcctctcatccacacagagtcaggaactaaaggactggttctgagacaaagcaccctttcctcaccctactcccattccacccgcttggaaaagttatccagagacttttaacctccggactccactcttcgcttatgtttgcttttttttccaacctgtacccacgcttcaaaatccctgctccagtcctgcctcttccagaaagaagccttctggccagcccagttcctcttcccctcttcctgttctgagctcattctcaggccacactgcacagccaacctgcttcctgcctgctcttctccaaaaagactgtgaatccactccacccacgccttgtgttgcatgctgggcatgccgttccctgccccaacccaccccaccccccagtgaataaagactgaagttattcattcca

SEQ ID NO: 12737 - DNA, 506 bp, Homo sapiens
tgcacctagcgtacacacacatgcacgtggcattagtctttgttccagtcattttctgagaaggagtgtttaagaggtacattttttgacatcttgcatatttgaaactgtctctattcaacttaaacttgatggtaatttgcctaagactagaatcctggatgggaaataaacttctctcaaagttttgaaggtatgtttgttagtaaaggtataggctaagctctgtaacaaacctcccccaaatacagtgacttaaacatctgattaatagtttctatactggccgggccctggtggctcacacctgtaatcccagcactttgggaggccaaggcgggtggatcacgaggtcaggagttcaagatcagcctggccaagatggtgaaaccccgtctctactaaaaactacaaaaattttccaggcgcggtggtgggcccgcgtaatcccagctacttggggaggctgaggcaggaaaatcgcttgaacccgggaggtggaggtt

SEQ ID NO: 12738 - DNA, 838 bp, Homo sapiens
ttgttggtttttttctccctcaaagtgaaatgagagactattgtagggttttgagccaaggagtgatattatctgaattctgttttaaaaggttcattatggctcctgtgtggaggcagggtagctacttagaaaccaagccatctcagcctcccgatttgtagagatgtggtctcactatgttgcccagactggtcttgaactcctggcctcatgtgatcctcccaccttggcctcccaaaatactaaaatgatagatatgagccgccacacctggccataagcttcagccttgagcagatactttctaaacactttatatagggaaaaaaaactaattcttgcgtagccaaggtgttcattttgccgagaataacgtagcatagtgtttacaattacgtgggtgtaatttctagctttgtgatcctgagagactgccttatcctccatatgcctcagttttctcatgtgtaaaaagggggtaataataatacctgacagggatgttgagaaatccatgtaaaagtacttagaacagcgcctgcatatagtgagagcagagaaaagggaaaaggttcgtggtggtgattgcattgatgttattattccttcagggtatcaccaagtcttccagtgccagcattgttcagttgagagagaaatatagatgctaggcatacacctagaaatagcattgacagtaagttacgatttctgtaattatcttcttagtaaaaaacctacatatttataaatcttttgagcaactggaaaaaaagtattaacttaaatttactacaggaaaaatgtattgcaataattatgttactttatacca

SEQ ID NO: 12739 - DNA, 780 bp, Homo sapiens
ttgttggtttttttctccctcaaagtgaaatgagagactattgtagggttttgagccaaggagtgatattatctgaattctgttttaaaaggttcattatggctcctgtgtggaggcagggtagctacttagaaaccaagccatctcagcctcccgatttgtagagatgtggtctcactatgttgcccagactggtcttgaactcctggcctcatgtgatcctcccaccttggcctcccaaaatactaaaatgatagatatgagccgccacacctggccataagcttcagccttgagcagatactttctaaacactttatatagggaatgtttacaattacgtgggtgtaatttctagctttgtgatcctgagagactgccttatcctccatatgcctcagttttctcatgtgtaaaaagggggtaataataatacctgacagggatgttgagaaatccatgtaaaagtacttagaacagcgcctgcatatagtgagagcagagaaaagggaaaaggttcgtggtggtgattgcattgatgttattattccttcagggtatcaccaagtcttccagtgccagcattgttcagttgagagagaaatatagatgctaggcatacacctagaaatagcattgacagtaagttacgatttctgtaattatcttcttagtaaaaaacctacatatttataaatcttttgagcaactggaaaaaaagtattaacttaaatttactacaggaaaaatgtattgcaataattatgttactttatacca

SEQ ID NO: 12740 - DNA, 3407 bp, Homo sapiens
gttgtatgactaatatgaatctagtattaacaaaacaaaatttgctacatatggaactattattattagaaacctttcagtggaacctctgccttccaacagccgcccatttcattgagtattatctctctgaagcagtacacgaaacagatcttcatgacggctggccaatgatttgcttggaaaagactaaactctacatggccaaatatgcagattacttcctggaagtatctttgcaagctgctgcatgtgtggcttcttcgaggattatacttcgtctttctccaacgtggcctacaagactacatcgtcttactgcctactcttgggatttcttagtgcagtgtattgaacgactgttgatcgctcatgataatgatgtgaaagaagcaaacaaacagagagggcaagcaggacctcagtcagcgcaactaagtgtattccagacagcctcccagccatcacggccagttcactttcagcaacctcagtatctccatcagacacatcagacctcactgcagtatcgccatcctacgtcagaacaaccaagctgtcagcagattgtatcgaccacacacacctcatcttacacactacagacatgtcctgctggcttccaaactagtgttcagggccttgggcacatgcagactggtgttgggatgtcactggcaataccagtagaagttaagccctgtctgagtgtttcttacaaccggagttatcagataaatgaacattacccttgtattactccatgttttgaaaggtgattatttgtgaagctgataaccgacccagactgctttgtgacatgaagctatgggtaagcgttttgtaaacttctgttcaaaaggaaagggatctaaatgacatcagaactcttcaggtaccagcaccaggaagactgaatatcctttttaatgcaccatgaatcctgggagactaagcaaattaacagtatgtcaaattctgttacaacaaatccctgtatgacaaaaatgttcaagtcctggctgatggtccaaatatttcaaaaatattcagtacaacagaaaatttggacagacttcaatttgccattttgagatttgacctgtggtagcatctgggcctaatgttggcttctaagtcaaagactaaatgtttatctcatctatggacttgccaaacagtcttttatgaaggaaagttacagtattaatttttgaaaaggttttttttattctgcaattttttatttttgttctacacatgaatttttgactaagtttaaactcatgaattgttatgctataccaatctgcagtaaaaaaaatttttttagatgattctatataacttcgtctcacaaatagtgtaggtatctgggtttatatactaaaattaagggtggagaagatcttattttttaaatcatggtcataatttttctttttttccctaagtgatcaacatcaaatttttagaattaaaatacatttaactcagggaatttgtactacttggaaacacttaactgtaatgcaacatgccttgggaatgttatagtgtgaactacctttataacataggttaaaatacgcttgctagggtgtgttttcaaatgagaacataatatagctcagaatgaagtggtagttcctgtgattcataatacatatgtaggttttgcatatctcagtgcaatccatgatttatactcagaatcgacattcttaaaaagttatttcaagggatggcataactgtaagaggtcagtgctagaataaagtcctgtaggtttattttggaagggactgtggccagggtagttctcaggttgtgctagagcagcactttgttatgtggaagacaggttttttaagcaacctttgaatccagctctagtcagtctaagcaggcaaaggtaactgatgactaaatttcagtagctactttcattggattgaccctacaactgccctgggacatttcactgtaccagtattaactgcaaacagcaataattgtcattacagcaagggcagtttgggggtaaagcattttggaggaataaccttaaaaagttaaaaagtcattgtaataactgataaactgtatacattgtgctcctttctgtgggagaagaaagatttggtggagggaagctttctggtttaaaaattagtaaggtgtgtctttttgttttttttaagatagcacttgaatagaagggaaaactgcatggcagatacgtgactgccacaatatgcatcgaagacaaacttactataaagatgttgtgggtatgcagcaggagtctcagtaatcaagccaatggcctttgtcaggaagggaaggggctcaacacagtgatggactgatccagatggctcccggggatgaatgtgggtgggtagcttctgtcagtatcaatgcttagagaaatatcctttccttaaaaagaaaataacttttatatttagagtacatagggcatgatgtggatttattagtctggtagataaaatgaaaaaccactcaggtaagaacactcactcatggcagtttttaagcatgaaaattgttttctgaaagtatcatcacttttcctttttaaagaaggctgctaattggattttggtagttcttacctcaagaaaacttgaattatttgggggaaagtaggctcaaaagagaatatatctttcacattcacattcagaacccagcaacctggagtccaattttcagtattttaactacctcaataatgctatgaatgtaagatattgggatagagatcccaacttgaaacaacagccagtgcctgtggtaacttaatgtcttgtcaaatacttttattgattggtttatatgccattcttgttatagaagaatatgccttttaaaaaagcttattaataacactttcccaatttatattttaaaaagctaaagaacactggattaataatcttttgggagggtagaataaaataattgattactattgctgcatacccggggtgggatggggtggttggagaaccagaactatttttaaaacattaggtttcaatataaatacaactcacaactgctagctttggggggtgggggaacattgtttgggttttgttttgtttaatttattgattagtctttaaagtaggctttttttttttttttgagaatactggaccatcattaaatgtgtactgtgaagagattaatatgtatgaagggctttaccaaagtccactaaataaacactactcaagtacagactgcaaaccaaaatgtatctgtgttacgacattaattgcaaatagcaagtatggtgctaaagtctacaccaatggaattagatgagtgctatgcacttaattttaaaataaaactagttttcagtaaaa

SEQ ID NO: 12741 - DNA, 3443 bp, Homo sapiens
gttgtatgactaatatgaatctagtattaacaaaacaaaatttgctacatatggaactattattattagaaacctttcagtggaacctctgccttccaacagccgcccatttcattgagtattatctctctgaagcagtacacgaaacagatcttcatgacggctggccaatgatttgcttggaaaagactaaactctacatggccaaatatgcagattacttcctggaagtatctttgcaagattatgcctttctaaattatgcaccttctttagtagctgctgcatgtgtggcttcttcgaggattatacttcgtctttctccaacgtggcctacaagactacatcgtcttactgcctactcttgggatttcttagtgcagtgtattgaacgactgttgatcgctcatgataatgatgtgaaagaagcaaacaaacagagagggcaagcaggacctcagtcagcgcaactaagtgtattccagacagcctcccagccatcacggccagttcactttcagcaacctcagtatctccatcagacacatcagacctcactgcagtatcgccatcctacgtcagaacaaccaagctgtcagcagattgtatcgaccacacacacctcatcttacacactacagacatgtcctgctggcttccaaactagtgttcagggccttgggcacatgcagactggtgttgggatgtcactggcaataccagtagaagttaagccctgtctgagtgtttcttacaaccggagttatcagataaatgaacattacccttgtattactccatgttttgaaaggtgattatttgtgaagctgataaccgacccagactgctttgtgacatgaagctatgggtaagcgttttgtaaacttctgttcaaaaggaaagggatctaaatgacatcagaactcttcaggtaccagcaccaggaagactgaatatcctttttaatgcaccatgaatcctgggagactaagcaaattaacagtatgtcaaattctgttacaacaaatccctgtatgacaaaaatgttcaagtcctggctgatggtccaaatatttcaaaaatattcagtacaacagaaaatttggacagacttcaatttgccattttgagatttgacctgtggtagcatctgggcctaatgttggcttctaagtcaaagactaaatgtttatctcatctatggacttgccaaacagtcttttatgaaggaaagttacagtattaatttttgaaaaggttttttttattctgcaattttttatttttgttctacacatgaatttttgactaagtttaaactcatgaattgttatgctataccaatctgcagtaaaaaaaatttttttagatgattctatataacttcgtctcacaaatagtgtaggtatctgggtttatatactaaaattaagggtggagaagatcttattttttaaatcatggtcataatttttctttttttccctaagtgatcaacatcaaatttttagaattaaaatacatttaactcagggaatttgtactacttggaaacacttaactgtaatgcaacatgccttgggaatgttatagtgtgaactacctttataacataggttaaaatacgcttgctagggtgtgttttcaaatgagaacataatatagctcagaatgaagtggtagttcctgtgattcataatacatatgtaggttttgcatatctcagtgcaatccatgatttatactcagaatcgacattcttaaaaagttatttcaagggatggcataactgtaagaggtcagtgctagaataaagtcctgtaggtttattttggaagggactgtggccagggtagttctcaggttgtgctagagcagcactttgttatgtggaagacaggttttttaagcaacctttgaatccagctctagtcagtctaagcaggcaaaggtaactgatgactaaatttcagtagctactttcattggattgaccctacaactgccctgggacatttcactgtaccagtattaactgcaaacagcaataattgtcattacagcaagggcagtttgggggtaaagcattttggaggaataaccttaaaaagttaaaaagtcattgtaataactgataaactgtatacattgtgctcctttctgtgggagaagaaagatttggtggagggaagctttctggtttaaaaattagtaaggtgtgtctttttgttttttttaagatagcacttgaatagaagggaaaactgcatggcagatacgtgactgccacaatatgcatcgaagacaaacttactataaagatgttgtgggtatgcagcaggagtctcagtaatcaagccaatggcctttgtcaggaagggaaggggctcaacacagtgatggactgatccagatggctcccggggatgaatgtgggtgggtagcttctgtcagtatcaatgcttagagaaatatcctttccttaaaaagaaaataacttttatatttagagtacatagggcatgatgtggatttattagtctggtagataaaatgaaaaaccactcaggtaagaacactcactcatggcagtttttaagcatgaaaattgttttctgaaagtatcatcacttttcctttttaaagaaggctgctaattggattttggtagttcttacctcaagaaaacttgaattatttgggggaaagtaggctcaaaagagaatatatctttcacattcacattcagaacccagcaacctggagtccaattttcagtattttaactacctcaataatgctatgaatgtaagatattgggatagagatcccaacttgaaacaacagccagtgcctgtggtaacttaatgtcttgtcaaatacttttattgattggtttatatgccattcttgttatagaagaatatgccttttaaaaaagcttattaataacactttcccaatttatattttaaaaagctaaagaacactggattaataatcttttgggagggtagaataaaataattgattactattgctgcatacccggggtgggatggggtggttggagaaccagaactatttttaaaacattaggtttcaatataaatacaactcacaactgctagctttggggggtgggggaacattgtttgggttttgttttgtttaatttattgattagtctttaaagtaggctttttttttttttttgagaatactggaccatcattaaatgtgtactgtgaagagattaatatgtatgaagggctttaccaaagtccactaaataaacactactcaagtacagactgcaaaccaaaatgtatctgtgttacgacattaattgcaaatagcaagtatggtgctaaagtctacaccaatggaattagatgagtgctatgcacttaattttaaaataaaactagttttcagtaaaa

SEQ ID NO: 12742 - DNA, 5621 bp, Homo sapiens
  misc_feature (4767)..(4767): n is a, c, g, or t
gttgtatgactaatatgaatctagtattaacaaaacaaaatttgctacatatggaactattattattagaaacctttcagtggaacctctgccttccaacagccgcccatttcattgagtattatctctctgaagcagtacacgaaacagatcttcatgacggctggccaatgatttgcttggaaaagactaaactctacatggccaaatatgcagattacttcctggaagtatctttgcaagctgctgcatgtgtggcttcttcgaggattatacttcgtctttctccaacgtggcctacaagactacatcgtcttactgcctactcttgggatttcttagtgcagtgtattgaacgactgttgatcgctcatgataatgatgtgaaagaagcaaacaaacagagagggcaagcaggacctcagtcagcgcaactaagtgtattccagacagcctcccagccatcacggccagttcactttcagcaacctcagtatctccatcagacacatcagacctcactgcagtatcgccatcctacgtcagaacaaccaagctgtcagcagattgtatcgaccacacacacctcatcttacacactacagacatgtcctgctggcttccaaactagtgttcagggccttgggcacatgcagactggtgttgggatgtcactggcaataccagtagaagttaagccctgtctgagtgtttcttacaaccggagttatcagataaatgaacattacccttgtattactccatgttttgaaaggtgattatttgtgaagctgataaccgacccagactgctttgtgacatgaagctatgggtaagcgttttgtaaacttctgttcaaaaggaaagggatctaaatgacatcagaactcttcaggtaccagcaccaggaagactgaatatcctttttaatgcaccatgaatcctgggagactaagcaaattaacagtatgtcaaattctgttacaacaaatccctgtatgacaaaaatgttcaagtcctggctgatggtccaaatatttcaaaaatattcagtacaacagaaaatttggacagacttcaatttgccattttgagatttgacctgtggtagcatctgggcctaatgttggcttctaagtcaaagactaaatgtttatctcatctatggacttgccaaacagtcttttatgaaggaaagttacagtattaatttttgaaaaggttttttttattctgcaattttttatttttgttctacacatgaatttttgactaagtttaaactcatgaattgttatgctataccaatctgcagtaaaaaaaatttttttagatgattctatataacttcgtctcacaaatagtgtaggtatctgggtttatatactaaaattaagggtggagaagatcttattttttaaatcatggtcataatttttctttttttccctaagtgatcaacatcaaatttttagaattaaaatacatttaactcagggaatttgtactacttggaaacacttaactgtaatgcaacatgccttgggaatgttatagtgtgaactacctttataacataggttaaaatacgcttgctagggtgtgttttcaaatgagaacataatatagctcagaatgaagtggtagttcctgtgattcataatacatatgtaggttttgcatatctcagtgcaatccatgatttatactcagaatcgacattcttaaaaagttatttcaagggatggcataactgtaagaggtcagtgctagaataaagtcctgtaggtttattttggaagggactgtggccagggtagttctcaggttgtgctagagcagcactttgttatgtggaagacaggttttttaagcaacctttgaatccagctctagtcagtctaagcaggcaaaggtaactgatgactaaatttcagtagctactttcattggattgaccctacaactgccctgggacatttcactgtaccagtattaactgcaaacagcaataattgtcattacagcaagggcagtttgggggtaaagcattttggaggaataaccttaaaaagttaaaaagtcattgtaataactgataaactgtatacattgtgctcctttctgtgggagaagaaagatttggtggagggaagctttctggtttaaaaattagtaaggtgtgtctttttgttttttttaagatagcacttgaatagaagggaaaactgcatggcagatacgtgactgccacaatatgcatcgaagacaaacttactataaagatgttgtgggtatgcagcaggagtctcagtaatcaagccaatggcctttgtcaggaagggaaggggctcaacacagtgatggactgatccagatggctcccggggatgaatgtgggtgggtagcttctgtcagtatcaatgcttagagaaatatcctttccttaaaaagaaaataacttttatatttagagtacatagggcatgatgtggatttattagtctggtagataaaatgaaaaaccactcaggtaagaacactcactcatggcagtttttaagcatgaaaattgttttctgaaagtatcatcacttttcctttttaaagaaggctgctaattggattttggtagttcttacctcaagaaaacttgaattatttgggggaaagtaggctcaaaagagaatatatctttcacattcacattcagaacccagcaacctggagtccaattttcagtattttaactacctcaataatgctatgaatgtaagatattgggatagagatcccaacttgaaacaacagccagtgcctgtggtaacttaatgtcttgtcaaatacttttattgattggtttatatgccattcttgttatagaagaatatgccttttaaaaaagcttattaataacactttcccaatttatattttaaaaagctaaagaacactggattaataatcttttgggagggtagaataaaataattgattactattgctgcatacccggggtgggatggggtggttggagaaccagaactatttttaaaacattaggtttcaatataaatacaactcacaactgctagctttggggggtgggggaacattgtttgggttttgttttgtttaatttattgattagtctttaaagtaggctttttttttttttttgagaatactggaccatcattaaatgtgtactgtgaagagattaatatgtatgaagggctttaccaaagtccactaaataaacactactcaagtacagactgcaaaccaaaatgtatctgtgttacgacattaattgcaaatagcaagtatggtgctaaagtctacaccaatggaattagatgagtgctatgcacttaattttaaaataaaactagttttcagtaaaatggcttcggtatttttgttttaaatacaaacttgtatatttgcagctctagtgaaccatctcatcatgtaattcagacttggaatcatgattttatttactaaaagccatcaagatgtagaatatagccattagtggcataaaacatccgttcattgcgtattccatactgagcattaaagcccacaaaagtatattggacaccactgttgcctttttgagcttaaaatcagttgttagtatgttagcaactacagattctaatttattcaacaatcatgcaagcatcagaaaatctgaagtttgatgtcaaaagtagggacacagaaaatggttaaagctatgagaaggaatatagggtctacagtgagtgagaatggtctatttacctgagtataaatatcatttgctacttaattcaactcaaaccttagcagatggaatttgttttgaaaagtaaaatttaacaggtttgtacaagcgggttaggaatttacactgcctttttaaaaaacatttttgaaattagtctcaaaactatcgtattgtcacttgttctggcacagtgccagggtttagcagccctcaagagttaatataccatgttctttagggctgactttaagaaaaagaaaaagcattccaaaccaggccaggtagctttgccttgaggtgatctgagccccatgtggcaagtttataaccaacaactgcctctcaggcacgtggtaaaagcctccctagcctcaagcagcttacatctagtttgataaatacgactagcacacttgcagcaattaggctagtagaggcccgcacggtggctcatgcctgtaatcccagcattttgggtggctgaggccagtggatcacttgaggccaggagtttgaagccagcctgggcaacatggtgaaaccctgtctctactaaaagtacaaaaactagctgggtgtggtggcacgtacctgtagtcccagctacttgggagactgaggcacaggaatcacttgaactcaggaggtggagactgcaataagctgagatcacaccactgcactccagcctgggcaacagagctagagtctgccactaaataaaattaggctggtgtagtctggaactcggtttaatatcgtgttagtttaggaatcactcaacattcatttttcaatcccttagattttaaagtagcaagtacagtcagttgacagcataaggaccaggctcagggatcatatgggaaggacacctgctatcctatccttgcctgactaccactctgtttcctcccataacaccctctgcctcccaggtaagcatcaccaccctgaatttattagttcttaagtccatgaagccntgacatggtatgcaatttatatgtaaatgatttcccctattcttaaagttttgtctactcaaagggacctgtaattaaaaatgtaagagtgactgtcttgtatccatttacttgctagtttctccctactagaaccttgtgttaggccgttctcgcattgctataaagaaatactcaggactgggtaatttataaagaagagaggtttaactggctcatgcttctgtaggctgtacagggagcatggagctggcatctgcttggcttctgggaggcctcaagaaacatggcagaagggtaagcaggagcaggaatctcacttggtgggaacaagtgggggtaggcgaaggtgccacacactttaaccagatctcacatgaagtgaactcactatcacaaggacagcaccaagccatgagggatccgcccccatgacaaacacctcccactaggccccacctccaacattggggattacatttcaacatggatttgggtggggacaaatatctaaactatgtcaaacatatcttccctctgtctgccaggctggagcgcagtgttgccattatggcccactgcagcctccacctcctgggctcaaaaaattctcccacttcagcctcctgagtagctaggatcgtaggcatacaccaccacatgcctggctcatttttacaattttttgtagaggtgggcgtggtggtgtgtgcctgtagtcccagctacttgtggggctgaagcaggaggactgcttgagcccaggaggtcgaggctgcagtgagccatgtttgtgccactatactccagcctgggtgacaaagtgagaccctgtctcaaaacaacaacaacaa

SEQ ID NO: 12743 - DNA, 4207 bp, Homo sapiens
  misc_feature (3353)..(3353): n is a, c, g, or t
tccaccgggcataattgaactttgggaccggtacgggatcaacatacagatctgtgtgaagggtgaaaatacatttaactcagggaatttgtactacttggaaacacttaactgtaatgcaacatgccttgggaatgttatagtgtgaactacctttataacataggttaaaatacgcttgctagggtgtgttttcaaatgagaacataatatagctcagaatgaagtggtagttcctgtgattcataatacatatgtaggttttgcatatctcagtgcaatccatgatttatactcagaatcgacattcttaaaaagttatttcaagggatggcataactgtaagaggtcagtgctagaataaagtcctgtaggtttattttggaagggactgtggccagggtagttctcaggttgtgctagagcagcactttgttatgtggaagacaggttttttaagcaacctttgaatccagctctagtcagtctaagcaggcaaaggtaactgatgactaaatttcagtagctactttcattggattgaccctacaactgccctgggacatttcactgtaccagtattaactgcaaacagcaataattgtcattacagcaagggcagtttgggggtaaagcattttggaggaataaccttaaaaagttaaaaagtcattgtaataactgataaactgtatacattgtgctcctttctgtgggagaagaaagatttggtggagggaagctttctggtttaaaaattagtaaggtgtgtctttttgttttttttaagatagcacttgaatagaagggaaaactgcatggcagatacgtgactgccacaatatgcatcgaagacaaacttactataaagatgttgtgggtatgcagcaggagtctcagtaatcaagccaatggcctttgtcaggaagggaaggggctcaacacagtgatggactgatccagatggctcccggggatgaatgtgggtgggtagcttctgtcagtatcaatgcttagagaaatatcctttccttaaaaagaaaataacttttatatttagagtacatagggcatgatgtggatttattagtctggtagataaaatgaaaaaccactcaggtaagaacactcactcatggcagtttttaagcatgaaaattgttttctgaaagtatcatcacttttcctttttaaagaaggctgctaattggattttggtagttcttacctcaagaaaacttgaattatttgggggaaagtaggctcaaaagagaatatatctttcacattcacattcagaacccagcaacctggagtccaattttcagtattttaactacctcaataatgctatgaatgtaagatattgggatagagatcccaacttgaaacaacagccagtgcctgtggtaacttaatgtcttgtcaaatacttttattgattggtttatatgccattcttgttatagaagaatatgccttttaaaaaagcttattaataacactttcccaatttatattttaaaaagctaaagaacactggattaataatcttttgggagggtagaataaaataattgattactattgctgcatacccggggtgggatggggtggttggagaaccagaactatttttaaaacattaggtttcaatataaatacaactcacaactgctagctttggggggtgggggaacattgtttgggttttgttttgtttaatttattgattagtctttaaagtaggctttttttttttttttgagaatactggaccatcattaaatgtgtactgtgaagagattaatatgtatgaagggctttaccaaagtccactaaataaacactactcaagtacagactgcaaaccaaaatgtatctgtgttacgacattaattgcaaatagcaagtatggtgctaaagtctacaccaatggaattagatgagtgctatgcacttaattttaaaataaaactagttttcagtaaaatggcttcggtatttttgttttaaatacaaacttgtatatttgcagctctagtgaaccatctcatcatgtaattcagacttggaatcatgattttatttactaaaagccatcaagatgtagaatatagccattagtggcataaaacatccgttcattgcgtattccatactgagcattaaagcccacaaaagtatattggacaccactgttgcctttttgagcttaaaatcagttgttagtatgttagcaactacagattctaatttattcaacaatcatgcaagcatcagaaaatctgaagtttgatgtcaaaagtagggacacagaaaatggttaaagctatgagaaggaatatagggtctacagtgagtgagaatggtctatttacctgagtataaatatcatttgctacttaattcaactcaaaccttagcagatggaatttgttttgaaaagtaaaatttaacaggtttgtacaagcgggttaggaatttacactgcctttttaaaaaacatttttgaaattagtctcaaaactatcgtattgtcacttgttctggcacagtgccagggtttagcagccctcaagagttaatataccatgttctttagggctgactttaagaaaaagaaaaagcattccaaaccaggccaggtagctttgccttgaggtgatctgagccccatgtggcaagtttataaccaacaactgcctctcaggcacgtggtaaaagcctccctagcctcaagcagcttacatctagtttgataaatacgactagcacacttgcagcaattaggctagtagaggcccgcacggtggctcatgcctgtaatcccagcattttgggtggctgaggccagtggatcacttgaggccaggagtttgaagccagcctgggcaacatggtgaaaccctgtctctactaaaagtacaaaaactagctgggtgtggtggcacgtacctgtagtcccagctacttgggagactgaggcacaggaatcacttgaactcaggaggtggagactgcaataagctgagatcacaccactgcactccagcctgggcaacagagctagagtctgccactaaataaaattaggctggtgtagtctggaactcggtttaatatcgtgttagtttaggaatcactcaacattcatttttcaatcccttagattttaaagtagcaagtacagtcagttgacagcataaggaccaggctcagggatcatatgggaaggacacctgctatcctatccttgcctgactaccactctgtttcctcccataacaccctctgcctcccaggtaagcatcaccaccctgaatttattagttcttaagtccatgaagccntgacatggtatgcaatttatatgtaaatgatttcccctattcttaaagttttgtctactcaaagggacctgtaattaaaaatgtaagagtgactgtcttgtatccatttacttgctagtttctccctactagaaccttgtgttaggccgttctcgcattgctataaagaaatactcaggactgggtaatttataaagaagagaggtttaactggctcatgcttctgtaggctgtacagggagcatggagctggcatctgcttggcttctgggaggcctcaagaaacatggcagaagggtaagcaggagcaggaatctcacttggtgggaacaagtgggggtaggcgaaggtgccacacactttaaccagatctcacatgaagtgaactcactatcacaaggacagcaccaagccatgagggatccgcccccatgacaaacacctcccactaggccccacctccaacattggggattacatttcaacatggatttgggtggggacaaatatctaaactatgtcaaacatatcttccctctgtctgccaggctggagcgcagtgttgccattatggcccactgcagcctccacctcctgggctcaaaaaattctcccacttcagcctcctgagtagctaggatcgtaggcatacaccaccacatgcctggctcatttttacaattttttgtagaggtgggcgtggtggtgtgtgcctgtagtcccagctacttgtggggctgaagcaggaggactgcttgagcccaggaggtcgaggctgcagtgagccatgtttgtgccactatactccagcctgggtgacaaagtgagaccctgtctcaaaacaacaacaacaa

SEQ ID NO: 12744 - DNA, 162 bp, Homo sapiens
ttgagttggggatggggcatgattttcttgcagatttcttctcaagcagtatttttaatagtttcctttctctccacgtttcagcgctcatgataatgatgtgaaagaagcaaacaaacagagagggcaagcaggacctcagtcagcgcaactaagtgtatt

SEQ ID NO: 12745 - DNA, 3687 bp, Homo sapiens
gttgtatgactaatatgaatctagtattaacaaaacaaaatttgctacatatggaactattattattagaaacctttcagtggaacctctgccttccaacagccgcccatttcattgagtattatctctctgaagcagtacacgaaacagatcttcatgacggctggccaatgatttgcttggaaaagactaaactctacatggccaaatatgcagattacttcctggaagtatctttgcaagctgctgcatgtgtggcttcttcgaggattatacttcgtctttctccaacgtggcctacaagactacatcgtcttactgcctactcttgggatttcttagtgcagtgtattgaacgactgttgatcgctcatgataatgatgtgaaagaagcaaacaaacagagagggcaagcaggacctcagtcagcgcaactaagtgtattccagacagcctcccagccatcacggccagttcactttcagcaacctcagtatctccatcagacacatcagacctcactgcagtatcgccatcctacgtcagaacaaccaagctgtcagcagattgtatcgaccacacacacctcatcttacacactacagacatgtcctgctggcttccaaactagtgttcagggccttgggcacatgcagactggtgttgggatgtcactggcaataccagtagaagttaagccctgtctgagtgtttcttacaaccggagttatcagataaatgaacattacccttgtattactccatgttttgaaaggtgattatttgtgaagctgataaccgacccagactgctttgtgacatgaagctatgggtaagcgttttgtaaacttctgttcaaaaggaaagggatctaaatgacatcagaactcttcaggtaccagcaccaggaagactgaatatcctttttaatgcaccatgaatcctgggagactaagcaaattaacagtatgtcaaattctgttacaacaaatccctgtatgacaaaaatgttcaagtcctggctgatggtccaaatatttcaaaaatattcagtacaacagaaaatttggacagacttcaatttgccattttgagatttgacctgtggtagcatctgggcctaatgttggcttctaagtcaaagactaaatgtttatctcatctatggacttgccaaacagtcttttatgaaggaaagttacagtattaatttttgaaaaggttttttttattctgcaattttttatttttgttctacacatgaatttttgactaagtttaaactcatgaattgttatgctataccaatctgcagtaaaaaaaatttttttagatgattctatataacttcgtctcacaaatagtgtaggtatctgggtttatatactaaaattaagggtggagaagatcttattttttaaatcatggtcataatttttctttttttccctaagtgatcaacatcaaatttttagaattaaaatacatttaactcagggaatttgtactacttggaaacacttaactgtaatgcaacatgccttgggaatgttatagtgtgaactacctttataacataggttaaaatacgcttgctagggtgtgttttcaaatgagaacataatatagctcagaatgaagtggtagttcctgtgattcataatacatatgtaggttttgcatatctcagtgcaatccatgatttatactcagaatcgacattcttaaaaagttatttcaagggatggcataactgtaagaggtcagtgctagaataaagtcctgtaggtttattttggaagggactgtggccagggtagttctcaggttgtgctagagcagcactttgttatgtggaagacaggttttttaagcaacctttgaatccagctctagtcagtctaagcaggcaaaggtaactgatgactaaatttcagtagctactttcattggattgaccctacaactgccctgggacatttcactgtaccagtattaactgcaaacagcaataattgtcattacagcaagggcagtttgggggtaaagcattttggaggaataaccttaaaaagttaaaaagtcattgtaataactgataaactgtatacattgtgctcctttctgtgggagaagaaagatttggtggagggaagctttctggtttaaaaattagtaaggtgtgtctttttgttttttttaagatagcacttgaatagaagggaaaactgcatggcagatacgtgactgccacaatatgcatcgaagacaaacttactataaagatgttgtgggtatgcagcaggagtctcagtaatcaagccaatggcctttgtcaggaagggaaggggctcaacacagtgatggactgatccagatggctcccggggatgaatgtgggtgggtagcttctgtcagtatcaatgcttagagaaatatcctttccttaaaaagaaaataacttttatatttagagtacatagggcatgatgtggatttattagtctggtagataaaatgaaaaaccactcaggtaagaacactcactcatggcagtttttaagcatgaaaattgttttctgaaagtatcatcacttttcctttttaaagaaggctgctaattggattttggtagttcttacctcaagaaaacttgaattatttgggggaaagtaggctcaaaagagaatatatctttcacattcacattcagaacccagcaacctggagtccaattttcagtattttaactacctcaataatgctatgaatgtaagatattgggatagagatcccaacttgaaacaacagccagtgcctgtggtaacttaatgtcttgtcaaatacttttattgattggtttatatgccattcttgttatagaagaatatgccttttaaaaaagcttattaataacactttcccaatttatattttaaaaagctaaagaacactggattaataatcttttgggagggtagaataaaataattgattactattgctgcatacccggggtgggatggggtggttggagaaccagaactatttttaaaacattaggtttcaatataaatacaactcacaactgctagctttggggggtgggggaacattgtttgggttttgttttgtttaatttattgattagtctttaaagtaggctttttttttttttttgagaatactggaccatcattaaatgtgtactgtgaagagattaatatgtatgaagggctttaccaaagtccactaaataaacactactcaagtacagactgcaaaccaaaatgtatctgtgttacgacattaattgcaaatagcaagtatggtgctaaagtctacaccaatggaattagatgagtgctatgcacttaattttaaaataaaactagttttcagtaaaaaaaaaaaaaaaaacaaaacaaaaaaaaaaaaaaaaaaaaaaaaaacaaacaacaaaaacaacaaaaacacaacacaccaacacaaaaaccacacagaacaaaacaacacaaaacacaaaaactacaataacacccaaacaatcatgacgggcgcggcgccttgtcccctactttgtccttcttccaacggcggcagcacacaaagttgactatgcacgacacacgctgtatcttgatctgaggccaagatggcgtgcgaccgcactccaaggccaagtta

SEQ ID NO: 12746 - DNA, 389 bp, Homo sapiens
cacagaggaatgcttgctcaccaagttcaccttgccaccaccattgctttcagtagtgctctgattacaggcaacttctgcccagtggtgctgtgcaggagctgcctgtaacccctcccctgcctgtgtttctggcactgggccatggcacctgcagtggcagtctatctgaaaagcagcggctctgctgtggattttgttctgcctctggatgctttcatgcaactctgcacagggttacccgataaatgactgcttactgtggtatttatgtctgtttgatttgccggtaactggtgtatctcaaacgaaaatttcttagcaaagacttctgtatatactagcaaatttccttgattatgttaaccactgtgaccttcccacccacc

SEQ ID NO: 12747 - DNA, 340 bp, Homo sapiens
tttatgttggaatattataattctcctcttttagctattttgatatatgcaataaattattattaactataatttccctgttgtactgtcaagtattggaacttattccttttacacaactgtgtttttgtaccccttagtcaacttctctttactttcctgcccacttcccttcctgcccctggtaaccactattctactctctaccaccatgaaaggtcttcagttgttgatagtgattcttctctcggtttttgtcgaggtctttgcacaaactgatcacggaaatcacactggtaatgccaattgagtttggtttagcgaaaaaaaaaaagttttg

SEQ ID NO: 12748 - DNA, 576 bp, Homo sapiens
tgatgctatatcttaaatacgtttgcctaaacaagagaaaacaaaggttttctcttacgttttctttttcctaaagaaagtttataattttaggttttacatttagatcgataatccagttggggtcaatttttgtctataatacaaggaatgaattttaagttcatttttacatatgaatatccatttgttgaaaaaactttcttttttccactgaattgcctttgcacctttgttgaaaagcagttgtccataattgtgcgggtctacctctaggttctctattctgttccattatcttttatatgactactatactgttttgagtaaggtaggtttataatatatcttaaagtcaggtaaacgttaagtcactagtttgtttttttcaaatccgttttgactaatttggcttctttgcatttctacgtgaatttgaaaataagcttgtcattttcttcaacaatgcctgctgggattttattggaattgcactgaatctatggataaatatgggggagacccaaaaactttacaatattgagtcttctgacccatacacaatctctctctcca

SEQ ID NO: 12749 - DNA, 397 bp, Homo sapiens
ataatatatatagagagatataaatatataaaaatatagatatgtaaattgggattgggtataaacagtcaatcagtttcttagggataagtagaaaagatagaatgttacatatttcttatgtaatacataatttgtattcttaatgtgggaaattccatgatatgctaaatgtctggttatgtttagagtttttagtgcttagtgtcaggaagattaaaaaatatattaaaagtatgttttgaaactaccttttttggttttaagaacaaatgtactggccgggcgcggtggctcacacctgtaatcccagccctttgggaggccgaggcaggtagatcacgaggtcaggagattgagaccttcctggctaacatggtgaaaccgtgtctctact

SEQ ID NO: 12750 - DNA, 766 bp, Homo sapiens
taacaaaaaaatctggaaaagacactaaaagaaaactatagaccaatatccctcataaacatactctcaaaaatctttaataaaatattagaaaatcaataaggttaagagctctgttgtataacatggtgactacagttaataacaatgtataatatttttgaaaattgctaagagaaaagattttgtgttctcatcacaaaaataggtatgtgaggtaaaacacgttaattaattcaatttagccattccacaatgtatgtacatattttgaatcatgcaatatacagtacatacaatttgtatttgtctatttaaaaattaaagggtgactatagttaataatgtattgaatgttctcactacaaagaaatgataaatgtttgagctgatggtgtgaaaggaaaataaatctcggtatcccaaaatcactaagccaaagggaaaagtcaagctgggaactgtgtcaggcaaacctacctcccattctattcctaaaggagatagcaacagagataaaaaataaaataaaataaaataaaataaaataaaagaagaagctacattaactccctcacaatttgcccataaggaaattccccgcttcaaattgtctttcccctgcccttctggccaatgtacatcttacatgtattgattgatatttcatgtctccctaaaatgtataaaaccaagctgtgccccaaccaccttaggcacatgtgtcaggacctcctaagtctgtgtcatgggcacacccttaacc

SEQ ID NO: 12751 - DNA, 393 bp, Homo sapiens
ctcccacctcagtctccctagtaggtggaactacaggcatgtaccaccacacctggctatttttttttttagagacagggtcttgctatgttgcccaggctggtctttaattcctgggctcgagagagccactcatccccatctctcagagtgttgggattacagccatgagccaccatgcccggccaaacttcagccttgaatattagtgattttgccatattagtttaccatctgtacaattatttgctttatatttttctttaaattggctcattattcacttaatgaaattattgcaacaggaatcttttgtatcacttctgtaaatggaaaaccagtctcatttgccatcaatagaaggtaaaacatgaaaataaatacaatgtaaac

SEQ ID NO: 12752 - DNA, 309 bp, Homo sapiens
agaaatctaaaactgaccatggctatataatactaatttttgagttatgttgtttcttactatgctttattatcaaaaaaggataaaatgcacattttacttgaagattattttagctaagattaagttcatatttttctcatttttatttaagctgctgtttaataaatgaaaatctaatgacttgaatgtagtcgacctaatgtcttaatgttgatataatcatttcatatatcatagtgcccttttacagccattgtcaactgactggagagcaacccttttctttggtaatatatttctatgggt

SEQ ID NO: 12753 - DNA, 603 bp, Homo sapiens
gcatcccacctcccggggggttcatcggcagcgcaggggctttgccaagacaggagtgctcctggaagcttcacgttttgagaaagaatccgtgaccaccaagcaaaccaccctatacctaacggtggaacagtttgtccccacatttgcgagacgtgtttatgtgtctgttgaaccgtgtccgtggctcaggggacatgggcctcggcggtgaggcgcaagagggcaggggccgcctccaggctgcgcgcggcggggcgagagcccccagccgcccccgagctccgcacctgtgcaggctggggctgcgcgcgagatgctcggctcccggccctgccactccgggctttttgatgatttgatgttttagaaaacgattatgagagcttacgtgtattaaatgttgaaagaaatggaaatattatttatacctataaggatgataagggaaatgtcgtctttggattatatgattgtcaaaccagacaaaatgagcttctatatacctttgagaaagacttggcaagttttcagttgctctgtcaacagtgaaagggctttgcttgctgcaagtttagttcagtctactaaagaaggaaaaag

SEQ ID NO: 12754 - DNA, 391 bp, Homo sapiens
ttctccttccttaaaggttactactgtttgtacttctaataaaagagattcgttttgcctgtttttaagttttatataatagaattattagtatatatttatatttggcttccttcactaatatattggttagatatgtttttaaccatcttctgctgagtattaacctcctattatcatttcagatgttttagaaaacgattatgagagcttacgtgtattaaatgttgaaagaaatggaaatattatttatacctataaggtatgtctatattcttttttattgtggtaagatgtaaaatttactgtttttaatcatttatattctctttttacagaattctatactgtatcttattgaagggtaatgaataaacttgttggcatttaa

SEQ ID NO: 12755 - DNA, 413 bp, Homo sapiens
gcatcccacctcccggggggttcatcggcagcgcaggggctttgccaagacaggagtgctcctggaagcttcacgttttgagaaagaatccgtgaccaccaagcaaaccaccctatacctaacggtggaacagtttgtccccacatttgcgagacgtgtttatgtgtctgttgaaccgtgtccgtggctcaggggacatgggcctcggcggtgaggcgcaagagggcaggggccgcctccaggctgcgcgcggcggggcgagagcccccagccgcccccgagctccgcacctgtgcaggctggggctgcgcgcgagatgctcggctcccggccctgccactccgggctttttgatgatttggtaagggagtgaaagtgacttttgagccttcccagcactgatctgttttaaa

SEQ ID NO: 12756 - DNA, 371 bp, Homo sapiens
cctgaactgctccagaggacccagctctctcaagccaagtggtttccacactttgctgcacagtggaggcacttgtagaataaagaaaataggccgaccctccaggtttggaagccactgggctagcggcctcgccaaggccctgaagcgcccacgtctttgcgccctctatcctcagccccgaagatgttttagaaaacgattatgagagcttacgtgtattaaatgttgaaagaaatggaaatattatttatacctataagcttctatatacctttgagaaagacttggcaagttttcagttgctctgtcaacagtgaaagggctttgcttgctgcaagtttagttcagtctactaaagaaggaaaaag

SEQ ID NO: 12757 - DNA, 1663 bp, Homo sapiens
atgcttaaattctagggaagctgtatccacagccctctgcattgcagccatgagagctctcacgctttcaacccttccataacctaatttagtcatttgggcctctcaaaaggaaatgcttttgtttaaataggtcagtcagttactgggagaaaaaatacagagccagtaggtttttagggatttgttttgcctttgctgctagttttttgaaaatattcttcgattatcaagattttaaaaatcggtttttaatataaagcttttttaaaaacgaggctggcacaagtgcagtggtgtttctttactcccactgcttgacttgactagccttgaaaaaataacagtaaaataaaatattaaaaaataattagaaaatgctacaaaggcaatgaccttattccattgagtaagatagttaaaaatgatagtaattgtagtgaaatagttaattacttgtaagttttattactgttaattgtagagattataaattggctcattaggtttctgaatggtgacacaataatgactgagaagagcaaaagtcagtcctcgttaactaatgtagtatgcaaattaaaatattttaatgatcagtaattttccccccagaaatgatgttggtatttctaagtaaatttcccataattttagcatagtttatgaaattgaataaaaatttattttcactgaagtaattttcttctaatatgatattattattgagattggatgcaaatctcatgaatatgttttagaagaaaattaatgaaattccctcccaggcagtatgtaccagaaggaaaactgaatttagcagtaaaacagtcctggtcattctaactacctgtatgatcttgaacaaagtcacttagtttccctgggccttggtgtctttcgtctataaaatattgtaccagattatctctgaaatcacttcaaggtttaatatatataattatcaatattttaaaattcaagcaatattcactttagaaattattataacattctataatagtaaaggttgaatttattaatataataaacacgttcaacttcttcaagcagataattgatatttggttcatattcttacaacctaatgcatgtcattttcaccaaatgcaggcagaatttatatttaggtttgcatctggaactagattatctggcactttatggccattatttttgggttgatggaccttctcaccacacaatttcccccttttttttttttgcatatcatatgttggttgatatttctcagaggtatccctatttcttcatacttaatatacatctccatttacatctttgactctctgaggtcaaaacaacaataaatgagaagtaaaacaactatatgtgtttgtatttacaactgtatctaaaattatataaccctagtttaccttcagagtaaactaggctgaagagttgttaataatgttgataaaaatgccattgaatcctttcttcaacaaatatttattgagtacctaacgtggcaaacgctgtgctaagtactggggatacagagataagtaagacacatttgcctccctgaaggacttcacagtgtagttggtaggagaaacaccagagcatacaccgttatataattagtgcagtaattgacatgaacatgagttta

SEQ ID NO: 12758 - DNA, 1362 bp, Homo sapiens
atgcttaaattctagggaagctgtatccacagccctctgcattgcagccatgagagctctcacgctttcaacccttccataacctaatttagtcatttgggcctctcaaaaggaaatgcttttgtttaaataggtcagtcagttactgggagaaaaaatacagagccagtaggtttttagggatttgttttgcctttgctgctagttttttgaaaatattcttcgattatcaagattttaaaaatcggtttttaatataaagcttttttaaaaacgaggctggcacaagtgcagtggtgtttctttactcccactgcttgacttgactagccttgaaaaaataacagtaaaataaaatattaaaaaataattagaaaatgctacaaaggcaatgaccttattccattgagtaagatagttaaaaatgatagtaattgtagtgaaatagttaattacttgtaagttttattactgttaattgtagagattataaattggctcattaggtttctgaatggtgacacaataatgactgagaagagcaaaagtcagtcctcgttaactaatgtagtatgcaaattaaaatattttaatgatcagtaattttccccccagaaatgatgttggtatttctaagtaaatttcccataattttagcatagtttatgaaattgaataaaaatttattttcactgaagtaattttcttctaatatgatattattattgagattggatgcaaatctcatgaatatgttttagaagaaaattaatgaaattccctcccaggcagtatgtaccagaaggaaaactgaatttagcagtaaaacagtcctggtcattctaactacctgtatgatcttgaacaaagtcacttagtttccctgggccttggtgtctttcgtctataaaatattgtaccagattatctctgaaatcacttcaaggtttaatatatataattatcaatattttaaaattcaagcaatattcactttagaaattattataacattctataatagtaaaggttgaatttattaatataataaacacgttcaacttcttcaagcagataattgatatttggttcatattcttacaacctaatgcatgtcattttcaccaaatgcaggcagaatttatatttaggtttgcatctggaactagattatctggcactttatggccattatttttgggttgatggaccttctcaccacacaatttcccccttttttttttttgcatatcatatgttggttgatatttctcagaggtatccctatttcttcatacttaatatacatctccatttacatctttgactctctgaggtcaaaacaacaataaatgagaagta

SEQ ID NO: 12759 - DNA, 226 bp, Homo sapiens
tttagaatagtcttgatttcagataatttcaaatctaaagctcaaacaatttcattctaaaatgtaggtattttcttacagttagagaagtgaaatgttatattttttcgttgcatgcatccggcacataagttgtagtcttgaatttccataatgctcctgtgaggtggatatgagctcagccttacagacaggaagacagcctctgaccctccttacatcctca

SEQ ID NO: 12760 - DNA, 991 bp, Homo sapiens
gttggatgagcccaaactgcttggagtttctctcagtaagaggcactgggggaaaaaaggactgaattttccctttctctgaagcttaaactgtgccagggtgaatggatgttgcagcatgcaatttttgtttttatataaagtttagcctaatcaaaatagttgcatattattttcttagtagtcattgtaggaaacaccaattttttcttttctctctctttttctttctttctttctttctttttttttttaagaaagggggtgatctgtctagcttgtggactctctcaatattcaccctgtctctgaaaatcaccctcccacctccttgaattctggtgaaggcagtcccacaagtttgtgttccaccggttgaatagccctgttaggaagacatccattttcccccacaagttcccataaaagccgtggggctgacccttactggactcaacttggggcatggccccatccttgacctaagtatggcccgtggggctgtgctgaaggtggttccttagaataaatactgggcaggcaaaaacaatataggtgctgactgggcctagggtattctaggatattctatgtcttactactcagggtatcatgctctggtcagcagcatcaccattacctggaagcttgttggaaatgcagactcatagactcttaggccccactgtgggatctcatggatcagaatctgttcttaacatattcctatgcacattggaatttgagatgtgtgcagtgctggagcaagtcagggaactctggcccatatccatctctttttcatggcatatccctgtatacacactgggcacctccatctcccaccagggctcacacctttgaaaccctaaagcagtgtgtgtcaagagaggccccaccatgatgaattgcttttagatgttcctatagtttcctttaagaccaggaatcagcatttcctttgttagctaggtaaaaataatgaattgga

SEQ ID NO: 12761 - DNA, 1018 bp, Homo sapiens
gttggatgagcccaaactgcttggagtttctctcagtaagaggcactgggggaaaaaaggactgaattttccctttctctgaagcttaaactgtgccagggtgaatggatgttgcagcatgcaatttttgtttttatataaagtttagcctaatcaaaatagttgcatattattttcttagtagtcattgtaggaaacaccaattttttcttttctctctctttttctttctttctttctttctttttttttttaagaaagggggtgatctgtctagcttgtggactctctcaatattcaccctgtctctgaaaatcaccctcccacctccttgaattctggtgaaggcagtcccacaagtttgtgttccaccggttgaatagccctgttaggaagacatccattttcccccacaagttcccataaaagccgtggggctgacccttactggactcaacttggggcatggccccatccttgacctaagtatggcccgtggggctgtgctgaaggtggttccttagaataaatactgggcaggcaaaaacaatataggtgctgactgggcctagggtattctaggatattctatgtcttactactcagggtatcatgctctggtcagcagcatcaccattacctggaagcttgttggaaatgcagactcatagactcttaggccccactgtgggatctcatggatcagaatctgttcttaacatattcctatgcacattggaatttgagatgtgtgcagtgctggagcaagtcagggaactctggcccatatccatctctttgtgtgggcggacatatgctaagatccatgattatcgagatcgaagtgctgtattgatgactacataggatattcatattagcagtgaattttgttttggacatagtcctatgcacatggggctaagtgagtgcttctcccttcctgtaagtcagggtaatgatgtactagaactcaatttctgatacatggacattatcctgtatacagcacttggta

SEQ ID NO: 12762 - DNA, 393 bp, Homo sapiens
gcgacacgcaggatggccaggcccggagcagctgcagccccggcgccgaacgccgcggcgacttccatcgtcagagaagtcattcagaattcaaaagaagttctaagtttattgcaagaaaaaaaccctgccttcaagccggttcttgcaattatccaggcaggtgacgacaacttgatgcaggaaatcaaccagaatttggctgaggaggctggtctgaacatcactcacatttgcctccctccagatagcagtgaagccgagattatagatgaaatcttaaagatcaatgaagataccagagtacatggccttgcccttcagatctctgagaacttgtttagcaacaaagtcctcaatgccttgaaaccagaaaaagatgtggatgggtaa

SEQ ID NO: 12763 - DNA, 434 bp, Homo sapiens
aaatctgaaaaggagctaatatttgatgattggccctaatggaggattgggttttgaccagcaatagtagagggaaaaatacaagatttctaggtggagggaacagcgtgaataaacacagaagcaaacaataaataaagaccctcggccgggtgtggtggctcacgcctgtaatcctagcactttgggaggctaaggcgggtggatcacgaggtcaggagatcaagaccatcctggctaacacggtgaaaccccgtctctactaaaaatacaaaaaaattagccgggcatgatggcaggcatctgtagtcccagctactcaggaggctgaggcaggagaatggcgtgaactggggaggcagaggttgcagtgagccgaaatcgcctcactgcattccagcctaggcgacagagtgaaactctgtctgaaaaaa

SEQ ID NO: 12764 - DNA, 527 bp, Homo sapiens
tgtctctactaaaaatacaaaaattagctgggcatggtggcacatgcctgtaatcccagctacttgggaggctgaggctggaaaattgcccgggaggcagaggtttcagtaagccaagattgtgccactggactccagcctgggcaacaaagcaagactccgtctcaaaaaaaaaaaaaaagtagttctttatttaccatgcgatctttccagtacacttgctaattgctactccagagcatagccagatgtggcccacacctgtaattccagcactttgaggaggacaagatgagcaaattgtttgagtccacgagttggagaccaccctgggcaacatggtaaaacctcatctctacaaaaaaataccaaaaaaattaacccggcgtggtattgggtgcctgtaatcccagctattcaggaagccaagttgggaagattgcttgagcccaggaagttgaggctgtagtgagttgtgatggtgccattgcaccagcccgggtgatagagcaagacctctgtctcga

SEQ ID NO: 12765 - DNA, 384 bp, Homo sapiens
tttagttattaatgcctttatatttttatcaagtaataatagtttatatttattctcataataagtactggtccttatttactattgaacacttacatggcaggcatattttaagcaatttacatgagtttacttatttagtcttcaaagcaaccctatgaggtgcatactattttcctccctattttaaagataggaaaattgagagattaagtattttgcctctatttacaaggttagtgaaagattagagccaagactcaagtcgaagcagtacaattccaaatcctgcacagttcgccttctgtttccatgagttctgtgtccatagattcaaacaaccttagaatgaaaatattcaggaaaaaagtaacacaacaataa

SEQ ID NO: 12766 - DNA, 597 bp, Homo sapiens
tgagtaattagcgattgctgtgtgttttcatattttcagaatagggatataacctcactgaagatgacataattagtacttgacaaagctaaaagtcctgtcagtatatttatacctatgcgtaagtatgctctctgagtcattctgctaattcccactgtaaaatacgtatacccttttattttattagaattaaagggctttgaggagatttttcattttaaaggtacaagacaagttttaacgtcaacatagcccactcactgttctatatttatgtgagaccttttaagaaccagggataaatgagctctaatttgtctgtgagggtctttccccgtctatctttaaaacttaacgtgttcctataggagtaactatataatatttgacaactgttatcccaccgtccacttgggaagcacacaagtaataaaagtaaatcaaattatgacactgtgtttagcatgacatcttaatttgaactatgagaaaccattattggaccaatgttggatttttactaaagacttgtagttgtcctagcacgtattaggagatgccaaatgaataagcctaggagtgattgtcatgggg

SEQ ID NO: 12767 - DNA, 1910 bp, Homo sapiens
gtgaactgtcacccttacaactcagcttgcaaccagccctggccaccaccagtttccccacactgagctgaatattggacatgcccatcttagacattccagcccattctgaaattccacatcgattcacccgacaaagtctgaagttccagggcaatttatctggaaaagctcacctggaatcatgtgtcatttcaaccaacaactgtcgaagaggacgtggcatcaaaaccaaggttatcaattatttataagggttgtgtggtggttggtccaagcatctctccttcatgccatcactcctttcaagagctgcctctattttctaatttagcacaggaatttagatgcccctaaataagtaggcatccagtatctgcccacaccagttttagtgagagtacatatggagacactaccaccacccctgctctcctactgcataccccaccatgccaaagcatggtggctcacacctgtaatcccagtgctttgggaggccaaagaggaggaacacttgaggccagaagtatgagaccagcctgggcaacatagtgagacctcatttctataaataagttaaaaaaacaaaaaaatagggcatagtggtgcacatgtgtggtcccagttactcagcaggctgaggctggaagatcacttgagcccaggagtttgaggctgcagtgagctaggattatgccactgcactctagcctgggcaacagagagagaccccatctctaaaaagagggagaagaaggaaggaggaggaagaagaggaagaggaggaggagaaatactgctctttctcaggcccaaggtaaaaaggtttttggtctcatgttgaccagaaagacattgatatttaattaagcaatataaaaaggctcattgttaggattaaagagtaagtaaaatcaatattgagataggaggatggaggacaccaactgagttccgatcccaatgaagaggagaaaaagctacaactatctaggtgaaatatctacttatcctagaagaagccttttgacagcaacataaaattcatacctataggtttttaattcctatggatgccgtagcaaataacaaaaacttggatggtgtaaagtaacagatgtttactcttttccagtattggagaccaggaatctgagatcaaggtgtgggcaggggtgcgctccccctggaggttctaggagaggatccttcctgcctcttccagctcctggtggctccaggtgtccctgggcttgtggccacatcactacattctctgcctccatctccacgtgaccttttcctctgtgtctgtgtctcctcttctgtctcttagaaggacactggtcattggatttaaaggccacctgggtaatttatagtgatctaatctcaagaatctttccttaattacatgcaaatactctttatccaaattagtttgcattcacaaattctggagcttagtacttggacatatattttggggggttgatggttggaggggcttttattcaactcagtacatcttaataaggaattaatgccccccaacttgccttacaagtcatatattaaaaacaatgttggcctggcacagtggctcatgcccgtaatctcaacactttgggaagccaagggaggaggatcacttgagcccaggagttggagaccagcctggataacaaagggagacccagtttctacaaaatatttaaaaattagccaggcatgatggtgcatgcctgtggtcctagctattcaggaaactgaggtgggaggatcacttgagcctggaagttcaagacagcagtgagctatgctcacaccactgcactccatcctgggcaacagagctggactctgtctcaaaaaacataacactaaaacatcaaaattaaaaaaaa

SEQ ID NO: 12768 - DNA, 916 bp, Homo sapiens
aatataaatgacttacatagcattttagatcagtggatgtttttgtgattcttttatttgagctttgcccaaagataacagtacccacaggttttttccgagctacctcgcatcttctcccatcagtggccctcgagcctggaaaatctgacatgacaatgtgcttgctcaacctaccaccgtttttcttttgaaaagtttggcagcctgtttctgactcctatgaaggtgaattcctcagcattcacagtttattagaaaaatactttgcttctctccaaactcgaaattcaagataaccaaacctatatataggctgatctttcaggatgcagttgtcatgttgatgccatgcttttcagtatcgtggccatcatctgttcagtaggggaggtgtacttctgtaatgggaggtggtggttatgtgtgtgtgcaagtgtttatttggtgtcttaagttagcctgtgggaagttctaaatcaggatggtacgtggttgccagcagagagctgctcctcaagtgaaggaggtagaatcaaagccaataggaaagagcctcagatgcttatatatgtaccgtggggattcagagtgaaagcagtcattggactaggggtggggttagggagagcctgtctgacagacacaagaaagggatggataacgccacccagagaaaaaagcattttaggcaagaacaaatatgaaaaaggaacaaagtctgtgggtggggggcaaggaggagataagttgacttgaaggaagacaacacttatgaaagtcacctggaggctgggtgccatggctcatgcctataatcgcagcactttgggaggccgaggtaggaggacaacttgagcccaggagttcgagaccatcctgggcaacatggtgagactgagtctctaccaaaaaa

SEQ ID NO: 12769 - DNA, 827 bp, Homo sapiens
  misc_feature (21)..(21): n is a, c, g, or t
tgaatccgactcactataggncgaaatgggtaaggggcccccctcgagcctggaaaatctgacatgacaatgtgcttgctcaacctaccaccgtttttcttttgaaaagtttggcagcctgtttctgactcctatgaaggtgaattcctcagcattcacagtttattagaaaaatactttgcttctctccaaactcgaaattcaagataaccaaacctatatataggctgatctttcaggatgcagttgtcatgttgatgccatgcttttcagtatcgtggccatcatctgttcagtaggggaggtgtacttctgtaatgggaggtggtggttatgtgtgtgtgcaagtgtttatttggtgtcttaagttagcctgtgggaagttctaaatcaggatggtacgtggttgccagcagagagctgctcctcaagtgaaggaggtagaatcaaagccaataggaaagagcctcagatgcttatatatgtaccgtggggattcagagtgaaagcagtcattggactaggggtggggttagggagagcctgtctgacagacacaagaaagggatggataacgccacccagagaaaaaagcattttaggcaagaacaaatatgaaaaaggaacaaagtctgtgggtggggggcaaggaggagataagttgacttgaaggaagacaacacttatgaaagtcacctggaggctgggtgccatggctcatgcctataatcgcagcactttgggaggccgaggtaggaggacaacttgagcccaggagttcgagaccatcctgggcaacatggtgagactgagtctctaccaaaaaa

SEQ ID NO: 12770 - DNA, 494 bp, Homo sapiens
ctacaaacagtgagattggttattactcatgatattaaaacagaatttcagaatctagaatatctgaggtcccactgctttagagggagtacatttatgattcactgctgttcaatatttaccaaaactttggattagaaaaataatatttatgtctggatcataaataagagaaaatgtctgggtcttagatcagaggaaatttatttttactttatgtttgaaataggttctaggaactctaaattatggctcacacttgtgatctcagccctttgggaggccggggcgggtggatcacctgaggtcaggagttcaacagcagcctggccagcgtggtgaaaccctgtctctactaagaatacaaagttggccaggcgtggtggcgggcgcctgtagttccagcttcctggggggctgaggcaggagaatggcatgaagccgggaggcagaggttgcaggttgcagtgagatcacacctctgcacacctacc

SEQ ID NO: 12771 - DNA, 548 bp, Homo sapiens
ctacaaacagtgagattggttattactcatgatattaaaacagaatttcagaatctagaatatctgaggtcccactgctttagagggagtacatttatgattcactgctgttcaatatttaccaaaactttggattagaaaaataatatttatgtctggatcataaataagagaaaatgtctgggtcttagatcagaggaaatttatttttactttatgtttgaaataggttctaggaactctaaattataaaacataattccataaacataccattgttaaacaagtctaggctgggtgtggtggctcacacttgtgatctcagccctttgggaggccggggcgggtggatcacctgaggtcaggagttcaacagcagcctggccagcgtggtgaaaccctgtctctactaagaatacaaagttggccaggcgtggtggcgggcgcctgtagttccagcttcctggggggctgaggcaggagaatggcatgaagccgggaggcagaggttgcaggttgcagtgagatcacacctctgcacacctacc

SEQ ID NO: 12772 - DNA, 688 bp, Homo sapiens
aaaaaagaaaaaaacaaaggattcaaaaggattcagctgttttgtattcagctgaggtaagtggcggcatggagcatggagcgattatttacatttaaaagaaaagaattgaaagtaagcacctgtatctctatttttattctgtgggtcttccacaaacgctttcgtcttatttcagaaaacagcttctgtgttcagtcacaggagccatcggcaaagaatggaagtggaaatgctacctccagggtcttggtgagagaaagtacagctttacctgataggtgatttcccttggaatccatcagaactcgacaaagcatgattttctgagcctagtaaaatggttctgaatcaaaaccgaagtcacgctgtgctgccgatccctgtttgactctcaaaaccaaaatctgtatcaggaaaggaataatcatttagcagactgagtccaaaatgctcatttttggtttcctgtgaaaatggatttctttttgtcgctttcctttttttttttttttttttgtgagatggagtctcactctattgcccaggctggagtgcagtggtgcaattttgactcactgcaaccaccgcctcccaggttcaagcgattctcctgcttcccaatcccaagctgctgggattacaggcatgcgccaccatgctcggctaattttttgtattttcagta

SEQ ID NO: 12773 - DNA, 426 bp, Homo sapiens
ggtgtttggatactaagtaaccaaaaccaaaaatgccagttacactcaaggatgtttcttgagcactagctttgataggtccctggccaagtgctctacaaatactatttcctttaatcattaaaacaaacctgtaagttggaaactattattatccccatcttatagacaaggaagttgaagatgcctttggtcacacagctagtgtgtacgggatggagctgagatttggccctagctccatctcactccagagtgagatgcttatccactatgctccagagggatcaagaatggccaaaaataggccaggcatggtggctcacacctgtgatcccaatgctttgggaggccaaggtgggaggattgtttgaggccaggagatcaagacgagcctgggcaacatatcaagatcctgtctctaca

SEQ ID NO: 12774 - DNA, 559 bp, Homo sapiens
gcggccgctccaacatcagaatggtaacaccacatgcccagtgtgagggacaaagaaaggggcgtccattacggcaaagaaaggccaagcctggatgggctctcacacacacacacgccgggaagagcatgcctggatgggctctctcacactgggcatgtggtgtttccatccaaaatcaggacagggcgtctgtctgtggcatcagtgtccccaggcctggctgagggctcctgctcgtgactggccagctttctccattatattctatggtgtgctggtcactgtcaaccagctgtcccaggcatccggtcctgggccccggccgtggcgattcccaggtgtgaatgtgaacgctctgcacggcagcagagagtcccttgcctgcctcgtcctctcagctgcagcccctgcggcagactgggcttgactcttcttgggacgctcagcagggaggagcctgagcctgcagggtttccataagcgtgtgtggactgaaatgtggatggatggacagtcagacagacggaaaggtctgagtagtgacctttccacctcg

SEQ ID NO: 12775 - DNA, 780 bp, Homo sapiens
tgtgtgtgtgagagcccatccaggcatgctcttcccggcgtgtgtgtgtgtgtgtgagagcccatccaggcatgctcttcccggcgtgtgtgtgtgtgtgagagcccatccaggcatgctcttcccggcatgtgtgtgtgtgagcccatccaggcatgctcttcccggcgtgtgtgtgagcccatccaggcatgctcttcccggcgtgtgtgtgtgtgtgtgagcccatccaggcatgctcttcccggcgtgtgtgtgtgtgtgtgagagagcccatccaggcatgctcttcccggcgtgtgtgtgtgtgagagcccatccaggcttggcctttctttgccgtaatggacgcccctttctttgtccctcacactgggcatgtggtgtttccatccaaaatcaggacagggcgtctgtctgtggcatcagtgtccccaggcctggctgagggctcctgctcgtgactggccagctttctccattatattctatggtgtgctggtcactgtcaaccagctgtcccaggcatccggtcctgggccccggccgtggcgattcccaggtgtgaatgtgaacgctctgcacggcagcagagagtcccttgcctgcctcgtcctctcagctgcagcccctgcggcagactgggcttgactcttcttgggacgctcagcagggaggagcctgagcctgcagggtttccataagcgtgtgtggactgaaatgtggatggatggacagtcagacagacggaaaggtctgagtagtgacctttccacctcg

SEQ ID NO: 12776 - DNA, 382 bp, Homo sapiens
tcgatttcccaaagtactgggattacaggcgtgagccaccacaccgggctctgaggccactttttcatccatattcttctctgtgcctctgcatgtgtgttccccatccctttggtaacttctattttttatttcaggagtgggttaaagtttccgattttttttttccttatactctctcagttcagtctggaccaacttggagaagagcggcggctttccctccctttttctgtggccgccttcagacgctggcccatgggagagtcagggctgtcccccgtgttggagctattaaactgtcgtaagaaaggggcctttgtcacgggaaacacgttactcagctcagtcatagagacagactgtgccagaaaacaaacaa

SEQ ID NO: 12777 - DNA, 1256 bp, Homo sapiens
attgttcaggtgaggacatgtgtccaggatgagtggggagtgggtggcaattgcagggcctgaagtcaggtgcatccaccttttccctgagactgatctgtggacagtggtgcacgtccccagtcctcgcccttgggaaggtcacagggctggccgggtccctgtgtgaagtttcatccagcacccaggccagggccccactcagtgcctgtgattttcatgtgagcttaggtccttccctgcttgccttgagggcgggtaatcaggggcacactcgcttggcacttcctggcccatcacgtgacgttgacaagcagcctgcaggaaatggaagccgatgactccagtgacattcaaaaatagctgcaaggtcccttatcccctgcagtcgccacctgtcgggacaaatctgaaatgtgatcagggctccaggaagcggggaccgagatgatgtgggcagagccttggggcctggcaagctccgaggtatttgacagtttcagcccccacatgcgcagagctgcctctggctgcactcagcatcttaatgagcaatgacacatttgtcatctctgacttgacagaactttcctcttggctcagtgtttcccaatgttctcaggtggcaccttcaacactcagaaattaaaattcatcctgggcatgggtcaccactacctctttcccctcgcaaacattctcccatgtgtcaatcaggaagcaggtgtgtccagaatgcatggagaagctgtgtggtgtgagctgcatgcacagtgtagttaggagtgggtgcagggtctcactctgccaccagctagcggccaagtgccctccattacccaagcctccagagtggcctggtgggcacgcccttacagcatcgctgtggggtgcatttagctgctgtgcaccagcctgaggggcaggccacgcttcgagggctccagagatggtagctggatgcccatcccctgggaaatcgagtggaagagcaattgatttccccactgccattttatgtctctgtttaaaatgtgcaagatggttcttttaaaggaggaaaaaagagaaaaagcccttccctgcattgccctgtgttgccctgcgtggggctccgcagtcggtgcactatggaatttcttcacattgtgaaggacctgcccactcctgacagcagtaactacagtaggagtttcaggttggagccttaaattgggttctcaaagaaagctgtcattactctctgtaatttttca

SEQ ID NO: 12778 - DNA, 675 bp, Homo sapiens
gagtggaggctggagttttctcggacagtgaactctaccgccccagggtcaccatgaagttcaatcccttcgttacctcggaccgcagtaaaaaccgcaaacgtcacttcaatgccccctcacacgtgcgcaggaagatcatgtcatccccgctctccaaggagctgcggcagaagtacaatgtccgctccatgcccatccgcaaggacgacgaggtccaggtagttcgaggacactacaaaggtcagcaaattggcaaggtagtccaggtgtacagaaagaaatatgtcatctacatcgagcgggtgcagcgtgagaaggccaacggcacaactgtccacgtgggcattcacccaagcaaggtggttatcaccaggctaaaactggacaaggatcggaaaaaaattcttgaacgcaaagccaagtctcgacaagttggaaaagagaaaggcaaatataaagaagaacttattgagaaaatgcaggaataaatagaacctgttgtgcaaccacggtttaaccggagattttgaggctagggtgtgtttctttcgaacttttcggaatgtctggaacatttcatttcctgttttgttacctgtgcctctgtaaatctacttttgcaattttaagtaataattttatgaataaaaatgggaaatgcttcctaattcc

SEQ ID NO: 12779 - DNA, 668 bp, Homo sapiens
cggacgcgtgggcaggtctgaggcagctagtagccggagggtcaccatgaagttcaatcccttcgttacctcggaccgcagtaaaaaccgcaaacgtcacttcaatgccccctcacacgtgcgcaggaagatcatgtcatccccgctctccaaggagctgcggcagaagtacaatgtccgctccatgcccatccgcaaggacgacgaggtccaggtagttcgaggacactacaaaggtcagcaaattggcaaggtagtccaggtgtacagaaagaaatatgtcatctacatcgagcgggtgcagcgtgagaaggccaacggcacaactgtccacgtgggcattcacccaagcaaggtggttatcaccaggctaaaactggacaaggatcggaaaaaaattcttgaacgcaaagccaagtctcgacaagttggaaaagagaaaggcaaatataaagaagaacttattgagaaaatgcaggaataaatagaacctgttgtgcaaccacggtttaaccggagattttgaggctagggtgtgtttctttcgaacttttcggaatgtctggaacatttcatttcctgttttgttacctgtgcctctgtaaatctacttttgcaattttaagtaataattttatgaataaaaatgggaaatgcttcctaattcc

SEQ ID NO: 12780 - DNA, 714 bp, Homo sapiens
cggacgcgtgggcaggtctgaggcagctagtagccggagggtcaccatgaagttcaatcccttcgttacctcggaccgcagtaaaaaccgcaaacgtcacttcaatgccccctcacacgtgcgcaggaagatcatgtcatccccgctctccaaggagctgcggcagaagtacaatgtccgctccatgcccatccgcaaggacgacgaggtccaggtagttcgaggacactacaaaggtcagcaaattggcaaggtagtccaggtgtacagaaagaaatatgtcatctacatcgagcgggtgcagcgtgagaaggccaacggcacaactgtccacgtgggcattcacccaagcaaggtggttatcaccaggctaaaactggacaaggatcggaaaaaaattcttgaacgcaaagccaagtctcgacaagttggaaaagagaaaggcaaatataaagaagaacttattgagaaaatgcaggaataaatagaacctgttgtgcaaccacggtttaaccggagattttgaggctagggtgtgtttctttcgaacttttcggaatgtctggaacatttcatttcctgttttgttacctgtgcctctgtaaatctacttttgcaattttaagtaataattttatgaataaaaatgggaaatgcttcctaattccacatagtatttgcattgttttataaataaattccacttactatcaa

SEQ ID NO: 12781 - DNA, 704 bp, Homo sapiens
ggcgaacgaaacgcggagctcgggagcgacccggcggggccaggcacgggcagaagggccaagagggccacagagggtcaccatgaagttcaatcccttcgttacctcggaccgcagtaaaaaccgcaaacgtcacttcaatgccccctcacacgtgcgcaggaagatcatgtcatccccgctctccaaggagctgcggcagaagtacaatgtccgctccatgcccatccgcaaggacgacgaggtccaggtagttcgaggacactacaaaggtcagcaaattggcaaggtagtccaggtgtacagaaagaaatatgtcatctacatcgagcgggtgcagcgtgagaaggccaacggcacaactgtccacgtgggcattcacccaagcaaggtggttatcaccaggctaaaactggacaaggatcggaaaaaaattcttgaacgcaaagccaagtctcgacaagttggaaaagagaaaggcaaatataaagaagaacttattgagaaaatgcaggaataaatagaacctgttgtgcaaccacggtttaaccggagattttgaggctagggtgtgtttctttcgaacttttcggaatgtctggaacatttcatttcctgttttgttacctgtgcctctgtaaatctacttttgcaattttaagtaataattttatgaataaaaatgggaaatgcttcctaattcc

SEQ ID NO: 12782 - DNA, 746 bp, Homo sapiens
cacgccgccggccgccgtttagtcccagagatagaaaaaagtagaggtaggagggcgcggcggctcacgcctgtaatcccagcactttggaaggccgaggcgggcggatcacgagagggtcaccatgaagttcaatcccttcgttacctcggaccgcagtaaaaaccgcaaacgtcacttcaatgccccctcacacgtgcgcaggaagatcatgtcatccccgctctccaaggagctgcggcagaagtacaatgtccgctccatgcccatccgcaaggacgacgaggtccaggtagttcgaggacactacaaaggtcagcaaattggcaaggtagtccaggtgtacagaaagaaatatgtcatctacatcgagcgggtgcagcgtgagaaggccaacggcacaactgtccacgtgggcattcacccaagcaaggtggttatcaccaggctaaaactggacaaggatcggaaaaaaattcttgaacgcaaagccaagtctcgacaagttggaaaagagaaaggcaaatataaagaagaacttattgagaaaatgcaggaataaatagaacctgttgtgcaaccacggtttaaccggagattttgaggctagggtgtgtttctttcgaacttttcggaatgtctggaacatttcatttcctgttttgttacctgtgcctctgtaaatctacttttgcaattttaagtaataattttatgaataaaaatgggaaatgcttcctaattcc

SEQ ID NO: 12783 - DNA, 449 bp, Homo sapiens
gttttctcggacagtgaactctaccgccccgtgagaccctgccctatgtgtcgcgggaacacatgtcaccccacagctctctttgagtgacctcccgaccacccattcctgcctaaccctagcattccttcctcagcctcaaggtcccagtgctaccctctcccccacgacccctttagacgggcatgcgacctccacacacgcctcactttatgtgatagtcagactagtcgcatctctctgtcctccctcagttgccttttcagaggctacctcccctgtagagcctttgttgggggatgaggagtgtcttgggtcgagaacaggcccctgtaacccactgagcgccccttcattccgtctctctccgccctttgtagagggtcaccatgaagttcaatcccttcgttacctcggaccgcagtaaaaaccgcaaacgtcacttcaat

SEQ ID NO: 12784 - DNA, 736 bp, Homo sapiens
gcaggcttttgctgtctcctgatattgcagtttcaacatgagaggggcaggaaatagaagccccatgcgttgaaggactgctgtgcctgcacttatctctggccagggagtccttggacactgttttctttggcagccagctggtctaggtcacttgaattcctttgaagttcagggatacagggagcggtagccactgcctgcattccttactcaggaggcaggcatggggtctgccattgcttacctgccagagaaccaggccttcattagaaaggtcatttttatgtgactatgactgaatagtccagccttttccccttaagtgggattttgtgctgattcagcagtaaagaataagcccataccccccatttttgttgccattgctcacatttgaatttataggtggagaattggtgaagaaaacgtgatgtagatgcccatcccaaaaggagcaagatctgctcttgcagtgggtgttgagaggggctgggaggctttttcagtcaaatatggagctgaaaactgtcagaatgtgctggttgtacattatcaataagaatcctaacaggagcacagtgtgatttctcttcgtagtgggcgtacatggtccttgggtttccatgtgcagcagtgagagttggtctccaaagcagaacggtcagcattaacttcagccaagcaagcattctgtatggggtgctccctttaagcccaagggaaagcaggctct

SEQ ID NO: 12785 - DNA, 737 bp, Homo sapiens
gcaggcttttgctgtctcctgatattgcagtttcaacatgagaggggcaggaaatagaagccccatgcgttgaaggactgctgtgcctgcacttatctctggccagggagtccttggacactgttttctttggcagccagctggtctaggtcacttgaattcctttgaagttcagggatacagggagcggtagccactgcctgcattccttactcaggaggcaggcatggggtctgccattgcttacctgccagagaaccaggccttcattagaaaggtcatttttatgtgactatgactgaatagtccagccttttccccttaagtgggattttgtgctgattcagcagtaaagaataagcccataccccccatttttgttgccattgctcacatttgaatttataggtggagaattggtgaagaaaaaaaaacctttgatctttggtacaaatacagctgtggggctgttgcccacatttgccgtgatgtagatgcccatcccaaaaggagcaagatctgctcttgcagtgggtgttgagaggggctgggaggctttttcagtcaaatatggagctgaaaatgtgatttctcttcgtagtgggcgtacatggtccttgggtttccatgtgcagcagtgagagttggtctccaaagcagaacggtcagcattaacttcagccaagcaagcattctgtatggggtgctccctttaagcccaagggaaagcaggctct

SEQ ID NO: 12786 - DNA, 791 bp, Homo sapiens
gcaggcttttgctgtctcctgatattgcagtttcaacatgagaggggcaggaaatagaagccccatgcgttgaaggactgctgtgcctgcacttatctctggccagggagtccttggacactgttttctttggcagccagctggtctaggtcacttgaattcctttgaagttcagggatacagggagcggtagccactgcctgcattccttactcaggaggcaggcatggggtctgccattgcttacctgccagagaaccaggccttcattagaaaggtcatttttatgtgactatgactgaatagtccagccttttccccttaagtgggattttgtgctgattcagcagtaaagaataagcccataccccccatttttgttgccattgctcacatttgaatttataggtggagaattggtgaagaaaaaaaaacctttgatctttggtacaaatacagctgtggggctgttgcccacatttgccgtgatgtagatgcccatcccaaaaggagcaagatctgctcttgcagtgggtgttgagaggggctgggaggctttttcagtcaaatatggagctgaaaactgtcagaatgtgctggttgtacattatcaataagaatcctaacaggagcacagtgtgatttctcttcgtagtgggcgtacatggtccttgggtttccatgtgcagcagtgagagttggtctccaaagcagaacggtcagcattaacttcagccaagcaagcattctgtatggggtgctccctttaagcccaagggaaagcaggctct

SEQ ID NO: 12787 - DNA, 193 bp, Homo sapiens
cgcccggacagggactagagttacagcagtgatgactgtggccttgcagtgacccttcatcactcacaaacaaaatctgcctgcactagacgactatgtactggcttagagactaacggtcataattcctattccaagtgtgcagttcatcacggtgcatggaagacaggcatctatctctattcctccccca

SEQ ID NO: 12788 - DNA, 239 bp, Homo sapiens
gcctttaacggcagagatggggttatttttggccctgtctacctcctagttatcaataggctaatcattaattgctaattgaggaatgttagggagattatcgtctcactgttggcataaagaacaaaagagaaatttgattcaactgagattctaaagtgtttgaaagtgatctggaataaagggcacataagatgtggcccctgccttcaaggaaatcgtcgtctagcaaaagaaaa

SEQ ID NO: 12789 - DNA, 1107 bp, Homo sapiens
gggcctggcacccgcgggcggccccagcctcagtctccagctacctttgcctcctgcggccgcccccaggcagagctgcgatcccaccgccgggggtgcagggagagggaagatctggcctccttggtccttttgcgtgggctcttcagagcgtgagcgccggggagggactccggagaaaagcttggggggctgcgtattgctgctccccaagctgggcgtcaggaccaaccccgccgcccccacgggcctgacgggagaggaggaagggctcgggacggtcggctcgccgagccaaccaggtggcgcctgaagagctgtccatggtgtcgacagcccagcaaacggcaccgagttcctagtctgagtgtctggataggtagcagaagaaaaactaatgcctgctctgggacagttctgttcggtgccttttcttgtgtgttctggagctcacagggttctatcgaagagtgcttaggtgtatacgatggagagtgggacgtcacaaaccaggatctcaaggctgagtccaacaaaacatggccgtagggaggccacgacagctgtggttgtcaccgacggatgaatagcttttgccaaccgtggaatttagtaactaaaggcacctaacccttttatctcatcctcatttttcaacaaatggtgcttcctggctaatatcagcgtgtcccatagatttctgcttccattgaatagacctaataagaaagagaatgaagtcaaagccaacagggcagaaagaaattgaaaacctgaagaacccagcactcaaactgtcttccacttgcgtttgctttttctttacctcttctccttctggttttcaacagccaaagcaggatttaaatttggttatgttgcaaaaatcatttccctcttcaggccctgtcatgtgacttgattttttcgtccattttagagaagctgtacccaccctggtttcaggacacggaactaaatttattagaaaagaagccacttcaagtcatgaaggagaaacacaaagattcttggatttagttctaagaactagaggggatttctatgtcagtactgtctcagaaaaaactgttgatatcaaatgtg

SEQ ID NO: 12790 - DNA, 557 bp, Homo sapiens
gagcaaagtcagttttcaatacatgcaggtcctataatgtcccagattatcgaagctgagctgcagatttttgatctttctcatcaaaaatcctctgatctttctgacagcaaaagagaattcaaagagaagtctttcaggagattaaaacattgaggttcaagtggacagtttttcagtggtcttgcttcatccagagataagattcagagtatccagaagaaggctgaatggtctgcatgcccttaacatagctctgcttgaacaattccctcctttcatctgtggtactgcacatgaaactgtcactcactctgcttccttgctgacacttggtgttgtcagactttagacttcttgccaatctaacttctgtgaaaaccctgtcattttaatatgcatttttcagattactaatgagcttatatatcctatatttatgggttttttgtaaacaaattactatttttgaatcatttttctatattatttttaaggctcttgtatatattttggagaataattctatgtgtattatatttgttaccaactctcca

SEQ ID NO: 12791 - DNA, 414 bp, Homo sapiens
gatgtgtagatgttccttttatattctgtttactcattgttgacgattataggttgcaatacctgctcccagatttagtttatcatcttacttttaattgaattatttgatatataagaaattccaagtccaagcatggtggctaacacctgcaatcccagcactttgggaggccatggtgggaggatcacttgagtccaggagtttgagaccagctgaagcaacatattaagactctgtctctaccaaaaatacaaataagttagctgggcatggtgatgcactcctataatcccagctactcaggaggctgaggtgggaggatcacttgagctctagaggccaaggctgcagtgagccgtgatcatgcctctgcaccctagtctgggtgacagaaggagaccctgtctcaaa

SEQ ID NO: 12792 - DNA, 469 bp, Homo sapiens
ggagcccgggagaggagaggcagggttcctcttttagccagaggagcccaaagtgacaggaggacgtggccgcagcaggggttcaggggctccagcacgccgcacgccggggatgtcaccaacacccacttaggccatgggaagccatcagcttccagattctgaacacagagttttatggtacccttgacaagagcagttgtaaagaagcatttaagtaagcattttccccgggtgaggagaatcggcacagcttgaggtgtgagacactggtacttctgtgcaaaacccgccctgtggacagtgggtttgtggtatcctaaggctgggaaggcatcttcggaggttttctccttgctgcaaaaacgcctgtcactgcccagggatacatattttgacctcatccttcctatttagaaactcagggcggttcccgccccgtttgggcagccagagacctcagggttgg

SEQ ID NO: 12793 - DNA, 362 bp, Homo sapiens
ttctatttttttttctacccatcatactactgtatttaccaactataaaagctcacctgatgtgaagccctttcagacaccattcagcctttctcaactcaggtttcttatctgaactgcaacacaggaaattgtttgagtgactgtcttctcgattctccaaagatagtacataacctggatcatcctatgttcttgggaaagaaagtgatccattacatgcaatggatgctgcggggcagtaggacttaatttctcaggaaagcctggctgagaaacatgccacagtaatccagtacacctacaaattatgaacacatcaaattgttcttaccacacacacacacaattccaaaaaaaaa

SEQ ID NO: 12794 - DNA, 633 bp, Homo sapiens
cattaaaaaagaagtatgatgttcctaaacaggcttgatgctggtctgcccaaatggctataaatatgcctgactttaccttaaggattttttttccattgtgttggaggcctgaatctgtgacatttctttgcatctaaaacgcatcagctgattccctttctactcactcaaaatccaccaacactgtcatcaaactcccttatacatattccaaataatatgctgtcttacactgcaagagacatctttcctggttgtttgaaagtacctttttaaaatgtacagatgtgtttggacactcttttggtttctaaagcataacgtccactacatttgctgaggcagtgctaaacctgagcttttaaaccttttcgaagaggtttaattttctgcatcttggatctgaaaccactttgcacttgagagagaaaaaatcatttcttaaagaataaaaaacaaaaaaactccacaatccttttatgttacctatggttgagttggatctaaaacgattgattttatatactgtggggttttgttttcattgaaaatatctgagggtttttgctttatttggaaggtgctctggagtctgcagccagctccaagcagtagtggaggaggctgcca

SEQ ID NO: 12795 - DNA, 1512 bp, Homo sapiens
aaacagttgccttttcctctcacagaaggaagatttcattttgtttgagacgagaaaccaaaccacacaccaaagagaggggtatgatggctaagaagcccccaaaaccagcccctcgcaggatcttccaggaaaggttaaagattactgctctacctttgtactttgaaggttttttattaatcaagcggtcaggataccgggagtatgagcattactggacagagttgagaggaactactcttttcttttataccgacaaaaagagtataatatatgttgacaaattagacatagtagacctcacatgccttactgagcagaattcaactgaaaagaactgtgcgaaattcacccttgttttgccgaaagaggaagtacaactgaagacagagaacacagaaagtggggaagaatggagaggcttcattcttacagtaacagagctgtcagttccccaaaacgtgtcactcctacctgggcaagtaattaaactgcatgaagtcctagagagagaaaagaaaaggaggattgagacagagcagagtacgtccgtggaaaaagagaaggaaccaactgaagattatgtggatgtactgaaccctatgccagcatgtttttatacagtgtcccggaaagaggcaactgagatgctccagaagaacccttctttgggaaatatgatcctgaggcctggtagtgacagtagaaactactccatcactattcggcaggagatagacattccaagaatcaagcactacaaagtgatgagcgtaggacaaaactacactattgaactggaaaaacctgtaacactcccaaaccttttcagtgtcattgattattttgtgaaggagactcgaggaaatttaagaccatttatatgttcaactgatgaaaacactggtcaagaacccagtatggaagggagaagtgaaaagttgaagaaaaatccacacattgcatgaaatacaatgtgaaagctcctttgtatatcttggtaatttatattttcaaaacgaagttcttacttttaaagagaattacctatattctcctgatactgattaccaagtcattcacctgaacaccagaattagaattaaacattgtaccatacaatttcattatcttatcagaatgaaaccaattcacagggaaactagagactacggctgtggtggtaacctgcagatatacacattcccatgcactgacataagttgaaaacacatagtactttctagatggaatttttttctttaggcctcaatgaaatacatttcccctatataattccaacagcagtttctctagttctaaattttaccaattcccaaaaaacctaagttttgctgaaatctgatttgaccaatttatcaaatatgtcattttaattacctagctggaagttagagacatgaaatgtactagaggagcccttttccaatggaaatattatataccacattttttgttaatggaaataaatgtctccattcccatgtt

SEQ ID NO: 12796 - DNA, 1153 bp, Homo sapiens
aaacagttgccttttcctctcacagaaggaagatttcattttgtttgagacgagaaaccaaaccacacaccaaagagaggggtatgatggctaagaagcccccaaaaccagcccctcgcaggatcttccaggaaaggttaaagattactgctctacctttgtactttgaaggttttttattaatcaagcggtcaggataccgggagtatgagcattactggacagagttgagaggaactactcttttcttttataccgacaaaaagagtataatatatgttgacaaattagacatagtagacctcacatgccttactgagcagaattcaactgaaaagaactgtgcgaaattcacccttgttttgccgaaagaggaagtacaactgaagacagagaacacagaaagtggggaagaatggagaggcttcattcttacagtaacagagctgtcagttccccaaaacgtgtcactcctacctgggcaagtaattaaactgcatgaagtcctagagagagaaaagaaaaggaggattgagacagagcagagtacgtccgtggaaaaagagaaggaaccaactgaagattatgtggatgtactgaaccctatgccagcatgtttttatacagtgtcccggaaagaggcaactgagatgctccagaagaacccttctttgggaaatatgatcctgaggcctggtagtgacagtagaaactactccatcactattcggcaggagatagacattccaagaatcaagcactacaaagtgatgagcgtaggacaaaactacactattgaactggaaaaacctgtaacactcccaaaccttttcagtgtcattgattattttgtgaaggagactcgaggaaatttaagaccatttatatgttcaactgatgaaaacactggtcaagaacccagtatggaagggagaagtgaaaagttgaagaaaaatccacacattgcatgaaatacaatgtgaaagctcctttgtatatcttggggaaagactatgtgagacagagggagaaaacagccattgacaactcaaggagagaggcctcggggggaaaaaaagatcaacctggccaaaaccttgaaaatccggcttcttgacttgtgagaaaataaatttgtgttccttaatccaca

SEQ ID NO: 12797 - DNA, 466 bp, Homo sapiens
catctatatgttcatatagtgcctaagacccagtattttccatatctccaagtcagccccaaagttagtggatatccagggtggtatatgagctaatatgaataacagctattgaggggtttctggttggattggtgacaatgtagggtagaaagcaatgtacttttaataattctttctacttctctcaatatggagaatatatatttgattttatatacctacatagaattttattatgttgtttactttctaggttactgacattaaaagaattatttctgcctgaaagatttttaattcttgattccttttttcctgtttattctttctaattcacccactcaatgacccagattacctatatccctagtgagtagcccccacaaaaagacactctgcaaaccaggtaaacagaaaataaaaaaccacgaaggattttttttttttttttttttgccaaact

SEQ ID NO: 12798 - DNA, 1957 bp, Homo sapiens
aaacagttgccttttcctctcacagaaggaagatttcattttgtttgagacgagaaaccaaaccacacaccaaagagaggggtatgatggctaagaagcccccaaaaccagcccctcgcaggatcttccaggaaaggttaaagattactgctctacctttgtactttgaaggttttttattaatcaagcggtcaggataccgggagtatgagcattactggacagagttgagaggaactactcttttcttttataccgacaaaaagagtataatatatgttgacaaattagacatagtagacctcacatgccttactgagcagaattcaactgaaaagaactgtgcgaaattcacccttgttttgccgaaagaggaagtacaactgaagacagagaacacagaaagtggggaagaatggagaggcttcattcttacagtaacagagctgtcagttccccaaaacgtgtcactcctacctgggcaagtaattaaactgcatgaagtcctagagagagaaaagaaaaggaggattgagacagagcagagtacgtccgtggaaaaagagaaggaaccaactgaagattatgtggatgtactgaaccctatgccagcatgtttttatacagtgtcccggaaagaggcaactgagatgctccagaagaacccttctttgggaaatatgatcctgaggcctggtagtgacagtagaaactactccatcactattcggcaggagatagacattccaagaatcaagcactacaaagtgatgagcgtaggacaaaactacactattgaactggaaaaacctgtaacactcccaaaccttttcagtgtcattgattattttgtgaaggagactcgaggaaatttaagaccatttatatgttcaactgatgaaaacactggtcaagaacccagtatggaagggagaagtgaaaagttgaagaaaaatccacacattgcatgaaatacaatgtgaaagctcctttgtatatcttggtaatttatattttcaaaacgaagttcttacttttaaagagaattacctatattctcctgatactgattaccaagtcattcacctgaacaccagaattagaattaaacattgtaccatacaatttcattatcttatcagaatgaaaccaattcacagggaaactagagactacggctgtggtggtaacctgcagatatacacattcccatgcactgacataagttgaaaacacatagtactttctagatggaatttttttctttaggcctcaatgaaatacatttcccctatataattccaacagcagtttctctagttctaaattttaccaattcccaaaaaacctaagttttgctgaaatctgatttgaccaatttatcaaatatgtcattttaattacctagctggaagttagagacatgaaatgtactagaggagcccttttccaatggaaatattatataccacattttttgttaatggaaataaatgtctccattcccatgtttttccctggtgtcatctttttgccactcaaaatcagcccattatttccttacaaagatggtgaaaggctgtatcatcatcttgtcgtaagtacgatgagcctgattataagtacctggagttcttaaaaatatggaaccatcagccccagactgcatctactgaatcaaaataacagggatattttttcataatttttttcttcaaaagcaaacttctaaattgattttgatggttatcaatttgggaatcacacaatcaactaagaatgaaaagatatggtctatattctacaggggaaagactatgtgagacagagggagaaaacagccattgacaactcaaggagagaggcctcggggggaaaaaaagatcaacctggccaaaaccttgaaaatccggcttcttgacttgtgagaaaataaatttgtgttccttaatccaca

SEQ ID NO: 12799 - DNA, 1459 bp, Homo sapiens
aaacagttgccttttcctctcacagaaggaagatttcattttgtttgagacgagaaaccaaaccacacaccaaagagaggggtatgatggctaagaagcccccaaaaccagcccctcgcaggatcttccaggaaaggttaaagattactgctctacctttgtactttgaaggttttttattaatcaagcggtcaggataccgggagtatgagcattactggacagagttgagaggaactactcttttcttttataccgacaaaaagagtataatatatgttgacaaattagacatagtagacctcacatgccttactgagcagaattcaactgaaaagaactgtgcgaaattcacccttgttttgccgaaagaggaagtacaactgaagacagagaacacagaaagtggggaagaatggagaggcttcattcttacagtaacagagctgtcagttccccaaaacgtgtcactcctacctgggcaagtaattaaactgcatgaagtcctagagagagaaaagaaaaggaggattgagacagagcagagtacgtccgtggaaaaagagaaggaaccaactgaagattatgtggatgtactgaaccctatgccagcatgtttttatacagtgtcccggaaagaggcaactgagatgctccagaagaacccttctttgggaaatatgatcctgaggcctggtagtgacagtagaaactactccatcactattcggcaggagatagacattccaagaatcaagcactacaaagtgatgagcgtaggacaaaactacactattgaactggaaaaacctgtaacactcccaaaccttttcagtgtcattgattattttgtgaaggagactcgaggaaatttaagaccatttatatgttcaactgatgaaaacactggtcaagaacccagtatggaagggagaagtgaaaagttgaagaaaaatccacacattgcatgaaatacaatgtgaaagctcctttgtatatcttggctcataggtggaagggacttgccttgctcagataagactttggacatggacttctggattaatgctggaatgagctaagactttgggggactgttggaaaggtgtgactgtgttttgaaacgtgagtacatgagattcagggggtaccagggatgaaatgatacattttggctgtgtccccacccaaaatctcatcttgaattgttatccccataattgccacatgtcaagggcaggaccacgtggaggtaatcagtgagtgatagtgagtgagtctcatgagatctgatggttttgtaagaacctggcagttcccctgcttgtactcacactgtcctgccaccctgtgaagaggtgcctgcttctcctttgtctcctgccatgattgtaagtttcctgaggcctccccaaccatgaggaactgtgagtcaattaaacctctttcctttacaaat

SEQ ID NO: 12800 - DNA, 287 bp, Homo sapiens
gaatattcagtatttattttcctaacaattactaaacacaccagcaatgttccacacacgagcaggaaaatcaactcactgaaaataaagaaccaccgttttctacaatattggttcgctaattaagtttttctacccacaatttctaggtcaagaacccagtatggaagggagaagtgaaaagttgaagaaaaatccacacattgcatgaaatacaatgtgaaagctcctttgtatatcttggtaatttatattttcaaaacgaagttcttacttttaaagagaat

SEQ ID NO: 12801 - DNA, 437 bp, Homo sapiens
atagtcatgacaacataggttgattatacaggtgatattttatatttactttagtttgcatttacccaattgtataataaaatggagactaaccatttgtttcattgtagcattccaagaatcaagcactacaaagtgatgagcgtaggacaaaactacactattgaactggaaaaacctgtaagtaactatttttgttgttgttgatgaacttcctcccgattccttatagcctcctagtgctggcaaaaagcagccaagttaaggagccctgaatgtggcagatatacaaggtgaaaagtgagattcaggaacaggtggtgaggcagagtaaaatataatttgcttctaaaaattctttccacttttctttttctgcaaatttctcaaggtttgcagagaaagaaaagtggaaaaaattcagagaaagaaagata

SEQ ID NO: 12802 - DNA, 898 bp, Homo sapiens
aagcgattctcctgccttagcctcccgagtagctgggattacaggtgcccaccaccacgcccagctaatttttgtatttcagtagagacgaagtttcaccatgttggccaggtgggtctcaaactcctgacctcaggttatctgcacacctcagcctcttaaagttctgggattacaggcgtgagccattgtgcccggcccataaaagaactttattatatttctaaaattcaatcatatggaagaatctgttgagcaggttagcctttgcttaactttcctcctctgttactccagccttagctggggtgttttgtagaattttcagagcatgggagacagacaactagagcttcctcctgcccttggcccatgcttttaggagagcaaaaggcaaaagattgaaaccactgactttagtttcctcaggccctttctttctgagggttaaagaagaaggaaatgtcttctgtggccaagaattcaaggacttgtaggagataagtgaaggctattacagggattttgtcctggtttggtaggtttctcttggagaaataccactacaccctggtctagaaatgagttttgaagacttggggagttaaagggcactgagttttgctctcactgtaccctgattccaggttttacatggagaaataacctgagggactttatttctatccaatgccctggtttccatcctgaccagaggatgatgacatccgctgataggccatgcttctgtcttctcttatgtgcctcatgccaagcctcgaaatataccttctggaccatcatttccacatctaccttgtgactagaagtcctagttatggtattttgaaatttatgatccataatccttgccagaaatcctgcagcgaactatggc

SEQ ID NO: 12803 - DNA, 483 bp, Homo sapiens
tatcatcgagctcggtccccccttaccgatggcccaggtgaactctaatattgatggtttcacagaattcaaggacttgtaggagataagtgaaggctattacagggattttgtcctggtttggtaggtttctcttggagaaataccactacaccctggtctagaaatgagttttgaagacttggggagttaaagggcactgagttttgctctcactgtaccctgattccaggttttacatggagaaataacctgagggactttatttctatccaatgccctggtttccatcctgaccagaggatgatgacatccgctgataggccatgcttctgtcttctcttatgtgcctcatgccaagcctcgaaatataccttctggaccatcatttccacatctaccttgtgactagaagtcctagttatggtattttgaaatttatgatccataatccttgccagaaatcctgcagcgaactatggc

SEQ ID NO: 12804 - DNA, 578 bp, Homo sapiens
  misc_feature (492)..(492): n is a, c, g, or t
  misc_feature (576)..(576): n is a, c, g, or t
aatcagctcccccagaaatgagggggtctagaggcaggcagatggagaggacagggacttcatagcatttaacatcattttaccatctttccttcctgttctttttggtgctgttggaaatcagtagtgagaggaaaacactcaaatctggaagtctagcgctgtcggtaggaactgggtagaaaaaactatgcatgtccccccatcactcggaaactacatcagaacatcataggagcatcctgtttccatgtgcattagtttccacgaacatacatgtgaatgttttcccacctgtagtgttgctgtggagttgtgagatgtcaaagtggaggcaagagtatctgccttttgcagtaggctctgttcttttcctgtcctgagagaggaggtcagtctaaccctcaccttgtgagttcagccttatactgacctgagcccagggtggatcagatgctgagatcatgtaactttgaactcccagcacattgngaggtcaaggcaggtggatcacttgagcccaggagttcgaaaccagcctcggcaacatggtgaaaccctgtctttacaaaaaanaa

SEQ ID NO: 12805 - DNA, 260 bp, Homo sapiens
acaggaattagaacttttctatgtctataccatcaatgtctagcactgtcctctcactccatgtggcatgtacttaaaatatggcataaaaggataaatctgatttttgtagaatttcctaatagtgtgaaaatgctggtgtgtatgttatcatactgaagatatgtttctttcatgacagctctcattctcagaggactgtgatggtatcatgatatatttctaatgctatctgtggtagtaaagatgtgtcaaagagg

SEQ ID NO: 12806 - DNA, 213 bp, Homo sapiens
tctgacacttatacagtaaattgtttatctttaaattggatctgtagtattttaaaaacttgttgggctgggcatggtggctcacgcctgtaatcctagcactatgggaggccaaggcgggtggattacttgagatcaggctgttattgaactcctgacctcaggtgattctcctgccttgacctcccagagtgctgcgattacaggcgtgag

SEQ ID NO: 12807 - DNA, 2786 bp, Homo sapiens
  misc_feature (102)..(102): n is a, c, g, or t
  misc_feature (966)..(966): n is a, c, g, or t
  misc_feature (1244)..(1244): n is a, c, g, or t
  misc_feature (1627)..(1627): n is a, c, g, or t
  misc_feature (2090)..(2090): n is a, c, g, or t
tttctagttctgtgcataggtgctgccttcctgggggtaggcacttctgtgagtccctgctgcaggggcagaagtgcatgtctgctgcaccagaagcccccnctattgatgctctcggctccattgggagagcagctgccaactcagcttcttctacctcctagatcctcaggcagcaagttccaccggtaccagcgtcctggcccacgggtgggcgttcatctgcataagggtagcagtgagattcgggaagccggtggcccacagctgtggccacagtgcccccacccagtggaccttgatgtcctgaggaccacacagcactgtttacaatctgagggacccacatctgtgcacctatcctctgtgtgattaaataagctgtcaggggccctcagagatgtgtccccatccacacatcatggagcagattcccggctggtcagggtgttaagattctctggagaacccggctttccttggagactttgctcaacagaggaaccagttgccattcaccaggttgaaggttcccctgaggttgcatggtgaccaccaggggcaagcacagcccggcgcagctgctcagggacagcagtctccccgggcctcctggcctctccctccatgggctgctaacccttgccgtagcttgggtttgagtgtcaagcacaggccagaatccacactcctgtccccacctgtcaatcacttcagacacaggttccctccttccaattccaaagctggaacaagggcaggaagaggcgtctcagggaacccccgaagaccccactgtctctccagctcctttcttagaatcctcctcttcttggggagaccaaaggggatgagtagggaggggttctggcttatttacttcttagtttagttttttgtaagtaaagtggccggagagatgagtaatccaaatacgattcctcaggccgggcacagtggctcacncctgtaaccctagcactttgggaggccaaggcaggcagatcacctgaggccaggctggtctcgaactcctgacctcaggtgatccacccacctcagcctcccaaaatgcttcgattgcaggcatgagccactgtgcctgtccaagaaaacagatttcttgatggaaattagtgagacagacatccccttaggattgaaagagagctctgggctgctccagggaaagccacttggcagaaatagcctctgtaagtgaattctggattcccctgaagacnttacagcaaatctctgggtatgtctctggtaaagaccctcacttgagcttctagaagggagcgaaaattcaggaatttgcttgctgcaaaagagaacatgattaacaggtaaaagagaaaagacaatataggccacagaggaatagtgttaggatcaaccctgctcagcaggggcctctggagccctccctgctgtacccaagccagagctgagacatggctccccagatggactggctgtggtcaggaaaggcctgtagagggagctgagggctcagaaaatacctgctccgggtgcctgggctcaagttctcattccatttctttgatgccactggccactgtatctgcttttgtaaaaacctccaaaaagttatacatcnggtatctctagtcagcttcctccgctgcccacctcttgccacagatgagtgatcactgtgaatggtggtgaccaggtgggcagggcaggggcttgtctaagtgccttagcccaggcctctggcccatcgacctcgaaaacagcaatatcgcctccttcttagatccagttaccaagtcagtctagctgggtgggtagtgctcagacagaaaggctggatgggaaggaagtcacatcctaaaagtccaggagggggccaggcgcagtggctcacgcctgtaatcccagcactttgggagaccaaggtgggcagatcacctgaggtcaggagtttgagaccagcctggccaacatggtgaaaccctgtttctactaaatatacaaaaaaaaaaaatagttggatgtggtttcgtgtgcctgtagtgccagctactcaggaggctgaggcaggagaattgcttgancccagaaggcagaggttgcatgatgcaatcatggctcactgcagcctccacctcccaggctcaagcgatcctcccacctcagctccctgagaagctgggaccacaggcctggctaaattttgactttttgtagagacaaggttttgccatgttgcccagtcagatctcgaactcctgggctcaagcgaggggctgttacatctgatcagggcaaaaggggctgtgctccttggacactttgcacagccccagtgggcttctttctcctctgttagtgtggttaatgttcatctgcctgcatccctgagtcacccaagtgtaacctcagccataacacgtactgcagccggaacggtgtccgcagctcagcgtccctctcccatgcactttctgaactttggtcttttaaccaggtttaccagccgctttctgcctctttgtgcttttgagggttttttggtttgtttgttctgttttgtttttaaataaagatgattatttggcccaggctgagggtgcaaacagaactcttcacgtgtccacgacaagaaaaatagtttttacaaacttctagttgtggcatcaaaagtgtgagtttttgcacctgcaaaattgtaatgcaagccctgactgggtggaagctgaagtcttgctgttttaaattaaataaataaattatttttctcctaaaaaaaa

SEQ ID NO: 12808 - DNA, 2950 bp, Homo sapiens
  misc_feature (102)..(102): n is a, c, g, or t
  misc_feature (966)..(966): n is a, c, g, or t
  misc_feature (1244)..(1244): n is a, c, g, or t
  misc_feature (1627)..(1627): n is a, c, g, or t
  misc_feature (2090)..(2090): n is a, c, g, or t
tttctagttctgtgcataggtgctgccttcctgggggtaggcacttctgtgagtccctgctgcaggggcagaagtgcatgtctgctgcaccagaagcccccnctattgatgctctcggctccattgggagagcagctgccaactcagcttcttctacctcctagatcctcaggcagcaagttccaccggtaccagcgtcctggcccacgggtgggcgttcatctgcataagggtagcagtgagattcgggaagccggtggcccacagctgtggccacagtgcccccacccagtggaccttgatgtcctgaggaccacacagcactgtttacaatctgagggacccacatctgtgcacctatcctctgtgtgattaaataagctgtcaggggccctcagagatgtgtccccatccacacatcatggagcagattcccggctggtcagggtgttaagattctctggagaacccggctttccttggagactttgctcaacagaggaaccagttgccattcaccaggttgaaggttcccctgaggttgcatggtgaccaccaggggcaagcacagcccggcgcagctgctcagggacagcagtctccccgggcctcctggcctctccctccatgggctgctaacccttgccgtagcttgggtttgagtgtcaagcacaggccagaatccacactcctgtccccacctgtcaatcacttcagacacaggttccctccttccaattccaaagctggaacaagggcaggaagaggcgtctcagggaacccccgaagaccccactgtctctccagctcctttcttagaatcctcctcttcttggggagaccaaaggggatgagtagggaggggttctggcttatttacttcttagtttagttttttgtaagtaaagtggccggagagatgagtaatccaaatacgattcctcaggccgggcacagtggctcacncctgtaaccctagcactttgggaggccaaggcaggcagatcacctgaggccaggctggtctcgaactcctgacctcaggtgatccacccacctcagcctcccaaaatgcttcgattgcaggcatgagccactgtgcctgtccaagaaaacagatttcttgatggaaattagtgagacagacatccccttaggattgaaagagagctctgggctgctccagggaaagccacttggcagaaatagcctctgtaagtgaattctggattcccctgaagacnttacagcaaatctctgggtatgtctctggtaaagaccctcacttgagcttctagaagggagcgaaaattcaggaatttgcttgctgcaaaagagaacatgattaacaggtaaaagagaaaagacaatataggccacagaggaatagtgttaggatcaaccctgctcagcaggggcctctggagccctccctgctgtacccaagccagagctgagacatggctccccagatggactggctgtggtcaggaaaggcctgtagagggagctgagggctcagaaaatacctgctccgggtgcctgggctcaagttctcattccatttctttgatgccactggccactgtatctgcttttgtaaaaacctccaaaaagttatacatcnggtatctctagtcagcttcctccgctgcccacctcttgccacagatgagtgatcactgtgaatggtggtgaccaggtgggcagggcaggggcttgtctaagtgccttagcccaggcctctggcccatcgacctcgaaaacagcaatatcgcctccttcttagatccagttaccaagtcagtctagctgggtgggtagtgctcagacagaaaggctggatgggaaggaagtcacatcctaaaagtccaggagggggccaggcgcagtggctcacgcctgtaatcccagcactttgggagaccaaggtgggcagatcacctgaggtcaggagtttgagaccagcctggccaacatggtgaaaccctgtttctactaaatatacaaaaaaaaaaaatagttggatgtggtttcgtgtgcctgtagtgccagctactcaggaggctgaggcaggagaattgcttgancccagaaggcagaggttgcagtgagccgagactgcaccactgcactccagcctgggtgacagagcaagactccatctcaaaaaataaaacaagtccaggaggggctgttacttctttttagtttatttatttttgtgaggcagggttttgctgtctggagcatcatacccagtctggagtgcagtgatgcaatcatggctcactgcagcctccacctcccaggctcaagcgatcctcccacctcagctccctgagaagctgggaccacaggcctggctaaattttgactttttgtagagacaaggttttgccatgttgcccagtcagatctcgaactcctgggctcaagcgaggggctgttacatctgatcagggcaaaaggggctgtgctccttggacactttgcacagccccagtgggcttctttctcctctgttagtgtggttaatgttcatctgcctgcatccctgagtcacccaagtgtaacctcagccataacacgtactgcagccggaacggtgtccgcagctcagcgtccctctcccatgcactttctgaactttggtcttttaaccaggtttaccagccgctttctgcctctttgtgcttttgagggttttttggtttgtttgttctgttttgtttttaaataaagatgattatttggcccaggctgagggtgcaaacagaactcttcacgtgtccacgacaagaaaaatagtttttacaaacttctagttgtggcatcaaaagtgtgagtttttgcacctgcaaaattgtaatgcaagccctgactgggtggaagctgaagtcttgctgttttaaattaaataaataaattatttttctcctaaaaaaaa

SEQ ID NO: 12809 - DNA, 2935 bp, Homo sapiens
  misc_feature (102)..(102): n is a, c, g, or t
  misc_feature (966)..(966): n is a, c, g, or t
  misc_feature (1244)..(1244): n is a, c, g, or t
  misc_feature (1627)..(1627): n is a, c, g, or t
  misc_feature (2090)..(2090): n is a, c, g, or t
tttctagttctgtgcataggtgctgccttcctgggggtaggcacttctgtgagtccctgctgcaggggcagaagtgcatgtctgctgcaccagaagcccccnctattgatgctctcggctccattgggagagcagctgccaactcagcttcttctacctcctagatcctcaggcagcaagttccaccggtaccagcgtcctggcccacgggtgggcgttcatctgcataagggtagcagtgagattcgggaagccggtggcccacagctgtggccacagtgcccccacccagtggaccttgatgtcctgaggaccacacagcactgtttacaatctgagggacccacatctgtgcacctatcctctgtgtgattaaataagctgtcaggggccctcagagatgtgtccccatccacacatcatggagcagattcccggctggtcagggtgttaagattctctggagaacccggctttccttggagactttgctcaacagaggaaccagttgccattcaccaggttgaaggttcccctgaggttgcatggtgaccaccaggggcaagcacagcccggcgcagctgctcagggacagcagtctccccgggcctcctggcctctccctccatgggctgctaacccttgccgtagcttgggtttgagtgtcaagcacaggccagaatccacactcctgtccccacctgtcaatcacttcagacacaggttccctccttccaattccaaagctggaacaagggcaggaagaggcgtctcagggaacccccgaagaccccactgtctctccagctcctttcttagaatcctcctcttcttggggagaccaaaggggatgagtagggaggggttctggcttatttacttcttagtttagttttttgtaagtaaagtggccggagagatgagtaatccaaatacgattcctcaggccgggcacagtggctcacncctgtaaccctagcactttgggaggccaaggcaggcagatcacctgaggccaggctggtctcgaactcctgacctcaggtgatccacccacctcagcctcccaaaatgcttcgattgcaggcatgagccactgtgcctgtccaagaaaacagatttcttgatggaaattagtgagacagacatccccttaggattgaaagagagctctgggctgctccagggaaagccacttggcagaaatagcctctgtaagtgaattctggattcccctgaagacnttacagcaaatctctgggtatgtctctggtaaagaccctcacttgagcttctagaagggagcgaaaattcaggaatttgcttgctgcaaaagagaacatgattaacaggtaaaagagaaaagacaatataggccacagaggaatagtgttaggatcaaccctgctcagcaggggcctctggagccctccctgctgtacccaagccagagctgagacatggctccccagatggactggctgtggtcaggaaaggcctgtagagggagctgagggctcagaaaatacctgctccgggtgcctgggctcaagttctcattccatttctttgatgccactggccactgtatctgcttttgtaaaaacctccaaaaagttatacatcnggtatctctagtcagcttcctccgctgcccacctcttgccacagatgagtgatcactgtgaatggtggtgaccaggtgggcagggcaggggcttgtctaagtgccttagcccaggcctctggcccatcgacctcgaaaacagcaatatcgcctccttcttagatccagttaccaagtcagtctagctgggtgggtagtgctcagacagaaaggctggatgggaaggaagtcacatcctaaaagtccaggagggggccaggcgcagtggctcacgcctgtaatcccagcactttgggagaccaaggtgggcagatcacctgaggtcaggagtttgagaccagcctggccaacatggtgaaaccctgtttctactaaatatacaaaaaaaaaaaatagttggatgtggtttcgtgtgcctgtagtgccagctactcaggaggctgaggcaggagaattgcttgancccagaaggcagaggttgcagtgagccgagactgcaccactgcactccagcctgggtgacagagcaagactccatctcaaaaaataaaacaagtccaggaggggctgttacttctttttagtttatttatttttgtgaggcagggttttgctgtctggagcatcatacccagtctggagtgcagtgatgcaatcatggctcactgcagcctccacctcccaggctcaagcgatcctcccacctcagctccctgagaagctgggaccacaggcctggctaaattttgactttttgtagagacaaggttttgccatgttgcccagtcagatctcgaagaggggctgttacatctgatcagggcaaaaggggctgtgctccttggacactttgcacagccccagtgggcttctttctcctctgttagtgtggttaatgttcatctgcctgcatccctgagtcacccaagtgtaacctcagccataacacgtactgcagccggaacggtgtccgcagctcagcgtccctctcccatgcactttctgaactttggtcttttaaccaggtttaccagccgctttctgcctctttgtgcttttgagggttttttggtttgtttgttctgttttgtttttaaataaagatgattatttggcccaggctgagggtgcaaacagaactcttcacgtgtccacgacaagaaaaatagtttttacaaacttctagttgtggcatcaaaagtgtgagtttttgcacctgcaaaattgtaatgcaagccctgactgggtggaagctgaagtcttgctgttttaaattaaataaataaattatttttctcctaaaaaaaa

SEQ ID NO: 12810 - DNA, 515 bp, Homo sapiens
cagtatggagatgacactaacgtgatggggctcaagaatcagatggtagaagaccagctgggaggtgaagtctcagtaggctaggggcttaatgttcgatgcacaccagacttctgagactcaggaggcgggtgtggatctgtctgcccagtgcctctcatttacagcctggacaccctatttcttgaggtgaactactgaaggcttttgtacgacgtgtgtcaggcaagactctggccagaccctttgccatagtccatttgtaatgtatttccacatggcacaggtatctccacttttgcccatgctctcatgtggctcagaattattctccctactgccactcttctttgccaacacagaagatatttcaagatgtagccctaagcttctccatctaatcaataacatgagggctcatatgggaacattgtcacaggcttacaggaatatgttcttaaatatctgcttttttattactctgttcattaaattgacatttatatcatcaccat

SEQ ID NO: 12811 - DNA, 564 bp, Homo sapiens
tttataaggtagtattaaggtcgtactaaaaattacattttaaaaacagctgacagtttgacagccacaaacctaactttttcatatgtatttcctgtgaaagtaaaaccaaaaatggtctttgggccaagaatgtgacttgagccaatttgttaaccaaaaatttatagaatgtccactttgatgaattctcctacccaaacaaacaaaaaacaataaatgactttttgggatggtatcacaaagctaacattttaaaaacaataactaggccgggtgcagtggctcacgcctgtaatcccagcactttgggaggcctaggtgggtggatcacttgaggccaggagtttgagaccagcctggccaacatggggaaacctcatcgctactaaaaatacaaaaaaaattattagccgggcatggtggcaggtgcctgtaatcccagctacttgggaggctaaggcacaagaatcgcttgaacccgggaggcagaggttgcagtgagctgagattgtgccactgcactccagcctgggcgacagagcaggactctttctttgtctc

SEQ ID NO: 12812 - DNA, 410 bp, Homo sapiens
ggaattttcagcatttaaattgtcattaccgccatgggggtgaatgagattgcccagagtattaagttaaaaaagaaggatccaataatgaaatcctatatttaataccgatgtataagaagcaggtagaaggaaagaaatgctgaaaggaggcttagaaggaatggccagggagggagaagcagaaccaggagaagtgccaaatgaaaggagaacgtggaaaaggatatgatgtctaaatcagttcagcatcattaccagtgtcctcttcatctacagctgaggctgcagtcacgctatcaaacatacctcctgagcctgctcccagacccagggaatttttttttttttaaagacagagtctcactctgtcgcccaggctggagtgcagtggtgcgatcttagctcac

SEQ ID NO: 12813 - DNA, 235 bp, Homo sapiens
gcatattgctagaggagagcgccactgcagaggacacactgtcttggccaccggctttgcaaaccatagtggaggagggagtttggggtcaccaaccacttcctggctgactgcctgagccacattatacaagactgtttgttgacttagtaatactgaagccagagctcaccaagattctgacatcaagcatgaaagtgctgggaaatgaaagaattagtcactttacatggtg

SEQ ID NO: 12814 - DNA, 551 bp, Homo sapiens
gcatattgctagaggagagcgccactgcagaggacacactgtcttggccaccggctttgcaaaccatagtggaggagggagtttggggtcaccaaccacttcctggctgactgcctgagccacattatacaagactgtttgttgacttagtaatactgaagccagagctcaccaagattctgacatcaagcatgaaagtgactaattctttcatttcccagcactttgacaaaggggactctcttaaaactcctcatcggacgttagtggaagtcgactcatgtatctaaacatgtagccagcgtaagttcttcgtcagattgatctaatgacttttttagcgtgtgtgtgtgtgtgtgtgtgtgtgtttaatctttttaagtttgggtgaagtttgaccttctagaattcctgtttattcctgagcaaagaaaaaaaaaatcaaccctttttaattcctttagcatcatatctgaccatctttagggtgttatttctttcctagactgaatcactcagagaaataagattggccaacaaatgtaatttga

SEQ ID NO: 12815 - DNA, 479 bp, Homo sapiens
gcatattgctagaggagagcgccactgcagaggacacactgtcttggccaccggctttgcaaaccatagtggaggagggagtttggggtcaccaaccacttcctggctgactgcctgagccacattatacaagactgtttgttgacttagtaatactgaagccagagctcaccaagattctgacatcaagcatgaaagtgactaattctttcatttcccagcactttgacaaaggggactctcttaaaactcctcatcggacgttagtggaagtcgactcatgtatctaaacatgtagccagcgtaagttcttcgtcagattgatctaatgacttttttagcgtgtgtgtgtgtgtgtgtgtgtgtgtttaatctttttaagtttgggtgaagtttgaccttctagaattcctgtttattcctgagcaaagaaacaacaccctaaagatggtcagatatgatgctaaaggaattaaaaa

SEQ ID NO: 12816 - DNA, 282 bp, Homo sapiens
tggcggcaaagaacagaaatctactctctcccagttctagatacagaaatctgaagtcaagatatgggcaggaccacacgtcctcctgaggctctaggggagggtccttcctgcctctcccagctcctgggggctccaggcatccctgggcttgtggccgcatcactccagtctctgcctccgtctccatgtggcctcatcctctgtgtctcctcttctgtcttttagaaggacatctgtcgttgtatttaggacccaccctaatccaggatgatctcatct

SEQ ID NO: 12817 - DNA, 795 bp, Homo sapiens
caaaaaccaagtacatttgctgatactttgaagaaatgttttaatgaggtactatttacagagatacaaccagatttaagataactaacaaggattgtagaggcacctgtggactaaaagacattagctctggagaccaagttctggagactaagtggtctggaggaagagacaagagtagttgagcccagtggagagttggaaccatgaaagtgagactcctaaacagaagctgcagttcagtaaccatgccaataacgaatgaaagcagaaaagaaatagaggaccacatacttccacctctttccttctgcagtatgatcacctactgataaccctcattggtcaaacccagccaggagccagaaagcaagggagagtagctgatgcgtttggtagagtttggcctcccagagcacagagcaggactaagatgaacagagaaaggatctagagggaaatggtggataatcagttttttcaatgggtttttaaagattttttaaactatatttctgaaatgtgaagataaatattttatctaaaattgggcaagataactgtatggatttttttaacttatatatggctacttgaaaaggaattatgcttctctttaatacagcaggattctctggttataaaagtgttttgacataccgtgttaagagtaacatgggtttaagtcatgtacagagagttcggaagagaaatttagatacccaataaaaatatgacaaaatcgttgacctcgttattaatcaaagaaaaaattaaagagtaaattaatcaaag

SEQ ID NO: 12818 - DNA, 671 bp, Homo sapiens
  misc_feature (643)..(643): n is a, c, g, or t
  misc_feature (647)..(647): n is a, c, g, or t
ctctccaatcactttttaatttccaggggaaatcgtaatctcactaatcacctagaaaggaatgtggagatgggagtatgaaggacgcagttcaggccttgaggcccagcgggcgtttgttttagtcaccgcatttgctcaaatgctttgtgcccgtggttaatgctggggagtattggtggaccctgcctctctgtctctcagagtccccttggagaccttcactcttcacttcaaggctgtgtgtgctgcccagctctggtgctggtgacatcagtggaaagagagccacaggtgctgtctggtccctcggaatctcttctctttattataaagtaccgctggaggcagagaaagagatttttgagctttccttctagcccacaaagctcagttttatttggagcttttaaccttgagccttagccagcccctgatgtgtggattttagaatcagtgtgaattttagggagatagggaaggcctgcagaagtttgaccactgcttcttgagcacctcttgctgtctttttctttttgaggagggtgggggctcctttagaattatgctggcatggtgattcttttttcttcttcttctttttttgagagacagagtgtccctccagcctgggcgacagagncgantccgtctcaaaaacaaaaaaaaac

SEQ ID NO: 12819 - DNA, 829 bp, Homo sapiens
ctctccaatcactttttaatttccaggggaaatcgtaatctcactaatcacctagaaaggaatgtggagatgggagtatgaaggacgcagttcaggccttgaggcccagcgggcgtttgttttagtcaccgcatttgctcaaatgctttgtgcccgtggttaatgctggggagtattggtggaccctgcctctctgtctctcagagtccccttggagaccttcactcttcacttcaaggctgtgtgtgctgcccagctctggtgctggtgacatcagtggaaagagagccacaggtgctgtctggtccctcggaatctcttctctttattataaagtaccgctggaggcagagaaagagatttttgagctttccttctagcccacaaagctcagttttatttggagcttttaaccttgagccttagccagcccctgatgtgtggattttagaatcagtgtgaattttagggagatagggaaggcctgcagaagtttgaccactgcttcttgagcacctcttgctgtctttttctttttgaggagggtgggggctcctttagaattatgctggcatggtgattcttttttcttcttcttctttttttgagagacagagtgtccctccatagcccaggctggagtgcagtggcacagtcttgactcactgcaaaccccacatcccgggttcaagcaattctcctgcctcagcctccccagtagctgggattacaggcatgcaccaccacgtccagctaatttttgtatttttagtagacaccaggtttcacgacgttggccaggctgatctcgaaatcctgacctcaagcg

SEQ ID NO: 12820 - DNA, 628 bp, Homo sapiens
cagacaggatatgtaggggcttacctagagcctggcacgacttctgagaagtcacccagcagaccggctagaggggatttgtgtgccacactctacttgccgggctgccattaaaatagaaagatataaaactgggtcaccaaaaaaaccaaacctcaaggctatccttccagagcagtagaaatgagtcccacagcctggtctttgagcagaggctgggaagataggatacatcactgtctggataccttctctttttaatagaatatattccgtatgattccctttccaccttaatggaaataatagctctctcctgcctgaacaaaagggattccaggtagtattgtggctaagagattacagcggacgatggaaggttcattttttagggaaggtgttgggtaggaagagtcacatttgacagaattcataaataatgtgtcctgaagtcagaggatgactgcaaagaaacacctcatgattccattaaatataaagagataaggagcaaggaggaaaaaagagaaagaattggtctttatttttcttgctaagaactctctggagtattgaaagacattgaaattatccctaaaattgtcacaacttttgtgaatactggtat

SEQ ID NO: 12821 - DNA, 455 bp, Homo sapiens
ctttctttctttttctttctttctttctttctttcttttctttctttcctttctctctctctctctctctctttcttttctttcttttgagagggagtcttgctctattgcctaggctgaaatgcagtggcgtgatctcagctcactgcaacctccacctcctgggttcaagtgcttctcctgcctcagcctcctgagtagctgagattacaggtgcccaccaccacatctggctaatttttgtatttttagtagagacggggtttcaccatgttggttaggctggtttcgaactcctgacttcaggtgatccacctgccttggctttccaaagttctgagattacaggcaggagccaccatgcccggcctaggtcttacatttctaataccctcatctttgtgtgtatttaacaagtataaaatatccacaagatgcaatgtttacataaattt

SEQ ID NO: 12822 - DNA, 186 bp, Homo sapiens
tttattaaatttctgtttttaagggatggggtctcattctgtcaccctggctgctggagtgcagtggcatgagcatgaatcactgtagtcttgaactcctgggctaaagcaatcctcctgcctcagcctcctgagtagctgggactactcagtgtttacaggtgtataacaccatgcccagctaat

SEQ ID NO: 12823 - DNA, 408 bp, Homo sapiens
atgacctttggaattgccacagctaccttacagcagagaacagggacgcacacagggattttcagagaagcacgtaaggaaaatttgaaatgaagctaaattcaagaagtaaatgatacttagaccttttgcaaagaaaacccagagattttaaaatagacaatagcatgacaatttataaaaatgaagctatttaaacagtatgatgtatagtattcacaatagcttaaaatattttattcccaggagcaacctaatccataactttttttttttttgctaaatgttagatgttgatatttgcaatgcattgccttaaattggaagattataacaaatttgtgtattttatggtgtactgtctatgtattgtctcacagcagctttgattcacttccatattaacct

SEQ ID NO: 12824 - DNA, 379 bp, Homo sapiens
ttcacaaagagcatcgcacagtggatttttacgtagtagtaacaatttgctgtaaaattgtatggtctgaggatatgaccgtagagtttgtcttctgtgtctccaaacttactatcctgtacatcttgactcattttattcatttttcacttcattaaacaataaggatttaccttaaattaagcatttttttggtatgtttattgtctcctagtggtcctttgtaatgccatatggttgctgcccagctcgacttacaaacttactctttttgcttctcatactagccattttgcaagcctgagctgctttgtggtacaggtcaagtacttatggagtaaagttaagtgaatttttattgtgcaggaatgtcttcgtt

SEQ ID NO: 12825 - DNA, 1874 bp, Homo sapiens
  misc_feature (1287)..(1287): n is a, c, g, or t
  misc_feature (1294)..(1294): n is a, c, g, or t
gctggtgggctccaggtgcagagagcagggtgggcgtcagaccccaggtccactgtgcacgccctcttgtagagcccgttccgttgtccatgagatgaggagtgttcttatctctaaagtattatcatgaaaacctaacaatgtagaaagactaaagcacatgggtggtgcttcataaatagtatttctcccactttctgaaaactcctgctgaagtaactgcacaagaatccttgaacatttagaattctggttttagccataccataaagtcagtagtgcgtggtggaattctgctaacgaaaattgcgaaggatcaaggcagagtacagagctggtgtgtagcgggtaccttctgtctgctggcactaggtattttacacattaaatcagctcgttctcacatcagctcttttaaaaataaggaaatgaggagccacagtggcccaactgatgcagtggcagaagtagaatttgagcttgtgcagatgtgcctccgtgttttgtctcctgagcatgctgccccaagtttgacaataccaagatttgtactggaacattccctcccatccccaccccctagaagcccctcttcctcccttagatttgacacatagtttgaaaccactattaactaccttatgagagccactgtttgtgaagtgctgactatgtgccaggtcccgtgccgtgcaatttttgtgaattatctcgtgtctacagtgcctcacaatttctctgctcaatacctccatgttactgccgaggaaagggaagctcagagagagtaagtaatttgctcgagttaaagagctggccaggacagccaggggcttgcaccccggagccttcatccactacactgtcagctggtatctcaaccagccattacaggctgtaaaaaaattatataagatagtctatggtaatgcagaaaagtgaggttattttgctccctttccctttgaagaaaaaagccctggaaagacatatcacttgagtatgggaaaaaatgaagctgtggcttttctgtgagtcaattctttcctggcagcttcttggaataagaccaagtatagcagcagagttttctgttttaatttgagctgcagggtgactttttttcttctatgctttcatctctctgtggcttcttttgcctcgttaatttcatgccctgcccaggcgggctactgtgctgcccagtcacccgggtctggggcggccaccgctggccagcaggcaggccctccagaggcagaggtggccacgcttaggtcgctcccnctgtggnggcggcacacttgggtggcagcacagctgtgatgtggcggcagctggcagccccatgggaaagatgtgtgaagtgtggggtttgacgacccatgggagaacagactttcttcctcttcttgttttcccttcaaagccgtgagtcaacctcaaattctctgtcttttttctccaccccctcgtgcctctctccctcacactctgcatctctcattgcaagcttgcatttttttgcacacaacactatcctaatatttctcttttctgcaggcaggaaatgagaagtcatttttcagggtcattcaggaagtcatccagagttataatggcccattatctaatggtcagagtttacttaggctttcactacttccactgcccacttgaaacagggaaaaatattttccccccgcgctgtgagtgtgctatttagagctgaccacaagcggggggaagagaggatggctcggatgctgcatttccactgagaacacaaggctggcaaagcttgtctgctgcccagcaagcacttcaggctcacaccattttaggttcactttaagtagtttctcaattgttaa

SEQ ID NO: 12826 - DNA, 430 bp, Homo sapiens
atggtcaagttattcctcaacataaaatctcttagaagaactgccatcaaggtattatacaaatgggttgtttgacttgaagaaaaaacaatgtagcattaattccacaaacatgtattgagctcatacctaatgtaccagtgccattgtagttgctaaagatagcaaaataaataaagatttcagttcttggattcaaggagctcagagtctcatgaaggggagagacctaaaacaattaattataacataatgtggtaaatgtacatgctctatatatagaagagagagaaccagtctaacctgataaatgaggggaaatttattaagacccagttttaacatcatgaagaaagagtaggatctagtcagaggtaattgttttatttcaaaccaatgaaacaatgagataataagttgggaaaagttg

SEQ ID NO: 12827 - DNA, 247 bp, Homo sapiens
tgaatgtttgcagtgtgcaccggtctggctgaaggcctcttcccttccccaacaccctcccatcgtgcaaaattaccctgcccagcagggagtgacttgtgtgtctcagaagattttgttgctgtgctctgagttctcactcctcatctcctttgaccagtttcttctaatactccccttgttcacaacacagaacatgagtgctctttcctatcattttgacactaataaacggacagtgattctc

SEQ ID NO: 12828 - DNA, 436 bp, Homo sapiens
ttgcagctaattgattctgcagagaaaaataagccctggtgcctctgacaggtgcagcagcctcgtgcagtatgttctcattatgcttatgtaaagtaagtctctactatcaaatgttaagaaacaacacagtggggcaaattttaaattaatggtttcagaaaatatcctgcagcctcatagtgtatcttgtcagctctctcaaattgtggacattcatcagaggtcttaaaagagaatggcaggaagtcagggaactgaaggtttagtagtaataaatggtatgtaagccaatatatagttggcttagtgttgttctgtgggataagaaatgcttctaaaccaagaaattacagaaaacatgcacaaacatattttttgactttggacagttcatgacggtatccttccaagattaaattaagaaaactaacac

SEQ ID NO: 12829 - DNA, 1281 bp, Homo sapiens
tggtgtgtggatgatgtcgtccagcctcccccatgtcaccagcaaccacgtcagctacaatggcctgtatggagtggcagtatttagccagaaggatggctccagcgagttacctcgaggccacagggctcaagagaacttcagcgaggatggggacgccatcctctgggagacagagctggagaaggaggacgacccactgcgccggcccatcaccatagctcttgttgagtctaacagtattaatcacaatggaggtgagtataccccctcagcccctgctcaagaaccttccatggctccccactgtctttttttttctccaatttaaaacttttaatttaatttaaatttaaaagtaaactttaatgtcaaagatgcaaacctgggtagggcagaaaaatcacacacaaggttgccacttcacacttggagggttgcacagcggccaggcagaggcgctcctcacttcccagacagtgtgggggccagggagaggcgctcctcacttcccagacagcgtgggggccagggagaggtgctcctcacttcccagacggtggggcggccgagcagaggtgcttcttatttttgagacggtgcggccgccaggcagggccttctgcagactgatcccaacttgccctcaggcctcatcagccacttcttccagcctgatccccaatcctcctgtatttattcattaaacttgaatccattctttcctgcctcctaacctgctgacctcactcatgcctttctcccatccacacgtcccaaactaacttgaacttcaaaacctgttgtgaatatcccccttcattccttcctcctttgaactgggccctccccatccccactggcacttgttatgaggcctcgcgactgtatttatttctgtggctgtttcatcaacactgataggccatgaacttgagacaaagaactgaagcccacccagctcagtgcccctgtccctgcagtaccaaatcccacctctggcacacatgcttttaatcaactctaggatacatttctcaaaattcaacatctcccacgagatgcatatcatggtttaattggcagtgagttttccttcttagagaggcagaaaataaaagtgttttaaatccatgttatcctaaacctgatgaaaaatggaggccaggtgccagggatcaagcctgtaatcccaggactttgggaggccaagactgggggattgcttgaggccaggtgttcaagacccgcctgggcaacataacaagacttggtttctac

SEQ ID NO: 12830 - DNA, 2752 bp, Homo sapiens
acactgcacatccagtgtatgcgaagcaccaggctaggctctgtaggcaataccactaaagtgtgcactctgatttagggagcaggacctgtggataccgattctaataactagcaaagtcaagtcgtggttatagaaagaagtgtggcttcagagggaggtgggtatttccaaatatggagttagggatggctccatgaggtaagtgacagtttgagctaagtcttgaaggatgcttggcagctagaaccatattttccatattcaggaattcaaatttgcctttattcagctagagagaaagagagaagggggtgtgggggagaaggaaaagagaattttcacacattttgaagttcctgagagcatttctgaggatatctgccgttagtgcagaaggtcgaaaccccaagtgcccccactaaacccaggctctttagctgtaaactgccatgcagtggcaggcctgcagccttcctgatgggaccacatggacagtggcacatgggacatttggctactcgttagcttaaacaactcagtcctgtgtcttctggttttgacaagaccacatttaggactgctgcccacctctgcctctttcattgagatttccgccttattgggtccctgtgctatgccacagataccaggtttggggttgttttgacccagaaggcattgggagtcccacattacagagcacacacacagctcaacacagccatttccctggccagaggcaccaagactgaagttcaggcccttagacactaggtggcagcggtgtggctgtgcagagccaaggatgaacctgagagcttgtttgcctctggctgggcactcttgttttgaattcctttgcccttatcgtgtagtccacggccttggtgaccaaggatcacctggctagcctgcttacatgcatgaccccatccaggttcacaggtattgccactgagtgatcttaggtagatcactgctcctggagaagcagagttgaggagtgtaagacaagggccatctagtgccaatgttccttgattcttatttgaggagctactatgtggtctttctgtaaacaagtgaacaaccaatgagactaaatatttgcaatagataggctaaggaatttgggttgagacaggagacggaggaaaaatgctttgatacaatgacagatggttagtctcttcagatttccctgaatattttccatcccgacaatatgcctcttagatacttgcagattagacatgtctctggatggaccacaagatacattcacaacatgtgttcagccttgagccctggctgtgtcctgtctggaaggaactgaggatgatgtggctataaagaggaggcagtgagctggcatgtgactgccttctgtgggcctgacctgtttgacatttgagggcctatgatgtgctaggtgctgtgttaggtacttccaaatgctttatctcattttaccccagtgcaagtgtgatatagtgaggatggtgaagacgtgggtatggttaagtcatgagttcagatcccgtgcttccaattacatgggtgttttcaaacaagtcactacttatgagtttcctcatctgtgaagggaagtttagtcatctgtttcaatgtggagacacacaggattgagggagtcctccgtcacagggtgactgtctggattctatgaggaaatacttggaaagcatgcagcacaatgcctggggtgcagctgaagctgagccactggtgtttcttcacagtatctctgtggggagggtgtattattcctttttatagggatctctataatgaagtgagaatcttgaaaatataagtgttatcctagatgggaggtgttaaaggtttttgccttgggaattttgtcatatttgttgcacagcaaggaaggactttcagaaaagcagggatgtggtgaggaagagcaggcaatagagagcagggaggaaaggctaagtagcatctggaacttgagaagtctaagggagccaaaatgagattttctattaaaaatgtctatcctcagccgggcgtggtagctcacgcctgtaatcccagcactttggggggtcgagatgggcagatcacctgaggtcaggagttcgagaccagcctgaccaatatggagaaaccccgtctctactaaaaatacaaaattagttgcgcgtggtggtgggcgcctgtaatcccagctactcaggagcctgaggcaggagaatcacttaaacccaggaggcggaggttgcagtgagccgagatcgcgccattgcactccagcctgggcaacaagagcgaaaccccgcctaaaaaaagaaaaaaaagaaaaagtctatcctctatgctactggcctgtttgtacaaagataaaatcattctaatttgtccggaatgactatcaaagatgatcaaatccccagggcctggtgtaacgttccaaatcatagcacaaatacagcttgaccttccttacagtccagaaaggacattctccctgagaaatgcccttggttgctgaggacagctctgtcctgtagtgacagagtgactgcctgggctgtggctcttgggttcacagaatccctaatcctccaagcccctaagaggcagggcagggatgctacccacaatatatgcagaaccccagatggagcctgtggggagagagaggaaattaccgtcttcactgtaggcaaaggagaatggctgtgattagccatatatgcctata

SEQ ID NO: 12831 - DNA, 462 bp, Homo sapiens
  misc_feature (330)..(331): n is a, c, g, or t
acactgcacatccagtgtatgcgaagcaccaggctaggctctgtaggcaataccactaaagtgtgcactctgatttagggagcaggacctgtggataccgattctaataactagcaaagtcaagtcgtggttatagaaagaagtgtggcttcagagggaggtgggtatttccaaatatggagttagggatggctccatgaggtaagtgacagtttgagctaagtcttgaaggatgcttggcagctagaaccatattttccatattcaggaattcaaatttgcctttattcagctagagagaaagagagaagggggtgtgggggacaatgnncacacttttattcccaacgcagaagcccttgaaaatgtgcttggggttttcatcatggtttttggaaaggaccgatccaaaaggctatcccttataactcatgaaaataaaattgccggacctgggccaaa

SEQ ID NO: 12832 - DNA, 949 bp, Homo sapiens
atagccaagaccacatctctacaaaaattaaaaaaaaaaaaaattagccagacatgatgacatacactggtagtcctagctactcaggaggctaaggctccttgcttgagctgaggaggtcaaggctgcagtaagttgtgatcataccactgtaatccagcctagggaacagagcaagaccccatctctaaaaagaaaagaaatgcacattctcaggtcccatcctcgacccaataaatcaaaagctctacctgagtttcagatttagtagttccgtgttggggttcaacaatgtgtaggggtcctatacgtattagctctcactccttattcctccaacttggtcatggtatataattctttttatagattcctggattttgtttgctaatattttattgaggatttttgcatttatatttatacaggatatatgtctgtccttttcttgtgatgtctttgtctgattttggtatcatagtaatagaatgagctgggaagtgttcccccttctgtttttttggaagagtttgtgattatataccatgatgaagtgggatttattccaggaatgcaagtttggttcaacgtgctaaaaccaatcaatgtaatagattactagcataaagaacaagaaaagcataattatctcagtatatggagaaaaaaacattgacaaaatttaacaatcctttcatgataaaaaaaaaaaccaacaaattaggaatagaagggaacttctcaacctgaaaaaggacacctatgaaaaagcctcagctaatatcatacttaatgatgaaacattgaaagctttacccctaagatcaagaagaagacgaggatgtccactcttaccactcttgttcaacattgtagtggcagttctagccaggggcagttaagcaagaaaaagaaataaaaggcaaccagattggaaaggaaaaataaa

SEQ ID NO: 12833 - DNA, 874 bp, Homo sapiens
cactgcacccactgtcctgcacccactgtctggcattccctagtgagatgaacccggtacctcagatggaaatgcagaaatcacccatcttctgtgtcgctcatgctgggagctgtagaccggagctgctcctattcggccatcttggctccaccgtatccttgttttaatagaagaaaactgtataatatcaatattggaatggttaaatactgttttactcattatattgatattatacattcattagaagatgacttaattagccaggtgtggtggtgcatgactgtagtctcagctactcgggtggctgaggtgggaagatggcttgaggcaaggagttcaagaccagcctggacaacatagcaagaccccatccataaaaaaaattcccagactgacaaagaaacttaaaaaataaaacatagactaggatctcattaacaaattaacattatatatatataacagatgtgaaataaactaccagaaagattctcttctacatcatatgtcaccagggaaatgtgagttaaaacaatgagataccactacctaccaattagagtggtcaaaatccagaacatgctgtggaaaatgtggagcaccaagaaattttatccattgctcatggggatgcaaaatggtacagccacttaccaaactaagcatactttgaccatactctccagcaatcacactctttggtgtttaccctaataaactgaaaatttatgtccacataaaaactggcacataaacatttatagcaggtttattcatacttgccaaaacatagaacaaccaagatgtccttcagtaggtgaatggataaacttggtacatcaggacagtgaaatattattcagtgctt

SEQ ID NO: 12834 - DNA, 443 bp, Homo sapiens
gggttcgggctgtgtctccaaccagccattccctctctctctcccttaggcctctattctgtgagacacaatattgcagttaggccaattaataatcctccagtggcctctaagtgttgaagtgaaaggaagaatcacacctttctcattttaaataaaaaactcgggccgggcatggtggctcacacctgtaatcccaggattttggggggccaaggtggcagatggcttgagcccaagagttcaagaccagcctaggcaacatgccaaaccctgtctacaaaaaatacaaaaattagctggccatgttggtgtgtgcctgtagtcccagctacttgggaagctgaggtgggagggtcacctgagctcagcaggtagaggttgctgtgggccacgatcgtgccactgcactccagcctgggtaacagcaagaccctatctca

SEQ ID NO: 12835 - DNA, 935 bp, Homo sapiens
  misc_feature (605)..(605): n is a, c, g, or t
gcattgcctctgtgggggcaggagacagcaaacataaaacctgtccctgaaaggggcaagatggccccgatggctccctgcacctgtcctggtgcctgcaggcaggcgggtcagctcccctcccgctgccaaatctcccacgtctctgtgcgctctgtcacccctgctttctggcctgagggctgggaagggaggtctggggagcccaggagctgagaagtacccaaaaaccacccccaacgccccccaaccctcaggcgtgcctgtgagtgtgtctgtgtgtctcactctgactcacccagacaactgacttcagcagccaaccttggtcattcccagaaccaccactggggggcatacgtgtggctagactgggggcgcccgaatatctgtctctacaaaaagtaaaaaaaaaattaatggggtgtggtggtggtgcgtgcctgtggtgtcagctgcttgggacgctggggcaggaggatcacttgagcccgagaattcaaggctacagtgagttaagattacgccactgcactccatcctgggtgacagagcaagaccttgtctcaagaaaaaatttttaaatgagtaaaattttaaaaaancaaaaaaaaaaaaaaaaaaaaaaaaaaaccggggttttatttggggggggggaaaaaggggtattgaatttcgaccattggtcaatagcgtgtttcccttgagcccaggtttcttttgtacagggggaacagattcgcagggcccccatagggagcccgattaaattccgatacgccggtaccggatattttgtcgcgccaccacgatggcgcagcagacgcgaggagagtcaccgacaacacgcccacacacacaaaacacacatcgacggacgacagccctgacgcaggacgcaaccaaagagccgatatacggcaggggatccatca

SEQ ID NO: 12836 - DNA, 154 bp, Homo sapiens
taacttggcccagattgtcaacttatgaatcctactgattaaaaattttttcttgcatttctcatcagccatcgaacattggttcatgattatttatagcacttaatgacattgaaagggatttatttcaatttattcagtctttattaacact

SEQ ID NO: 12837 - DNA, 1202 bp, Homo sapiens
tttgcacttgtaatttcccagagttgaaaggaaagattgaactggaatattgtgtaaactatctgtcttacattagtgtagcattttgcaatttggggaacatcttcacaatttgtgtctcgttgttcagaacaaccctgtgaagtagtttggcaatgtctgtgttacatttcatgtaatttagccaactcccattccaactaggctttggctaaatctgacaattttatatatagcttaaaacaaagaatatacattcttttcacccctcccagtctacccatccagccttcatgattcattcctgtgtcaaggttagtcgctgttttccatttgaattggtttcttttatggtcagtttactttcttccctctcccctccctttcctgcacatccccatccttgctatgcctttctgtcctcttttataatggatatatctttttcctgccattatccctcagacattctcctcatggcacattttcttcaaatgctaacatttactgagtgtacattgaagttctgtgcatacaggaagaagttattttctgagcttagataatactatgtgtatatgtgattaaaatgaagattattttctaaagccttcaaattagaagtggatttctgtttcattacttccgttttaaaagtttttgccagagagttttgctaaatactctcttatttgctctagtgtactagtccagtagtgtttgcatgtggatgtctgtggatgacagttattgtagcactttggcagtgcactaaaattttgccactatgaaatgtttctttattgtgtgtgcgtgtgtgttttgaaatacgcacacagccacacccacatatatattaaaagtggttgtattcatttagtgaaaaacaaaaagtagatgtacttctgtaaatcagataaatgcttggaatttgattgtctacccaatcaacagttttccctctttgctctggaaatatttgtactcatatagcatatttcaaaaatgttgtcattcattaaggcctcttaaatagaccactattttttgtgtctggcagatgagtatgtcaaggattgagatgaacacataagtcttggaaattaaataaatttataaacataaagataatttaatgctgtgacttcattttttaaattctttaaaccaactttctcccaataaaaaattataaactatgt

SEQ ID NO: 12838 - DNA, 1843 bp, Homo sapiens
acatccagctgcctgagaccctcctgcagccttctcaagggacagccccactctgcctcttgctcctccagggcagcaccatgcagcccctgtggctctgctgggcactctgggtgttgcccctggccagccccggggccgccctgaccggggagcagctcctgggcagcctgctgcggcagctgcagctcaaagaggtgcccaccctggacagggccgacatggaggagctggtcatccccacccacgtgagggcccagtacgtggccctgctgcagcgcagccacggggaccgctcccgcggaaagaggttcagccagagcttccgagaggtggccggcaggttcctggcgttggaggccagcacacacctgctggtgttcggcatggagcagcggctgccgcccaacagcgagctggtgcaggccgtgctgcggctcttccaggagccggtccccaaggccgcgctgcacaggcacgggcggctgtccccgcgcagcgcccgggcccgggtgaccgtcgagtggctgcgcgtccgcgacgacggctccaaccgcacctccctcatcgactccaggctggtgtccgtccacgagagcggctggaaggccttcgacgtgaccgaggccgtgaacttctggcagcagctgagccggccccggcagccgctgctgctacaggtgtcggtgcagagggagcatctgggcccgctggcgtccggcgcccacaagctggtccgctttgcctcgcagggggcgccagccgggcttggggagccccagctggagctgcacaccctggaccttggggactatggagctcagggcgactgtgaccctgaagcaccaatgaccgagggcacccgctgctgccgccaggagatgtacattgacctgcaggggatgaagtgggccgagaactgggtgctggagcccccgggcttcctggcttatgagtgtgtgggcacctgccggcagcccccggaggccctggccttcaagtggccgtttctggggcctcgacagtgcatcgcctcggagactgactcgctgcccatgatcgtcagcatcaaggagggaggcaggaccaggccccaggtggtcagcctgcccaacatgagggtgcagaagtgcagctgtgcctcggatggtgcgctcgtgccaaggaggctccagccataggcgcctagtgtagccatcgagggacttgacttgtgtgtgtttctgaagtgttcgagggtaccaggagagctggcgatgactgaactgctgatggacaaatgctctgtgctctctagtgagccctgaatttgcttcctctgacaagttacctcacctaatttttgcttctcaggaatgagaatctttggccactggagagcccttgctcagttttctctattcttattattcactgcactatattctaagcacttacatgtggagatactgtaacctgagggcagaaagcccaatgtgtcattgtttacttgtcctgtcactggatctgggctaaagtcctccaccaccactctggacctaagacctggggttaagtgtgggttgtgcatccccaatccagataataaagactttgtaaaacatgaataaaacacattttattctaaaccctcaaaacaaaaccacctccacaccctccaccacacaccccaaccgaggccgccccacccactaaaaggtacgcccctagaagggcacccagcatgcttgcggtgggcccgcaggtttatgttgtaaccggagtggccccaaatggcgggcgcttttatagagcccgagcccgtggtcggcggtgtagcaccactcgtgtgagagcaggaact

SEQ ID NO: 12839 - DNA, 1626 bp, Homo sapiens
acatccagctgcctgagaccctcctgcagccttctcaagggacagccccactctgcctcttgctcctccagggcagcaccatgcagcccctgtggctctgctgggcactctgggtgttgcccctggccagccccggggccgccctgaccggggagcagctcctgggcagcctgctgcggcagctgcagctcaaagaggtgcccaccctggacagggccgacatggaggagctggtcatccccacccacgtgagggcccagtacgtggccctgctgcagcgcagccacggggaccgctcccgcggaaagaggttcagccagagcttccgagaggtggccggcaggttcctggcgttggaggccagcacacacctgctggtgttcggcatggagcagcggctgccgcccaacagcgagctggtgcaggccgtgctgcggctcttccaggagccggtccccaaggccgcgctgcacaggcacgggcggctgtccccgcgcagcgcccgggcccgggtgaccgtcgagtggctgcgcgtccgcgacgacggctccaaccgcacctccctcatcgactccaggctggtgtccgtccacgagagcggctggaaggccttcgacgtgaccgaggccgtgaacttctggcagcagctgagccggccccggcagccgctgctgctacaggtgtcggtgcagagggagcatctgggcccgctggcgtccggcgcccacaagctggtccgctttgcctcgcagggggcgccagccgggcttggggagccccagctggagctgcacaccctggaccttggggactatggagctcagggcgactgtgaccctgaagcaccaatgaccgagggcacccgctgctgccgccaggagatgtacattgacctgcaggggatgaagtgggccgagaactgggtgctggagcccccgggcttcctggcttatgagtgtgtgggcacctgccggcagcccccggaggccctggccttcaagtggccgtttctggggcctcgacagtgcatcgcctcggagactgactcgctgcccatgatcgtcagcatcaaggagggaggcaggaccaggccccaggtggtcagcctgcccaacatgagggtgcagaagtgcagctgtgcctcggatggtgcgctcgtgccaaggaggctccagccataggcgcctagtgtagccatcgagggacttgacttgtgtgtgtttctgaagtgttcgagggtaccaggagagctggcgatgactgaactgctgatggacaaatgctctgtgctctctagtgagccctgaatttgcttcctctgacaagttacctcacctaatttttgcttctcaggaatgagaatctttggccactggagagcccttgctcagttttctctattcttattattcactgcactatattctaagcacttacatgtggagatactgtaacctgagggcagaaagcccaatgtgtcattgtttacttgtcctgtcactggatctgggctaaagtcctccaccaccactctggacctaagacctggggttaagtgtgggttgtgcatccccaatccagataataaagactttgtaaaacatgaataaaacacattttattcta

SEQ ID NO: 12840 - DNA, 249 bp, Homo sapiens
gtacagactgcttttccagcagcatggacacaagaagcatagtaagatgatgataacccacataaggcaggccctttggaatatgttaggtttcaattggtagtggaatagtgtatttgattatatggttagtacttgggaagcagaatgaagtttgtcacttagaatagattggtagtcttaaaagagagcgtctagggaataagttgaattgcttcacaaaaaggttaattggagaaaaaagtttta

SEQ ID NO: 12841 - DNA, 444 bp, Homo sapiens
aagccaaggatgagttagcctgctgctacccattttagctgcagagtgggctgtgcaggttctgagctttccccatgtgatagtcaaagaccccaaggcagccccagcctctctaggtctctgcacagtctccagtgtggaaagctgtgggaaaggaaggagcaggttctaggtcttcaggattttctgcatcttaaagcagctcatctcctttgccctcctagggagcaggggggcctagctttgggatcgtcctcctagcctcagaaataattgttcaagaaataacatttctcacacaaaggataaatgtttgaggggatggataccccatcttccatgatttgattattacacattgcatgcctgtatcaaaaatctcatatatacacctactatgtacccacaaaaatttaaaatttaaaattaaaaacaaaacaaaac

SEQ ID NO: 12842 - DNA, 464 bp, Homo sapiens
tcatggctatgaggtgatttgtcctttgctggatgactagataaatcagtaaagacagaattcaggaaaagggatgagagatggaatggggaggagactcagatttaaagaatgccttgtgctaggccacgtgctgagcattttctataagtcagttccccaagtcctctgaagaactcaaatccttcagcacatgtttgttccgcacaggttagcagtggtcacaggcaggccctgagggtggactgcctgcccaggttcctgtgctgtgcgtggcgctgggctttgctcagaggagtcaaggagaagtcacttggccccagctctaagaagacttgctgtccaggacaaagattgtcaagctgtttctctaaggttcatagtgagaaatccgttttatgttgcaacctgtaggaacacattagtcccacagtcagaagtaaaacatttcatctcaagaaaaa

SEQ ID NO: 12843 - DNA, 363 bp, Homo sapiens
cttctcccatttaatcttcacatgcttaggtttacgtacgcttacatttatggtttcacactctggccttgatctctgaatcagatctctttgttttaatgacattctgggctacccttctggtttgggactttgggatccactgttatttctgaggtctgattatttgacatatcaggtgcacaggcccatgtgcaaatcctctatcagtcctgactcatgaaacatggctactactcctacccccatcactgaagcctgtcacttcactactggcaaaggtatttagggaaagttcttaccctcctaataggatgaggttgtagagaaccatttacataatttatgcttacgctttctcta

SEQ ID NO: 12844 - DNA, 498 bp, Homo sapiens
aggattgagactagtttaattcatgccgtaacaatttgctattcttctctgaatctcagtttcctcatccttaaaattggaataattttacttgtcctaatttcttcatgagataatgtctatgggaggactttgcaaactgtaacaaaaacaacagatttcaatatgtattgtctgaaactctagtaactggtgggattgagagtaggtagatatgaggaagagttccccacttagtttccttttaggtattgtcatgggcactttttctagttatgagagtaagaacttaggggaggaaataggttttctcaagtatcagggctgttgagtctagttaggaactgtgtaggtagtgaattttgttttcttactttttggtgccttctctctccaatgatgcctcttattctctgtctgtggacatatatcttatgacctgggactcattccagatgtgaacgtgttttctgaatcaaaattgggacatgaagtctt

SEQ ID NO: 12845 - DNA, 524 bp, Homo sapiens
tacccggcaacctccgacccacaccaactccagagccctggcccacacccgagctatgaccatggacagagaattttgtctctttaggcatcactttccttatctgaaaagtggagacaaaaacaggacctacttgctaaggctgatgttaggactccaaggacatggatgaatgaacgtaggcttctcacagggcctggcagtcctccagccagttcagcacacattaacattgaccctgaggaaaaccatatgacctgatgctgtggaacttgtagaaacttaatgcagagcttaagccttcataacaacactgagaaggaaacagtccagacttaaaacctgtctgcttggtgggcaaattcagatatagggtagtagccagaagtgcagccctgagcccttgactgctaggagtgaggcaggggttgggatttaggggatgtcatcctgatggggactctgggagcccagctcatgagtgttgagcttggaaaactttttgttttttagctggaggctca

SEQ ID NO: 12846 - DNA, 587 bp, Homo sapiens
gcactttaggaagcttagagtggggaagtgatggggtggtgggctggaggcagcctgaatgaagagaggaggcagagacagaggctgagcggcaatggtggagctgctgtaagacgatgctgggggctggcaggtggtctaaaaagccctttcctggatccctgtgggtgtgagggattaaagcctacaggtaaagcaactacaggcccctgccacacctcctcaggtgcttaaagagttgcctctgtgttcccagttgtaaatgagatcatctttggtgatgtctggatgataataaccactctttattacacattttctctgtgctttacagggagtaggttctttaatcctcccaacatccctttgcggtaggtgctgtaagtcattttatagatgaggaaattgaggtcttagagaggttagatcatttgcccaagaccaacagctagtcagtggtagaattgggatttgagcacagagacagtctggctacagagcctgtgcttaccgtaaccaccatgcttttaaatagcaatttttcctaatgaaaattgatagtgtaatgtccagaaggttagaattta

SEQ ID NO: 12847 - DNA, 297 bp, Homo sapiens
caaactccagagctcaaacagtctgcccgccttgacatcccaaagtgctgggattacaggtgtgagccaccgcacccggccttcacttttatccatatgtttcgctttggaaattcaagtttgctacacgttcactattcttcataaaataagtctagtaaaatgttgatatatagtcttagtaaaatgtttaacttgttctttgccaaagaataatttgaaaaatgagaaaacctgtcactcccttctttcctccctcctatagccccacctaaaattaaacatattgaacagctg

SEQ ID NO: 12848 - DNA, 193 bp, Homo sapiens
tactttaagttaatgtttatacacatatacagcaatttgtttttttaatgttatcagattaactgaagataatgaattttaaaataattcttgtgatgtaagagggaaaggaaagtaagtgctaaacttagtttaaacttcaacatctgtaagttaatacagccattatggagaacagtatggagggtcctca

SEQ ID NO: 12849 - DNA, 215 bp, Homo sapiens
gtccactggtgtcccacactgcagaagtggtgcatggaacagaggtcaggagttgagatcccgatttggaagttatttacacagaggatgaatctgcaatcatgaagtctgatgaaattccaataggaaaaccatagggggtggggtgggagagaaaagagatctctgagctgaactatagacagcagcaaaatttagggaaaaaggagaaaaaa

SEQ ID NO: 12850 - DNA, 503 bp, Homo sapiens
acaataatcaccaagaaaatctctttggtttttaaaaataaataaacatatattcataaaactcaaaaaacagttatactgaacgttgagatggcagaaactttcagaagcaaaaattaagcatattgaaaggatcccactcatatgaaactaacaggctgttttctgtttaaactcaactgtgagtgcttctgttcagaacacgttatttcatgactaggataaagaagcaaatggtttatgacttgtctgctttctggtagttagaatacaagggtcaatctatggctagtgtttattggtaattttaaaatctttaaaaataagtagctgggcacagtggcttacgtctgtaatcccagcactttgggaggctgaggcaggagaatcgcttgagcccgggacggaggttgcagtgagcggagatcgtgccactgcactacagcctgggaggcagagcgagactctgtctcataaaacaaaacaaaaaaataaaaataagt

SEQ ID NO: 12851 - DNA, 446 bp, Homo sapiens
  misc_feature (413)..(413): n is a, c, g, or t
  misc_feature (420)..(421): n is a, c, g, or t
tggatgttttttagggctataaaaaagttaatttttcatgaaagggcaaactagaccagaagatgctgctgaataagtctttattctattgaaagtaataggcaaaaacctaataccatagaaattgctaagctttttatttcttctccaattttctctctaaggggagagaggtctataaaggcgttcatctgtgtccactttttaaatgacttagtcctgccactgaatttgcctgggggaagagaactcataagtagataatacaccaggagtcaagccttttgaagtcattttgtcgctctctccttttttttgggtgttgaggtgaggataagaggagggcgtgaaaccccgaggcggagcttgcagtgagccgagattgcgccactgcactccagcctgggcgacangaagtcnntccgtctcaaaaacaaaaaaaaaca

SEQ ID NO: 12852 - DNA, 610 bp, Homo sapiens
tggaattgcttctttaaacttgactccctagaaaatatcaattttccatcatgtctcagagcaaacgctgccttctctgagaagcctcccctgattcctccaggccccatcccctttcttcacacttccttgtgaacatgcctcaaaatcatagccgttcccattatgctataactgatttcatgtctgtcccggctccaggctgcagccctagaaggagtctgacttcatttccctcactatcccccatagaagctcagtgcgtgacatataacaaattgctgattaatatctgttgaaagaataaagcaaggagggagggagtgaggccaactgcacagctcttcatagcagaaaacaacagaaagagccttggcatttaacaaacctgagtttggctcctagctctcctgcttggcaagtggtttagccttctgtgcctcactgtccctttctgtaaaatggggacatccatctatctcacagggaagactgaatgaagtgtgtaagcctgaggcacagtgcctgccccatcaacagagtgtgggttattttcatcccttctcctccttgctcctcccctcagataataaaaccctctggtctgatc

SEQ ID NO: 12853 - DNA, 519 bp, Homo sapiens
atccttaggacaaccttttgagggaggagatacggttattaacctcatttaggaaacctttgtaggggagtgaatagaaaatgggacactatggaagtcaaaagtaaggaagtagaaaacaagcttgagaaaaaattttcccaacaaaaggctgaaaatgtagaatatgagaactatggggaaaattatagcagcttttaatggtgttatctttgaatggtaagattaggcatgacatttgttttcttctttatgtttttcaatgttttaaaataagaactttttgaaaaatgcttttttttaaacaaagagcatagttgacagagagcatctaaggttttcaataaataatcttaaataattcaatgaaaattaaattgcattacaggcagtattcagggagtagacaagagtgaagcagccccgacagggagttaacctcctaattgggaaaatagagcagagagattcatgctgctgaagaagcactgtgactatgcaccttcactcctccaactc

SEQ ID NO: 12854 - DNA, 1154 bp, Homo sapiens
  misc_feature (527)..(527): n is a, c, g, or t
atctgtaaagtccccaacattccccccaattccttttttctgcctggttctgccagggactttatcctcttcaatattggcaggttgtggatttttgtctgggagcaaaatgcattgaatattttaaactggaaagatattttaaattgactttaatggaaacatattttattgttgggacagataggtttgttttacttttgttttgttgccatgggaactcaaggaacactgtagtctgggtattccaatgatagcaatttgctggtaccacccttcccccagcttcattttctgatggagatggtgacaccacgagggaccctctttactgagaagaatgacagcattacctctgagtgtgggaaggaggaggagggaaagcagagaattgggtgggagagacaccccatggacgcccaaggacccctcactctgggttctgagagccctgggccaacctggctctctagatgggtgctaaggagactttaatttccttttctaattttgcaagttcacaaagnagggcaccattctcatttcggttcctttttttttttttttcattttttctttcattttttttttttttctccccttcactcaactcagcagctggctggctgacagcagtaaaaaatacatttcactttgctggtcaaaggcctaaagccagaagcaggaaatctggaattaaatgtttcttgtatctggaaagaggcatgactaaggtaaaactgaatccaaacacaagccctacttgttcaaggcttccagagagagtatatgagagtgtgtgagtgtgtgagagagtgtgtgtgtgtgtgtaaaggtcaaccgagtgttttttcccccccttctaaatcattgaaagataattatagtggcttggggaaaaaaagcctcctaaaataaaacaagcaaggcagaagctaaaaggaagcaagtagaaatatgaccagctaagctttgaagaacagggcacggtctcgcacggcacacaatcgctgcttcatatagtgatttccgtttggtgcaattttcactgaatgttttttcagttatcctgtcatggtacaacacaattaccccacaggatatgatcttatcatatgattattagaagtttttacagtacaagaggacaaaag

SEQ ID NO: 12855 - DNA, 240 bp, Homo sapiens
cctagtagaatgccagacaggcctacatacgcctgaatccttgggaatgcacagctaggctctgaaaatacctctgtatggtattgaatctacttctggggttgaaacgggccttaaagatacttgggtagttaaagaaaattatttgctcatctaatcaagtgatgtttgaatctgtctgctggtggagtgaggactgtggaggaaggatcgacaaatatttattgagtagatgctgaa

SEQ ID NO: 12856 - DNA, 712 bp, Homo sapiens
aaaacattacccactttgcatttcacttctgttcttttcctgtgagacagatactactatctatcctatttttatgggttaaaaagcacagatcaattgaaaaagaactggaaggataactgctaaactgagaactgttacatccaggcacgttgactcacgcctgtaatcccaacactttgggaagctgaggccggtggatcacgaggtcaggagatcgaaaccatcctggccaacatggtgaaaccccatctctactaaaaatacaaaaattagcgggtgtggtggcacacgcctgtaatctcagctattcaggaggctgaggcagaagaatcacttgaacctgggaggtggagattgcagtgagccaagattgcaccactgcactctagcctgggcaacagagtgagactccagagttgagactctgtctcaaaagaaaaaaagaaaaggtttctgttgggccaggcccagtggctcacacctgttatcccagcactttgggaggccaaggcaggcagatcccttgagtctaagagttttgagaccagcttaggcaacttagagagaccccgtctttacaaaaagttagccagacatggtggcacatgccatggaaggctcacttgagcccgtgaagtcgaggttgcagtgaactgtgatcttgccactgcactccagcctgggtgatggagtgagaccatgtctcaaa

SEQ ID NO: 12857 - DNA, 916 bp, Homo sapiens
aaaacattacccactttgcatttcacttctgttcttttcctgtgagacagatactactatctatcctatttttatgggttaaaaagcacagatcaattgaaaaagaactggaaggataactgctaaactgagaactgttacatccaggcacgttgactcacgcctgtaatcccaacactttgggaagctgaggccggtggatcacgaggtcaggagatcgaaaccatcctggccaacatggtgaaaccccatctctactaaaaatacaaaaattagctgggtgtggtggcgtgtgccttaatcccagctactcgggaggctgaggcacaagaatcgcttgaacctaagaggcggaggtttcagtgagctgagatcgcaccactgcactccagcctggcaccagagcaagactctgtctcaaaaaaaaaaaaaaagaattgtggtcacttccagaaaagaattaggggagtgagattggaagtggtaatcataggaacttttgtgtcatctatattttccttttttccaaggaaaatattcatatattaattgtttaattaaaaattaaattttggctgggcgcggtggctcacgcctgtaatccctgcactttgggaggccgaggtgggcggatcacgaggtcaggagatcaagaccatcctggctaacatggtgaaaccccgtctctactaaaaaatatgacaaaaattagccaaggcaggcagatcccttgagtctaagagttttgagaccagcttaggcaacttagagagaccccgtctttacaaaaagttagccagacatggtggcacatgccatggaaggctcacttgagcccgtgaagtcgaggttgcagtgaactgtgatcttgccactgcactccagcctgggtgatggagtgagaccatgtctcaaa

SEQ ID NO: 12858 - DNA, 412 bp, Homo sapiens
ctgcctggctgaagaagaggatctccttacaaaggccttataactcagacctttaccctctcatctgtctcttctgaaatactgcactctagcctgggcaacagagtgagactccagagttgagactctgtctcaaaagaaaaaaagaaaaggtttctgttgggccaggcccagtggctcacacctgttatcccagcactttgggaggccaaggcaggcagatcccttgagtctaagagttttgagaccagcttaggcaacttagagagaccccgtctttacaaaaagttagccagacatggtggcacatgccatggaaggctcacttgagcccgtgaagtcgaggttgcagtgaactgtgatcttgccactgcactccagcctgggtgatggagtgagaccatgtctcaaa

SEQ ID NO: 12859 - DNA, 446 bp, Homo sapiens
cggatggcctcgttcctgcccaccacagcaattactcctgaaactggtaccaccctgctctaatgtcccctggccagggtggggacaacctgactcattgtagcctgaagtccccgggtccccagagcccccgttgctgatacacagcaggatgattcacccccctgtggagctcctggagcctcccctcatgacagccagcttctgaggcccatgctaccggtatgtcaccacacgtgggggcacgtacaccccatatgagtttgcctgggttgacacgacaaactagcaaagaccgggggctcaaacaacagacttctatcgtctctcagtcacggagcctggaagtctgagatcagggtgtctgcagggtgggcttctcctgaggcctctctccttggcttgcagatggccgccttctccctgtgacctcgcgtggtcatccc

SEQ ID NO: 12860 - DNA, 416 bp, Homo sapiens
cacctgacagccagctgcagcctccagacatgagggtatctcaggccatccatgtgcagttgatccaccatatcattgcagttacataagtgaccctgacacagacagcagaaaaccacacagttgaccacaaaataaattgctaacccagagttatatattactaaaatgtagttgtttacaccgctacatttttgggatagcaatagaaaactgacaaaaacagctgcctaaactcaccttttgggccaaattagtaaaagggcgaaccacagaatttgtgcctacattgcacagagtggataccagaggtagatgagttaacctcaggaagcaaagacagtctcaaacatcaattatccaggggtgagcagagaaaacaagccaggcataaaaccaaacacgtaaattcactc

SEQ ID NO: 12861 - DNA, 596 bp, Homo sapiens
cttaatttttcttttttttttttttaaagggtgaagtttggggagaactcccaagagaatgggcacaggaagtagcatttatctacgcactaaaatgccagacacttttaaacacctcacatttacaacaattactagccccattttccagatcctaatactcgggttaagtgattcacccaaatgcctggatcttgaaaactgtagcccaaatttaaacaaggtatttccggattcagagttcttctgataacaggcccaagtgtaaggaaacaaagggcgatcagaccccagaaaggcctgtcacgaggagttttgagagtagtcagactgtccagccgcggagcaacctaaccaggcactggaagacaccaccagatgctcagggcaaaaccttttgtcccctctccgcagcgaggcaatccaggccggagagtcagatgcacctgagaaaaccaatatccccagggcatatcttggggttgggtcaaactccattccttatcctagaagccctgcttatgggtcccggaggttgactctgctagtgctccggcgccctctagcgattgtccattccaatgccagctctctct

SEQ ID NO: 12862 - DNA, 473 bp, Homo sapiens
ctgcatcatttcaatgacatttttagcaccagaaaaagattctccagagatgttttgagtattttggaaaaagtttaattctgggcctctttctctgtgatttgaagcactcacagaactcagttattcatgtaataacattgattgctaataacgttgattactaaatttaaatgctaaagcttgtcctaagacttaactttttttttttaaatgaaccacctatattagtaaaaaaaaaaaaaaattaagtatgtaccattcccagtgtatgcacatttttaaatttagaaattatatatgtgactactgcattaatattattatgttaaaaacatatattaaaatagaactttaaaaagatgagaggaaatttatactaggggtcagcaaacattttctttgaagggccagatagtgaacattttaggtttttcagcctgtatagtgtgtactggaactattccactgtt

SEQ ID NO: 12863 - DNA, 1515 bp, Homo sapiens
gtacgctttcttagaaatgtgagcaaagaggagtgccttaaatgtatgaaaacaactgaaattgaaataatatgatgcataagaactaataaagcattttcttattttttaaaaatttgtaggctgggtgcagtggctcatgcctgtagtcccagcactttgggaggctgaggtaggaggatcactgtagcccaggagaccagcctgagcaacatagtgggacaccatctctacaaagaattaaaaattagccaggcatgggtgacatgtgcttgtggtcctagctattcgggaggctaaggcatgaggattgcttgaactgcagtgagtgaggctgcattgagccatgttcatgccactgcattccagcctgggcaacagagcaagacccagtctcaatgtttttttaaaaattttattttatctgtatttgtattttattaattttttttctagactaggtactgataattatagttaactcttcttactaggtaacttgtttttaatactctaaatttcatactatattactcaaaattcagaatgtaagccaaagagagataaagtatattaataaatgttaggtttaaacttgtatgatacatttccaaataggtattatatatttttaaaatatataatgtccatcttttctgtattgatgcctatacaaccataaccccagaagtactctcatactgtgaaagtcattgctaaattaggtattcactttcttaaacacatttctgagaaaagggtgtctttttagggcagatgacttagaagttcttttacgtagccaaggcaaaagattgtctattgaaagcttggaagggctatatgtacatttggaggggaaaaaaaatttatcttacctccagcaagaagagatttctaaaatattgtgctgaaacacaatatacctaggattagacacttttagatagttaaatataagaaatgctaggcaagcataatttgtatatgtataatacaccctgaaaattttattctcaacttcacttctgtttagatctgagacactaaaaatatttcctttagcagaaaattcttcaatgattatagaaagaaaatttgctgtatagtcacaaatttaatatacaaaattaagaagtgccttaaaaaaattgtaacctgataatacttcgcattagtcctcatttcaaatatgtgaagcagccaagatccacaaaagtgtgtattttcatgtattgaatgaatatattaaaatgtttcttttaaattttattttagaaaagatacagtgaaaaccactgaaactgagttagatgaatttgagatttgactttgtttgctttaatatatactagatagatagatagatagatacatagacagatagatacatagacagacagacagatagatataaatctcagcactttaagaggctgagctgggaagatagcttaaagccaggagtttgaccagcttaccagcctggataagggaagactttgtctctacaaa

SEQ ID NO: 12864 - DNA, 468 bp, Homo sapiens
agaggtttaattggctcacagtactgcaggctatacaggaagcatgaggccagcatctgctcatggtgagggcctcgggaagcttacagtcatgcaaaaggcaaaggggaagcaggtgcatcacatagagcaggagaaagagagagaggtgggaggtaccatactcttttaaacaatcagatttcctgtgaagagaagaactcactcattgccatggaaaggacaccatgccatttatgagggagctgcccttgtaatccacacatttcccaccaggccccacttccaaaattggggatcacatttcaacatgaaatttggagggcacaaatatccaaaccatatcattccccttattttgaaatattgttcagaattccagttcagtaatatggtttcttattccctaagtcaactgccagcccttgaggtccattatgaaagaaaacttcaaagggaacgctccaa

SEQ ID NO: 12865 - DNA, 446 bp, Homo sapiens
atgcctgcagtttccacggggaaagctcaggttagtgaagggggcctaaaatgtaggtatcattggtgtcgaaataaatatacctttgaaaacgaccttttccaaccccattgaagttatctacctctcttatgaattaagtgtagaaacattgtgaggagcagggccaaggttaataagcaaagatttcggaccaagtttttatacctttttatcctgtttccccattgcaatcccctcagtgcatgtgtgtgcgcgcgcacacacacacacacacactctcactcatgcttctaacaaaaatatgttgttacagtacagattctcagtaaacatttcttaaataaaggcagccataatgtatgtttgttagcctatattagtgtgaggaaataaagtagggctactttataaccaaaatgaggaaaataaacagtaaaagaaaa

SEQ ID NO: 12866 - DNA, 792 bp, Homo sapiens
ccaagatgatgccactgcactgcagcctgggcaacagagtgaaaccctatcccttaaaataaaaaaaaagtagggaaggaatgaggaaaacacccaagggaagagcattttagttggagggaactgtatatgcagaagccctcaggaggcaggaatcatttcattcattactgtatcccaaatgcttggcacatagtgggttttcaataattaatgagtaaagatgaaacaaggcgtatgtgcgtgtgtatctgtgtgtgtaatgtgatctagtttgccttttaaaaagagagaatagagacaccacagatacagagtactcggtaaaggagatgttggaatggttgaagaaatgcttggttgactgttgcttgagtcattggttggttggctggttctttttttcttttttaattttttttttctcctggaccctcttatgggttaagactgattctttcattggctaatttgttgggttttggttaactggttcattggttgattaatgggttgattggttggttgactgatttatttggttggttgaccgattccctgattgattggtcgactagttcattggttggttggttggttggttggttgactgggtggttagatggttgattgttggttggttcgttgactggtttattggtttcttcactggtttgttggtttattgactggtttgatgattcagtggttagttgttttactgaatgaatgggacagatgcacctgaatgagacgtgagtcagcacccaactacgcagaagaccagcaact

SEQ ID NO: 12867 - DNA, 516 bp, Homo sapiens
aaaaaaaaaaaaaaaattaataataactataccttatcaaatgctgacaagatgacagacactgtacaataaatgttacacatactggttcatttaattttcacaataaccatgtaagatcagtattatcatctgcattttgtgaatagcatgccaaaatccagagtgattaactcatccaagatcacacagcagtagatccaagatcacacagtagtagaagagtattcagatccaggtttatctgaactccaaacttttgctccttccatgacaattttcaagttacatatctagcaaataaaaaaaaaactggatagcaatgatagagaaagtaaacttatcaaggatggcaggcaaacagacattgtattcctgcttcctggtagaggagcaaatgccattgactttccatgggcagagaaaagcaacgagcaaaggaaacacaagcacagcacacttgcccatcgtgtgccaagtcaaagagatgaaaatgcctcctcggatgggagcatg

SEQ ID NO: 12868 - DNA, 451 bp, Homo sapiens
gcatatttagtagagacgaggtttcacgaggttgtccaggctggtctcacaaactcctgacctcaagtgatctgcccatctcggcctcccaaagtgcagggattacagacaggagtcaccacgcccagcctgaccattctttttttaataaaaatattcttaccaagagtatatatttgagttagctgcttacaggtcattttgcttgcattacaacgataatcaaactttgacacacactcataatcaaattgtctgaaaactttttttttaacttgaaatattgaattacttttagatttacagaaaagtttcaaaaatagtacagggattttctggctgggcacggtggctcccacctgtaatctcagcactttgggaggccgaggctggcggatcacgaagtcaggagatggagaacatcctggctaacacagtgaaaccccgtctc

SEQ ID NO: 12869 - DNA, 285 bp, Homo sapiens
tacccaagaggtcatggcagaatcaacagcttgttttgttttctttaaaccgggaccaaaaataattcccctctggttggttcagtggcttattaactctggtacttggggcaagaagagtgagaggatcgcacgatcttctaaggcagccttgaatactgaggcccacacaacaatctcctgaaatggttccttgaagctaccagatagtctttctgccttgcagtggggtttctagtattggaaattctgggcaaatattaaaggatggtgtattatgcagtt

SEQ ID NO: 12870 - DNA, 323 bp, Homo sapiens
agttgtttcggtgatggagagggcattattggctttagtgggcagagaccaggacggccagaagtcctcctgcaataggcagaaaagtttcacaagaattgtcccatgccccacaggacttttatatatctaatatttgagtgttacatgttcctacttataaccacagcacgaccataacaattaggaaattgacactgattcgataataccatcgaatccacagaccccactttatgggtccagcatccagactagtatcacaggttggatttagttgtcacgtctcattcgcctccctcaatctagaacagttcctcaga

SEQ ID NO: 12871 - DNA, 395 bp, Homo sapiens
cctcctctctctcttgcttttcctgattttctctccccacgacagctggagggattttcttaacacttaaattggatcctgtctctgtcctacctaaaaacctattgtgactgtctattgctcttagacaaatcaaactccttctcatggtttaaaaggcagtacgtaaactagctcgtgtcagcctgactttccagtgtccttcctgccagtcccacctcattgcctagcaggtactcttgtctccctccatcgcctccacaggcctgctcccttgagctctttctgtccctccatgaggcttggaatctctcccctcctacctactcactgtcatctatgtcccaactcattgtctcctcctcagagacttcttgagcactgccgctcgtatc

SEQ ID NO: 12872 - DNA, 336 bp, Homo sapiens
agacaactagcttttcaaccaggtaatttaacatctgtattaaaaagattttatgccaggcaccgtggctcacaccggtaatcccagcacttttcgaggccgaggtgggcgggatcacttgaggtcaggttgagaccagcctggccaatatggtgaaaccctgtctctactaaaaatacaaaaactagctgagtgtggtggtgcacacctgcaatcctaggtacttgggagactgaggcaggagaatcacttgaacctgggatgtggaggttgcagtgagctgagatggcaccattgcgctccagcctgggcaacagagtgagactctatctcaaa

SEQ ID NO: 12873 - DNA, 492 bp, Homo sapiens
tttgtttctccactgactatgtaaattccaaggaggaagcatctaattgaactagtttgggtcacatgcttgcctctttgctagtgaaaggcaggattcctagttacagtccagtgagtaagaattaattccccaatggaattcaaattgtcattaggaaggagaaataaatgctggaagctaaaaagcaacaaatgtttaacacagccactatttattcattgtgtatggtttaccagtcactgtgattcatgtgcattatctcatttaatgcttataacagggctagtagttcagatcctgttataatcctcattttacaggtaagaaaactaaagctttgagaaaggttagatagcttgtgcaaggtcacaccactagaaagtggcagaatcagaacttcagagagaacactcataaaagccatacttctcttgacagagctgtgtattagcattgatgataatatttactgaatctgtccttcagggg

SEQ ID NO: 12874 - DNA, 492 bp, Homo sapiens
taaatgtttaacttgtctttgttatctataccaagatataactggctgaaaaatatttattatgcatggaaagcactctgtaaaccttgtgaagtgataaataagtgaaaggtataattgttagttgacattaatataaaaaaggattattcttcaataaaattggttgatttgaagggaaaaaatccttttagttgaactagtagaagttagtaataactattgactcttgttttgtttattaaggaaactagcattgttaatatatactgattaatatttaattattcacagttgtttaattatatatttgtggatttcttttctaaatgttttaggcatatgaaaatattatagtacaacacctgtaatttttaagtagatcaaatattttctgtaagattgctttaaatgctccttataaattcacattgcaaaagtaacttaatatggaattaacacttgtcagataataaaacagccaaacttgtg

SEQ ID NO: 12875 - DNA, 622 bp, Homo sapiens
acaatcttctttattgaccctattagattttactaccgatttaagaagaatgctgttttatactttgtatttattgccagggcttttctgagtcttctatccaaccaacatactttatatgtcttaacaattctaacaattattttgttacgagagtccaagagtgaaagtttcaccaataatctgggaaaatatgtctttttaaaattttttacagtttactgtgtacatatcatgggcctacgtgagataaaacagtaaacgccacctatgaagtcaaactgctttgactagcaactgcatatgaactgcatagttttagttttataagaattttagctttatcggaggtaactattccaaccataagtaatatgtcatatttgaaagtttaatagccattgccacatcagatatgtctttcttggagatagaatcagtatgctaaatctatttaaaaattttacaataatgttacaaatatcaagattcaaaatggagatgacagactttccttaatagaagcaacaaagtggcttcattcttttaactattgccttagatgggtgccataaattatgtgtcttctgcattgttaaaataaatttatgaatgtatttta

SEQ ID NO: 12876 - DNA, 2710 bp, Homo sapiens
ggcttgaatcccggcgcctcagaggactatgaggcgggcgccaactgcttgggccgcagggcgggaggcagcgcgggagtggggcgttgaggggccggcctagcttggggctctggccttgcgtcttccgaccgaatcaccgctcctgagcccggtgcggggctgccgctatcgcctggccgtgggtgccggagcggccgggttgcgactcagcgttcttgggtgggcgcgggcggcgtctccgcggcgggcatcccccgaggccgccctcgggccatgatcgactccgtgaagctgcgccgcgacagcgcggcggacttcttctcccactacgagtacctgtgcgcgctgcagaactcggtgccgctgcccgccgtgcgcgcctgtctccgggagggcgtgctggatttcaacgccgaccgcctccgcggggtggactgggcgcctctgctgagcaccctcaagatcaataaagacctgcccttggtctccatcaagagcttcttccagccctggctgggggacacaggttctgacatgaataaattttgcagaagtcgtgttcctgcgataagatacaaagatgtgaccttccagttgtgtaaagctcttaaaggctgtttaagtatatcaagtgtgctaaagaacctggagctaaatggactaattctgagagagagggatttaactattctagcaaagggattgaataaatcggcttctttggtgcacctgtctcttgcaaattgtccaattggagatggaggtttagaaattatttgtcaaggtataaagagctctatcactcttaagacagtcaacttcacaggatgtaatctgacatggcagggagcagatcacatggccaagatcttaaagtatcagaccatgagaaggcatgaagaaacctgggctgagagtcttcgctataggagacctgatcttgactgtatggctggcttaagacgtatcacactgaattgcaacacacttattggtgacctaggtgcatgtgcttttgcagactctctcagtgaggatttatggctgagagctcttgacctgcaacagtgcggcctcaccaatgaaggagcaaaggctttgctagaggcccttgaaaccaatacaactctggtcgttctggatataagaaaaaatccactcattgatcattctatgatgaaagcagttatcaaaaaagtcctccagaatggaaggagtgccaaatcagagtaccagtggataacttctccatcagtgaaggaaccatccaaaactgctaaacagaaaaggagaactataattctaggaagtggtcacaaaggaaaagctactattagaattggattggctacaaagaaacctgtaagtagtggcagaaaacactcccttggtaaagaatattatgcgcccgcacctcttccacctggtgtgtctggtttcttgccgtggcgtactgcagaacgtgcaaaaagacacaggggtttcccattaatcaaaacacgtgatatatgtaatcagttgcagcaaccaggttttcctgtgactgtgacagtagagagtccttcatcctctgaagttgaagaggttgatgattcttcagagagtgttcatgaagtgcctgagaaaactagtatagaacaagaagcattacaggaaaaactggaggagtgcctaaagcagttaaaggaagaaagagtgataaggcttaaggttgataaacgagtcagtgagctggaacatgaaaatgcccagttaagaaatataaatttctctttgtctgaagcccttcatgcacagtcattgacaaatatgatcctggatgatgaaggtgttttgggcagcattgagaattcttttcagaagtttcatgctttcttggatctccttaaagatgctgggcttgggcagcttgccacaatggctgggatagatcagtcagattttcaattactaggtcatccccagatgacttctactgttagtaatccacctaaagaagaaaagaaggcgcttgaagatgaaaaaccagaaccgaagcagaatgccctagggcaaatgcaaaatatccagtttcagaaaattacaggtgatgctagaattcctttgcctctcgactcctttcctgtcccagtttctactccagagggcttaggaacttccagcaacaacctaggagtcccagctactgagcagcggcaggagtcttttgaaggattcattgctagaatgtgttctccttcaccagatgcgacttctggaactggaagtcaaagaaaagaagaggagttgtccagaaatagcagatcttcttcagagaaaaagaccaaaacaggtgaatataccaaaaaacactctgataagcaacaccctggaaaggacctgcattcctgatctgactgtcctgaaaaccagaaaagcaaagaaactagggaaactagttctttggttaatgaaccaattaaaagtaggtctttgaaaaaatacgtttctgtcaagaaagaaaatagaatagtgactgtttcatccaagacaaataaaagtaaatccagtccactagaacattctgaaagtgatactcttggatgtgattttgaatttcaagaaagcatccattctctatcacacctttcatatgactaaatcttttgaaactatgtttttacctttaaattttaataaattttcttatgtttttattatggcatat

SEQ ID NO: 12877 - DNA, 3376 bp, Homo sapiens
ggcttgaatcccggcgcctcagaggactatgaggcgggcgccaactgcttgggccgcagggcgggaggcagcgcgggagtggggcgttgaggggccggcctagcttggggctctggccttgcgtcttccgaccgaatcaccgctcctgagcccggtgcggggctgccgctatcgcctggccgtgggtgccggagcggccgggttgcgactcagcgttcttgggtgggcgcgggcggcgtctccgcggcgggcatcccccgaggccgccctcgggccatgatcgactccgtgaagctgcgccgcgacagcgcggcggacttcttctcccactacgagtacctgtgcgcgctgcagaactcggtgccgctgcccgccgtgcgcgcctgtctccgggagggcgtgctggatttcaacgccgaccgcctccgcggggtggactgggcgcctctgctgagcaccctcaagatcaataaagacctgcccttggtctccatcaagagcttcttccagccctggctgggggacacaggttctgacatgaataaattttgcagaagtcgtgttcctgcgataagatacaaagatgtgaccttccagttgtgtaaagctcttaaaggctgtttaagtatatcaagtgtgctaaagaacctggagctaaatggactaattctgagagagagggatttaactattctagcaaagggattgaataaatcggcttctttggtgcacctgtctcttgcaaattgtccaattggagatggaggtttagaaattatttgtcaaggtataaagagctctatcactcttaagacagtcaacttcacaggatgtaatctgacatggcagggagcagatcacatggccaagatcttaaagtatcagaccatgagaaggcatgaagaaacctgggctgagagtcttcgctataggagacctgatcttgactgtatggctggcttaagacgtatcacactgaattgcaacacacttattggtgacctaggtgcatgtgcttttgcagactctctcagtgaggatttatggctgagagctcttgacctgcaacagtgcggcctcaccaatgaaggagcaaaggctttgctagaggcccttgaaaccaatacaactctggtcgttctggatataagaaaaaatccactcattgatcattctatgatgaaagcagttatcaaaaaagtcctccagaatggaaggagtgccaaatcagagtaccagtggataacttctccatcagtgaaggaaccatccaaaactgctaaacagaaaaggagaactataattctaggaagtggtcacaaaggaaaagctactattagaattggattggctacaaagaaacctgtaagtagtggcagaaaacactcccttggtaaagaatattatgcgcccgcacctcttccacctggtgtgtctggtttcttgccgtggcgtactgcagaacgtgcaaaaagacacaggggtttcccattaatcaaaacacgtgatatatgtaatcagttgcagcaaccaggttttcctgtgactgtgacagtagagagtccttcatcctctgaagttgaagaggttgatgattcttcagagagtgttcatgaagtgcctgagaaaactagtatagaacaagaagcattacaggaaaaactggaggagtgcctaaagcagttaaaggaagaaagagtgataaggcttaaggttgataaacgagtcagtgagctggaacatgaaaatgcccagttaagaaatataaatttctctttgtctgaagcccttcatgcacagtcattgacaaatatgatcctggatgatgaaggtgttttgggcagcattgagaattcttttcagaagtttcatgctttcttggatctccttaaagatgctgggcttgggcagcttgccacaatggctgggatagatcagtcagattttcaattactaggtcatccccagatgacttctactgttagtaatccacctaaagaagaaaagaaggcgcttgaagatgaaaaaccagaaccgaagcagaatgccctagggcaaatgcaaaatatccagtttcagaaaattacaggtgatgctagaattcctttgcctctcgactcctttcctgtcccagtttctactccagagggcttaggaacttccagcaacaacctaggagtcccagctactgagcagcggcaggagtcttttgaaggattcattgctagaatgtgttctccttcaccagatgcgacttctggaactggaagtcaaagaaaagaagaggagttgtccagaaatagcagatcttcttcagagaaaaagaccaaaacagaatcccattgaaatgactggagaaatattaaaataaaaataatagcagagttggaaaaccagaaatttgaacagtgaaatttctggaagataagaagcagatgatttaagtaccagttaattaaaggatggaacagctaagccattccactcatctttggagcatctgattctggagtttgccaccaggctaagaaagcagctatctgaagtgggagctctgacccaagaaatgctgggatcggagaataagggaattatccaaaatggctccgaagaggaactgaagttaagctgcccacatgatctctctaactatgatgacctgccacttccgtttataatcaccatataagtgcctgtaatcatttgtgttcattaaaagtgaaccagaattcccatttggatgaaaaaataacacttccaactttaatcttaggccctcatttataaatatggacaaccaagaatcatcaaatttgaagaaaaccagtaacataaaaggaggcatgaaattaaaattaacctgttcaagaagatagttactaggagaaacatgaaatttttaaattaatgaatcaaaatcttcagcaattcataaagatactgtgttcataaagaataggatgccatgaaaaaaatatttagagtttctggaaattaaaaatttgattatgaaactgaaacactcagaagatggactacacagcagaatggattcatttgaagcttaaattcatgaaatggaaggtattaattggtcttagacgtttcatcagcaacttaattacttagaaaaaatctttctcagagtaactaagcaaaatgaacaatgaacccattaacgtgtggttttgttttttgggttttttttttttgagtcaaggtctcactcatgtcacccaggctggggtgtagtgatgggatcacagcttattgtaaccatgaaccattgggcttaaattatcttcccacctcagcctcccaagtagctgcaatgtaccaccatgccgaagttttaaaaaattattgtagagttggg

SEQ ID NO: 12878 - DNA, 2480 bp, Homo sapiens
ctcatgagcccacactaggctaggtcgaggctggtgggaatcggccgaggatgactccgtgaagctgcgccgcgacagcgcggcggacttcttctcccactacgagtacctgtgcgcgctgcagaactcggtgccgctgcccgccgtgcgcgcctgtctccgggagggcgtgctggatttcaacgccgaccgcctccgcggggtggactgggcgcctctgctgagcaccctcaagatcaataaagacctgcccttggtctccatcaagagcttcttccagccctggctgggggacacaggttctgacatgaataaattttgcagaagtcgtgttcctgcgataagatacaaagatgtgaccttccagttgtgtaaagctcttaaaggctgtttaagtatatcaagtgtgctaaagaacctggagctaaatggactaattctgagagagagggatttaactattctagcaaagggattgaataaatcggcttctttggtgcacctgtctcttgcaaattgtccaattggagatggaggtttagaaattatttgtcaaggtataaagagctctatcactcttaagacagtcaacttcacaggatgtaatctgacatggcagggagcagatcacatggccaagatcttaaagtatcagaccatgagaaggcatgaagaaacctgggctgagagtcttcgctataggagacctgatcttgactgtatggctggcttaagacgtatcacactgaattgcaacacacttattggtgacctaggtgcatgtgcttttgcagactctctcagtgaggatttatggctgagagctcttgacctgcaacagtgcggcctcaccaatgaaggagcaaaggctttgctagaggcccttgaaaccaatacaactctggtcgttctggatataagaaaaaatccactcattgatcattctatgatgaaagcagttatcaaaaaagtcctccagaatggaaggagtgccaaatcagagtaccagtggataacttctccatcagtgaaggaaccatccaaaactgctaaacagaaaaggagaactataattctaggaagtggtcacaaaggaaaagctactattagaattggattggctacaaagaaacctgtaagtagtggcagaaaacactcccttggtaaagaatattatgcgcccgcacctcttccacctggtgtgtctggtttcttgccgtggcgtactgcagaacgtgcaaaaagacacaggggtttcccattaatcaaaacacgtgatatatgtaatcagttgcagcaaccaggttttcctgtgactgtgacagtagagagtccttcatcctctgaagttgaagaggttgatgattcttcagagagtgttcatgaagtgcctgagaaaactagtatagaacaagaagcattacaggaaaaactggaggagtgcctaaagcagttaaaggaagaaagagtgataaggcttaaggttgataaacgagtcagtgagctggaacatgaaaatgcccagttaagaaatataaatttctctttgtctgaagcccttcatgcacagtcattgacaaatatgatcctggatgatgaaggtgttttgggcagcattgagaattcttttcagaagtttcatgctttcttggatctccttaaagatgctgggcttgggcagcttgccacaatggctgggatagatcagtcagattttcaattactaggtcatccccagatgacttctactgttagtaatccacctaaagaagaaaagaaggcgcttgaagatgaaaaaccagaaccgaagcagaatgccctagggcaaatgcaaaatatccagtttcagaaaattacaggtgatgctagaattcctttgcctctcgactcctttcctgtcccagtttctactccagagggcttaggaacttccagcaacaacctaggagtcccagctactgagcagcggcaggagtcttttgaaggattcattgctagaatgtgttctccttcaccagatgcgacttctggaactggaagtcaaagaaaagaagaggagttgtccagaaatagcagatcttcttcagagaaaaagaccaaaacaggtgaatataccaaaaaacactctgataagcaacaccctggaaaggacctgcattcctgatctgactgtcctgaaaaccagaaaagcaaagaaactagggaaactagttctttggttaatgaaccaattaaaagtaggtctttgaaaaaatacgtttctgtcaagaaagaaaatagaatagtgactgtttcatccaagacaaataaaagtaaatccagtccactagaacattctgaaagtgatactcttggatgtgattttgaatttcaagaaagcatccattctctatcacacctttcatatgactaaatcttttgaaactatgtttttacctttaaattttaataaattttcttatgtttttattatggcatat

SEQ ID NO: 12879 - DNA, 1878 bp, Homo sapiens
aggctagtacgaggccgggtggtgatcacatggccaagatcttaaagtatcagaccatgagaaggcatgaagaaacctgggctgagagtcttcgctataggagacctgatcttgactgtatggctggcttaagacgtatcacactgaattgcaacacacttattggtgacctaggtgcatgtgcttttgcagactctctcagtgaggatttatggctgagagctcttgacctgcaacagtgcggcctcaccaatgaaggagcaaaggctttgctagaggcccttgaaaccaatacaactctggtcgttctggatataagaaaaaatccactcattgatcattctatgatgaaagcagttatcaaaaaagtcctccagaatggaaggagtgccaaatcagagtaccagtggataacttctccatcagtgaaggaaccatccaaaactgctaaacagaaaaggagaactataattctaggaagtggtcacaaaggaaaagctactattagaattggattggctacaaagaaacctgtaagtagtggcagaaaacactcccttggtaaagaatattatgcgcccgcacctcttccacctggtgtgtctggtttcttgccgtggcgtactgcagaacgtgcaaaaagacacaggggtttcccattaatcaaaacacgtgatatatgtaatcagttgcagcaaccaggttttcctgtgactgtgacagtagagagtccttcatcctctgaagttgaagaggttgatgattcttcagagagtgttcatgaagtgcctgagaaaactagtatagaacaagaagcattacaggaaaaactggaggagtgcctaaagcagttaaaggaagaaagagtgataaggcttaaggttgataaacgagtcagtgagctggaacatgaaaatgcccagttaagaaatataaatttctctttgtctgaagcccttcatgcacagtcattgacaaatatgatcctggatgatgaaggtgttttgggcagcattgagaattcttttcagaagtttcatgctttcttggatctccttaaagatgctgggcttgggcagcttgccacaatggctgggatagatcagtcagattttcaattactaggtcatccccagatgacttctactgttagtaatccacctaaagaagaaaagaaggcgcttgaagatgaaaaaccagaaccgaagcagaatgccctagggcaaatgcaaaatatccagtttcagaaaattacaggtgatgctagaattcctttgcctctcgactcctttcctgtcccagtttctactccagagggcttaggaacttccagcaacaacctaggagtcccagctactgagcagcggcaggagtcttttgaaggattcattgctagaatgtgttctccttcaccagatgcgacttctggaactggaagtcaaagaaaagaagaggagttgtccagaaatagcagatcttcttcagagaaaaagaccaaaacaggtgaatataccaaaaaacactctgataagcaacaccctggaaaggacctgcattcctgatctgactgtcctgaaaaccagaaaagcaaagaaactagggaaactagttctttggttaatgaaccaattaaaagtaggtctttgaaaaaatacgtttctgtcaagaaagaaaatagaatagtgactgtttcatccaagacaaataaaagtaaatccagtccactagaacattctgaaagtgatactcttggatgtgattttgaatttcaagaaagcatccattctctatcacacctttcatatgactaaatcttttgaaactatgtttttacctttaaattttaataaattttcttatgtttttattatggcatat

SEQ ID NO: 12880 - DNA, 3194 bp, Homo sapiens
ctcatgagcccacactaggctaggtcgaggctggtgggaatcggccgaggatgactccgtgaagctgcgccgcgacagcgcggcggacttcttctcccactacgagtacctgtgcgcgctgcagaactcggtgccgctgcccgccgtgcgcgcctgtctccgggagggcgtgctggatttcaacgccgaccgcctccgcggggtggactgggcgcctctgctgagcaccctcaagatcaataaagacctgcccttggtctccatcaagagcttcttccagccctggctgggggacacaggttctgacatgaataaattttgcagaagtcgtgttcctgcgataagatacaaagatgtgaccttccagttgtgtaaagctcttaaaggctgtttaagtatatcaagtgtgctaaagaacctggagctaaatggactaattctgagagagagggatttaactattctagcaaagggattgaataaatcggcttctttggtgcacctgtctcttgcaaattgtccaattggagatggaggtttagaaattatttgtcaaggtataaagagctctatcactcttaagacagtcaacttcacaggatgtaatctgacatggcagggagcagatcacatggccaagatcttaaagtatcagaccatgagaaggcatgaagaaacctgggctgagagtcttcgctataggagacctgatcttgactgtatggctggcttaagacgtatcacactgaattgcaacacacttattggtgacctaggtgcatgtgcttttgcagactctctcagtgaggatttatggctgagagctcttgacctgcaacagtgcggcctcaccaatgaaggagcaaaggctttgctagaggcccttgaaaccaatacaactctggtcgttctggatataagaaaaaatccactcattgatcattctatgatgaaagcagttatcaaaaaagtcctccagaatggaaggagtgccaaatcagagtaccagtggataacttctccatcagtgaaggaaccatccaaaactgctaaacagaaaaggagaactataattctaggaagtggtcacaaaggaaaagctactattagaattggattggctacaaagaaacctgtaagtagtggcagaaaacactcccttggtaaagaatattatgcgcccgcacctcttccacctggtgtgtctggtttcttgccgtggcgtactgcagaacgtgcaaaaagacacaggggtttcccattaatcaaaacacgtgatatatgtaatcagttgcagcaaccaggttttcctgtgactgtgacagtagagagtccttcatcctctgaagttgaagaggttgatgattcttcagagagtgttcatgaagtgcctgagaaaactagtatagaacaagaagcattacaggaaaaactggaggagtgcctaaagcagttaaaggaagaaagagtgataaggcttaaggttgataaacgagtcagtgagctggaacatgaaaatgcccagttaagaaatataaatttctctttgtctgaagcccttcatgcacagtcattgacaaatatgatcctggatgatgaaggtgttttgggcagcattgagaattcttttcagaagtttcatgctttcttggatctccttaaagatgctgggcttgggcagcttgccacaatggctgggatagatcagtcagattttcaattactaggtcatccccagatgacttctactgttagtaatccacctaaagaagaaaagaaggcgcttgaagatgaaaaaccagaaccgaagcagaatgccctagggcaaatgcaaaatatccaggtttctatttgtatgcagtcagcttacaatgaaggaacactaatgaagtttcagaaaattacaggtgatgctagaattcctttgcctctcgactcctttcctgtcccagtttctactccagagggcttaggaacttccagcaacaacctaggagtcccagctactgagcagcggcaggagtcttttgaaggattcattgctagaatgtgttctccttcaccagatgcgacttctggaactggaagtcaaagaaaagaagaggagttgtccagaaatagcagatcttcttcagagaaaaagaccaaaacagaatcccattgaaatgactggagaaatattaaaataaaaataatagcagagttggaaaaccagaaatttgaacagtgaaatttctggaagataagaagcagatgatttaagtaccagttaattaaaggatggaacagctaagccattccactcatctttggagcatctgattctggagtttgccaccaggctaagaaagcagctatctgaagtgggagctctgacccaagaaatgctgggatcggagaataagggaattatccaaaatggctccgaagaggaactgaagttaagctgcccacatgatctctctaactatgatgacctgccacttccgtttataatcaccatataagtgcctgtaatcatttgtgttcattaaaagtgaaccagaattcccatttggatgaaaaaataacacttccaactttaatcttaggccctcatttataaatatggacaaccaagaatcatcaaatttgaagaaaaccagtaacataaaaggaggcatgaaattaaaattaacctgttcaagaagatagttactaggagaaacatgaaatttttaaattaatgaatcaaaatcttcagcaattcataaagatactgtgttcataaagaataggatgccatgaaaaaaatatttagagtttctggaaattaaaaatttgattatgaaactgaaacactcagaagatggactacacagcagaatggattcatttgaagcttaaattcatgaaatggaaggtattaattggtcttagacgtttcatcagcaacttaattacttagaaaaaatctttctcagagtaactaagcaaaatgaacaatgaacccattaacgtgtggttttgttttttgggttttttttttttgagtcaaggtctcactcatgtcacccaggctggggtgtagtgatgggatcacagcttattgtaaccatgaaccattgggcttaaattatcttcccacctcagcctcccaagtagctgcaatgtaccaccatgccgaagttttaaaaaattattgtagagttggg

SEQ ID NO: 12881 - DNA, 1819 bp, Homo sapiens
ggggattggaatgggaagggtggaagatcattctctgtgctctttaaattgaatagagtcgtaagaaacatttccctccctgaagtaaattctttaaaaattttctgggttctcccggtgccacagtataggcgtgtggatatgtcacacaatggaggccttgtggtttcatctgtgtagacaggaagtcatttctctgggtccacaaatcagctgttgcctccagcaaaacaaatttgaccaccatttctcacccgacacatggagctatcatagtcaagaatgtccttaagtttaaaagaaatgttcttgggggatacatattttatatgtatatatatatttccagattctaaagctaaaacaaagcaaccagtcctaaagcctctgctttctcagagcttttctttctcccttgtcaggatcaaacacattccctgtcattctgcatcatggtattagagcaagtgaattctgtcagagtatcagattttccttttcagttgtttttagagaccgtaatttctctgtaaaagatagcactactgagatgaaggagcacctgtgtgtccgtactgcccctcgcatagccaaaagtaggggcgtgcatctcattctaccgtctaggattttcagcaaccaggttttcctgtgactgtgacagtagagagtccttcatcctctgaagttgaagaggttgatgattcttcagagagtgttcatgaagtgcctgagaaaactagtatagaacaagaagcattacaggaaaaactggaggagtgcctaaagcagttaaaggaagaaagagtgataaggcttaaggttgataaacgagtcagtgagctggaacatgaaaatgcccagttaagaaatataaatttctctttgtctgaagcccttcatgcacagtcattgacaaatatgatcctggatgatgaaggtgttttgggcagcattgagaattcttttcagaagtttcatgctttcttggatctccttaaagatgctgggcttgggcagcttgccacaatggctgggatagatcagtcagattttcaattactaggtcatccccagatgacttctactgttagtaatccacctaaagaagaaaagaaggcgcttgaagatgaaaaaccagaaccgaagcagaatgccctagggcaaatgcaaaatatccagtttcagaaaattacaggtgatgctagaattcctttgcctctcgactcctttcctgtcccagtttctactccagagggcttaggaacttccagcaacaacctaggagtcccagctactgagcagcggcaggagtcttttgaaggattcattgctagaatgtgttctccttcaccagatgcgacttctggaactggaagtcaaagaaaagaagaggagttgtccagaaatagcagatcttcttcagagaaaaagaccaaaacaggtgaatataccaaaaaacactctgataagcaacaccctggaaaggacctgcattcctgatctgactgtcctgaaaaccagaaaagcaaagaaactagggaaactagttctttggttaatgaaccaattaaaagtaggtctttgaaaaaatacgtttctgtcaagaaagaaaatagaatagtgactgtttcatccaagacaaataaaagtaaatccagtccactagaacattctgaaagtgatactcttggatgtgattttgaatttcaagaaagcatccattctctatcacacctttcatatgactaaatcttttgaaactatgtttttacctttaaattttaataaattttcttatgtttttattatggcatat

SEQ ID NO: 12882 - DNA, 1239 bp, Homo sapiens
gttagactaaggagtagtgatagacatttatagagaatgacttaacacttcagaaagatcactttgattagatgtcctttagtatttggtattcggtttatattattatacaatcttgtcctctttttttaagccaaccaggttttcctgtgactgtgacagtagagagtccttcatcctctgaagttgaagaggttgatgattcttcagagagtgttcatgaagtgcctgagaaaactagtatagaacaagaagcattacagctggaacatgaaaatgcccagttaagaaatataaatttctctttgtctgaagcccttcatgcacagtcattgacaaatatgatcctggatgatgaaggtgttttgggcagcattgagaattcttttcagaagtttcatgctttcttggatctccttaaagatgctgggcttgggcagcttgccacaatggctgggatagatcagtcagattttcaattactaggtcatccccagatgacttctactgttagtaatccacctaaagaagaaaagaaggcgcttgaagatgaaaaaccagaaccgaagcagaatgccctagggcaaatgcaaaatatccagtttcagaaaattacaggtgatgctagaattcctttgcctctcgactcctttcctgtcccagtttctactccagagggcttaggaacttccagcaacaacctaggagtcccagctactgagcagcggcaggagtcttttgaaggattcattgctagaatgtgttctccttcaccagatgcgacttctggaactggaagtcaaagaaaagaagaggagttgtccagaaatagcagatcttcttcagagaaaaagaccaaaacaggtgaatataccaaaaaacactctgataagcaacaccctggaaaggacctgcattcctgatctgactgtcctgaaaaccagaaaagcaaagaaactagggaaactagttctttggttaatgaaccaattaaaagtaggtctttgaaaaaatacgtttctgtcaagaaagaaaatagaatagtgactgtttcatccaagacaaataaaagtaaatccagtccactagaacattctgaaagtgatactcttggatgtgattttgaatttcaagaaagcatccattctctatcacacctttcatatgactaaatcttttgaaactatgtttttacctttaaattttaataaattttcttatgtttttattatggcatat

SEQ ID NO: 12883 - DNA, 124 bp, Homo sapiens
gagttttggggatcatattgggaattaattataatatttactttattacttaatactaggaaaaactggaggagtgcctaaagcagttaaaggaagaaagagtgataaggcttaaggttgataa

SEQ ID NO: 12884 - DNA, 937 bp, Homo sapiens
  misc_feature (39)..(39): n is a, c, g, or t
  misc_feature (45)..(45): n is a, c, g, or t
  misc_feature (62)..(62): n is a, c, g, or t
  misc_feature (89)..(89): n is a, c, g, or t
tgtaggaccccactatcgctaagaaaccctctaaatggntaatgngcaatgaatatcttttnttctgaaactcaaccatgaattacggnttcagcaatatgattattctagagtcataaagatgctgggcttgggcagcttgccacaatggctgggatagatcagtcagattttcaattactaggtcatccccagatgacttctactgttagtaatccacctaaagaagaaaagaaggcgcttgaagatgaaaaaccagaaccgaagcagaatgccctagggcaaatgcaaaatatccagtttcagaaaattacaggtgatgctagaattcctttgcctctcgactcctttcctgtcccagtttctactccagagggcttaggaacttccagcaacaacctaggagtcccagctactgagcagcggcaggagtcttttgaaggattcattgctagaatgtgttctccttcaccagatgcgacttctggaactggaagtcaaagaaaagaagaggagttgtccagaaatagcagatcttcttcagagaaaaagaccaaaacaggtgaatataccaaaaaacactctgataagcaacaccctggaaaggacctgcattcctgatctgactgtcctgaaaaccagaaaagcaaagaaactagggaaactagttctttggttaatgaaccaattaaaagtaggtctttgaaaaaatacgtttctgtcaagaaagaaaatagaatagtgactgtttcatccaagacaaataaaagtaaatccagtccactagaacattctgaaagtgatactcttggatgtgattttgaatttcaagaaagcatccattctctatcacacctttcatatgactaaatcttttgaaactatgtttttacctttaaattttaataaattttcttatgtttttattatggcatat

SEQ ID NO: 12885 - DNA, 279 bp, Homo sapiens
gttagctttaggcctctcaggtggtactttctcttgcctcaaatagttcccatacatatatgtattaatttgcactctgctgaatagttaatagagatcttttatagatttttagagttctgtgcctgttcagccctcttgtctctggtgctctatccagaaaactctaactgctttattgtccctgaaatctcagctctgtttcctcaagtctggatggatgtccaccacgctcccccggactctccctccctatgccatcatatagaaatgctctct

SEQ ID NO: 12886 - DNA, 365 bp, Homo sapiens
catgcagatgaaggaaagaaagctttgtgcggcttgcttgtgtgaacgacaagcccaggggttttgttttcttgtgtttacgtaggaaaatcacagacagggacttcccaagagactgtttctcttagccactgtctgctcctaacagttacaagaactgttcttcctcccacagctgtggcagaagcctgcttctgcagggtctctgatggggaagaactgagctgtttaggattgaactgcccacctactgttaagtaatgttctgtctgtaacacaggatttccacttaggaaaatgtgctgtacatttggctgcagcatttactacgcatctgctttacaagcctgttctgcagctccaag

SEQ ID NO: 12887 - DNA, 562 bp, Homo sapiens
ctaaagtaatctgtgaaatgcaaaataagtgaggtaccaaaagcaagcataatactcatgaatttgcttttactttgagatgatccactttatgaatagatttactggatttgcagttgtttatctgcctcatctagaaagtggtactctacggaggattagcgctgctaaaattgatttgttttagtgctgggggctgcatgatatatcttagtactatgctatatttttgtgaaagtaataatctgtgggactgcatacaaatggaaaggtaagaatcttaggagaaaagtgatttcttttaaaaaatgaagcttttgtaacttaaaattattttaataagtactttttgaagtattgaataacatatcttttaatatgaagttttggactttttaaaggtcagctcttgatataattaagaatatttgggctgagcacggtggcccaagcttgtaatcccagcactttgggaggccggggcagttggattgcttgagcccagaagttcgagaccagcctgggcaatgtggtgaaaccccatccttacaaaaagtgaaaa

SEQ ID NO: 12888 - DNA, 353 bp, Homo sapiens
gtttaacccccaggatacaagcaatatcctagtaaagcactagggtcatatgcaacctcccagctgaatccagaattacagatgcatgtaagaaaacttattttcttactaggaaagctaatactaactaacctaggattaattttttcaagctactgatataatttaaagagtgaatatatgattaaaattttacagaaatatagagaggaaaaagaacacggtagagtttgcccctttggacaaatggctgaataactatagtacagatacttcttacgatgtttaaagggtcacatgtcccattcatgcctcatggcctcattatacacctgcttctgatgaaactgtct

SEQ ID NO: 12889 - DNA, 584 bp, Homo sapiens
gcatgtactgtctgtgactgggttaagttaggagaaaattgttcaattctatcccacctttcatatctcgccatcactctttccaaactcagataatgcagtcactctataggaaagcccgttttagatttccacaattaaagatacattgttgggttccggaggctggagtcatgctgcccacatcttgtttgggaagcaaaagctcccagtgagctggtgtgcccatgtgtctttcatgggactgtcccctttagatccccacctgtcacagccatagcttcggggtcctgtcatcacatcccccgggaggggaggcagaaggaggctgagggccccaggatttctgcctggtcccttctcactgtgaggacgcccttggcacatctttctcaagtcacacaaactattgcagttacatacagaattgctgacaggagcaggagatgctgaggaaacagctggcaatgtgacaaaattcttttctgggacaacagtcaaatcatgtatttgtatttttttaagtttaccaatgaattgtacaacaatgtaataataaagttcatcctaatatgaagtgcaaa

SEQ ID NO: 12890 - DNA, 369 bp, Homo sapiens
tgctgtctttttgtgcctcccgctaacacacagctgtttttgttcatacatcattttgtgttcaactgcctggttacttcctcaggtcccttttatggtgaataatggacacatgggagtttgaacacccaagtgtgtggttattcaaacaggaagtctcaaggaagcacagtaactttgtcagaggaacaaaagatgggacaggaaaggctattgatgattctaggcttcaaacatctgctgggaaatctgacaatttctgaaatacagatattccatagcttacaaacaagttggtttgtttatttggaacttgttccattttttaaaaatcagggtattaaatcttcgtaaaatagaagtggagga

SEQ ID NO: 12891 - DNA, 271 bp, Homo sapiens
taaaataaagatcagttcaataaataatagttacttttgtttgaagactgtggttatttattaaatgtaagcactatagtggatccagtaagaatgaagagatcaaaacaattattaatagggtttgataggaaaaattcaatccattaatttgtcaaaatagagtgttactgaaaaaatatatacatgtaaatagtcttagaaaagctttcttcagtcatgattgtgacacttaactccagcttagacaacgagagtgagaccctgtctc

SEQ ID NO: 12892 - DNA, 605 bp, Homo sapiens
ccaccttccaggtagaggattccacccatttgcttaagacccctcaagtctgccttcatcattttgggtatcatgggtctttactatcatttgtttagcttttccacattttgtgatatcttttcagcttttacctattagaattatttttccaagtctacttttggatagaatataattttactgtttttggttgttctctaagtgacattgaaaggtacacactttttatttttattttttactctctccaggatcttagtaggaaggaatgcattttatctttcaccacactgtgtaatctccttggcatcctctcctttatttgttggatttttcttttaattaaaaagtcattccaggtatgttttattgcttatttattctttccttatttactttctcaaaaactaattgaacataggaaagtaaatctttaattctgctaaaaatatcaagactattattgaaatctattcttacacattctttaaaatgagcaccccaaatcattgttctttcttgggacaaatgcaatgaagatagtgtgttagctatgcgatatcatcagtggtgtgcaaatgaggaaaaaaataaaaaaaaaa

SEQ ID NO: 12893 - DNA, 311 bp, Homo sapiens
gccaaggagaaatatagccccagggatatagatgggaaatgaaatcacctggcccctgactcagtccatctcccaggctaactgggagctactggatacaggcatcaggaaggtgatgtgaaagatgccgcaggtgaaagagaagaagaacgcggagcacctgagcagctgtggagcctcggattcgttggaaggcacattcttggaagaatagctcctgtaatgagattgggcacatccaggccatcttctattttactgtccgcataacacaatccaggaagtgaaatctcagcatgttcacagatcct

SEQ ID NO: 12894 - DNA, 895 bp, Homo sapiens
aggaatccaaggatgaggaaatgcctgagaactgaggaagttcagattctttttgtacatttaagatgaagtattcatttttaccacataccatgtcttctgtcatatttctgttttcatataacattgcaatagaataatgaaagatagtgacctctctagtctttttaaaatataagattctgcttctgtgtcaaaaaacaacaaaaaatggatattaggaacgttttgttgtttaaaaaaattactttgtttttacactttggtagaaaaaacttaaggaatatttcaaacataatacaaagtgagcagaatagaatagtgagcttttatgtaaccattctttttttttttttttttctgtaaaaagagacaaggtcttgctctgtcacccaggctggagtgaagtggtgctatcataacttgctgctgcctcagactcctgggcggaagtgatcctcctgccttagcctgccgagtagttaggactacaggtgcacaccaccacacctggctaatttttaaattttttaattttttttgtggagacgggatcttactgtgttgcccaggctggtcatgaacttttggcctcaagcagtcctcctgctgtggcctcctaaagtgttgggattgagccactgtgcccagcccattgtttttattattttttaaaggtttatttttaggtgaagtttacatatattgaaatgcacaaatcttaactgtacagttgttaataagttttattgagatataatttatatactatagttatatgtacataattcacatgcattctttgaaggtgtacagttcagtgattttttttagtatactcacaaagttgtgcagccatcaccatacctaatttcagaatattttcatcatccca

SEQ ID NO: 12895 - DNA, 344 bp, Homo sapiens
agaaaaggggcagctctgcactattccttcactcacatatttccttcctttctcttttttcatcatcttccctttctccctttatttagtggatttttaaaataaataaaatgctgtgtggcatagcactttgccaaacaggaaactctcataattttgtaatattttctagaatagattttagaccagccatagtgaaatttaattatggtgctaatgtgcttctgaagattcctgataaaagacttgtgcccttaatcccatcgactcaagaggccgaggtgggaggatcacctgagtcctggagtttgtggctgcagtgaactatgtactccagcctgggc

SEQ ID NO: 12896 - DNA, 375 bp, Homo sapiens
tgatcttggcctttaggtctttgggcaaatggaactataattccattgttcagtaaaattgaatgagaaagtgcatataaaatatgtagcatgatggctggtagtgtggatgcccctttacagtaggggtgtacctggctgcataccactttctgaggctctgaagagttccttgccttctttcttgccattcctgcccttatttgaggaaaaggatccagggaagacagaggctctggtagagattcttttggctgccagatttttgccctgagcaaaatgtgttaggtctccacaggttgaaatgccaccagattttaagaactctataatatgaaaagtcttttatttagcatttagtagctgtgaaaattt

SEQ ID NO: 12897 - DNA, 897 bp, Homo sapiens
caccaaactctggtgtagtccagggcagtggggcaggtaaattggcttccctggaaaatatgtccatctatgtgccttattcccagttcgtgcttttaagggatggagcacaccagccatgaactaaggctggagtagcaaaacatgaaatctgctttctacaaattatccagataatctcttccaatccccttctggaggaaaaacagagctgtatgagggtgacagtctggcaggtattcaaagctgcagtgaccatggcttggctcctgttgtatccacagagctgtttgattgggttaatttatacagtttttcctgtatgaatccttttgataagtatctttagaagcttctaattcattttaaaggaatgtttctctttggcttcatgtctcattcttttcacattatatattctggtgataaatgatggatccataaatacattacctttgctcagtcagtgttttctgttgttgatgtaaagtacacaaattggatttgtttcaggatagctgaatttggaatatgacattttgccaagtcagcatcacacttgcccatacaacacagatgtggattttgcagttgttttgtttttaaaattgtatatgtctgtggtgctattgattaatgtaatattgcattaatgtgctattacaacactctagggcattcatgaggtctttcagccagcagcaaagaattccccaaacaaaagcttttaataaaatacagattgcagggcaaagaaaagtatcaaccgtgagaatttatggatagcagaagtgcttgaggaatcaacttttgatggccttgccaatggaaataccgtgtaattgttatattatttcatttccctccaaatcattaaagatcatctatatatctatt

SEQ ID NO: 12898 - DNA, 411 bp, Homo sapiens
aatacagtgtatttaaatgctttgttagtggaagtagaaagtggtatcaggagtatataactagggcatataatctggatttggggaaggcctctggaagaagttaacatttgagacctaaaagatagtaagagttagctagatgaaataagaggggaattctttccaagataagacatttagtgtcctttagatacacattattgttggaagaaaattgtcaacaagatatataattggcctgatttgattgaatagttttaaggatttttcataacacaatttagaaagcatgcattatctgaaaatacaatatgtctagcataaacatgagaaactttaaagttctgagttatatagttattttatcttgttatctgtttacacaataaaaaagagactagttttgct

SEQ ID NO: 12899 - DNA, 1301 bp, Homo sapiens
cccagctaatttttgttctttttttttttggtatagacagggttttgccatgttgcccaggctggtcttgaactcttgggctcaagtaatctgctcacctcagcctgccagtttatcctttctggcatttgttggtcttgcacatattgattaatatttttgatcagatttgggatttgggagccattattcattcacatattttttctgccccttttctctcctctcattatgtttgttatatttactaagagtaattctttttcattattttataataagagaacttatgatagcattggctgaatttcctaagtaatgttcttgttttgttgtttgctaaatatgcttgattataacttatatttattcttttactcaatagttatttagtgtgatgcttcatgttgaggatttctggctttctttttcctcaaaaaaatcatgtttttatttcattgtaatgagacaatgtgggtgctgtcatttcctacatgcttagtttttaataacaaccttatgttgcaggacacatccctcattcttcttttttccaaaattttatctcattatcatgtagttattttatgtgaactatagaaacagcttgtcgagtgttcacaaatatcactggaatttaaattggaatggccctgaatttgtagattaattttgggagagctgtcatttttacaatcttcccatacattaatgtaatatttttctccttttattcgggtcttcggtatctgcgtatgtatattctacttattacttttaatctcccccattttctggaaaaaaaagatgtctttggaagtgcaattctggtgggaaaagtgtagatgtcatctgcatagactagagccaatcagtagggaatgtcattcaaaatgtgttttgtgtttgatcttaccatttctttcaaatgttcctagcagcctgcattatttataatgttctgtattcctggtttaggtaagtccagaggtgagagctggtattaggaaaatgacatagtaaggcatttgttttcagtaatggcagcatccgtttgacctcctttcccatttggaagggctttctccatcctgaaagctcctgtagacttggtgctcttttttttttttaggattcataccagttgaagactttcaaagccttcagtgtaactggttatgttcttactagaaaagtatttagggccaggcgcagtggctcatgcctgcaatcccagcaccttgggaggccgaggcaagtggatcacttgaggtcaggagttcgagatcagcctggctaac

SEQ ID NO: 12900 - DNA, 608 bp, Homo sapiens
ttgcccaggctagtctcaaactcctggcctcgagcaatcctcctgcctcctcagcctgttacagctttttttttaaggtaatctggtaacagctcttaaaagtagtgtgactgatgagtgcacaagcccgtccagccccagccgccccctggcaccttttctgagggtgtctactgccccgctgtgctgtgcccgctaatctgggtgtggcccgatcgcacaatggcttttctggaaggatccgatgctcacgaggcttattgctaaggaggaagatgcaacaggtccagctgttccaagtgactgggtcacgcttcacatcgatgtgcaatgtctcctgccacctgcctggatgcactctcgtgactacctggcaggctgggaacagcacgggggaggcccccgcctgccccagcgacctgcctgccctgctctcaagtgcagacccccaggtctgcacttccacgctcactacacaaccccaagtggccccccgggtggccccgtggccggatgtgcacccagcagagcagccacccttgagacctggggtgtggtctgggggctgtgtggagacctcccgccagggtgcaggagtgtctaagggc

SEQ ID NO: 12901 - DNA, 466 bp, Homo sapiens
ggcttgcagatggctgccttcttgctgtgtcctcacgtgaccttttctctgtgctcacacactactggtgtctcatcctctccttacaaggacaccagtcccatcggattagggccccatccagatgacctcatttaactttagctacctccttaaaggttctgcctccaagtgcagctacattgggggttagggcttcaacatatggaactggggagtgggggtacagttcattccataacaatagccaaaagaattgacaacaaggactcaaaacctacttgtacgccagtgttcgtagcatcattattcacggtagccaaaaggtgtaaccaacccaagtgtctatcaacagatgaatggttaaacaaaatgtggtatgtacatacggtggaatattatccagtcataaaaaggaatacagtactgatacaatgtggatgaaccttgaaaacatgctatgtga

SEQ ID NO: 12902 - DNA, 463 bp, Homo sapiens
tggttttcatttggaatctgatggcaaaccttcagggaaacagggtagctctaacggatttagagacactggataccacgagaaaactgttcttttacaataccacaacttaagtcataaccactgtcattccttaactgaaaaataaaaaaccctgtatttatgatgtatggattggtcatttcaattcatacaaacttttaatccgcaaaactgaggacctgcaatttaagtataacaccgttccgtgagatatttctctgaattatctttcatgatcaagcataaatttttgtttaaaacactttttacttaagtagattacagtttctcattataatcagtcattttatttggaattatagcaatccgggtttttttgctgtactaagacgtagggagtctcactttaggattttatttgcttcttagacatcatttatataatattccttgattttta

SEQ ID NO: 12903 - DNA, 447 bp, Homo sapiens
tcataccttacctcagtttcccctttaaaacagggttgctaattcctacctcacagggtggtcctcatgaggataacatgagataatgtctggggaaattgcttgggaaagtgtaaaaggccactcacacagaaacccctcatgacccatgtggccaaagtggggacgtggacttagaggccctggacccaggcctgggccctgccttgcctgtctggggaaatggtcctggcctttactcaacactgaccctgccttgggaggaagagcctgcccaggccaatctcccacgccctgaccgaagcaggtgccgtcagacagagtcctggcttgggagtcagagggactgagctcaacacgtgggtaccctagaacctgcgcctggataactgagttgctgatgcagcctgaaggggtgggttgcccctccacacctgtgggtgtttc

SEQ ID NO: 12904 - DNA, 372 bp, Homo sapiens
gtagagactgggtttcatcatgttgcccaggctggtctcgaactcaagagttcaagtgatccacctgcctgggcctcccacagtgctgggattataggcgtgagccaccacacccagctaatttatgttcttcataaatgatccagtgaacaaagcataccatactctaaaaaaaagaaataataataatctatttattgtcaggattatggtattcaatgattttcttctttccttagttttttaaaaaaaatgaatcaagggattattttaaggtattttatgtaaatggtgagagtagtcttttaaataatctttatatgaataacctttataatctagtagtatgaataacttttgaaagtcctccaa

SEQ ID NO: 12905 - DNA, 642 bp, Homo sapiens
tgagattcttgatgagtatttaatgaggaatcccgttatttaagatgtgtgcatatggtgagactttattattaataataacttttatattgtacgatcagatttgtataaaatatcctgcttgttttgagtttctgtaagtgccacaaccaaacatcatcaggtgcccgaaaatatattaaggaggctgaagggagatttcgtagtgttgaggaagaaaggttgggttgagaatcacaacatgtaagttttaatcttggatgccatttgggctgttgtagaccactgaatgtctggttatgccttcctttaaaatttttcaggctaaaattttatgaatcagaattttgggggcttggtagtgattcccctggtctccaggtggaggtggaatagccttctttgcatttaggcgtccatcattactagatccttccactctaagaagaggatgtcagctattctcgtagcctgtgagggcccatgagtctgtatttgatgagcacaggatacttgcattccaggaatcttccaggggctatattgtcctattctttccattaaaaaaaaattattaaaagtttggctataagaaatagtgttacctgagaatgaattaagagatacctatttcttaaatta

SEQ ID NO: 12906 - DNA, 484 bp, Homo sapiens
gcaacatgacaaaacaccgtctccactaaaaatacagaaattagccaggtgtggtggcatgcacctgtaatcccagctactccaagaattgtttgaacccaggaggtggaggttacagtgagctgaaatcacgccactgcactcagcctgggcgacacagtgagagagactctgtctcacaaaagaaagaacagaatgtatcctctgtggttaaggggggactactatatttgtaaactatgggtctgaaaagtggttaatactcaaaatatgtaaggaactcagacaactctagcaagaaaacaacttgattaaaaaaatgggctgaggacctgagcataaatttctggaaagaagacatgtaattggccaacatgtatatgaaaaaatgctcaacatctctgatcatcagggaaatgcaaattaaagccccgatgagataccactttacacctgttataggactgttactaaaaaaaggaaa

SEQ ID NO: 12907 - DNA, 1008 bp, Homo sapiens
ggtctgtccacacaaagaggggcaagcctgcatgagtaaaagggagagtgggggcagatacctgccttcattgtccagagggtggattttatttaattttagtttaatttattttttgagaaagagtctgggtgatagagtgagaacctatctcaaaaaaaaaaaaaaatgatgccacatgacttggggcaggttgcttaatctctgtgtgctttggtttcataagactaaacataggaaattgagtactcaaggagaggatacaagtaaagcagtaagcctggtacttactaagtgttctccgaaaaatggtatctgttatattatcgttattatctttgcctagaagctaacaggtacttacttgagcatcagtggaagccttgtttgcctccttgcagggtgcattttgccagagtccaccaagcccttttgtttagggccaaaccttttgactccccagtacccccaagggggcacaagctgaagtggaaaatctgacctgacctgatctgatctgggttttaaaattttaattttgtatttcaacataagttcagacttagagaaaagttgcaagaatagtcataggagctcagtcccttggaactcaggggtcagggcctgagttcacaggggctcttcacctttatcccaattaccctaacataacattttaccacatttgttttctcttttctcatacatgtatacagtgtgtatgtgtgtgtatatgtgtgtgtgtgtgtacacatgtatacatatacacacacattcacacatttcaagggaaaaaagattaaaaatatgtgtttatgtatgtacacacatgtatacgtgtgttggagaatgctgtagtgaatagccctgcctcaggtttgcttctatggccctaccagctttgtacccatcattatccacctggctttttacctctgagtacttcagtatctcctaaaatcaaagactctttcttacattatcacaccccatcctaaaatcaggaaa

SEQ ID NO: 12908 - DNA, 455 bp, Homo sapiens
gccagggtggtctcgaattcctgacctcaggtgattgacctgccttggcctcccaaagtgctgggattacaggtattgagccacagcgcctgacccagagggtggattttagagctaggcctctggaatcaaatcgtcatgccaggccaggagtggtggctcacgcccgtaatcctagcactcagttgcgaggccaaggtgggtggatcgcttgagcccaggaatttgagactagcttgggaaacatggcaaaaccccatctctactaaaattacaaaaattagccgagcatgatggcaggcgcctgtagttctagctactcaggaggctgaggtgggaggatcacctgagcccaggaggttgaggttgtggtgagccatgatcatgatcatgccactatactccagcctgggtgatagagtgagaacctatctcaaaaaaaaaaaaaaatgatg

SEQ ID NO: 12909 - DNA, 994 bp, Homo sapiens
atcaagaacaagacaatgttttgtgcacattaatttttgcacagactactttaaaagtttaatgcatgccattctattttccattatttatttacaaggagaaaccacacatatgttaaagtttgggagtgtattttaggaaatgattccttttctcatttttggctttagatattcttttttctttaaataagggtggaatataatgctgacaacatcaggcccttgtaatgcctcctctattcctctgcacagactgtgtccccacattggcttcctgcctgccagcctctgtgcctttccttgtgctgtccccagcctgggggctgggaatgtccttatccatttcttttgtgcctgttgaagttctgcttgtcccaccaggctcagatcagatacctcgaaggagccttttataatttcctcttcttcctcctcccctctcctccagttagaatggatttaccttccacttgtttccaaggcactttactcctggtgcgtgtatttcatcctcttgcttgtatacctctctctcctggttactgtaaactctgaagggcagcacttaaggaattctctctgccttaccttgtctagtatgatgctttctgttacagatacctggaaaatgggcgttgaattaaattatttactgaattggcaaaaaaaaaaaaaaaacggaagcggccgcaagcttaatcccctttagggggggttactttcacctaggccctggctcgcgcttatacaaagtttgccactgggataacctcggttaaccccaatttaatcactcttgcgacaaattcctcttatggtccgcgtggtctccaacgtaatagccgcccccccctctagcctattctcacaattttatcggacataaatgtcaacagagtactctcccctgaatgttacgcataacctcctggcaattcttgctcgctatgtcttcttccatcatgtactcttctcccggctgttcgcatcc

SEQ ID NO: 12910 - DNA, 573 bp, Homo sapiens
gctgctgtcttctacacatagacacgcacacacaccctttctcgcacacacacacacacacacacacattctcacacattctcacatgctagacccttctaagcagcttgtccgtttttacacatgtatctgaactctcctgcatcactcttggccattttctcgcattcgattgcttttgccgttttttatttagatcagtacttgatttcattttcattttccagtctactttggggttctcgcagtggataatttagccaaaatgtttttcttgtggagacattagctgacaattcccaccacagactggcttgtacgtcctcccagggagacctaaacctggctcccctcccaccgcagttcttaatattgtggataagagatccatctttctcattctggatacctacttagtgctcatggaagaaggggtgccctgcccagccccagctgctaagctcacacctcctgtcaaaaagtcccaggacatgcacgacgagaggagcaagctggtgaatgagtatgcgtgtcgagtgctggaacttctggggatggggcatcgtctgtttg

SEQ ID NO: 12911 - DNA, 597 bp, Homo sapiens
gctgctgtcttctacacatagacacgcacacacaccctttctcgcgcacacacacacacacacacacacacacacacacacacacacacacattctcacacattctcacatgctagacccttctaagcagcttgtccgtttttacacatgtatctgaactctcctgcatcactcttggccattttctcgcattcgattgcttttgccgttttttatttagatcagtacttgatttcattttcattttccagtctactttggggttctcgcagtggataatttagccaaaatgtttttcttgtggagacattagctgacaattcccaccacagactggcttgtacgtcctcccagggagacctaaacctggctcccctcccaccgcagttcttaatattgtggataagagatccatctttctcattctggatacctacttagtgctcatggaagaaggggtgccctgcccagccccagctgctaagctcacacctcctgtcaaaaagtcccaggacatgcacgacgagaggagcaagctggtgaatgagtatgcgtgtcgagtgctggaacttctggggatggggcatcgtctgtttg

SEQ ID NO: 12912 - DNA, 555 bp, Homo sapiens
aaccttatatcaacacctcaacaaccttttttataaaaatcttataatttggttctaaaatgatatacagaaatgccccaaggcaagagtagctaagacacttttgaagaacaaatttggataacttattagacttcttataaaacagtggtaattaaggcaatgtggtgttacacgagtaatcatgtagatcaatggtaaaagagaatctgaaaactgataattacctgtagacacttgaattatgacaaagttggcattctagaacaatgggaggaaactcaccttttcagtaatgcctctggctcagttatccaaatgggtaaaacaaagaaaaaacaaatttactgcataccattcacaaaatttactctgcctaaacctataatagaggacaatgtatagcagtaagtatagatcaggcaaaaagaaagcctgaaaatacctaagcaacagtctcaataggttagaataaaaaaacgctgtgatctaactccaaaaaaataaaaaggacatgataaaaataaaagaagatgaagaaataggaaaacacac

SEQ ID NO: 12913 - DNA, 433 bp, Homo sapiens
cgccgttccacattgctggggctcggcggtggtgagtctgggagctgcacagcattatggcgggtgcagtggttcagttgttattagtgagtgtcattgtgccctgtttgcaagcactcaagtgttcagaggaggaatcaagggtaccaaatggagaaaaacaatacacaagagtctaatatctttaagtgggtaaattatcttttccttgagaaagcagaaaatgttaatggctaagtctacaaagacattttataatagaagtaaataaagaaacaaaagattgttccagtactattgtgtgcaattaaagcctgtcattcagtaccctaaattaatctaagtactctgacgtaaatgtgtatgtcataaaaggtacattttgtcttgaattttttctttatataaataattaacaactggaaaaaaaaaa

SEQ ID NO: 12914 - DNA, 1630 bp, Homo sapiens
catagtaaaatgaagtaaaatggaaagtttggagtaggagaaaagagagattagatcttaaggcacttgatggcctccaaaaatcctgactttggaacatcaaatgcatatgtgcacttttatctttgttctgagtcactgcagtccccaaagtcatatgccaatgttcacactgaaatactgtattgtacaccaaactggaaggcaattttcctatgaaaatcaaagccggtatattcattggtatgctctatacagatatcttaataaaaattttatagtgtgaacagtgcacagagttaaggcataaaaatgtatcattctttataaaaatctactgaaaatgtgtaatcattgaagacagttcttttaagcatgattttaaaatagcaactgaaattcaatcattttaaacaaatgatggtagtaatccattagttatggccagcagtgttctttggagagccacaataatttcaagaggaaaatataccagtgaaaattgtgtggctattttgagtagaattggtcagttgattattttgtgtaattgagatatatgtagtagtttaagcatgattcttgaagaaagcaatagtgacttttgcatagggagattttggtagaaacttcttgggactaaacaagtttagagatgcatttaagaattattcacaaaatgtgtaattctaaattaaaacataaatatattttcaaaagcatttgatttctctgaagcatgatatagctggtcttacctagtgaatcaggattgtcctcaggtaaatgaaatcatgatacattattgcagtgaactcaagtgcaatactttgtaagacatataattcctatgattttcacatttttatatcttatatatgggaaaagccaaattaaattgaattcagattaattccagcattagactaaatgagcaaacttaagtaaatgtacaaactaggtaagtataaaaccacaggttaacaatattggagtacttttagaattacattaaaactgtcttaaatgtcctatcccaaatctaaaaaaaaagaaaatggcaggctgagataatacagaattttaaaatgcactttgtaccagtgtctatatggaaagaagtagatgctgaatacctcaagatgccaagggaacaagcaacattgggaagttgtcacaacatgctcaaagacaaactacaattgtctgctagctatttcttcagaactggaactaatacgactatccttttctgttttatactttgattagaatgttatttcctcgcttacttaaaatgtacttcaactttttaacaactgatacaataacttcataaaagtataacactaggttgaaaccttaaggaaaaattgaaattgttaatgctttcgatcttttgggaggccagtacacagacaaataaatttcttctttttatgatacaaaatgactttgtattcaatcagaagcatatacttatgttattttgggtttgtttataattctctcattgtaaccaaattattttaaaatgtatagtataaaaagttacccgtggtattaagtgacaaaagcgtacttttattacaactccagttgttagattgcttctcagaatgctaactgt

SEQ ID NO: 12915 - DNA, 2938 bp, Homo sapiens
ggcataaccacccaacaggctccttactcaagctcgggttcttctcctaggcggaagccagaccagagagcgtgcgtgtttttcccagggtgccccgcgctgctgttatggccgcctccttgaggtagtatccgcacatggaattctagggccgcaggtgtatttacggtaactgtcgccactagatttcagcgcctttggactctcctgttttcactttcttttgttgactcccgtgtggccctcgtgggagcctgttttggctgcagcggtgtctggggtgatgtggaccccggagctggcaattctgaggggattccccactgaggctgagcggcagcaatggaaacaggagggggtcgtcggttcagagagtggatctttcctacaattgctgctggaagggaactatgaagccatattcttaaattcaatgactcaaaatatttttaattcaacaacaaccgctgaagaaaagattgatagctacctggagaagcaggtagtaacattcctggattactcaacagatttggacacaacggaaagacaacagttgatatttctacttggtgtgagcagtttgcaactttttgttcagagcaactggacggggccccctgttgacttacaccctcaggactttttgtcatctgttttgttccagcaattcagtgaggttaaaggactggatgcatttgttctgagcctgctcactctagatggtgaatcaatctacagcctgacctcgaagcctatactactgttattagcacgcattatcctagtgaatgtaagacataaactgacagctattcagagcttgccatggtggactttgagatgtgtgaatattcatcagcatttgcttgaggaacgctcacctctgctttttactcttgccgaaaactgtattgatcaagtgatgaaactacagaatctgtttgtagatgattcaggtcgatatttggctattcaattccatctggaatgtgcatatgtgtttttatattattatgagtacagaaaagcaaaagatcagttggatattgctaaggacatcagccaattacaaattgatttgacaggtgctttgggaaaaagaacacggttccaggaaaattatgtggcacaactgattctagatgtaagaagggaaggggatgtcctttcaaattgtgaattcactccagcacccactcctcaggaacatttaaccaagaatcttgagctcaatgatgacaccattctgaatgacataaagttagcagattgtgaacagttccagatgccggatctgtgtgctgaagagatcgctattattcttggaatctgcactaattttcaaaagaataacccagtgcacacattaactgaagtggagcttctggcatttacatcatgtttgctttcacaaccaaagttctgggccattcagacatcagccttgatcctccggacaaaacttgagaaaggaagtactcgccgagtggaacgggcaatgaggcagacacaggctcttgcagaccaatttgaagataaaactacatctgtattggaacgcctgaagattttctattgctgtcaagtaccacctcactgggccattcagcgccaacttgcaagtttgctctttgagttgggatgtaccagttcagcccttcagatatttgaaaagctagaaatgtgggaagatgttgtcatttgttatgaaagagccgggcagcacggaaaggcagaagaaatccttagacaagagctggagaaaaaagaaacgcctagtttatactgcttgcttggagatgtcctcggagaccattcttgctatgacaaggcctgggagttgtcccggtaccgcagtgctcgtgctcagcgctccaaagccctccttcatcttcggaacaaggagtttcaagagtgtgtagagtgcttcgaacgctcggttaagattaatcccatgcagctcggggtgtggttttctctcggttgtgcctatttggccttggaagactatcaaggttcagcaaaggcatttcagcgctgtgtgactctagaacccgataatgctgaagcttggaacaatttgtcaacttcctatatccgattaaaacaaaaagtaaaagcttttagaactttacaagaagctctcaagtgtaactatgaacactggcagatttgggaaaactacatcctcaccagcactgacgttggggaattttcagaagccattaaagcttatcaccggctcttggacttacgtgacaaatacaaagatgttcaggtccttaaaattctagtcagggcagtgattgatgggatgactgatcgaagtggagatgttgcaactggcctcaaaggaaagctgcaggagttatttggcagagtgacttcaagagtgacaaatgatggagaaatctggaggctgtatgcccacgtatatggaaatgggcagagtgaaaagcctgatgaaaatgaaaaggcattccagtgcctctcaaaggcatacaagtgtgacacccagtccaattgttgggagaaagatattacatcatttaaggaagttgttcaaagagccttaggacttgcacatgtggccataaaatgcagtaaaaacaaatccagttcccaagaagctgtacaaatgctttcttctgttcgactcaatttacggggcttgttatctaaagcaaagcaactttttacagatgtggcaactggagaaatgtccagggaattagctgatgacataacagctatggacaccttagtgacagagctccaagacctaagcaaccagtttcgaaatcagtattgattctgctggaagcagattctggaaaaggtgctttcacctgctggtaaaagatacatctgtatatctgaaatgcaagatattgatttttaaaataaatttgttttatgacttaaaaaaaaaaaa

SEQ ID NO: 12916 - DNA, 1021 bp, Homo sapiens
agaattgagctgtacagatctggcatgtcacttccttgggcttgtgtcatcagcagttgtgaagtccccattggggacttggtagcatggaaagccacacaaagatgtgctgcatctgtttttgtctgtgtgggtactttgttttcaataatattttgtctccttgcctaattttatttgtctatgcacatgtgtgcgtgtgtgtgctcgaatgcatgcgtgtatatgtgtttagggtctcttcccagtgatccgtaactcaccaaaaatcacctgtttttcccaaaattccctggagcagtaaattaccattcttaaagaaggatagagaaaggccaggtgcaatggctgacacctgtaatctcagtgctttgggaggctgcagcaggagactagcttgaggccagtagttcaaggctgtatgccacacctccagactgagcgacagggtgagaccctgtatcttaaaaaaaaaaagaagaagaagaagaagaaggataaagggaaaagctatgtacataattattattctttttcaacaataaaaactttccaggtagaagtgtttctaaagtatgttactataaaaattctaattaaataattggcttttgtacctgtgaattattattaacactttttaatggatgtttctctccatacttatcttccagtggccataaaatgcagtaaaaacaaatccagttcccaagaagctgtacaaatgctttcttctgttcgactcaatttacggggcttgttatctaaagcaaagcaactttttacagatgtggcaactggagaaatgtccagggaattagctgatgacataacagctatggacaccttagtgacagagctccaagacctaagcaaccagtttcgaaatcagtattgattctgctggaagcagattctggaaaaggtgctttcacctgctggtaaaagatacatctgtatatctgaaatgcaagatattgatttttaaaataaatttgttttatgacttaaaaaaaaaaaa

SEQ ID NO: 12917 - DNA, 2628 bp, Homo sapiens
ggcataaccacccaacaggctccttactcaagctcgggttcttctcctaggcggaagccagaccagagagcgtgcgtgtttttcccagggtgccccgcgctgctgttatggccgcctccttgaggtagtatccgcacatggaattctagggccgcaggtgtatttacggtaactgtcgccactagatttcagcgcctttggactctcctgttttcactttcttttgttgactcccgtgtggccctcgtgggagcctgttttggctgcagcggtgtctggggtgatgtggaccccggagctggcaattctgaggggattccccactgaggctgagcggcagcaatggaaacaggagggggtcgtcggttcagagagtggatctttcctacaattgctgctggaagggaactatgaagccatattcttaaattcaatgactcaaaatatttttaattcaacaacaaccgctgaagaaaagattgatagctacctggagaagcaggtagtaacattcctggattactcaacagatttggacacaacggaaagacaacagttgatatttctacttggtgtgagcagtttgcaactttttgttcagagcaactggacggggccccctgttgacttacaccctcaggactttttgtcatctgttttgttccagcaattcagtgaggttaaaggactggatgcatttgttctgagcctgctcactctagatggtgaatcaatctacagcctgacctcgaagcctatactactgttattagcacgcattatcctagtgaatgtaagacataaactgacagctattcagagcttgccatggtggactttgagatgtgtgaatattcatcagcatttgcttgaggaacgctcacctctgctttttactcttgccgaaaactgtattgatcaagtgatgaaactacagaatctgtttgtagatgattcaggtcgatatttggctattcaattccatctggaatgtgcatatgtgtttttatattattatgagtacagaaaagcaaaagatcagttggatattgctaaggacatcagccaattacaaattgatttgacaggtgctttgggaaaaagaacacggttccaggaaaattatgtggcacaactgattctagatgtaagaagggaaggggatgtcctttcaaattgtgaattcactccagcacccactcctcaggaacatttaaccaagaatcttgagctcaatgatgacaccattctgaatgacataaagttagcagattgtgaacagttccagatgccggatctgtgtgctgaagagatcgctattattcttggaatctgcactaattttcaaaagaataacccagtgcacacattaactgaagtggagcttctggcatttacatcatgtttgctttcacaaccaaagttctgggccattcagacatcagccttgatcctccggacaaaacttgagaaaggaagtactcgccgagtggaacgggcaatgaggcagacacaggctcttgcagaccaatttgaagataaaactacatctgtattggaacgcctgaagattttctattgctgtcaagtaccacctcactgggccattcagcgccaacttgcaagtttgctctttgagttgggatgtaccagttcagcccttcagatatttgaaaagctagaaatgtgggaagatgttgtcatttgttatgaaagagccgggcagcacggaaaggcagaagaaatccttagacaagagctggagaaaaaagaaacgcctagtttatactgcttgcttggagatgtcctcggagaccattcttgctatgacaaggcctgggagttgtcccggtaccgcagtgctcgtgctcagcgctccaaagccctccttcatcttcggaacaaggagtttcaagagtgtgtagagtgcttcgaacgctcggttaagattaatcccatgcagctcggggtgtggttttctctcggttgtgcctatttggccttggaagactatcaaggttcagcaaaggcatttcagcgctgtgtgactctagaacccgataatgctgaagcttggaacaatttgtcaacttcctatatccgattaaaacaaaaagtaaaagcttttagaactttacaagaagctctcaagtgtaactatgaacactggcagatttgggaaaactacatcctcaccagcactgacgttggggaattttcagaagccattaaagcttatcaccggctcttggacttacgtgacaaatacaaagatgttcagtggccataaaatgcagtaaaaacaaatccagttcccaagaagctgtacaaatgctttcttctgttcgactcaatttacggggcttgttatctaaagcaaagcaactttttacagatgtggcaactggagaaatgtccagggaattagctgatgacataacagctatggacaccttagtgacagagctccaagacctaagcaaccagtttcgaaatcagtattgattctgctggaagcagattctggaaaaggtgctttcacctgctggtaaaagatacatctgtatatctgaaatgcaagatattgatttttaaaataaatttgttttatgacttaaaaaaaaaaaa

SEQ ID NO: 12918 - DNA, 1712 bp, Homo sapiens
caatgatgcatacaaatactgaatggcatcgcgttcccagatgtaaactgacctggatgtcgcatctgtgtactgaatacagcgctataatacttggagtctgctctacattcaaaagaataggcgagtgcagagattaacttggaagtgtcgctactggcgatctaacagtcatgtacggtttcatataacaaggtgcctgaggcattcagacatcagccttgatcctccggacaaaacttgagaaaggaagtactcgccgagtggaacgggcaatgaggcagacacaggctcttgcagaccaatttgaagataaaactacatctgtattggaacgcctgaagattttctattgctgtcaagtaccacctcactgggccattcagcgccaacttgcaagtttgctctttgagttgggatgtaccagttcagcccttcagatatttgaaaagctagaaatgtgggaagatgttgtcatttgttatgaaagagccgggcagcacggaaaggcagaagaaatccttagacaagagctggagaaaaaagaaacgcctagtttatactgcttgcttggagatgtcctcggagaccattcttgctatgacaaggcctgggagttgtcccggtaccgcagtgctcgtgctcagcgctccaaagccctccttcatcttcggaacaaggagtttcaagagtgtgtagagtgcttcgaacgctcggttaagattaatcccatgcagctcggggtgtggttttctctcggttgtgcctatttggccttggaagactatcaaggttcagcaaaggcatttcagcgctgtgtgactctagaacccgataatgctgaagcttggaacaatttgtcaacttcctatatccgattaaaacaaaaagtaaaagcttttagaactttacaagaagctctcaagtgtaactatgaacactggcagatttgggaaaactacatcctcaccagcactgacgttggggaattttcagaagccattaaagcttatcaccggctcttggacttacgtgacaaatacaaagatgttcaggtccttaaaattctagtcagggcagtgattgatgggatgactgatcgaagtggagatgttgcaactggcctcaaaggaaagctgcaggagttatttggcagagtgacttcaagagtgacaaatgatggagaaatctggaggctgtatgcccacgtatatggaaatgggcagagtgaaaagcctgatgaaaatgaaaaggcattccagtgcctctcaaaggcatacaagtgtgacacccagtccaattgttgggagaaagatattacatcatttaaggaagttgttcaaagagccttaggacttgcacatgtggccataaaatgcagtaaaaacaaatccagttcccaagaagctgtacaaatgctttcttctgttcgactcaatttacggggcttgttatctaaagcaaagcaactttttacagatgtggcaactggagaaatgtccagggaattagctgatgacataacagctatggacaccttagtgacagagctccaagacctaagcaaccagtttcgaaatcagtattgattctgctggaagcagattctggaaaaggtgctttcacctgctggtaaaagatacatctgtatatctgaaatgcaagatattgatttttaaaataaatttgttttatgacttaaaaaaaaaaaa

SEQ ID NO: 12919 - DNA, 1655 bp, Homo sapiens
ggcataaccacccaacaggctccttactcaagctcgggttcttctcctaggcggaagccagaccagagagcgtgcgtgtttttcccagggtgccccgcgctgctgttatggccgcctccttgaggtagtatccgcacatggaattctagggccgcaggtgtatttacggtaactgtcgccactagatttcagcgcctttggactctcctgttttcactttcttttgttgactcccgtgtggccctcgtgggagcctgttttggctgcagcggtgtctggggtgatgtggaccccggagctggcaattctgaggggattccccactgaggctgagcggcagcaatggaaacaggagggggtcgtcggttcagagagtggatctttcctacaattgctgctggaagggaactatgaagccatattcttaaattcaatgactcaaaatatttttaattcaacaacaaccgctgaagaaaagattgatagctacctggagaagcaggtagtaacattcctggattactcaacagatttggacacaacggaaagacaacagttgatatttctacttggtgtgagcagtttgcaactttttgttcagagcaactggacggggccccctgttgacttacaccctcaggactttttgtcatctgttttgttccagcaattcagtgaggttaaaggactggatgcatttgttctgagcctgctcactctagatggtgaatcaatctacagcctgacctcgaagcctatactactgttattagcacgcattatcctagtgaatgtaagacataaactgacagctattcagagcttgccatggtggactttgagatgtgtgaatattcatcagcatttgcttgaggaacgctcacctctgctttttactcttgccgaaaactgtattgatcaagtgatgaaactacagaatctgtttgtagatgattcaggtcgatatttggctattcaattccatctggaatgtgcatatgtgtttttatattattatgagtacagaaaagcaaaagatcagttggatattgctaaggacatcagccaattacaaattgatttgacaggtgctttgggaaaaagaacacggttccaggaaaattatgtggcacaactgattctagatgtaagaagggaaggggatgtcctttcaaattgtgaattcactccagcacccactcctcaggaacatttaaccaagaatcttgagctcaatgatgacaccattctgaatgacataaagttagcagattgtgaacagttccagatgccggatctgtgtgctgaagagatcgctattattcttggaatctgcactaattttcaaaagaataacccagtgcacacattaactgaagtggagcttctggcatttacatcatgtttgctttcacaaccaaagttctgggccattcagacatcagccttgatcctccggacaaaacttgagaaaggaagtactcgccgagtggaacgggcaatgaggcagacacaggtggcacatgatgttcacttatcctgtcactggggatgttatttgatcattcagtaagcttgtgtttgtgagatttctccccaagtaaagttactctactcttttcccattgtaattaataaacattttcaggaagtga

SEQ ID NO: 12920 - DNA, 637 bp, Homo sapiens
gcagctcggggtgtggttttctctcggttgtgcctatttggccttggaagactatcaaggttcagcaaaggcatttcagcgctgtgtgactctagaacccgatgtctgtgcatattccactgtcttgtttacagaaactttgtagtaagttttgaaaatgctaatgctgaagcttggaacaatttgtcaacttcctatatccgattaaaacaaaaagtaaaagcttttagaactttacaagaagctctcaagtgtaactatgaacactggcagatttgggaaaactacatcctcaccagcactgacgttggggaattttcagaagccattaaagcttatcaccggctcttggacttacgtgacaaatacaaagatgttcaggtaggatattcctattccgttatttcagtttgtgtttgatactaatccttgatcatatggtataaattatttccttgaatatgcacaggaaaattttgttaaacacatgtaacatatgaaaagggtatttttttctagtcaaatattcttcatgatatatagaattctgctattctaatgtcaaatttgtttgtacagtcataaactgaatattactctgactcagttatgaaaatctccgtgagcgggtacatat

SEQ ID NO: 12921 - DNA, 251 bp, Homo sapiens
ctttgctttttaaaaattatatttcattagctacaacatgcatcttataattaatttacctttttttcttaatttaaagcactaattttcaaaagaataacccagtgcacacattaactgaagtggagcttctggcatttacatcagtgagtaatgtctttttctcttccatttcatttttttcctggtaaattacttcctctggtatggtcttgccttggattgtttatgttgaaacactgccacctaag

SEQ ID NO: 12922 - DNA, 2922 bp, Homo sapiens
ggcataaccacccaacaggctccttactcaagctcgggttcttctcctaggcggaagccagaccagagagcgtgcgtgtttttcccagggtgccccgcgctgctgttatggccgcctccttgaggtagtatccgcacatggaattctagggccgcaggtgtatttacggtaactgtcgccactagatttcagcgcctttggactctcctgttttcactttcttttgttgactcccgtgtggccctcgtgggagcctgttttggctgcagcggtgtctggggtgatgtggaccccggagctggcaattctgaggggattccccactgaggctgagcggcagcaatggaaacaggagggggtcgtcggttcagagagtggatctttcctacaattgctgctggaagggaactatgaagccatattcttaaattcaatgactcaaaatatttttaattcaacaacaaccgctgaagaaaagattgatagctacctggagaagcaggtagtaacattcctggattactcaacagatttggacacaacggaaagacaacagttgatatttctacttggtgtgagcagtttgcaactttttgttcagagcaactggacggggccccctgttgacttacaccctcaggactttttgtcatctgttttgttccagcaattcagtgaggttaaaggactggatgcatttgttctgagcctgctcactctagatggtgaatcaatctacagcctgacctcgaagcctatactactgttattagcacgcattatcctagtgaatgtaagacataaactgacagctattcagagcttgccatggtggactttgagatgtgtgaatattcatcagcatttgcttgaggaacgctcacctctgctttttactcttgccgaaaactgtattgatcaagtgatgaaactacagaatctgtttgtagatgattcaggtcgatatttggctattcaattccatctggaatgtgcatatgtgtttttatattattatgagtacagaaaagcaaaagatcagttggatattgctaaggacatcagccaattacaaattgatttgacaggtgctttgggaaaaagaacacggttccaggaaaattatgtggcacaactgattctagatgtaagaagggaaggggatgtcctttcaaattgtgaattcactccagcacccactcctcaggaacatttaaccaagaatcttgagctcaatgatgacaccattctgaatgacataaagttagcagattgtgaacagttccagatgccggatctgtgtgctgaagagatcgctattattcttggaatctgcactaattttcaaaagaataacccagtgcacacattaactgaagtggagcttctggcatttacatcatgtttgctttcacaaccaaagttctgggccattcagacatcagccttgatcctccggacaaaacttgagaaaggaagtactcgccgagtggaacgggcaatgaggcagacacaggctcttgcagaccaatttgaagataaaactacatctgtattggaacgcctgaagattttctattgctgtcaagtaccacctcactgggccattcagcgccaacttgcaagtttgctctttgagttgggatgtaccagttcagcccttcagatatttgaaaagctagaaatgtgggaagatgttgtcatttgttatgaaagagccgggcagcacggaaaggcagaagaaatccttagacaagagctggagaaaaaagaaacgcctagtttatactgcttgcttggagatgtcctcggagaccattcttgctatgacaaggcctgggagttgtcccggtaccgcagtgctcgtgctcagcgctccaaagccctccttcatcttcggaacaaggagtttcaagagtgtgtagagtgcttcgaacgctcggttaagattaatcccatgcagctcggggtgtggttttctctcggttgtgcctatttggccttggaagactatcaaggttcagcaaaggcatttcagcgctgtgtgactctagaacccgataatgctgaagcttggaacaatttgtcaacttcctatatccgattaaaacaaaaagtaaaagcttttagaactttacaagaagctctcaagtgtaactatgaacactggcagatttgggaaaactacatcctcaccagcactgacgttggggaattttcagaagccattaaagcttatcaccggctcttggacttacgtgacaaatacaaagatgttcaggtccttaaaattctagtcagggcagtgattgatgggatgactgatcgaagtggagatgttgcaactggcctcaaaggaaagctgcaggagttatttggcagagtgacttcaagagtgacaaatgatggagaaatctggaggctgtatgcccacgtatatggaaatgggcagagtgaaaagcctgatgaaaatgaaaaggcattccagtgcctctcaaaggcatacaagtgtgacacccagtccaattgttgggagaaagatattacatcatttaaggaagttgttcaaagagccttaggacttgcacatgtggccataaaatgcagtaaaaacaaatccagttcccaagaagctgtacaaatgctttcttctgttcgactcaatttacggggcttgttatctaaagcaaagcaactttttacagatgtggcaactggagaaatgtccagggaattagctgatgacataacagctatggacaccttagtgacagagctccaagacctaagcaaccagtttcgaaatcagtattgattctgctggaagtgctttcacctgctggtaaaagatacatctgtatatctgaaatgcaagatattgatttttaaaataaatttgttttatgacttaaaaaaaaaaaa

SEQ ID NO: 12923 - DNA, 1641 bp, Homo sapiens
  misc_feature (79)..(79): n is a, c, g, or t
  misc_feature (96)..(96): n is a, c, g, or t
  misc_feature (117)..(117): n is a, c, g, or t
  misc_feature (132)..(132): n is a, c, g, or t
  misc_feature (146)..(146): n is a, c, g, or t
  misc_feature (175)..(175): n is a, c, g, or t
  misc_feature (193)..(193): n is a, c, g, or t
  misc_feature (199)..(199): n is a, c, g, or t
  misc_feature (207)..(207): n is a, c, g, or t
  misc_feature (216)..(216): n is a, c, g, or t
gtgggctgcggcggctccaggtacctgcctgaacgtggcactgcgcagtctgcccccgggtcgcaggggcgctcctgancttcgcggggccgcctntagggctgcctgcgcggaganccgaccgcggccgangtcggtgttaagtngccgccccggccggctacccggagccaanaacaggcggcgcactgancgggangtggccangctggcgangcggctcttgcagaccaatttgaagataaaactacatctgtattggaacgcctgaagattttctattgctgtcaagtaccacctcactgggccattcagcgccaacttgcaagtttgctctttgagttgggatgtaccagttcagcccttcagatatttgaaaagctagaaatgtgggaagatgttgtcatttgttatgaaagagccgggcagcacggaaaggcagaagaaatccttagacaagagctggagaaaaaagaaacgcctagtttatactgcttgcttggagatgtcctcggagaccattcttgctatgacaaggcctgggagttgtcccggtaccgcagtgctcgtgctcagcgctccaaagccctccttcatcttcggaacaaggagtttcaagagtgtgtagagtgcttcgaacgctcggttaagattaatcccatgcagctcggggtgtggttttctctcggttgtgcctatttggccttggaagactatcaaggttcagcaaaggcatttcagcgctgtgtgactctagaacccgataatgctgaagcttggaacaatttgtcaacttcctatatccgattaaaacaaaaagtaaaagcttttagaactttacaagaagctctcaagtgtaactatgaacactggcagatttgggaaaactacatcctcaccagcactgacgttggggaattttcagaagccattaaagcttatcaccggctcttggacttacgtgacaaatacaaagatgttcaggtccttaaaattctagtcagggcagtgattgatgggatgactgatcgaagtggagatgttgcaactggcctcaaaggaaagctgcaggagttatttggcagagtgacttcaagagtgacaaatgatggagaaatctggaggctgtatgcccacgtatatggaaatgggcagagtgaaaagcctgatgaaaatgaaaaggcattccagtgcctctcaaaggcatacaagtgtgacacccagtccaattgttgggagaaagatattacatcatttaaggaagttgttcaaagagccttaggacttgcacatgtggccataaaatgcagtaaaaacaaatccagttcccaagaagctgtacaaatgctttcttctgttcgactcaatttacggggcttgttatctaaagcaaagcaactttttacagatgtggcaactggagaaatgtccagggaattagctgatgacataacagctatggacaccttagtgacagagctccaagacctaagcaaccagtttcgaaatcagtattgattctgctggaagcagattctggaaaaggtgctttcacctgctggtaaaagatacatctgtatatctgaaatgcaagatattgatttttaaaataaatttgttttatgacttaaaaaaaaaaaa

SEQ ID NO: 12924 - DNA, 1038 bp, Homo sapiens
gcagctcggggtgtggttttctctcggttgtgcctatttggccttggaagactatcaaggttcagcaaaggcatttcagcgctgtgtgactctagaacccgatgtctgtgcatattccactgtcttgtttacagaaactttgtagtaagttttgaaaatgctaatgctgaagcttggaacaatttgtcaacttcctatatccgattaaaacaaaaagtaaaagcttttagaactttacaagaagctctcaagtgtaactatgaacactggcagatttgggaaaactacatcctcaccagcactgacgttggggaattttcagaagccattaaagcttatcaccggctcttggacttacgtgacaaatacaaagatgttcaggtccttaaaattctagtcagggcagtgattgatgggatgactgatcgaagtggagatgttgcaactggcctcaaaggaaagctgcaggagttatttggcagagtgacttcaagagtgacaaatgatggagaaatctggaggctgtatgcccacgtatatggaaatgggcagagtgaaaagcctgatgaaaatgaaaaggcattccagtgcctctcaaaggcatacaagtgtgacacccagtccaattgttgggagaaagatattacatcatttaaggaagttgttcaaagagccttaggacttgcacatgtggccataaaatgcagtaaaaacaaatccagttcccaagaagctgtacaaatgctttcttctgttcgactcaatttacggggcttgttatctaaagcaaagcaactttttacagatgtggcaactggagaaatgtccagggaattagctgatgacataacagctatggacaccttagtgacagagctccaagacctaagcaaccagtttcgaaatcagtattgattctgctggaagcagattctggaaaaggtgctttcacctgctggtaaaagatacatctgtatatctgaaatgcaagatattgatttttaaaataaatttgttttatgacttaaaaaaaaaaaa

SEQ ID NO: 12925 - DNA, 1157 bp, Homo sapiens
  misc_feature (339)..(339): n is a, c, g, or t
  misc_feature (367)..(367): n is a, c, g, or t
  misc_feature (370)..(370): n is a, c, g, or t
gcagctcggggtgtggttttctctcggttgtgcctatttggccttggaagactatcaaggttcagcaaaggcatttcagcgctgtgtgactctagaacccgatgtctgtgcatattccactgtcttgtttacagaaactttgtagtaagttttgaaaatgctaatgctgaagcttggaacaatttgtcaacttcctatatccgattaaaacaaaaagtaaaagcttttagaactttacaagaagctctcaagtgtaactatgaacactggcagatttgggaaaactacatcctcaccagcactgagctgtatctcggcggcttaattgcgaacaaaggnggattgacgggacggcacatggcaacgnggnacacccccccccccccccccgcccgccgcggccgggcgggcggtggggggtggggtgggggggggggggtggggtgctgagggcttatcaccggctcttggacttacgtgacaaatacaaagatgttcaggtccttaaaattctagtcagggcagtgattgatgggatgactgatcgaagtggagatgttgcaactggcctcaaaggaaagctgcaggagttatttggcagagtgacttcaagagtgacaaatgatggagaaatctggaggctgtatgcccacgtatatggaaatgggcagagtgaaaagcctgatgaaaatgaaaaggcattccagtgcctctcaaaggcatacaagtgtgacacccagtccaattgttgggagaaagatattacatcatttaaggaagttgttcaaagagccttaggacttgcacatgtggccataaaatgcagtaaaaacaaatccagttcccaagaagctgtacaaatgctttcttctgttcgactcaatttacggggcttgttatctaaagcaaagcaactttttacagatgtggcaactggagaaatgtccagggaattagctgatgacataacagctatggacaccttagtgacagagctccaagacctaagcaaccagtttcgaaatcagtattgattctgctggaagcagattctggaaaaggtgctttcacctgctggtaaaagatacatctgtatatctgaaatgcaagatattgatttttaaaataaatttgttttatgacttaaaaaaaaaaaa

SEQ ID NO: 12926 - DNA, 1334 bp, Homo sapiens
actcggccaaaaggccagtcctggaaataggtgagagtgggcaggcccttggggaagtgaagctcttgggaagctctgacatccagttggacatccagaacctttgcttcctgaatcctggttcttggctggactccagagggtccttatgactattgcttagaatttgatgcataagctgtatgtttttcaagcactcctagaaggaaacacttccagggtaagcctctcagaggaaggctcacatcttacctctgatcttcccctaaataatcaccagcaggtgaccatctctttgcagcctttctactaaggagccaaggcaagagtattactcagatattgaaaatggatctcagctgtgcccctcgccttttctcccacgactcgtcatctgtgatgtttccaccagctttatttgcagagcacagaccacagggagccagtgtcttgggttagggttgtcttcacctgccctcgtctccaggcacgagaggcctgagaggctgctcaggagctaaaacattgtgaatgtccattcttgtaaaggatcaggtaccttagtattcggcagtttacatgattcaaagcacctgtgcatgttttcctctttctctagttacttgcacacttgtctggaaagaccttgtggggtgtagaacacaacagtgttcatagctaggccagtctcagcagtgtcctagcccattcagaggccatctggtgatagacccagcatgtttttttcttatggcagcagaaagattgaatagcctttctgctggattctagacccccaaaaaagaaaaataaaatcccagtgggcaaactcccaggcggtggtgatcactaaaatctgtcacagtcttcagtgaacaaaccccacttgctgttcctggggttgctctgctgccactccccatccccgcttatttaaagaactgctgtgaaaaatcagttccagtttcttctgtaaaacccacggcactactggtgcattctgagttacacttgttaagtagaaccttcttattccctaagagattttcaaaataagtcacttattcctgttaacatcgccctttttgtcaataatcaaatcaagcaggttgtgtttttttatgtaagaattccaacaagaagatgtaaaccaccaattcaggattgttttcactttctttttttgagatggggcctcactctgtcacccaggctggagctagagtacagtggtgtgatctcagcttactgcaaccacctcctgggctcaagcaatcctcccacctcagcctccccagtagctgggactacaggcatgcaccaccattcccagc

SEQ ID NO: 12927 - DNA, 250 bp, Homo sapiens
tgcctcagcctcccgactgggagtactggcatgtgccaccatgcttgtctaatttttttgtactttttagtagagatgagattttgccatgttggccagtgatctgctcacctcagcctcccaaaatgctgggattacaggtgtgagccactgcacctggccagcacttcacttttgagtgtcctagttggacttaattctttccttagaccatctacctgggtcgatcaatcagtagagttctttaaac

SEQ ID NO: 12928 - DNA, 2383 bp, Homo sapiens
  misc_feature (2383)..(2383): n is a, c, g, or t
gtggagccagtgtttttgtatgaacatgatgaactactgattaaaactttgatttgtaaattcctggggtgagttgatctgaattgtattttattccactgcctacataaatccatagtgctctgtgaagcatatgaataacatcaccgtgctgtgcttgaaggggagtgaagatgaatggtattgattgttatctgcatcaataaatgagatattctgattatggtacagtcagcagaagggaattgaaggcttaagattttaatatttccttcaaggaatttatgatttgatgtcagtagttcctcacattttttaataatgaaggctcctttcaatatcaagatattttatagatctccacatgataacctgttgaactttttgagtatctgttgatcaagaaaataaagtcaaaagctacaattaattagtaatgtgctcaaaataaatttgtattttataaatcataacatcttttccatgttactctgtctatatggagttcttaataccacacatttgcttagggagatggaattagcaactagtctgtgctaccctgtattttttttttaaccatgtagttggattttttaaaatacaataaaagagttcacttttccaggtttgacaacatttttatgaattggaaattttctgtggctacagatactattaacattttggaaaggtgtaaagaacattgttttaatgtaaggctcttctctaacctccctcccctctccaaattctccataatatgaagtaggaagatatgtatttttctgttgccattaaaatgttctggccatcgtgggagtggggatggggagggcggggatgggaattagaacttactagaataaaattccaaatagaggtttggggaaacctacttgtgagtgctttttaacctcaaaataaggatttggggtgggtggagaaggtgatggggcagaagaagttgtttttggaggagagaaagcagattgaaaggaaaaggacagctgatagccacttaaataatgtcatcgttagagtgatacctattttttgtaaaaagaaaacaatatgctccattcttacaaagcattgattgtattttaatatatacaatgtaaatactatcatgcagtggtgtccaagggagagaatacagtcatgagttcttagtttctgttattggttgggccaataaagccccttcatcatccttcttttctgcttatcactagagacagaaactaaaaaccatggcttcaggctgctaaaagcctaaaacaaaacagaacaacaacaacaaataaggcaggttggacaagcttgctgagtatttgggagcctttttcaaaagtctgatttgggggaagtaaagtcacttattttaagctaccttagtatagcacctaaagagttactttgtgaattttgtatggctgcaattgaaaaaaaaaattgctcactttcacttgcatttaaaaatcagagctctaaaagttaattcttgttttttattgggaaactctgagagaaacattaattgatgagggtaataattttggtataaagccagtgaaattttaatgcttaacatgttgggttttttaaaattactgattgaaactcttccttttctatttaaagatgatgaaaaagatgagcatacttctaaaaagcgcaaagtagagccaggagaaccagcaaagaagaaaaagtagaaacaaatgaccagaatttctgtactgctaaacttgttgaaatgtttctttggacagattaagttgatattgtgggttattatgccacatctccatgaaaatgcatacgttaatgaactaataagtattgcctcaagaactttccactatagaattctttttttatttaaaacatgtatgtatttaaaactcaactggtgacttgtgattgtgaaattgataacacttggatgcattcttgctctcacagaattggtgacatgctttgagagttttgtcacatgttgacatgccaatgttcttataaaccttttataaaggaatatatttttaaagtaaatatattgtaatgtactgtgaacttgtagggtgcttttcaacagtctttgtacagtgtaaatagatcatggaaataaaattacttattcaatattactattactgtataacattaacatttgaatgtttgtctgtgacaagtaccctatttgtcgtgtgacattttaagttgtaataagaagtattaccatttaaagagtgcctcctgtgttccaggtgctttgtgcatatattttctctgatccttaaacaacctagcgcaaggtattattagtattctcattttataataaagagtgcttgagtagcttgtctgatgttan

SEQ ID NO: 12929 - DNA, 1223 bp, Homo sapiens
  misc_feature (1223)..(1223): n is a, c, g, or t
cgctcgcagccgtcatggcagcggaggagaaggaccctctgagctattttgcggcatacgggagcagcagctcaggctcctcggacgagaggataacatcgagccggagagacgagtcgcagaaccccggatccggcgaagtcggcgggcggctgtaggaacaaggcggagaagcggctcccgggacctgacgagctgtttaggagcgtgactcgcccggcctttctctacaatccgctcaacaaacagatagactgggagaggcacgtcgtcaaggcgcctgaggagcctccaaaggaattcaaaatatggaagtcaaattatgtaccacctcctgagacctacaccactgagaagaagcctccgcctccagagcttgacatggcaataaaatggtctaacatatatgaggacaatggtgatgatgctccacagaatgctaagaaagctaggcttctaccagaaggggaggagacgttggaatcagatgatgaaaaagatgagcatacttctaaaaagcgcaaagtagagccaggagaaccagcaaagaagaaaaagtagaaacaaatgaccagaatttctgtactgctaaacttgttgaaatgtttctttggacagattaagttgatattgtgggttattatgccacatctccatgaaaatgcatacgttaatgaactaataagtattgcctcaagaactttccactatagaattctttttttatttaaaacatgtatgtatttaaaactcaactggtgacttgtgattgtgaaattgataacacttggatgcattcttgctctcacagaattggtgacatgctttgagagttttgtcacatgttgacatgccaatgttcttataaaccttttataaaggaatatatttttaaagtaaatatattgtaatgtactgtgaacttgtagggtgcttttcaacagtctttgtacagtgtaaatagatcatggaaataaaattacttattcaatattactattactgtataacattaacatttgaatgtttgtctgtgacaagtaccctatttgtcgtgtgacattttaagttgtaataagaagtattaccatttaaagagtgcctcctgtgttccaggtgctttgtgcatatattttctctgatccttaaacaacctagcgcaaggtattattagtattctcattttataataaagagtgcttgagtagcttgtctgatgttan

SEQ ID NO: 12930 - DNA, 2548 bp, Homo sapiens
aacgattgtcgttacagcgaacagtttggccccgtttgtaaaaggccgcggcaggcgaagagagaagagactatcaagatctccacttagggaagtgggaatcttatttgcggaacattgggcagaagctttgccattggctggtggagaaggaggaggcagaatgtctgcattgttacaccatacagctcaaacttcagaagattttgggttaagcagttatcattagtctgcaaatgatcgtgttttcacctgatcattagaaactaatgaaacaccttttaagtcttatgaattcaggttacactgttttccagatgccttggcagctggtacagggcctctgaaaaatggaaccaaattctctgaggactaaagtcccagctttcttatctgatttggggaaggccacattgaggggaatcagaaagtgtccccgatgtggcacatacaatggaacccggggactgagctgtaagaacaagacatgtggaaccatattccgctacggtgcacgcaagcagcctagtgttgaagctgtcaaaatcattacaggctctgatcttcaggtctactcagtgcggcaaagagaccggggccctgattaccgatgctttgtggagctcggggtttcagagacaacaatccagacagtggatgggacgatcatcactcagctgagctctggacggtgttatgtcccctcatgcctgaaagctgccactcaaggcgttgtggaaaaccagtgccagcacatcaagctggcggtgaactgccaggcagaggccacccctctgaccctgaagagctcggtcctgaatgcaatgcaggcctccccggaaaccaaacagaccatctggcagttggccacggaacccacaggtcctctggtgcagagaattactaaaaacatcttggtggtgaaatgcaaggcaagccagaagcacagtttggggtatttgcatacatcttttgtgcagaaagtcagtggcaaaagcttgcctgagcgccgcttcttctgctcctgtcagactctgaaatcgcacaagtcaaatgcctccaaggatgagacagcccagagatgcattcatttctttgcttgcatctgtgcctttgccagtgatgagacactggctcaggaattctcagacttcctaaattttgattccagcggtcttaaagagattattgtaccccagttaggttgccattcagaatcaacagtatctgcttgtgagtctactgcctctaagtcaaagaagaggagaaaggatgaagtatctggtgcacagatgaacagttcactactgcctcaagatgcagtgagcagtaatctaaggaaaagtggcctgaaaaagcctgtggttgcttcctcgttaaaaaggcaggcctgtggtcagctgttagatgaggcacaagtgactttatccttccaagactggctggccagtgtcacagaacgcatccatcaaaccatgcactatcagtttgatggcaaaccagaaccattggtgttccacattcctcagtcattttttgatgccctgcaacaaagaatatctataggaagtgcaaaaaaacggctccccaactccaccacagcttttgttcggaaagatgccttgccactgggaaccttttccaagtatacttggcatatcactaatatcctgcaagttaaacaaatcttagataccccagagatgcccttggaaatcacccgtagctttatccagaaccgagatgggacttatgagctatttaaatgccctaaagtggaagtagaaagcatagcagaaacctacggtcgtatagaaaaacaaccagtgctgcgacccttggaactaaaaacttttctcaaagttggcaacacttccccagatcaaaaggagccaacacctttcatcatcgagtggatcccagatatccttccccaatctaagattggcgagctgcggatcaagtttgagtatggccaccaccggaatgggcatgtggcggagtaccaagaccagcggccccccttggaccagcccttggaactggcccctctgaccactattactttcccttaaagcaaaacaagataataatcttttgctgcttaatttgcacatccccaccccttgacaactttaaatgctagttaggcacttagatggccctgttccttggtaaactgctcttagctaagatgcaaattctcagtgctttcaagtggattctgttgaagaaaatctcttgtaaatagcctttttgatgctgctgtgtacagtcttcattatgcattgggcagtatttctggctagagttttaaaaggaacagaaagaaaaccagcttattttccttcttacggactcatctttagcgtttatttcaaccttttgctaattctctgagaaatctgcagcactcagccatacaccaacagtgttggaaagttaacaccctggttagggcagaatgttaaagaccatcttggcagagttccagccacgctctttattctgttctcaaataaagcagtgtcactagtttttcctaatt

SEQ ID NO: 12931 - DNA, 2708 bp, Homo sapiens
cgcgcggggaggatgccgggaagcaggtcccaggggatatgtgtgtgtcgctgcagacccatcccggaagccggccgggaggtgagcgtcccggagtcgggcggccgctccgttgactgcagggccccggcggtcttcctccgctgttccgaggccgttgagggctgatgtgctccatcctcccacttgtggtttggcaagccatccagccgactacaaacccacgtttactatcaagatctccacttagggaagtgggaatcttatttgcggaacattgggcagaagctttgccattggctggtggagaaggaggaggcagaatgtctgcattgttacaccatacagctcaaacttcagaagattttgggttaagcagttatcattagtctgcaaatgatcgtgttttcacctgatcattagaaactaatgaaacaccttttaagtcttatgaattcaggttacactgttttccagatgccttggcagctggtacagggcctctgaaaaatggaaccaaattctctgaggactaaagtcccagctttcttatctgatttggggaaggccacattgaggggaatcagaaagtgtccccgatgtggcacatacaatggaacccggggactgagctgtaagaacaagacatgtggaaccatattccgctacggtgcacgcaagcagcctagtgttgaagctgtcaaaatcattacaggctctgatcttcaggtctactcagtgcggcaaagagaccggggccctgattaccgatgctttgtggagctcggggtttcagagacaacaatccagacagtggatgggacgatcatcactcagctgagctctggacggtgttatgtcccctcatgcctgaaagctgccactcaaggcgttgtggaaaaccagtgccagcacatcaagctggcggtgaactgccaggcagaggccacccctctgaccctgaagagctcggtcctgaatgcaatgcaggcctccccggaaaccaaacagaccatctggcagttggccacggaacccacaggtcctctggtgcagagaattactaaaaacatcttggtggtgaaatgcaaggcaagccagaagcacagtttggggtatttgcatacatcttttgtgcagaaagtcagtggcaaaagcttgcctgagcgccgcttcttctgctcctgtcagactctgaaatcgcacaagtcaaatgcctccaaggatgagacagcccagagatgcattcatttctttgcttgcatctgtgcctttgccagtgatgagacactggctcaggaattctcagacttcctaaattttgattccagcggtcttaaagagattattgtaccccagttaggttgccattcagaatcaacagtatctgcttgtgagtctactgcctctaagtcaaagaagaggagaaaggatgaagtatctggtgcacagatgaacagttcactactgcctcaagatgcagtgagcagtaatctaaggaaaagtggcctgaaaaagcctgtggttgcttcctcgttaaaaaggcaggcctgtggtcagctgttagatgaggcacaagtgactttatccttccaagactggctggccagtgtcacagaacgcatccatcaaaccatgcactatcagtttgatggcaaaccagaaccattggtgttccacattcctcagtcattttttgatgccctgcaacaaagaatatctataggaagtgcaaaaaaacggctccccaactccaccacagcttttgttcggaaagatgccttgccactgggaaccttttccaagtatacttggcatatcactaatatcctgcaagttaaacaaatcttagataccccagagatgcccttggaaatcacccgtagctttatccagaaccgagatgggacttatgagctatttaaatgccctaaagtggaagtagaaagcatagcagaaacctacggtcgtatagaaaaacaaccagtgctgcgacccttggaactaaaaacttttctcaaagttggcaacacttccccagatcaaaaggagccaacacctttcatcatcgagtggatcccagatatccttccccaatctaagattggcgagctgcggatcaagtttgagtatggccaccaccggaatgggcatgtggcggagtaccaagaccagcggccccccttggaccagcccttggaactggcccctctgaccactattactttcccttaaagcaaaacaagataataatcttttgctgcttaatttgcacatccccaccccttgacaactttaaatgctagttaggcacttagatggccctgttccttggtaaactgctcttagctaagatgcaaattctcagtgctttcaagtggattctgttgaagaaaatctcttgtaaatagcctttttgatgctgctgtgtacagtcttcattatgcattgggcagtatttctggctagagttttaaaaggaacagaaagaaaaccagcttattttccttcttacggactcatctttagcgtttatttcaaccttttgctaattctctgagaaatctgcagcactcagccatacaccaacagtgttggaaagttaacaccctggttagggcagaatgttaaagaccatcttggcagagttccagccacgctctttattctgttctcaaataaagcagtgtcactagtttttcctaatt

SEQ ID NO: 12932 - DNA, 2560 bp, Homo sapiens
cgcgcggggaggatgccgggaagcaggtcccaggggatatgtgtgtgtcgctgcagacccatcccggaagccggccgggagactatcaagatctccacttagggaagtgggaatcttatttgcggaacattgggcagaagctttgccattggctggtggagaaggaggaggcagaatgtctgcattgttacaccatacagctcaaacttcagaagattttgggttaagcagttatcattagtctgcaaatgatcgtgttttcacctgatcattagaaactaatgaaacaccttttaagtcttatgaattcaggttacactgttttccagatgccttggcagctggtacagggcctctgaaaaatggaaccaaattctctgaggactaaagtcccagctttcttatctgatttggggaaggccacattgaggggaatcagaaagtgtccccgatgtggcacatacaatggaacccggggactgagctgtaagaacaagacatgtggaaccatattccgctacggtgcacgcaagcagcctagtgttgaagctgtcaaaatcattacaggctctgatcttcaggtctactcagtgcggcaaagagaccggggccctgattaccgatgctttgtggagctcggggtttcagagacaacaatccagacagtggatgggacgatcatcactcagctgagctctggacggtgttatgtcccctcatgcctgaaagctgccactcaaggcgttgtggaaaaccagtgccagcacatcaagctggcggtgaactgccaggcagaggccacccctctgaccctgaagagctcggtcctgaatgcaatgcaggcctccccggaaaccaaacagaccatctggcagttggccacggaacccacaggtcctctggtgcagagaattactaaaaacatcttggtggtgaaatgcaaggcaagccagaagcacagtttggggtatttgcatacatcttttgtgcagaaagtcagtggcaaaagcttgcctgagcgccgcttcttctgctcctgtcagactctgaaatcgcacaagtcaaatgcctccaaggatgagacagcccagagatgcattcatttctttgcttgcatctgtgcctttgccagtgatgagacactggctcaggaattctcagacttcctaaattttgattccagcggtcttaaagagattattgtaccccagttaggttgccattcagaatcaacagtatctgcttgtgagtctactgcctctaagtcaaagaagaggagaaaggatgaagtatctggtgcacagatgaacagttcactactgcctcaagatgcagtgagcagtaatctaaggaaaagtggcctgaaaaagcctgtggttgcttcctcgttaaaaaggcaggcctgtggtcagctgttagatgaggcacaagtgactttatccttccaagactggctggccagtgtcacagaacgcatccatcaaaccatgcactatcagtttgatggcaaaccagaaccattggtgttccacattcctcagtcattttttgatgccctgcaacaaagaatatctataggaagtgcaaaaaaacggctccccaactccaccacagcttttgttcggaaagatgccttgccactgggaaccttttccaagtatacttggcatatcactaatatcctgcaagttaaacaaatcttagataccccagagatgcccttggaaatcacccgtagctttatccagaaccgagatgggacttatgagctatttaaatgccctaaagtggaagtagaaagcatagcagaaacctacggtcgtatagaaaaacaaccagtgctgcgacccttggaactaaaaacttttctcaaagttggcaacacttccccagatcaaaaggagccaacacctttcatcatcgagtggatcccagatatccttccccaatctaagattggcgagctgcggatcaagtttgagtatggccaccaccggaatgggcatgtggcggagtaccaagaccagcggccccccttggaccagcccttggaactggcccctctgaccactattactttcccttaaagcaaaacaagataataatcttttgctgcttaatttgcacatccccaccccttgacaactttaaatgctagttaggcacttagatggccctgttccttggtaaactgctcttagctaagatgcaaattctcagtgctttcaagtggattctgttgaagaaaatctcttgtaaatagcctttttgatgctgctgtgtacagtcttcattatgcattgggcagtatttctggctagagttttaaaaggaacagaaagaaaaccagcttattttccttcttacggactcatctttagcgtttatttcaaccttttgctaattctctgagaaatctgcagcactcagccatacaccaacagtgttggaaagttaacaccctggttagggcagaatgttaaagaccatcttggcagagttccagccacgctctttattctgttctcaaataaagcagtgtcactagtttttcctaatt

SEQ ID NO: 12933 - DNA, 2603 bp, Homo sapiens
aacgattgtcgttacagcgaacagtttggccccgtttgtaaaaggccgcggcaggcgaagagagaagaggtgagggcggtcgtcagctaagggccccggggctcgcggggggtgcgcagggcagactatcaagatctccacttagggaagtgggaatcttatttgcggaacattgggcagaagctttgccattggctggtggagaaggaggaggcagaatgtctgcattgttacaccatacagctcaaacttcagaagattttgggttaagcagttatcattagtctgcaaatgatcgtgttttcacctgatcattagaaactaatgaaacaccttttaagtcttatgaattcaggttacactgttttccagatgccttggcagctggtacagggcctctgaaaaatggaaccaaattctctgaggactaaagtcccagctttcttatctgatttggggaaggccacattgaggggaatcagaaagtgtccccgatgtggcacatacaatggaacccggggactgagctgtaagaacaagacatgtggaaccatattccgctacggtgcacgcaagcagcctagtgttgaagctgtcaaaatcattacaggctctgatcttcaggtctactcagtgcggcaaagagaccggggccctgattaccgatgctttgtggagctcggggtttcagagacaacaatccagacagtggatgggacgatcatcactcagctgagctctggacggtgttatgtcccctcatgcctgaaagctgccactcaaggcgttgtggaaaaccagtgccagcacatcaagctggcggtgaactgccaggcagaggccacccctctgaccctgaagagctcggtcctgaatgcaatgcaggcctccccggaaaccaaacagaccatctggcagttggccacggaacccacaggtcctctggtgcagagaattactaaaaacatcttggtggtgaaatgcaaggcaagccagaagcacagtttggggtatttgcatacatcttttgtgcagaaagtcagtggcaaaagcttgcctgagcgccgcttcttctgctcctgtcagactctgaaatcgcacaagtcaaatgcctccaaggatgagacagcccagagatgcattcatttctttgcttgcatctgtgcctttgccagtgatgagacactggctcaggaattctcagacttcctaaattttgattccagcggtcttaaagagattattgtaccccagttaggttgccattcagaatcaacagtatctgcttgtgagtctactgcctctaagtcaaagaagaggagaaaggatgaagtatctggtgcacagatgaacagttcactactgcctcaagatgcagtgagcagtaatctaaggaaaagtggcctgaaaaagcctgtggttgcttcctcgttaaaaaggcaggcctgtggtcagctgttagatgaggcacaagtgactttatccttccaagactggctggccagtgtcacagaacgcatccatcaaaccatgcactatcagtttgatggcaaaccagaaccattggtgttccacattcctcagtcattttttgatgccctgcaacaaagaatatctataggaagtgcaaaaaaacggctccccaactccaccacagcttttgttcggaaagatgccttgccactgggaaccttttccaagtatacttggcatatcactaatatcctgcaagttaaacaaatcttagataccccagagatgcccttggaaatcacccgtagctttatccagaaccgagatgggacttatgagctatttaaatgccctaaagtggaagtagaaagcatagcagaaacctacggtcgtatagaaaaacaaccagtgctgcgacccttggaactaaaaacttttctcaaagttggcaacacttccccagatcaaaaggagccaacacctttcatcatcgagtggatcccagatatccttccccaatctaagattggcgagctgcggatcaagtttgagtatggccaccaccggaatgggcatgtggcggagtaccaagaccagcggccccccttggaccagcccttggaactggcccctctgaccactattactttcccttaaagcaaaacaagataataatcttttgctgcttaatttgcacatccccaccccttgacaactttaaatgctagttaggcacttagatggccctgttccttggtaaactgctcttagctaagatgcaaattctcagtgctttcaagtggattctgttgaagaaaatctcttgtaaatagcctttttgatgctgctgtgtacagtcttcattatgcattgggcagtatttctggctagagttttaaaaggaacagaaagaaaaccagcttattttccttcttacggactcatctttagcgtttatttcaaccttttgctaattctctgagaaatctgcagcactcagccatacaccaacagtgttggaaagttaacaccctggttagggcagaatgttaaagaccatcttggcagagttccagccacgctctttattctgttctcaaataaagcagtgtcactagtttttcctaatt

SEQ ID NO: 12934 - DNA, 2563 bp, Homo sapiens
aatgtatgtaacactcaagcacgtcccgtgtaatttcggcacgatggtttgtaaccaggccgctatacgtgagccagagaagagactatcaagatctccacttagggaagtgggaatcttatttgcggaacattgggcagaagctttgccattggctggtggagaaggaggaggcagaatgtctgcattgttacaccatacagctcaaacttcagaagattttgggttaagcagttatcattagtctgcaaatgatcgtgttttcacctgatcattagaaactaatgaaacaccttttaagtcttatgaattcaggttacactgttttccagatgccttggcagctggtacagggcctctgaaaaatggaaccaaattctctgaggactaaagtcccagctttcttatctgatttggggaaggccacattgaggggaatcagaaagtgtccccgatgtggcacatacaatggaacccggggactgagctgtaagaacaagacatgtggaaccatattccgctacggtgcacgcaagcagcctagtgttgaagctgtcaaaatcattacaggctctgatcttcaggtctactcagtgcggcaaagagaccggggccctgattaccgatgctttgtggagctcggggtttcagagacaacaatccagacagtggatgggacgatcatcactcagctgagctctggacggtgttatgtcccctcatgcctgaaagctgccactcaaggcgttgtggaaaaccagtgccagcacatcaagctggcggtgaactgccaggcagaggccacccctctgaccctgaagagctcggtcctgaatgcaatgcaggcctccccggaaaccaaacagaccatctggcagttggccacggaacccacaggtcctctggtgcagagaattactaaaaacatcttggtggtgaaatgcaaggcaagccagaagcacagtttggggtatttgcatacatcttttgtgcagaaagtcagtggcaaaagcttgcctgagcgccgcttcttctgctcctgtcagactctgaaatcgcacaagtcaaatgcctccaaggatgagacagcccagagatgcattcatttctttgcttgcatctgtgcctttgccagtgatgagacactggctcaggaattctcagacttcctaaattttgattccagcggtcttaaagagattattgtaccccagttaggttgccattcagaatcaacagtatctgcttgtgagtctactgcctctaagtcaaagaagaggagaaaggatgaagtatctggtgcacagatgaacagttcactactgcctcaagatgcagtgagcagtaatctaaggaaaagtggcctgaaaaagcctgtggttgcttcctcgttaaaaaggcaggcctgtggtcagctgttagatgaggcacaagtgactttatccttccaagactggctggccagtgtcacagaacgcatccatcaaaccatgcactatcagtttgatggcaaaccagaaccattggtgttccacattcctcagtcattttttgatgccctgcaacaaagaatatctataggaagtgcaaaaaaacggctccccaactccaccacagcttttgttcggaaagatgccttgccactgggaaccttttccaagtatacttggcatatcactaatatcctgcaagttaaacaaatcttagataccccagagatgcccttggaaatcacccgtagctttatccagaaccgagatgggacttatgagctatttaaatgccctaaagtggaagtagaaagcatagcagaaacctacggtcgtatagaaaaacaaccagtgctgcgacccttggaactaaaaacttttctcaaagttggcaacacttccccagatcaaaaggagccaacacctttcatcatcgagtggatcccagatatccttccccaatctaagattggcgagctgcggatcaagtttgagtatggccaccaccggaatgggcatgtggcggagtaccaagaccagcggccccccttggaccagcccttggaactggcccctctgaccactattactttcccttaaagcaaaacaagataataatcttttgctgcttaatttgcacatccccaccccttgacaactttaaatgctagttaggcacttagatggccctgttccttggtaaactgctcttagctaagatgcaaattctcagtgctttcaagtggattctgttgaagaaaatctcttgtaaatagcctttttgatgctgctgtgtacagtcttcattatgcattgggcagtatttctggctagagttttaaaaggaacagaaagaaaaccagcttattttccttcttacggactcatctttagcgtttatttcaaccttttgctaattctctgagaaatctgcagcactcagccatacaccaacagtgttggaaagttaacaccctggttagggcagaatgttaaagaccatcttggcagagttccagccacgctctttattctgttctcaaataaagcagtgtcactagtttttcctaatt

SEQ ID NO: 12935 - DNA, 2334 bp, Homo sapiens
aacgattgtcgttacagcgaacagtttggccccgtttgtaaaaggccgcggcaggcgaagagagaagaggtgagggcggtcgtcagctaagggccccggggctcgcggggggtgcgcagggcagggcctctgaaaaatggaaccaaattctctgaggactaaagtcccagctttcttatctgatttggggaaggccacattgaggggaatcagaaagtgtccccgatgtggcacatacaatggaacccggggactgagctgtaagaacaagacatgtggaaccatattccgctacggtgcacgcaagcagcctagtgttgaagctgtcaaaatcattacaggctctgatcttcaggtctactcagtgcggcaaagagaccggggccctgattaccgatgctttgtggagctcggggtttcagagacaacaatccagacagtggatgggacgatcatcactcagctgagctctggacggtgttatgtcccctcatgcctgaaagctgccactcaaggcgttgtggaaaaccagtgccagcacatcaagctggcggtgaactgccaggcagaggccacccctctgaccctgaagagctcggtcctgaatgcaatgcaggcctccccggaaaccaaacagaccatctggcagttggccacggaacccacaggtcctctggtgcagagaattactaaaaacatcttggtggtgaaatgcaaggcaagccagaagcacagtttggggtatttgcatacatcttttgtgcagaaagtcagtggcaaaagcttgcctgagcgccgcttcttctgctcctgtcagactctgaaatcgcacaagtcaaatgcctccaaggatgagacagcccagagatgcattcatttctttgcttgcatctgtgcctttgccagtgatgagacactggctcaggaattctcagacttcctaaattttgattccagcggtcttaaagagattattgtaccccagttaggttgccattcagaatcaacagtatctgcttgtgagtctactgcctctaagtcaaagaagaggagaaaggatgaagtatctggtgcacagatgaacagttcactactgcctcaagatgcagtgagcagtaatctaaggaaaagtggcctgaaaaagcctgtggttgcttcctcgttaaaaaggcaggcctgtggtcagctgttagatgaggcacaagtgactttatccttccaagactggctggccagtgtcacagaacgcatccatcaaaccatgcactatcagtttgatggcaaaccagaaccattggtgttccacattcctcagtcattttttgatgccctgcaacaaagaatatctataggaagtgcaaaaaaacggctccccaactccaccacagcttttgttcggaaagatgccttgccactgggaaccttttccaagtatacttggcatatcactaatatcctgcaagttaaacaaatcttagataccccagagatgcccttggaaatcacccgtagctttatccagaaccgagatgggacttatgagctatttaaatgccctaaagtggaagtagaaagcatagcagaaacctacggtcgtatagaaaaacaaccagtgctgcgacccttggaactaaaaacttttctcaaagttggcaacacttccccagatcaaaaggagccaacacctttcatcatcgagtggatcccagatatccttccccaatctaagattggcgagctgcggatcaagtttgagtatggccaccaccggaatgggcatgtggcggagtaccaagaccagcggccccccttggaccagcccttggaactggcccctctgaccactattactttcccttaaagcaaaacaagataataatcttttgctgcttaatttgcacatccccaccccttgacaactttaaatgctagttaggcacttagatggccctgttccttggtaaactgctcttagctaagatgcaaattctcagtgctttcaagtggattctgttgaagaaaatctcttgtaaatagcctttttgatgctgctgtgtacagtcttcattatgcattgggcagtatttctggctagagttttaaaaggaacagaaagaaaaccagcttattttccttcttacggactcatctttagcgtttatttcaaccttttgctaattctctgagaaatctgcagcactcagccatacaccaacagtgttggaaagttaacaccctggttagggcagaatgttaaagaccatcttggcagagttccagccacgctctttattctgttctcaaataaagcagtgtcactagtttttcctaatt

SEQ ID NO: 12936 - DNA, 2073 bp, Homo sapiens
cgcgcggggaggatgccgggaagcaggtcccaggggatatgtgtgtgtcgctgcagacccatcccggaagccggccgggaggtgagcgtcccggagtcgggcggccgctccgttgactgcagggccccggcggtcttcctccgctgttccgaggccgttgagggctgatgtgctccatcctcccacttgtggtttggcaagccatccagccgactacaaacccacgtttactatcaagatctccacttagggaagtgggaatcttatttgcggaacattgggcagaagctttgccattggctggtggagaaggaggaggcagaatgtctgcattgttacaccatacagctcaaacttcagaagattttgggttaagcagttatcattagtctgcaaatgatcgtgttttcacctgatcattagaaactaatgaaacaccttttaagtcttatgaattcaggttacactgttttccagatgccttggcagctggtacagggcctctgaaaaatggaaccaaattctctgaggactaaagtcccagctttcttatctgatttggggaaggccacattgaggggaatcagaaagtgtccccgatgtggcacatacaatggaacccggggactgagctgtaagaacaagacatgtggaaccatattccgctacggtgcacgcaagcagcctagtgttgaagctgtcaaaatcattacaggctctgatcttcaggtctactcagtgcggcaaagagaccggggccctgattaccgatgctttgtggagctcggggtttcagagacaacaatccagacagtggatgggacgatcatcactcagctgagctctggacggtgttatgtcccctcatgcctgaaagctgccactcaaggcgttgtggaaaaccagtgccagcacatcaagctggcggtgaactgccaggcagaggccacccctctgaccctgaagagctcggtcctgaatgcaatgcaggcctccccggaaaccaaacagaccatctggcagttggccacggaacccacaggtcctctggtgcagagaattactaaaaacatcttggtggtgaaatgcaaggcaagccagaagcacagtttggggtatttgcatacatcttttgtgcagaaagtcagtggcaaaagcttgcctgagcgccgcttcttctgctcctgtcagactctgaaatcgcacaagtcaaatgcctccaaggatgagacagcccagagatgcattcatttctttgcttgcatctgtgcctttgccagtgatgagacactggctcaggaattctcagacttcctaaattttgattccagcggtcttaaagagattattgtaccccagttaggttgccattcagaatcaacagtatctgcttgtgagtctactgcctctaagtcaaagaagaggagaaaggatgaagtatctggtgcacagatgaacagttcactactgcctcaagatgcagtgagcagtaatctaaggaaaagtggcctgaaaaagcctgtggttgcttcctcgttaaaaaggcaggcctgtggtcagctgttagatgaggcacaagtgactttatccttccaagactggctggccagtgtcacagaacgcatccatcaaaccatgcactatcagtttgatggcaaaccagaaccattggtgttccacattcctcagtcattttttgatgccctgcaacaaagaatatctataggaagtgcaaaaaaacggctccccaactccaccacaggtacaggatttccctttggtatagtgatggatgtctcgaacatagagaattatgtttggaaaaaatctgtgtggaatattcaccgtgagtattcagagttaggacttctactcacatgtctggagcacaaagccttcaatgatcagcatatcaattatctacatcaactgatttgtcaccaaaaccttttatatatttgcctctagaatttctttttaaaagtgctgagaatctataaggaaataatagtactgtattagaaactaggtaacaaatacaacaaaagaaaatgttattttttggtaatctaa

SEQ ID NO: 12937 - DNA, 561 bp, Homo sapiens
gatgaggcacaagtgactttatccttccaagactggctggccagtgtcacagaacgcatccatcaaaccatgcactatcagtttgatggtaagtattgttcatctaactgggctcttgctgaaagtaggagaaattaaggtaattgtgctgtaattctcctctgataggaaaagtaattggacttcagtccagagagcactgggccacaagaaagtagaaatctaattgaaagaaaaaaacaatcacatagttaaaattcaggcgcagcaaaattattataatttagagacagaagagaaaaaacatagcaaataataagtaaaggcaggtagtcttattgcttgcataagttcgtgtgcacgtgtgtgtgtgtgtgtgtgtgtgtgtgtgtgtgtggtgagggagatactgaagctttatgagactattctaactctcaaacttaaagcaaggggaaaaaagattagagaaaatctaagcctgcacaacatagtgaaccccatctctacaaaaaatagtgccattgcactccagcctgggaaacgaagcgagaccctgta

SEQ ID NO: 12938 - DNA, 711 bp, Homo sapiens
actgaacaaatcccatccttctttcacaccggtacaaattctatttcttatagaactttctggtcatcctggcccatatagactttcccctattctgaactctttagcatttacttattcgactggcactgatcatatgaatgcatattattatttttctttttaggtatatatcctatacttgccaacttggtggacactgagaacaccaatctaatactaaggttaaaagaaggtgctgaatatggtcatccctcagagggtcaatagcatgagaaaagacattaattaacaagtgaagggtacatagacaactcaagtagatgaacaagctcttttactcttgaggctacttttaacttttgaattgttcattccttactgggagagagaacatctcacctctctctctgagtttagctcttagagaatgcttggtaaacatttgctaaactgcatgttaacaaatttgtcactgtagctctaaaagttcctagcctcatcaacatgtaagaaggtattatcaaactgatgcaatgtcctgaaatagatggtggatgtcaatttaccccacccgaatgatgttaagacacttacagttacacactcacagcacagcagaaccagctataacacgtttgtttatattattgagaaagacattgccaagactgcttcttagcttcaatgttctaaaacttaagggcaatg

SEQ ID NO: 12939 - DNA, 619 bp, Homo sapiens
ttcgagaccagcctgggccaacacagtgggaccctgtttctacaaaacaaataaatagaaataaaaaaggaataaattggttcatgcaacaccatggatgaagctaagcgagaacaagccagaaacaaaagactgcatgctttgttattccataatggtctagaaaatgcaaactatagtcacagaaagcagaacagtgcttgccagggactatagatgagggaggggtagactgtagagggcatggtgggaagattctgtatcttgactgtggtggtggatacatgactatatacagttgtgggaacttgtcaaattgtgcacttaaaatgggtgagtagtattgtatgtaagtaaataaagctgatttaaaagaaaaacaccaggagatgacatttcatgaggcatgtgctaattaaaatcacaataagataacaccggaatagttaaaagggcagccaagaccaagtgttagcgaggaagtacagcaattggggcatttatacatggctggtgttgagtgtaaaatggttcaacccctgtggaccactaacagtttcttagagaagctgacatatatctacctatgactcagaaattccactccccggtattctct

SEQ ID NO: 12940 - DNA, 416 bp, Homo sapiens
ctctggcagggaggacgtgctcatctctggtacctgaaaagaagttgcccatgttattttcgctttatatgtgacgaaacaaacatggtgcacttctttttcggtatcaaatatctccttgaagtgcctccatccccgacgggaccctgagcatgggacctggtgtcactacctctcttggtatgtacatggaggatttgtcctggcagcccctcggtgactttgtgtgttggtgggctcagggaccatgctcagtcctcagtcctcagtccacgcccacctctcggacaggcacagttggcgaggcctcaaccacatgccagttccccgctgccagggaggctggggagatgcacttccaggctccattgagaagcgttccccaacatttgagaagagttcagatcatagcagcc

SEQ ID NO: 12941 - DNA, 324 bp, Homo sapiens
caagaattcactcaacactttgaaatgataagaaattagagctctttagtctcatctacctatattttgaccaactcaattgtaaaacccttgagaataatacatatgtgctgcttttataatttttacattaacagtgatttatataaatactcaatacatttcaataaatacttaacattaatgctcaggctttatgtcccaattttttttttagacaaaaagtaaacattgggtcatatttattatacacttttttgtcaggtttaaactaaaatacaatctcatttgaaatttaataaagtattttcacactccagaaat

SEQ ID NO: 12942 - DNA, 513 bp, Homo sapiens
ctgttttagctcatctgttatagatggatgctctgtcatggataatttatccatccttcttgtttgcctttctatgtgcaggccgttcataaaattgaattgtttgcctctgtccacactcatagtaggtgctgggagggatttgaaaagtttgctgggtgacatttcattggaagtgaaaaatgacctgggggtggagccccaggggtgtgtgtgtcaaaccactgaaagggatggcaactttggctctgtagggggctaattcatacacagataaatgatttaattgtaattaggcagcaatttaaaatgacactaataaccctcagaccatctttatgttcgctaacaaaaagattcctgtttgtctttatttcccctaagttatgggtatctttttctataaaatatataaaacctttgccagatgattcattggttaagcctatactttttaagccgtaattgattgggtttttatttagtagaaaggtagtatatagcattgtacac

SEQ ID NO: 12943 - DNA, 573 bp, Homo sapiens
acagcatctccaggagtcaacacccaggcagcattcctctcttcttgtgtgaatttctgcaggttgtcagcaatctgagggcaacgtcttttcttagggaaagctaagatattcagatttaccccagagtgggtatcaaattatctgtgggtgtaaggaatacacaatggtagagattttattcctaatgagcagagactggaaacacatttggaagtatatcatgatgtttcttttcctacctcagtctagtgatctcattgggttgaattctctgtggtttggcttcaaactcttttcattccaatcttcgtcttttcaatttgctgccccattttatggtctacatctttccttcaaagatcctgctgcttttcatcttcttgatgcctcatcatttattcaacctgttgcgtgccttctctgtgtcttccctccatttcattttataaggcattttagtgcattgtatgtggcaaatgggggaggagacagaatgaagagagaccagtaacccttcccaggccagtttatacagttttcctaaggcttcccatatatttaatactaaat

SEQ ID NO: 12944 - DNA, 406 bp, Homo sapiens
atcctgactgtatttttggctgaaagactttcctcttggctgcatggtaagggaacaggttaggggaagccaggctgtaggggtcagaggccatcagggaaattgcaggttgcactttcgtgcttttgggtcactggggcaggtctggagaatgtcttggaggtagacagaagctgctgagtctgagagtcccttgcggtgcctttttccctgacttcccatgttgggccatgtcccttggaatggagactcccttgtctccaggctggctcaaggctgaacttcaggcttggaaaacagagaattagaaccaaattcctcactttgggaagccaaagtgggctgatcacttgaggtcaggagttcaagaccagcctggctaacttggtgaaaccccatcactact

SEQ ID NO: 12945 - DNA, 156 bp, Homo sapiens
tgttgtccagttgtatcaggaagggagtacagtgtaatggttaagtgacctccagaaacaggtagcttggatttgaatctcagttaaaccacttagtagctgtgtgaccttggacaagttatctaacttctttgtgtctcatctgtaaaagaaaaa

SEQ ID NO: 12946 - DNA, 529 bp, Homo sapiens
cccgtagaggcagaaggtgaggcgtctacgccctctctcaccagattttgggcggccctgtggagacaccctgtgccctttaagggacatggattgagtcgggatctcaaaatgtgagcctttcctcagacccagctttgacccacgtactcgcctttcctcaactcattttcatactttcacttgactatatattttttaaaaattgtgttaagcacttgaggttcatttctgcccctactgtatgtgcaccctgtgccagagggtggggtgaacacgtgtgtagcagtcatgcgtcctgtccacaggggccgatgcacctccttgcaaccctttacattccactgtgaaacaaacctcaactttttcttattcctgtttttacaccgtgcttatagctgccttaatccatgttccttcgggatgctggtatccaactgagaagttgacggagcatctatcgtgtgccagacactgtgctaagtgctaacgagaaatcggtgagcaaaacagaaaagaaaaaaaaaaa

SEQ ID NO: 12947 - DNA, 330 bp, Homo sapiens
acgtatgctgagatgatttaaatcagtgagacagactttccttatgatgcccacacccaacacagaaggaagccgaggtcccaggaaattggaatagcaggtacacgtctcaggtgtgcaagaaatatcacaagaatgtaacttctgttttgagcccccatttttcctgagtgccagaaaagatcatttgtccatttgggattccttctctttccatgagggtcatagctgagttctgagggtcttacataatgccaagaagttgggagagcattctcactgatcaccagtgtccatacttcatccatccccgggatttccatcattcca

SEQ ID NO: 12948 - DNA, 629 bp, Homo sapiens
tctgttgggagagagagagccaggggtgatggtctggctttcagacctgagatcagacaggcagatagctgaactcccaggcagttcgttggttggtggttggttttttgctaggttttagttgtttttttgttctgaatctcatttcaaagagagcagattgactccacacctaatgcacatcctcagtttcacaaagcagctaagagcaagtcaggtttcatagtccaaatgatgctattgcttgagtgtaattgtgcaccagccattagcccacatttcttggtagagcctcggtgcccttggattatgaatttgcacacagtggaatcgcaacaatttgttttatagttctgtcctttgagggagtgacatttcttccaaggtctcagctcctttaatctataaaatgggaataataagaattcactggacaaatattcagtgtgcctgttgggagtgttgggcatgtgcagtccatctctggggctagcatggaaggcgtacattaaaaagatactcatgctggctgcagtggctcgtgcctgtaatcccaacaccctgagaggctgaggtaggtggatcacttgagaccagtctgggcaacatgatgaaactctgtctctata

SEQ ID NO: 12949 - DNA, 1037 bp, Homo sapiens
ctgcctcagcctcccgagtagctgggactacaggcgcccgccaccatgcccagctaatttttttgtatttttagtagagacgaggtttcaccatgttagccaggatggtctcaatctcctgacctcatgatccgcccgcctcagcctcccaaagtgctgggattacaggcgtgagccaccgcacccagcccgtatttttttttctaacaaatacctggtgttaagcccaaagtgtgtgtttctggttggctggtgatgctctttcaagtcctgaatcagggacccaataactttcaacattgtggctcagctctcttcaacagctgcctccaagttctcttgagatattggtatttatcagaggagaggggatggagaaggtatatgcctttgctagagctgccataacaaaggactgtagactgaggggcttaaacaacagaaatttatttccttacaatcctggaggtcggaagtctgagatcaaggtgtgggcagggctggttcctcctgaggcctctctccttggcttgtagactctgtgttctccctttgtcctcatacagtcgtctctctgtgtgtgtctgtgtcctcatctcttcttatgaggtgtcttagtccatttcaagctgctataacagaacaccatagactgcagggcttaaacaacagacatttattctcccattgtcttggaggctatctatctacctatgtagcatctatctacccatctatctatcatctgtgtataatctacctattatctatctatctacttatcatctacttatcatctacctatcatctgtctatttttctatctatcatctatctaccatctatgtatctacctatcatctagccatctgtcatctatcatctatcacctatcatctatctgtctcacctatcatttatctatgtatttgtgtatcatcatcacccagctatgaactatctatcatgtatgatgtatctatcatctatgtatctacctatctgttattttggtcaaatatacataatataaaact

SEQ ID NO: 12950 - DNA, 441 bp, Homo sapiens
cagctgcaaccttgcctcctgggttcgagcaattcttctgcctcagcctcttgagtagctgggattacaggcgtgcaccaccacacctggctaatttttggatttttttttttttttagaagaggcacagtttcaccatgtaggtcatgctgacctcaagtgatcctcctacctcggcctcccaaagtgtaggaattacaggcatgagccaccatatccggctaaacgtgacagtttcttacaatcccaccccagagataaccactgttaaagcttgttgaatatccccctagatctgcagttcacaatttttttggtctcaggatccattttccactcttaaaattggaggatcccaaaaaacttttatgtatgtgagttatatctattgatatttataatttataaattgagaaatctaaaaaacattttaatttattt

SEQ ID NO: 12951 - DNA, 596 bp, Homo sapiens
caaaacaaaacaaaaaaacaacagcataatgcctggcatatattaggtaagtgttagctacctccctgccgatatcagtgattttgaagtcttaagattaccacccctattgcttgtgattatgccagaagaaataatcactgcaggcatataggggtcttagggccagtccatactggtcctctacagatgagtctaattattcaacacaccaaagaaggaatctgtcattcacagagctgcacaaaagataacacacaggaatgtctatacatctacaaaaatgtgcaagatttatatgaagaaaaacttaaaacattactgaagggccaggcatagtggctcacacctgtaatcccagctctttgggaggctaaggtgagatcatttgagtccaggagtttgagaccagactggacaataccccacatctgcaaaaaattttcaaattagctgggcatggtgtgtgcctatagtcccagctacttgggaggctgaggcaggaggatcacttgagaccaggagtctgaggttgcagtgacctgtgactgtaccactgcactccagcatgggcagcagagtaagaccctgtgtct

SEQ ID NO: 12952 - DNA, 744 bp, Homo sapiens
aggctccttgaggccctggagatggaatgttgggcccccaagtcctgaaaggaaccagtggggctgtaatcttcacaatctggatccagccagaagagcactgagagctcagtgtttggaggacaaaaaagggcaatggatatacagtaacttagtgaatcagggcccggatccaggaagatgcctgacatttgtttatcagcagagaaacagaagtaaaggaggggaaccttctcctaagtgttactgtgttatgaaagtgtccttcagggagaggcgacatgaacagggcagctgataacgttgatactgtgcaggcacacatctccccacattccccaggctgctgaaccaagtgtaccaaactaatcgcaaggacacagctttgagcctccccggcggcagtccctggagagagtccgctcagacaaagcaaagcgcgctcccagcggggaggggtggccactttttctttgttctcccttggaaaatcggctgtctctcaagtctcgtaaaccagctgctttcacttcttgcagggggtcaaaatcaattaatcaccaatcatgtttggacagcacagttttgaagccctgaactctgtgaaatgcagggtcaaactatttttagaattttaacatgccgttaagtttgtattctgagtttcccagcaaaaatttctgaaatgtgccccactttgaaaaaataaaataaaaagaacacctccagaaaaaaggtggtgga

SEQ ID NO: 12953 - DNA, 294 bp, Homo sapiens
ccccactccccacaaggaggtgaagctgtctctgatggcagtgccgctgtcactgcctcggacgctggagcagagtagctcatggcaggctgcagaggaggggactccacaaggacaccaggaggcacagggtgcaccctgcagggcttggggcatggtccaatgaccctttcatggggcctgccagctgcaccagagcacacctgcccccataccagactcgtgcctggggtcctgcagggccactgcctctgaccagcccactgttggtgggatctgccgtccttgcagtgg

SEQ ID NO: 12954 - DNA, 290 bp, Homo sapiens
atggtttcagcttttcagcacttgttgagacttaatttgccatctcacttatggccaatttttgtcaatattctatgtgaatttgaaaataatgtaactttcctattttgaatataagatggtataggcataattatagttatgattaatcttattaaccgtgttcttcaaattctccatatcctcaataagtttcagtcaactagatctgtcaattcctaagaaaggtatattaaacttatcactgtgattgttgacttatatgcacatatgtgtatgtatccttgtta

SEQ ID NO: 12955 - DNA, 338 bp, Homo sapiens
aactccatgaagataaggaaaaatcagcgcaaaaatgctgaaaatttcaaaagccagaatgcctcttctcctctaaatgatcacaacaactctccagcaagggtgcaaaactggacagagaatgagattgacgaattgacagaagaaggcttcagaaggtaggtaataacaaactcctcttagctaaaggagcatgttctaacccacatgtttgtatgtttcacacatttacagttacaaattataaatcccaaatcctaagactcatatgatttttaaaattatgtaaaatttctgctaacaaaataccctgattatgttattaggacattcaaaat

SEQ ID NO: 12956 - DNA, 4119 bp, Homo sapiens
  misc_feature (3939)..(3939): n is a, c, g, or t
agtcagaagccccgcagccgccgcgcggagaacagcgacagccgagcgcccggtccgcctgtctgccggtgggtctgcctgcccgcgcagcagacccggggcggccgcgggagcccgcgccccgcccgccgcgcctctgccgggacccacccgcagcggagggctgagcccgccggcggctccccggagctcacccacctccgcgcgccggagcgcaggcaaaaggggaggaaaggctcctctctttagtcaccactctcgccctctccaagaatttgtttaacaaagcgctgaggaaagagaacgtcttcttgaattctttagtaggggcggagtctgctgctgccctgcgctgccacctcggctacactgccctccgcgacgacccctgaccagccggggtcacgtccgggagacgggatcatgaagcgctcggtagccgtctggctcttggtcgggctcagcctcggtgtcccccagttcggcaaaggtgatatttgtgatcccaatccatgtgaaaatggaggtatctgtttgccaggattggctgatggttccttttcctgtgagtgtccagatggcttcacagaccccaactgttctagtgttgtggaggttgcatcagatgaagaagaaccaacttcagcaggtccctgcactcctaatccatgccataatggaggaacctgtgaaataagtgaagcataccgaggggatacattcataggctatgtttgtaaatgtccccgaggatttaatgggattcactgtcagcacaacataaatgaatgcgaagttgagccttgcaaaaatggtggaatatgtacagatcttgttgctaactattcctgtgagtgcccaggcgaatttatgggaagaaattgtcaatacaaatgctcaggcccactgggaattgaaggtggaattatatcaaaccagcaaatcacagcttcctctactcaccgagctctttttggactccaaaaatggtatccctactatgcacgtcttaataagaaggggcttataaatgcgtggacagctgcagaaaatgacagatggccgtggattcagataaatttgcaaaggaaaatgagagttactggtgtgattacccaaggagccaagaggattggaagcccagagtatataaaatcctacaaaattgcctacagtaatgatggaaagacttgggcaatgtacaaagtgaaaggcaccaatgaagacatggtgtttcgtggaaacattgataacaacactccatatgctaactctttcacaccccccataaaagctcagtatgtaagactctatccccaagtttgtcgaagacattgcactttgcgaatggaacttcttggctgtgaactgtcgggttgttctgagcctctgggtatgaaatcaggacatatacaagactatcagatcactgcctccagcatcttcagaacgctcaacatggacatgttcacttgggaaccaaggaaagctcggctggacaagcaaggcaaagtgaatgcctggacctctggccacaatgaccagtcacaatggttacaggtggatcttcttgttccaaccaaagtgactggcatcattacacaaggagctaaagattttggtcatgtacagtttgttggctcctacaaactggcttacagcaatgatggagaacactggactgtataccaggatgaaaagcaaagaaaagataaggttttccagggaaattttgacaatgacactcacagaaaaaatgtcatcgaccctcccatctatgcacgacacataagaatccttccttggtcctggtacgggaggatcacattgcggtcagagctgctgggctgcacagaggaggaatgaggggaggctacatttcacaaccctcttccctatttccctaaaagtatctccatggaatgaactgtgcaaaatctgtaggaaactgaatggtttttttttttttttcatgaaaaagtgctcaaattatggtaggcaactaacggtgtttttaagggggtctaagcctgccttttcaatgatttaatttgattttattttatccgtcaaatctcttaagtaacaacacattaagtgtgaattacttttctctcattgtttcctgaattattcgcattggtagaaatatattagggaaagaaagtagccttctttttatagcaagagtaaaaaagtctcaaagtcatcaaataagagcaagagttgatagagcttttacaatcaatactcacctaattctgataaaaggaatactgcaatgttagcaataagtttttttcttctgtaatgactctacgttatcctgtttccctgtgcctaccaaacactgtcaatgtttattacaaaattttaaagaagaatatgtaacatgcagtactgatattataattctcattttactttcattatttctaataagagattatgtgacttctttttcttttagttctattctacattcttaatattgtatattacctgaataattcaatttttttctaattgaatttcctattagttgactaaaagaagtgtcatgtttactcatatatgtagaacatgactgcctatcagtagattgatctgtatttaatattcgttaattaaatctgcagttttatttttgaaggaagccataactatttaatttccaaataattgcttcataaagaatcccatactctcagtttgcacaaaagaacaaaaaatatatatgtctctttaaatttaaatcttcatttagatggtaattacatatccttatatttactttaaaaaatcggcttatttgtttattttataaaaaatttagcaaagaaatattaatatagtgctgcatagtttggccaagcatactcatcatttctttgttcagctccacatttcctgtgaaactaacatcttattgagatttgaaactggtggtagtttcccaggaaggcacaggtggagttatttgtgagaagcaaagtgtttactaatgacaaagtagtaaaccattttcaagatgaaaactgatttctatttattttgcttcaaaggtcctgaaaaaataagcaattatcataacaatttgttattgatactggaggtttcattgacatgtctctcaaattaaagctcacactgcctccataaaagtcttcaacatctaatttataagctttacaagtatttattttataaggcttagacagaattattggagttttaaattaagtgtattggaaaagaaaggatggtatgtgtatgaaatgttaagatcctacgcaacactgctatttttttcctttaatatttgtgctgcataacaaaagccactagactgttactgtcttgtctgtccatgtgttaacagcatttcttaatgatgtatatatggagtggtcttcaatcatagtgaagaatttaaagagaaagtcaattgtattggcatttttaataagaacaaaattagttcgtctaaggggactggctggccacatatttgttccttgcccatatgctttctacttcttgttcttattatgaaattatgaatttgaagcctctgaaatggtgatcagttttcaacatctttcaaaaacaaaattactatttcctccatattgccttttttagataactttaaagttaggattttaaaatatttgtaactggctaaattttaaagtcgtgacaaataattacttaggttcagaaatatacacacacttactctttagccagtttctttcaaggtttactgtcccatcagatatctagccattttcctttgcaaattacataccttcttaagagtgtatttttaagattattacttacgctttatgatgatatagtttttcaaaattatttatagcttcatatgatgttttgtaattttttctattgatacctgttttaaaaatattntccaaggaagttgattaaattctatttgttaccttttagaaaaaagcattgaaatgagtttctcttgcttttcattttccctctgctttatatgctcttcgcatacatcatgtccacgggatcctattgttctctgaacccaattgtggagccgggtcgcccttggatgttgacctttgg

SEQ ID NO: 12957 - DNA, 2719 bp, Homo sapiens
agtcagaagccccgcagccgccgcgcggagaacagcgacagccgagcgcccggtccgcctgtctgccggtgggtctgcctgcccgcgcagcagacccggggcggccgcgggagcccgcgccccgcccgccgcgcctctgccgggacccacccgcagcggagggctgagcccgccggcggctccccggagctcacccacctccgcgcgccggagcgcaggcaaaaggggaggaaaggctcctctctttagtcaccactctcgccctctccaagaatttgtttaacaaagcgctgaggaaagagaacgtcttcttgaattctttagtaggggcggagtctgctgctgccctgcgctgccacctcggctacactgccctccgcgacgacccctgaccagccggggtcacgtccgggagacgggatcatgaagcgctcggtagccgtctggctcttggtcgggctcagcctcggtgtcccccagttcggcaaaggtgatatttgtgatcccaatccatgtgaaaatggaggtatctgtttgccaggattggctgatggttccttttcctgtgagtgtccagatggcttcacagaccccaactgttctagtgttgtggaggttgcatcagatgaagaagaaccaacttcagcaggtccctgcactcctaatccatgccataatggaggaacctgtgaaataagtgaagcataccgaggggatacattcataggctatgtttgtaaatgtccccgaggatttaatgggattcactgtcagcacaacataaatgaatgcgaagttgagccttgcaaaaatggtggaatatgtacagatcttgttgctaactattcctgtgagtgcccaggcgaatttatgggaagaaattgtcaatacaaatgctcaggcccactgggaattgaaggtggaattatatcaaaccagcaaatcacagcttcctctactcaccgagctctttttggactccaaaaatggtatccctactatgcacgtcttaataagaaggggcttataaatgcgtggacagctgcagaaaatgacagatggccgtggattcagataaatttgcaaaggaaaatgagagttactggtgtgattacccaaggagccaagaggattggaagcccagagtatataaaatcctacaaaattgcctacagtaatgatggaaagacttgggcaatgtacaaagtgaaaggcaccaatgaagacatggtgtttcgtggaaacattgataacaacactccatatgctaactctttcacaccccccataaaagctcagtatgtaagactctatccccaagtttgtcgaagacattgcactttgcgaatggaacttcttggctgtgaactgtcgggttgttctgagcctctgggtatgaaatcaggacatatacaagactatcagatcactgcctccagcatcttcagaacgctcaacatggacatgttcacttgggaaccaaggaaagctcggctggacaagcaaggcaaagtgaatgcctggacctctggccacaatgaccagtcacaatggttacaggtggatcttcttgttccaaccaaagtgactggcatcattacacaaggagctaaagattttggtcatgtacagtttgttggctcctacaaactggcttacagcaatgatggagaacactggactgtataccaggatgaaaagcaaagaaaagataaggttttccagggaaattttgacaatgacactcacagaaaaaatgtcatcgaccctcccatctatgcacgacacataagaatccttccttggtcctggtacgggaggatcacattgcggtcagagctgctgggctgcacagaggaggaatgaggggaggctacatttcacaaccctcttccctatttccctaaaagtatctccatggaatgaactgtgcaaaatctgtaggaaactgaatggtttttttttttttttcatgaaaaagtgctcaaattatggtaggcaactaacggtgtttttaagggggtctaagcctgccttttcaatgatttaatttgattttattttatccgtcaaatctcttaagtaacaacacattaagtgtgaattacttttctctcattgtttcctgaattattcgcattggtagaaatatattagggaaagaaagtagccttctttttatagcaagagtaaaaaagtctcaaagtcatcaaataagagcaagagttgatagagcttttacaatcaatactcacctaattctgataaaaggaatactgcaatgttagcaataagtttttttcttctgtaatgactctacgttatcctgtttccctgtgcctaccaaacactgtcaatgtttattacaaaattttaaagaagaatatgtaacatgcagtactgatattataattctcattttactttcattatttctaataagagattatgtgacttctttttcttttagttctattctacattcttaatattgtatattacctgaataattcaatttttttctaattgaatttcctattagttgactaaaagaagtgtcatgtttactcatatatgtagaacatgactgcctatcagtagattgatctgtatttaatattcgttaattaaatctgcagttttatttttgaaggaagccataactatttaatttccaaataattgcttcataaagaatcccatactctcagtttgcaca

SEQ ID NO: 12958 - DNA, 4089 bp, Homo sapiens
  misc_feature (3909)..(3909): n is a, c, g, or t
agtcagaagccccgcagccgccgcgcggagaacagcgacagccgagcgcccggtccgcctgtctgccggtgggtctgcctgcccgcgcagcagacccggggcggccgcgggagcccgcgccccgcccgccgcgcctctgccgggacccacccgcagcggagggctgagcccgccggcggctccccggagctcacccacctccgcgcgccggagcgcaggcaaaaggggaggaaaggctcctctctttagtcaccactctcgccctctccaagaatttgtttaacaaagcgctgaggaaagagaacgtcttcttgaattctttagtaggggcggagtctgctgctgccctgcgctgccacctcggctacactgccctccgcgacgacccctgaccagccggggtcacgtccgggagacgggatcatgaagcgctcggtagccgtctggctcttggtcgggctcagcctcggtgtcccccagttcggcaaaggtgatatttgtgatcccaatccatgtgaaaatggaggtatctgtttgccaggattggctgatggttccttttcctgtgagtgtccagatggcttcacagaccccaactgttctagtgttgtggaggttggtccctgcactcctaatccatgccataatggaggaacctgtgaaataagtgaagcataccgaggggatacattcataggctatgtttgtaaatgtccccgaggatttaatgggattcactgtcagcacaacataaatgaatgcgaagttgagccttgcaaaaatggtggaatatgtacagatcttgttgctaactattcctgtgagtgcccaggcgaatttatgggaagaaattgtcaatacaaatgctcaggcccactgggaattgaaggtggaattatatcaaaccagcaaatcacagcttcctctactcaccgagctctttttggactccaaaaatggtatccctactatgcacgtcttaataagaaggggcttataaatgcgtggacagctgcagaaaatgacagatggccgtggattcagataaatttgcaaaggaaaatgagagttactggtgtgattacccaaggagccaagaggattggaagcccagagtatataaaatcctacaaaattgcctacagtaatgatggaaagacttgggcaatgtacaaagtgaaaggcaccaatgaagacatggtgtttcgtggaaacattgataacaacactccatatgctaactctttcacaccccccataaaagctcagtatgtaagactctatccccaagtttgtcgaagacattgcactttgcgaatggaacttcttggctgtgaactgtcgggttgttctgagcctctgggtatgaaatcaggacatatacaagactatcagatcactgcctccagcatcttcagaacgctcaacatggacatgttcacttgggaaccaaggaaagctcggctggacaagcaaggcaaagtgaatgcctggacctctggccacaatgaccagtcacaatggttacaggtggatcttcttgttccaaccaaagtgactggcatcattacacaaggagctaaagattttggtcatgtacagtttgttggctcctacaaactggcttacagcaatgatggagaacactggactgtataccaggatgaaaagcaaagaaaagataaggttttccagggaaattttgacaatgacactcacagaaaaaatgtcatcgaccctcccatctatgcacgacacataagaatccttccttggtcctggtacgggaggatcacattgcggtcagagctgctgggctgcacagaggaggaatgaggggaggctacatttcacaaccctcttccctatttccctaaaagtatctccatggaatgaactgtgcaaaatctgtaggaaactgaatggtttttttttttttttcatgaaaaagtgctcaaattatggtaggcaactaacggtgtttttaagggggtctaagcctgccttttcaatgatttaatttgattttattttatccgtcaaatctcttaagtaacaacacattaagtgtgaattacttttctctcattgtttcctgaattattcgcattggtagaaatatattagggaaagaaagtagccttctttttatagcaagagtaaaaaagtctcaaagtcatcaaataagagcaagagttgatagagcttttacaatcaatactcacctaattctgataaaaggaatactgcaatgttagcaataagtttttttcttctgtaatgactctacgttatcctgtttccctgtgcctaccaaacactgtcaatgtttattacaaaattttaaagaagaatatgtaacatgcagtactgatattataattctcattttactttcattatttctaataagagattatgtgacttctttttcttttagttctattctacattcttaatattgtatattacctgaataattcaatttttttctaattgaatttcctattagttgactaaaagaagtgtcatgtttactcatatatgtagaacatgactgcctatcagtagattgatctgtatttaatattcgttaattaaatctgcagttttatttttgaaggaagccataactatttaatttccaaataattgcttcataaagaatcccatactctcagtttgcacaaaagaacaaaaaatatatatgtctctttaaatttaaatcttcatttagatggtaattacatatccttatatttactttaaaaaatcggcttatttgtttattttataaaaaatttagcaaagaaatattaatatagtgctgcatagtttggccaagcatactcatcatttctttgttcagctccacatttcctgtgaaactaacatcttattgagatttgaaactggtggtagtttcccaggaaggcacaggtggagttatttgtgagaagcaaagtgtttactaatgacaaagtagtaaaccattttcaagatgaaaactgatttctatttattttgcttcaaaggtcctgaaaaaataagcaattatcataacaatttgttattgatactggaggtttcattgacatgtctctcaaattaaagctcacactgcctccataaaagtcttcaacatctaatttataagctttacaagtatttattttataaggcttagacagaattattggagttttaaattaagtgtattggaaaagaaaggatggtatgtgtatgaaatgttaagatcctacgcaacactgctatttttttcctttaatatttgtgctgcataacaaaagccactagactgttactgtcttgtctgtccatgtgttaacagcatttcttaatgatgtatatatggagtggtcttcaatcatagtgaagaatttaaagagaaagtcaattgtattggcatttttaataagaacaaaattagttcgtctaaggggactggctggccacatatttgttccttgcccatatgctttctacttcttgttcttattatgaaattatgaatttgaagcctctgaaatggtgatcagttttcaacatctttcaaaaacaaaattactatttcctccatattgccttttttagataactttaaagttaggattttaaaatatttgtaactggctaaattttaaagtcgtgacaaataattacttaggttcagaaatatacacacacttactctttagccagtttctttcaaggtttactgtcccatcagatatctagccattttcctttgcaaattacataccttcttaagagtgtatttttaagattattacttacgctttatgatgatatagtttttcaaaattatttatagcttcatatgatgttttgtaattttttctattgatacctgttttaaaaatattntccaaggaagttgattaaattctatttgttaccttttagaaaaaagcattgaaatgagtttctcttgcttttcattttccctctgctttatatgctcttcgcatacatcatgtccacgggatcctattgttctctgaacccaattgtggagccgggtcgcccttggatgttgacctttgg

SEQ ID NO: 12959 - DNA, 3261 bp, Homo sapiens
  misc_feature (3081)..(3081): n is a, c, g, or t
agcggaatggatttaggacctctgtattcaacattcctatcacttttgtaggtaactgtgctattgcataatatggccatacttaagtcattttccttgagaatagagaagtaaaggagaaaccaatgatttttcccccacttcagatctcacctgccagcactgatgtaagacttcacctccctatttcaaggcacattattatcatcagtctggataaatttgcaaaggaaaatgagagttactggtgtgattacccaaggagccaagaggattggaagcccagagtatataaaatcctacaaaattgcctacagtaatgatggaaagacttgggcaatgtacaaagtgaaaggcaccaatgaagacatggtgtttcgtggaaacattgataacaacactccatatgctaactctttcacaccccccataaaagctcagtatgtaagactctatccccaagtttgtcgaagacattgcactttgcgaatggaacttcttggctgtgaactgtcgggttgttctgagcctctgggtatgaaatcaggacatatacaagactatcagatcactgcctccagcatcttcagaacgctcaacatggacatgttcacttgggaaccaaggaaagctcggctggacaagcaaggcaaagtgaatgcctggacctctggccacaatgaccagtcacaatggttacaggtggatcttcttgttccaaccaaagtgactggcatcattacacaaggagctaaagattttggtcatgtacagtttgttggctcctacaaactggcttacagcaatgatggagaacactggactgtataccaggatgaaaagcaaagaaaagataaggttttccagggaaattttgacaatgacactcacagaaaaaatgtcatcgaccctcccatctatgcacgacacataagaatccttccttggtcctggtacgggaggatcacattgcggtcagagctgctgggctgcacagaggaggaatgaggggaggctacatttcacaaccctcttccctatttccctaaaagtatctccatggaatgaactgtgcaaaatctgtaggaaactgaatggtttttttttttttttcatgaaaaagtgctcaaattatggtaggcaactaacggtgtttttaagggggtctaagcctgccttttcaatgatttaatttgattttattttatccgtcaaatctcttaagtaacaacacattaagtgtgaattacttttctctcattgtttcctgaattattcgcattggtagaaatatattagggaaagaaagtagccttctttttatagcaagagtaaaaaagtctcaaagtcatcaaataagagcaagagttgatagagcttttacaatcaatactcacctaattctgataaaaggaatactgcaatgttagcaataagtttttttcttctgtaatgactctacgttatcctgtttccctgtgcctaccaaacactgtcaatgtttattacaaaattttaaagaagaatatgtaacatgcagtactgatattataattctcattttactttcattatttctaataagagattatgtgacttctttttcttttagttctattctacattcttaatattgtatattacctgaataattcaatttttttctaattgaatttcctattagttgactaaaagaagtgtcatgtttactcatatatgtagaacatgactgcctatcagtagattgatctgtatttaatattcgttaattaaatctgcagttttatttttgaaggaagccataactatttaatttccaaataattgcttcataaagaatcccatactctcagtttgcacaaaagaacaaaaaatatatatgtctctttaaatttaaatcttcatttagatggtaattacatatccttatatttactttaaaaaatcggcttatttgtttattttataaaaaatttagcaaagaaatattaatatagtgctgcatagtttggccaagcatactcatcatttctttgttcagctccacatttcctgtgaaactaacatcttattgagatttgaaactggtggtagtttcccaggaaggcacaggtggagttatttgtgagaagcaaagtgtttactaatgacaaagtagtaaaccattttcaagatgaaaactgatttctatttattttgcttcaaaggtcctgaaaaaataagcaattatcataacaatttgttattgatactggaggtttcattgacatgtctctcaaattaaagctcacactgcctccataaaagtcttcaacatctaatttataagctttacaagtatttattttataaggcttagacagaattattggagttttaaattaagtgtattggaaaagaaaggatggtatgtgtatgaaatgttaagatcctacgcaacactgctatttttttcctttaatatttgtgctgcataacaaaagccactagactgttactgtcttgtctgtccatgtgttaacagcatttcttaatgatgtatatatggagtggtcttcaatcatagtgaagaatttaaagagaaagtcaattgtattggcatttttaataagaacaaaattagttcgtctaaggggactggctggccacatatttgttccttgcccatatgctttctacttcttgttcttattatgaaattatgaatttgaagcctctgaaatggtgatcagttttcaacatctttcaaaaacaaaattactatttcctccatattgccttttttagataactttaaagttaggattttaaaatatttgtaactggctaaattttaaagtcgtgacaaataattacttaggttcagaaatatacacacacttactctttagccagtttctttcaaggtttactgtcccatcagatatctagccattttcctttgcaaattacataccttcttaagagtgtatttttaagattattacttacgctttatgatgatatagtttttcaaaattatttatagcttcatatgatgttttgtaattttttctattgatacctgttttaaaaatattntccaaggaagttgattaaattctatttgttaccttttagaaaaaagcattgaaatgagtttctcttgcttttcattttccctctgctttatatgctcttcgcatacatcatgtccacgggatcctattgttctctgaacccaattgtggagccgggtcgcccttggatgttgacctttgg

SEQ ID NO: 12960 - DNA, 3203 bp, Homo sapiens
  misc_feature (3023)..(3023): n is a, c, g, or t
aactccatgaagataaggaaaaatcagcgcaaaaatgctgaaaatttcaaaagccagaatgcctcttctcctctaaatgatcacaacaactctccagcaagggtgcaaaactggacagagaatgagattgacgaattgacagaagaaggcttcagaagataaatttgcaaaggaaaatgagagttactggtgtgattacccaaggagccaagaggattggaagcccagagtatataaaatcctacaaaattgcctacagtaatgatggaaagacttgggcaatgtacaaagtgaaaggcaccaatgaagacatggtgtttcgtggaaacattgataacaacactccatatgctaactctttcacaccccccataaaagctcagtatgtaagactctatccccaagtttgtcgaagacattgcactttgcgaatggaacttcttggctgtgaactgtcgggttgttctgagcctctgggtatgaaatcaggacatatacaagactatcagatcactgcctccagcatcttcagaacgctcaacatggacatgttcacttgggaaccaaggaaagctcggctggacaagcaaggcaaagtgaatgcctggacctctggccacaatgaccagtcacaatggttacaggtggatcttcttgttccaaccaaagtgactggcatcattacacaaggagctaaagattttggtcatgtacagtttgttggctcctacaaactggcttacagcaatgatggagaacactggactgtataccaggatgaaaagcaaagaaaagataaggttttccagggaaattttgacaatgacactcacagaaaaaatgtcatcgaccctcccatctatgcacgacacataagaatccttccttggtcctggtacgggaggatcacattgcggtcagagctgctgggctgcacagaggaggaatgaggggaggctacatttcacaaccctcttccctatttccctaaaagtatctccatggaatgaactgtgcaaaatctgtaggaaactgaatggtttttttttttttttcatgaaaaagtgctcaaattatggtaggcaactaacggtgtttttaagggggtctaagcctgccttttcaatgatttaatttgattttattttatccgtcaaatctcttaagtaacaacacattaagtgtgaattacttttctctcattgtttcctgaattattcgcattggtagaaatatattagggaaagaaagtagccttctttttatagcaagagtaaaaaagtctcaaagtcatcaaataagagcaagagttgatagagcttttacaatcaatactcacctaattctgataaaaggaatactgcaatgttagcaataagtttttttcttctgtaatgactctacgttatcctgtttccctgtgcctaccaaacactgtcaatgtttattacaaaattttaaagaagaatatgtaacatgcagtactgatattataattctcattttactttcattatttctaataagagattatgtgacttctttttcttttagttctattctacattcttaatattgtatattacctgaataattcaatttttttctaattgaatttcctattagttgactaaaagaagtgtcatgtttactcatatatgtagaacatgactgcctatcagtagattgatctgtatttaatattcgttaattaaatctgcagttttatttttgaaggaagccataactatttaatttccaaataattgcttcataaagaatcccatactctcagtttgcacaaaagaacaaaaaatatatatgtctctttaaatttaaatcttcatttagatggtaattacatatccttatatttactttaaaaaatcggcttatttgtttattttataaaaaatttagcaaagaaatattaatatagtgctgcatagtttggccaagcatactcatcatttctttgttcagctccacatttcctgtgaaactaacatcttattgagatttgaaactggtggtagtttcccaggaaggcacaggtggagttatttgtgagaagcaaagtgtttactaatgacaaagtagtaaaccattttcaagatgaaaactgatttctatttattttgcttcaaaggtcctgaaaaaataagcaattatcataacaatttgttattgatactggaggtttcattgacatgtctctcaaattaaagctcacactgcctccataaaagtcttcaacatctaatttataagctttacaagtatttattttataaggcttagacagaattattggagttttaaattaagtgtattggaaaagaaaggatggtatgtgtatgaaatgttaagatcctacgcaacactgctatttttttcctttaatatttgtgctgcataacaaaagccactagactgttactgtcttgtctgtccatgtgttaacagcatttcttaatgatgtatatatggagtggtcttcaatcatagtgaagaatttaaagagaaagtcaattgtattggcatttttaataagaacaaaattagttcgtctaaggggactggctggccacatatttgttccttgcccatatgctttctacttcttgttcttattatgaaattatgaatttgaagcctctgaaatggtgatcagttttcaacatctttcaaaaacaaaattactatttcctccatattgccttttttagataactttaaagttaggattttaaaatatttgtaactggctaaattttaaagtcgtgacaaataattacttaggttcagaaatatacacacacttactctttagccagtttctttcaaggtttactgtcccatcagatatctagccattttcctttgcaaattacataccttcttaagagtgtatttttaagattattacttacgctttatgatgatatagtttttcaaaattatttatagcttcatatgatgttttgtaattttttctattgatacctgttttaaaaatattntccaaggaagttgattaaattctatttgttaccttttagaaaaaagcattgaaatgagtttctcttgcttttcattttccctctgctttatatgctcttcgcatacatcatgtccacgggatcctattgttctctgaacccaattgtggagccgggtcgcccttggatgttgacctttgg

SEQ ID NO: 12961 - DNA, 3993 bp, Homo sapiens
  misc_feature (3813)..(3813): n is a, c, g, or t
agtcagaagccccgcagccgccgcgcggagaacagcgacagccgagcgcccggtccgcctgtctgccggtgggtctgcctgcccgcgcagcagacccggggcggccgcgggagcccgcgccccgcccgccgcgcctctgccgggacccacccgcagcggagggctgagcccgccggcggctccccggagctcacccacctccgcgcgccggagcgcaggcaaaaggggaggaaaggctcctctctttagtcaccactctcgccctctccaagaatttgtttaacaaagcgctgaggaaagagaacgtcttcttgaattctttagtaggggcggagtctgctgctgccctgcgctgccacctcggctacactgccctccgcgacgacccctgaccagccggggtcacgtccgggagacgggatcatgaagcgctcggtagccgtctggctcttggtcgggctcagcctcggtgtcccccagttcggcaaaggtgatatttgtgatcccaatccatgtgaaaatggaggtatctgtttgccaggattggctgatggttccttttcctgtgagtgtccagatggcttcacagaccccaactgttctagtgttgtggaggttgcatcagatgaagaagaaccaacttcagcaggtccctgcactcctaatccatgccataatggaggaacctgtgaaataagtgaagcataccgaggggatacattcataggctatgtttgtaaatgtccccgaggatttaatgggattcactgtcagcacaacataaatgaatgcgaagttgagccttgcaaaaatggtggaatatgtacagatcttgttgctaactattcctgtgagtgcccaggcgaatttatgggaagaaattgtcaatacaaatgctcaggcccactgggaattgaaggtggaattatatcaaaccagcaaatcacagcttcctctactcaccgagctctttttggactccaaaaatggtatccctactatgcacgtcttaataagaaggggcttataaatgcgtggacagctgcagaaaatgacagatggccgtggattcagataaatttgcaaaggaaaatgagagttactggtgtgattacccaaggagccaagaggattggaagcccagagtatataaaatcctacaaaattgcctacagtaatgatggaaagacttgggcaatgtacaaagtgaaaggcaccaatgaagacatggtgtttcgtggaaacattgataacaacactccatatgctaactctttcacaccccccataaaagctcagtatgtaagactctatccccaagtttgtcgaagacattgcactttgcgaatggaacttcttggctgtgaactgtcgggttgttctgagcctctgggtatgaaatcaggacatatacaagactatcagatcactgcctccagcatcttcagaacgctcaacatggacatgttcacttgggaaccaaggaaagctcggctggacaagcaaggcaaagtgaatgcctggacctctggccacaatgaccagtcacaatggttacaggtggatcttcttgttccaaccaaagtgactggcatcattacacaaggagctaaagattttggtcatgtacagtttgttggctcctacaaactggcttacagcataagaatccttccttggtcctggtacgggaggatcacattgcggtcagagctgctgggctgcacagaggaggaatgaggggaggctacatttcacaaccctcttccctatttccctaaaagtatctccatggaatgaactgtgcaaaatctgtaggaaactgaatggtttttttttttttttcatgaaaaagtgctcaaattatggtaggcaactaacggtgtttttaagggggtctaagcctgccttttcaatgatttaatttgattttattttatccgtcaaatctcttaagtaacaacacattaagtgtgaattacttttctctcattgtttcctgaattattcgcattggtagaaatatattagggaaagaaagtagccttctttttatagcaagagtaaaaaagtctcaaagtcatcaaataagagcaagagttgatagagcttttacaatcaatactcacctaattctgataaaaggaatactgcaatgttagcaataagtttttttcttctgtaatgactctacgttatcctgtttccctgtgcctaccaaacactgtcaatgtttattacaaaattttaaagaagaatatgtaacatgcagtactgatattataattctcattttactttcattatttctaataagagattatgtgacttctttttcttttagttctattctacattcttaatattgtatattacctgaataattcaatttttttctaattgaatttcctattagttgactaaaagaagtgtcatgtttactcatatatgtagaacatgactgcctatcagtagattgatctgtatttaatattcgttaattaaatctgcagttttatttttgaaggaagccataactatttaatttccaaataattgcttcataaagaatcccatactctcagtttgcacaaaagaacaaaaaatatatatgtctctttaaatttaaatcttcatttagatggtaattacatatccttatatttactttaaaaaatcggcttatttgtttattttataaaaaatttagcaaagaaatattaatatagtgctgcatagtttggccaagcatactcatcatttctttgttcagctccacatttcctgtgaaactaacatcttattgagatttgaaactggtggtagtttcccaggaaggcacaggtggagttatttgtgagaagcaaagtgtttactaatgacaaagtagtaaaccattttcaagatgaaaactgatttctatttattttgcttcaaaggtcctgaaaaaataagcaattatcataacaatttgttattgatactggaggtttcattgacatgtctctcaaattaaagctcacactgcctccataaaagtcttcaacatctaatttataagctttacaagtatttattttataaggcttagacagaattattggagttttaaattaagtgtattggaaaagaaaggatggtatgtgtatgaaatgttaagatcctacgcaacactgctatttttttcctttaatatttgtgctgcataacaaaagccactagactgttactgtcttgtctgtccatgtgttaacagcatttcttaatgatgtatatatggagtggtcttcaatcatagtgaagaatttaaagagaaagtcaattgtattggcatttttaataagaacaaaattagttcgtctaaggggactggctggccacatatttgttccttgcccatatgctttctacttcttgttcttattatgaaattatgaatttgaagcctctgaaatggtgatcagttttcaacatctttcaaaaacaaaattactatttcctccatattgccttttttagataactttaaagttaggattttaaaatatttgtaactggctaaattttaaagtcgtgacaaataattacttaggttcagaaatatacacacacttactctttagccagtttctttcaaggtttactgtcccatcagatatctagccattttcctttgcaaattacataccttcttaagagtgtatttttaagattattacttacgctttatgatgatatagtttttcaaaattatttatagcttcatatgatgttttgtaattttttctattgatacctgttttaaaaatattntccaaggaagttgattaaattctatttgttaccttttagaaaaaagcattgaaatgagtttctcttgcttttcattttccctctgctttatatgctcttcgcatacatcatgtccacgggatcctattgttctctgaacccaattgtggagccgggtcgcccttggatgttgacctttgg

SEQ ID NO: 12962 - DNA, 2457 bp, Homo sapiens
  misc_feature (47)..(47): n is a, c, g, or t
  misc_feature (2277)..(2277): n is a, c, g, or t
acgtcgaacacgctccataccctacgagcgccaagcgacaccaaaancccttaggttttccagggaaattttgacaatgacactcacagaaaaaatgtcatcgaccctcccatctatgcacgacacataagaatccttccttggtcctggtacgggaggatcacattgcggtcagagctgctgggctgcacagaggaggaatgaggggaggctacatttcacaaccctcttccctatttccctaaaagtatctccatggaatgaactgtgcaaaatctgtaggaaactgaatggtttttttttttttttcatgaaaaagtgctcaaattatggtaggcaactaacggtgtttttaagggggtctaagcctgccttttcaatgatttaatttgattttattttatccgtcaaatctcttaagtaacaacacattaagtgtgaattacttttctctcattgtttcctgaattattcgcattggtagaaatatattagggaaagaaagtagccttctttttatagcaagagtaaaaaagtctcaaagtcatcaaataagagcaagagttgatagagcttttacaatcaatactcacctaattctgataaaaggaatactgcaatgttagcaataagtttttttcttctgtaatgactctacgttatcctgtttccctgtgcctaccaaacactgtcaatgtttattacaaaattttaaagaagaatatgtaacatgcagtactgatattataattctcattttactttcattatttctaataagagattatgtgacttctttttcttttagttctattctacattcttaatattgtatattacctgaataattcaatttttttctaattgaatttcctattagttgactaaaagaagtgtcatgtttactcatatatgtagaacatgactgcctatcagtagattgatctgtatttaatattcgttaattaaatctgcagttttatttttgaaggaagccataactatttaatttccaaataattgcttcataaagaatcccatactctcagtttgcacaaaagaacaaaaaatatatatgtctctttaaatttaaatcttcatttagatggtaattacatatccttatatttactttaaaaaatcggcttatttgtttattttataaaaaatttagcaaagaaatattaatatagtgctgcatagtttggccaagcatactcatcatttctttgttcagctccacatttcctgtgaaactaacatcttattgagatttgaaactggtggtagtttcccaggaaggcacaggtggagttatttgtgagaagcaaagtgtttactaatgacaaagtagtaaaccattttcaagatgaaaactgatttctatttattttgcttcaaaggtcctgaaaaaataagcaattatcataacaatttgttattgatactggaggtttcattgacatgtctctcaaattaaagctcacactgcctccataaaagtcttcaacatctaatttataagctttacaagtatttattttataaggcttagacagaattattggagttttaaattaagtgtattggaaaagaaaggatggtatgtgtatgaaatgttaagatcctacgcaacactgctatttttttcctttaatatttgtgctgcataacaaaagccactagactgttactgtcttgtctgtccatgtgttaacagcatttcttaatgatgtatatatggagtggtcttcaatcatagtgaagaatttaaagagaaagtcaattgtattggcatttttaataagaacaaaattagttcgtctaaggggactggctggccacatatttgttccttgcccatatgctttctacttcttgttcttattatgaaattatgaatttgaagcctctgaaatggtgatcagttttcaacatctttcaaaaacaaaattactatttcctccatattgccttttttagataactttaaagttaggattttaaaatatttgtaactggctaaattttaaagtcgtgacaaataattacttaggttcagaaatatacacacacttactctttagccagtttctttcaaggtttactgtcccatcagatatctagccattttcctttgcaaattacataccttcttaagagtgtatttttaagattattacttacgctttatgatgatatagtttttcaaaattatttatagcttcatatgatgttttgtaattttttctattgatacctgttttaaaaatattntccaaggaagttgattaaattctatttgttaccttttagaaaaaagcattgaaatgagtttctcttgcttttcattttccctctgctttatatgctcttcgcatacatcatgtccacgggatcctattgttctctgaacccaattgtggagccgggtcgcccttggatgttgacctttgg

SEQ ID NO: 12963 - DNA, 498 bp, Homo sapiens
tgtatttgacaattacaagtgaagaattaaactgaacaaaatatctccaatggtctcatgaactctatcaggtaaacaataatatgaacacttaacagctgcaaagccctctggtacaacgcagggtagggtaagaagaaagtcaggagaacagtacaaaatgttaggagaaggaaaaggattaaattgcccacattgacctgaaaagaacttctgaaaggatggcatttgggtcaggagttgaaggaataatagctttttggttgtggagaagttgaatttcactatgagggttgggaccattcacgtaaatattgatcaataggtacagatcccctgttatataccagggactagacaaaatgctcaagatacagcgtggaacagatgactctcctcatagtgtttagttgtagaagagactgaaaaggtgaaagtcattggtaatcctactacccagtaaagacccaatgaatatttgttccgtttaaaaaaaaa

SEQ ID NO: 12964 - DNA, 415 bp, Homo sapiens
ccaggagttattgtgcctttgttttctaacgttggcttttgcggatcataactaggaaggtagagaaagtagatttgctctaagaagatccattaaagcatttagaagaataataaagaaatgaacatgaggctgggcatggtggttcacgcctatagtcttagcactttgggaggccgagatggtcagattgcttgagctcaggaattcaataccagcctgggcaatatggtgagacccccatctctactaaaaatacagaaaaatagctgggtgcggtggtgcatgcctatggtcccagctactagggaggctgaggtgggaggatcgcttgagactggggtggtggaggttgtagtgagccgtgattataccactgcactccagcctgggtgacagagcgagaccctgtctc

SEQ ID NO: 12965 - DNA, 429 bp, Homo sapiens
gaaggaaggaaggaaaaccttaacatctagaattttagagaacaagaacgtgtttatttgaaagtaggctctaaatgttaaggtatcttcccttgcacttcaaaataatatggcgtgcatgcaataaataagaaatgcagccgggtgcagtggctcacgcctgtaatcccagcactttgggaggtcgaggcaggcagatcacgaggtcaggaaatcgagaccatcctgactaacatggtgaaaccttgtctctactaaaaatacaaaaaattagccgggtgtggtggcgggggcctgtagtcccggctactcgggaggctgaggcaggagaatggcgtgaacccaggaggcagagcttgcagtgatctgagattgcaccactgccctccagcctgggcaacagagtgagactctgtctcaaaaaataaa

SEQ ID NO: 12966 - DNA, 253 bp, Homo sapiens
tcacacacttccgtatccaattcagtcacaaatgttgctagtcttctacctttgtaagattttgaacatcaccactggtctaagccatcattctcttttctgagaaatattgaatgatccttctaattggccttcatgctttctttcttgctttccttctgtgtaacaacttggaaagaaaagttccaaacctatcacagttaagcattaaaagtgtttgcttacataataaagaatgttggaaatttctcat

SEQ ID NO: 12967 - DNA, 1899 bp, Homo sapiens
caataataatattataatgtgtttctcttctaaaataaacagattttatactcattattttaaaatgtgatcaaaaccacataattgtttttagtcttctgattgcgatttttaaaaagaaaattcaaagtttggcattaaatatattttctgtaagataatataactacatatgataaaatgattaagtactctgatagtgtcactatttcaataccattattatctttaacatatgttaaaacactccagtacataactaataaagaggaattcacatggccagcaattttaaactggtgcagcaaacttatcttttgtgtttgcaaacataagagaactgaagaagcaagatgcaaacaatgtctccgttgttcagcatgtgttttatgatataatacattcgttcatgttgtgttatacaaattttgcagggagggttgctcgttttatcaatttgtgtattttttatttcatattttgtacgcaatcatgagcatttttcttataaattgtacacaacaagaacctgttgaagattagaaggaaggagcagcacatacttttagcaatccttttatcttaccaatcactggaagaaaatgatgccaagaagccatgtgagatatcatctctgtctgtcatgttttcagaacagagtgtggcttactaatgttgccattgcaggctatgctttgtcaagtgaatacggttttcatcttaaggggatagtaagcaagatgttagcaatactcactcatcttcagatttcattgtcaaatatactaatatttcaaaaatatggttttcatctagaaaaaaatggagattttgagtgtacaaatatagccaatgcaggttaaatttaaacagagatttttttttaatctctcccttttttatacttttttttttttttttgagacagagtcttgccctgtcacccaggcttcagtgcaatggcgcaatctcgactcactgcaacctccgcctcccaggttctagtgattctcctgcctcagcctcccaagtagctgggattacaggcacgcgctaccacacctggctaatttttgtatctttagtagagacaggtttcaccatgttggtcaggctggtatcgaactcctgacctcatgatccacccgcctcggactcccgaagtgctgggattacaggcatgagccaccacacctggcccccctttttatactttttacaagtaatctgacactaggtgccacataattaagataaagacaaaagtgcaaaaccatgtaaaatattgacttctaattgtgaattagtttcccttttctacttgttttgccttgttggatatgaaacatttcaagtatgtcattgtaggattatttttgacattttattcttagaatggtgatttagttgcataattctcatttgctataccacttttctaaaaaataaatgtttgaattattgaaatatcccaagatactccttgttatataattgtagatcattactttattttcagacaaattatgctattgtggataaatattcaatgtataaaatacaggacttcttttttcctgttttacaaaactccagtgccctttcttatctactattttaatattcctttgctatagtatattgcataatgtggagtcaactattttttacaatatgtacgtgttgatctgaaagttcctattgagttaaataatgaaaaataatttggtggaccatgaattttaaatttgttaaaaattgttttatttgtgtatgtgtataaaattaaattttgcaaattggtaaatttattcttcatttaaccttgttgctttgagtactcctaaagcttgtaataattctttggggagtaatataaaatatatcattcataagtga

SEQ ID NO: 12968 - DNA, 490 bp, Homo sapiens
ttattcctacgaaggccagtgcaggctcctgggctgcaaacaccaggccccagaaagacaattgcagccctctaccctctccctgcgtcaggcagcccacctgccttccccagggggctgctcctgctcacagagggatggccagcctggctccagagagctggaattgtcattgcagtgacaggagagaacagggctctcagctctggaaacagattcttatcctcatcttggtcttgggaattaggctggaactgggtgagaacaagcttcccagccacacaggcccaaagagagtcacagaagtacagaggccataaactcagccctttcccctctgactcccagatacggaggcgagaggctcaaagccagctcggcaaaccctggggactagctgtggaaagcaacttcaatgagatgcgtagaatgccaaaagttcagagtcaaagggcatccttggattcccaggctttttaggtttgtgttt

SEQ ID NO: 12969 - DNA, 882 bp, Homo sapiens
  misc_feature (833)..(833): n is a, c, g, or t
  misc_feature (835)..(835): n is a, c, g, or t
tgcaggctggtacggtccgagaggcgctagatccgcagcgaggaagcgcccgcgcgggcgcaggcggccgggatggcggggcccggctggggtcccccgcgcctggacggcttcatcctcaccgagcgcctgggcagcggcacgtacgccacggtgtacaaggcctacgccaagaaggacactcgtgaagtggtagccataaagtgtgtagccaagaaaagtctgaacaaggcatcggtggagaacctcctcacggagattgagatcctcaagggcattcgacatccccacattgtgcagctgaaagactttcagtgggacagtgacaatatctacctcatcatggagttttgcgcagggggcgacctgtctcgcttcatccatacccgcaggattctgcctgagaaggtggcgcgtgtcttcatgcagcaattagctagcgccctgcaattcctgcatgaacggaatatctctcacctggatctgaagccacagaacattctactgagctccttggagaagccccacctaaaactggcagactttggtttcgcacaacacatgtccccgtgggatgagaagcacgtgctccgtggctcccccctctacatggcccccgagatggtgtgccagcggcagtatgacgcccgcgtggacctctggtccatgggggtcatcctgtatggtgagacctcttttccctgcttctcaccctgaggcctacagtttcctcaggcaaggcctctctgggccacttctgaagggttctgatgaaaactgactgctggcccagggcccctgctgaggggcgtcaggccaggcttgacccaatncntacagctcagagacgactacttccaagaggctcttaggaagcccctt

SEQ ID NO: 12970 - DNA, 236 bp, Homo sapiens
gaagaccaggctgaggctgtgtcgggaagccaggattccagaatcagcattcctcactggcctcacaagggaaagctgggaagcccggtgctggtgtgcagtagaaggacactcgtgaagtggtagccataaagtgtgtagccaagaaaagtctgaacaaggcatcggtggagaacctcctcacggagattgagatcctcaagggcatttcatcgacttggaatcctcgggatcga

SEQ ID NO: 12971 - DNA, 2812 bp, Homo sapiens
  misc_feature (2185)..(2185): n is a, c, g, or t
cggcgctgggggcagcgtggagccacccagtgctcggcccgccccgcaacccgccggaaccgccgcccgcagcgaggaagcgcccgcgcgggcgcaggcggccgggatggcggggcccggctggggtcccccgcgcctggacggcttcatcctcaccgagcgcctgggcagcggcacgtacgccacggtgtacaaggcctacgccaagaaggacactcgtgaagtggtagccataaagtgtgtagccaagaaaagtctgaacaaggcatcggtggagaacctcctcacggagattgagatcctcaagggcattcgacatccccacattgtgcagctgaaagactttcagtgggacagtgacaatatctacctcatcatggagttttgcgcagggggcgacctgtctcgcttcatccatacccgcaggattctgcctgagaaggtggcgcgtgtcttcatgcagcaattagctagcgccctgcaattcctgcatgaacggaatatctctcacctggatctgaagccacagaacattctactgagctccttggagaagccccacctaaaactggcagactttggtttcgcacaacacatgtccccgtgggatgagaagcacgtgctccgtggctcccccctctacatggcccccgagatggtgtgccagcggcagtatgacgcccgcgtggacctctggtccatgggggtcatcctgtatggtgagacctcttttccctgcttctcaccctgaggcctacagtttcctcaggcaaggcctctctgggccacttctgaagggttctgatgaaaactgactgctggcccagggcccctgctgaggggcgtcaggccaggcttgacccattccctcccagcctccgctctgcctcccttccacagaagccctcttcgggcagcccccctttgcctccaggtcgttctcggagctggaagagaagatccgtagcaaccgggtcatcgagctccccttgcggcccctgctctcccgagactgccgggacctactgcagcggctcctggagcgggaccccagccgtcgcatctccttccaggacttctttgcgcacccctgggtggacctggagcacatgcccagtggggagagtctggggcgagcaaccgccctggtggtgcaggctgtgaagaaagaccaggagggggattcagcagccgccttatcactctactgcaaggctctggacttctttgtacctgccctgcactatgaagtggatgcccagcggaaggaggcaattaaggcaaaggtggggcagtacgtgtcccgggctgaggagctcaaggccatcgtctcctcttccaatcaggccctgctgaggcaggggacctctgcccgagacctgctcagagagatggcccgggacaagccacgcctcctagctgccctggaagtggcttcagctgccatggccaaggaggaggccgccggcggggagcaggatgccctggacctgtaccagcacagcctgggggagctactgctgttgctggcagcggagcccccgggccggaggcgggagctgcttcacactgaggttcagaacctcatggcccgagctgaatacttgaaggagcaggtcaagatgagggaatctcgctgggaagctgacaccctggacaaagagggactgtcggaatctgttcgtagctcttgcacccttcagtgaccctagaagaatgattggacagatgtgagccatctggagcagaggggcactaacccaggctgacgccaagaatgaagtggcccactgcagccctggcgagcaggcttcttggatggacagtgctgagacccccatatcccagagtccccagcctccctcaggttactctgcaccccacagatggtttgatggctgtgctgtatactggaggggagggcaggactctgggagaacagcacttctttcatgagacctttgttactcggtggttactgggtcctgtgcctgtccgttttggggcatgcagccctctatcatttttggctccgagaagagggcaaggggcccccgcagggtacttctgtgcttgccctcgccctgccagcaggcagctgtgccctggcctgcccttcccgggaccccttattccaactcagctcctctttgcactggaatggggcactccaacacccctcagngaccaccctccccacagtatgcactcagccccacagaacccaccagtctttctgggaactcacacctgcccgccatcttggtactttaggttaatccctcaagcatgaaagctggatcttttggggtttaagaagcccaagccttgttcctgccctggcctagggagcactcaggagggttccttggtcctcatctctcccacctccgttccctctgggccccacactagccacagcgcgggccttgtgctggagtttgagcctgggacagggagagggaggcttggagacagtctgacccagtgccctctaggccacccacttctaggcctgccctgccgccgtggagccctgggcaagctctttcccctttctgggcctgggtctccccatctcttcaatggggctgataccttcacagcccacagcatgggcattatgaggacaaagtgaatttaacctggaaaagaatgtatttgagagtttcttttaaataatcagcgggtgttggtgatttgtagcccttctgcccttaaatgcttccttgggcaagagctgtctgtcctccctgcaggagctgagtgtaaagagtatcattcattgtttctctattaaattattttctct

SEQ ID NO: 12972 - DNA, 2896 bp, Homo sapiens
  misc_feature (2269)..(2269): n is a, c, g, or t
cggcgctgggggcagcgtggagccacccagtgctcggcccgccccgcaacccgccggaaccgccgcccgcagcgaggaagcgcccgcgcgggcgcaggcggccgggatggcggggcccggctggggtcccccgcgcctggacggcttcatcctcaccgagcgcctgggcagcggcacgtacgccacggtgtacaaggcctacgccaagaaggacactcgtgaagtggtagccataaagtgtgtagccaagaaaagtctgaacaaggcatcggtggagaacctcctcacggagattgagatcctcaagggcattcgacatccccacattgtgcagctgaaagactttcaggtgtgagcctggggcggggccgctgccaaagggagctggagaagggacactctcttcaggccgcctctctgcctctaaacacagtgggacagtgacaatatctacctcatcatggagttttgcgcagggggcgacctgtctcgcttcatccatacccgcaggattctgcctgagaaggtggcgcgtgtcttcatgcagcaattagctagcgccctgcaattcctgcatgaacggaatatctctcacctggatctgaagccacagaacattctactgagctccttggagaagccccacctaaaactggcagactttggtttcgcacaacacatgtccccgtgggatgagaagcacgtgctccgtggctcccccctctacatggcccccgagatggtgtgccagcggcagtatgacgcccgcgtggacctctggtccatgggggtcatcctgtatggtgagacctcttttccctgcttctcaccctgaggcctacagtttcctcaggcaaggcctctctgggccacttctgaagggttctgatgaaaactgactgctggcccagggcccctgctgaggggcgtcaggccaggcttgacccattccctcccagcctccgctctgcctcccttccacagaagccctcttcgggcagcccccctttgcctccaggtcgttctcggagctggaagagaagatccgtagcaaccgggtcatcgagctccccttgcggcccctgctctcccgagactgccgggacctactgcagcggctcctggagcgggaccccagccgtcgcatctccttccaggacttctttgcgcacccctgggtggacctggagcacatgcccagtggggagagtctggggcgagcaaccgccctggtggtgcaggctgtgaagaaagaccaggagggggattcagcagccgccttatcactctactgcaaggctctggacttctttgtacctgccctgcactatgaagtggatgcccagcggaaggaggcaattaaggcaaaggtggggcagtacgtgtcccgggctgaggagctcaaggccatcgtctcctcttccaatcaggccctgctgaggcaggggacctctgcccgagacctgctcagagagatggcccgggacaagccacgcctcctagctgccctggaagtggcttcagctgccatggccaaggaggaggccgccggcggggagcaggatgccctggacctgtaccagcacagcctgggggagctactgctgttgctggcagcggagcccccgggccggaggcgggagctgcttcacactgaggttcagaacctcatggcccgagctgaatacttgaaggagcaggtcaagatgagggaatctcgctgggaagctgacaccctggacaaagagggactgtcggaatctgttcgtagctcttgcacccttcagtgaccctagaagaatgattggacagatgtgagccatctggagcagaggggcactaacccaggctgacgccaagaatgaagtggcccactgcagccctggcgagcaggcttcttggatggacagtgctgagacccccatatcccagagtccccagcctccctcaggttactctgcaccccacagatggtttgatggctgtgctgtatactggaggggagggcaggactctgggagaacagcacttctttcatgagacctttgttactcggtggttactgggtcctgtgcctgtccgttttggggcatgcagccctctatcatttttggctccgagaagagggcaaggggcccccgcagggtacttctgtgcttgccctcgccctgccagcaggcagctgtgccctggcctgcccttcccgggaccccttattccaactcagctcctctttgcactggaatggggcactccaacacccctcagngaccaccctccccacagtatgcactcagccccacagaacccaccagtctttctgggaactcacacctgcccgccatcttggtactttaggttaatccctcaagcatgaaagctggatcttttggggtttaagaagcccaagccttgttcctgccctggcctagggagcactcaggagggttccttggtcctcatctctcccacctccgttccctctgggccccacactagccacagcgcgggccttgtgctggagtttgagcctgggacagggagagggaggcttggagacagtctgacccagtgccctctaggccacccacttctaggcctgccctgccgccgtggagccctgggcaagctctttcccctttctgggcctgggtctccccatctcttcaatggggctgataccttcacagcccacagcatgggcattatgaggacaaagtgaatttaacctggaaaagaatgtatttgagagtttcttttaaataatcagcgggtgttggtgatttgtagcccttctgcccttaaatgcttccttgggcaagagctgtctgtcctccctgcaggagctgagtgtaaagagtatcattcattgtttctctattaaattattttctct

SEQ ID NO: 12973 - DNA, 2593 bp, Homo sapiens
  misc_feature (1966)..(1966): n is a, c, g, or t
ggctggtactggcctcgagattttgggaccgcagcgaggaagcgcccgcgcgggcgcaggcggccgggatggcggggcccggctggggtcccccgcgcctggacggcttcatcctcaccgagcgcctgggcagcggcacgtacgccacggtgtacaaggcctacgccaagaaggacactcgtgaagtggtagccataaagtgtgtagccaagaaaagtctgaacaaggcatcggtggagaacctcctcacggagattgagatcctcaagggcattcgacatccccacattgtgcagctgaaagactttcagtgggacagtgacaatatctacctcatcatggagttttgcgcagggggcgacctgtctcgcttcatccatacccgcaggattctgcctgagaaggtggcgcgtgtcttcatgcagcaattagctagcgccctgcaattcctgcatgaacggaatatctctcacctggatctgaagccacagaacattctactgagctccttggagaagccccacctaaaactggcagactttggtttcgcacaacacatgtccccgtgggatgagaagcacgtgctccgtggctcccccctctacatggcccccgagatggtgtgccagcggcagtatgacgcccgcgtggacctctggtccatgggggtcatcctgtatgaagccctcttcgggcagcccccctttgcctccaggtcgttctcggagctggaagagaagatccgtagcaaccgggtcatcgagctccccttgcggcccctgctctcccgagactgccgggacctactgcagcggctcctggagcgggaccccagccgtcgcatctccttccaggacttctttgcgcacccctgggtggacctggagcacatgcccagtggggagagtctggggcgagcaaccgccctggtggtgcaggctgtgaagaaagaccaggagggggattcagcagccgccttatcactctactgcaaggctctggacttctttgtacctgccctgcactatgaagtggatgcccagcggaaggaggcaattaaggcaaaggtggggcagtacgtgtcccgggctgaggagctcaaggccatcgtctcctcttccaatcaggccctgctgaggcaggggacctctgcccgagacctgctcagagagatggcccgggacaagccacgcctcctagctgccctggaagtggcttcagctgccatggccaaggaggaggccgccggcggggagcaggatgccctggacctgtaccagcacagcctgggggagctactgctgttgctggcagcggagcccccgggccggaggcgggagctgcttcacactgaggttcagaacctcatggcccgagctgaatacttgaaggagcaggtcaagatgagggaatctcgctgggaagctgacaccctggacaaagagggactgtcggaatctgttcgtagctcttgcacccttcagtgaccctagaagaatgattggacagatgtgagccatctggagcagaggggcactaacccaggctgacgccaagaatgaagtggcccactgcagccctggcgagcaggcttcttggatggacagtgctgagacccccatatcccagagtccccagcctccctcaggttactctgcaccccacagatggtttgatggctgtgctgtatactggaggggagggcaggactctgggagaacagcacttctttcatgagacctttgttactcggtggttactgggtcctgtgcctgtccgttttggggcatgcagccctctatcatttttggctccgagaagagggcaaggggcccccgcagggtacttctgtgcttgccctcgccctgccagcaggcagctgtgccctggcctgcccttcccgggaccccttattccaactcagctcctctttgcactggaatggggcactccaacacccctcagngaccaccctccccacagtatgcactcagccccacagaacccaccagtctttctgggaactcacacctgcccgccatcttggtactttaggttaatccctcaagcatgaaagctggatcttttggggtttaagaagcccaagccttgttcctgccctggcctagggagcactcaggagggttccttggtcctcatctctcccacctccgttccctctgggccccacactagccacagcgcgggccttgtgctggagtttgagcctgggacagggagagggaggcttggagacagtctgacccagtgccctctaggccacccacttctaggcctgccctgccgccgtggagccctgggcaagctctttcccctttctgggcctgggtctccccatctcttcaatggggctgataccttcacagcccacagcatgggcattatgaggacaaagtgaatttaacctggaaaagaatgtatttgagagtttcttttaaataatcagcgggtgttggtgatttgtagcccttctgcccttaaatgcttccttgggcaagagctgtctgtcctccctgcaggagctgagtgtaaagagtatcattcattgtttctctattaaattattttctct

SEQ ID NO: 12974 - DNA, 2458 bp, Homo sapiens
  misc_feature (1831)..(1831): n is a, c, g, or t
ggctggtactggcctcgagattttgggaccgcagcgaggaagcgcccgcgcgggcgcaggcggccgggatggcggggcccggctggggtcccccgcgcctggacggcttcatcctcaccgagcgcctgggcagcggcacgtacgccacggtgtacaaggcctacgccaagaaggacactcgtgaagtggtagccataaagtgtgtagccaagaaaagtctgaacaaggcatcggtggagaacctcctcacggagattgagatcctcaagggcattcgacatccccacattgtgcagctgaaagactttcagtgggacagtgacaatatctacctcatcatggagttttgcgcagggggcgacctgtctcgcttcatccatacccgcaggattctgcctgagaaggtggcgcgtgtcttcatgcagcaattagctagcgccctgcaattcctgcatgaacggaatatctctcacctggatctgaagccacagaacattctactgagctccttggagaagccccacctaaaactggcagactttggtttcgcacaacacatgtccccgtgggatgagaagcacgtgctccgtggctcccccctctacatggcccccgagatggtgtgccagcggcagtatgacgcccgcgtggacctctggtccatgggggtcatcctgtatgaagccctcttcgggcagcccccctttgcctccaggtcgttctcggagctggaagagaagatccgtagcaaccgggtcatcgagctccccttgcggcccctgctctcccgagactgccgggacctactgcagcggctcctggagcgggaccccagccgtcgcatctccttccaggacttctttgcgcacccctgggtggacctggagcacatgcccagtggggagagtctggggcgagcaaccgccctggtggtgcaggctgtgaagaaagaccaggagggggattcagcagccgccttatcactctactgcaaggctctggacttctttgtacctgccctgcactatgaagtggatgcccagcggaaggaggcaattaaggcaaaggtggggcagtacgtgtcccgggctgaggagctcaaggccatcgtctcctcttccaatcaggccctgctgaggcaggggacctctgcccgagacctgctcagagagatggcccgggacaagccacgcctcctagctgccctggaagtggcttcagctgccatggccaaggaggaggccgccggcggggagcaggatgccctggacctgtaccagcacagcctgggggagctactgctgttgctggcagcggagcccccgggccggaggcgggagctgcttcacactgaggttcagaacctcatggcccgagctgaatacttgaaggagcaggtcaagatgagggaatctcgctgggaagctgacaccctggacaaagagggactgtcggaatctgttcgtagctcttgcacccttcagtgaccctagaagaatgattggacagatgtgagccatctggagcagaggggcactaacccaggctgacgccaagaatgaagtggcccactgcagccctggcgagcaggttctttcatgagacctttgttactcggtggttactgggtcctgtgcctgtccgttttggggcatgcagccctctatcatttttggctccgagaagagggcaaggggcccccgcagggtacttctgtgcttgccctcgccctgccagcaggcagctgtgccctggcctgcccttcccgggaccccttattccaactcagctcctctttgcactggaatggggcactccaacacccctcagngaccaccctccccacagtatgcactcagccccacagaacccaccagtctttctgggaactcacacctgcccgccatcttggtactttaggttaatccctcaagcatgaaagctggatcttttggggtttaagaagcccaagccttgttcctgccctggcctagggagcactcaggagggttccttggtcctcatctctcccacctccgttccctctgggccccacactagccacagcgcgggccttgtgctggagtttgagcctgggacagggagagggaggcttggagacagtctgacccagtgccctctaggccacccacttctaggcctgccctgccgccgtggagccctgggcaagctctttcccctttctgggcctgggtctccccatctcttcaatggggctgataccttcacagcccacagcatgggcattatgaggacaaagtgaatttaacctggaaaagaatgtatttgagagtttcttttaaataatcagcgggtgttggtgatttgtagcccttctgcccttaaatgcttccttgggcaagagctgtctgtcctccctgcaggagctgagtgtaaagagtatcattcattgtttctctattaaattattttctct

SEQ ID NO: 12975 - DNA, 916 bp, Homo sapiens
  misc_feature (867)..(867): n is a, c, g, or t
  misc_feature (869)..(869): n is a, c, g, or t
cggcgctgggggcagcgtggagccacccagtgctcggcccgccccgcaacccgccggaaccgccgcccgcagcgaggaagcgcccgcgcgggcgcaggcggccgggatggcggggcccggctggggtcccccgcgcctggacggcttcatcctcaccgagcgcctgggcagcggcacgtacgccacggtgtacaaggcctacgccaagaaggacactcgtgaagtggtagccataaagtgtgtagccaagaaaagtctgaacaaggcatcggtggagaacctcctcacggagattgagatcctcaagggcattcgacatccccacattgtgcagctgaaagactttcagtgggacagtgacaatatctacctcatcatggagttttgcgcagggggcgacctgtctcgcttcatccatacccgcaggattctgcctgagaaggtggcgcgtgtcttcatgcagcaattagctagcgccctgcaattcctgcatgaacggaatatctctcacctggatctgaagccacagaacattctactgagctccttggagaagccccacctaaaactggcagactttggtttcgcacaacacatgtccccgtgggatgagaagcacgtgctccgtggctcccccctctacatggcccccgagatggtgtgccagcggcagtatgacgcccgcgtggacctctggtccatgggggtcatcctgtatggtgagacctcttttccctgcttctcaccctgaggcctacagtttcctcaggcaaggcctctctgggccacttctgaagggttctgatgaaaactgactgctggcccagggcccctgctgaggggcgtcaggccaggcttgacccaatncntacagctcagagacgactacttccaagaggctcttaggaagcccctt

SEQ ID NO: 12976 - DNA, 1396 bp, Homo sapiens
  misc_feature (769)..(769): n is a, c, g, or t
ggcttcctggaggaaggagcagataagggactcaggaggcaagttgttctgatggggcagagggttctggagagcatcaggggtgaggaggagttccctttgaaaccccaccccccgccactctcccccacacccaagggcatatctttccttggcaggttcagaacctcatggcccgagctgaatacttgaaggagcaggtcaagatgagggaatctcgctgggaagctgacaccctggacaaagagggactgtcggaatctgttcgtagctcttgcacccttcagtgaccctagaagaatgattggacagatgtgagccatctggagcagaggggcactaacccaggctgacgccaagaatgaagtggcccactgcagccctggcgagcaggcttcttggatggacagtgctgagacccccatatcccagagtccccagcctccctcaggttactctgcaccccacagatggtttgatggctgtgctgtatactggaggggagggcaggactctgggagaacagcacttctttcatgagacctttgttactcggtggttactgggtcctgtgcctgtccgttttggggcatgcagccctctatcatttttggctccgagaagagggcaaggggcccccgcagggtacttctgtgcttgccctcgccctgccagcaggcagctgtgccctggcctgcccttcccgggaccccttattccaactcagctcctctttgcactggaatggggcactccaacacccctcagngaccaccctccccacagtatgcactcagccccacagaacccaccagtctttctgggaactcacacctgcccgccatcttggtactttaggttaatccctcaagcatgaaagctggatcttttggggtttaagaagcccaagccttgttcctgccctggcctagggagcactcaggagggttccttggtcctcatctctcccacctccgttccctctgggccccacactagccacagcgcgggccttgtgctggagtttgagcctgggacagggagagggaggcttggagacagtctgacccagtgccctctaggccacccacttctaggcctgccctgccgccgtggagccctgggcaagctctttcccctttctgggcctgggtctccccatctcttcaatggggctgataccttcacagcccacagcatgggcattatgaggacaaagtgaatttaacctggaaaagaatgtatttgagagtttcttttaaataatcagcgggtgttggtgatttgtagcccttctgcccttaaatgcttccttgggcaagagctgtctgtcctccctgcaggagctgagtgtaaagagtatcattcattgtttctctattaaattattttctct

SEQ ID NO: 12977 - DNA, 1450 bp, Homo sapiens
  misc_feature (823)..(823): n is a, c, g, or t
acatgggggccacgctggggctagggtctgtgggttctgttgctctctgcttgtggctgtcgtccccccctgctggtgtatgtctgctctctcgcctcctctgcaggcctccctgtccctgtatctgcccttcactctctctcttgctcggcactgcgctgtggctcgtgtccccgtccttcactctctcacttgctcggcactgcgctgtggctcgtgtgtctgcctctcatcccttgtgctgccttcacatcccacagatgagggaatctcgctgggaagctgacaccctggacaaagagggactgtcggaatctgttcgtagctcttgcacccttcagtgaccctagaagaatgattggacagatgtgagccatctggagcagaggggcactaacccaggctgacgccaagaatgaagtggcccactgcagccctggcgagcaggcttcttggatggacagtgctgagacccccatatcccagagtccccagcctccctcaggttactctgcaccccacagatggtttgatggctgtgctgtatactggaggggagggcaggactctgggagaacagcacttctttcatgagacctttgttactcggtggttactgggtcctgtgcctgtccgttttggggcatgcagccctctatcatttttggctccgagaagagggcaaggggcccccgcagggtacttctgtgcttgccctcgccctgccagcaggcagctgtgccctggcctgcccttcccgggaccccttattccaactcagctcctctttgcactggaatggggcactccaacacccctcagngaccaccctccccacagtatgcactcagccccacagaacccaccagtctttctgggaactcacacctgcccgccatcttggtactttaggttaatccctcaagcatgaaagctggatcttttggggtttaagaagcccaagccttgttcctgccctggcctagggagcactcaggagggttccttggtcctcatctctcccacctccgttccctctgggccccacactagccacagcgcgggccttgtgctggagtttgagcctgggacagggagagggaggcttggagacagtctgacccagtgccctctaggccacccacttctaggcctgccctgccgccgtggagccctgggcaagctctttcccctttctgggcctgggtctccccatctcttcaatggggctgataccttcacagcccacagcatgggcattatgaggacaaagtgaatttaacctggaaaagaatgtatttgagagtttcttttaaataatcagcgggtgttggtgatttgtagcccttctgcccttaaatgcttccttgggcaagagctgtctgtcctccctgcaggagctgagtgtaaagagtatcattcattgtttctctattaaattattttctct

SEQ ID NO: 12978 - DNA, 633 bp, Homo sapiens
gtctctcttcgtgggtcctgctcctcagctagcgccctgcaattcctgcatgaacggaatatctctcacctggatctgaagccacagaacattctactgagctccttggagaagccccacctaaaactggcagactttggtttcgcacaacacatgtccccgtgggatgagaacactcaggagggttccttggtcctcatctctcccacctccgttccctctgggccccacactagccacagcgcgggccttgtgctggagtttgagcctgggacagggagagggaggcttggagacagtctgacccagtgccctctaggccacccacttctaggcctgccctgccgccgtggagccctgggcaagctctttcccctttctgggcctgggtctccccatctcttcaatggggctgataccttcacagcccacagcatgggcattatgaggacaaagtgaatttaacctggaaaagaatgtatttgagagtttcttttaaataatcagcgggtgttggtgatttgtagcccttctgcccttaaatgcttccttgggcaagagctgtctgtcctccctgcaggagctgagtgtaaagagtatcattcattgtttctctattaaattattttctct

SEQ ID NO: 12979 - DNA, 641 bp, Homo sapiens
ttagtaaagctgacaaaaggatcttagaggtcatttagcccaagctcaactgcagattaaacacactgcataggaccacagaatcagctggttctgaacagtatccagaccttatgagtcttagacctatgttcttttccattgcacacttactagtatgatgctaggttcctatcttctactcttttccttttgttttcatctctccatactattatatggaaatttgaaaattagaatatttatgtcagttgagggggattacccctgtaatcctaccagtttggtaggccaagttgggaggactgcttgagcccagtagttccaagaccaggctgggcaaaagagtaagaccctatctcccaaaacaaaatgttagcgaggtgaggtggtgcgtgcctgtagtcccagctacttgggaggctgaggcaggaggactgtttgagccccagccaggagttgggggctacagtgagctatgatcacgccactgcactccagccagggcaacagagcgacaccttatctcaaaaaaataaaggaaattagaatatttagagcagttactatctgtctttctgtagttaaatcctagcaaggaatgggaaaaacaataaatcccagagaaaaatcaagaaaaa

SEQ ID NO: 12980 - DNA, 2081 bp, Homo sapiens
  misc_feature (481)..(481): n is a, c, g, or t
tttaggctaggtacgaggctggtttgaattggccgaggcctgcctgagtcgcgagccccagacatgagcccccagcgcatctccaaccagctgcacgggaccattgccgtggtgcggcctgggtcccaggcttgccctgccgaccgaggccccgccaatgggacgcccccaccactgcccgccaggagcagcccacccagcccagcgtatgagcgtggcctctccctggacagcttcctgcgggcctcccggccctccgccatgacccatgaggccccgaagctctccccgaaggtggaccggctctgcctcctaaaccgccccctgtccctgcaccttcagagcccccacagcagccccctggcccctgctgcagcccccagcgacccccggctccaggacctgaaggccagagaagcagaggcctgggaggagcccacagaactgctggggctgcccagtgccctggcgggcatgcagnaccttcgcctggagggggcactgcacctgctcctggcccagcagcagctgcgggctagggccagggcaggcagtgtcaggccaaggggccagcccacacccggggagatgctgccctccctaccagtcggctcagactctgagggccctgagaatgaggggaccagggcagctctggccgcagcaggcctgtctggagggcggcacacacagcctgcaggcccgggccgcgcccagaggacagaggctgcagccacgcaggactgtgccctagacaagcccctggacctctcggagtggggccgggcccggggccaggacactcccaagccggccggccagcatgggtcactcagccctgccgctgcccacactgccagccccgagccacccacccagtccggacccctgactcgcagtccccaggcactcagcaatggcaccaaggggaccagagtgccagagcaggaggaggcttccactcccatggacccctcacgcccacttccagggtcccagctcagcctgtcctctccaggcagtacagaagatgaagacacagggaggcctctgccacctccccacccacagccgcctccccacccacagccgcctgacctggacggccacccagagcccagcaaggctgaagtgctgagaccagagtccgacgaactggatgagacagacaccccaggcagcgaggtgggcctgagctcccaggcggaggccactacgagcacgaccggggaggggcctgagtgcatctgcacccaggagcacgggcagggtccaccacggaagaggaagcgggcctcggagcctggggacaaagcctccaaaaagccatccagagggagaaggaaactgacagccactgaggggcccgggagcccaagggacgccgaggaccacagtccctcccccaacagcagcccctgggaggagacctagccagcctgcaccagggtccacagcgagcccggggcagccctccacctgcccaccagggcctggagagggcacaccatccaaccagcaggcagccctgcacagaaccctgggagaagacctagccagcctcagctgaacccacagtgagcccagggcagctctctgcctgctcaccacagcctggagagggcacaccacccaaccagcaggcaaccccgaagagccggtgacgggcacatcctggcccacttcaagaggggctggaggaccgagaggggtctcaggctggcgattcaccccgtctccacccacctgggaaatgctctgcggcccctcccacagcccagcacctgctccctgaggggtgtggggactggaggcgggatcactcaggctccagcccagccctacccctgctgtgcactgcagccgttcccaggcagtgcccacgctctgggaggcaacggaccactcggacccccacccctgcccgccaagctccaagcacaatcttggacgccccctcgtgggctgacagcaaacagatgtctggcagtgagggtggagggagacagtgggcggcagcaccctcgaagaccgggtcccctgagtgacggagaataaacacttgaagaacaaaaaatgtg

SEQ ID NO: 12981 - DNA, 826 bp, Homo sapiens
agtaatcccgccacctatctagtgggagagccatccaaatgagaaacctaaaataattggttcttggtagagattcattatttctccactttgttctttaggagattttaggtgttgattttctgttttattttaactcatacctttaaaggaattccccaaagaatgtttatagcaaacttggaatttgtaacctcagctctgggagaggatttttttctgagcgattattatctaaagtgtgttgttgctttaggctcacggcacgcttgcgtatgtctgttaccatgtcactgtggtcctatgccgaatgccctcaggggacttgaatctttccaataaaccaggtttagacagtatgagtcaatgtgcagtgcagcccacacttgagaggatgaatgtatgtgcactgtcactttgctctgggtggaagtatgttattgttgacttattttctctgtgtttgttcctacagcccctttttcatatgttgctcagtctccctttcccttcttggtgcttacacatctcagaccctttagccaaacccttgccagtgacagtattttggttctcagttctcactgttccctctgctcctggagcctttgaataaaaatgcacgtagctatggagtggggtttagctggaaaggtggccttccaacttcacgtcaacttctggctcctcagtttggcagtaaggcagggaagttgttttcctatttctcactgagaagattgtgaatatttccatatggattttccattattgtttgtttgattctttgttttaaaataaaaattctgaatgtacatgaaaacaa

SEQ ID NO: 12982 - DNA, 212 bp, Homo sapiens
tcttgtgtttctgccaccaccatgagaacaccacactctaggatagctattgacccattagcctgagtctcagaaagaagtatctggaacagacccaaaccatttctgcagcttacagccagcccagccaaagtccaattgacccataagcctgtgagtaagaaaaacaaatgtctgctgttataaaccatagagattttttaggttgtttg

SEQ ID NO: 12983 - DNA, 369 bp, Homo sapiens
gccccagccagtgagacttgaaccccacctgtgactccagagccttcagatttaaccccctccccatgaactgccttccctcgccaggtggagaaagcctgtcaccaggccatttttggggaagtggtggggcttgcagatgagagggctccctgggctggagaggaccagctggcccctctaagctggcttcctcagctgcttcatggggcgaagggatgccaaggtcagcacagctacctccctctcccgcctgccctggggacctggcagtccccagtccctctctcctgctggaactgtgacctcccacaggcttcagatggcacgaaacccgggcatggtcagcacacgagctggccagccaca

SEQ ID NO: 12984 - DNA, 455 bp, Homo sapiens
ctcagttacctccttttaaggtgtccctagggtgagagagatgatcacgatagtcccttccacctgggcggcccaggctttcctcgcccatttagtgcctttcatgtagaatttccacctgttgtctgctgtgctgccactgcttgtcctccctccctgccacacagagctgtgttctctgcctgccactcacgcctacttctctgatcagggtttgtggaaccctccagcgtggtcaccattctggtacctgtggtaacacgctcagccttggtgtggcacattctaggtctaccgtttgtattcaccagcctgtgagcttgtgtacatgggacatgtatcttcgttttgggggctttctccttccacttgatgcccatcccttgagcgtttactacttgtggagcgcttggctttcaggccgtagagagctttccaatcagtggtgtccaggt

SEQ ID NO: 12985 - DNA, 554 bp, Homo sapiens
taggaaggcctgaaaagaatgctgaaaacaagtgacctggctggaatctaccaccacgctacttctctgctccaggaccttccatggctcccactggctcacaggcaaaagaagagatgaagcacacattgcaaacacgctttgatccctgcagtgagatgagcgtcatgatcatgcatgcttctcttctcccttctccgggccttttgaagtctacactctccgctgtgggatggtctcctgccctaccaggagagctggtctccacaccgacttcaaagacagctgatgttccagagaagaaaaacactgcaaagaagcactccaaaatccttttgacctcaaacatgactacagaatggatacagctttttaaatagccacttcctgcagcattctatagtataatgacccttaaatgacacccacgcaaattacataatttgctaaaatggaaacccagtaattccatcttacatcaaagtaaagaaaaaaaataccaaactttaaaaatctgaagctcaattaaatagtaattaaaaacgaaatataac

SEQ ID NO: 12986 - DNA, 1268 bp, Homo sapiens
cccatggcagtcttattcctcctcctgttcctatgtggaactccccaggctgcagacaacatgcaggccatctatgtggccttgggggaggcagtagagctgccatgtccctcaccacctactctacatggggacgaacacctgtcatggttctgcagccctgcagcaggctccttcaccaccctggtagcccaagtccaagtgggcaggccagccccagaccctggaaaaccaggaagggaatccaggctcagactgctggggaactattctttgtggttggagggatccaaagaggaagatgccgggcggtactggtgcgctgtgctaggtcagcaccacaactaccagaactggagggtgtacgacgtcttggtgctcaaaggatcccagttatctgcaagggctgcagatggatccccctgcaatgtcctcctgtgctctgtggtccccagcagacgcatggactctgtgacctggcaggaagggaagggtcccgtgaggggccgtgttcagtccttctggggcagtgaggctgccctgctcttggtgtgtcctggggaggggctttctgagcccaggagccgaagaccaagaatcatccgctgcctcatgactcacaacaaaggggtcagctttagcctggcagcctccatcgatgcttctcctgccctctgtgccccttccacgggctgggacatgccttggattctgatgctgctgctcacaatgggccagggagttgtcatcctggccctcagcatcgtgctctggaggcagagggtccgtggggctccaggcagaggaaaccgaatgcggtgctacaactgtggtggaagccccagcagttcttgcaaagaggccgtgaccacctgtggcgagggcagaccccagccaggcctggaacagatcaagctacctggaaaccccccagtgaccttgattcaccaacatccagcctgcgtcgcagcccatcattgcaatcaagtggagacagagtcggtgggagacgtgacttatccagcccacagggactgctacctgggagacctgtgcaacagcgccgtggcaagccatgtggcccctgcaggcattttggctgcagcagctaccgccctgacctgtctcttgccaggactgtggagcggatagggggagtaggagtagagaagggaacaagggagcaagggaacaagggacatctgaacatctaatgtgagaagacaaacatccttctgtgagtcattaaaatctatgaaccactctaa

SEQ ID NO: 12987 - DNA, 486 bp, Homo sapiens
ccgtgttcagtccttctggggcagtgaggctgccctgctcttggtgtgtcctggggaggggctttctgagcccaggagccgaagaccaagaatcatccgctgcctcatgactcacaacaaaggggtcagctttagcctggcaggtaaactgaggaaggagacggaaagggatgttctttcacttcagcctcccaagtagctggaattacaggcgcccgccaccatgcctggataattttttgtacttttagtagagacgagatttcaccattttggccaggctggtatcaacctcctgacttctagtgatctgcctgcctcagtctcccaaagtgctgggattataggcatgagccaccgcacctttaaattttttgtagagacaggatcttgctatgttgcccagtctggtctcaaactactggcctcaaatgatcctcctatcttggtctcccaaagtgctggggttacaggcatgagccatca

SEQ ID NO: 12988 - DNA, 509 bp, Homo sapiens
gcatggaaagtctttatttgagccccttagctgatgtggaatcagaagagcaaaaaggtcatcttcagagtggcctgggctgggtccttttctctccaggatagaaaagtggtggtcactttatccctagtagacatgctgctgggctttatcgccccagcattcccatcccctccagagccccttgtcactccagaccagcgagtgtgggcctttatctggactctgcttcctccctggggacaccaggtcttggagcaagagaacttggcaggctctccccatggcagtcttattcctcctcctgttcctatgtggaactccccaggctgcaggtaaggggcaagaggtacgggattccttagctatttgcaaggttggggagggactactgctctttctcctaggagcctggcgaaggcatctgactcaagaagatagaattaccccaaccaacctcctcctgcctctgacactagggaagacccagaggcaacgagggtccaggt

SEQ ID NO: 12989 - DNA, 606 bp, Homo sapiens
ttttttttggacacttggttttctcttatcctaggagactatgtgtgattgctctggctttaggaagcagaagctctgtgtcttgagcacagccgtctggggcagttgaaaccagttgggagattcccctggttccagacgttgttcatttggggtcctgtgtttccgactccacgggagtcactaatagtgtgacatctcttcatcacggcacccagaggatacagacctccccttaggaagggcatgtcactgttgacaggggagcaccacagttctggcctgctctaggaggtgaggctggctgcccactcagtgtcctgcctggtgacggaggcgtctggccctgtcctggtcactcctggtcactgctggtcagcttctcctcttgccttcatcgtgcagcaaagacagcggttgatcagaagcacagattctgaacaaagtcttcccttccaaagaatgaataaaggaggcttagttacaagctctaaattagagacaaatttgaaattagcttcattctcaataaaaaacaaagctgaagggtggaatgagcttggagttaaagccacttactgttgctaaaggctttaattcgagtgt

SEQ ID NO: 12990 - DNA, 772 bp, Homo sapiens
cactattacagttcccatccccacataaattcagtggaactaccctgtccttggtgcaaactgtggctggagaaaatcacacatccaccctgtctacaatagaaatgagaaatagatggagaaataaagagtccttgtgtgtggctttgcatctgcagttttggttcttgaggttctacctagttcctgcctctcctgctttgactctatgagctcccgctgtgcactttctgtgagccaatatatttccacttgcttagctaaattgaattgggtttctattaaaacaatcttgactaatatgccccttccatccaagactggttttgtatcccttctttgtgccttcagtaacacccagtgtttaccactgtatctttgaaaagagtgatgtctaatttatctatgattactttagcagtgttcacactgaattattgttatccatttatctgtgtctatcactaaactgtaatcatcctgagagttgggacttcattcttggatataatagtttctcagtctatgtgagatgaatgaatgaatgatcaaatggacaaatgaaatgtgatctaagatcatgggctttggtatcaaaaagatctagatttgaattctcgctctatcacttattctctgggtggcataatttgcttaacctctctcaaccttggtgtctttgttacctgtaattgataaaatgtggataataatgcctacccttcaagaatatcattagaattaagtgagagatgtacaaataaatgcccac

SEQ ID NO: 12991 - DNA, 626 bp, Homo sapiens
gactactcaagtgccatccttgggagaactgagaaagcagccactcgaatcattttctgtgttctgggatttagaggaggaacactggttgagaaagggaatatttttaaggctcttgacacatattgcagatggcttttaaaaataattccttgagtaagtacttcagtaccaagcatttgattctttgtaattcttggtagtatggttattattgtgaaaaatataggttatttctatcatctgaagtgtttcttcttggagggtgggatgtggctagaatacagtatgattgtgaagtaataagactaattttgacatgtggtttgtggaattggtttcattacttatagtcacatttgaggctttacaatatttctcacagtatctactacactgccttgaatgtagttcaatgcatgttctctgaaggaatttgtacatccaacctgtagagtaaaaaggaataagagaacacttcgtaggaccctaaaatgaatttttatattcaatttgtacagaagaatggtgaaagaatggagaaaaaatgaaactgagagaccctaactgtcccatttccatctctcacacttataataaaattcctctttgagtcaattcaggct

SEQ ID NO: 12992 - DNA, 339 bp, Homo sapiens
caggcatactttgattctaactttgcttgctagatggcgctcggtgtctcaggactttctgtttcagaattaaagcggctttttagcaccgttgttctgaactatttgtgggcatttgatcagtacagtgctggtaatgttattattgcccttgttttcgtcacactttttctctttttgattaaggtatcgtccaggtgggagctgcccatcttaatccatataataatgaaattcagggaaactctgcacctaaatttagggcacatgtgtggttcaattacctgttctggtgcacttaaaaaggcaccttagtaactttcctccaagaatgtgatt

SEQ ID NO: 12993 - DNA, 422 bp, Homo sapiens
ctggtggaatcaattaggaaagttaagcaggggagctcatcagcggctgattggccctctccctagaacaacccccagctcgcaaatactctcccagaatcattcaggggagcagtggggtctgtagaactgggccctgctgcagtattaagctgggaaggtagtaaattcttcttatgggcttccttgaatctgagctaaagccacaatttccttaatagttttccaatagcactccatctcttattaaaaagtacagttaatctggaccttccctcccactcccctgtaatgtcagaaaagaaatgtgtttctgaaaataaatgcttcttttgctgcgtggctatatttcttcaggactgtggttagcaaattgctgctgcacaacataaaaccaagcaaaacaaacataagacatatgc

SEQ ID NO: 12994 - DNA, 225 bp, Homo sapiens
agctagctaagacagaaaaggtaaataagttctagagtctcataatgcctaaaatgtcctggttcatttagaaatcatttggtatacaaagaaccaggaaaaatctcaacttgaatgtaaaaggtaattagaagattccagaacaaaaatgacaaagatgttggaattattcagaaaatattttaaagcagtcatcataaaaatgcttccagtatattgcttaca

SEQ ID NO: 12995 - DNA, 457 bp, Homo sapiens
ggatatgcagtttacacctgataagaatagtaagagaaacttgtcatattttgttatagttgaatattttcttttaatagattctacccttctgaaaggtggagtgtgtatcctattatttgttctcaaatttacctgtgatgtttcccaccttgaagccatgcctcctttcttctttttttttaaattttttattttacttattattattattattattattattattatttattattattttgagacagagtctcattctgttgccgaggctggagtgcagtggtgtgatttcagctcactacaacctctgcctcctgggctcaagtgatcttcctgcctcatcctcctgaagaactgggactgcaggcctgtgacaccaagcccagctaattttttgtattttttgtagagacggggtttcgctatgttgcccaggctggtcttgaacacctgg

SEQ ID NO: 12996 - DNA, 1481 bp, Homo sapiens
ggttttgctgagggctgagggacggctcagcgacgccacggccagcagcgctcgcgtcctccccagcaacagttactcaaagctaatcagatagcgaaagaagcaggagagcaagtcaagaaatacggtgaaggagtccttcccaaagttgtctaggtccttccgcgccggtgcctggtcttcgtcgtcaacaccatggacagctcccgggaaccgactctggggcgcttggacgccgctggcttctggcaggtctggcagcgctttgatgcggatgaaaaaggttacatagaagagaaggaactcgatgctttctttctccacatgttgatgaaactgggtactgatgacacggtcatgaaagcaaatttgcacaaggtgaaacagcagtttatgactacccaagatgcctctaaagatggtcgcattcggatgaaagagcttgctggtatgttcttatctgaggatgaaaactttcttctgctctttcgccgggaaaacccactggacagcagcgtggagtttatgcagatttggcgcaaatatgacgctgacagcagtggctttatatcagctgctgagctccgcaacttcctccgagacctctttcttcaccacaaaaaggccatttctgaggctaaactggaagaatacactggcaccatgatgaagatttttgacagaaataaagatggtcggttggatctaaatgacttagcaaggattctggctcttcaggaaaacttccttctccaatttaaaatggatgcttgttctactgaagaaaggaaaagggactttgagaaaatctttgcctactatgatgttagtaaaacaggagccctggaaggcccagaagtggatgggtttgtcaaagacatgatggagcttgtccagcccagcatcagcggggtggaccttgataagttccgcgagattctcctgcgtcactgcgacgtgaacaaggatggaaaaattcagaagtctgagctggctttgtgtcttgggctgaaaatcaacccataatcccagactgctttgccttttgctcttactatgtttctgtgatcttgctggtagaattgtatctgtgcattgatgttgggaacacagtgggcaaactcacaaatggtgtgctattcttgggcaagaagagggacgctagggccttccttccaccggcgtgatctatccctgtctcactgaaagcccctgtgtagtgtctgtgttgttttcccttgaccctgggctttcctatcctcccaaagactcagctcccctgttagatggctctgcctgtccttccccagtcaccagggtgggggggacaggggcagctgagtgcattcattttgtgcttttcttgtgggctttctgcttagtctgaaaggtgtgtggcattcatggcaatcctgtaacttcaacatagattttttttgtgtgtgtggaaataaatctgcaattggaaacaaaaaaaaaat

SEQ ID NO: 12997 - DNA, 900 bp, Homo sapiens
ggttttgctgagggctgagggacggctcagcgacgccacggccagcagcgctcgcgtcctccccagcaacagttactcaaagctaatcagatagcgaaagaagcaggagagcaagtcaagaaatacggtgaaggagtccttcccaaagttgtctaggtccttccgcgccggtgcctggtcttcgtcgtcaacaccatggacagctcccgggaaccgactctggggcgcttggacgccgctggcttctggcaggtctggcagcgctttgatgcggatgaaaaaggttacatagaagagaaggaactcgatgctttctttctccacatgttgatgaaactgggtactgatgacacggtcatgaaagcaaatttgcacaaggtgaaacagcagtttatgactacccaagatgcctctaaagatggtcgcattcggatgaaagagcttgctggtatgttcttatctgaggatgaaaactttcttctgctctttcgccgggaaaacccactggacagcagcgtggagtttatgcagatttggcgcaaatatgacgctgacagcagtggctttatatcagctgctgagctccgcaacttcctccgagacctctttcttcaccacaaaaaggccatttctgaggctaaactggaagaatacactggcaccatgatgaagatttttgacagaaataaagatggtcggttggatctaaatgacttagcaagatgtcatatctaggaagccattgccaaaatccaagctcatgaagatttacccgtttgtttccttctaagagttatataaactataaagtttctgttttatgtaaatccttttcatgttaattgtttaatacagtgtaaggtgggggcacaatttcattattttgcatgtagatatcta

SEQ ID NO: 12998 - DNA, 803 bp, Homo sapiens
ggttttgctgagggctgagggacggctcagcgacgccacggccagcagcgctcgcgtcctccccagcaacagttactcaaagctaatcagatagcgaaagaagcaggagagcaagtcaagaaatacggtgaaggagtccttcccaaagttgtctaggtccttccgcgccggtgcctggtcttcgtcgtcaacaccatggacagctcccgggaaccgactctggggcgcttggacgccgctggcttctggcaggtctggcagcgctttgatgcggatggtgagtagaacaagccacttgcacactcaggtgtagacgtggctccaagctcagcccgctgaaaggacctggagtttcccctttactgtaggaaaagttatcgacctgggttgttaatgcagtgtacctaatacagtatcattaacagacgtttggcatactggtgatacacatctatataccttgttaaaattctgggtggtgaatttccactttcccctttccaatctctctttgtgtgcgagcgcgccatatatatggtagacatacatatatattgtatatacaatgactaatatcattgtatatgttcaaggcttgtgggctgagactcagctatttgaagtcatccttccctaaatgggctcacttttacgcagtgactttgctgtacacccctcactctctcaaaatgagaataaattttatcagctttcaaaacgactcctccaccaaaaaactacttgaaaataaaatggaactacttaatatttgtttttattaataaagaaataaaatatctaaa

SEQ ID NO: 12999 - DNA, 1354 bp, Homo sapiens
ggttttgctgagggctgagggacggctcagcgacgccacggccagcagcgctcgcgtcctccccagcaacagttactcaaagctaatcagatagcgaaagaagcaggagagcaagtcaagaaatacggtgaaggagtccttcccaaagttgtctaggtccttccgcgccggtgcctggtcttcgtcgtcaacaccatggacagctcccgggaaccgactctggggcgcttggacgccgctggcttctggcaggtctggcagcgctttgatgcggatggacacggtcatgaaagcaaatttgcacaaggtgaaacagcagtttatgactacccaagatgcctctaaagatggtcgcattcggatgaaagagcttgctggtatgttcttatctgaggatgaaaactttcttctgctctttcgccgggaaaacccactggacagcagcgtggagtttatgcagatttggcgcaaatatgacgctgacagcagtggctttatatcagctgctgagctccgcaacttcctccgagacctctttcttcaccacaaaaaggccatttctgaggctaaactggaagaatacactggcaccatggattctggctcttcaggaaaacttccttctccaatttaaaatggatgcttgttctactgaagaaaggaaaagggactttgagaaaatctttgcctactatgatgttagtaaaacaggagccctggaaggcccagaagtggatgggtttgtcaaagacatgatggagcttgtccagcccagcatcagcggggtggaccttgataagttccgcgagattctcctgcgtcactgcgacgtgaacaaggatggaaaaattcagaagtctgagctggctttgtgtcttgggctgaaaatcaacccataatcccagactgctttgccttttgctcttactatgtttctgtgatcttgctggtagaattgtatctgtgcattgatgttgggaacacagtgggcaaactcacaaatggtgtgctattcttgggcaagaagagggacgctagggccttccttccaccggcgtgatctatccctgtctcactgaaagcccctgtgtagtgtctgtgttgttttcccttgaccctgggctttcctatcctcccaaagactcagctcccctgttagatggctctgcctgtccttccccagtcaccagggtgggggggacaggggcagctgagtgcattcattttgtgcttttcttgtgggctttctgcttagtctgaaaggtgtgtggcattcatggcaatcctgtaacttcaacatagattttttttgtgtgtgtggaaataaatctgcaattggaaacaaaaaaaaaat

SEQ ID NO: 13000 - DNA, 384 bp, Homo sapiens
aaactgcctgccacccagtcttaggctcagtaaaaatgctcattagaagaattttcttaggataattccttagaatctggaagctactgcaaatattttaggtttggcatagaactgaaatcaacagaacatttaaaaattgattggagccttctggatttacctctgacatgtaacaagcttagaagtcattatgcccttcctaataataagaaaaacctgaacaaactaaaaacaatatctttattggacctgtcaggggactatggtcacaggggaaaatcaccaccctgaaatctgggaaagacaggtggaataggagtcacagctggagattggcttgctctggacccatgtttttttattgtctattctgattatttg

SEQ ID NO: 13001 - DNA, 420 bp, Homo sapiens
gcagatcctttttagctagatgcaaaaaactacttcactttgcacttcctgctccaaccctctgaacctgtctcctttctgaaggcccagttaccattctccatgacacagaccaacctgatcctattccacaataggaaatttcacatgtccttagaacttcaagttaataaatagtaacacagtatgctacatgactttgtataaagaaggagtactggccaagcgccgtggtccacacctgtaatcccagcgctttgggaggccaaggcaagtggatcactttaggtcaggagtttgagtgatagttaaatattatctgaatattaattctattgtatatcttttatttcattttgaaaatataaaggaatctaaaacttacttaaactgtaatttaaattattcattgttccctca

SEQ ID NO: 13002 - DNA, 420 bp, Homo sapiens
gaacatgtataatcagaaagaacatattcctaactaggaacattttcctttagatatactttgccaaaacattacttacttagacaatctgttacattgtgtgtaatcctcaactctgcagatggttgcacttccttaatattgcctgtctataattctaagaagtactacagtacacttcagggactgtatgtgctataaaaattgaaggtactttataaacaacttactttggagttctcccaaaggaagttattaaagtaattatggtattagaagtagcaggctattcctaaggtgaaatattaatgggattttctgtctacatattgtatgtttcctgtcattagcttctttcactatacaagacagataggtcccataagataagaactgaaaacatacgctggcaattaaaaa

SEQ ID NO: 13003 - DNA, 571 bp, Homo sapiens
tgtctgtcttctccctgttagaatgtaagctctatgacggaccttttctaacttgtttgccattgtgtccccaacttggagcctagctcatgcctgctacataatgggtgctcaataaatatttgttaaatgaatgaatcatacagcagctcaacttggattataatttagatactctaatttatattccagtacttatcatgctacctcaaacaaaaatggaggtaagaaaaaaaatactgatagccaagtcctcccctcactccaccaaaaaagaggggttgttgtatgtgtgtgtatacatttactcagttcaattccagcttaacaccattgggtattaactgtgtatatgatactgtactacaagttgggacttcagcataaattaaatgatacctgcctctaagatgaataaaaggacatgggcaaatacacaactagccacaagtcagctgttgtgttataagcaactgtgcttgaagtaaattagctaacgccaagacagatagcagcatagtcttagggatcccacttattaatggcatttattaagaccaaactcttccaa

SEQ ID NO: 13004 - DNA, 203 bp, Homo sapiens
agatgtatggaagtccttgtgtgaagagccctatgtggctttcaacaataaagtctcattgagttggaggcagtttggaaaaaggcttggagccccacattagatggataccagaagaccaacatcccattataaaaagaaagtccttacatcaaaatatttaaaccaaagggaaaggcccaagaagtatggaaaagaaacaa

SEQ ID NO: 13005 - DNA, 364 bp, Homo sapiens
aactaaggccagaaaagccaagtgcttggcccaaggaggcagggatgggactggcattagaaatcaggtatttgcagctgggtgtggtggctcacacctgtaatcccagcactttgggaggccaaggcgggtggatcatctgaggtcaggaattcgagaccagcctgaccaacatggtgaaaccctgtttctactaaaaatacaaaaaaaatagctgggcatggtggcacatgcctgtagtcccagctactcgggaggcagaggcaggagaattgcttgaacccggaaggcagaggttgcagtgagctgaggtcgcaccactgcactccagcctgggagacagagcgagactctgtctcaaaca

SEQ ID NO: 13006 - DNA, 581 bp, Homo sapiens
ttttttgcatctatgaagttttttcaaattctttttaagtgacaaaacttgtacatgtgtatcgcacaatatttctagtcgacagcactgctttacagaatgtaaaccgtgcactcccaggaaaatgcagacacagcacgcctctttgggaccgcggtttatactttcgaagtgctcggagcccttcctccagaccgttctcccacaccccgctccagggtctctcccggagttacaggcctcgctgtaggccccgggaacccaacgcggtgtcagagaagtggggtcccctacgagggaccaggagctccgggcgggcagcagctgcggaagagccgcgcgaggcttcccagaacccggccggggcgggaagacgcaggagtggggaggcggaaccgggaccccgcagagcccgggtccctgcgccccacaagccttggcttccctgctagggccgggcaaggccgggtgcagggcgcggctccagggaggaagctccggggcgagcccaagacgcctcccgggcggtcggggcccagcggcggcgttcgcagtggagccgggcaccgggcagcggccgc

SEQ ID NO: 13007 - DNA, 613 bp, Homo sapiens
cttcctcccggctgcatctccaggccggactctggcccgactccaggtcccaacaacgtctttggactcagctcctgcccagctcccagcggccctggtaggcccacaacttccctaagccaagctccccaggcccagctcaggcctcgcggtggcctctccaggctcagctcctggccctccgatgacatctgcaggccccaaatggcctccggtcggtgggctcctctaggcccagcttgggcctcccggcggcctccgcaggcccaaatcgtcccgaagtcagtctctccaggcggcctttgcaggcccggcctcctgcctctcgaaggcctgcacgggcccggcctcggcctcggcctcacagcggactctccacgcccagctagctctcgcctcactgcggcctccccagtccaaagctcctgcctttcggccacttcggcaggtccagctcctgcctgccagtggcctctttaggcccagctcattcctcacgtcggccattccaggccccgtttttcccttccggcagcctcttggcctctaatttgtttatcttttgtgtataaatcccaaaatattgaattttggaatatttccaccattatgt

SEQ ID NO: 13008 - DNA, 507 bp, Homo sapiens
ggagctctctggggtctctttcataagggcactaatccctcccagtggccccaactcctaatactatcaccttggaagtttggatttcaacatataattttttgggggagggacataaacattcagtttcattgtatatagtattgaataaaatatgccagccataaaaaatacatgctgtatagttccatttatatacagttcacaaaacaggcaatatcctaaactgtactgcttaggatataaaatataaagaaaaacaaggaaagggttaccataaatttcaggattattattagctctagtggtaaggaagggggatgactgaaggggacatcaatggcatttctggactgctaacagtattctacttcttgacatgagtggtgattacccagtttttcattttgtaataaataatttagctctacatcttgtgaatgtgtgtgactctatatgtgtgctatctttcatgatcaaatgttaaaatggcagaaccacaggaga

SEQ ID NO: 13009 - DNA, 314 bp, Homo sapiens
agggaatttggccctcgagcaagtaatttaggagagggaggtgcgcaccttctcctccctggagtggccttccaggtgccctctcagagctgctcatcagggctgtgcctttgtcagcaccaagcctcagcccttgtccctgctgccactgaaggctcaaaacaacactgcacagccttgtgtgtcctctgtgtgtcggcagtttcccccggctctgcagcagcccaggccaggtagcctctggagggagtggtggaggagcacgggcatcctggccgccgctgtgttggggacagaccctggggcctggaaag

SEQ ID NO: 13010 - DNA, 395 bp, Homo sapiens
aattggcatacatttaaaacatcccttaattcatattataagcggatgaatacttggagtccagttgcaggttcacctacaatctataaccttccatgtggctgggttaaccttctccctctgtctgcacctttcactcatttatccgtagaagcaattatcaggctgcagaaaatataaggcacacagagccttcgaaatacaacgtggtagggggattaatttggcaaatgacttttaaaaagtctgatgttgtaaaacagtgtgaggaggtaagtaggcagaggaacaagggcactctgtcgcttctgctcctgagcagaattttatccacacctctatgatagcagcctcacctcctactcacctcctaatgaaacaagtcgcgacacctt

SEQ ID NO: 13011 - DNA, 1596 bp, Homo sapiens
cctcacacgtataggtggtgaacttatgtgtaaatacatgtgtacagatgagaaactgcaacaaaaatgtcctgtggatgataatccagctcagtttccggttttctacattctgtgctgtttccagctaagaaaaaggcgaactcccactatataaagggaaaaggttgtattcatttcatgttcctcatgaaatctctgctgtatgtttatggaatggccatgactaaatgtatatatggtatgtaagaggccatgctgttaaatgttgcataaactaacacagattctgtagtcaaaaatatttaacttgttattgtaaaatgtgatttgtcattgagagattatttttctgtatgtatatgagagtattttaggaatctaatttaagtgcataaaactatagaaaaaaatttaaaacctattccaagagtagaaaatgcttaatgagattacttgggttcaactcaactaaatttcttatattaaaaaaaaattccaagttgtatatgttagaaatcaaatgagtcattttttttcctgcaggaaatatgataaatttcagtgtaatggatggtggcgtgatcaaatgaaaagtatcctgtagctatgacctcgcatgggaccttggtgttgcattaaaaatggatttttgcagatcacatatctgagagggtacttgtgtcaggaaggatgagaggatagggagcctgtttttcatcagatccatgtgccacgcaggcttccttgggttctagtggatttgttagggatctggggctgacgcagctatcccactagagaggccactctctgacttccaggtcgccctttctacttctgtatctggattgattcagtttatccctaattagcgtttgcgttttccatgaaatttcctgatgcatcctcactgtcttcaactgttgcatagccaggtgggtggatggatggtttagggtttctgagttaagccgttttggggcaggcttctggatgcccatgtttccatggagaccccagggggaagatgccttcctcccgtctgcattcccagaaaaggatcagaagtccaggctgcttctggggcacagactttctgtacttggccaccagaagtgccccttaggccacctaaggaggattctgtgaaactcaatgtctaaacccctgagaaaggcattcagaaatgatttcaggagggggcaaccccaggagtccagcctcccctggcagcctggaaatactgcagtaacaaaaagagctggtttctggtgatctgaatgcattgtgtttgggggtgacaccgctggtggaaggttgagggcctgtggtctgaaaagacatctgaagaatgtgttaggttttcaacatttctttgaacaggctgcgtgcatcttaatgctgtcaaccagcaactggagccccttttttgagaggcccgaaccagtaaagctgctgacttcaggagtatggggaagctgtgatttctggaagcttcctggaatctatttaggtgcatgaataatctgcaaatcacttagaggcactgtccatgtggtccataactggctttattcccaaagatggagctgt

SEQ ID NO: 13012 - DNA, 3474 bp, Homo sapiens
gcggcggcggcggcggcggccgggaagaactagaggtattccccgggcggctggaggactgagtcgagccgggacccgagtcctccggtatcccagcagccaccggaggcagtgaggtaatggaggaagaatgtagggagtcctccagtggaccacactccttctagcgagccgcggaaaccatagagatcagggctcagccggagggccggcccactgctgtcacgtggcctccatccgtgcgctttattggctggtgctggctttacggggttgaattttggacgctgcctgccattcgtgggaccgagtttcaggcagctggaataaagagagacatcgggggaaagccgcgagaaggccagcgtccctggctgggagcagagctagccgagtagggcgcccggctgtcaaaactggccggcgcagtgcacgctgggccgccccggagcggtcgcagagcccgtcgggagtcgtagtccgggacgggcccgcagcattgtccgcgacgcagctcgggatccgcgtcgggttgtcggccgggttgctgccaggcaccgtcgagcgttagccacccagcattgagctgccagcggctgttctccctaagcaccctcgctcacgtcgcctcgcctcgcctcgcctgaccggccgcagccttggataccagccttaaatcgagccgactacggcccagccccgcccgcggcgaagtgcgcggggttcggtgccagccgctcgcccctggccgggccagcctcttgatgcaccggggacgggcgcgcccatccgactcttcgaggggcggcagggccccatctgtgtctttcgctctcgagcccccagctagagttggcttcagcggaatacctactgtgcaggattattcaacaagccgattgatcacattcttcagctctagcagtgcaaaggcttcactgaaaaagaacattacaaattttttttgaaagaaatttgggggtaaatttaattttaaatactgatttttgataacatttgatcttatgacagcatttgtatttttaattacagataggattacactaaaagtcatttctgacctgctcccttacccttatggctaaaataaactgctaggccctgaagcaaaggcgagccatgttctagagcaatgtctttcttgtattaaaatacggccccatgctcacatataggctgttttgtgttttgcttttctgttgatgcacaaaggaatccttgatatgtttgtcctcaaagaccaaagacaagtatctagtaaaaaatgcaaatcatatctaacagtgaagctttccagcaaaaaccttctgctctagaatgcataattatgcgagcataagatctactactctagacttttagcataattacctataggcagcaaaaccctagtcaattgagtgtctggtgcctcttggacctggacttctccaagagaatgggcaaggaggacgaaaaggaagagacagctatgctttgtgaaacaggaggtgacttaaaaaaaaaattctatagcagtcttcttaattcctgttacagacttgatacgcttatctgctgttgaggacacggttgccagtttctaaccttctctgtctgcctgaaaaactagaaattagatgatcatatggcctagagccagaagtgcaggaggcagaaagccaggggccagtttttttctttttgtttctgaataagaaggccaaatcctgacttaaaataatcaaaataaattttacggagtgacggtctttccagctgaaaaccttaaaacatggcatctggaagaaggccttagtctattgctcccaggatggtactatatagtcattaaatagcccacagataagggagttattgccccctcgttattgggctgccaggaattaaatgatggaactaagtttcacttgaaacattcccaaattaaaacaaaaacaagccttgctttgagctgttgaaaaggcattttactgagaagatccagatgctattgctgttcttaaatgatgttgaaaggcaaagggtcaggactttcaaaaagtcactttgaggtcacctcacataagcaagcaacagtttgaactgatgcaaaaacaaacaatgaaattatgaacaggaggaagaaactaaaatgagggcagtatatgccataaatatggaagaggctgtctcttatttatcttctcatttcctgtacataatacagaaacctggtatgtaataggcatacaattatttgtggctcaactgaataaacgaagatggaaaccagcaagcagcgggcagataatatacttgggaaaggagaactgcagagacgctgggtggttcaaggcttctgcatgatcctcaaatgtcaccccaatctgctgtgacatagctataccactcatcagaataccccaaaacaaattgtctgcctcccttatgtacaacttttattatttcttatctcggttggttaagaatatgtagtaatggccgggcgcggtggctcacgcctgtaatcccagcactttgggaggccgaggcaggaggatcacctgaggtcaggagttcgagaccagcctcaacatggagaaaccccgtctctactaaaaatacaaaattagccgggcgtggtggtgcatacctgtaattccagctactcgggaggctgaggcaggagaattgcttgaacctgggaggcagagtttgcggtgagctgagatcgcgccattgcactccatccagcctgggcaacaagagcgaaactccatctcaaaaaaaaaaaaaaaaaaaaaagaatatgtagtaatggttaagagtccactgtggaatcagcctgcataggtccaaatcccagccctgactgaatacctgtgaacaagttatatcagtgactcaggcttattatctgtaaaatggggattatagcattcctgcctcatagggatgttatgagatttaaataccaataagtctgtacattataaaccttatcagattggtgtggtgaaaatgctcagtaactgagcctcgtgagcattagaatgttgagatcagcatgaagttagcctgtatactgggcatacacattcttctggatttgctccttttgtgagcaatcaatgatgagctaaaggcatttgctaactagtaggaatgaaataaggtttcagacaggatcttggtgggtgatgtagattttatctgtcccatttgtcccatttctcaactggaagtgagtctggccttggtctgcatctgtgctctccccttcacaaaaggcaggcccagagagactccagagatggcccctgtctcctgtgtgtcctccgccgctgtgtccacttgggcacgtcaaaggtatgatcggtacttatctgatgaaaacaaatctttgtatatacagttgtctacctgggttgaatatttcagaggtataaagtagtttaaataaataaaccc

SEQ ID NO: 13013 - DNA, 422 bp, Homo sapiens
ttatacatacctcacattttggcattaaaataatagacattcctaggtaaatgtctagtctaagcatatgaaaaatcctgtaattcatgcttttaatcattcactatcaaaatggatattttctgcatactttgctgctgcatcagtcactgctggatgtataaagtgatgccccctgttctcagagggtttatagactagacgatcaagtatgttaggataatacttgagaaaaaaaggagactatacacagatgtgaattttgttgggccaataaaacattagagctattgactggagagaacaaaaagatggattattttttaaagaacaaagatggatttctttcttcccggaatctcccatgttacactgttacaatttctaaagagctatgtaagattacagtggtgagagagccc

SEQ ID NO: 13014 - DNA, 674 bp, Homo sapiens
tgctgggattacaggcatgagccaccattcccgacctgacatttacttttgaagctttcattcttaggagccatagtggaaatcattgcagttacacatagtgcaatcctctctagtcagaaatctgttttgccagattatctatgttttctaccgttgttttacagtcactcttgtcaccataacttgtctaatttgaatggctatccaaatagaaagttaaaagcaggttaaataatctgtttttttaagctttcttattttttctccttttcaaaaatagaaaatacacaactatatcagctgtgttgcaggggttgggggagggtagtgtgggacctcatgcatttaacagtgtctgctttttatgcttccaaagggggaaaaaatctctgtaggggctttaaattttcattttcttgtgcctttcccttatgaggaggtgcaggcccagccaatgttttatacattttgtcacaatgtattttctgttattctgagggtagaatcaggcgagaaaaataggaaaatgttatgttcatatggaagagttttgagcaactgggctaaattagtgaggaatttccttctagcttttaagtagaagaggcttgtccctatgaaagatgctgcccattcccttgcataactgaaaaaataaaaaaaaagttttg

SEQ ID NO: 13015 - DNA, 431 bp, Homo sapiens
gatggccttccctccagaagctacagtttctaggctgacttgtgaactttgtctcattgagagaactttgtctcattgagagaacttgtgaactttgtctcatgaacatccattaaacaaggataaagtccccagggtatgcagaattctgtccaataaagaagccaagatgtgcgaggcgcagtggctcacacctgcaatcccagcaatttgggaggctgaggcaggcagatcgctctgagctcaggagttcaagaccagcctgggcaacatggtgaaaccctatctccacaaaaaatgtaaaaattagccgggcattggtggcgtgctcctgtagtgccagctttggaaggctaggctggaaaattgcttgagcccaggaagcagaggttgcagtgagctgagatcacgccactgcactccagcctggg

SEQ ID NO: 13016 - DNA, 621 bp, Homo sapiens
aagtggattaaggacttaaatctaagacctcaaactgtgtaactattacaataaaacatttgggtaaatctggacatttatctgggcaaaaaattccttgagcagtactgtacaagtccaggcaaccaaagcagaaatggacaaatgggatcacatcaagttaaaaagcttctgcacagcaaaggaaacaatccacaaagtaaggagacaacctccagaaagacagaaaatatttgcaaattactcatctgacaagggattaataaccagaatatataagaagctcaaacaactctatagaaaaaaaactaataatccgatcacaatatgaccaaaagatttgaatagacctttctcaaaagaagacgtacacatgacaaacaaaggtgctataaacatcattggttatcagagaaatgtaagtcaaaactacaaagagaaatcatctcagttcagttaaaatggcttatgtccaaaagacaggcaagaacaaatgcgaggatgtggagaaaagggaactcttgtatactttaggtgggaatataaattagtacatctgctatgaagaacagtttggaagttcctcaaaaaactgaaaatagaaataccatattacctagc

SEQ ID NO: 13017 - DNA, 2701 bp, Homo sapiens
  misc_feature (153)..(153): n is a, c, g, or t
atgctcctggacgcgggtccgcagttcccggccatcggggtgggcagcttcgcgcgccaccatcaccactccgccgcggcggcggcggcggctgccgccgagatgcaggaccgtgaactgagcctggcggcggcgcagaacggcttcgttgantccgccgccgcgcacatgggagccttcaagctcaacccgggcgcgcacgagctgtccccgggccagagctcggcgttcacgtcgcagggccccggcgcctaccccggctccgctgcggctgccgctgcggccgcagcgctcgggccccacgccgcgcacgttggctcctactctgggccgcccttcaactccacccgggacttcctgttccgcagccgcggcttcggggactcggcgccgggcggcgggcagcacgggctgttcgggccgggcgcgggcggcctgcaccacgcgcactcggacgcgcagggccacctcctcttcccgggcctgccagagcagcacgggccgcacggctcgcagaatgtgctcaacgggcagatgcgcctcgggctgcccggcgaggtgttcgggcgctcggagcaataccgccaggtggccagcccgcggaccgacccctactcggcggcgcaactccacaaccagtacggccccatgaatatgaacatgggtatgaacatggcagcagccgcggcccaccaccaccaccaccaccaccaccaccccggtgcctttttccgctatatgcggcagcagtgcatcaagcaggagctaatctgcaagtggatcgaccccgagcaactgagcaatcccaagaagagctgcaacaaaactttcagcaccatgcacgagctggtgacacacgtctcggtggagcacgtcggcggcccggagcagagcaaccacgtctgcttctgggaggagtgtccgcgcgagggcaagcccttcaaggccaaatacaaactggtcaaccacatccgcgtgcacacaggcgagaaacccttcccctgccccttcccgggctgtggcaaagtcttcgcgcgctccgagaacctcaagatccacaaaaggacccacacaggggagaagccgttccagtgtgagtttgagggctgcgaccggcgcttcgccaacagcagcgacaggaagaagcacatgcacgtccacacctccgataagccctatctctgcaagatgtgcgacaagtcctacacgcaccccagctcgctgcggaagcacatgaaggtccatgagtcctccccgcagggctctgaatcctccccggccgccagctccggctatgagtcgtccacgcccccggggctggtgtcccccagcgccgagccccagagcagctccaacctgtccccagcggcggcggcagcggcggcggcggctgcggcggcggcggccgcggtgtccgcggtgcaccggggcggaggctcgggcagtggcggcgcgggaggcggctcaggcggcggcagcggcagtggcgggggcggcggcggggcgggcggcgggggcggcggcagctctggcgggggcagcgggacagccgggggtcacagcggcctctcctccaacttcaatgaatggtacgtgtgacgggtcggggcctctctccctctccctgtccccaccccagcgcagcagccctccccgcagctagcagcgagggcaccttgtgatcatgttgttaaaattatgaatctgatttttatgatgatgaaaattttaccagcagaaggattttttaaagttttttttttttttttaataataatctaggcatgaagagcaaaaatatcccttccggagtctttgaagctgaaaatataaaacaaataaaaaataaaaaaataaaaacccacaaaaatgttgaaccaaacctccctgctaatctccatgcccacgttctttcccaccctgttcccagtcttctgacaaactgtgtacatagcggactcctcctttctcctccgaggtggttttaaaggctttttggtgtatagaagtttgtccatttgtaaaactccggattgcgttcctccccgccttccgccccttcccttccctaaagtgatgggctttctcttttctctttttagtttacccggtttctttttaagtaatgtggaagaaaatggtttattttgtattgtggtattgaatattgtgttcctttttatgaggcaacctgattgtaaacttcatgtaactatagactggaaaaaatgagccgtgccaaagtctcccttctgtttcttcagcacattgacccatagcacacacatacacaccaccaccaacaacgcttgtgaatgtatttttctgttagctgggtttacatgtgatgttttagtgcttttgcaagttcaatttgttagttcctgtatgaaagattgtgggggaaaaataaacgtcgtgccgttagctttttccgtaataacacccttccttctgtaaatacccgttaccatatttatccatttgtaattaaattatggtattaacttgctacagaggaaacaatatttataaagaatgtttcttaactataaatatgtacaattgtgggcataaactgtttcagattttttatttgaaggttttaagtggtttgatcatttcttgtgatgttttgagagtaatgcatacagaaatataataaaatgtgttgaaactgcatgaacataaaaattttcta

SEQ ID NO: 13018 - DNA, 1871 bp, Homo sapiens
caaacaacacgtagcaactccaaatgtaattgcttactggccctggcgagaaaccgacagcagcccagcagcctgtgtgattttgataatgccccaaatattttgtcataataacagcttctccgtggcgagagcaacttgttagaagctgcaaatccaagaagccctctagaaaggcaggcagggctaggagcttccccacattcctgagaaatttgaggagatggacgtcagcctggaagaaagggagaagccgttccagtgtgagtttgagggctgcgaccggcgcttcgccaacagcagcgacaggaagaagcacatgcacgtccacacctccgataagccctatctctgcaagatgtgcgacaagtcctacacgcaccccagctcgctgcggaagcacatgaaggtccatgagtcctccccgcagggctctgaatcctccccggccgccagctccggctatgagtcgtccacgcccccggggctggtgtcccccagcgccgagccccagagcagctccaacctgtccccagcggcggcggcagcggcggcggcggctgcggcggcggcggccgcggtgtccgcggtgcaccggggcggaggctcgggcagtggcggcgcgggaggcggctcaggcggcggcagcggcagtggcgggggcggcggcggggcgggcggcgggggcggcggcagctctggcgggggcagcgggacagccgggggtcacagcggcctctcctccaacttcaatgaatggtacgtgtgacgggtcggggcctctctccctctccctgtccccaccccagcgcagcagccctccccgcagctagcagcgagggcaccttgtgatcatgttgttaaaattatgaatctgatttttatgatgatgaaaattttaccagcagaaggattttttaaagttttttttttttttttaataataatctaggcatgaagagcaaaaatatcccttccggagtctttgaagctgaaaatataaaacaaataaaaaataaaaaaataaaaacccacaaaaatgttgaaccaaacctccctgctaatctccatgcccacgttctttcccaccctgttcccagtcttctgacaaactgtgtacatagcggactcctcctttctcctccgaggtggttttaaaggctttttggtgtatagaagtttgtccatttgtaaaactccggattgcgttcctccccgccttccgccccttcccttccctaaagtgatgggctttctcttttctctttttagtttacccggtttctttttaagtaatgtggaagaaaatggtttattttgtattgtggtattgaatattgtgttcctttttatgaggcaacctgattgtaaacttcatgtaactatagactggaaaaaatgagccgtgccaaagtctcccttctgtttcttcagcacattgacccatagcacacacatacacaccaccaccaacaacgcttgtgaatgtatttttctgttagctgggtttacatgtgatgttttagtgcttttgcaagttcaatttgttagttcctgtatgaaagattgtgggggaaaaataaacgtcgtgccgttagctttttccgtaataacacccttccttctgtaaatacccgttaccatatttatccatttgtaattaaattatggtattaacttgctacagaggaaacaatatttataaagaatgtttcttaactataaatatgtacaattgtgggcataaactgtttcagattttttatttgaaggttttaagtggtttgatcatttcttgtgatgttttgagagtaatgcatacagaaatataataaaatgtgttgaaactgcatgaacataaaaattttcta

SEQ ID NO: 13019 - DNA, 2914 bp, Homo sapiens
  misc_feature (153)..(153): n is a, c, g, or t
atgctcctggacgcgggtccgcagttcccggccatcggggtgggcagcttcgcgcgccaccatcaccactccgccgcggcggcggcggcggctgccgccgagatgcaggaccgtgaactgagcctggcggcggcgcagaacggcttcgttgantccgccgccgcgcacatgggagccttcaagctcaacccgggcgcgcacgagctgtccccgggccagagctcggcgttcacgtcgcagggccccggcgcctaccccggctccgctgcggctgccgctgcggccgcagcgctcgggccccacgccgcgcacgttggctcctactctgggccgcccttcaactccacccgggacttcctgttccgcagccgcggcttcggggactcggcgccgggcggcgggcagcacgggctgttcgggccgggcgcgggcggcctgcaccacgcgcactcggacgcgcagggccacctcctcttcccgggcctgccagagcagcacgggccgcacggctcgcagaatgtgctcaacgggcagatgcgcctcgggctgcccggcgaggtgttcgggcgctcggagcaataccgccaggtggccagcccgcggaccgacccctactcggcggcgcaactccacaaccagtacggccccatgaatatgaacatgggtatgaacatggcagcagccgcggcccaccaccaccaccaccaccaccaccaccccggtgcctttttccgctatatgcggcagcagtgcatcaagcaggagctaatctgcaagtggatcgaccccgagcaactgagcaatcccaagaagagctgcaacaaaactttcagcaccatgcacgagctggtgacacacgtctcggtggagcacgtcggcggcccggagcagagcaaccacgtctgcttctgggaggagtgtccgcgcgagggcaagcccttcaaggccaaatacaaactggtcaaccacatccgcgtgcacacaggcgagaaacccttcccctgccccttcccgggctgtggcaaagtcttcgcgcgctccgagaacctcaagatccacaaaaggacccacacaggggagaagccgttccagtgtgagtttgagggctgcgaccggcgcttcgccaacagcagcgacaggaagaagcacatgcacgtccacacctccgataagccctatctctgcaagatgtgcgacaagtcctacacgcaccccagctcgctgcggaagcacatgaaggtaccaccgcggcggccgggaggagggcgaggcaggccgaggcgccggtgcagcactggcccggaccacctcagccggcctgggagggtccccaggggccagggcggcggggggaacatttctgggggtgctctcccccaggggcccggccccacagcagctgcactcacacccagtcccctctggtcccccctcccggcttttgtcttgcaggtccatgagtcctccccgcagggctctgaatcctccccggccgccagctccggctatgagtcgtccacgcccccggggctggtgtcccccagcgccgagccccagagcagctccaacctgtccccagcggcggcggcagcggcggcggcggctgcggcggcggcggccgcggtgtccgcggtgcaccggggcggaggctcgggcagtggcggcgcgggaggcggctcaggcggcggcagcggcagtggcgggggcggcggcggggcgggcggcgggggcggcggcagctctggcgggggcagcgggacagccgggggtcacagcggcctctcctccaacttcaatgaatggtacgtgtgacgggtcggggcctctctccctctccctgtccccaccccagcgcagcagccctccccgcagctagcagcgagggcaccttgtgatcatgttgttaaaattatgaatctgatttttatgatgatgaaaattttaccagcagaaggattttttaaagttttttttttttttttaataataatctaggcatgaagagcaaaaatatcccttccggagtctttgaagctgaaaatataaaacaaataaaaaataaaaaaataaaaacccacaaaaatgttgaaccaaacctccctgctaatctccatgcccacgttctttcccaccctgttcccagtcttctgacaaactgtgtacatagcggactcctcctttctcctccgaggtggttttaaaggctttttggtgtatagaagtttgtccatttgtaaaactccggattgcgttcctccccgccttccgccccttcccttccctaaagtgatgggctttctcttttctctttttagtttacccggtttctttttaagtaatgtggaagaaaatggtttattttgtattgtggtattgaatattgtgttcctttttatgaggcaacctgattgtaaacttcatgtaactatagactggaaaaaatgagccgtgccaaagtctcccttctgtttcttcagcacattgacccatagcacacacatacacaccaccaccaacaacgcttgtgaatgtatttttctgttagctgggtttacatgtgatgttttagtgcttttgcaagttcaatttgttagttcctgtatgaaagattgtgggggaaaaataaacgtcgtgccgttagctttttccgtaataacacccttccttctgtaaatacccgttaccatatttatccatttgtaattaaattatggtattaacttgctacagaggaaacaatatttataaagaatgtttcttaactataaatatgtacaattgtgggcataaactgtttcagattttttatttgaaggttttaagtggtttgatcatttcttgtgatgttttgagagtaatgcatacagaaatataataaaatgtgttgaaactgcatgaacataaaaattttcta

SEQ ID NO: 13020 - DNA, 2079 bp, Homo sapiens
caaacaacacgtagcaactccaaatgtaattgcttactggccctggcgagaaaccgacagcagcccagcagcctgtgtgattttgataatgccccaaatattttgtcataataacagcttctccgtggcgagagcaacttgttagaagctgcaaatccaagaagccctctagaaaggcaggcagggctaggagcttccccacattcctgagaaatttgaggagatggacgtcagcctggaagaaagtaaaatacgaaataaatgagcaggactgtcgggcgggaaggcggttaatttgatcttagttctgccgcagaggggatcggactggtttgagggacccagccccctcaggtccttctccctcgccgcggcccagccccctcgcagcctgagtgggggctctgcaggctctgggtgtctgcagccagcgccgatgtttgccgtccacaggggagaagccgttccagtgtgagtttgagggctgcgaccggcgcttcgccaacagcagcgacaggaagaagcacatgcacgtccacacctccgataagccctatctctgcaagatgtgcgacaagtcctacacgcaccccagctcgctgcggaagcacatgaaggtccatgagtcctccccgcagggctctgaatcctccccggccgccagctccggctatgagtcgtccacgcccccggggctggtgtcccccagcgccgagccccagagcagctccaacctgtccccagcggcggcggcagcggcggcggcggctgcggcggcggcggccgcggtgtccgcggtgcaccggggcggaggctcgggcagtggcggcgcgggaggcggctcaggcggcggcagcggcagtggcgggggcggcggcggggcgggcggcgggggcggcggcagctctggcgggggcagcgggacagccgggggtcacagcggcctctcctccaacttcaatgaatggtacgtgtgacgggtcggggcctctctccctctccctgtccccaccccagcgcagcagccctccccgcagctagcagcgagggcaccttgtgatcatgttgttaaaattatgaatctgatttttatgatgatgaaaattttaccagcagaaggattttttaaagttttttttttttttttaataataatctaggcatgaagagcaaaaatatcccttccggagtctttgaagctgaaaatataaaacaaataaaaaataaaaaaataaaaacccacaaaaatgttgaaccaaacctccctgctaatctccatgcccacgttctttcccaccctgttcccagtcttctgacaaactgtgtacatagcggactcctcctttctcctccgaggtggttttaaaggctttttggtgtatagaagtttgtccatttgtaaaactccggattgcgttcctccccgccttccgccccttcccttccctaaagtgatgggctttctcttttctctttttagtttacccggtttctttttaagtaatgtggaagaaaatggtttattttgtattgtggtattgaatattgtgttcctttttatgaggcaacctgattgtaaacttcatgtaactatagactggaaaaaatgagccgtgccaaagtctcccttctgtttcttcagcacattgacccatagcacacacatacacaccaccaccaacaacgcttgtgaatgtatttttctgttagctgggtttacatgtgatgttttagtgcttttgcaagttcaatttgttagttcctgtatgaaagattgtgggggaaaaataaacgtcgtgccgttagctttttccgtaataacacccttccttctgtaaatacccgttaccatatttatccatttgtaattaaattatggtattaacttgctacagaggaaacaatatttataaagaatgtttcttaactataaatatgtacaattgtgggcataaactgtttcagattttttatttgaaggttttaagtggtttgatcatttcttgtgatgttttgagagtaatgcatacagaaatataataaaatgtgttgaaactgcatgaacataaaaattttcta

SEQ ID NO: 13021 - DNA, 1747 bp, Homo sapiens
tgaaaggctttgctgactcccccaaccctcgcccaccagcttgtgcctctccgcagtcactagatgctgccttatctctaatatttaccttttcttcaacttatttttttaaagacgggaggggagaagccgttccagtgtgagtttgagggctgcgaccggcgcttcgccaacagcagcgacaggaagaagcacatgcacgtccacacctccgataagccctatctctgcaagatgtgcgacaagtcctacacgcaccccagctcgctgcggaagcacatgaaggtccatgagtcctccccgcagggctctgaatcctccccggccgccagctccggctatgagtcgtccacgcccccggggctggtgtcccccagcgccgagccccagagcagctccaacctgtccccagcggcggcggcagcggcggcggcggctgcggcggcggcggccgcggtgtccgcggtgcaccggggcggaggctcgggcagtggcggcgcgggaggcggctcaggcggcggcagcggcagtggcgggggcggcggcggggcgggcggcgggggcggcggcagctctggcgggggcagcgggacagccgggggtcacagcggcctctcctccaacttcaatgaatggtacgtgtgacgggtcggggcctctctccctctccctgtccccaccccagcgcagcagccctccccgcagctagcagcgagggcaccttgtgatcatgttgttaaaattatgaatctgatttttatgatgatgaaaattttaccagcagaaggattttttaaagttttttttttttttttaataataatctaggcatgaagagcaaaaatatcccttccggagtctttgaagctgaaaatataaaacaaataaaaaataaaaaaataaaaacccacaaaaatgttgaaccaaacctccctgctaatctccatgcccacgttctttcccaccctgttcccagtcttctgacaaactgtgtacatagcggactcctcctttctcctccgaggtggttttaaaggctttttggtgtatagaagtttgtccatttgtaaaactccggattgcgttcctccccgccttccgccccttcccttccctaaagtgatgggctttctcttttctctttttagtttacccggtttctttttaagtaatgtggaagaaaatggtttattttgtattgtggtattgaatattgtgttcctttttatgaggcaacctgattgtaaacttcatgtaactatagactggaaaaaatgagccgtgccaaagtctcccttctgtttcttcagcacattgacccatagcacacacatacacaccaccaccaacaacgcttgtgaatgtatttttctgttagctgggtttacatgtgatgttttagtgcttttgcaagttcaatttgttagttcctgtatgaaagattgtgggggaaaaataaacgtcgtgccgttagctttttccgtaataacacccttccttctgtaaatacccgttaccatatttatccatttgtaattaaattatggtattaacttgctacagaggaaacaatatttataaagaatgtttcttaactataaatatgtacaattgtgggcataaactgtttcagattttttatttgaaggttttaagtggtttgatcatttcttgtgatgttttgagagtaatgcatacagaaatataataaaatgtgttgaaactgcatgaacataaaaattttcta

SEQ ID NO: 13022 - DNA, 2508 bp, Homo sapiens
  misc_feature (153)..(153): n is a, c, g, or t
atgctcctggacgcgggtccgcagttcccggccatcggggtgggcagcttcgcgcgccaccatcaccactccgccgcggcggcggcggcggctgccgccgagatgcaggaccgtgaactgagcctggcggcggcgcagaacggcttcgttgantccgccgccgcgcacatgggagccttcaagctcaacccgggcgcgcacgagctgtccccgggccagagctcggcgttcacgtcgcagggccccggcgcctaccccggctccgctgcggctgccgctgcggccgcagcgctcgggccccacgccgcgcacgttggctcctactctgggccgcccttcaactccacccgggacttcctgttccgcagccgcggcttcggggactcggcgccgggcggcgggcagcacgggctgttcgggccgggcgcgggcggcctgcaccacgcgcactcggacgcgcagggccacctcctcttcccgggcctgccagagcagcacgggccgcacggctcgcagaatgtgctcaacgggcagatgcgcctcgggctgcccggcgaggtgttcgggcgctcggagcaataccgccaggtggccagcccgcggaccgacccctactcggcggcgcaactccacaaccagtacggccccatgaatatgaacatgggtatgaacatggcagcagccgcggcccaccaccaccaccaccaccaccaccaccccggtgcctttttccgctatatgcggcagcagtgcatcaagcaggagctaatctgcaagtggatcgaccccgagcaactgagcaatcccaagaagagctgcaacaaaactttcagcaccatgcacgagctggtgacacacgtctcggtggagcacgtcggcggcccggagcagagcaaccacgtctgcttctgggaggagtgtccgcgcgagggcaagcccttcaaggccaaatacaaactggtcaaccacatccgcgtgcacacaggcgagaaacccttcccctgccccttcccgggctgtggcaaagtcttcgcgcgctccgagaacctcaagatccacaaaaggacccacacaggggagaagccgttccagtgtgagtttgagggctgcgaccggcgcttcgccaacagcagcgacaggaagaagcacatgcacgtccacacctccgataagccctatctctgcaagatgtgcgacaagtcctacacgcaccccagctcgctgcggaagcacatgaaggtccatgagtcctccccgcagggctctgaatcctccccggccgccagctccggctatgagtcgtccacgcccccggggctggtgtcccccagcgccgagccccagagcagctccaacctgtccccagcggcggcggcagcggcggcggcggctgcggcggcggcggccgcggtgtccgcggtgcaccggggcggaggctcgggcagtggcggcgcgggaggcggctcaggcggcggcagcggcagtggcgggggcggcggcggggcgggcggcgggggcggcggcagctctggcgggggcagcgggacagccgggggtcacagcggcctctcctccaacttcaatgaatggcatgaagagcaaaaatatcccttccggagtctttgaagctgaaaatataaaacaaataaaaaataaaaaaataaaaacccacaaaaatgttgaaccaaacctccctgctaatctccatgcccacgttctttcccaccctgttcccagtcttctgacaaactgtgtacatagcggactcctcctttctcctccgaggtggttttaaaggctttttggtgtatagaagtttgtccatttgtaaaactccggattgcgttcctccccgccttccgccccttcccttccctaaagtgatgggctttctcttttctctttttagtttacccggtttctttttaagtaatgtggaagaaaatggtttattttgtattgtggtattgaatattgtgttcctttttatgaggcaacctgattgtaaacttcatgtaactatagactggaaaaaatgagccgtgccaaagtctcccttctgtttcttcagcacattgacccatagcacacacatacacaccaccaccaacaacgcttgtgaatgtatttttctgttagctgggtttacatgtgatgttttagtgcttttgcaagttcaatttgttagttcctgtatgaaagattgtgggggaaaaataaacgtcgtgccgttagctttttccgtaataacacccttccttctgtaaatacccgttaccatatttatccatttgtaattaaattatggtattaacttgctacagaggaaacaatatttataaagaatgtttcttaactataaatatgtacaattgtgggcataaactgtttcagattttttatttgaaggttttaagtggtttgatcatttcttgtgatgttttgagagtaatgcatacagaaatataataaaatgtgttgaaactgcatgaacataaaaattttcta

SEQ ID NO: 13023 - DNA, 2292 bp, Homo sapiens
caaacaacacgtagcaactccaaatgtaattgcttactggccctggcgagaaaccgacagcagcccagcagcctgtgtgattttgataatgccccaaatattttgtcataataacagcttctccgtggcgagagcaacttgttagaagctgcaaatccaagaagccctctagaaaggcaggcagggctaggagcttccccacattcctgagaaatttgaggagatggacgtcagcctggaagaaagtaaaatacgaaataaatgagcaggactgtcgggcgggaaggcggttaatttgatcttagttctgccgcagaggggatcggactggtttgagggacccagccccctcaggtccttctccctcgccgcggcccagccccctcgcagcctgagtgggggctctgcaggctctgggtgtctgcagccagcgccgatgtttgccgtccacaggggagaagccgttccagtgtgagtttgagggctgcgaccggcgcttcgccaacagcagcgacaggaagaagcacatgcacgtccacacctccgataagccctatctctgcaagatgtgcgacaagtcctacacgcaccccagctcgctgcggaagcacatgaaggtaccaccgcggcggccgggaggagggcgaggcaggccgaggcgccggtgcagcactggcccggaccacctcagccggcctgggagggtccccaggggccagggcggcggggggaacatttctgggggtgctctcccccaggggcccggccccacagcagctgcactcacacccagtcccctctggtcccccctcccggcttttgtcttgcaggtccatgagtcctccccgcagggctctgaatcctccccggccgccagctccggctatgagtcgtccacgcccccggggctggtgtcccccagcgccgagccccagagcagctccaacctgtccccagcggcggcggcagcggcggcggcggctgcggcggcggcggccgcggtgtccgcggtgcaccggggcggaggctcgggcagtggcggcgcgggaggcggctcaggcggcggcagcggcagtggcgggggcggcggcggggcgggcggcgggggcggcggcagctctggcgggggcagcgggacagccgggggtcacagcggcctctcctccaacttcaatgaatggtacgtgtgacgggtcggggcctctctccctctccctgtccccaccccagcgcagcagccctccccgcagctagcagcgagggcaccttgtgatcatgttgttaaaattatgaatctgatttttatgatgatgaaaattttaccagcagaaggattttttaaagttttttttttttttttaataataatctaggcatgaagagcaaaaatatcccttccggagtctttgaagctgaaaatataaaacaaataaaaaataaaaaaataaaaacccacaaaaatgttgaaccaaacctccctgctaatctccatgcccacgttctttcccaccctgttcccagtcttctgacaaactgtgtacatagcggactcctcctttctcctccgaggtggttttaaaggctttttggtgtatagaagtttgtccatttgtaaaactccggattgcgttcctccccgccttccgccccttcccttccctaaagtgatgggctttctcttttctctttttagtttacccggtttctttttaagtaatgtggaagaaaatggtttattttgtattgtggtattgaatattgtgttcctttttatgaggcaacctgattgtaaacttcatgtaactatagactggaaaaaatgagccgtgccaaagtctcccttctgtttcttcagcacattgacccatagcacacacatacacaccaccaccaacaacgcttgtgaatgtatttttctgttagctgggtttacatgtgatgttttagtgcttttgcaagttcaatttgttagttcctgtatgaaagattgtgggggaaaaataaacgtcgtgccgttagctttttccgtaataacacccttccttctgtaaatacccgttaccatatttatccatttgtaattaaattatggtattaacttgctacagaggaaacaatatttataaagaatgtttcttaactataaatatgtacaattgtgggcataaactgtttcagattttttatttgaaggttttaagtggtttgatcatttcttgtgatgttttgagagtaatgcatacagaaatataataaaatgtgttgaaactgcatgaacataaaaattttcta

SEQ ID NO: 13024 - DNA, 2738 bp, Homo sapiens
  misc_feature (153)..(153): n is a, c, g, or t
atgctcctggacgcgggtccgcagttcccggccatcggggtgggcagcttcgcgcgccaccatcaccactccgccgcggcggcggcggcggctgccgccgagatgcaggaccgtgaactgagcctggcggcggcgcagaacggcttcgttgantccgccgccgcgcacatgggagccttcaagctcaacccgggcgcgcacgagctgtccccgggccagagctcggcgttcacgtcgcagggccccggcgcctaccccggctccgctgcggctgccgctgcggccgcagcgctcgggccccacgccgcgcacgttggctcctactctgggccgcccttcaactccacccgggacttcctgttccgcagccgcggcttcggggactcggcgccgggcggcgggcagcacgggctgttcgggccgggcgcgggcggcctgcaccacgcgcactcggacgcgcagggccacctcctcttcccgggcctgccagagcagcacgggccgcacggctcgcagaatgtgctcaacgggcagatgcgcctcgggctgcccggcgaggtgttcgggcgctcggagcaataccgccaggtggccagcccgcggaccgacccctactcggcggcgcaactccacaaccagtacggccccatgaatatgaacatgggtatgaacatggcagcagccgcggcccaccaccaccaccaccaccaccaccaccccggtgcctttttccgctatatgcggcagcagtgcatcaagcaggagctaatctgcaagtggatcgaccccgagcaactgagcaatcccaagaagagctgcaacaaaactttcagcaccatgcacgagctggtgacacacgtctcggtggagcacgtcggcggcccggagcagagcaaccacgtctgcttctgggaggagtgtccgcgcgagggcaagcccttcaaggccaaatacaaactggtcaaccacatccgcgtgcacacaggcgagaaacccttcccctgccccttcccgggctgtggcaaagtcttcgcgcgctccgagaacctcaagatccacaaaaggacccacacaggggagaagccgttccagtgtgagtttgagggctgcgaccggcgcttcgccaacagcagcgacaggaagaagcacatgcacgtccacacctccgataagccctatctctgcaagatgtgcgacaagtcctacacgcaccccagctcgctgcggaagcacatgaagtcccctctggtcccccctcccggcttttgtcttgcaggtccatgagtcctccccgcagggctctgaatcctccccggccgccagctccggctatgagtcgtccacgcccccggggctggtgtcccccagcgccgagccccagagcagctccaacctgtccccagcggcggcggcagcggcggcggcggctgcggcggcggcggccgcggtgtccgcggtgcaccggggcggaggctcgggcagtggcggcgcgggaggcggctcaggcggcggcagcggcagtggcgggggcggcggcggggcgggcggcgggggcggcggcagctctggcgggggcagcgggacagccgggggtcacagcggcctctcctccaacttcaatgaatggtacgtgtgacgggtcggggcctctctccctctccctgtccccaccccagcgcagcagccctccccgcagctagcagcgagggcaccttgtgatcatgttgttaaaattatgaatctgatttttatgatgatgaaaattttaccagcagaaggattttttaaagttttttttttttttttaataataatctaggcatgaagagcaaaaatatcccttccggagtctttgaagctgaaaatataaaacaaataaaaaataaaaaaataaaaacccacaaaaatgttgaaccaaacctccctgctaatctccatgcccacgttctttcccaccctgttcccagtcttctgacaaactgtgtacatagcggactcctcctttctcctccgaggtggttttaaaggctttttggtgtatagaagtttgtccatttgtaaaactccggattgcgttcctccccgccttccgccccttcccttccctaaagtgatgggctttctcttttctctttttagtttacccggtttctttttaagtaatgtggaagaaaatggtttattttgtattgtggtattgaatattgtgttcctttttatgaggcaacctgattgtaaacttcatgtaactatagactggaaaaaatgagccgtgccaaagtctcccttctgtttcttcagcacattgacccatagcacacacatacacaccaccaccaacaacgcttgtgaatgtatttttctgttagctgggtttacatgtgatgttttagtgcttttgcaagttcaatttgttagttcctgtatgaaagattgtgggggaaaaataaacgtcgtgccgttagctttttccgtaataacacccttccttctgtaaatacccgttaccatatttatccatttgtaattaaattatggtattaacttgctacagaggaaacaatatttataaagaatgtttcttaactataaatatgtacaattgtgggcataaactgtttcagattttttatttgaaggttttaagtggtttgatcatttcttgtgatgttttgagagtaatgcatacagaaatataataaaatgtgttgaaactgcatgaacataaaaattttcta

SEQ ID NO: 13025 - DNA, 462 bp, Homo sapiens
tgggatctgtgtgatgtttttctcatgattagactgacatagcgtcttgggaggaagagcacatgggtaaagtatcgttttctttgtgtcacatcaaggttacatacatggcttatcagtgatgtgtagccttgaccacccctactgaggtagtattggtcaagtttctctctctttcttggggtgcaagcggggggacctttctatactgtactcttgagaaggaagtcagtatgtgctcccccatccccgtatgatgttatgaaatcagccaggttgatcgtaagcagatttttcaagtgtttcctaccctctaactcttgttaattccttgtagatgtttgttattattgtttaatcattgcttagcaccctatgagcagtctttaagagtatgggtagtggggagtgacagtatgtttttgccccaagcttcttggttgcaaacaaaacaatttgtcc

SEQ ID NO: 13026 - DNA, 629 bp, Homo sapiens
gtccttgggtcctggatcgttctgggattgtttgtatatttctgctcccaagggtgcctggggaagagccactgcgcatgttatctttggtgttactccagtgttgagcagagagctggtcagaggcagcgcatcgcagagagacattaataagggaatcctttgaatccctaagcagcagcagctttcctgagggggccgatgatgccagtgacctctcagggaagtctgggacattgggacccaccctgggggaggagcttgtgggatgtggcttttcttttcatgactaaagtactttgagttgtttgaaatcacctatctcagcatcaagatggttttctcccttttttaagtttttattttaactgaacattttagaaaaacaccccacggataaaaacttgactaaatggcagtgtaagtgccacaccttttgtcagtgttctgggagaaattgaccctcagagccgggtgcggtggctcacgcctgtaatcccagcactttgggaggctgaggcgggtggatcacaaggtcaggagttcaagaccagcctgaccaacatggtgaaaccccgtcttttacgaaacatacaaaaattagctgggcatggtagcgcatgcctgta

SEQ ID NO: 13027 - DNA, 368 bp, Homo sapiens
ggtcgacacgaagtatatttttgcataaaactaaggattttaaaattgtacggtgactttattggaaatgtgaccctttatgccaggaatcagtgagcttttcctataaatggcgagacagtaaacattttagactttgcaggctctaaggtctctgtcacaaccactcaactctgttattgtgtgaaagcactcatagattatatgtaaacaaatgagcatgttcatgttccagcaaacctttatttttttaaaaaaggatgataggcgggcaggcgcagtggctctagcctgtaatcctggcactttgggaggccgaggcaggcggacgacaaggtcaagagatagagaccatccttgctaatatg

SEQ ID NO: 13028 - DNA, 460 bp, Homo sapiens
cacacccatgcgtggggacctgcctggtgccggcagaggccacaggaggccagtgtggttggggcaccgtgaatgaggcagtgtttcccattctcaaatgagacagaggtctgggacatgacattgcagagataccagaggtcaagttatgaagggtcttacaggctactgtgaagactctgctgtttttcagcataggaaataggaaaccattgaaggattttgtgcagaggagtgccatgatctgagttaaattttctaaggatcaccctgatgggtcttttgaaaataggtttggaaggtggagagtcaagagcagaagcagggagaatagttaggaagcttataggtatcataggaaattattatgatagatatatgtaggctctttttatgacagaatcatgtagaaactaagtaattgatgatgactgattacattacttatggaaaatttaaa

SEQ ID NO: 13029 - DNA, 513 bp, Homo sapiens
  misc_feature (315)..(315): n is a, c, g, or t
  misc_feature (492)..(492): n is a, c, g, or t
ataacatttctttctacagatgtatagacatttatggaatgactatctttgaggaaatagatattacttacatagagttaatattttggatgttatgatcttgttggaattagaagctttcagtaatttacatccttaaatagatttctatcttctttttatttccaagatttttctcacaagtttattcccagtacagagacatcattatgttatagaggagcttttttgtgtgatagctcttggcagccagtttggtgctgacggtgagaggaaattagaatctgtttgcaaattgtccaacccaccccctcnacatgaggggcttccattttctgtgttttgtaagggaactgtttccttcatgccgccatgttcctgatattagttctgatttctttttaacaaatgttatcatgattaagaaaatttccagcactttaatggccaattaactgagaatgtaagaaaattgatgctgtacaaggcaantaaagctgtttattaaccttg

SEQ ID NO: 13030 - DNA, 273 bp, Homo sapiens
agccaaatagggaagagggtcagtggatacagattttctgttagcatattacagttagtaataaaaatgtaacattaaatgtacattcaaataatagttgctaaaatattagcagatattgtgattagataataaagatatcttttttattttacttcattacttggtaaataaaggattagttttgacatttctagaccaaacttcatgtttattccttttggtgtttggttgtatgaatacataattagatttgggggtaaagcccagaaa

SEQ ID NO: 13031 - DNA, 942 bp, Homo sapiens
ctgagcaagaccatttttatttacagcacggaaagcagcagaagcatcacatgatactgccagttcctctgccattacatcccacataacacaaagggcccaggtggcagctatgcgggcagttgtgctgcagctgaggaatctaggaccaagccctccataccttttacagcaagtaatgaacaagccagaatccttcccctgaggagttagtagtcatatggttgtctgtctgtgtcaccatgacctacttaattggctatgtgattagctacagaaatggctcagcatcataggacagctaggccttgcattttggcatactcagcaaggatgggtgcagatgctggggcccatggaagactgcctttcccaacagtgggtggtccatttcatccttatcacaatcctgagaagaagatgctactattatcccatttcacaagtgaagaaattgaggttcggtgaaagggaagtaacaaagcaacttgcttaaggtcataagcaacttgcccaaggtcaaaagtaacttgcccaatgttgcaaagctagtagacagtgagcagtgatttaaccctactctgtctgaatgcagggcccaaacaacatacaactgcctcattccatttggcaggaaattgagaaccacaaggaacagatttaaattatgtatctgagagaataattcattgtggttttttgtttgtttgtttttgttttgtttttgagatggagtcacactctgtcacccaggctggagtgcaatggcatggtctcggctcactgcaacctccacctcccaggttcaagtgattctccagcctcagcctcctgagtagctgggactacaggtgtgtgccaccacgcccggctaatttttatatttttagtagagacgaggtttcactatgttggccagactggtctcaaactcctgacctc

SEQ ID NO: 13032 - DNA, 1503 bp, Homo sapiens
tctttttccctgccaaaagagatctgacctcccttcttcatggaatatgtgcacttttcctcagacaaaaagcttaaacttttgtaagaggataaaaatttgagacagaatttaaagtcattaaggcttaattcatgtgtacccagatacctggaacctaccagatgataaggtgatgatgagcagagccttctagaggtctcatgtgaccctgaaacctggcaattcaggggattcatgcactccctgtgcatgagaaatgtcttctggtttctcctcatccattacgggagtgaaattttaacttggcttgtacacaggttgcttatttggctggtgggttcagatattggagtttcacctcaacagagactaaggaacagacctgtgagataaaagccagagagagaaaaaagagctaaagttaacaggtaacattgcccctacagtgggagcttagcctctagagagagagtgggcatcagattctctctgagaaatcttggttcttgatatgtgtgttatgtcaggaaggacttttacatttgggggttattgagcttaacttgaaattaatggcacatctcagattttgtttaagtttcctatttaccctcaatttttaatcttattaagagaaaggagccttagggcagaaccaaattctaactaactgcttaccagatcattagaatttcattctgaaggaaaattcttaaaaatgacacaccaccattttgagtattaacctcttgatataataagggaagtccttcttaaatttaattacctttctttttaaaattttttttttattaaaaaaaagaaaaaaaaaaccatcatctgaagacttacgtggagctggagaatctgctcccaatacaggttagtccatggctgtttgcaggatgcctcagttcttctactcatgagcctctccctagtgctgcttgagtgtccccataacttctggcttcctgaagagcaagtaattcaagagaaagctgggagcaagctaaaatgccatgacctattatcagaagtcaccatcatctatcaatcatattctattcattagaagcaagtcactaagtatagcccacactcaaggatgaaggaaattagtttccacctcctaaaaggaataccaaagaatttatggatatattttaaaaatagcacatgatctgaagttgaagagctcaaggtaattataggtcagggtctgcaagtaggaagggctgaaactagcatcacagctacttctttctattgaaaattttttacagtcctttgaagcggcgtatgaggagagcatccaggaactataatactgggattccatagcctccatttattaatccaagttcaatgagacccaatactaatatttagagaatgttatgagaagctataaaaacaggggagctggaataaatgatgtttaaagttccatccaactctttggattgtggaggttgctgatgacaattcttcagcctc

SEQ ID NO: 13033 - DNA, 836 bp, Homo sapiens
tctttttccctgccaaaagagatctgacctcccttcttcatggaatatgtgcacttttcctcagacaaaaagcttaaacttttgtaagaggataaaaatttgagacagaatttaaagtcattaaggcttaattcatgtgtacccagatacctggaacctaccagatgataaggtgatgatgagcagagccttctagaggtctcatgtgaccctgaaacctggcaattcaggggattcatgcactccctgtgcatgagaaatgtcttctggtttctcctcatccattacgggagtgaaattttaacttggcttgtacacaggttgcttatttggctggtgggttcagatattggagtttcacctcaacagagactaaggaacagacctgtgagataaaagccagagagagaaaaaagagctaaagttaacaggtaacattgcccctacagtgggagcttagcctctagagagagagtgggcatcagattctctctgagaaatcttggttcttgatatgtgtgttatgtcaggaaggacttttacatttgggggttattgagcttaacttgaaattaatggcacatctcagattttgtttaagtttcctatttaccctcaatttttaatcttattaagagaaaggagccttagggcagaaccaaattctaactaactgcttaccagatcattagaatttcattctgaaggaaaattcttaaaaatgacacaccaccattttgagtattaacctcttgatataataagggaagtccttcttaaaaagaaaggtaattaaatttaagaaggtcgacgcggccgcgaatttagtagtagta

SEQ ID NO: 13034 - DNA, 1449 bp, Homo sapiens
tctttttccctgccaaaagagatctgacctcccttcttcatggaatatgtgcacttttcctcagacaaaaagcttaaacttttgtaagaggataaaaatttgagacagaatttaaagtcattaaggcttaattcatgtgtacccagatacctggaacctaccagatgataaggtgatgatgagcagagccttctagaggtctcatgtgaccctgaaacctggcaattcaggggattcatgcactccctgtgcatgagaaatgtcttctggtttctcctcatccattacgggagtgaaattttaacttggcttgtacacaggttgcttatttggctggtgggttcagatattggagtttcacctcaacagagactaaggaacagacctgtgagataaaagccagagagagaaaaaagagctaaagttaacaggtaacattgcccctacagtgggagcttagcctctagagagagagtgggcatcagattctctctgagaaatcttggttcttgatatgtgtgttatgtcaggaaggacttttacatttgggggttattgagcttaacttgaaattaatggcacatctcagattttgtttaagtttcctatttaccctcaatttttaatcttattaagagaaaggagccttagggcagaaccaaattctaactaactgcttaccagatcattagaatttcattctgaaggaaaattcttaaaaatgacacaccaccattttgagtattaacctcttgatataataagggaagtccttcttaaatttaattacctttctttttaaaattttttttttattaaaaaaaagaaaaaaaaaaccatcatctgaagacttacgtggagctggagaatctgctcccaatacaggttagtccatggctgtttgcaggatgcctcagttcttctactcatgagcctctccctagtgctgcttgagtgtccccataacttctggcttcctgaagagcaagtaattcaagagaaagctgggagcaagctaaaatgccatgacctattatcagaagtcaccatcatctatcaatcatattctattcattagaagcaagtcactaagtatagcccacactcaaggatgaaggaaattagtttccacctcctaaaaggaataccaaagaatttatggatatattttatgcaagtaggaagggctgaaactagcatcacagctacttctttctattgaaaattttttacagtcctttgaagcggcgtatgaggagagcatccaggaactataatactgggattccatagcctccatttattaatccaagttcaatgagacccaatactaatatttagagaatgttatgagaagctataaaaacaggggagctggaataaatgatgtttaaagttccatccaactctttggattgtggaggttgctgatgacaattcttcagcctc

SEQ ID NO: 13035 - DNA, 179 bp, Homo sapiens
acaaacactgctttactagcccccgactatataatactgcactgatttagaaacagaaagcaagtcatagcctgcagtgagggaaagaaaagggaagcacttacccattgaggtggggtccacacctgactgtagctggcgtctccagcccagccagaggtcggtgtggaaagccccag

SEQ ID NO: 13036 - DNA, 124 bp, Homo sapiens
aaaagaaaggctttagttatgttctgcttggagcctattggcatggggggagctggaggcaggtgatctaggacaacttcttacatgattagtttagggatttctcaggtaggccctgagttgg

SEQ ID NO: 13037 - DNA, 910 bp, Homo sapiens
gcctggggcagacagcccacatggttaggaaaaagtgagtgaacgcatgtggcccccagaacccctccctgaaattgcagttgatttttattcccaccgtcaggcccacatatctaaagcttcctctgaacgctccttgcagtacacaaaatagaaatgattgacaggcacagagcagcagcaggccccacgctgtacaccagcatctggcactgtgggtcaccaagcaccaactcgatcccctcggagccaggtgtgtgttgagattcaggatttttcagttgcaaaggcaatatgatctctactccacagggcacacggcaccctcagtgctcagcacagcagtgtgcagcagcctggttaacttttctgcagggaagtatgtgaacgttcacaccaagcgtgtcagtcatgtctgtaagtcatctcccaccaacacaggtcaggttttcctgcccaatgagcttggggatggcttgactttggagctctttggatctgtggattttggaattttggatttctgatacccgtttgatcaaagaggcaaccgaggtctaacgggtcaagtgactttcccatatccgtgaaggtcatgaaaagcagggccaggatggtggcctggggtgccttgaatgataagctgggcccttcactgtgcaggcccctctccttcagtccactctgccactgctgtctgccacaccctgctctgatagctcctctctgccaggcttttccctcacatcctcaactcagccaagagctggtttcttccagagagccctgctgtgcagtcagttattggacttctctttttgtgcatgtttgttttcagggtttagctgatcaaagtggtatcgttgtaacaggcagctctaaatagaagtcttcagaagccaaagtgtgt

SEQ ID NO: 13038 - DNA, 520 bp, Homo sapiens
taataagaaactccctcactataaagaactcacagcctagtgagaaagtttgacaaagaaataacccgttgcagtgtagatgtataaaaagtgctgtggcaaacatcgttagaagatctgtgggaggtgcaccttggataggtcacagaaagcttcccagaagtgatgtccaagtggagcctgaaaaggcgagcattgtaattgactagggcttctgtctggagaatgaggtggtcggagatggatgtgggaaagaaagaggtgagtgaaggatttttcagccatcctaaggcaatggggagttagttggcaggttctaaagagagtgacacatcaggtttgtaattgagagaattttctctctgcaaaaaagaaaggggattgatagggaaaggaataacacgtgcatggctgcatgttctgaatggctgtcatagtaaccagaccagaaacaatggtgcttggactaaagtattaacgatgtcaaggaaaagtaggtgcacggttcttttgtttttta

SEQ ID NO: 13039 - DNA, 459 bp, Homo sapiens
  misc_feature (101)..(101): n is a, c, g, or t
cccctggtgttcccccaaaatcattgccaacaaaaaagcaaagcccattttacccctcctaagtaatgtcaagtaaaacaatgaaaggaaaaacctgaaanccttccctgccttaaagagcccattctgaggccctggccatgggttgtcacgccctgtaatctcaacactttgggaggcccaagacgggcgaatcacctgaggtcaggagtttgagactagcctggccaacatggtgaaaccccatctctactaaacatgcgaaaattaggtcccgggtgtgagccacggcacgcagtcataaaggcaatcctggggtgccatcaagaagagatgatgaggcgacagtgacacagcaatgactgccttcagttttatcatcagtcctggatagagaaggtgcaccactgcactctagcctgggcaacaagagtgaagctctgtttccaaaaaaaaaaa

SEQ ID NO: 13040 - DNA, 354 bp, Homo sapiens
ttttttgcctgagggcagaccccagtgagtactaagcagggcagctaaaatgcagatagatgcagtcttaccaaatagaagaataagagggaagcattcagggtaactatagcagctgtaaattgggatcaagggcaggaggatccaagaaaggataaaacaatggaaagggagcccaaaattttatgtataaaactctacctaagtctctggcaattctctgaactatgcatgtgtaagacagacgtcaagcagcccaactaaggccaaaacaactaaacagagatttcacttggtgtctgttttagtgagagatagagattgaatttagccatgttaattactggctaaaac

SEQ ID NO: 13041 - DNA, 361 bp, Homo sapiens
tgctgtatttacctcatgtacttattaaataaataaagtgtcatagaaatctaaaacaggctgggcatggtggcccacctgtagtctcagcactttgggaggccaaggcaggaggattgcttgagcccaggggttcaagaccagcctgggcaacagtggcacttcatctctactaaaaataagtttaaaaaaattagctgggcatagtggcatgtgcctataatcttagctactagggagactgaggtgggaggatcccttgagcccaggagtttgggggttgtaatgagttatgatctacgacactgcactccagcctgggtgacagagtaagaccttgtctcaaaagaagagaaagaat

SEQ ID NO: 13042 - DNA, 375 bp, Homo sapiens
aatccatgcattcataaaagaactcttggtcacctatagagggttctgggaaatgagctcattattttgagaactggtaaatacaaggaaaggatcaaatgtgaatcctacctttcctgtactaactgtaccacagagtaaccaaatagttgacaaaggaagtttctctattatgaagtattcttgctaatacatgattaaggaatgagaattcgagtatttgcacattcgaatgaaatagtggatttaggctaaatgtctaacatcacactaagagaaacaactgggcgcctgctaacaaaagtcctgtcactatcaccaatggtgtcttcttgcaaaaaattccaattataagtgatcaaattacctattagg

SEQ ID NO: 13043 - DNA, 470 bp, Homo sapiens
ccattaattctaaatcaaagcaattaatggtggcttatgcctatacagtcccagcttacttgggaggctgaggtgggaggatcacttgaggccaggagtttgagatcaccttgggcgatctcaacatagtgagaccctgtgtctaagaaaaattttttaaataaaataacgaactgggcatggtgatacacacctctactcccaggactttgggaggctgaggcaggaggctcactcggggccaagagttctggaccagcctgaacaacatagtgagacccctatttctacaaaacaatttttgaaaaaaattagggatgatggcacaggtctgtagtcccagctactaaggaggctgaagtgggaggattgcttgagcccaggaggttgaggctgtagtgaactgtgatggtgccactgcactccagcctgggtgacagggagagagcccatctctttaaaaaaaaaaa

SEQ ID NO: 13044 - DNA, 273 bp, Homo sapiens
ctattttttactattcacatcataactatatttttcctaaaataaatttattagaaaaatacttccttacatcaatactactcctgcttcccaatatagaatattactcaattacactcacaaagcaacagctccttttcaaggtagttcaattttttcagctttttagaacagttagtaaatatgacattatgagtaatactcctctaattttaaaatgaaaaattaggtgttataaattactaacctctttagttattttattaagttcag

SEQ ID NO: 13045 - DNA, 922 bp, Homo sapiens
ttgagggctcttaagattggtacatatacaagggctctgtttgaaagactttggctgccctggcgtcctggctgttttatgcctggtagctctagcggttaaaagctctctctgtcttgccactcctattacccattaccagtacatttgttggagaactttggttgtagaatataaatcccagaaacagagctgtgtgtgcatggttaagttttttagttcatgagagaagggggaaattaaagatcttgactcatacctggccagtacaacattgcacagggaagaaaaatgcaattaggtgcttgctttacagtagaagaaaatattggtaagtgttttacatcgggtcagattctggggattttctaattctgagccgaacttatgtactgtgaaggaaatggtgggtggttttcagaaaatagggaaacttttacatcaaaaactctgtaaagaagtcaaagataaatgtaatctgggaaaaaatattctgtaacattatatatagaaatcctttatgtataaatagcacctgacatcatttaggaaaagaactatttatgatgtagtatactgagaactgtgcacaatgtatggacaggtctagtaaatattagggaaaaagtaatgaaaaaacttgaaaccagcaccgctggtggaaggttatattggttcagctttgctggttggcttatcagaagcttaaattgtgcttttaatttgactgtgaggaacttatcctaataatagcaaaaacttggttaacagatactcttcagtagaaacaaattatagtttaactgttcaataaaatgctatgcagatgttaattttgagatctatatgttttgacatgataatatattaaatcaaataaaaattttataaaattgcatataaagatttgtactaggccggg

SEQ ID NO: 13046 - DNA, 399 bp, Homo sapiens
aatgctaaggacacactgtggctgacccctcttcatcgtgctgctgcctcccgaaacgagaaggtgctggggctgctgctggcacattcagcagatgtgaatgcccgggacaagctgtggcagacaccactgcatgtggctgctgccaaccgggccaccaagtgtgctgaggctctggcacccctgttgagcagcctcaacgtggctgacaggagcgggcgcagtgccctgcaccatgcagtgcatagtgggcatcttgagacggtgaacctgctcctcaacaagggagccagcctgaatgtctgtgacaaaaaggagcggcagcctctgcattgggcagcttttctagatcgatgaacccaatgcttttggaaacacagctttgcacatcgcctgcta

SEQ ID NO: 13047 - DNA, 250 bp, Homo sapiens
tgagccaatgtcaaccagccgaatgacaagggcttcacgccactgcatgtggctgcagtctcgaccaatggcgctctctgcttggagctactggttaataatggggctgacgtcaactaccagagcaaagaagggaaaagtcctctgcacatggctgcaatccatggccgtttcacacgctcccagatcctcatccagaatggcagcgagattgattgtgccgacaaatttgggaacacgccactgcatg

SEQ ID NO: 13048 - DNA, 726 bp, Homo sapiens
aatgctaaggacacactgtggctgacccctcttcatcgtgctgctgcctcccgaaacgagaaggtgctggggctgctgctggcacattcagcagatgtgaatgcccgggacaagctgtggcagacaccactgcatgtggctgctgccaaccgggccaccaagtgtgctgaggctctggcacccctgttgagcagcctcaacgtggctgacaggagcgggcgcagtgccctgcaccatgcagtgcatagtgggcatcttgaggtgaggactgttcccatccaggcccagctggggctttcccttttcttaccttcctactcacgtttccctgcttctgggccctcaagcctgaaggagaagcagcccggatggttatataaacacttaagctgaagcactaaatgaatggtcagactagattaaaattcttaacttggacttcaggaggttgataaaaccttggattttgcgtggaaaatatttgcatacacgcctttctgaagagagtccatgtctttcagcacatttgcaaagacttacaagagtttaagaaccggccgggcacggcggctcacgcctgtaatcccagcactttgggaggcgaaggcgggtggatcatgagatcaggagatcgagatcatcctggctaacatggtgaaaccctgtctctactaaaaatacaaaaaattagccgggtgtggtggcggccgcctgtagtcccagcta

SEQ ID NO: 13049 - DNA, 724 bp, Homo sapiens
aatgctaaggacacactgtggctgacccctcttcatcgtgctgctgcctcccgaaacgagaaggtgctggggctgctgctggcacattcagcagatgtgaatgcccgggacaagctgtggcagacaccactgcatgtggctgctgccaaccgggccaccaagtgtgctgaggctctggcacccctgttgagcagcctcaacgtggctgacaggagcgggcgcagtgccctgcaccatgcagtgcatagtgggcatcttgaggtgaggactgttcccatccaggcccagctggggctttcccttttcttaccttcctactcacgtttccctgcttctgggccctcaagcctgaaggagaagcagcccggatggttatataaacacttaagctgaagcactaaatgaatggtcagactagattaaaattcttaacttggacttcaggaggttgataaaaccttggattttgcgtggaaaatatttgcatacacgcctttctgaagagagtccatgtctttcagcacatttgcaaagacttacaggcgtgagccaccgtgcccagccacatctttttttctaacagaaaaacaaacaaaacaaacaaaaacaaaccttgagtaccatattcttagttctctgtttggctactggaaattctgcgctttgcccatcttgacctctaatagctaaaggaaatgtggttgagaaccactgatagaggaga

SEQ ID NO: 13050 - DNA, 378 bp, Homo sapiens
aatgctaaggacacactgtggctgacccctcttcatcgtgctgctgcctcccgaaacgagaaggtgctggggctgctgctggcacattcagcagatgtgaatgcccgggacaagctgtggcagacaccactgcatgtggctgctgccaaccgggccaccaagtgtgctgaggctctggcacccctgttgagcagcctcaacgtggctgacaggagcgggcgcagtgccctgcaccatgcagtgcatagtgggcatcttgagacggtgaacctgctcctcaacaagggagccagcctgaatgtctgtgacaaaaaggagcggcagcctctgcattgggcagcttttctaggacctccaagtgccctagttctagatcgc

SEQ ID NO: 13051 - DNA, 441 bp, Homo sapiens
atcgatgaacccaatgcttttggaaacacagctttgcacatcgcctgctacctgggccaggatgctgtggctattgagctggtgaatgcctgagccaatgtcaaccagccgaatgacaagggcttcacgccactgcatgtggctgcagtctcgaccaatggcgctctctgcttggagctactggttaataatggggctgacgtcaactaccaggtgcctgaagggataaggcttagaccagtggggagcgaaacttggatctaggggtcctgactgtatctggatagctctcttggggaattatccacttgcttcctagggtaatcagaccttgccagggactcaggaaagagtgggctaagaaggtgccatatgacccttttgtccttagagatatgtccttggaagggaggtagggcattctctgtgctttgcactgga

SEQ ID NO: 13052 - DNA, 237 bp, Homo sapiens
ctattcctccttccatttcctgttgttttacctcctgctcccactctctcttttgtcccctgcccctcaacagaaggtgctggggctgctgctggcacattcagcagatgtgaatgcccgggacaagctgtggcagacaccactgcatgtggctgctgccaaccgggccaccaagtgtgctgaggctctggcacccctgttgagcagcctcaacgtggctgacaggagcgggcgcag

SEQ ID NO: 13053 - DNA, 546 bp, Homo sapiens
tatcatctaccaacagcccttgacttactaattgtagtttattgtgggtgaattaatctgaaatctttatagaatagctaaggctatagtaaatacatgtgaaaaatttaagaacaataacaccagcaatagagaagaaaatggagtgaaaagtgaagccactccatgttaacgtgtgtgttaacataaaactacccgtcaacaggtaactttactctgttgttcctaagtttttaatagtagctgtgtttttaaagtttatgaaccaaacttaaatgcattatgagagcttgataatgaaccagatcttagtaaaacagtattttaacatttggatatactagttgtactatgcttatctcagatccctgtaacactggtcaggctacaacttactaatgactacaaagaactatatacacaatcaggtttatttctgtctcttaaagcaaattgcaaataaaattggttactgcttttaaaaaggtgccaaacaccctaattctttgatttctgtttcacaattatagtaatatgtagagcaaa

SEQ ID NO: 13054 - DNA, 354 bp, Homo sapiens
tctgagtgcacagtcatgtcatttgcttattttatttcttcctttttcaatctttatggcttttcttttttgtcttattgcactggctaggaccactaatgcagtgttgcagaaaacgttcaaaattttattattaaataggatgtttgcagtaggtttttcttacttcccttctatttctaaattgctgagaatttgtatcataaatggatgcttattattgtattattaaattttttttgtctttcaagtaaacgtgatttttctctcttttgttgttttcatagtgaattatgttgacttttgcatgttaaaccactctggaataaaaaaacaatcagttgtgatgtattg

SEQ ID NO: 13055 - DNA, 484 bp, Homo sapiens
agccactattctccagatcccagaatggtagatcaaccaacagcttgcactgtacatctggaaaagctgcagacactcaatgccagcctatgaaagcagcttggaatggggctgtaccctgcaaaggcacaggggcagagctgcccaagaccatgagagtctacttcttccaccagtgtgacctgaatgtgagacatagagtcaaaggagattattttggagctgtaaaattcagtgaataccctgctggattctggacttgcatggggcttttagcccctttgttttgtccaattctcctatatggaatgggaacatcctcatccaatgcctgtaccctcattgtatcttagaagtaattaacttggttttgattttataggccatgctaatcagcattcagttctagattccaatttattctcagtgtgcctgtataacttttctttctatatatatataattaaatttctattacttattt

SEQ ID NO: 13056 - DNA, 290 bp, Homo sapiens
cccgatcatatattaaaacgcatacaaaggtacagtgaatttgatgatggcgcttaaatatagagaacagaatggtgagtcttggggaagagaggaagggttcagaaatcttccatcactccttaaaccaaaataaaatccgcatgcagaatatattaaaagatacacatctttttaagaaatatcacctatactcaaagaaaccttctggaagaatacattaaaaactaatattgccaaacaggacaatttgaaaagacgacgttaacaatgatgactacctgtgcatc

SEQ ID NO: 13057 - DNA, 416 bp, Homo sapiens
caccaaggtctacctggcctcccttctgtgactccagcctactctcttgccactccccacctgctaagcaatgccctggagatgtgtatacaggctcagaatatgctgcacgctctcctaccactgggacttcactggtgagttctcttgtcctaagacactttttcaagcactgctagcctggctaatgcctaggtctcaaacttaggtctccacttcttcaatgtcctttcctgatatcctcccctgcaactgacacgtgggttcagagcccttcctacgtgctccctaggaagacttggctgggaaagaggatttctaccttctgagtcagagcagagaccatttctgtttccttcatccctgttttccttagtatgcaaaagggtcctggcttgtcgtaagcacttggggat

SEQ ID NO: 13058 - DNA, 614 bp, Homo sapiens
ataaaacagaggatactacaggctgggaaagctgcagcaaagggagactagagagagatttgttaaaggatacaaagttacagcttggtaggaggaataatttctggtgttctataccactgtaggacgactatagttaagaacattatattccatttagtttcaaatagctaaaaggagattttgtccccaacaaaaagaaatgataaatatttgaaaccatggatactctaatttctctgatctgaccactataaattatatgtattgaaacattattatgtatctcccaaatatgttcaattcttatgtcgctcaaaaaataaaatttaatttaaaaagtatctgatttttaaagtaaatattttttaaagttttgacatttaaattacttgaatctcattattttgacaataatttaattcttttattgttcaatctgttagtgagatgtgtcataggtattatgtcattagttcaaattcttgtggaaattatagctacattaaaagtgtaacatttttatttagttgtgtacttatttgttaataatacagacattgtatgttatcatactgcaatttacaattaaaatattttctgtagattatttg

SEQ ID NO: 13059 - DNA, 284 bp, Homo sapiens
ctaccacacagatgcaccttgtgtaagccagtcatggaaagacaaatgttgtatgattccactgacatgaggttcctagagtagtgaaagtcctagaaggtagaatggtagttccagcggctgcaagaaggaggaaatgggaggttggtgtttaatgagtgcagagtttgggaagaggaaaaagttctggagacggatggtgcggttggcggcacaacataccagtgtacttattgtcactgaaaagtggtgaattttatgtatgtagtactttaccatagtaa

SEQ ID NO: 13060 - DNA, 466 bp, Homo sapiens
ctcctgcatagccttgttgggaaggaccaacaggtggcttgctggtgcctgagacacaagagactggtgagatgagctgaaaatgggaggtatttaacgggtgcttactctgtgtcatgtgcccttcttgctgctgaacaaagtggataaattccttgcctgaaagtaattaaggaagaggagaatggatactggagaaaatagtgatccatcacagcccactcctttggccctccatgtagccaggctcaccattttttctcagcagtggagcgtaatcaccacataccaacaacccaaagtcctgtctgggtgctgcatccatctccaagtccaggatctctgggtgatgtgctgtcctctccatcaagtgacagggtggctcttgcctcccacacctacatccagtatgtaatgatgttgtagaatggtatatctgcaataaaatctctctttcacaaatgga

SEQ ID NO: 13061 - DNA, 507 bp, Homo sapiens
actaaaaatacaaaaaaattagccaggcttggtggcaggcatctgtaatcccagctactcaggaggctgaggcatgagagtcatttgaacccaggaagtgggggttgcagtgagtcgagatcatgccactgcacaccagcctgggcgacagagcaagactctgtctcaaaaaaaaaaaaaaaagttttaagagactactgacatatatttggaaacattttgcctacatcttaaaataacaatcttaaaagtgtttcactgtctttgataagagacttgaaacccaccaatcgtagataagggatctttctacataactctatcatgcccacaagagaaaatcgaatatctcctactttgaaatttcccttttcccatttctatcttggccaaattacagtccgataaagaatatagtgagtttcatttcttgttgaacttgactgagaactagaaatgtaagatgacgatggaagtactgacttaatgccccaaaggaaagaaaaa

SEQ ID NO: 13062 - DNA, 386 bp, Homo sapiens
tccaagaagctcaaagaacacctgggatattcgttgcaaaaagattatcatctaggcacatagtcatcaggttacctaaagtcaaaatggggccggacatggtggcttatgcctataatcccagcactttgggaggctgagttaggcgattacttgagctcaggagttccagaccagcaacacagtgaaacactgtctctctaaaaaatacaaacagccaggcatagtagtgcatgcctgtaatcccagctacttgggaggctgaggtgagaggattgcttgggtctgggaggtggaagttgcagtgagctgagatcatgccactgcactccagcttgggtgacagagtgagatcctgtctcgacaaaaattaaaaaaataaagtc

SEQ ID NO: 13063 - DNA, 375 bp, Homo sapiens
gatttagacttaaaaaacataacagtatttattcatgtaataagtagacttttatttctgcaaagaatgaaaacatatagtatatactgttttataaggtaatttaaaatttaataatatattgtaatcatttctttatgccaataaatatggaactctggcgtcaatgtcttctcttccaccctccactataacttcattcttgttcagggagtatggtcctccaaatatttgaaaaagtaaattctgccgttggcccctttactctcttcctgtctttgttcagtaatgaaccatctagtactccatcttctcaaccaagcactggtgatgaggtttcatgcatttaggaaaagtgcatggattcttctgatg

SEQ ID NO: 13064 - DNA, 2023 bp, Homo sapiens
  misc_feature (1351)..(1351): n is a, c, g, or t
aggctggtcttgaactcctgacctcaaatgatccatccacctcggccccacaaagtgctggtcacatgcatgagtcactgcacctggccttgggttaggtttcacttcctccattagacatttgacattttattgtagcagctttctgggttaatatctctttgtgattgatagaagtggttggaagaggaagagtagggaaaagtgtgacattacagattaaacagtgaaaatcagtaccataatgactcctttacacccatgagatacgtaccatgatgaccagggctcggtgaaagaaagatttctttttttttttttgagatagtctcactttgttgcccagtctggagtgcagtggcgcaatctcggctcacggcaacctctgcctcccgggttcaagtgattctcctgtctcagcctcccaagtagctgggactacaggtgcatgccaccacacctggctaatttttgtatttttagtggagacagggagtcaccatgttggccaggctggtctcgatctcctgacctcaagtgatccagctgcctcagcctcccaaagtgctgagattacaggcgtgagccactgtgcccagccaaaagaacgatttcttagatggaggacctaggaaccaacagatgggctgctgtattactcttacccctttcattttcctgtatgcttcttcccaaggcagcatcaaattttgaattaatttttgctgcttaataaggacttaaactggtacccaagtcagaaagactctgcctctaattttctggggcttggggatgaagataaagtgttacacccagtgtttgtccaccacagtctgtggggcagagagacccttcctgggactgaattctcaatttgaagcactgttgttcaaagatctcccttctgggtctgacaagaagaaacataacccttatttattgcattcttctggcttacatacattgccctcactaatcaatggacatttcagcatttcattactaattttgagagaaggccaccatggaatttaataaaaatattattgaagagaattgccatcattctccattttccctgaactaccacaagcttctcagaattttagacaaatgtttttcccctcagaactgagcatcagtgctgctttggaaaaacattccatgtgaatactgtggtttcagtgtcaggacctgtacttgggcagttggaagagagtgtgccagttttttattgggagatgggaacaccaatttaattgatgcaattaggttgtaggttttttacagtttttcttttcttttctttttctttttcttttcttttcttttcttttttttttttttngagacataggctggctctgtcacctaggctggaatacaatggcacgatctcggcttactgcaacctccgcctcctaggttcaagcaattctgcctcggcctcccaaatagcagggattacaggcacctgccaccactcccagctaatttttgtgtatttttattagagatgaggtttcgccatgttggccaggctggtcttgaactcctgacctgaggtgatccacccgtctcggcctcccaaagtgctgggattataggcatgagccaccgcacccggccggttttctacagttttctaatactcaagatgttgactttgacaatacttatgtttgtatacttgtaatcttataatggggaaaatgtgtataaagatgttttaatatgtatgtagtttttcaataaatcttaatgccttgaagggaagatttgctgtccagcttgaatgctcattcttgggtcagtgcctgtctaaccttgaggagcatttcattttcaggttatctccatcccagggaaaccctctgggtctaaactgagaagctgctgcaattgtcccctcactggcttctcagtcctagtgaattgatcaagttaacttaccaagtggtttgggttcagctcaggtgaagaggataattgagtttacataaatggtaccttctattat

SEQ ID NO: 13065 - DNA, 771 bp, Homo sapiens
gagaaataagtgtcaactatggaagcagcaccacagaggggccatttttaatagtgcagggagcccaaggtcttcatggtggaggaggagctatctgagcttgggagggaacccgaggtaatggtttgggctaaaaggcatttctggtgtggcaaattgcaaaggacacaggcagaagtggagggctggggaacggtgacaggaggtgaggctggagaggaagggagagcagaggcctcagatcccagaggactgccatcctgggagagccctggcaggagttttcaggagtgtgacagagactgcatcttcgagaagaattaccctggaggtggattaggcctgaggctgctgtgggagtgttccatagcttcctctcctcttctttgtttcacaactcttgtaacttgctttgcaagaaggaatgtgatctcattgttcaattcccacctatgaaaaaaaaaaaaaaaaaaaaaagaaggaatgtgaaattgtggtgtttgttagtttaaagttgttttttattgataaatatcttgaaggactctcccaatgtgaaatccggttcaggatctgtctgcaaactcattgcttttcctggcttgaggtgcccacctctgcctttctcctcacagaccacttgtaattcaagataaacgaatgccagagagtaaaaatggataggcgcaggcagcatgatttagaatgaaagaatattaattggtttcaccggagcgtatattttcattatgagagaagtgactacctaga

SEQ ID NO: 13066 - DNA, 214 bp, Homo sapiens
taattatgaatgggtatggaattttgtcagacatgcgttttgtaccagttgatttgatcagttgatttttcttatttatattgctaaaattgtggattacattaatttttgaatattgaataagctgtgcattcccaaggtaaatcccacttaattctagtatactattatttttatatattactaaattcttaatccttgttgaggattttta

SEQ ID NO: 13067 - DNA, 434 bp, Homo sapiens
atgcacacacgatattctgtttcatccccggacagctctgtgaggtgagtaccaatattattcacatcttacgtaagaggacactgagtctcagagagaggcagagtcactgtccctggtgcacccagctagtaggggctggggtgggtgtgaaggggccagaagcttcccaataagtgcctgaagggcaaggctagggcatttgtagttcgaggctctaccactctgtctaggtcagacctaggaatgctgcaggtgttgcataaatgctcatcagtccaggctggaccgctcttgcccaactaagtgccaagcctggcctggctgatctcacagcctgcattctttgccctacacctgttgtgggaaaacgtaaatcctctcattcttagctaaccttgtgacccccgttctgggccagcaaagatgatccc

SEQ ID NO: 13068 - DNA, 376 bp, Homo sapiens
  misc_feature (5)..(5): n is a, c, g, or t
  misc_feature (29)..(29): n is a, c, g, or t
  misc_feature (38)..(38): n is a, c, g, or t
  misc_feature (69)..(69): n is a, c, g, or t
tagantacctgggcttgccttcctttccnctgtttaancctttttttttgggagatgggagtttccgcnccttgttgccccggggtggagtgcaacggcgcgatctcggccctggtgacagagcgagactctgtcttaaaaaaaaaaaaaagaaagaaaaaagaaaaaaaaaaaaccttcctaataccaaactaatccactttctatgtaaacactgatgttcagccaaggccatgctttatttttacggcacttacaacctaagacacgtagtttaccaaatatttggggatgtatagagaaagatcttcagtggaggctataaaagaacgatttattttagaagtacagaaaaatataaaaactgaagcaagaa

SEQ ID NO: 13069 - DNA, 273 bp, Homo sapiens
ctaatctccaattatccatagtcttgcaaggtattaaaaatgtcttttgtggccgggcgcagtggctcacacctgtaatcccaacactttgggaggccgaggcgggcggttcacgaggtcaggagatcgagaccatcctggctaacacggtgaaaccccgtctctactaaaaatacaaaaaaaattagccgggcgcggtggcgggcgcttgtagtcccagctactcgggaggctgaggcaggaaaatggcgtgaacccagcggggcggagctt

SEQ ID NO: 13070 - DNA, 180 bp, Homo sapiens
tgctcctcttggctggcagggggtcccttccagccctgtcctctctggcctttcctctgtgcacctgcacccctggggtctctctgcctctaaatgtcctcctcgtttatggaccccagtcagacaggattagggcccaccctaagggccatgagttaatttaatcaccactttagtgga

SEQ ID NO: 13071 - DNA, 263 bp, Homo sapiens
tttctatctttttataagggatttctatcctctgatgaaggaatgttttcagtagaaagcggttgctaaggaaaatcaatgaaaatgttatataccaaacaaactcggttcttgtttgcaaaaagagtaaaattatattagaaggagagaattagaagtaacttttctgagtgggaaagatttttcttgtaattatggtaaatttaggcaaagcttgtatatgctttccagaaacaatgagttcagaaggaggcttagaaatg

SEQ ID NO: 13072 - DNA, 720 bp, Homo sapiens
aaaatcttcccattggtttctgttaagagcatttttcattgaaaatataggcctttattgtctttaacattgaagtaactttgtagttttattcaattatgagccagcagatccttagtttaggcccttatattgcatacctaattagaactttccccaaagttcaactgcatgaccttaatgtattggagcacgtcttacaggtggacttaaaactctagaatttcctgagtcgttgttattttccactgaaggtctttccactgtacagcatttcaggcatcatcactatgactcttttttcttgactgttgcttgttttcccactgctcttttccccaatggcgagctgggtgtgccgtctctggggctctcttataggaactcacagtctagcctactgtattttgttttcggagaagtgaaagtgaacactgttatttgccatcatacctccatcaagaatttcacttcactaggaaatatatgggcctttcatggaactgatgattactgtggctgatgtgagtgttgggcttaggatgctcagcatgtggtagttggaagttttgtaatctaagatggaaatgagtgggccatttaaatggccatctaaaggtcacagtgactgtcagaagaagtaagaagagagtataattcttcagctcctggacttccataggaaagcttgaaatcttatacccagattaccaaaaaaaa

SEQ ID NO: 13073 - DNA, 362 bp, Homo sapiens
gaagaagagatctaaccttcttttagagattaaaaggctttcttttttcataaacaaactgcaaagtgttatgtggaatcaaaatacataaaacaggctgggcgcggtggctcacacctgtaattgcagcactttgggtggatcacctgaggtcaggagttcgagaccaggctgaccaatacggtgaaaccctgtctctcctaaaattacaaaaattacacaggcgtggtggcgtgcgcctgtagccccatctacttgggagactgagacaggagaattgcttgaacccgggagctggaggttgcagtgagctgagatcacggcactgcactccagcttggggaacagagcaagactctatc

SEQ ID NO: 13074 - DNA, 1530 bp, Homo sapiens
gttgatctagaggatccgacgctcgctctgtgggggccaggctggggccattggaatcagtatggtggtccccacctgcactccagctccgatggctgatgacgggggccctggcagctgaccccttgcctcagtggggagaccacggctcacgagggcatgagacctgcccagagcatagcccagaggccggcctggattctcacagctccgcccactgggctgtcctgccccaccccctttttagcctgctgggaccatgagtcagaacccagtaggtgtgaggggacccagccagcccaggtggccagtccagcctgagggggtgggggtctcagagattaagtcaggagcccagagtgcgtgcttagggtgcaacccaccccacagcctcccccaaggcacctcccgggggtgcagatgggggcagacgcagggacactcagggtggaccacctgactgggagctgatcatgaggtgtgcgacagcctgagtcagcctcagctcagaggagctgggatggccttgatcttccccctccggccactcaccacagctgggagggtccaaggagaccctcagccactgtcccttcagccctcaccccaccctggctggctctgcccggacagtccttagggacatcttggtcctgcccaccagccaggggacccagaattggagcaggggagcaggacccccagaccctctcataccgcttttgttctgaggccttgagggaacacggggtcttcgcgaccccaggcgagatgatgctgggacagaggagggtcgggctgcatcggggccctcctggtccccactcctgggtgagtcagcatctcagtctccagttctgggtgggcggcaccaggtgtgagcctcagcggtctccttgctggctaaggacctgggatttgctccagtgcccctcgggagggagtaggacacgtgcccagagagcaagcagaccccctccccgaccaacttctgagagcaaagacacctagagctagagattcagcaccccctgagcctcagtttctccactatgaagtgggatccgtgatctcagccttaccagggctgtgaggattaaatggtccagcccagcctggggcctgcctggagtaggcagcctgctcaggatgggctgtggaaggagggctggggtagacctttcaagtccacttgggcatggggagctgagagctagcatgccgtttaacttggcaggaagcaggccgggcgcagtggctcatgcctgtaatcccagcactttgggaggctgaggcgggcggatcacgaggtcaggagatcaacaccatcctggctaacacggtgaaaccccctgtctactaaaaatacaaaaaatcagccgggcgtagtggcgggcgcctgtagtcccagctactcgggaggctgaggcaggagaatggcgtgaacccaggaggcggagcttgcagtgagccgagatcgcgccactgcactccagcctgggggacagagtgagactccatctcaaaaaa

SEQ ID NO: 13075 - DNA, 896 bp, Homo sapiens
ggacccgaggccaggagccagggcccagaagaatgtggccccgtcccagagcaccacccgagacatcaggagcccatcgtgggctagggaagatcctccgggacctaacggcccaggtcttccacccttggccacctccccaggtgatgcctgaagctcaagggactgtgtccaccctcaggccctgcccgtggctctggatcggcggtccccatcagaggcctgggctgagtcctcaggggtcgacgcaggtcctctgggcagcatggggtggtgccgggtggaccccacggtggcctgtgttcgccacgtggccgtgggtcagttcctcgctggaggagacccttccccagacacctgccgggcacccagccaaacccttgaggcctgggaaggtctctggatgccaccctacaccccgcccagactcctctccctgtggttcctggacagaacattccgtcaccacgaaacgaagtttgcccaggccctgccttcaccctgggaaaacccagccgggcatgggaaggaggaatgctgcccgcctgcccgcccagaccagagtcgccccacatgccaggccaggcccgcatcctcctggggcacacgggagccccaggcttcccggcaggaaaagccccccaccgcagaagggctggtctctggtggggagttgctgctgggtggggtgaccacagggcggggttcaggctggggtatttttaatgatgtagttgcatctggtcaccgccccctgccacccccgattctttcctgccctccccaccttgtgacccagactgtggcttgaattaagaatgttttcagataagtacacgcctttgaggttaaaagtatgcctaatgattaaacaccagacagagatccccacagga

SEQ ID NO: 13076 - DNA, 365 bp, Homo sapiens
tgtggcctcccctgaagccatgtctcttcttgtcttcccgccactcttccagcaagctccccccgttggcccacctcatctgcccactgtgcacttggggcatggtgatctttgaccctggtggtgcacccctcaggctggacagggcctgaaggagccgtggttcattgcagggcgtctgagtggaagaggctcagcctcacctccacaccctgaagactcactctctggccctgggctctgttgtgtgcaccgcctgtctgcagggcccagcctgcctcgagcactccctggggacagaagctcctgcgctggcctctcctgtcacctagccaccgggcatcctggagtgcagccctcatgcc

SEQ ID NO: 13077 - DNA, 2435 bp, Homo sapiens
  misc_feature (897)..(897): n is a, c, g, or t
ttttctttcaactcgatgagaggaggactcctcctgggcctggtgcttcgaggtccagacgagcagacactggcgcctgtgaccctgcagcggacgcccttcaaagtccgcgtggccgcatttggaagcctgggcggcgtggagacggcgccttcagcttgagataaatgtggccccgtcccagagcaccacccgagacatcaggagcccatcgtgggctagggaagatcctccgggacctaacggcccaggtcttccacccttggccacctccccaggtgatgcctgaagctcaagggactgtgtccaccctcaggccctgcccgtggctctggatcggcggtccccatcagaggcctgggctgagtcctcaggtcaagaagtggcgctgacctggagcccctgcctggggctggccttcctcacagtgagctgggcctcctgccatcctggctctggagggcgtctgagtggaagaggctcagcctcacctccacaccctgaagactcactctctggccctgggctctgttgtgtgcaccgcctgtctgcagggcccagcctgcctcgagcactccctggggacagaagctcctgcgctggcctctcctgtcacctagccaccgggcatcctggagtgcagccctcatgccccgaggccacctgccatcgcccaggatgactcaagatgccacctgggtaagtctagcccagaacgagaaaggccgaatgagggaaactgagtcacatctgcttctcccaggtggggctgggggcccagggggagggcacttgtggtgacgaccagggtggactaggggcctgtctcccattctgtctctgccacacgttatagagcccgacctgtgggctgggtccccccatggtgagcactgnaggctctaggaggctgaagtcctggcctgggggacctgtgggggccaggctggggccattggaatcagtatggtggtccccacctgcactccagctccgatggctgatgacgggggccctggcagctgaccccttgcctcagtggggagaccacggctcacgagggcatgagacctgcccagagcatagcccagaggccggcctggattctcacagctccgcccactgggctgtcctgccccaccccctttttagcctgctgggaccatgagtcagaacccagtaggtgtgaggggacccagccagcccaggtggccagtccagcctgagggggtgggggtctcagagattaagtcaggagcccagagtgcgtgcttagggtgcaacccaccccacagcctcccccaaggcacctcccgggggtgcagatgggggcagacgcagggacactcagggtggaccacctgactgggagctgatcatgaggtgtgcgacagcctgagtcagcctcagctcagaggagctgggatggccttgatcttccccctccggccactcaccacagctgggagggtccaaggagaccctcagccactgtcccttcagccctcaccccaccctggctggctctgcccggacagtccttagggacatcttggtcctgcccaccagccaggggacccagaattggagcaggggagcaggacccccagaccctctcataccgcttttgttctgaggccttgagggaacacggggtcttcgcgaccccaggcgagatgatgctgggacagaggagggtcgggctgcatcggggccctcctggtccccactcctgggtgagtcagcatctcagtctccagttctgggtgggcggcaccaggtgtgagcctcagcggtctccttgctggctaaggacctgggatttgctccagtgcccctcgggagggagtaggacacgtgcccagagagcaagcagaccccctccccgaccaacttctgagagcaaagacacctagagctagagattcagcaccccctgagcctcagtttctccactatgaagtgggatccgtgatctcagccttaccagggctgtgaggattaaatggtccagcccagcctggggcctgcctggagtaggcagcctgctcaggatgggctgtggaaggagggctggggtagacctttcaagtccacttgggcatggggagctgagagctagcatgccgtttaacttggcaggaagcaggccgggcgcagtggctcatgcctgtaatcccagcactttgggaggctgaggcgggcggatcacgaggtcaggagatcaacaccatcctggctaacacggtgaaaccccctgtctactaaaaatacaaaaaatcagccgggcgtagtggcgggcgcctgtagtcccagctactcgggaggctgaggcaggagaatggcgtgaacccaggaggcggagcttgcagtgagccgagatcgcgccactgcactccagcctgggggacagagtgagactccatctcaaaaaa

SEQ ID NO: 13078 - DNA, 501 bp, Homo sapiens
agtccattctactcttccaaagtgttctattcttaacaaataattccaaggctcatctaattactacattggctcaaaaatccaggacatcttctgaatcaggcctagctgcagatgaggctcctcgggtgcagtttgttgggaacagattatcaagtacatttcctctacagtttaagacctgtgaactaaaaactcaagttatctatcagccacctcatcctctcatctccctcacattgtaaaatggtgcttgaggaataatgcaatagatagtcttactcaaaaaggagtggggtagagtaggaggcacatggtagtcaccatctgtagaaattctggtatctaccggtcatcactgccccagggtcaaaagatacactttgattaagatccagttttgctctgcctggctgtgattctgccctctgagtcatcctttctcttccataagaaatggcccatatgtgccttagggtagctttcttttttaaaaaaaaa

SEQ ID NO: 13079 - DNA, 533 bp, Homo sapiens
caaactgtttgcacgaggatggctgttcccatttcatacttttaaggaaaggattttggctggcagaaggcacttcccccctccagctggagggaagaagtatacagagatctagaacttgaaagtgcattgtgaacatggaacagcaaggggtttcgtgctgctgagaggtagtctgggtttagctgaagagggaacacaggtttgctcctcatttgttcagtcaagaagtattgaccgggcgcggtggcccacacctgtaatcccaacactgggaggcctaagtaggcagatcacttgagtccaggagttcgagaccagcctgggcaacatggcgaaaccccgtctctacaaaaaaaatgtaaaaaattagctgggcctggtggcacttatctgtagtcccagctactcaggaggctgagatgggaaggtcttgccttgagcctggaggcggagattgcagtgagccgagatcacgccactgccctccagcctgggtgacacctgggtgacagcaagatcctatctcaaaa

SEQ ID NO: 13080 - DNA, 422 bp, Homo sapiens
gtgaacatcctgtagcaaaggactgagcaaatgatgcggtggggcctgaacctgggcgttgtcagaggcgtgggaaggagtctgaagtctcattgatagtttcttgatgtcagtagttccgcaagttcccagaaaaaagaggaagccttcagtgaaactttttttaaaaaaaaattgattgattgacaaggtcttgctctgtcacccaggctacagtacagtggcacgatcatggctcactgcagccttgacctcctgggctcaagaaattctcctgctcccgcctcccaaatagctgtgactacaggcacacaccaccatgcctggctaatttttaaaatttttataaaaacagagtctcactgtgttgcccaggcttgtcttgaactcctggcctcaagagatcttcctgccttggcctc

SEQ ID NO: 13081 - DNA, 248 bp, Homo sapiens
cctcaacaggcccccagggttggctgtttcctgctttgtgcctgtcagaaggggaacgctgtgctcctaggaacctggaacagattctccctcacagtctcagaaggaatcaaccctgccaacaccttgatgttggactcccagcctccagaactggaagacatacatttctgttgttgaagcccctagtctgtggtactttattatggcagccctcccaaacaaatccagagatgaggcccaggacc

SEQ ID NO: 13082 - DNA, 557 bp, Homo sapiens
tcaattacatctttaaccatgaccatagttaacttttccatagttaattgcttaattatgatacattttctaaaagctcttgataaagaagtaaaatcctagaatggcgtatcttcaaggaggttcacagaaaggatgaaaagaaccctgacaagcactcttgaaaacaggtttctgataacttaaagatcacattatttggattaagaattcccaaaactctaatgaagagactgactgggttataaaacttctaacccaagcaagacaagaattaattgaataccaagaaaacactttgccagattttcatgctaaatcagctctcactaaaatgttttaagtatacaatttaaataaacttctatggtccaattcaaattacctatgatggcccacctaataaacagtgctatacatctgaattgaaaaacaaaattggtttttgagaggatctaaattcagtattaagcatatactcatggagagcctaaatggccacctggtccttccaaagtccttcaagctttcattgttaaaagttctgtatgccatca

SEQ ID NO: 13083 - DNA, 450 bp, Homo sapiens
aggcaggaatgtggagagaagaaagctacctgacaagggaatctcaggatacaaggaaaacaccaaggaatgtaaatctctgtttaccacaagccctctgtctccacaagttctgtgtccagaactgaaggcagatccaaatacaatattcatgggatgcaaattcccatgtatgccaagagataactgctttattggaggcctagtggggaactgaaactcccactcctgcttagcaggaatgagaagccccctttcagaggtcaacagaagctgagttaagaaacctgaacttttaccctacctggcagtaatgaagcgacacccaccttcgtctgtgaggatggtgtgagatgaaggtagctaaaacaaaaggtttaaataagattcagagtctcatcatattgaaatgtccatatttcagtggaaaattactcatcatacaaaaac

SEQ ID NO: 13084 - DNA, 925 bp, Homo sapiens
ttgagcatctccactggctgtgacaaaaccgctgtgctcacctttgacagagctctcctgaccaggtgggcaaagcctggaaggtcaagttccctggagaacgtcaagcttacttgacaagggtgtaaagtggggataaccgtggtatcttccgtgaaaactcaccctctcactctcatccatctcaggctctttatcactgcattgagatctgacagtctcatgtttgtctctgtctcattctctttctctctttcaccgtttctctgtctctgtatatttctctttgtctctgtgtctctgcctccctatctctcttccctgagccctcagcctgcccctctcattctccttggctggaaatgtatagacctatacaggcataaagaaaatgttcattcccactttgctgtgtctactttggggagacagctgtcaccctgagaatttcctaatcctaagaacttccattagcaaggtcaggttgccctttaggttgaggacaaggtgagtctatcccctatccccatagcttttcccaaatccctcaagcctcactttttctgagccttcacaacttttcatgctgctacagcggagtttggcccctgctagaaaagaaaggacctaatattcagttcaaagccagcaaaaacacctgtgttgagtgccctgctacttgagagggtaagggagatggaaggggagtacaaaagtgcaggctggaaaagagcttcagtgatcctggagagttagaggctgttgggtccatggcagggagcagaagtaaagcttgagtgacagctgtcattatacagaggcacacgaattcgctgccttaggccactgcctggtgggtctgagcagtttggagctttgggactagaggcacagttggactctaccctcaccccaaaggaaaaag

SEQ ID NO: 13085 - DNA, 327 bp, Homo sapiens
ggaattactagacagagactttaaaatatcttccatagtatgttcaaaagcaaaaggaaaaaatgaaccaaggactaaagaaaatcaggaaaacaatatacgaacaaaataagaataccaacaaagagacaggaattatgaaaaggaaccaagcagaaattctggagctggaaaacataatgactgaattcaaaaattcactggaaggattaagtcaatcttgacgcagaagaacaaaattagagaatttataatatcaggcttcaagacttattctaaagctacaacactcaagacagtgtgcaagtgtataaaactgaactagga

SEQ ID NO: 13086 - DNA, 810 bp, Homo sapiens
ctgcatccgcgccctgaatctgaaattggtcgtcctgccacgccgcctcaccgcggtataaggtcgtcccatcctgaatggccggtgcgcagactcaattgcgactttgaggctgtcagccgccacccggcaaccttccagtgaacaggattctgggtttctcaaagctgtaattggagggccactccagaggtgttaaagctccagcacttcgagcctgcctcgtgggaaagtcttaggctgagtctgtaggtgtctgcagttaagaagccagcggtctgcatatgattgctcaggggtggtggctgggtccaacagcattcactacaggcctgccttgaataccacctagcgcagtgctccgcatatcacaggggctggaaacctaacaatttcacttcctagacaacttgctaaaagtcacctaaagacagtctggttactgccaaagatatgctttcaaataagatttggataaagaagggaggtagatgccttttttcagcagtggagtgatgtctagaccagtagatgtacgcatctaagtgaattcatcaccagcaacaatttccagaaacttcctgacctccagattgcagcttcattagtgtgagtttaaagccaactagatgccattctcagattccacgcatatggccaagggtccaggaaataagaagaaacagggttgaggggttggtgttatggggcatttacttgaattttctatgctataattgtctcatctttaaaacggtgataataataaaattgtcagttattaaataaattaacacagtgaaaaaaaaa

SEQ ID NO: 13087 - DNA, 588 bp, Homo sapiens
agctttggattcataagctcagtaaattaaggaatttcacattatgaactcaatttgagatgggttggactggtgatacctggaaggggtaaatgagaacccactctggaggcactttacgcctgagggagcatccacaaataatttttcaggggctggaaacctaacaatttcacttcctagacaacttgctaaaagtcacctaaagacagtctggttactgccaaagatatgctttcaaataagatttggataaagaagggaggtagatgccttttttcagcagtggagtgatgtctagaccagtagatgtacgcatctaagtgaattcatcaccagcaacaatttccagaaacttcctgacctccagattgcagcttcattagtgtgagtttaaagccaactagatgccattctcagattccacgcatatggccaagggtccaggaaataagaagaaacagggttgaggggttggtgttatggggcatttacttgaattttctatgctataattgtctcatctttaaaacggtgataataataaaattgtcagttattaaataaattaacacagtgaaaaaaaaa

SEQ ID NO: 13088 - DNA, 547 bp, Homo sapiens
cccagacatcaaagctgagctttctttgtctccggcagcctgggccactccagaggtgttaaagctccagcacttcgagcctgcctcgtgggaaagtcttaggctgagtctgggctggaaacctaacaatttcacttcctagacaacttgctaaaagtcacctaaagacagtctggttactgccaaagatatgctttcaaataagatttggataaagaagggaggtagatgccttttttcagcagtggagtgatgtctagaccagtagatgtacgcatctaagtgaattcatcaccagcaacaatttccagaaacttcctgacctccagattgcagcttcattagtgtgagtttaaagccaactagatgccattctcagattccacgcatatggccaagggtccaggaaataagaagaaacagggttgaggggttggtgttatggggcatttacttgaattttctatgctataattgtctcatctttaaaacggtgataataataaaattgtcagttattaaataaattaacacagtgaaaaaaaaa

SEQ ID NO: 13089 - DNA, 319 bp, Homo sapiens
aattcctatatatgctatctgagaagacatttaatcaaattcatcattgattgaaaatgatcttaaaaatagaaataaacgggtatatctccagtaccaaaaagtacatcatggttagggaactagaagcattctcactaaagtcaagataatagtttaaagggtgctgacgccttgggccagctggttccactttcacacatactgtctttgttatataaaaacgtgtacagcacgagggaaggatagaaggctgttcatcccatgaaatgagatgaattatataccttgttacatgttatacaatgtgatattaaaa

SEQ ID NO: 13090 - DNA, 293 bp, Homo sapiens
gtggtgatgttggtataaacaaacctactgcactgctagtcatataaaagtatagcacacacagaaggtataggacataatactcaataatgataataaatgactatattactgatttatgtatttattttttattgctatttcagagcatagtcattctacttatatgttaactgtaaaacagcatcagacaagtccttcaggaggtatttcagaagaaggcattgttgtcctaggagatgagagctccatgcatgttatttaccctgaagaacttctagtcagacaaggtg

SEQ ID NO: 13091 - DNA, 2987 bp, Homo sapiens
cccctccctcccagtcagcctccgccgcagcccaggaagccagccgggacgccgccgccccggaccccgcgccctaacctccacctcgggggcctgcacccccagattgaatcgggaattccggaaacccgagcctggaaccctgatctgggaccagcaccccgagatccggccgtggaaccccaagatctggagcctgaaccccagtatatggggctggaatctcaacatcggtcactgggacctcaatatttggagccggaaccccacaatttggaacacagaccccaatatttggagcagaaccccaagatttgacatctaaaacctcaagcctggagctgaactctgaattctgggcctgggaccttgaaatctgggactggatttccagtactgtaccctggaacccactcttggggacctgaaccctgggattcaggcctcaaattccaagatctggactgtgggattccaaggggcctgaacccgagtttgggcctgaagtccttgctgcagacctgagtgcttaaatctggggcttgagacctcccaatcttgactcagcaccccaatatctgaatgcagaaccccgggatcggatctcagactctaaaccccaccgtttggctgcttagcatcccaagactggacctgggagaccctgaccctgaacaacccaaactggacccgtaaaactggaccctagaggcccaatatttaggggtctggaaccccgagtattaaggtctggagactccgttgccacagatttgagccgagtcaggacacagtccctctacagaagccttggggacaggaaaagcatgaccagatgctccctccagagccctgacctctgactcccctggagctaggactctgctccctggggctgcttctagctcaggacacccctgcccgcgatggccatcctcccgttgctcctgtgcctgctgccgctggcccctgcctcatccccaccccagtcagccacacccagcccatgtccccgccgctgccgctgccagacacagtcgctgcccctaagcgtgctgtgcccaggggcaggcctcctgttcgtgccaccctcgctggaccgccgggcagccgagctgcggctggcagacaacttcatcgcctccgtgcgccgccgcgacctggccaacatgacaggcctgctgcatctgagcctgtcgcggaacaccatccgccacgtggctgccggcgccttcgccgacctgcgggccctgcgtgccctgcacctggatggcaaccggctgacctcactgggcgagggccagctgcgcggcctggtcaacttgcgccacctcatcctcagcaacaaccagctggcagcgctggcggccggcgccctggatgattgtgccgagacactggaggacctcgacctctcctacaacaacctcgagcagctgccctgggaggccctgggccgcctgggcaacgtcaacacgttgggcctcgaccacaacctgctggcttctgtgcccgccggcgctttttcccgcctgcacaagctggcccggctggacatgacctccaaccgcctgaccacaatcccacccgacccactcttctcccgcctgcccctgctcgccaggccccggggctcgcccgcctctgccctggtgctggcctttggcgggaaccccctgcactgcaactgcgagctggtgtggctgcgtcgcctggcgcgggaggacgacctcgaggcctgcgcgtccccacctgctctgggcggccgctacttctgggcggtgggcgaggaggagtttgtctgcgagccgcccgtggtgactcaccgctcaccacctctggctgtgcccgcaggtcggccggctgccctgcgctgccgggcagtgggggacccagagccccgtgtgcgttgggtgtcaccccagggccggctgctaggcaactcaagccgtgcccgcgccttccccaatgggacgctggagctgctggtcaccgagccgggtgatggtggcatcttcacctgcattgcggccaatgcagctggcgaggccacagctgctgtggagctgactgtgggtcccccaccacctcctcagctagccaacagcaccagctgtgaccccccgcgggacggggatcctgatgctctcaccccaccctccgctgcctctgcttctgccaaggtggccgacactgggccccctaccgaccgtggcgtccaggtgactgagcacggggccacagctgctcttgtccagtggccggatcagcggcctatcccgggcatccgcatgtaccagatccagtacaacagctcggctgatgacatcctcgtctacaggatgatcccggcggagagccgctcgttcctgctgacggacctggcgtcaggccggacctacgatctgtgcgtgctcgccgtgtatgaggacagcgccacggggctcacggccacgcggcctgtgggctgcgcccgcttctccaccgaacctgcgctgcggccatgcggggcgccgcacgctcccttcctgggcggcacgatgatcatcgcgctgggcggcgtcatcgtagcctcggtactggtcttcatcttcgtgctgctaatgcgctacaaggtgcacggcggccagccccccggcaaggccaagattcccgcgcctgttagcagcgtttgctcccagaccaacggcgccctgggccccacgcccacgcccgccccgcccgccccggagcccgcggcgctcagggcccacaccgtggtccagctggactgcgagccctgggggcccggccacgaacctgtgggaccctagccaggcgcccccccctctaagggtcctctggccccacggacagcaggacccggacaccctgtgggacctggcctcaaactcaccaaatcgctcatggtttttaaaactctgatggggagggtgtcggggacaccggggcaaaacaagaaagtcctatttttccaagcttgggcg

SEQ ID NO: 13092 - DNA, 398 bp, Homo sapiens
acagctgctgtggagctgactgtgggtcccccaccacctcctcagctagccaacagcaccagctgtgaccccccgcgggacggggatcctgatgctctcaccccaccctccgctgcctctgcttctgccaaggtggccgacactgggccccctaccgaccgtggcgtccaggtgactgagcacggggccacagctgctcttgtccagtggccggatcagcggcctatcccgggcatccgcatgtaccagatccagtacaacagctcggctgatgacatcctcgtctacaggtgcagggtccaggcactggggtagcttgggtgggggagtgaggcaaggggagggttgagggtacacctactaataccctacaccgaagcacaactgataagtgatgc

SEQ ID NO: 13093 - DNA, 422 bp, Homo sapiens
tgctagataactgtttctttccatatgtcaaaaaagccagcctgcagatttttaaaattctccttacggtgactgatgttgtgcaaagttcttttaaagagtaccactgactggcccatgtcttttgctcatgttccctgtatggcttcatgtgagtacttctgaagaaagccactattattgatataaagcagttctttattcccaacccctaaccattggcacagtttatataatgtgggtcagaaccatttgtgattttctgttatgagggccagagtttgagattttaaaccattcattcaaagaaacttaagaaagacacagttaaacaccttagaaagatacattttcatctaactagcctaattacgagctcagctaaaaaaggtacaggatcctctagaagaatcgtgctgtat

SEQ ID NO: 13094 - DNA, 177 bp, Homo sapiens
tactactatacgggtgcttttagacgacagaagggtgccccgtctgacacccctggggttgctgagggaacggttggagtggggatcggcctgcgaaaggatactgtgaaatcactaattaactaataaacctgtctcaagttgaggatttgaagaagaacacagaagtcgcatcga

SEQ ID NO: 13095 - DNA, 142 bp, Homo sapiens
tactactatacgggtgcttttagacgacagaagggtgccccgtctgacacccctggggttgctgagggaacggttggagtggggatcggcctgcgaaaggatactgtgaaatcactaattaactaataaacctgtctcaagt

SEQ ID NO: 13096 - DNA, 649 bp, Homo sapiens
cgcccggctcctcctccacgcgcggcctggcggcggcggccactctaaccagcgcaaaatgtccctggaacaggaggaggaaacgcaacctgggcggctcctaggacgcagagacgccgtccccgccttcattgagcccaacgtgcgcttctggatcaccgagcgccaagtacggcccgggcccggcgcgactaggggcagggagggggcgggccgggccgcgtggagtcgggctgacccgggtgaccttggccaggccacgtgggcgccccctgtctccgtttcctcctctcggagttgtgccgggaacgcgcaccaccggccttcaccccttagggcgcgggaggggacgcaggggaaatcgaagctgccagatgcccacgaccacaacgtcaccctccagattgccctctcggaggggcccagtccgcgcaggtggctgctccctactgcctgagctgtggctgagcagcagattggggagaaacaggctctcgcaccttgtcctttattcgacgatttcttcaatggacagaattattagatcctacaaatgtgttcatttcagttgtaagtattgttttcagagctaatgaatttcacattttattttgaaacttgaagtctgtgtgtcccttttttttttttt

SEQ ID NO: 13097 - DNA, 1503 bp, Homo sapiens
cgcccggctcctcctccacgcgcggcctggcggcggcggccactctaaccagcgcaaaatgtccctggaacaggaggaggaaacgcaacctgggcggctcctaggacgcagagacgccgtccccgccttcattgagcccaacgtgcgcttctggatcaccgagcgccaatcctttattcgacgatttcttcaatggacagaattattagatcctacaaatgtgttcatttcagttgaaagtatagaaaactcgaggcaactattgtgcacaaatgaagatgtttccagccctgcctcggcggaccaaaggatacaggaagcttggaagcggagtcttgcaacagtgcatcccgacagcagcaacctgatccccaagctttttcgacctgcagcgttcctgcctttcatggcgcccacggtatttttgtcaatgacgccactgaaagggatcaagtccgtgattttacctcaggttttcctctgtgcctacatggcagcgttcaacagcatcaatggaaacagaagttacacttgtaagccactagaaagatcattactaatggcgggagccgttgcttcttcaactttcttaggagtaatccctcagtttgtccagatgaagtatggcctgactggcccttggattaaaagactcttacctgtgatcttcctcgtgcaagccagtggaatgaatgtctacatgtcccgaagtcttgaatccattaaggggattgcggtcatggacaaggaaggcaatgtcctgggtcattccagaattgctgggacaaaggctgttagagaaacgctagcatccagaatagtgctgtttgggacctcagctctgattcctgaagtcttcacctacttttttaaaaggacccagtatttcaggaaaaacccagggtcattgtggattttgaaactgtcttgtactgtcctggcaatgggactgatggtgccattttcttttagtatatttccacagattggacagatacagtactgtagtcttgaagagaaaattcagtctccaacagaagaaacagaaatcttttatcacagaggggtgtaggcgtgagttttaggtgaatttatgtggttcctgcttgaaaaccttcccctctccaggttcggtttagagaactttgccacaggtcttctggggaccccagaggtgtctgtgctgacaaggcgacttcagattccatactgagatcgttcccaggctggcgtctctggggtttttaaggctggctggagaagacagtgggagggtgccccgtctgacacccctggggttgctgagggaacggttggagtggggatcggcctgcgaaaggatactgtgaaatcactaattaactaataaacctgtctcaagttgagtagctgggactacaggcatgtaccagccaccacgtccagctaatttttgttttgctttttttaagtagagatggggtttcaccatgttggccaggctgtcatctcctgtccccgcga

SEQ ID NO: 13098 - DNA, 1417 bp, Homo sapiens
cgcccggctcctcctccacgcgcggcctggcggcggcggccactctaaccagcgcaaaatgtccctggaacaggaggaggaaacgcaacctgggcggctcctaggacgcagagacgccgtccccgccttcattgagcccaacgtgcgcttctggatcaccgagcgccaatcctttattcgacgatttcttcaatggacagaattattagatcctacaaatgtgttcatttcagttgaaagtatagaaaactcgaggcaactattgtgcacaaatgaagatgtttccagccctgcctcggcggaccaaaggatacaggaagcttggaagcggagtcttgcaacagtgcatcccgacagcagcaacctgatccccaagctttttcgacctgcagcgttcctgcctttcatggcgcccacggtatttttgtcaatgacgccactgaaagggatcaagtccgtgattttacctcaggttttcctctgtgcctacatggcagcgttcaacagcatcaatggaaacagaagttacacttgtaagccactagaaagatcattactaatggcgggagccgttgcttcttcaactttcttaggagtaatccctcagtttgtccagatgaagtatggcctgactggcccttggattaaaagactcttacctgtgatcttcctcgtgcaagccagtggaatgaatgtctacatgtcccgaagtcttgaatccattaaggggattgcggtcatggacaaggaaggcaatgtcctgggtcattccagaattgctgggacaaaggctgttagagaaacgctagcatccagaatagtgctgtttgggacctcagctctgattcctgaagtcttcacctacttttttaaaaggacccagtatttcaggaaaaacccagggtcattgtggattttgaaactgtcttgtactgtcctggcaatgggactgatggtgccattttcttttagtatatttccacagattggacagatacagtactgtagtcttgaagagaaaattcagtctccaacagaagaaacagaaatcttttatcacagaggggtgtaggcgtgagttttaggtgaatttatgtggttcctgcttgaaaaccttcccctctccaggttcggtttagagaactttgccacaggtcttctggggaccccagaggtgtctgtgctgacaaggcgacttcagattccatactgagatcgttcccaggctggcgtctctggggtttttaaggctggctggagaagacagtgggagggtgccccgtctgacacccctggggttgctgagggaacggttggagtggggatcggcctgcgaaaggatactgtgaaatcactaattaactaataaacctgtctcaagttgaggatttgaagaagaacacagaagtcgcatcga

SEQ ID NO: 13099 - DNA, 1838 bp, Homo sapiens
cgcccggctcctcctccacgcgcggcctggcggcggcggccactctaaccagcgcaaaatgtccctggaacaggaggaggaaacgcaacctgggcggctcctaggacgcagagacgccgtccccgccttcattgagcccaacgtgcgcttctggatcaccgagcgccaagtacggcccgggcccggcgcgactaggggcagggagggggcgggccgggccgcgtggagtcgggctgacccgggtgaccttggccaggccacgtgggcgccccctgtctccgtttcctcctctcggagttgtgccgggaacgcgcaccaccggccttcaccccttagggcgcgggaggggacgcaggggaaatcgaagctgccagatgcccacgaccacaacgtcaccctccagattgccctctcggaggggcccagtccgcgcaggtggctgctccctactgcctgagctgtggctgagcagcagattggggagaaacaggctctcgcaccttgtcctttattcgacgatttcttcaatggacagaattattagatcctacaaatgtgttcatttcagttgaaagtatagaaaactcgaggcaactattgtgcacaaatgaagatgtttccagccctgcctcggcggaccaaaggatacaggaagcttggaagcggagtcttgcaacagtgcatcccgacagcagcaacctgatccccaagctttttcgacctgcagcgttcctgcctttcatggcgcccacggtatttttgtcaatgacgccactgaaagggatcaagtccgtgattttacctcaggttttcctctgtgcctacatggcagcgttcaacagcatcaatggaaacagaagttacacttgtaagccactagaaagatcattactaatggcgggagccgttgcttcttcaactttcttaggagtaatccctcagtttgtccagatgaagtatggcctgactggcccttggattaaaagactcttacctgtgatcttcctcgtgcaagccagtggaatgaatgtctacatgtcccgaagtcttgaatccattaaggggattgcggtcatggacaaggaaggcaatgtcctgggtcattccagaattgctgggacaaaggctgttagagaaacgctagcatccagaatagtgctgtttgggacctcagctctgattcctgaagtcttcacctacttttttaaaaggacccagtatttcaggaaaaacccagggtcattgtggattttgaaactgtcttgtactgtcctggcaatgggactgatggtgccattttcttttagtatatttccacagattggacagatacagtactgtagtcttgaagagaaaattcagtctccaacagaagaaacagaaatcttttatcacagaggggtgtaggcgtgagttttaggtgaatttatgtggttcctgcttgaaaaccttcccctctccaggttcggtttagagaactttgccacaggtcttctggggaccccagaggtgtctgtgctgacaaggcgacttcagattccatactgagatcgttcccaggctggcgtctctggggtttttaaggctggctggagaagacagtgggagggtgccccgtctgacacccctggggttgctgagggaacggttggagtggggatcggcctgcgaaaggatactgtgaaatcactaattaactaataaacctgtctcaagttgagtagctgggactacaggcatgtaccagccaccacgtccagctaatttttgttttgctttttttaagtagagatggggtttcaccatgttggccaggctgtcatctcctgtccccgcga

SEQ ID NO: 13100 - DNA, 1971 bp, Homo sapiens
cgcccggctcctcctccacgcgcggcctggcggcggcggccactctaaccagcgcaaaatgtccctggaacaggaggaggaaacgcaacctgggcggctcctaggacgcagagacgccgtccccgccttcattgagcccaacgtgcgcttctggatcaccgagcgccaagtacggcccgggcccggcgcgactaggggcagggagggggcgggccgggccgcgtggagtcgggctgacccgggtgaccttggccaggccacgtgggcgccccctgtctccgtttcctcctctcggagttgtgccgggaacgcgcaccaccggccttcaccccttagggcgcgggaggggacgcaggggaaatcgaagctgccagatgcccacgaccacaacgtcaccctccagattgccctctcggaggggcccagtccgcgcaggtggctgctccctactgcctgagctgtggctgagcagcagattggggagaaacaggctctcgcaccttggtaagctcagccactttcggtgagacccccgaggctttgggaagccacccttgggcaggacataagcaggacttatctccctgcagcgtctagggcagcaccgtccaatagaaatatgatgtgagccttacagtcctttattcgacgatttcttcaatggacagaattattagatcctacaaatgtgttcatttcagttgaaagtatagaaaactcgaggcaactattgtgcacaaatgaagatgtttccagccctgcctcggcggaccaaaggatacaggaagcttggaagcggagtcttgcaacagtgcatcccgacagcagcaacctgatccccaagctttttcgacctgcagcgttcctgcctttcatggcgcccacggtatttttgtcaatgacgccactgaaagggatcaagtccgtgattttacctcaggttttcctctgtgcctacatggcagcgttcaacagcatcaatggaaacagaagttacacttgtaagccactagaaagatcattactaatggcgggagccgttgcttcttcaactttcttaggagtaatccctcagtttgtccagatgaagtatggcctgactggcccttggattaaaagactcttacctgtgatcttcctcgtgcaagccagtggaatgaatgtctacatgtcccgaagtcttgaatccattaaggggattgcggtcatggacaaggaaggcaatgtcctgggtcattccagaattgctgggacaaaggctgttagagaaacgctagcatccagaatagtgctgtttgggacctcagctctgattcctgaagtcttcacctacttttttaaaaggacccagtatttcaggaaaaacccagggtcattgtggattttgaaactgtcttgtactgtcctggcaatgggactgatggtgccattttcttttagtatatttccacagattggacagatacagtactgtagtcttgaagagaaaattcagtctccaacagaagaaacagaaatcttttatcacagaggggtgtaggcgtgagttttaggtgaatttatgtggttcctgcttgaaaaccttcccctctccaggttcggtttagagaactttgccacaggtcttctggggaccccagaggtgtctgtgctgacaaggcgacttcagattccatactgagatcgttcccaggctggcgtctctggggtttttaaggctggctggagaagacagtgggagggtgccccgtctgacacccctggggttgctgagggaacggttggagtggggatcggcctgcgaaaggatactgtgaaatcactaattaactaataaacctgtctcaagttgagtagctgggactacaggcatgtaccagccaccacgtccagctaatttttgttttgctttttttaagtagagatggggtttcaccatgttggccaggctgtcatctcctgtccccgcga

SEQ ID NO: 13101 - DNA, 1476 bp, Homo sapiens
cgcccggctcctcctccacgcgcggcctggcggcggcggccactctaaccagcgcaaaatgtccctggaacaggaggaggaaacgcaacctgggcggctcctaggacgcagagacgccgtccccgccttcattgagcccaacgtgcgcttctggatcaccgagcgccaatcctttattcgacgatttcttcaatggacagaattattagatcctacaaatgtgttcatttcagttgaaagtatagaaaactcgaggcaactattgtgcacaaatgaagatgtttccagccctgcctcggcggaccaaagggcaacagtgcatcccgacagcagcaacctgatccccaagctttttcgacctgcagcgttcctgcctttcatggcgcccacggtatttttgtcaatgacgccactgaaagggatcaagtccgtgattttacctcaggttttcctctgtgcctacatggcagcgttcaacagcatcaatggaaacagaagttacacttgtaagccactagaaagatcattactaatggcgggagccgttgcttcttcaactttcttaggagtaatccctcagtttgtccagatgaagtatggcctgactggcccttggattaaaagactcttacctgtgatcttcctcgtgcaagccagtggaatgaatgtctacatgtcccgaagtcttgaatccattaaggggattgcggtcatggacaaggaaggcaatgtcctgggtcattccagaattgctgggacaaaggctgttagagaaacgctagcatccagaatagtgctgtttgggacctcagctctgattcctgaagtcttcacctacttttttaaaaggacccagtatttcaggaaaaacccagggtcattgtggattttgaaactgtcttgtactgtcctggcaatgggactgatggtgccattttcttttagtatatttccacagattggacagatacagtactgtagtcttgaagagaaaattcagtctccaacagaagaaacagaaatcttttatcacagaggggtgtaggcgtgagttttaggtgaatttatgtggttcctgcttgaaaaccttcccctctccaggttcggtttagagaactttgccacaggtcttctggggaccccagaggtgtctgtgctgacaaggcgacttcagattccatactgagatcgttcccaggctggcgtctctggggtttttaaggctggctggagaagacagtgggagggtgccccgtctgacacccctggggttgctgagggaacggttggagtggggatcggcctgcgaaaggatactgtgaaatcactaattaactaataaacctgtctcaagttgagtagctgggactacaggcatgtaccagccaccacgtccagctaatttttgttttgctttttttaagtagagatggggtttcaccatgttggccaggctgtcatctcctgtccccgcga

SEQ ID NO: 13102 - DNA, 1811 bp, Homo sapiens
cgcccggctcctcctccacgcgcggcctggcggcggcggccactctaaccagcgcaaaatgtccctggaacaggaggaggaaacgcaacctgggcggctcctaggacgcagagacgccgtccccgccttcattgagcccaacgtgcgcttctggatcaccgagcgccaagtacggcccgggcccggcgcgactaggggcagggagggggcgggccgggccgcgtggagtcgggctgacccgggtgaccttggccaggccacgtgggcgccccctgtctccgtttcctcctctcggagttgtgccgggaacgcgcaccaccggccttcaccccttagggcgcgggaggggacgcaggggaaatcgaagctgccagatgcccacgaccacaacgtcaccctccagattgccctctcggaggggcccagtccgcgcaggtggctgctccctactgcctgagctgtggctgagcagcagattggggagaaacaggctctcgcaccttgtcctttattcgacgatttcttcaatggacagaattattagatcctacaaatgtgttcatttcagttgaaagtatagaaaactcgaggcaactattgtgcacaaatgaagatgtttccagccctgcctcggcggaccaaagggcaacagtgcatcccgacagcagcaacctgatccccaagctttttcgacctgcagcgttcctgcctttcatggcgcccacggtatttttgtcaatgacgccactgaaagggatcaagtccgtgattttacctcaggttttcctctgtgcctacatggcagcgttcaacagcatcaatggaaacagaagttacacttgtaagccactagaaagatcattactaatggcgggagccgttgcttcttcaactttcttaggagtaatccctcagtttgtccagatgaagtatggcctgactggcccttggattaaaagactcttacctgtgatcttcctcgtgcaagccagtggaatgaatgtctacatgtcccgaagtcttgaatccattaaggggattgcggtcatggacaaggaaggcaatgtcctgggtcattccagaattgctgggacaaaggctgttagagaaacgctagcatccagaatagtgctgtttgggacctcagctctgattcctgaagtcttcacctacttttttaaaaggacccagtatttcaggaaaaacccagggtcattgtggattttgaaactgtcttgtactgtcctggcaatgggactgatggtgccattttcttttagtatatttccacagattggacagatacagtactgtagtcttgaagagaaaattcagtctccaacagaagaaacagaaatcttttatcacagaggggtgtaggcgtgagttttaggtgaatttatgtggttcctgcttgaaaaccttcccctctccaggttcggtttagagaactttgccacaggtcttctggggaccccagaggtgtctgtgctgacaaggcgacttcagattccatactgagatcgttcccaggctggcgtctctggggtttttaaggctggctggagaagacagtgggagggtgccccgtctgacacccctggggttgctgagggaacggttggagtggggatcggcctgcgaaaggatactgtgaaatcactaattaactaataaacctgtctcaagttgagtagctgggactacaggcatgtaccagccaccacgtccagctaatttttgttttgctttttttaagtagagatggggtttcaccatgttggccaggctgtcatctcctgtccccgcga

SEQ ID NO: 13103 - DNA, 1382 bp, Homo sapiens
cgcccggctcctcctccacgcgcggcctggcggcggcggccactctaaccagcgcaaaatgtccctggaacaggaggaggaaacgcaacctgggcggctcctaggacgcagagacgccgtccccgccttcattgagcccaacgtgcgcttctggatcaccgagcgccaatcctttattcgacgatttcttcaatggacagaattattagatcctacaaatgtgttcatttcagttgaaagtatagaaaactcgaggcaactattgtgcacaaatgaagatgtttccagccctgcctcggcggaccaaaggatacaggaagcttggaagcggagtcttgcaacagtgcatcccgacagcagcaacctgatccccaagctttttcgacctgcagcgttcctgcctttcatggcgcccacggtatttttgtcaatgacgccactgaaagggatcaagtccgtgattttacctcaggttttcctctgtgcctacatggcagcgttcaacagcatcaatggaaacagaagttacacttgtaagccactagaaagatcattactaatggcgggagccgttgcttcttcaactttcttaggagtaatccctcagtttgtccagatgaagtatggcctgactggcccttggattaaaagactcttacctgtgatcttcctcgtgcaagccagtggaatgaatgtctacatgtcccgaagtcttgaatccattaaggggattgcggtcatggacaaggaaggcaatgtcctgggtcattccagaattgctgggacaaaggctgttagagaaacgctagcatccagaatagtgctgtttgggacctcagctctgattcctgaagtcttcacctacttttttaaaaggacccagtatttcaggaaaaacccagggtcattgtggattttgaaactgtcttgtactgtcctggcaatgggactgatggtgccattttcttttagtatatttccacagattggacagatacagtactgtagtcttgaagagaaaattcagtctccaacagaagaaacagaaatcttttatcacagaggggtgtaggcgtgagttttaggtgaatttatgtggttcctgcttgaaaaccttcccctctccaggttcggtttagagaactttgccacaggtcttctggggaccccagaggtgtctgtgctgacaaggcgacttcagattccatactgagatcgttcccaggctggcgtctctggggtttttaaggctggctggagaagacagtgggagggtgccccgtctgacacccctggggttgctgagggaacggttggagtggggatcggcctgcgaaaggatactgtgaaatcactaattaactaataaacctgtctcaagt

SEQ ID NO: 13104 - DNA, 1756 bp, Homo sapiens
cgcccggctcctcctccacgcgcggcctggcggcggcggccactctaaccagcgcaaaatgtccctggaacaggaggaggaaacgcaacctgggcggctcctaggacgcagagacgccgtccccgccttcattgagcccaacgtgcgcttctggatcaccgagcgccaagtacggcccgggcccggcgcgactaggggcagggagggggcgggccgggccgcgtggagtcgggctgacccgggtgaccttggccaggccacgtgggcgccccctgtctccgtttcctcctctcggagttgtgccgggaacgcgcaccaccggccttcaccccttagggcgcgggaggggacgcaggggaaatcgaagctgccagatgcccacgaccacaacgtcaccctccagattgccctctcggaggggcccagtccgcgcaggtggctgctccctactgcctgagctgtggctgagcagcagattggggagaaacaggctctcgcaccttgtcctttattcgacgatttcttcaatggacagaattattagatcctacaaatgtgttcatttcagttgaaagtatagaaaactcgaggcaactattgtgcacaaatgaagatgtttccagccctgcctcggcggaccaaaggcgttcctgcctttcatggcgcccacggtatttttgtcaatgacgccactgaaagggatcaagtccgtgattttacctcaggttttcctctgtgcctacatggcagcgttcaacagcatcaatggaaacagaagttacacttgtaagccactagaaagatcattactaatggcgggagccgttgcttcttcaactttcttaggagtaatccctcagtttgtccagatgaagtatggcctgactggcccttggattaaaagactcttacctgtgatcttcctcgtgcaagccagtggaatgaatgtctacatgtcccgaagtcttgaatccattaaggggattgcggtcatggacaaggaaggcaatgtcctgggtcattccagaattgctgggacaaaggctgttagagaaacgctagcatccagaatagtgctgtttgggacctcagctctgattcctgaagtcttcacctacttttttaaaaggacccagtatttcaggaaaaacccagggtcattgtggattttgaaactgtcttgtactgtcctggcaatgggactgatggtgccattttcttttagtatatttccacagattggacagatacagtactgtagtcttgaagagaaaattcagtctccaacagaagaaacagaaatcttttatcacagaggggtgtaggcgtgagttttaggtgaatttatgtggttcctgcttgaaaaccttcccctctccaggttcggtttagagaactttgccacaggtcttctggggaccccagaggtgtctgtgctgacaaggcgacttcagattccatactgagatcgttcccaggctggcgtctctggggtttttaaggctggctggagaagacagtgggagggtgccccgtctgacacccctggggttgctgagggaacggttggagtggggatcggcctgcgaaaggatactgtgaaatcactaattaactaataaacctgtctcaagttgagtagctgggactacaggcatgtaccagccaccacgtccagctaatttttgttttgctttttttaagtagagatggggtttcaccatgttggccaggctgtcatctcctgtccccgcga

SEQ ID NO: 13105 - DNA, 1538 bp, Homo sapiens
cgcccggctcctcctccacgcgcggcctggcggcggcggccactctaaccagcgcaaaatgtccctggaacaggaggaggaaacgcaacctgggcggctcctaggacgcagagacgccgtccccgccttcattgagcccaacgtgcgcttctggatcaccgagcgccaatcctttattcgacgatttcttcaatggacagaattattagatcctacaaatgtgttcatttcagttgaaagtatagaaaactcgaggcaactattgtgcacaaatgaagatgtttccagccctgcctcggcggaccaaaggatacaggaagcttggaagcggagtcttgcaacagtgcatcccgacagcagcaacctgatccccaagctttttcgacctgcagcgttcctgcctttcatggcgcccacggtatttttgtcaatgacgccactgaaagggatcaagtccgtgattttacctcaggttttcctctgtgcctacatggcagcgttcaacagcatcaatggaaacagaagttacacttgtaagccactagaaagatcattactaatggcgggagccgttgcttcttcaactttcttaggagtaatccctcagtttgtccagatgaagtatggcctgactggcccttggattaaaagactcttacctgtgatcttcctcgtgcaagccagtggaatgaatgtctacatgtcccgaagtcttgaatccattaaggggattgcggtcatggacaaggaaggcaatgtcctgggtcattccagaattgctgggacaaaggctgttagagaaacgctagcatccagaatagtgctgtttgggacctcagctctgattcctgaagtcttcacctacttttttaaaaggacccagtatttcaggaaaaacccagggtcattgtggattttgaaactgtcttgtactgtcctggcaatgggactgatggtgccattttcttttagtatatttccacagattggacaggtgacatgacatgagaattgccttaaaatactcaaggaaaaaaatcctactgctgggtgtgggaggtgcttgatgaaatgagatctgcaaattgttaatagtgattcctgagtgagcacatatacagtactgtagtcttgaagagaaaattcagtctccaacagaagaaacagaaatcttttatcacagaggggtgtaggcgtgagttttaggtgaatttatgtggttcctgcttgaaaaccttcccctctccaggttcggtttagagaactttgccacaggtcttctggggaccccagaggtgtctgtgctgacaaggcgacttcagattccatactgagatcgttcccaggctggcgtctctggggtttttaaggctggctggagaagacagtgggagggtgccccgtctgacacccctggggttgctgagggaacggttggagtggggatcggcctgcgaaaggatactgtgaaatcactaattaactaataaacctgtctcaagttgaggatttgaagaagaacacagaagtcgcatcga

SEQ ID NO: 13106 - DNA, 1306 bp, Homo sapiens
cgcccggctcctcctccacgcgcggcctggcggcggcggccactctaaccagcgcaaaatgtccctggaacaggaggaggaaacgcaacctgggcggctcctaggacgcagagacgccgtccccgccttcattgagcccaacgtgcgcttctggatcaccgagcgccaatcctttattcgacgatttcttcaatggacagaattattagatcctacaaatgtgttcatttcagttgaaagtatagaaaactcgaggcaactattgtgcacaaatgaagatgtttccagccctgcctcggcggaccaaaggatacaggaagcttggaagcggagtcttgcaacagtgcatcccgacagcagcaacctgatccccaagctttttcgacctgcagcgttcctgcctttcatggcgcccacggtatttttgtcaatgacgccactgaaagggatcaagtccgtgattttacctcaggttttcctctgtgcctacatggcagcgttcaacagcatcaatggaaacagaagttacacttgtaagccactagaaagatcattactaatggcgggagccgttgcttcttcaactttcttaggagtaatccctcagtttgtccagatgaagtatggcctgactggcccttggattaaaagactcttacctgtgatcttcctcgtgcaagccagtggaatgaatgtctacatgtcccgaagtcttgaatccattaaggggattgcggtcatggacaaggaaggcaatgtcctgggtcattccagaattgctgggacaaaggctgttagagaaacgctagcatccagaatagtgctgtttgggacctcagctctgattcctgaagtcttcacctacttttttaaaaggacccagtatttcaggaaaaacccagggtcattgtggattttgaaactgtcttgtactgtcctggcaatgggactgatggtgccattttcttttagtatatttccacagattggacagatacagtactgtagtcttgaagagaaaattcagtctccaacagaagaaacagaaatcttttatcacagaggggtgtaggcgtgagttttaggtgaatttatgtggttcctgcttgaaaaccttcccctctccaggttcggtttagagaactttgccacaggtcttctggggtttttaaggctggctggagaagacagtgggagggtgccccgtctgacacccctggggttgctgagggaacggttggagtggggatcggcctgcgaaaggatactgtgaaatcactaattaactaataaacctgtctcaagt

SEQ ID NO: 13107 - DNA, 1449 bp, Homo sapiens
cgcccggctcctcctccacgcgcggcctggcggcggcggccactctaaccagcgcaaaatgtccctggaacaggaggaggaaacgcaacctgggcggctcctaggacgcagagacgccgtccccgccttcattgagcccaacgtgcgcttctggatcaccgagcgccaatcctttattcgacgatttcttcaatggacagaattattagatcctacaaatgtgttcatttcagttgaaagtatagaaaactcgaggcaactattgtgcacaaatgaagatgtttccagccctgcctcggcggaccaaaggatacaggaagcttggaagcggagtcttgcaacagtgcatcccgacagcagcaacctgatccccaagctttttcgacctgcagcgttcctgcctttcatggcgcccacggtatttttgtcaatgacgccactgaaagggatcaagtccgtgattttacctcaggttttcctctgtgcctacatggcagcgttcaacagcatcaatggaaacagaagttacacttgtaagccactagaaagatcattactaatggcgggagccgttgcttcttcaactttcttaggagtaatccctcagtttgtccagatgaagtatggcctgactggcccttggattatgtcccgaagtcttgaatccattaaggggattgcggtcatggacaaggaaggcaatgtcctgggtcattccagaattgctgggacaaaggctgttagagaaacgctagcatccagaatagtgctgtttgggacctcagctctgattcctgaagtcttcacctacttttttaaaaggacccagtatttcaggaaaaacccagggtcattgtggattttgaaactgtcttgtactgtcctggcaatgggactgatggtgccattttcttttagtatatttccacagattggacagatacagtactgtagtcttgaagagaaaattcagtctccaacagaagaaacagaaatcttttatcacagaggggtgtaggcgtgagttttaggtgaatttatgtggttcctgcttgaaaaccttcccctctccaggttcggtttagagaactttgccacaggtcttctggggaccccagaggtgtctgtgctgacaaggcgacttcagattccatactgagatcgttcccaggctggcgtctctggggtttttaaggctggctggagaagacagtgggagggtgccccgtctgacacccctggggttgctgagggaacggttggagtggggatcggcctgcgaaaggatactgtgaaatcactaattaactaataaacctgtctcaagttgagtagctgggactacaggcatgtaccagccaccacgtccagctaatttttgttttgctttttttaagtagagatggggtttcaccatgttggccaggctgtcatctcctgtccccgcga

SEQ ID NO: 13108 - DNA, 1145 bp, Homo sapiens
cgcccggctcctcctccacgcgcggcctggcggcggcggccactctaaccagcgcaaaatgtccctggaacaggaggaggaaacgcaacctgggcggctcctaggacgcagagacgccgtccccgccttcattgagcccaacgtgcgcttctggatcaccgagcgccaatcctttattcgacgatttcttcaatggacagaattattagatcctacaaatgtgttcatttcagttgaaagtatagaaaactcgaggcaactattgtgcacaaatgaagatgtttccagccctgcctcggcggaccaaaggatacaggaagcttggaagcggagtcttgcaacagtgcatcccgacagcagcaacctgatccccaagctttttcgacctgcagcgttcctgcctttcatggcgcccacggtatttttgtcaatgacgccactgaaagggatcaagtccgtgattttacctcaggttttcctctgtgcctacatggcagcgttcaacagcatcaatggaaacagaagttacacttgtaagccactagaaagatcattactaatggcgggagccgttgcttcttcaactttcttaggagtaatccctcagtttgtccagatgaagtatggcctgactggcccttggattaaaagactcttacctgtgatcttcctcgtgcaagccagtggaatgaatgtctacatgtcccgaagtcttgaatccattaaggggattgcggtcatggacaaggaaggcaatgtcctgggtcattccagaattgctgggacaaaggctgttagagaaacgctagcatccagaatagtgctgtttgggacctcagctctgattcctgaagtcttcacctacttttttaaaaggacccagtatttcaggaaaaacccagggtcattgtggattttgaaactgtcttgtactgtcctggcaatgggactgatggtgccattttcttttagtatatttccacagattggacaggtgacatgacatgagaattgccttaaaatactcaaggaaaaaaatcctactgctgggtgtgggaggtgcttgatgaaatgagatctgcaaattgttaatagtgattcctgagtgagcacatgtgagttcattacattccttctacatttgt

SEQ ID NO: 13109 - DNA, 1069 bp, Homo sapiens
cgcccggctcctcctccacgcgcggcctggcggcggcggccactctaaccagcgcaaaatgtccctggaacaggaggaggaaacgcaacctgggcggctcctaggacgcagagacgccgtccccgccttcattgagcccaacgtgcgcttctggatcaccgagcgccaatcctttattcgacgatttcttcaatggacagaattattagatcctacaaatgtgttcatttcagttgaaagtatagaaaactcgaggcaactattgtgcacaaatgaagatgtttccagccctgcctcggcggaccaaaggatacaggaagcttggaagcggagtcttgcaacagtgcatcccgacagcagcaacctgatccccaagctttttcgacctgcagcgttcctgcctttcatggcgcccacggtatttttgtcaatgacgccactgaaagggatcaagtccgtgattttacctcaggttttcctctgtgcctacatggcagcgttcaacagcatcaatggaaacagaagttacacttgtaagccactagaaagatcattactaatggcgggagccgttgcttcttcaactttcttaggagtaatccctcagtttgtccagatgaagtatggcctgactggcccttggattaaaagactcttacctgtgatcttcctcgtgcaagccagtggaatgaatgtctacatgtcccgaagtcttgaatccattaaggggattgcggtcatggacaaggaaggcaatgtcctgggtcattccagaattgctgggacaaaggctgttagagaaacgctagcatccagaatagtgctgtttgggacctcagctctgattcctgaagtcttcacctacttttttaaaaggacccagtatttcaggaaaaacccagggtcattgtggattttgaaactgtcttgtactgtcctggcaatgggactgatggtgccattttcttttagtatatttccacagattggacagatacagtactgtagccttgaggagcgtgagttttagtgaacttattgggctcctgctggaaacccttccctttcg

SEQ ID NO: 13110 - DNA, 950 bp, Homo sapiens
aggcgaccacggtgtcttcaaaagccccgtcagggttggcttcctggggccggaccgactgtgggtcagtttgcaccagcgctctggaatcgagttacgcgcgaaagggcagagtttctggaggaaaccgcagcctctcaaccgctgaccgggtctcagaaggcccccggcagggccgcttggcgggaactgaccacgcgccagtcaggctctccagggacctgcgcaggcgcgtgtgggcggagtcgtgcgcagggggcggggcttcgggaaggagccacagagagggcggggcgtaggacctgcgcttcgggggtggagtcggagcggcgcggcggcggtcatgcgggacgcggatgcagacgcaggcggaggcgctgacggcggggatggccggggtggccacagctgccgcgggggcgtggacacagccgcagctccggccggtggagctcccccagcgcacgcgccaggtccgggcagagacgccgcgtctgcggccagggggtcacgaatgcggccgcacatattcaccctcagcgtgcctttcccgacccccttggaggcggaaatcgcccatgggtccctggcaccagatgccgagccccaccaaagggtggttgggaaggatctcacagtgagtggcaggatcctggtcgtccgctggaaagctgaagactgtcgcctgctccgaatttccgtcatcaactttcttgaccagctttccctggtggtgcggaccatgcagcgctttgggccccccgtttcccgctaagcctggcctgggcaaatggagcgaggtcccactttgcgtctccttgtaggcagtgcgtccatccttccctagggcaggaattcccacagttgctactttcctgggagggcctcatgttttatctggttcttaaatgtttgttactacagaaaataaaactgcgctactattccaa

SEQ ID NO: 13111 - DNA, 1062 bp, Homo sapiens
aggcgaccacggtgtcttcaaaagccccgtcagggttggcttcctggggccggaccgactgtgggtcagtttgcaccagcgctctggaatcgagttacgcgcgaaagggcagagtttctggaggaaaccgcagcctctcaaccgctgaccgggtctcagaaggcccccggcagggccgcttggcgggaactgaccacgcgccagtcaggctctccagggacctgcgcaggcgcgtgtgggcggagtcgtgcgcagggggcggggcttcgggaaggagccacagagagggcggggcgtaggacctgcgcttcgggggtggagtcggagcggcgcggcggcggtcatgcgggacgcggatgcagacgcaggcggaggcgctgacggcggggatggccggggtggccacagctgccgcgggggcgtggacacagccgcagctccggccggtggagctcccccagcgcacgcgccaggtccgggcagagacgccgcgtctgcggccagggggtcacgaatgcggccgcacatattcaccctcagcgtgcctttcccgacccccttggaggcggaaatcgcccatgggtccctggcaccagatgccgagccccaccaaagggtggttgggaaggatctcacagtgagtggcaggatcctggtcgtccgctggaaagctgaagactgtcgcctgctccgaatttccgtcatcaactttcttgaccagctttccctggtggtgcggaccatgcagcgctttgggccccccgtttcccgctaagcctggcctgggcaaatggagcgaggtcccactttgcgtctccttgtaggcagtgcgtccatccttccctagggcaggaattcccacagttgctactttcctgggagggcctcatgttttatctggttcttaaatgtttgttactacagaaaataaaactgcgctactattccaaaaaaaaaaaacgacccaacaacaaacgacagacacacacacaacgcacacaagaaataggaagaggaacagacgaaaaaaaccgcccgaaatcatcgtcgggggcaaaatag

SEQ ID NO: 13112 - DNA, 2185 bp, Homo sapiens
aggcgaccacggtgtcttcaaaagccccgtcagggttggcttcctggggccggaccgactgtgggtcagtttgcaccagcgctctggaatcgagttacgcgcgaaagggcagagtttctggaggaaaccgcagcctctcaaccgctgaccgggtctcagaaggcccccggcagggccgcttggcgggaactgaccacgcgccagtcaggctctccagggacctgcgcaggcgcgtgtgggcggagtcgtgcgcagggggcggggcttcgggaaggagccacagagagggcggggcgtaggacctgcgcttcgggggtggagtcggagcggcgcggcggcggtcatgcgggacgcggatgcagacgcaggcggaggcgctgacggcggggatggccggggtggccacagctgccgcgggggcgtggacacagccgcagctccggccggtggagctcccccagcgcacgcgccaggtccgggcagagacgccgcgtctgcggccagggggtcacgaatgcggccgcacatattcaccctcagcgtgcctttcccgacccccttggaggcggaaatcgcccatgggtccctggcaccagatgccgagccccaccaaagggtggttgggaaggatctcacagtgagtggcaggatcctggtcgtccgctggaaagctgaagactgtcgcctgctccgaatttccgtcatcaactttcttgaccagctttccctggtggtgcggaccatgcagcgctttgggccccccgtttcccgctaagcctggcctgggcaaatggagcgaggtcccactttgcgtctccttgtaggcagtgcgtccatccttccctagggcaggaattcccacagttgctactttcctgggagggcctcatgttttatctggttcttaaatgtttgttactacagaaaataaaactgcgctactattccaaattccaagtctgagtttatttgcagctggggcacctcccaatattcttgttgtgcttgggttgctgggggggggttctagaattcagatattcaaggagtacaaggaaattgaagacaatttaggaaatggaagaaaatgaaaatcaattgggttctgtcattcaggattaactactgtcaacattttggaatacttcctcagttttacagttgcacttacatagtaaatgtgtaactgtaatatacaccacataatatttgcaagtttagtgttaaatttttttcctgatttttaaatctaacatgagcttttttcctctaacgatcagtgaagaaagtgctggggcaattgactagtgtctggggcaaggagttggctccctggaaaatacagtgtctccagccttagggctcttttatagattctatcagattttctgagagtgaaaaggaagaggtacaactgcttttattctcagaaaacaaggaaatggtttgatccttttgagtcttgctttgaagatgtgctgtgtgggaccagagcagctcttaactgtaggcttgtttccctctatggaggcaacaaacaccattctgggcaccctggccagtgctgcctaggtgaacatgagcttctctatcctggtgggtggggacagctgctagtccctgtcctgcttgcacactggagttaccgttcatcctctcctgctggggtgatggccttccctggtcttgggtagcttcctcacacgcctgtgctcaccagtagtcgtagtccgctgcacactggaacgggagcctctgtggatatccagggttctttccctgtgcagctctcttctctctggttctccgccctgcaaactccagctgctgggacgctctgaatcagtttcaactcctaaagtccgggtgtctgccaggctccaccaggaaactccacacaggacactgggccagtcgcatggcttacttaatactctgcattccatatattttgtctggtttggcgtgttctttcatttggcatgacatatccagtccctattactccatatggaggaacagtttccctttgtagaatctggggagctctgccagtggtgacggtggcactggccttcagcttatgaagatgacactttcctctctccctctcttttgctctcattcctttcttcctttcttaatattttttagacattaattattgacgaatagttgacaattt

SEQ ID NO: 13113 - DNA, 927 bp, Homo sapiens
aggcgaccacggtgtcttcaaaagccccgtcagggttggcttcctggggccggaccgactgtgggtcagtttgcaccagcgctctggaatcgagttacgcgcgaaagggcagagtttctggaggaaaccgcagcctctcaaccgctgaccgggtctcagaaggcccccggcagggccgcttggcgggaactgaccacgcgccagtcaggctctccagggacctgcgcaggcgcgtgtgggcggagtcgtgcgcagggggcggggcttcgggaaggagccacagagagggcggggcgtaggacctgcgcttcgggggtggagtcggagcggcgcggcggcggtcatgcgggacgcggatgcagacgcaggcggaggcgctgacggcggggatggccggggtggccacagctgccgcgggggcgtggacacagccgcagctccggccggtggagctcccccagcgcacgcgccaggtccgggcagagacgccgcgtctgcggccagggggtcacgaatgcggccgcacatattcaccctcagcgtgcctttcccgacccccttggaggcggaaatcgcccatgggtccctggcaccagatgccgagccccaccaaagggtggttgggaaggatctcacaccgctggaaagctgaagactgtcgcctgctccgaatttccgtcatcaactttcttgaccagctttccctggtggtgcggaccatgcagcgctttgggccccccgtttcccgctaagcctggcctgggcaaatggagcgaggtcccactttgcgtctccttgtaggcagtgcgtccatccttccctagggcaggaattcccacagttgctactttcctgggagggcctcatgttttatctggttcttaaatgtttgttactacagaaaataaaactgcgctactattccaa

SEQ ID NO: 13114 - DNA, 1059 bp, Homo sapiens
aggcgaccacggtgtcttcaaaagccccgtcagggttggcttcctggggccggaccgactgtgggtcagtttgcaccagcgctctggaatcgagttacgcgcgaaagggcagagtttctggaggaaaccgcagcctctcaaccgctgaccgggtctcagaaggcccccggcagggccgcttggcgggaactgaccacgcgccagtcaggctctccagggacctgcgcaggcgcgtgtgggcggagtcgtgcgcagggggcggggcttcgggaaggagccacagagagggcggggcgtaggacctgcgcttcgggggtggagtcggagcggcgcggcggcggtcatgcgggacgcggatgcagacgcaggcggaggcgctgacggcggggatggccggggtggccacagctgccgcgggggcgtggacacagccgcagctccggccggtggagctcccccagcgcacgcgccaggtccgggcagagacgccgcgtctgcggccagggggtcacgaatgcggccgcacatattcaccctcagcgtgcctttcccgacccccttggaggcggaaatcgcccatgggtccctggcaccagatgccgagccccaccaaagggtggttgggaaggatctcacagtgagtggcaggatcctggtcgtccgctggaaagctgaagactgtcgcctgctccgaatttccgtcatcaactttcttgaccagctttccctggtggtgcggaccatgcagcgctttgggccccccgtttcccgctaagcctggcctgggcaaatggagcgaggtcccactttgcgtctccttgtaggcagtgcgtccatccttccctagggcaggaattcccacagttgctactttcctgggagggcctcatgttttatctggttcttaaatgtttgttactacagaaaataaaactgcgctactattccaacgttctaaaaataaaaataattatataaaaaaactcgagggggggcccggacccaatatgcctataggaggcgattacacttatgggccgcgtttcacctcgtgactgg

SEQ ID NO: 13115 - DNA, 2162 bp, Homo sapiens
aggcgaccacggtgtcttcaaaagccccgtcagggttggcttcctggggccggaccgactgtgggtcagtttgcaccagcgctctggaatcgagttacgcgcgaaagggcagagtttctggaggaaaccgcagcctctcaaccgctgaccgggtctcagaaggcccccggcagggccgcttggcgggaactgaccacgcgccagtcaggctctccagggacctgcgcaggcgcgtgtgggcggagtcgtgcgcagggggcggggcttcgggaaggagccacagagagggcggggcgtaggacctgcgcttcgggggtggagtcggagcggcgcggcggcggtcatgcgggacgcggatgcagacgcaggcggaggcgctgacggcggggatggccggggtggccacagctgccgcgggggcgtggacacagccgcagctccggccggtggagctcccccagcgcacgcgccaggtccgggcagagacgccgcgtctgcggccagggggtcacgaatgcggccgcacatattcaccctcagcgtgcctttcccgacccccttggaggcggaaatcgcccatgggtccctggcaccagatgccgagccccaccaaagggtggttgggaaggatctcacaccgctggaaagctgaagactgtcgcctgctccgaatttccgtcatcaactttcttgaccagctttccctggtggtgcggaccatgcagcgctttgggccccccgtttcccgctaagcctggcctgggcaaatggagcgaggtcccactttgcgtctccttgtaggcagtgcgtccatccttccctagggcaggaattcccacagttgctactttcctgggagggcctcatgttttatctggttcttaaatgtttgttactacagaaaataaaactgcgctactattccaaattccaagtctgagtttatttgcagctggggcacctcccaatattcttgttgtgcttgggttgctgggggggggttctagaattcagatattcaaggagtacaaggaaattgaagacaatttaggaaatggaagaaaatgaaaatcaattgggttctgtcattcaggattaactactgtcaacattttggaatacttcctcagttttacagttgcacttacatagtaaatgtgtaactgtaatatacaccacataatatttgcaagtttagtgttaaatttttttcctgatttttaaatctaacatgagcttttttcctctaacgatcagtgaagaaagtgctggggcaattgactagtgtctggggcaaggagttggctccctggaaaatacagtgtctccagccttagggctcttttatagattctatcagattttctgagagtgaaaaggaagaggtacaactgcttttattctcagaaaacaaggaaatggtttgatccttttgagtcttgctttgaagatgtgctgtgtgggaccagagcagctcttaactgtaggcttgtttccctctatggaggcaacaaacaccattctgggcaccctggccagtgctgcctaggtgaacatgagcttctctatcctggtgggtggggacagctgctagtccctgtcctgcttgcacactggagttaccgttcatcctctcctgctggggtgatggccttccctggtcttgggtagcttcctcacacgcctgtgctcaccagtagtcgtagtccgctgcacactggaacgggagcctctgtggatatccagggttctttccctgtgcagctctcttctctctggttctccgccctgcaaactccagctgctgggacgctctgaatcagtttcaactcctaaagtccgggtgtctgccaggctccaccaggaaactccacacaggacactgggccagtcgcatggcttacttaatactctgcattccatatattttgtctggtttggcgtgttctttcatttggcatgacatatccagtccctattactccatatggaggaacagtttccctttgtagaatctggggagctctgccagtggtgacggtggcactggccttcagcttatgaagatgacactttcctctctccctctcttttgctctcattcctttcttcctttcttaatattttttagacattaattattgacgaatagttgacaattt

SEQ ID NO: 13116 - DNA, 1759 bp, Homo sapiens
  misc_feature (181)..(181): n is a, c, g, or t
  misc_feature (204)..(204): n is a, c, g, or t
  misc_feature (206)..(206): n is a, c, g, or t
  misc_feature (242)..(244): n is a, c, g, or t
  misc_feature (247)..(247): n is a, c, g, or t
  misc_feature (251)..(251): n is a, c, g, or t
  misc_feature (255)..(256): n is a, c, g, or t
gcggccgggaggagccgagccgggcggcggcggcgggaggctacagcgcgcgggggtctcccgcgtcccctccgcctcgccgggagctcgcgccctcgcccagccgagctcccacccccgcttttttccgaagcgctgggcggcgccaccctccggccggagcccggcactgcacaacccnctccgactttcaatgttccacantncccggccagagcctcctcggcttctttttttccctnnnccnaaantccnnccccacagctgcctccatttccttaaggaagggtttttttctctctccctcccccacaccgtagcggcgcgcgagcgggccgggcgggcggccgagttttccaagagataacttcaccaagatgtccagtgataggcaaaggtccgatgatgagagccccagcaccagcagtggcagttcagatgcggaccagcgagacccagccgctccagagcctgaagaacaagaggaaagaaaaccttctgccacccagcagaagaaaaacaccaaactctctagcaaaaccactgctaagttatccactagtgctaaaagaattcagaaggagctagctgaaataacccttgatcctcctcctaattgcagtgctgggcctaaaggagataacatttatgaatggagatcaactatacttggtccaccgggttctgtatatgaaggtggtgtgttttttctggatatcacattttcatcagattatccatttaagccaccaaaggttactttccgcaccagaatctatcactgcaacatcaacagtcagggagtcatctgtctggacatccttaaagacaactggagtcccgctttgactatttcaaaggttttgctgtctatttgttcccttttgacagactgcaaccctgcggatcctctggttggaagcatagccactcagtatttgaccaacagagcagaacacgacaggatagccagacagtggaccaagagatacgcaacataattcacataatttgtatgcagtgtgaaggagcagaaggcatcttctcactgtgctgcaaatctttatagcctttacaatacggacttctgtgtatatgttatactgattctactctgcttttatcctttggagcctgggagactccccaaaaaggtaaatgctatcaagagtagaactttgtagctgtagattagttatgtttaaaacgcctacttgcaagtcttgcttctttgggatatcaaaatgtattttgtgatgtactaaggatactggtcctgaagtctaccaaatattatagtgcattttagcctaattcattatctgtatgaagttataaaagtagctgtagatggctaggaattatgtcatttgtattaaacccagatctatttctgagtatgtggttcatgctgttgtgaaaaatgttttaccttttacctttgtcagtttgtaatgagaggatttccttttaccctttgtagctcagagagcacctgatgtatcatctcaaacacaataaacatgctcctgaaggcatagtttcctgtcgtaatattttaagtcagtcttgttagaaagtgtgtctgagatgattgttgatgaagtaaaaatgtggctatgaagattactaaagactagcacaaataaacccattcttaaattgaaaacatttaaaatcctattaaatgcatagagtttttttcctttgttattgaaagaatgaccttaaataatcaaaagtggattttgacccattg

SEQ ID NO: 13117 - DNA, 860 bp, Homo sapiens
  misc_feature (58)..(58): n is a, c, g, or t
  misc_feature (60)..(60): n is a, c, g, or t
  misc_feature (62)..(62): n is a, c, g, or t
  misc_feature (66)..(66): n is a, c, g, or t
  misc_feature (68)..(68): n is a, c, g, or t
cccgctcgcaatatcaacacgcgccggaaaggattgtagctaaagtgactctcttacnancnccgntncagtgctgggcctaaaggagataacatttatgaatggagatcaactatacttggtccaccgggttctgtatatgaaggtggtgtgttttttctggatatcacattttcatcagattatccatttaagccaccaaaggttactttccgcaccagaatctatcactgcaacatcaacagtcagggagtcatctgtctggacatccttaaagacaactggagtcccgctttgactatttcaaaggttttgctgtctatttgttcccttttgacagactgcaaccctgcggacccgccggccgcaagcattccctactcaacactctcaccccccaacccaccaccccctgctacgccaaccagagtcacaaacaccactcacgatacctcacctcccctccaccgcatctccctacccggcccagcgcaccgccccctctgctgcacactaccacctgcactccaatgcccgcccccaccacccccgcccctgctctcacccactcgactagaatatcccatcacccacagtattgagcattgggcccgcccaccacgtcggcgcggctacacggcgtgcgcaccccctccagccactctaccacagtccagcctcacgagtaggcccccccccgccccccgcgttgcccccccctcccccctcccctcccccctcgcagcccccccgccccatctccgctctgtcgtcccgccgcttgctcctcaacacctccccgcaatctcacaggagccaccacatcccaccagccgcccctcacgcctccacccaccacg

SEQ ID NO: 13118 - DNA, 818 bp, Homo sapiens
tcttcgcgagaaaaatcatacatttcctagttctcgaggatttcttttagttccatgtttcctccaggccaacagtaagatgttttcacttttctttctttctttctttctttttttttttttttttcagaagaggtgtggtggaaaggtcttccagaaccagaggctaagcacacagcagtacaaatataaattctttattccagcttccagaattcctcctcttcagccttgcctgctcactggaataatgaagcaattaaacagtggtgtaaagaagttccatccagtggttgaagttcaatagaaaacaaggaaataggctgatgtatatcaaatacaccatcggcactctgagtccttcccaggttccctaattaaaataattatatgttaaataaaatatgcagatgttaaattgacttcctcctggggccacttagcatttatttcttgttacccctaagctgctgtttttcttagatttatatcttcgtgtgcagagaagaatgtcgggaagaatatacactagaatgtttacaactagagagaatgtgccaccttaggggttcagccaggagcacagagagcctgagctattccgactgtcttcttgagaatagtcctcaacccaggcctgtagaactaattctcctctgttgaggtaatcttttcagcttcttgtctatccctccagagatacatttaacttgtagtcttcctaatgaaattctatgatttggtatcttttaacattaaacttgaagacttcatttaaggcatttggtgtttaactaaaagcaaaatggcttctttgt

SEQ ID NO: 13119 - DNA, 1486 bp, Homo sapiens
gtgaagggagatgtagtcgtatagcaaagaacgcggaaggagctagcggtaagactctcttaatctaccacggctacacttttccaagagataacttcaccaagatgtccagtgataggcaaaggtccgatgatgagagccccagcaccagcagtggcagttcagatgcggaccagcgagacccagccgctccagagcctgaagaacaagaggaaagaaaaccttctgccacccagcagaagaaaaacaccaaactctctagcaaaaccactgctaagttatccactagtgctaaaagaattcagaaggagctagctgaaataacccttgatcctcctcctaattgcagtgctgggcctaaaggagataacatttatgaatggagatcaactatacttggtccaccgggttctgtatatgaaggtggtgtgttttttctggatatcacattttcatcagattatccatttaagccaccaaaggttactttccgcaccagaatctatcactgcaacatcaacagtcagggagtcatctgtctggacatccttaaagacaactggagtcccgctttgactatttcaaaggttttgctgtctatttgttcccttttgacagactgcaaccctgcggatcctctggttggaagcatagccactcagtatttgaccaacagagcagaacacgacaggatagccagacagtggaccaagagatacgcaacataattcacataatttgtatgcagtgtgaaggagcagaaggcatcttctcactgtgctgcaaatctttatagcctttacaatacggacttctgtgtatatgttatactgattctactctgcttttatcctttggagcctgggagactccccaaaaaggtaaatgctatcaagagtagaactttgtagctgtagattagttatgtttaaaacgcctacttgcaagtcttgcttctttgggatatcaaaatgtattttgtgatgtactaaggatactggtcctgaagtctaccaaatattatagtgcattttagcctaattcattatctgtatgaagttataaaagtagctgtagatggctaggaattatgtcatttgtattaaacccagatctatttctgagtatgtggttcatgctgttgtgaaaaatgttttaccttttacctttgtcagtttgtaatgagaggatttccttttaccctttgtagctcagagagcacctgatgtatcatctcaaacacaataaacatgctcctgaaggcatagtttcctgtcgtaatattttaagtcagtcttgttagaaagtgtgtctgagatgattgttgatgaagtaaaaatgtggctatgaagattactaaagactagcacaaataaacccattcttaaattgaaaacatttaaaatcctattaaatgcatagagtttttttcctttgttattgaaagaatgaccttaaataatcaaaagtggattttgacccattg

SEQ ID NO: 13120 - DNA, 1659 bp, Homo sapiens
agcacgaggggcgagcgctacccgcggcccccgcgcggccctccccacaaagggccgcggagctgcgtggccgccgccgccggccgtggctcgcctccgcgggcgcggaaatttgttgcacttcttggggcttgtttatttgtttgttttttctctgggtttcttatttttttcgttattttggacaaaatgtcggtccgtgatataaaaattgagcgaggaaccttggtggcattgggagctttgcagaagttttccaagagataacttcaccaagatgtccagtgataggcaaaggtccgatgatgagagccccagcaccagcagtggcagttcagatgcggaccagcgagacccagccgctccagagcctgaagaacaagaggaaagaaaaccttctgccacccagcagaagaaaaacaccaaactctctagcaaaaccactgctaagttatccactagtgctaaaagaattcagaaggagctagctgaaataacccttgatcctcctcctaattgcagtgctgggcctaaaggagataacatttatgaatggagatcaactatacttggtccaccgggttctgtatatgaaggtggtgtgttttttctggatatcacattttcatcagattatccatttaagccaccaaaggttactttccgcaccagaatctatcactgcaacatcaacagtcagggagtcatctgtctggacatccttaaagacaactggagtcccgctttgactatttcaaaggttttgctgtctatttgttcccttttgacagactgcaaccctgcggatcctctggttggaagcatagccactcagtatttgaccaacagagcagaacacgacaggatagccagacagtggaccaagagatacgcaacataattcacataatttgtatgcagtgtgaaggagcagaaggcatcttctcactgtgctgcaaatctttatagcctttacaatacggacttctgtgtatatgttatactgattctactctgcttttatcctttggagcctgggagactccccaaaaaggtaaatgctatcaagagtagaactttgtagctgtagattagttatgtttaaaacgcctacttgcaagtcttgcttctttgggatatcaaaatgtattttgtgatgtactaaggatactggtcctgaagtctaccaaatattatagtgcattttagcctaattcattatctgtatgaagttataaaagtagctgtagatggctaggaattatgtcatttgtattaaacccagatctatttctgagtatgtggttcatgctgttgtgaaaaatgttttaccttttacctttgtcagtttgtaatgagaggatttccttttaccctttgtagctcagagagcacctgatgtatcatctcaaacacaataaacatgctcctgaaggcatagtttcctgtcgtaatattttaagtcagtcttgttagaaagtgtgtctgagatgattgttgatgaagtaaaaatgtggctatgaagattactaaagactagcacaaataaacccattcttaaattgaaaacatttaaaatcctattaaatgcatagagtttttttcctttgttattgaaagaatgaccttaaataatcaaaagtggattttgacccattg

SEQ ID NO: 13121 - DNA, 1564 bp, Homo sapiens
gccagccctgccgggtccccgccgcgctctttgtcctggccgcgcgcgggcggacgcgtgcacccccaggtgaggggaggtgtggagagcgcgcacgggagcgcgcgggaacagctcgcgcccgccgggcgtcggcggcgcgcgcccctccgccagttttccaagagataacttcagccaagatgtccagtgataggcaaaggtccgatgatgagagccccagcaccagcagtggcagttcagatgcggaccagcgagacccagccgctccagagcctgaagaacaagaggaaagaaaaccttctgccacccagcagaagaaaaacaccaaactctctagcaaaaccactgctaagttatccactagtgctaaaagaattcagaaggagctagctgaaataacccttgatcctcctcctaattgcagtgctgggcctaaaggagataacatttatgaatggagatcaactatacttggtccaccgggttctgtatatgaaggtggtgtgttttttctggatatcacattttcatcagattatccatttaagccaccaaaggttactttccgcaccagaatctatcactgcaacatcaacagtcagggagtcatctgtctggacatccttaaagacaactggagtcccgctttgactatttcaaaggttttgctgtctatttgttcccttttgacagactgcaaccctgcggatcctctggttggaagcatagccactcagtatttgaccaacagagcagaacacgacaggatagccagacagtggaccaagagatacgcaacataattcacataatttgtatgcagtgtgaaggagcagaaggcatcttctcactgtgctgcaaatctttatagcctttacaatacggacttctgtgtatatgttatactgattctactctgcttttatcctttggagcctgggagactccccaaaaaggtaaatgctatcaagagtagaactttgtagctgtagattagttatgtttaaaacgcctacttgcaagtcttgcttctttgggatatcaaaatgtattttgtgatgtactaaggatactggtcctgaagtctaccaaatattatagtgcattttagcctaattcattatctgtatgaagttataaaagtagctgtagatggctaggaattatgtcatttgtattaaacccagatctatttctgagtatgtggttcatgctgttgtgaaaaatgttttaccttttacctttgtcagtttgtaatgagaggatttccttttaccctttgtagctcagagagcacctgatgtatcatctcaaacacaataaacatgctcctgaaggcatagtttcctgtcgtaatattttaagtcagtcttgttagaaagtgtgtctgagatgattgttgatgaagtaaaaatgtggctatgaagattactaaagactagcacaaataaacccattcttaaattgaaaacatttaaaatcctattaaatgcatagagtttttttcctttgttattgaaagaatgaccttaaataatcaaaagtggattttgacccattg

SEQ ID NO: 13122 - DNA, 1226 bp, Homo sapiens
ttgtatggaacttgactctctccttaacgccgcaccagaattcagaaggagctagctgaaataacccttgatcctcctcctaattgcagtgctgggcctaaaggagataacatttatgaatggagatcaactatacttggtccaccgggttctgtatatgaaggtggtgtgttttttctggatatcacattttcatcagattatccatttaagccaccaaaggttactttccgcaccagaatctatcactgcaacatcaacagtcagggagtcatctgtctggacatccttaaagacaactggagtcccgctttgactatttcaaaggttttgctgtctatttgttcccttttgacagactgcaaccctgcggatcctctggttggaagcatagccactcagtatttgaccaacagagcagaacacgacaggatagccagacagtggaccaagagatacgcaacataattcacataatttgtatgcagtgtgaaggagcagaaggcatcttctcactgtgctgcaaatctttatagcctttacaatacggacttctgtgtatatgttatactgattctactctgcttttatcctttggagcctgggagactccccaaaaaggtaaatgctatcaagagtagaactttgtagctgtagattagttatgtttaaaacgcctacttgcaagtcttgcttctttgggatatcaaaatgtattttgtgatgtactaaggatactggtcctgaagtctaccaaatattatagtgcattttagcctaattcattatctgtatgaagttataaaagtagctgtagatggctaggaattatgtcatttgtattaaacccagatctatttctgagtatgtggttcatgctgttgtgaaaaatgttttaccttttacctttgtcagtttgtaatgagaggatttccttttaccctttgtagctcagagagcacctgatgtatcatctcaaacacaataaacatgctcctgaaggcatagtttcctgtcgtaatattttaagtcagtcttgttagaaagtgtgtctgagatgattgttgatgaagtaaaaatgtggctatgaagattactaaagactagcacaaataaacccattcttaaattgaaaacatttaaaatcctattaaatgcatagagtttttttcctttgttattgaaagaatgaccttaaataatcaaaagtggattttgacccattg

SEQ ID NO: 13123 - DNA, 1483 bp, Homo sapiens
tgtttgtgcgtgggggcgtgggtgtggggggagggggaagctggctgcaacgctctcttaatttccaccgctacagttttccaagagataacttcaccaagatgtccagtgataggcaaaggtccgatgatgagagccccagcaccagcagtggcagttcagatgcggaccatcgagacccagccgctccagagcctgaagaacaagaggaaagaaaaccttctgccacccagcagaagaaaaacaccaaactctctagcaaaaccactgtttttttattcactagtgctaaaagaattcagaaggagctagctgaaataacccttgatcctcctcctaattgcagtgctgggcctaaaggagataacatttatgaatggagatcaactatacttggtccaccgggttctgtatatgaaggtggtgtgttttttctggatatcacattttcatcagattatccatttaagccaccaaaggttactttccgcaccagaatctatcactgcaacatcaacagtcagggagtcatctgtctggacatccttaaagacaactggagtcccgctttgactatttcaaaggttttgctgtctatttgttcccttttgacagactgcaaccctgcggatcctctggttggaagcatagccactcagtatttgaccaacagagcagaacacgacaggatagccagacagtggaccaagagatacgcaacataattcacataatttgtatgcagtgtgaaggagcagaaggcatcttctcactgtgctgcaaatctttatagcctttacaatacggacttctgtgtatatgttatactgattctactctgcttttatcctttggagcctgggagactccccaaaaaggtaaatgctatcaagagtagaactttgtagctgtagattagttatgtttaaaacgcctacttgcaagtcttgcttctttgggatatcaaaatgtattttgtgatgtactaaggatactggtcctgaagtctaccaaatattatagtgcattttagcctaattcattatctgtatgaagttataaaagtagctgtagatggctaggaattatgtcatttgtattaaacccagatctatttctgagtatgtggttcatgctgttgtgaaaaatgttttaccttttacctttgtcagtttgtaatgagaggatttccttttaccctttgtagctcagagagcacctgatgtatcatctcaaacacaataaacatgctcctgaaggcatagtttcctgtcgtaatattttaagtcagtcttgttagaaagtgtgtctgagatgattgttgatgaagtaaaaatgtggctatgaagattactaaagactagcacaaataaacccattcttaaattgaaaacatttaaaatcctattaaatgcatagagtttttttcctttgttattgaaagaatgaccttaaataatcaaaagtggattttgacccattg

SEQ ID NO: 13124 - DNA, 2029 bp, Homo sapiens
  misc_feature (181)..(181): n is a, c, g, or t
  misc_feature (204)..(204): n is a, c, g, or t
  misc_feature (206)..(206): n is a, c, g, or t
  misc_feature (242)..(244): n is a, c, g, or t
  misc_feature (247)..(247): n is a, c, g, or t
  misc_feature (251)..(251): n is a, c, g, or t
  misc_feature (255)..(256): n is a, c, g, or t
gcggccgggaggagccgagccgggcggcggcggcgggaggctacagcgcgcgggggtctcccgcgtcccctccgcctcgccgggagctcgcgccctcgcccagccgagctcccacccccgcttttttccgaagcgctgggcggcgccaccctccggccggagcccggcactgcacaacccnctccgactttcaatgttccacantncccggccagagcctcctcggcttctttttttccctnnnccnaaantccnnccccacagctgcctccatttccttaaggaagggtttttttctctctccctcccccacaccgtagcggcgcgcgagcgggccgggcgggcggccgagttttccaagagataacttcaccaagatgtccagtgataggcaaaggtccgatgatgagagccccagcaccagcagtggcagttcagatgcggaccagcgagacccagccgctccagagcctgaagaacaagaggaaagaaaaccttctgccacccagcagaagaaaaacaccaaactctctagcaaaaccactgctaagttatccactagtgctaaaagaattcagaaggagctagctgaaataacccttgatcctcctcctaattgcagttttccaagagataacttcaccaagatgtccagtgataggcaaaggtccgatgatgagagccccagcaccagcagtggcagttcagatgcggaccagcgagacccagccgctccagagcctgaagaacaagaggaaagaaaaccttctgccacccagcagaagaaaaacaccaaactctctagcaaaaccactgctaagttatccactagtgctaaaagaattcagaaggagctagctgaaataacccttgatcctcctcctaattgcagtgctgggcctaaaggagataacatttatgaatggagatcaactatacttggtccaccgggttctgtatatgaaggtggtgtgttttttctggatatcacattttcatcagattatccatttaagccaccaaaggttactttccgcaccagaatctatcactgcaacatcaacagtcagggagtcatctgtctggacatccttaaagacaactggagtcccgctttgactatttcaaaggttttgctgtctatttgttcccttttgacagactgcaaccctgcggatcctctggttggaagcatagccactcagtatttgaccaacagagcagaacacgacaggatagccagacagtggaccaagagatacgcaacataattcacataatttgtatgcagtgtgaaggagcagaaggcatcttctcactgtgctgcaaatctttatagcctttacaatacggacttctgtgtatatgttatactgattctactctgcttttatcctttggagcctgggagactccccaaaaaggtaaatgctatcaagagtagaactttgtagctgtagattagttatgtttaaaacgcctacttgcaagtcttgcttctttgggatatcaaaatgtattttgtgatgtactaaggatactggtcctgaagtctaccaaatattatagtgcattttagcctaattcattatctgtatgaagttataaaagtagctgtagatggctaggaattatgtcatttgtattaaacccagatctatttctgagtatgtggttcatgctgttgtgaaaaatgttttaccttttacctttgtcagtttgtaatgagaggatttccttttaccctttgtagctcagagagcacctgatgtatcatctcaaacacaataaacatgctcctgaaggcatagtttcctgtcgtaatattttaagtcagtcttgttagaaagtgtgtctgagatgattgttgatgaagtaaaaatgtggctatgaagattactaaagactagcacaaataaacccattcttaaattgaaaacatttaaaatcctattaaatgcatagagtttttttcctttgttattgaaagaatgaccttaaataatcaaaagtggattttgacccattg

SEQ ID NO: 13125 - DNA, 1208 bp, Homo sapiens
  misc_feature (58)..(58): n is a, c, g, or t
  misc_feature (60)..(60): n is a, c, g, or t
  misc_feature (62)..(62): n is a, c, g, or t
  misc_feature (66)..(66): n is a, c, g, or t
  misc_feature (68)..(68): n is a, c, g, or t
cccgctcgcaatatcaacacgcgccggaaaggattgtagctaaagtgactctcttacnancnccgntncagtgctgggcctaaaggagataacatttatgaatggagatcaactatacttggtccaccgggttctgtatatgaaggtggtgtgttttttctggatatcacattttcatcagattatccatttaagccaccaaaggttactttccgcaccagaatctatcactgcaacatcaacagtcagggagtcatctgtctggacatccttaaagacaactggagtcccgctttgactatttcaaaggttttgctgtctatttgttcccttttgacagactgcaaccctgcggatcctctggttggaagcatagccactcagtatttgaccaacagagcagaacacgacaggatagccagacagtggaccaagagatacgcaacataattcacataatttgtatgcagtgtgaaggagcagaaggcatcttctcactgtgctgcaaatctttatagcctttacaatacggacttctgtgtatatgttatactgattctactctgcttttatcctttggagcctgggagactccccaaaaaggtaaatgctatcaagagtagaactttgtagctgtagattagttatgtttaaaacgcctacttgcaagtcttgcttctttgggatatcaaaatgtattttgtgatgtactaaggatactggtcctgaagtctaccaaatattatagtgcattttagcctaattcattatctgtatgaagttataaaagtagctgtagatggctaggaattatgtcatttgtattaaacccagatctatttctgagtatgtggttcatgctgttgtgaaaaatgttttaccttttacctttgtcagtttgtaatgagaggatttccttttaccctttgtagctcagagagcacctgatgtatcatctcaaacacaataaacatgctcctgaaggcatagtttcctgtcgtaatattttaagtcagtcttgttagaaagtgtgtctgagatgattgttgatgaagtaaaaatgtggctatgaagattactaaagactagcacaaataaacccattcttaaattgaaaacatttaaaatcctattaaatgcatagagtttttttcctttgttattgaaagaatgaccttaaataatcaaaagtggattttgacccattg

SEQ ID NO: 13126 - DNA, 1579 bp, Homo sapiens
  misc_feature (181)..(181): n is a, c, g, or t
  misc_feature (204)..(204): n is a, c, g, or t
  misc_feature (206)..(206): n is a, c, g, or t
  misc_feature (242)..(244): n is a, c, g, or t
  misc_feature (247)..(247): n is a, c, g, or t
  misc_feature (251)..(251): n is a, c, g, or t
  misc_feature (255)..(256): n is a, c, g, or t
gcggccgggaggagccgagccgggcggcggcggcgggaggctacagcgcgcgggggtctcccgcgtcccctccgcctcgccgggagctcgcgccctcgcccagccgagctcccacccccgcttttttccgaagcgctgggcggcgccaccctccggccggagcccggcactgcacaacccnctccgactttcaatgttccacantncccggccagagcctcctcggcttctttttttccctnnnccnaaantccnnccccacagctgcctccatttccttaaggaagggtttttttctctctccctcccccacaccgtagcggcgcgcgagcgggccgggcgggcggccgagttttccaagagataacttcaccaagatgtccagtgataggcaaaggtccgatgatgagagccccagcaccagcagtggcagttcagatgcggaccagcgagacccagccgctccagagcctgaagaacaagaggaaagaaaaccttctgccacccagcagaagaaaaacaccaaactctctagcaaaaccactgctaagttatccactagtgctaaaagaattcagaaggagctagctgaaataacccttgatcctcctcctaattgcagtgctgggcctaaaggagataacatttatgaatggagatcaactatacttggtccaccgggttctgtatatgaaggtggtgtgttttttctggatatcacattttcatcagattatccatttaagccaccaaaggttactttccgcaccagaatctatcactgcaacatcaacagtcagggagtcatctgtctggacatccttaaagacaactggagtcccgctttgactatttcaaaggttttgctgtctatttgttcccttttgacagactgcaaccctgcggatcctctggttggaagcatagccactcagtatttgaccaacagagcagaacacgacaggatagccagacagtggaccaagagatacgcaacataattcacataatttgtatgcagtgtgaaggagcagaaggcatcttctcactgtgctgcaaatctttatagcctttacaatacggacttctgtgtatatgttatactgattctactctgcttttatcctttggagcctgggagactccccaaaaaggtaaatgctatcaagagtagaactttgtagctgtagattagttatgtttaaaacgcctacttgcaagtcttgcttctttgggatatcaaaatgtattttgtgatgtactaaggatactggtcctgaagtctaccaaatattatagtgcattttagcctaattcattatctgtatgaagttataaaagtagctgtagatggctaggaattatgtcatttgtattaaacccagatctatttctgagtatgtggttcatgctgttgtgaaaaatgttttaccttttacctttgtcagtttgtaatgagaggatttccttttaccctttgtagctcagagagcacctgatgtatcatctcaaacacaataaacatatgatgcggcctgcttaatcttcccaactctgctaatcacctaccgatacctaa

SEQ ID NO: 13127 - DNA, 1818 bp, Homo sapiens
  misc_feature (181)..(181): n is a, c, g, or t
  misc_feature (204)..(204): n is a, c, g, or t
  misc_feature (206)..(206): n is a, c, g, or t
  misc_feature (242)..(244): n is a, c, g, or t
  misc_feature (247)..(247): n is a, c, g, or t
  misc_feature (251)..(251): n is a, c, g, or t
  misc_feature (255)..(256): n is a, c, g, or t
gcggccgggaggagccgagccgggcggcggcggcgggaggctacagcgcgcgggggtctcccgcgtcccctccgcctcgccgggagctcgcgccctcgcccagccgagctcccacccccgcttttttccgaagcgctgggcggcgccaccctccggccggagcccggcactgcacaacccnctccgactttcaatgttccacantncccggccagagcctcctcggcttctttttttccctnnnccnaaantccnnccccacagctgcctccatttccttaaggaagggtttttttctctctccctcccccacaccgtagcggcgcgcgagcgggccgggcgggcggccgagttttccaagagataacttcaccaagatgtccagtgataggcaaaggtccgatgatgagagccccagcaccagcagtggcagttcagatgcggaccagcgagacccagccgctccagagcctgaagaacaagaggaaagaaaaccttctgccacccagcagaagaaaaacaccaaactctctagcaaaaccactgctaagttatccactagtgctaaaagaattcagaaggagctagctgaaataacccttgatcctcctcctaattgcagtgctgggcctaaaggagataacatttatgaatggagatcaactatacttggtccaccgggttctgtatatgaaggtggtgtgttttttctggatatcacattttcatcagattatccatttaagccaccaaaggttactttccgcaccagaatctatcactgcaacatcaacagtcagggagtcatctgtctggacatccttaaagacaactggagtcccgctttgactatttcaaaggttttgctgtctatttgttcccttttgacagactgcaaccctgcggatcctctggttggaagcatagccactcagtatttgaccaacagagcagaacacgacaggatagccagacagtggaccaagagatacgcaacataattcacataatttgtatgcagtgtgaaggagcagaaggcatcttctcactgtgctgcaaatctttatagcctttacaatacggacttctgtgtatatgttatactgattctactctgcttttatcctttggagcctgggagactccccaaaaaggtaaatgctatcaagagtagaactttgtagctgtagattagttatgtttaaaacgcctacttgcaagtcttgcttctttgggatatcaaaatgtattttgtgatgtactaaggatactggtcctgaagtctaccaaatattatagtgcattttagcctaattcattatctgtatgaagttataaaagtagctgtagatggctaggaattatgtcatttgtattaaacccagatctatttctgagtatgtggttcatgctgttgtgaaaaatgttttaccttttacctttgtcagtttgtaatgagaggatttccttttaccctttgtagctcagagagcacctgatgtatcatctcaaacacaataaacaaaaaaaaaaaaaaaaaaaaaaaaaaaaaaaaaaaaaacaccaaaaaaaaaaaaaaaaaaaaaaaaaaaaaacgaaccacagaaaaagacagaaacaacaagaaaagacataagaaagaaacaagaagaaacaaaagaggggggggggggcggcataagaataatacgccagggggggcaggcacgtaggtcgggacaacgcactatattaggaagagagggggcgcccacaaggaggggggcattcaaaataacaacgagaggcgccgggcgggaaaacacacgcgggggggaa

SEQ ID NO: 13128 - DNA, 1569 bp, Homo sapiens
  misc_feature (181)..(181): n is a, c, g, or t
  misc_feature (204)..(204): n is a, c, g, or t
  misc_feature (206)..(206): n is a, c, g, or t
  misc_feature (242)..(244): n is a, c, g, or t
  misc_feature (247)..(247): n is a, c, g, or t
  misc_feature (251)..(251): n is a, c, g, or t
  misc_feature (255)..(256): n is a, c, g, or t
gcggccgggaggagccgagccgggcggcggcggcgggaggctacagcgcgcgggggtctcccgcgtcccctccgcctcgccgggagctcgcgccctcgcccagccgagctcccacccccgcttttttccgaagcgctgggcggcgccaccctccggccggagcccggcactgcacaacccnctccgactttcaatgttccacantncccggccagagcctcctcggcttctttttttccctnnnccnaaantccnnccccacagctgcctccatttccttaaggaagggtttttttctctctccctcccccacaccgtagcggcgcgcgagcgggccgggcgggcggccgagttttccaagagataacttcaccaagatgtccagtgataggcaaaggtccgatgatgagagccccagcaccagcagtggcagttcagatgcggaccagcgagacccagccgctccagagcctgaagaacaagaggaaagaaaaccttctgccacccagcagaagaaaaacaccaaactctctagcaaaaccactgctaagttatccactagtgctaaaagaattcagaaggagctagctgaaataacccttgatcctcctcctaattgcagtgctgggcctaaaggagataacatttatgaatggagatcaactatacttggtccaccgggttctgtatatgaaggtggtgtgttttttctggatatcacattttcatcagattatccatttaagccaccaaaggttactttccgcaccagaatctatcactgcaacatcaacagtcagggagtcatctgtctggacatccttaaagacaactggagtcccgctttgactatttcaaaggttttgctgtctatttgttcccttttgacagactgcaaccctgcggatcctctggttggaagcatagccactcagtatttgaccaacagagcagaacacgacaggatagccagacagtggaccaagagatacgcaacataattcacataatttgtatgcagtgtgaaggagcagaaggcatcttctcactgtgctgcaaatctttatagcctttacaatacggacttctgtgtatatgttatactgattctactctgcttttatcctttggagcctgggagactccccaaaaaggtaaatgctatcaagagtagaactttgtagctgtagattagttatgtttaaaacgcctacttgcaagtcttgcttctttgggatatcaaaatgtattttgtgatgtactaaggatactggtcctgaagtctaccaaatattatagtgcattttagcctaattcattatctgtatgaagttataaaagtagctgtagatggctaggaattatgtcatttgtattaaacccagatctatttctgagtatgtggttcatgctgttgtgaaaaatgttttaccttttacctttgtcagtttgtaatgagaggatttccttttaccctttgtagctcagagagcacctgatgtatcatctcaaacacaataaacatgagagcggccgattattattaaaacaagtcgaatagttatgtat

SEQ ID NO: 13129 - DNA, 1575 bp, Homo sapiens
  misc_feature (181)..(181): n is a, c, g, or t
  misc_feature (204)..(204): n is a, c, g, or t
  misc_feature (206)..(206): n is a, c, g, or t
  misc_feature (242)..(244): n is a, c, g, or t
  misc_feature (247)..(247): n is a, c, g, or t
  misc_feature (251)..(251): n is a, c, g, or t
  misc_feature (255)..(256): n is a, c, g, or t
gcggccgggaggagccgagccgggcggcggcggcgggaggctacagcgcgcgggggtctcccgcgtcccctccgcctcgccgggagctcgcgccctcgcccagccgagctcccacccccgcttttttccgaagcgctgggcggcgccaccctccggccggagcccggcactgcacaacccnctccgactttcaatgttccacantncccggccagagcctcctcggcttctttttttccctnnnccnaaantccnnccccacagctgcctccatttccttaaggaagggtttttttctctctccctcccccacaccgtagcggcgcgcgagcgggccgggcgggcggccgagttttccaagagataacttcaccaagatgtccagtgataggcaaaggtccgatgatgagagccccagcaccagcagtggcagttcagatgcggaccagcgagacccagccgctccagagcctgaagaacaagaggaaagaaaaccttctgccacccagcagaagaaaaacaccaaactctctagcaaaaccactgctaagttatccactagtgctaaaagaattcagaaggagctagctgaaataacccttgatcctcctcctaattgcagtgctgggcctaaaggagataacatttatgaatggagatcaactatacttggtccaccgggttctgtatatgaaggtggtgtgttttttctggatatcacattttcatcagattatccatttaagccaccaaaggttactttccgcaccagaatctatcactgcaacatcaacagtcagggagtcatctgtctggacatccttaaagacaactggagtcccgctttgactatttcaaaggttttgctgtctatttgttcccttttgacagactgcaaccctgcggatcctctggttggaagcatagccactcagtatttgaccaacagagcagaacacgacaggatagccagacagtggaccaagagatacgcaacataattcacataatttgtatgcagtgtgaaggagcagaaggcatcttctcactgtgctgcaaatctttatagcctttacaatacggacttctgtgtatatgttatactgattctactctgcttttatcctttggagcctgggagactccccaaaaaggtaaatgctatcaagagtagaactttgtagctgtagattagttatgtttaaaacgcctacttgcaagtcttgcttctttgggatatcaaaatgtattttgtgatgtactaaggatactggtcctgaagtctaccaaatattatagtgcattttagcctaattcattatctgtatgaagttataaaagtagctgtagatggctaggaattatgtcatttgtattaaacccagatctatttctgagtatgtggttcatgctgttgtgaaaaatgttttaccttttacctttgtcagtttgtaatgagaggatttccttttaccctttgtagctcagagagcacctgatgtatcatctcaaacacaataaacatgagcgtcagaaaatgatgttgataaaagagaggaagtataaataaatata

SEQ ID NO: 13130 - DNA, 1070 bp, Homo sapiens
  misc_feature (6)..(6): n is a, c, g, or t
  misc_feature (25)..(25): n is a, c, g, or t
  misc_feature (45)..(45): n is a, c, g, or t
  misc_feature (54)..(54): n is a, c, g, or t
tggaanttctggcacgagcatgganatcacacttttcatcagatnatccagttnaagccaccaaaggttactttccgcaccagaatctatcactgcaacatcaacagtcagggagtcatctgtctggacatccttaaagacaactggagtcccgctttgactatttcaaaggttttgctgtctatttgttcccttttgacagactgcaaccctgcggatcctctggttggaagcatagccactcagtatttgaccaacagagcagaacacgacaggatagccagacagtggaccaagagatacgcaacataattcacataatttgtatgcagtgtgaaggagcagaaggcatcttctcactgtgctgcaaatctttatagcctttacaatacggacttctgtgtatatgttatactgattctactctgcttttatcctttggagcctgggagactccccaaaaaggtaaatgctatcaagagtagaactttgtagctgtagattagttatgtttaaaacgcctacttgcaagtcttgcttctttgggatatcaaaatgtattttgtgatgtactaaggatactggtcctgaagtctaccaaatattatagtgcattttagcctaattcattatctgtatgaagttataaaagtagctgtagatggctaggaattatgtcatttgtattaaacccagatctatttctgagtatgtggttcatgctgttgtgaaaaatgttttaccttttacctttgtcagtttgtaatgagaggatttccttttaccctttgtagctcagagagcacctgatgtatcatctcaaacacaataaacatgctcctgaaggcatagtttcctgtcgtaatattttaagtcagtcttgttagaaagtgtgtctgagatgattgttgatgaagtaaaaatgtggctatgaagattactaaagactagcacaaataaacccattcttaaattgaaaacatttaaaatcctattaaatgcatagagtttttttcctttgttattgaaagaatgaccttaaataatcaaaagtggattttgacccattg

SEQ ID NO: 13131 - DNA, 1962 bp, Homo sapiens
  misc_feature (181)..(181): n is a, c, g, or t
  misc_feature (204)..(204): n is a, c, g, or t
  misc_feature (206)..(206): n is a, c, g, or t
  misc_feature (242)..(244): n is a, c, g, or t
  misc_feature (247)..(247): n is a, c, g, or t
  misc_feature (251)..(251): n is a, c, g, or t
  misc_feature (255)..(256): n is a, c, g, or t
gcggccgggaggagccgagccgggcggcggcggcgggaggctacagcgcgcgggggtctcccgcgtcccctccgcctcgccgggagctcgcgccctcgcccagccgagctcccacccccgcttttttccgaagcgctgggcggcgccaccctccggccggagcccggcactgcacaacccnctccgactttcaatgttccacantncccggccagagcctcctcggcttctttttttccctnnnccnaaantccnnccccacagctgcctccatttccttaaggaagggtttttttctctctccctcccccacaccgtagcggcgcgcgagcgggccgggcgggcggccgagttttccaagagataacttcaccaagatgtccagtgataggcaaaggtccgatgatgagagccccagcaccagcagtggcagttcagatgcggaccagcgagacccagccgctccagagcctgaagaacaagaggaaagaaaaccttctgccacccagcagaagaaaaacaccaaactctctagcaaaaccactgctaagttatccactagtgctaaaagaattcagaaggagctagctgaaataacccttgatcctcctcctaattgcagtgctgggcctaaaggagataacatttatgaatggagatcaactatacttggtccaccgggttctgtatatgaaggtggtgtgttttttctggatatcacattttcatcagattatccatttaagccaccaaaggttactttccgcaccagaatctatcactgcaacatcaacagtcagggagtcatctgtctggacatccttaaagacaactggagtcccgctttgactatttcaaaggttttgctgtctatttgttcccttttgacagactgcaaccctgcggatcctctggttggaagcatagccactcagtatttgaccaacagagcagaacacgacaggatagccagacagtggaccaagagatacgcaacataattcacataatttgtatgcagtgtgaaggagcagaaggcatcttctcactgtgctgcaaatctttatagcctttacaatacggacttctgtgtatatgttatactgattctactctgcttttatcctttggagcctgggagactccccaaaaaggtaaatgctatcaagagtagaactttgtaaggtgtggtggaaaggtcttccagaaccagaggctaagcacacagcagtacaaatataaattctttattccagcttccagaattcctcctcttcagccttgcctgctcactggaataatgaagcaattaaacagtggtgtaaagaagttccatccagtggttgaagttcaatagaaaacaaggaaataggctgatgtatatcaaatacaccatcggcactctgagtccttcccaggttccctaaagggggaggaggggacaccgttttagatttaatttgtactgtacctgatatgattgtgataattttccaatgaataattgttaatcttacctaattaaaataattatatgttaaataaaatatgcagatgttaaattgacttcctcctggggccacttagcatttatttcttgttacccctaagctgctgtttttcttagatttatatcttcgtgtgcagagaagaatgtcgggaagaatatacactagaatgtttacaactagagagaatgtgccaccttaggggttcagccaggagcacagagagcctgagctattccgactgtcttcttgagaatagtcctcaacccaggcctgtagaactaattctcctctgttgaggtaatcttttcagcttcttgtctatccctccagagatacatttaacttgtagtcttcctaatgaaattctatgatttggtatcttttaacattaaacttgaagacttcatttaaggcatttggtgtttaactaaaagcaaaatggcttctttgt

SEQ ID NO: 13132 - DNA, 572 bp, Homo sapiens
  misc_feature (20)..(20): n is a, c, g, or t
ctagaggacccccatctctnatgcggtaagtctgtgtgttggtcttgggatatcaaaatgtattttgtgatgtactaaggatactggtcctgaagtctaccaaatattatagtgcattttagcctaattcattatctgtatgaagttataaaagtagctgtagatggctaggaattatgtcatttgtattaaacccagatctatttctgagtatgtggttcatgctgttgtgaaaaatgttttaccttttacctttgtcagtttgtaatgagaggatttccttttaccctttgtagctcagagagcacctgatgtatcatctcaaacacaataaacatgctcctgaaggcatagtttcctgtcgtaatattttaagtcagtcttgttagaaagtgtgtctgagatgattgttgatgaagtaaaaatgtggctatgaagattactaaagactagcacaaataaacccattcttaaattgaaaacatttaaaatcctattaaatgcatagagtttttttcctttgttattgaaagaatgaccttaaataatcaaaagtggattttgacccattg

SEQ ID NO: 13133 - DNA, 1600 bp, Homo sapiens
gctgcctttgtgaagttgaagagccaggagctactcagcaacaattgatttttgaaacttaactcttttggggcaaaagcaaagagctggttttctttgctagcccaataaatgctatttatgaagatggacctgttgaactatcagtacttggacaagatgaacaacaatatcggcattctgtgctacgaagttttccaagagataacttcaccaagatgtccagtgataggcaaaggtccgatgatgagagccccagcaccagcagtggcagttcagatgcggaccagcgagacccagccgctccagagcctgaagaacaagaggaaagaaaaccttctgccacccagcagaagaaaaacaccaaactctctagcaaaaccactgctaagttatccactagtgctaaaagaattcagaaggagctagctgaaataacccttgatcctcctcctaattgcagtgctgggcctaaaggagataacatttatgaatggagatcaactatacttggtccaccgggttctgtatatgaaggtggtgtgttttttctggatatcacattttcatcagattatccatttaagccaccaaaggttactttccgcaccagaatctatcactgcaacatcaacagtcagggagtcatctgtctggacatccttaaagacaactggagtcccgctttgactatttcaaaggttttgctgtctatttgttcccttttgacagactgcaaccctgcggatcctctggttggaagcatagccactcagtatttgaccaacagagcagaacacgacaggatagccagacagtggaccaagagatacgcaacataattcacataatttgtatgcagtgtgaaggagcagaaggcatcttctcactgtgctgcaaatctttatagcctttacaatacggacttctgtgtatatgttatactgattctactctgcttttatcctttggagcctgggagactccccaaaaaggtaaatgctatcaagagtagaactttgtagctgtagattagttatgtttaaaacgcctacttgcaagtcttgcttctttgggatatcaaaatgtattttgtgatgtactaaggatactggtcctgaagtctaccaaatattatagtgcattttagcctaattcattatctgtatgaagttataaaagtagctgtagatggctaggaattatgtcatttgtattaaacccagatctatttctgagtatgtggttcatgctgttgtgaaaaatgttttaccttttacctttgtcagtttgtaatgagaggatttccttttaccctttgtagctcagagagcacctgatgtatcatctcaaacacaataaacatgctcctgaaggcatagtttcctgtcgtaatattttaagtcagtcttgttagaaagtgtgtctgagatgattgttgatgaagtaaaaatgtggctatgaagattactaaagactagcacaaataaacccattcttaaattgaaaacatttaaaatcctattaaatgcatagagtttttttcctttgttattgaaagaatgaccttaaataatcaaaagtggattttgacccattg

SEQ ID NO: 13134 - DNA, 1510 bp, Homo sapiens
caatatgaagagctacggccaagttcatgcagtcacaggcaatgacaactatatcaccaatgctgcctggctgagagtgatttaagacatcattgattggaagttttccaagagataacttcaccaagatgtccagtgataggcaaaggtccgatgatgagagccccagcaccagcagtggcagttcagatgcggaccagcgagacccagccgctccagagcctgaagaacaagaggaaagaaaaccttctgccacccagcagaagaaaaacaccaaactctctagcaaaaccactgctaagttatccactagtgctaaaagaattcagaaggagctagctgaaataacccttgatcctcctcctaattgcagtgctgggcctaaaggagataacatttatgaatggagatcaactatacttggtccaccgggttctgtatatgaaggtggtgtgttttttctggatatcacattttcatcagattatccatttaagccaccaaaggttactttccgcaccagaatctatcactgcaacatcaacagtcagggagtcatctgtctggacatccttaaagacaactggagtcccgctttgactatttcaaaggttttgctgtctatttgttcccttttgacagactgcaaccctgcggatcctctggttggaagcatagccactcagtatttgaccaacagagcagaacacgacaggatagccagacagtggaccaagagatacgcaacataattcacataatttgtatgcagtgtgaaggagcagaaggcatcttctcactgtgctgcaaatctttatagcctttacaatacggacttctgtgtatatgttatactgattctactctgcttttatcctttggagcctgggagactccccaaaaaggtaaatgctatcaagagtagaactttgtagctgtagattagttatgtttaaaacgcctacttgcaagtcttgcttctttgggatatcaaaatgtattttgtgatgtactaaggatactggtcctgaagtctaccaaatattatagtgcattttagcctaattcattatctgtatgaagttataaaagtagctgtagatggctaggaattatgtcatttgtattaaacccagatctatttctgagtatgtggttcatgctgttgtgaaaaatgttttaccttttacctttgtcagtttgtaatgagaggatttccttttaccctttgtagctcagagagcacctgatgtatcatctcaaacacaataaacatgctcctgaaggcatagtttcctgtcgtaatattttaagtcagtcttgttagaaagtgtgtctgagatgattgttgatgaagtaaaaatgtggctatgaagattactaaagactagcacaaataaacccattcttaaattgaaaacatttaaaatcctattaaatgcatagagtttttttcctttgttattgaaagaatgaccttaaataatcaaaagtggattttgacccattg

SEQ ID NO: 13135 - DNA, 1208 bp, Homo sapiens
  misc_feature (45)..(45): n is a, c, g, or t
  misc_feature (55)..(55): n is a, c, g, or t
  misc_feature (57)..(58): n is a, c, g, or t
  misc_feature (66)..(66): n is a, c, g, or t
  misc_feature (68)..(68): n is a, c, g, or t
acaaatgggaggagatgtgaaataagaaaaaaagttatctgcagngactctcttntnnaccaccgntncagtgctgggcctaaaggagataacatttatgaatggagatcaactatacttggtccaccgggttctgtatatgaaggtggtgtgttttttctggatatcacattttcatcagattatccatttaagccaccaaaggttactttccgcaccagaatctatcactgcaacatcaacagtcagggagtcatctgtctggacatccttaaagacaactggagtcccgctttgactatttcaaaggttttgctgtctatttgttcccttttgacagactgcaaccctgcggatcctctggttggaagcatagccactcagtatttgaccaacagagcagaacacgacaggatagccagacagtggaccaagagatacgcaacataattcacataatttgtatgcagtgtgaaggagcagaaggcatcttctcactgtgctgcaaatctttatagcctttacaatacggacttctgtgtatatgttatactgattctactctgcttttatcctttggagcctgggagactccccaaaaaggtaaatgctatcaagagtagaactttgtagctgtagattagttatgtttaaaacgcctacttgcaagtcttgcttctttgggatatcaaaatgtattttgtgatgtactaaggatactggtcctgaagtctaccaaatattatagtgcattttagcctaattcattatctgtatgaagttataaaagtagctgtagatggctaggaattatgtcatttgtattaaacccagatctatttctgagtatgtggttcatgctgttgtgaaaaatgttttaccttttacctttgtcagtttgtaatgagaggatttccttttaccctttgtagctcagagagcacctgatgtatcatctcaaacacaataaacatgctcctgaaggcatagtttcctgtcgtaatattttaagtcagtcttgttagaaagtgtgtctgagatgattgttgatgaagtaaaaatgtggctatgaagattactaaagactagcacaaataaacccattcttaaattgaaaacatttaaaatcctattaaatgcatagagtttttttcctttgttattgaaagaatgaccttaaataatcaaaagtggattttgacccattg

SEQ ID NO: 13136 - DNA, 1582 bp, Homo sapiens
  misc_feature (181)..(181): n is a, c, g, or t
  misc_feature (204)..(204): n is a, c, g, or t
  misc_feature (206)..(206): n is a, c, g, or t
  misc_feature (242)..(244): n is a, c, g, or t
  misc_feature (247)..(247): n is a, c, g, or t
  misc_feature (251)..(251): n is a, c, g, or t
  misc_feature (255)..(256): n is a, c, g, or t
  misc_feature (1525)..(1525): n is a, c, g, or t
  misc_feature (1529)..(1529): n is a, c, g, or t
  misc_feature (1540)..(1540): n is a, c, g, or t
gcggccgggaggagccgagccgggcggcggcggcgggaggctacagcgcgcgggggtctcccgcgtcccctccgcctcgccgggagctcgcgccctcgcccagccgagctcccacccccgcttttttccgaagcgctgggcggcgccaccctccggccggagcccggcactgcacaacccnctccgactttcaatgttccacantncccggccagagcctcctcggcttctttttttccctnnnccnaaantccnnccccacagctgcctccatttccttaaggaagggtttttttctctctccctcccccacaccgtagcggcgcgcgagcgggccgggcgggcggccgagttttccaagagataacttcaccaagatgtccagtgataggcaaaggtccgatgatgagagccccagcaccagcagtggcagttcagatgcggaccagcgagacccagccgctccagagcctgaagaacaagaggaaagaaaaccttctgccacccagcagaagaaaaacaccaaactctctagcaaaaccactgctaagttatccactagtgctaaaagaattcagaaggagctagctgaaataacccttgatcctcctcctaattgcagtgctgggcctaaaggagataacatttatgaatggagatcaactatacttggtccaccgggttctgtatatgaaggtggtgtgttttttctggatatcacattttcatcagattatccatttaagccaccaaaggttactttccgcaccagaatctatcactgcaacatcaacagtcagggagtcatctgtctggacatccttaaagacaactggagtcccgctttgactatttcaaaggttttgctgtctatttgttcccttttgacagactgcaaccctgcggatcctctggttggaagcatagccactcagtatttgaccaacagagcagaacacgacaggatagccagacagtggaccaagagatacgcaacataattcacataatttgtatgcagtgtgaaggagcagaaggcatcttctcactgtgctgcaaatctttatagcctttacaatacggacttctgtgtatatgttatactgattctactctgcttttatcctttggagcctgggagactccccaaaaaggtaaatgctatcaagagtagaactttgtagctgtagattagttatgtttaaaacgcctacttgcaagtcttgcttctttgggatatcaaaatgtattttgtgatgtactaaggatactggtcctgaagtctaccaaatattatagtgcattttagcctaattcattatctgtatgaagttataaaagtagctgtagatggctaggaattatgtcatttgtattaaacccagatctatttctgagtatgtggttcatgctgttgtgaaaaatgttttaccttttacctttgtcagtttgtaatgagaggatttccttttaccctttgtagctcagagagcacctgatgtatcatctcaaacacaataaacangcgntgcggccagcntcttcctctcttttgtcctacacaacaaggtgtcgcgtgcgg

SEQ ID NO: 13137 - DNA, 1574 bp, Homo sapiens
  misc_feature (181)..(181): n is a, c, g, or t
  misc_feature (204)..(204): n is a, c, g, or t
  misc_feature (206)..(206): n is a, c, g, or t
  misc_feature (242)..(244): n is a, c, g, or t
  misc_feature (247)..(247): n is a, c, g, or t
  misc_feature (251)..(251): n is a, c, g, or t
  misc_feature (255)..(256): n is a, c, g, or t
gcggccgggaggagccgagccgggcggcggcggcgggaggctacagcgcgcgggggtctcccgcgtcccctccgcctcgccgggagctcgcgccctcgcccagccgagctcccacccccgcttttttccgaagcgctgggcggcgccaccctccggccggagcccggcactgcacaacccnctccgactttcaatgttccacantncccggccagagcctcctcggcttctttttttccctnnnccnaaantccnnccccacagctgcctccatttccttaaggaagggtttttttctctctccctcccccacaccgtagcggcgcgcgagcgggccgggcgggcggccgagttttccaagagataacttcaccaagatgtccagtgataggcaaaggtccgatgatgagagccccagcaccagcagtggcagttcagatgcggaccagcgagacccagccgctccagagcctgaagaacaagaggaaagaaaaccttctgccacccagcagaagaaaaacaccaaactctctagcaaaaccactgctaagttatccactagtgctaaaagaattcagaaggagctagctgaaataacccttgatcctcctcctaattgcagtgctgggcctaaaggagataacatttatgaatggagatcaactatacttggtccaccgggttctgtatatgaaggtggtgtgttttttctggatatcacattttcatcagattatccatttaagccaccaaaggttactttccgcaccagaatctatcactgcaacatcaacagtcagggagtcatctgtctggacatccttaaagacaactggagtcccgctttgactatttcaaaggttttgctgtctatttgttcccttttgacagactgcaaccctgcggatcctctggttggaagcatagccactcagtatttgaccaacagagcagaacacgacaggatagccagacagtggaccaagagatacgcaacataattcacataatttgtatgcagtgtgaaggagcagaaggcatcttctcactgtgctgcaaatctttatagcctttacaatacggacttctgtgtatatgttatactgattctactctgcttttatcctttggagcctgggagactccccaaaaaggtaaatgctatcaagagtagaactttgtagctgtagattagttatgtttaaaacgcctacttgcaagtcttgcttctttgggatatcaaaatgtattttgtgatgtactaaggatactggtcctgaagtctaccaaatattatagtgcattttagcctaattcattatctgtatgaagttataaaagtagctgtagatggctaggaattatgtcatttgtattaaacccagatctatttctgagtatgtggttcatgctgttgtgaaaaatgttttaccttttacctttgtcagtttgtaatgagaggatttccttttaccctttgtagctcagagagcacctgatgtatcatctcaaacacaataaacagatgcggcaagtttttgtgggggaatttcatcaatatttatttatatttg

SEQ ID NO: 13138 - DNA, 1577 bp, Homo sapiens
  misc_feature (181)..(181): n is a, c, g, or t
  misc_feature (204)..(204): n is a, c, g, or t
  misc_feature (206)..(206): n is a, c, g, or t
  misc_feature (242)..(244): n is a, c, g, or t
  misc_feature (247)..(247): n is a, c, g, or t
  misc_feature (251)..(251): n is a, c, g, or t
  misc_feature (255)..(256): n is a, c, g, or t
gcggccgggaggagccgagccgggcggcggcggcgggaggctacagcgcgcgggggtctcccgcgtcccctccgcctcgccgggagctcgcgccctcgcccagccgagctcccacccccgcttttttccgaagcgctgggcggcgccaccctccggccggagcccggcactgcacaacccnctccgactttcaatgttccacantncccggccagagcctcctcggcttctttttttccctnnnccnaaantccnnccccacagctgcctccatttccttaaggaagggtttttttctctctccctcccccacaccgtagcggcgcgcgagcgggccgggcgggcggccgagttttccaagagataacttcaccaagatgtccagtgataggcaaaggtccgatgatgagagccccagcaccagcagtggcagttcagatgcggaccagcgagacccagccgctccagagcctgaagaacaagaggaaagaaaaccttctgccacccagcagaagaaaaacaccaaactctctagcaaaaccactgctaagttatccactagtgctaaaagaattcagaaggagctagctgaaataacccttgatcctcctcctaattgcagtgctgggcctaaaggagataacatttatgaatggagatcaactatacttggtccaccgggttctgtatatgaaggtggtgtgttttttctggatatcacattttcatcagattatccatttaagccaccaaaggttactttccgcaccagaatctatcactgcaacatcaacagtcagggagtcatctgtctggacatccttaaagacaactggagtcccgctttgactatttcaaaggttttgctgtctatttgttcccttttgacagactgcaaccctgcggatcctctggttggaagcatagccactcagtatttgaccaacagagcagaacacgacaggatagccagacagtggaccaagagatacgcaacataattcacataatttgtatgcagtgtgaaggagcagaaggcatcttctcactgtgctgcaaatctttatagcctttacaatacggacttctgtgtatatgttatactgattctactctgcttttatcctttggagcctgggagactccccaaaaaggtaaatgctatcaagagtagaactttgtagctgtagattagttatgtttaaaacgcctacttgcaagtcttgcttctttgggatatcaaaatgtattttgtgatgtactaaggatactggtcctgaagtctaccaaatattatagtgcattttagcctaattcattatctgtatgaagttataaaagtagctgtagatggctaggaattatgtcatttgtattaaacccagatctatttctgagtatgtggttcatgctgttgtgaaaaatgttttaccttttacctttgtcagtttgtaatgagaggatttccttttaccctttgtagctcagagagcacctgatgtatcatctcaaacacaataaacatgtgatacgaaaagcttttctaatatttattgtaggaataataacactaattc

SEQ ID NO: 13139 - DNA, 995 bp, Homo sapiens
  misc_feature (36)..(36): n is a, c, g, or t
gtgcggtaccgccagtcgcgcttggaacagtcaggnggagtcatctgtctggacatccttaaagacaactggagtcccgctttgactatttcaaaggttttgctgtctatttgttcccttttgacagactgcaaccctgcggatcctctggttggaagcatagccactcagtatttgaccaacagagcagaacacgacaggatagccagacagtggaccaagagatacgcaacataattcacataatttgtatgcagtgtgaaggagcagaaggcatcttctcactgtgctgcaaatctttatagcctttacaatacggacttctgtgtatatgttatactgattctactctgcttttatcctttggagcctgggagactccccaaaaaggtaaatgctatcaagagtagaactttgtagctgtagattagttatgtttaaaacgcctacttgcaagtcttgcttctttgggatatcaaaatgtattttgtgatgtactaaggatactggtcctgaagtctaccaaatattatagtgcattttagcctaattcattatctgtatgaagttataaaagtagctgtagatggctaggaattatgtcatttgtattaaacccagatctatttctgagtatgtggttcatgctgttgtgaaaaatgttttaccttttacctttgtcagtttgtaatgagaggatttccttttaccctttgtagctcagagagcacctgatgtatcatctcaaacacaataaacatgctcctgaaggcatagtttcctgtcgtaatattttaagtcagtcttgttagaaagtgtgtctgagatgattgttgatgaagtaaaaatgtggctatgaagattactaaagactagcacaaataaacccattcttaaattgaaaacatttaaaatcctattaaatgcatagagtttttttcctttgttattgaaagaatgaccttaaataatcaaaagtggattttgacccattg

SEQ ID NO: 13140 - DNA, 1868 bp, Homo sapiens
  misc_feature (181)..(181): n is a, c, g, or t
  misc_feature (204)..(204): n is a, c, g, or t
  misc_feature (206)..(206): n is a, c, g, or t
  misc_feature (242)..(244): n is a, c, g, or t
  misc_feature (247)..(247): n is a, c, g, or t
  misc_feature (251)..(251): n is a, c, g, or t
  misc_feature (255)..(256): n is a, c, g, or t
gcggccgggaggagccgagccgggcggcggcggcgggaggctacagcgcgcgggggtctcccgcgtcccctccgcctcgccgggagctcgcgccctcgcccagccgagctcccacccccgcttttttccgaagcgctgggcggcgccaccctccggccggagcccggcactgcacaacccnctccgactttcaatgttccacantncccggccagagcctcctcggcttctttttttccctnnnccnaaantccnnccccacagctgcctccatttccttaaggaagggtttttttctctctccctcccccacaccgtagcggcgcgcgagcgggccgggcgggcggccgagttttccaagagataacttcaccaagatgtccagtgataggcaaaggtccgatgatgagagccccagcaccagcagtggcagttcagatgcggaccagcgagacccagccgctccagagcctgaagaacaagaggaaagaaaaccttctgccacccagcagaagaaaaacaccaaactctctagcaaaaccactgctaagttatccactagtgctaaaagaattcagaaggagctagctgaaataacccttgatcctcctcctaattgcagtgctgggcctaaaggagataacatttatgaatggagatcaactatacttggtccaccgggttctgtatatgaaggtggtgtgttttttctggatatcacattttcatcagattatccatttaagccaccaaaggttactttccgcaccagaatctatcactgcaacatcaacagtcagggagtcatctgtctggacatccttaaagacaactggagtcccgctttgactatttcaaaggttttgctgtctatttgttcccttttgacagactgcaaccctgcggatcctctggttggaagcatagccactcagtatttgaccaacagagcagaacacgacaggatagccagacagtggaccaagagatacgcaacataattcacataatttgtatgcagtgtgaaggagcagaaggcatcttctcactgtgctgcaaatctttatagcctttacaatacggacttctgtgtatatgttatactgattctactctgcttttatcctttggagcctgggagactccccaaaaaggtaaatgctatcaagagtagaactttgtaaggtgtggtggaaaggtcttccagaaccagaggctaagcacacagcagtacaaatataaattctttattccagcttccagaattcctcctcttcagccttgcctgctcactggaataatgaagcaattaaacagtggtgtaaagaagttccatccagtggttgaagttcaatagaaaacaaggaaataggctgatgtatatcaaatacaccatcggcactctgagtccttcccaggttccctaattaaaataattatatgttaaataaaatatgcagatgttaaattgacttcctcctggggccacttagcatttatttcttgttacccctaagctgctgtttttcttagatttatatcttcgtgtgcagagaagaatgtcgggaagaatatacactagaatgtttacaactagagagaatgtgccaccttaggggttcagccaggagcacagagagcctgagctattccgactgtcttcttgagaatagtcctcaacccaggcctgtagaactaattctcctctgttgaggtaatcttttcagcttcttgtctatccctccagagatacatttaacttgtagtcttcctaatgaaattctatgatttggtatcttttaacattaaacttgaagacttcatttaaggcatttggtgtttaactaaaagcaaaatggcttctttgt

SEQ ID NO: 13141 - DNA, 407 bp, Homo sapiens
acaaaaaatatgaataaactagtcaggaatggtggtgcacacctgtagtcccagctacttgggagcctaaggtgggaggatctcttgagcctaggagtttcaggctgtggtgagccatgatcacgccactgcactccagcctgggcaacagagggagaccctgtcccataaaaaaaggaaaatactttcccgactcctaaccctcttcttgtgctcttgggcctccagaaagcctgatgtaaatagctgtattggttctcgttgaaatctcagcgaggagcttaggcaattgccatcacaaggcttgaattatgagcccttctctccctcttaaccaaaatcaaaatgttgtgatagtctaatccagtgtttttgtttttaacttttcaaatacataaaaacaaatg

SEQ ID NO: 13142 - DNA, 501 bp, Homo sapiens
ctcgcctgagtgcttgttagatatgcatgatgtcaggcttgctgcggacctactgaacaagaagctgcagtgtcacaagatcctcaggtgtttcttgtgtgcattaaagtctgagaagccctgatctagaaaataacgtctcaactcatctgtgatgccaatattcttgtcagattgttgctggggtaggatttcagcttttggtgaacagagaatgaatcaattatctatttggtttagtgccaactataataataatatcatagagtgagctgtcatctggcattgttgggagatggagtacaggtgaacaatttgtcagctcgggcaaggtcaatagcctgctttgagaaaccttggtgggcaccacggttactatttcagagccagagagaagaaggcagagggcaacatttttcttgggatataatttttcttcccttcttaaaataccgtgagtaatgtacggggtgagggaaagatgggaaggggtcaaagttg

SEQ ID NO: 13143 - DNA, 421 bp, Homo sapiens
ccaggttcaaaatgtgggaaagcctacagaacaaataagtcagtttctttaacaaatgaatcatgggggaaaaaaagtgtccatgtatatgtgtagggggtgtaaggagtgtgccattaattaattaaaataaaagacattaacctaatgcaatattcggacttttgaggccatgaggaaacaacacagaagggtcttagaggatattaaggaatcattgtcacttgtgttaggtatgatgatgacattgtggttgtgctgaggtgatgtatctgttagaaatatatactgaagaatttagaagtgacacgatacaattgctaggctttgcttgaaaacacaccagcaagaagaacacccccacaaagaagctgagggctgacaaaaacagaatgctgctagtcatggaagccgggtgatg

SEQ ID NO: 13144 - DNA, 1007 bp, Homo sapiens
  misc_feature (225)..(225): n is a, c, g, or t
attcgagatcagcctggccaacatggtgaaaccagtactttgggaggctgaggcgggtggagcacctgaggtcaggaattcgagatcagcctggccaacatggtgaaaccccatctctactgaaaaacacacacaaaaaaattagctgggcatggtggcacatgcctgtaatcccagctactcgggaggctgaggcaggagaatcatttgaacctgggaggcggngcttgcagtgagccgagattgcacccctgcactccagcctgggccacagagcaagactctgtctcaagaaaaacaaaaaaaaagataaatggacaaaagacatgaacaaacagcttttataggatagtatggctaacaaacttttagaaaagtgtttagtctcactagtaagtaacaaaatattggggcagggcacagtggctcatgcgtataatcctagaactttggaaggccaaagctggtggattgcttgagcccaggagtttgagaccagcccaggcaacattgggagaccctgcctctacaaatatacaaaaaaattactgggcatggtgacacacacctgtggtcccagctgttctgaaggctgaggtgggaggatcacttgagaccaggagaggtcaaggctgcagtgatctgtgatcacaccactgcactccagcctgggcaacagagcaaaaccctgcctttaaaaaaacaaaaaacaaaaaaggccgggctcagtggctcatgcctataatactttgggaggccgaggcaggtggatcaattgaggtcaggtgttcgagaccagccaggccaacttggtgaaaccccgtctctactaaaaatacaaaaaaaaaaaaaaaaaaaattagccagatgtggtggtgcacatttgtagtcccagctgctcaggaggctgaggcaggataatcgcttgaacctgggaggcagaggttgcagtgagccaagatcgcaccactgcactccagcctgggtgtcgagtgaaactcattctc

SEQ ID NO: 13145 - DNA, 506 bp, Homo sapiens
aataatatactttttttttcattgacactaattttatgctgtagattattttagcagggcctaatataggctaccttacatttttcacactttctaaacttagttttgtttccatcctagaagacagtatgatattttctctggccagttgcataataactgcaaaatgtaagtataaattgatttctttttcagaggaattactaaatatataggtgtgagccaccacgtctggttgagaactgttctaagcaataaccactcacaaattttgagccagtgtatttaccatcacaagtaaatattttagaatattgatttatcgataaatctgctagcttgatttgtctgaattatttcattagtgctcctaagtgaactgataaatcggcctaataaggttgagtgcatgagataatccattgcaacagccaacattgagcactcctacagatatgatatttatttattatcataactattttacctaaggtaaaattaagtgg

SEQ ID NO: 13146 - DNA, 4199 bp, Homo sapiens
  misc_feature (2902)..(2902): n is a, c, g, or t
  misc_feature (3221)..(3221): n is a, c, g, or t
  misc_feature (3417)..(3417): n is a, c, g, or t
agagtatcctcctcgcatcagcagaatcacattgtcactttcttcagccagtgggcaacactcaaatttaagtgtgtaacagtgtccccgggagggctctgttcaaacagattgttgtacgcgccccctacccctgcccaccccgagtgtttgattcagtaggtctagtttgggatcgagaatctttttattttgttttccttttgttttgttttgttttgtttttgagacagggtctcgccctgtcgcccaggctggagtgcagtcgtgccatctcggctcactgtagcctctgcctccccggctaaagtgatcctccagcctcagcctccggagcagctggggccacaggcaagcgccaccactgtaggctaattttttttttttttttttttttttttttgtagagactggggtctcactatgttgcccacgctggtctcaaactcctgggctcaagcgatcctcccgcttcagcctcccaaggtgctgggattacaggtggagccaccgcgcccggcatcgataatctgaatctctaacgagctcccgggcgacgttgatgcagctggtaccgggaccactcttcgaaaatcatcggtttagaggttttaattctgaatccattgcgaaaactgttgggcggacagagcactactaactcctaacttttctcagaaagctgggctctgctttcgccagcaacccggtccgaagtcgcgggcatattctgtctgaaatcgtgtgcaccgaaatccccgccttgcggtggaggctggcgctaggcggcctcagcctcggcctgctgcgctcaggaacccgcgccccggctcctcggcgatccattgctctttcctctggcgccggccgcaggcctcggtcacgcccccagcggcccgttggtttccgggtcccgcggggtgcccccgcccacacgctatgccttaaattgggccaggctgaggcgctgctgctggagcggccgatccgagacgtggctccctgggcggcagaaccatgttggacttcgcgatcttcgccgttaccttcttgctggcgttggtgggagccgtgctctacctctatccggcttccagacaagctgcaggaattccagggattactccaactgaagaaaaagatggtaatcttccagatattgtgaatagtggaagtttgcatgagttcctggttaatttgcatgagagatatgggcctgtggtctccttctggtttggcaggcgcctcgtggttagtttgggcactgttgatgtactgaagcagcatatcaatcccaataagacattggacccttttgaaaccatgctgaagtcattattaaggtatcaatctggtggtggcagtgtgagtgaaaaccacatgaggaaaaaattgtatgaaaatggtgtgactgattctctgaagagtaactttgccctcctcctaaagctttcagaagaattattagataaatggctctcctacccagagacccagcacgtgcccctcagccagcatatgcttggttttgctatgaagtctgttacacagatggtaatgggtagtacatttgaagatgatcaggaagtcattcgcttccagaagaatcatggcacagtttggtctgagattggaaaaggctttctagatgggtcacttgataaaaacatgactcggaaaaaacaatatgaagatgccctcatgcaactggagtctgttttaaggaacatcataaaagaacgaaaaggaaggaacttcagtcaacatattttcattgactccttagtacaagggaaccttaatgaccaacagatcctagaagacagtatgatattttctctggccagttgcataataactgcaaaattgtgtacctgggcaatctgttttttaaccacctctgaagaagttcaaaaaaaattatatgaagagataaaccaagtttttggaaatggtcctgttactccagagaaaattgagcagctcagatattgtcagcatgtgctttgtgaaactgttcgaactgccaaactgactccagtttctgcccagtttcaagatattgaaggaaaaattgaccgatttattattcctagagagaccctcgtcctttatgcccttggtgtggtacttcaggatcctaatacttggccatctccacacaagtttgatccagatcggtttgatgatgaattagtaatgaaaactttttcctcacttggattctcaggcacacaggagtgtccagagttgaggtttgcatatatggtgaccacagtacttcttagtgtattggtgaagagactgcacctactttctgtggagggacaggttattgaaacaaagtatgaactggtaacatcatcaagggaagaagcttggatcactgtctcaaagagatattaaaattttatacatttaaaatcattgttaaattgattgaggaaaacaaccatttaaaaaaaatctatgttgaatccttttataaaccagtatcactttgtaatataaacacctatttgtacttaattttgtaaatttggatttttatatatcatattttcttaattcattggacacatttgacttactgcacagtatattgatcattttaatgggaaactttagctttctactttttatttttgttttttcactttctatgccattatttttgtattctttttcttagtgtgagctctaaaatcaatgttcttgaaaaagaaattattttgcagaagttggggaatcatgtttgttgaatatgtataaaatagaaacataggctgggcgcggtggctcacacctgtaatccctacactttgggaggctgaggcaggtggatcacctgaggtccagagtttgagaccagtctggccaacatgatgaaaccccatctctnctagaaatacaaaacattggccgggagtggtggctcatgcctgtaatcccagcactttgggatgctgaggcgggtggatcacctgaggtcaggagtttgcgaccagcctggccaacatgatgaaaccctgtctctactaaaaatacaaaaaaattggctgggtgtggtggcccacacctgtaatcccagcactttgggaggtcgaggcgggtggatcacctgaggtccgaagttcgaggccagcctggccaacaggatgaaaccctgtctctattaaaaatacagaaaattggccgggtgcggtggctcacccctgtantcccagtactttgggaggctgaggcgggtggagcacctgaggtcaggaattcgagatcagcctggccaacatggtgaaaccccatctctactgaaaaacacacacaaaaaaattagctgggcatggtggcacatgcctgtaatcccagctactcgggaggctgaggcaggagaatcatttgaacctgggaggcggngcttgcagtgagccgagattgcacccctgcactccagcctgggccacagagcaagactctgtctcaagaaaaacaaaaaaaaagataaatggacaaaagacatgaacaaacagcttttataggatagtatggctaacaaacttttagaaaagtgtttagtctcactagtaagtaacaaaatattggggcagggcacagtggctcatgcgtataatcctagaactttggaaggccaaagctggtggattgcttgagcccaggagtttgagaccagcccaggcaacattgggagaccctgcctctacaaatatacaaaaaaattactgggcatggtgacacacacctgtggtcccagctgttctgaaggctgaggtgggaggatcacttgagaccaggagaggtcaaggctgcagtgatctgtgatcacaccactgcactccagcctgggcaacagagcaaaaccctgcctttaaaaaaacaaaaaacaaaaaaggccgggctcagtggctcatgcctataatactttgggaggccgaggcaggtggatcaattgaggtcaggtgttcgagaccagccaggccaacttggtgaaaccccgtctctactaaaaatacaaaaaaaaaaaaaaaaaaaattagccagatgtggtggtgcacatttgtagtcccagctgctcaggaggctgaggcaggataatcgcttgaacctgggaggcagaggttgcagtgagccaagatcgcaccactgcactccagcctgggtgtcgagtgaaactcattctc

SEQ ID NO: 13147 - DNA, 2656 bp, Homo sapiens
agagtatcctcctcgcatcagcagaatcacattgtcactttcttcagccagtgggcaacactcaaatttaagtgtgtaacagtgtccccgggagggctctgttcaaacagattgttgtacgcgccccctacccctgcccaccccgagtgtttgattcagtaggtctagtttgggatcgagaatctttttattttgttttccttttgttttgttttgttttgtttttgagacagggtctcgccctgtcgcccaggctggagtgcagtcgtgccatctcggctcactgtagcctctgcctccccggctaaagtgatcctccagcctcagcctccggagcagctggggccacaggcaagcgccaccactgtaggctaattttttttttttttttttttttttttttgtagagactggggtctcactatgttgcccacgctggtctcaaactcctgggctcaagcgatcctcccgcttcagcctcccaaggtgctgggattacaggtggagccaccgcgcccggcatcgataatctgaatctctaacgagctcccgggcgacgttgatgcagctggtaccgggaccactcttcgaaaatcatcggtttagaggttttaattctgaatccattgcgaaaactgttgggcggacagagcactactaactcctaacttttctcagaaagctgggctctgctttcgccagcaacccggtccgaagtcgcgggcatattctgtctgaaatcgtgtgcaccgaaatccccgccttgcggtggaggctggcgctaggcggcctcagcctcggcctgctgcgctcaggaacccgcgccccggctcctcggcgatccattgctctttcctctggcgccggccgcaggcctcggtcacgcccccagcggcccgttggtttccgggtcccgcggggtgcccccgcccacacgctatgccttaaattgggccaggctgaggcgctgctgctggagcggccgatccgagacgtggctccctgggcggcagaaccatgttggacttcgcgatcttcgccgttaccttcttgctggcgttggtgggagccgtgctctacctctatccggcttccagacaagctgcaggaattccagggattactccaactgaagaaaaagatggtaatcttccagatattgtgaatagtggaagtttgcatgagttcctggttaatttgcatgagagatatgggcctgtggtctccttctggtttggcaggcgcctcgtggttagtttgggcactgttgatgtactgaagcagcatatcaatcccaataagacattggacccttttgaaaccatgctgaagtcattattaaggtatcaatctggtggtggcagtgtgagtgaaaaccacatgaggaaaaaattgtatgaaaatggtgtgactgattctctgaagagtaactttgccctcctcctaaagctttcagaagaattattagataaatggctctcctacccagagacccagcacgtgcccctcagccagcatatgcttggttttgctatgaagtctgttacacagatggtaatgggtagtacatttgaagatgatcaggaagtcattcgcttccagaagaatcatggcacaccctcatgcaactggagtctgttttaaggaacatcataaaagaacgaaaaggaaggaacttcagtcaacatattttcattgactccttagtacaagggaaccttaatgaccaacagatcctagaagacagtatgatattttctctggccagttgcataataactgcaaaattgtgtacctgggcaatctgttttttaaccacctctgaagaagttcaaaaaaaattatatgaagagataaaccaagtttttggaaatggtcctgttactccagagaaaattgagcagctcagatattgtcagcatgtgctttgtgaaactgttcgaactgccaaactgactccagtttctgcccagtttcaagatattgaaggaaaaattgaccgatttattattcctagagagaccctcgtcctttatgcccttggtgtggtacttcaggatcctaatacttggccatctccacacaagtttgatccagatcggtttgatgatgaattagtaatgaaaactttttcctcacttggattctcaggcacacaggagtgtccagagttgaggtttgcatatatggtgaccacagtacttcttagtgtattggtgaagagactgcacctactttctgtggagggacaggttattgaaacaaagtatgaactggtaacatcatcaagggaagaagcttggatcactgtctcaaagagatattaaaattttatacatttaaaatcattgttaaattgattgaggaaaacaaccatttaaaaaaaatctatgttgaatccttttataaaccagtatcactttgtaatataaacacctatttgtacttaattttgtaaatttggatttttatatatcatattttcttaattcattggacacatttgacttactgcacagtatattgatcattttaatgggaaactttagctttctactttttatttttgttttttcactttctatgccattatttttgtattctttttcttagtgtgagctctaaaatcaatgttcttgaaaaagaaattattttg

SEQ ID NO: 13148 - DNA, 3982 bp, Homo sapiens
  misc_feature (2685)..(2685): n is a, c, g, or t
  misc_feature (3004)..(3004): n is a, c, g, or t
  misc_feature (3200)..(3200): n is a, c, g, or t
agagtatcctcctcgcatcagcagaatcacattgtcactttcttcagccagtgggcaacactcaaatttaagtgtgtaacagtgtccccgggagggctctgttcaaacagattgttgtacgcgccccctacccctgcccaccccgagtgtttgattcagtaggtctagtttgggatcgagaatctttttattttgttttccttttgttttgttttgttttgtttttgagacagggtctcgccctgtcgcccaggctggagtgcagtcgtgccatctcggctcactgtagcctctgcctccccggctaaagtgatcctccagcctcagcctccggagcagctggggccacaggcaagcgccaccactgtaggctaattttttttttttttttttttttttttttgtagagactggggtctcactatgttgcccacgctggtctcaaactcctgggctcaagcgatcctcccgcttcagcctcccaaggtgctgggattacaggtggagccaccgcgcccggcatcgataatctgaatctctaacgagctcccgggcgacgttgatgcagctggtaccgggaccactcttcgaaaatcatcggtttagaggttttaattctgaatccattgcgaaaactgttgggcggacagagcactactaactcctaacttttctcagaaagctgggctctgctttcgccagcaacccggtccgaagtcgcgggcatattctgtctgaaatcgtgtgcaccgaaatccccgccttgcggtggaggctggcgctaggcggcctcagcctcggcctgctgcgctcaggaacccgcgccccggctcctcggcgatccattgctctttcctctggcgccggccgcaggcctcggtcacgcccccagcggcccgttggtttccgggtcccgcggggtgcccccgcccacacgctatgccttaaattgggccaggctgaggcgctgctgctggagcggccgatccgagacgtggctccctgggcggcagaaccatgttggacttcgcgatcttcgccgttaccttcttgctggcgttggtgggagccgtgctctacctctatccgtggacccttttgaaaccatgctgaagtcattattaaggtatcaatctggtggtggcagtgtgagtgaaaaccacatgaggaaaaaattgtatgaaaatggtgtgactgattctctgaagagtaactttgccctcctcctaaagctttcagaagaattattagataaatggctctcctacccagagacccagcacgtgcccctcagccagcatatgcttggttttgctatgaagtctgttacacagatggtaatgggtagtacatttgaagatgatcaggaagtcattcgcttccagaagaatcatggcacagtttggtctgagattggaaaaggctttctagatgggtcacttgataaaaacatgactcggaaaaaacaatatgaagatgccctcatgcaactggagtctgttttaaggaacatcataaaagaacgaaaaggaaggaacttcagtcaacatattttcattgactccttagtacaagggaaccttaatgaccaacagatcctagaagacagtatgatattttctctggccagttgcataataactgcaaaattgtgtacctgggcaatctgttttttaaccacctctgaagaagttcaaaaaaaattatatgaagagataaaccaagtttttggaaatggtcctgttactccagagaaaattgagcagctcagatattgtcagcatgtgctttgtgaaactgttcgaactgccaaactgactccagtttctgcccagtttcaagatattgaaggaaaaattgaccgatttattattcctagagagaccctcgtcctttatgcccttggtgtggtacttcaggatcctaatacttggccatctccacacaagtttgatccagatcggtttgatgatgaattagtaatgaaaactttttcctcacttggattctcaggcacacaggagtgtccagagttgaggtttgcatatatggtgaccacagtacttcttagtgtattggtgaagagactgcacctactttctgtggagggacaggttattgaaacaaagtatgaactggtaacatcatcaagggaagaagcttggatcactgtctcaaagagatattaaaattttatacatttaaaatcattgttaaattgattgaggaaaacaaccatttaaaaaaaatctatgttgaatccttttataaaccagtatcactttgtaatataaacacctatttgtacttaattttgtaaatttggatttttatatatcatattttcttaattcattggacacatttgacttactgcacagtatattgatcattttaatgggaaactttagctttctactttttatttttgttttttcactttctatgccattatttttgtattctttttcttagtgtgagctctaaaatcaatgttcttgaaaaagaaattattttgcagaagttggggaatcatgtttgttgaatatgtataaaatagaaacataggctgggcgcggtggctcacacctgtaatccctacactttgggaggctgaggcaggtggatcacctgaggtccagagtttgagaccagtctggccaacatgatgaaaccccatctctnctagaaatacaaaacattggccgggagtggtggctcatgcctgtaatcccagcactttgggatgctgaggcgggtggatcacctgaggtcaggagtttgcgaccagcctggccaacatgatgaaaccctgtctctactaaaaatacaaaaaaattggctgggtgtggtggcccacacctgtaatcccagcactttgggaggtcgaggcgggtggatcacctgaggtccgaagttcgaggccagcctggccaacaggatgaaaccctgtctctattaaaaatacagaaaattggccgggtgcggtggctcacccctgtantcccagtactttgggaggctgaggcgggtggagcacctgaggtcaggaattcgagatcagcctggccaacatggtgaaaccccatctctactgaaaaacacacacaaaaaaattagctgggcatggtggcacatgcctgtaatcccagctactcgggaggctgaggcaggagaatcatttgaacctgggaggcggngcttgcagtgagccgagattgcacccctgcactccagcctgggccacagagcaagactctgtctcaagaaaaacaaaaaaaaagataaatggacaaaagacatgaacaaacagcttttataggatagtatggctaacaaacttttagaaaagtgtttagtctcactagtaagtaacaaaatattggggcagggcacagtggctcatgcgtataatcctagaactttggaaggccaaagctggtggattgcttgagcccaggagtttgagaccagcccaggcaacattgggagaccctgcctctacaaatatacaaaaaaattactgggcatggtgacacacacctgtggtcccagctgttctgaaggctgaggtgggaggatcacttgagaccaggagaggtcaaggctgcagtgatctgtgatcacaccactgcactccagcctgggcaacagagcaaaaccctgcctttaaaaaaacaaaaaacaaaaaaggccgggctcagtggctcatgcctataatactttgggaggccgaggcaggtggatcaattgaggtcaggtgttcgagaccagccaggccaacttggtgaaaccccgtctctactaaaaatacaaaaaaaaaaaaaaaaaaaattagccagatgtggtggtgcacatttgtagtcccagctgctcaggaggctgaggcaggataatcgcttgaacctgggaggcagaggttgcagtgagccaagatcgcaccactgcactccagcctgggtgtcgagtgaaactcattctc

SEQ ID NO: 13149 - DNA, 4315 bp, Homo sapiens
  misc_feature (3018)..(3018): n is a, c, g, or t
  misc_feature (3337)..(3337): n is a, c, g, or t
  misc_feature (3533)..(3533): n is a, c, g, or t
agagtatcctcctcgcatcagcagaatcacattgtcactttcttcagccagtgggcaacactcaaatttaagtgtgtaacagtgtccccgggagggctctgttcaaacagattgttgtacgcgccccctacccctgcccaccccgagtgtttgattcagtaggtctagtttgggatcgagaatctttttattttgttttccttttgttttgttttgttttgtttttgagacagggtctcgccctgtcgcccaggctggagtgcagtcgtgccatctcggctcactgtagcctctgcctccccggctaaagtgatcctccagcctcagcctccggagcagctggggccacaggcaagcgccaccactgtaggctaattttttttttttttttttttttttttttgtagagactggggtctcactatgttgcccacgctggtctcaaactcctgggctcaagcgatcctcccgcttcagcctcccaaggtgctgggattacaggtggagccaccgcgcccggcatcgataatctgaatctctaacgagctcccgggcgacgttgatgcagctggtaccgggaccactcttcgaaaatcatcggtttagaggttttaattctgaatccattgcgaaaactgttgggcggacagagcactactaactcctaacttttctcagaaagctgggctctgctttcgccagcaacccggtccgaagtcgcgggcatattctgtctgaaatcgtgtgcaccgaaatccccgccttgcggtggaggctggcgctaggcggcctcagcctcggcctgctgcgctcaggaacccgcgccccggctcctcggcgatccattgctctttcctctggcgccggccgcaggcctcggtcacgcccccagcggcccgttggtttccgggtcccgcggggtgcccccgcccacacgctatgccttaaattgggccaggctgaggcgctgctgctggagcggccgatccgagacgtggctccctgggcggcagaaccatgttggacttcgcgatcttcgccgttaccttcttgctggcgttggtgggagccgtgctctacctctatccggcttccagacaagctgcaggaattccagggattactccaactgaagaaaaagatggtaatcttccagatattgtgaatagtggaagtttgcatgagttcctggttaatttgcatgagagatatgggcctgtggtctccttctggtttggcaggcgcctcgtggttagtttgggcactgttgatgtactgaagcagcatatcaatcccaataagacattggacccttttgaaaccatgctgaagtcattattaaggtatcaatctggtggtggcagtgtgagtgaaaaccacatgaggaaaaaattgtatgaaaatggtgtgactgattctctgaagagtaactttgccctcctcctaaagctttcagaagaattattagataaatggctctcctacccagagacccagcacgtgcccctcagccagcatatgcttggttttgctatgaagtctgttacacagatggtaatgggtagtacatttgaagatgatcaggaagtcattcgcttccagaagaatcatggcacagtttggtctgagattggaaaaggctttctagatgggtcacttgataaaaacatgactcggaaaaaacaatatgaagatgagtctcgctctgttgccaggctggagtgcagtggtgcgatctcggccacagcaacctccgcctcccaggttcaagcaattctcctgcctcagcctcccgagtagctgggactacagccctcatgcaactggagtctgttttaaggaacatcataaaagaacgaaaaggaaggaacttcagtcaacatattttcattgactccttagtacaagggaaccttaatgaccaacagatcctagaagacagtatgatattttctctggccagttgcataataactgcaaaattgtgtacctgggcaatctgttttttaaccacctctgaagaagttcaaaaaaaattatatgaagagataaaccaagtttttggaaatggtcctgttactccagagaaaattgagcagctcagatattgtcagcatgtgctttgtgaaactgttcgaactgccaaactgactccagtttctgcccagtttcaagatattgaaggaaaaattgaccgatttattattcctagagagaccctcgtcctttatgcccttggtgtggtacttcaggatcctaatacttggccatctccacacaagtttgatccagatcggtttgatgatgaattagtaatgaaaactttttcctcacttggattctcaggcacacaggagtgtccagagttgaggtttgcatatatggtgaccacagtacttcttagtgtattggtgaagagactgcacctactttctgtggagggacaggttattgaaacaaagtatgaactggtaacatcatcaagggaagaagcttggatcactgtctcaaagagatattaaaattttatacatttaaaatcattgttaaattgattgaggaaaacaaccatttaaaaaaaatctatgttgaatccttttataaaccagtatcactttgtaatataaacacctatttgtacttaattttgtaaatttggatttttatatatcatattttcttaattcattggacacatttgacttactgcacagtatattgatcattttaatgggaaactttagctttctactttttatttttgttttttcactttctatgccattatttttgtattctttttcttagtgtgagctctaaaatcaatgttcttgaaaaagaaattattttgcagaagttggggaatcatgtttgttgaatatgtataaaatagaaacataggctgggcgcggtggctcacacctgtaatccctacactttgggaggctgaggcaggtggatcacctgaggtccagagtttgagaccagtctggccaacatgatgaaaccccatctctnctagaaatacaaaacattggccgggagtggtggctcatgcctgtaatcccagcactttgggatgctgaggcgggtggatcacctgaggtcaggagtttgcgaccagcctggccaacatgatgaaaccctgtctctactaaaaatacaaaaaaattggctgggtgtggtggcccacacctgtaatcccagcactttgggaggtcgaggcgggtggatcacctgaggtccgaagttcgaggccagcctggccaacaggatgaaaccctgtctctattaaaaatacagaaaattggccgggtgcggtggctcacccctgtantcccagtactttgggaggctgaggcgggtggagcacctgaggtcaggaattcgagatcagcctggccaacatggtgaaaccccatctctactgaaaaacacacacaaaaaaattagctgggcatggtggcacatgcctgtaatcccagctactcgggaggctgaggcaggagaatcatttgaacctgggaggcggngcttgcagtgagccgagattgcacccctgcactccagcctgggccacagagcaagactctgtctcaagaaaaacaaaaaaaaagataaatggacaaaagacatgaacaaacagcttttataggatagtatggctaacaaacttttagaaaagtgtttagtctcactagtaagtaacaaaatattggggcagggcacagtggctcatgcgtataatcctagaactttggaaggccaaagctggtggattgcttgagcccaggagtttgagaccagcccaggcaacattgggagaccctgcctctacaaatatacaaaaaaattactgggcatggtgacacacacctgtggtcccagctgttctgaaggctgaggtgggaggatcacttgagaccaggagaggtcaaggctgcagtgatctgtgatcacaccactgcactccagcctgggcaacagagcaaaaccctgcctttaaaaaaacaaaaaacaaaaaaggccgggctcagtggctcatgcctataatactttgggaggccgaggcaggtggatcaattgaggtcaggtgttcgagaccagccaggccaacttggtgaaaccccgtctctactaaaaatacaaaaaaaaaaaaaaaaaaaattagccagatgtggtggtgcacatttgtagtcccagctgctcaggaggctgaggcaggataatcgcttgaacctgggaggcagaggttgcagtgagccaagatcgcaccactgcactccagcctgggtgtcgagtgaaactcattctc

SEQ ID NO: 13150 - DNA, 2529 bp, Homo sapiens
agagtatcctcctcgcatcagcagaatcacattgtcactttcttcagccagtgggcaacactcaaatttaagtgtgtaacagtgtccccgggagggctctgttcaaacagattgttgtacgcgccccctacccctgcccaccccgagtgtttgattcagtaggtctagtttgggatcgagaatctttttattttgttttccttttgttttgttttgttttgtttttgagacagggtctcgccctgtcgcccaggctggagtgcagtcgtgccatctcggctcactgtagcctctgcctccccggctaaagtgatcctccagcctcagcctccggagcagctggggccacaggcaagcgccaccactgtaggctaattttttttttttttttttttttttttttgtagagactggggtctcactatgttgcccacgctggtctcaaactcctgggctcaagcgatcctcccgcttcagcctcccaaggtgctgggattacaggtggagccaccgcgcccggcatcgataatctgaatctctaacgagctcccgggcgacgttgatgcagctggtaccgggaccactcttcgaaaatcatcggtttagaggttttaattctgaatccattgcgaaaactgttgggcggacagagcactactaactcctaacttttctcagaaagctgggctctgctttcgccagcaacccggtccgaagtcgcgggcatattctgtctgaaatcgtgtgcaccgaaatccccgccttgcggtggaggctggcgctaggcggcctcagcctcggcctgctgcgctcaggaacccgcgccccggctcctcggcgatccattgctctttcctctggcgccggccgcaggcctcggtcacgcccccagcggcccgttggtttccgggtcccgcggggtgcccccgcccacacgctatgccttaaattgggccaggctgaggcgctgctgctggagcggccgatccgagacgtggctccctgggcggcagaaccatgttggacttcgcgatcttcgccgttaccttcttgctggcgttggtgggagccgtgctctacctctatccggcttccagacaagctgcaggaattccagggattactccaactgaagaaaaagatggtaatcttccagatattgtgaatagtggaagtttgcatgagttcctggttaatttgcatgagagatatgggcctgtggtctccttctggtttggcaggcgcctcgtggttagtttgggcactgttgatgtactgaagcagcatatcaatcccaataagacattggacccttttgaaaccatgctgaagtcattattaaggtatcaatctggtggtggcagtgtgagtgaaaaccacatgaggaaaaaattgtatgaaaatggtgtgactgattctctgaagagtaactttgccctcctcctaaagctttcagaagaattattagataaatggctctcctacccagagacccagcacgtgcccctcagccagcatatgcttggttttgctatgaagtctgttacacagatggtaatgggtagtacatttgaagatgatcaggaagtcattcgcttccagaagaatcatggcacagtttggtctgagattggaaaaggctttctagatgggtcacttgataaaaacatgactcggaaaaaacaatatgaagatgccctcatgcaactggagtctgttttaaggaacatcataaaagaacgaaaaggaaggaacttcagtcaacatattttcattgactccttagtacaagggaaccttaatgaccaacagatcctagaagacagtatgatattttctctggccagttgcataataactgcaaaattgtgtacctgggcaatctgttttttaaccacctctgaagaagttcaaaaaaaattatatgaagagataaaccaagtttttggaaatggtcctgttactccagagaaaattgagcagctcagatattgtcagcatgtgctttgtgaaactgttcgaactgccaaactgactccagtttctgcccagtttcaagatattgaaggaaaaattgaccgatttattattcctagagagaccctcgtcctttatgcccttggtgtggtacttcaggatcctaatacttggccatctccacacaagtttgatccagatcggtttgatgatgaattagtaatgaaaactttttcctcacttggattctcaggcacacaggagtgtccagagttgaggtttgcatatatggtgaccacagtacttcttagtgtattggtgaagagactgcacctactttctgtggagggacaggttattgaaacaaagtatgaactggtaacatcatcaagggaagaagcttggatcactgtctcaaagagatattaaaattttatacatttaaaatcattgttaaattgattgaggaaaacaaccatttaaaaaaaatctatgttgaatccttttataaaccagtatcactttgtaatataaacacctatttgtacttaa

SEQ ID NO: 13151 - DNA, 3790 bp, Homo sapiens
  misc_feature (3008)..(3008): n is a, c, g, or t
agagtatcctcctcgcatcagcagaatcacattgtcactttcttcagccagtgggcaacactcaaatttaagtgtgtaacagtgtccccgggagggctctgttcaaacagattgttgtacgcgccccctacccctgcccaccccgagtgtttgattcagtaggtctagtttgggatcgagaatctttttattttgttttccttttgttttgttttgttttgtttttgagacagggtctcgccctgtcgcccaggctggagtgcagtcgtgccatctcggctcactgtagcctctgcctccccggctaaagtgatcctccagcctcagcctccggagcagctggggccacaggcaagcgccaccactgtaggctaattttttttttttttttttttttttttttgtagagactggggtctcactatgttgcccacgctggtctcaaactcctgggctcaagcgatcctcccgcttcagcctcccaaggtgctgggattacaggtggagccaccgcgcccggcatcgataatctgaatctctaacgagctcccgggcgacgttgatgcagctggtaccgggaccactcttcgaaaatcatcggtttagaggttttaattctgaatccattgcgaaaactgttgggcggacagagcactactaactcctaacttttctcagaaagctgggctctgctttcgccagcaacccggtccgaagtcgcgggcatattctgtctgaaatcgtgtgcaccgaaatccccgccttgcggtggaggctggcgctaggcggcctcagcctcggcctgctgcgctcaggaacccgcgccccggctcctcggcgatccattgctctttcctctggcgccggccgcaggcctcggtcacgcccccagcggcccgttggtttccgggtcccgcggggtgcccccgcccacacgctatgccttaaattgggccaggctgaggcgctgctgctggagcggccgatccgagacgtggctccctgggcggcagaaccatgttggacttcgcgatcttcgccgttaccttcttgctggcgttggtgggagccgtgctctacctctatccggcttccagacaagctgcaggaattccagggattactccaactgaagaaaaagatggtaatcttccagatattgtgaatagtggaagtttgcatgagttcctggttaatttgcatgagagatatgggcctgtggtctccttctggtttggcaggcgcctcgtggttagtttgggcactgttgatgtactgaagcagcatatcaatcccaataagacattggacccttttgaaaccatgctgaagtcattattaaggtatcaatctggtggtggcagtgtgagtgaaaaccacatgaggaaaaaattgtatgaaaatggtgtgactgattctctgaagagtaactttgccctcctcctaaagctttcagaagaattattagataaatggctctcctacccagagacccagcacgtgcccctcagccagcatatgcttggttttgctatgaagtctgttacacagatggtaatgggtagtacatttgaagatgatcaggaagtcattcgcttccagaagaatcatggcacagtttggtctgagattggaaaaggctttctagatgggtcacttgataaaaacatgactcggaaaaaacaatatgaagatgccctcatgcaactggagtctgttttaaggaacatcataaaagaacgaaaaggaaggaacttcagtcaacatattttcattgactccttagtacaagggaaccttaatgaccaacagatcctagaagacagtatgatattttctctggccagttgcataataactgcaaaattgtgtacctgggcaatctgttttttaaccacctctgaagaagttcaaaaaaaattatatgaagagataaaccaagtttttggaaatggtcctgttactccagagaaaattgagcagctcagatattgtcagcatgtgctttgtgaaactgttcgaactgccaaactgactccagtttctgcccagtttcaagatattgaaggaaaaattgaccgatttattattcctagagagaccctcgtcctttatgcccttggtgtggtacttcaggatcctaatacttggccatctccacacaagtttgatccagatcggtttgatgatgaattagtaatgaaaactttttcctcacttggattctcaggcacacaggagtgtccagagttgaggtttgcatatatggtgaccacagtacttcttagtgtattggtgaagagactgcacctactttctgtggagggacaggttattgaaacaaagtatgaactggtaacatcatcaagggaagaagcttggatcactgtctcaaagagatattaaaattttatacatttaaaatcattgttaaattgattgaggaaaacaaccatttaaaaaaaatctatgttgaatccttttataaaccagtatcactttgtaatataaacacctatttgtacttaattttgtaaatttggatttttatatatcatattttcttaattcattggacacatttgacttactgcacagtatattgatcattttaatgggaaactttagctttctactttttatttttgttttttcactttctatgccattatttttgtattctttttcttagtgtgagctctaaaatcaatgttcttgaaaaagaaattattttgcagaagttggggaatcatgtttgttgaatatgtataaaatagaaacataggctgggcgcggtggctcacacctgtaatccctacactttgggaggctgaggcaggtggatcacctgaggtccagagtttgagaccagtctggccaacatggtgaaaccccatctctactgaaaaacacacacaaaaaaattagctgggcatggtggcacatgcctgtaatcccagctactcgggaggctgaggcaggagaatcatttgaacctgggaggcggngcttgcagtgagccgagattgcacccctgcactccagcctgggccacagagcaagactctgtctcaagaaaaacaaaaaaaaagataaatggacaaaagacatgaacaaacagcttttataggatagtatggctaacaaacttttagaaaagtgtttagtctcactagtaagtaacaaaatattggggcagggcacagtggctcatgcgtataatcctagaactttggaaggccaaagctggtggattgcttgagcccaggagtttgagaccagcccaggcaacattgggagaccctgcctctacaaatatacaaaaaaattactgggcatggtgacacacacctgtggtcccagctgttctgaaggctgaggtgggaggatcacttgagaccaggagaggtcaaggctgcagtgatctgtgatcacaccactgcactccagcctgggcaacagagcaaaaccctgcctttaaaaaaacaaaaaacaaaaaaggccgggctcagtggctcatgcctataatactttgggaggccgaggcaggtggatcaattgaggtcaggtgttcgagaccagccaggccaacttggtgaaaccccgtctctactaaaaatacaaaaaaaaaaaaaaaaaaaattagccagatgtggtggtgcacatttgtagtcccagctgctcaggaggctgaggcaggataatcgcttgaacctgggaggcagaggttgcagtgagccaagatcgcaccactgcactccagcctgggtgtcgagtgaaactcattctc

SEQ ID NO: 13152 - DNA, 3953 bp, Homo sapiens
  misc_feature (2656)..(2656): n is a, c, g, or t
  misc_feature (2975)..(2975): n is a, c, g, or t
  misc_feature (3171)..(3171): n is a, c, g, or t
agagtatcctcctcgcatcagcagaatcacattgtcactttcttcagccagtgggcaacactcaaatttaagtgtgtaacagtgtccccgggagggctctgttcaaacagattgttgtacgcgccccctacccctgcccaccccgagtgtttgattcagtaggtctagtttgggatcgagaatctttttattttgttttccttttgttttgttttgttttgtttttgagacagggtctcgccctgtcgcccaggctggagtgcagtcgtgccatctcggctcactgtagcctctgcctccccggctaaagtgatcctccagcctcagcctccggagcagctggggccacaggcaagcgccaccactgtaggctaattttttttttttttttttttttttttttgtagagactggggtctcactatgttgcccacgctggtctcaaactcctgggctcaagcgatcctcccgcttcagcctcccaaggtgctgggattacaggtggagccaccgcgcccggcatcgataatctgaatctctaacgagctcccgggcgacgttgatgcagctggtaccgggaccactcttcgaaaatcatcggtttagaggttttaattctgaatccattgcgaaaactgttgggcggacagagcactactaactcctaacttttctcagaaagctgggctctgctttcgccagcaacccggtccgaagtcgcgggcatattctgtctgaaatcgtgtgcaccgaaatccccgccttgcggtggaggctggcgctaggcggcctcagcctcggcctgctgcgctcaggaacccgcgccccggctcctcggcgatccattgctctttcctctggcgccggccgcaggcctcggtcacgcccccagcggcccgttggtttccgggtcccgcggggtgcccccgcccacacgctatgccttaaattgggccaggctgaggcgctgctgctggagcggccgatccgagacgtggctccctgggcggcagaaccatgttggacttcgcgatcttcgccgttaccttcttgctggcgttggtgggagccgtgctctacctctatccggcttccagacaagctgcaggaattccagggattactccaactgaagaaaatggacccttttgaaaccatgctgaagtcattattaaggtatcaatctggtggtggcagtgtgagtgaaaaccacatgaggaaaaaattgtatgaaaatggtgtgactgattctctgaagagtaactttgccctcctcctaaagctttcagaagaattattagataaatggctctcctacccagagacccagcacgtgcccctcagccagcatatgcttggttttgctatgaagtctgttacacagatggtaatgggtagtacatttgaagatgatcaggaagtcattcgcttccagaagaatcatggcacaccctcatgcaactggagtctgttttaaggaacatcataaaagaacgaaaaggaaggaacttcagtcaacatattttcattgactccttagtacaagggaaccttaatgaccaacagatcctagaagacagtatgatattttctctggccagttgcataataactgcaaaattgtgtacctgggcaatctgttttttaaccacctctgaagaagttcaaaaaaaattatatgaagagataaaccaagtttttggaaatggtcctgttactccagagaaaattgagcagctcagatattgtcagcatgtgctttgtgaaactgttcgaactgccaaactgactccagtttctgcccagtttcaagatattgaaggaaaaattgaccgatttattattcctagagagaccctcgtcctttatgcccttggtgtggtacttcaggatcctaatacttggccatctccacacaagtttgatccagatcggtttgatgatgaattagtaatgaaaactttttcctcacttggattctcaggcacacaggagtgtccagagttgaggtttgcatatatggtgaccacagtacttcttagtgtattggtgaagagactgcacctactttctgtggagggacaggttattgaaacaaagtatgaactggtaacatcatcaagggaagaagcttggatcactgtctcaaagagatattaaaattttatacatttaaaatcattgttaaattgattgaggaaaacaaccatttaaaaaaaatctatgttgaatccttttataaaccagtatcactttgtaatataaacacctatttgtacttaattttgtaaatttggatttttatatatcatattttcttaattcattggacacatttgacttactgcacagtatattgatcattttaatgggaaactttagctttctactttttatttttgttttttcactttctatgccattatttttgtattctttttcttagtgtgagctctaaaatcaatgttcttgaaaaagaaattattttgcagaagttggggaatcatgtttgttgaatatgtataaaatagaaacataggctgggcgcggtggctcacacctgtaatccctacactttgggaggctgaggcaggtggatcacctgaggtccagagtttgagaccagtctggccaacatgatgaaaccccatctctnctagaaatacaaaacattggccgggagtggtggctcatgcctgtaatcccagcactttgggatgctgaggcgggtggatcacctgaggtcaggagtttgcgaccagcctggccaacatgatgaaaccctgtctctactaaaaatacaaaaaaattggctgggtgtggtggcccacacctgtaatcccagcactttgggaggtcgaggcgggtggatcacctgaggtccgaagttcgaggccagcctggccaacaggatgaaaccctgtctctattaaaaatacagaaaattggccgggtgcggtggctcacccctgtantcccagtactttgggaggctgaggcgggtggagcacctgaggtcaggaattcgagatcagcctggccaacatggtgaaaccccatctctactgaaaaacacacacaaaaaaattagctgggcatggtggcacatgcctgtaatcccagctactcgggaggctgaggcaggagaatcatttgaacctgggaggcggngcttgcagtgagccgagattgcacccctgcactccagcctgggccacagagcaagactctgtctcaagaaaaacaaaaaaaaagataaatggacaaaagacatgaacaaacagcttttataggatagtatggctaacaaacttttagaaaagtgtttagtctcactagtaagtaacaaaatattggggcagggcacagtggctcatgcgtataatcctagaactttggaaggccaaagctggtggattgcttgagcccaggagtttgagaccagcccaggcaacattgggagaccctgcctctacaaatatacaaaaaaattactgggcatggtgacacacacctgtggtcccagctgttctgaaggctgaggtgggaggatcacttgagaccaggagaggtcaaggctgcagtgatctgtgatcacaccactgcactccagcctgggcaacagagcaaaaccctgcctttaaaaaaacaaaaaacaaaaaaggccgggctcagtggctcatgcctataatactttgggaggccgaggcaggtggatcaattgaggtcaggtgttcgagaccagccaggccaacttggtgaaaccccgtctctactaaaaatacaaaaaaaaaaaaaaaaaaaattagccagatgtggtggtgcacatttgtagtcccagctgctcaggaggctgaggcaggataatcgcttgaacctgggaggcagaggttgcagtgagccaagatcgcaccactgcactccagcctgggtgtcgagtgaaactcattctc

SEQ ID NO: 13153 - DNA, 3787 bp, Homo sapiens
  misc_feature (2490)..(2490): n is a, c, g, or t
  misc_feature (2809)..(2809): n is a, c, g, or t
  misc_feature (3005)..(3005): n is a, c, g, or t
agagtatcctcctcgcatcagcagaatcacattgtcactttcttcagccagtgggcaacactcaaatttaagtgtgtaacagtgtccccgggagggctctgttcaaacagattgttgtacgcgccccctacccctgcccaccccgagtgtttgattcagtaggtctagtttgggatcgagaatctttttattttgttttccttttgttttgttttgttttgtttttgagacagggtctcgccctgtcgcccaggctggagtgcagtcgtgccatctcggctcactgtagcctctgcctccccggctaaagtgatcctccagcctcagcctccggagcagctggggccacaggcaagcgccaccactgtaggctaattttttttttttttttttttttttttttgtagagactggggtctcactatgttgcccacgctggtctcaaactcctgggctcaagcgatcctcccgcttcagcctcccaaggtgctgggattacaggtggagccaccgcgcccggcatcgataatctgaatctctaacgagctcccgggcgacgttgatgcagctggtaccgggaccactcttcgaaaatcatcggtttagaggttttaattctgaatccattgcgaaaactgttgggcggacagagcactactaactcctaacttttctcagaaagctgggctctgctttcgccagcaacccggtccgaagtcgcgggcatattctgtctgaaatcgtgtgcaccgaaatccccgccttgcggtggaggctggcgctaggcggcctcagcctcggcctgctgcgctcaggaacccgcgccccggctcctcggcgatccattgctctttcctctggcgccggccgcaggcctcggtcacgcccccagcggcccgttggtttccgggtcccgcggggtgcccccgcccacacgctatgccttaaattgggccaggctgaggcgctgctgctggagcggccgatccgagacgtggctccctgggcggcagaaccatgttggacttcgcgatcttcgccgttaccttcttgctggcgttggtgggagccgtgctctacctctatccgtggacccttttgaaaccatgctgaagtcattattaaggtatcaatctggtggtggcagtgtgagtgaaaaccacatgaggaaaaaattgtatgaaaatggtgtgactgattctctgaagagtaactttgccctcctcctaaagctttcagaagaattattagataaatggctctcctacccagagacccagcacgtgcccctcagccagcatatgcttggttttgctatgaagtctgttacacagatggtaatgggtagtacatttgaagatgatcaggaagtcattcgcttccagaagaatcatggcacaatcctagaagacagtatgatattttctctggccagttgcataataactgcaaaattgtgtacctgggcaatctgttttttaaccacctctgaagaagttcaaaaaaaattatatgaagagataaaccaagtttttggaaatggtcctgttactccagagaaaattgagcagctcagatattgtcagcatgtgctttgtgaaactgttcgaactgccaaactgactccagtttctgcccagtttcaagatattgaaggaaaaattgaccgatttattattcctagagagaccctcgtcctttatgcccttggtgtggtacttcaggatcctaatacttggccatctccacacaagtttgatccagatcggtttgatgatgaattagtaatgaaaactttttcctcacttggattctcaggcacacaggagtgtccagagttgaggtttgcatatatggtgaccacagtacttcttagtgtattggtgaagagactgcacctactttctgtggagggacaggttattgaaacaaagtatgaactggtaacatcatcaagggaagaagcttggatcactgtctcaaagagatattaaaattttatacatttaaaatcattgttaaattgattgaggaaaacaaccatttaaaaaaaatctatgttgaatccttttataaaccagtatcactttgtaatataaacacctatttgtacttaattttgtaaatttggatttttatatatcatattttcttaattcattggacacatttgacttactgcacagtatattgatcattttaatgggaaactttagctttctactttttatttttgttttttcactttctatgccattatttttgtattctttttcttagtgtgagctctaaaatcaatgttcttgaaaaagaaattattttgcagaagttggggaatcatgtttgttgaatatgtataaaatagaaacataggctgggcgcggtggctcacacctgtaatccctacactttgggaggctgaggcaggtggatcacctgaggtccagagtttgagaccagtctggccaacatgatgaaaccccatctctnctagaaatacaaaacattggccgggagtggtggctcatgcctgtaatcccagcactttgggatgctgaggcgggtggatcacctgaggtcaggagtttgcgaccagcctggccaacatgatgaaaccctgtctctactaaaaatacaaaaaaattggctgggtgtggtggcccacacctgtaatcccagcactttgggaggtcgaggcgggtggatcacctgaggtccgaagttcgaggccagcctggccaacaggatgaaaccctgtctctattaaaaatacagaaaattggccgggtgcggtggctcacccctgtantcccagtactttgggaggctgaggcgggtggagcacctgaggtcaggaattcgagatcagcctggccaacatggtgaaaccccatctctactgaaaaacacacacaaaaaaattagctgggcatggtggcacatgcctgtaatcccagctactcgggaggctgaggcaggagaatcatttgaacctgggaggcggngcttgcagtgagccgagattgcacccctgcactccagcctgggccacagagcaagactctgtctcaagaaaaacaaaaaaaaagataaatggacaaaagacatgaacaaacagcttttataggatagtatggctaacaaacttttagaaaagtgtttagtctcactagtaagtaacaaaatattggggcagggcacagtggctcatgcgtataatcctagaactttggaaggccaaagctggtggattgcttgagcccaggagtttgagaccagcccaggcaacattgggagaccctgcctctacaaatatacaaaaaaattactgggcatggtgacacacacctgtggtcccagctgttctgaaggctgaggtgggaggatcacttgagaccaggagaggtcaaggctgcagtgatctgtgatcacaccactgcactccagcctgggcaacagagcaaaaccctgcctttaaaaaaacaaaaaacaaaaaaggccgggctcagtggctcatgcctataatactttgggaggccgaggcaggtggatcaattgaggtcaggtgttcgagaccagccaggccaacttggtgaaaccccgtctctactaaaaatacaaaaaaaaaaaaaaaaaaaattagccagatgtggtggtgcacatttgtagtcccagctgctcaggaggctgaggcaggataatcgcttgaacctgggaggcagaggttgcagtgagccaagatcgcaccactgcactccagcctgggtgtcgagtgaaactcattctc

SEQ ID NO: 13154 - DNA, 2549 bp, Homo sapiens
agagtatcctcctcgcatcagcagaatcacattgtcactttcttcagccagtgggcaacactcaaatttaagtgtgtaacagtgtccccgggagggctctgttcaaacagattgttgtacgcgccccctacccctgcccaccccgagtgtttgattcagtaggtctagtttgggatcgagaatctttttattttgttttccttttgttttgttttgttttgtttttgagacagggtctcgccctgtcgcccaggctggagtgcagtcgtgccatctcggctcactgtagcctctgcctccccggctaaagtgatcctccagcctcagcctccggagcagctggggccacaggcaagcgccaccactgtaggctaattttttttttttttttttttttttttttgtagagactggggtctcactatgttgcccacgctggtctcaaactcctgggctcaagcgatcctcccgcttcagcctcccaaggtgctgggattacaggtggagccaccgcgcccggcatcgataatctgaatctctaacgagctcccgggcgacgttgatgcagctggtaccgggaccactcttcgaaaatcatcggtttagaggttttaattctgaatccattgcgaaaactgttgggcggacagagcactactaactcctaacttttctcagaaagctgggctctgctttcgccagcaacccggtccgaagtcgcgggcatattctgtctgaaatcgtgtgcaccgaaatccccgccttgcggtggaggctggcgctaggcggcctcagcctcggcctgctgcgctcaggaacccgcgccccggctcctcggcgatccattgctctttcctctggcgccggccgcaggcctcggtcacgcccccagcggcccgttggtttccgggtcccgcggggtgcccccgcccacacgctatgccttaaattgggccaggctgaggcgctgctgctggagcggccgatccgagacgtggctccctgggcggcagaaccatgttggacttcgcgatcttcgccgttaccttcttgctggcgttggtgggagccgtgctctacctctatccggcttccagacaagctgcaggaattccagggattactccaactgaagaaaaagatggtaatcttccagatattgtgaatagtggaagtttgcatgagttcctggttaatttgcatgagagatatgggcctgtggtctccttctggtttggcaggcgcctcgtggttagtttgggcactgttgatgtactgaagcagcatatcaatcccaataagacattggacccttttgaaaccatgctgaagtcattattaaggtatcaatctggtggtggcagtgtgagtgaaaaccacatgaggaaaaaattgtatgaaaatggtgtgactgattctctgaagagtaactttgccctcctcctaaagctttcagaagaattattagataaatggctctcctacccagagacccagcacgtgcccctcagccagcatatgcttggttttgctatgaagtctgttacacagatggtaatgggtagtacatttgaagatgatcaggaagtcattcgcttccagaagaatcatggcacagtttggtctgagattggaaaaggctttctagatgggtcacttgataaaaacatgactcggaaaaaacaatatgaagatgccctcatgcaactggagtctgttttaaggaacatcataaaagaacgaaaaggaaggaacttcagtcaacatattttcattgactccttagtacaagggaaccttaatgaccaacagatcctagaagacagtatgatattttctctggccagttgcataataactgcaaaattgtgtacctgggcaatctgttttttaaccacctctgaagaagttcaaaaaaaattatatgaagagataaaccaagtttttggaaatggtcctgttactccagagaaaattgagcagctcagatattgtcagcatgtgctttgtgaaactgttcgaactgccaaactgactccagtttctgcccagtttcaagatattgaaggaaaaattgaccgatttattattcctagagagaccctcgtcctttatgcccttggtgtggtacttcaggatcctaatacttggccatctccacacaagtttgatccagatcggtttgatgatgaattagtaatgaaaactttttcctcacttggattctcaggcacacaggagtgtccagagttgaggtttgcatatatggtgaccacagtacttcttagtgtattggtgaagagactgcacctactttctgtggagggacaggttattgaaacaaagtatgaactggtaacatcatcaagggaagaagcttggatcactgtctcaaagagatattaaaattttatacatttaaaatcattgttaaattgattgaggaaaacaaccatttaaaaaaaatctatgttgaatccttttataaaccagtatcactttgtaatataaacacctatttgtacttaaaaaaaaaaaagtcgacgcgg

SEQ ID NO: 13155 - DNA, 2539 bp, Homo sapiens
  misc_feature (1242)..(1242): n is a, c, g, or t
  misc_feature (1561)..(1561): n is a, c, g, or t
  misc_feature (1757)..(1757): n is a, c, g, or t
ttcctaactgttgagtagaaaactcaatatgtagcaatgatacaacaaaagaaaactagtgaatccccttttcttctctttcttttgagacagggtctcacaaaaaatggaatatagtaagaaacagcaatagactaaatatatgttaaataatttgggaacataaaaataagtggcatttaaatataatgtaagagcactttctattttcagttgatttttaactttgttacatacttgtgttcttttagtgtcaacatgtaagatgccagtggagctatattgtgattaacctcaaattttctttgtaggtttgatccagatcggtttgatgatgaattagtaatgaaaactttttcctcacttggattctcaggcacacaggagtgtccagagttgaggtgaataatagaatgccagactctgttcttagaattttgatgatcactgttgatgagaatgggcaatctgtatgattaaagtattatttttttattattattgtactttaagttctggggttcatgtgcagaacgtgcaggtttaaagtataatttttaatctttagtaactaattgactttcttcctgactaggtttgcatatatggtgaccacagtacttcttagtgtattggtgaagagactgcacctactttctgtggagggacaggttattgaaacaaagtatgaactggtaacatcatcaagggaagaagcttggatcactgtctcaaagagatattaaaattttatacatttaaaatcattgttaaattgattgaggaaaacaaccatttaaaaaaaatctatgttgaatccttttataaaccagtatcactttgtaatataaacacctatttgtacttaattttgtaaatttggatttttatatatcatattttcttaattcattggacacatttgacttactgcacagtatattgatcattttaatgggaaactttagctttctactttttatttttgttttttcactttctatgccattatttttgtattctttttcttagtgtgagctctaaaatcaatgttcttgaaaaagaaattattttgcagaagttggggaatcatgtttgttgaatatgtataaaatagaaacataggctgggcgcggtggctcacacctgtaatccctacactttgggaggctgaggcaggtggatcacctgaggtccagagtttgagaccagtctggccaacatgatgaaaccccatctctnctagaaatacaaaacattggccgggagtggtggctcatgcctgtaatcccagcactttgggatgctgaggcgggtggatcacctgaggtcaggagtttgcgaccagcctggccaacatgatgaaaccctgtctctactaaaaatacaaaaaaattggctgggtgtggtggcccacacctgtaatcccagcactttgggaggtcgaggcgggtggatcacctgaggtccgaagttcgaggccagcctggccaacaggatgaaaccctgtctctattaaaaatacagaaaattggccgggtgcggtggctcacccctgtantcccagtactttgggaggctgaggcgggtggagcacctgaggtcaggaattcgagatcagcctggccaacatggtgaaaccccatctctactgaaaaacacacacaaaaaaattagctgggcatggtggcacatgcctgtaatcccagctactcgggaggctgaggcaggagaatcatttgaacctgggaggcggngcttgcagtgagccgagattgcacccctgcactccagcctgggccacagagcaagactctgtctcaagaaaaacaaaaaaaaagataaatggacaaaagacatgaacaaacagcttttataggatagtatggctaacaaacttttagaaaagtgtttagtctcactagtaagtaacaaaatattggggcagggcacagtggctcatgcgtataatcctagaactttggaaggccaaagctggtggattgcttgagcccaggagtttgagaccagcccaggcaacattgggagaccctgcctctacaaatatacaaaaaaattactgggcatggtgacacacacctgtggtcccagctgttctgaaggctgaggtgggaggatcacttgagaccaggagaggtcaaggctgcagtgatctgtgatcacaccactgcactccagcctgggcaacagagcaaaaccctgcctttaaaaaaacaaaaaacaaaaaaggccgggctcagtggctcatgcctataatactttgggaggccgaggcaggtggatcaattgaggtcaggtgttcgagaccagccaggccaacttggtgaaaccccgtctctactaaaaatacaaaaaaaaaaaaaaaaaaaattagccagatgtggtggtgcacatttgtagtcccagctgctcaggaggctgaggcaggataatcgcttgaacctgggaggcagaggttgcagtgagccaagatcgcaccactgcactccagcctgggtgtcgagtgaaactcattctc

SEQ ID NO: 13156 - DNA, 2205 bp, Homo sapiens
agagtatcctcctcgcatcagcagaatcacattgtcactttcttcagccagtgggcaacactcaaatttaagtgtgtaacagtgtccccgggagggctctgttcaaacagattgttgtacgcgccccctacccctgcccaccccgagtgtttgattcagtaggtctagtttgggatcgagaatctttttattttgttttccttttgttttgttttgttttgtttttgagacagggtctcgccctgtcgcccaggctggagtgcagtcgtgccatctcggctcactgtagcctctgcctccccggctaaagtgatcctccagcctcagcctccggagcagctggggccacaggcaagcgccaccactgtaggctaattttttttttttttttttttttttttttgtagagactggggtctcactatgttgcccacgctggtctcaaactcctgggctcaagcgatcctcccgcttcagcctcccaaggtgctgggattacaggtggagccaccgcgcccggcatcgataatctgaatctctaacgagctcccgggcgacgttgatgcagctggtaccgggaccactcttcgaaaatcatcggtttagaggttttaattctgaatccattgcgaaaactgttgggcggacagagcactactaactcctaacttttctcagaaagctgggctctgctttcgccagcaacccggtccgaagtcgcgggcatattctgtctgaaatcgtgtgcaccgaaatccccgccttgcggtggaggctggcgctaggcggcctcagcctcggcctgctgcgctcaggaacccgcgccccggctcctcggcgatccattgctctttcctctggcgccggccgcaggcctcggtcacgcccccagcggcccgttggtttccgggtcccgcggggtgcccccgcccacacgctatgccttaaattgggccaggctgaggcgctgctgctggagcggccgatccgagacgtggctccctgggcggcagaaccatgttggacttcgcgatcttcgccgttaccttcttgctggcgttggtgggagccgtgctctacctctatccggcttccagacaagctgcaggaattccagggattactccaactgaagaaaaagatggtaatcttccagatattgtgaatagtggaagtttgcatgagttcctggttaatttgcatgagagatatgggcctgtggtctccttctggtttggcaggcgcctcgtggttagtttgggcactgttgatgtactgaagcagcatatcaatcccaataagacattggacccttttgaaaccatgctgaagtcattattaaggtatcaatctggtggtggcagtgtgagtgaaaaccacatgaggaaaaaattgtatgaaaatggtgtgactgattctctgaagagtaactttgccctcctcctaaagctttcagaagaattattagataaatggctctcctacccagagacccagcacgtgcccctcagccagcatatgcttggttttgctatgaagtctgttacacagatggtaatgggtagtacatttgaagatgatcaggaagtcattcgcttccagaagaatcatggcacagtttggtctgagattggaaaaggctttctagatgggtcacttgataaaaacatgactcggaaaaaacaatatgaagatgccctcatgcaactggagtctgttttaaggaacatcataaaagaacgaaaaggaaggaacttcagtcaacatattttcattgactccttagtacaagggaaccttaatgaccaacagatcctagaagacagtatgatattttctctggccagttgcataataactgcaaaatgtaagtataaattgatttctttttcagaggaattactaaatatataggtgtgagccaccacgtctggttgagaactgttctaagcaataaccactcacaaattttgagccagtgtatttaccatcacaagtaaatattttagaatattgatttatcgataaatctgctagcttgatttgtctgaattatttcattagtgctcctaagtgaactgataaatcggcctaataaggttgagtgcatgagataatccattgcaacagccaacattgagcactcctacagatatgatatttatttattatcataactattttacctaaggtaaaattaagtgg

SEQ ID NO: 13157 - DNA, 1934 bp, Homo sapiens
agagtatcctcctcgcatcagcagaatcacattgtcactttcttcagccagtgggcaacactcaaatttaagtgtgtaacagtgtccccgggagggctctgttcaaacagattgttgtacgcgccccctacccctgcccaccccgagtgtttgattcagtaggtctagtttgggatcgagaatctttttattttgttttccttttgttttgttttgttttgtttttgagacagggtctcgccctgtcgcccaggctggagtgcagtcgtgccatctcggctcactgtagcctctgcctccccggctaaagtgatcctccagcctcagcctccggagcagctggggccacaggcaagcgccaccactgtaggctaattttttttttttttttttttttttttttgtagagactggggtctcactatgttgcccacgctggtctcaaactcctgggctcaagcgatcctcccgcttcagcctcccaaggtgctgggattacaggtggagccaccgcgcccggcatcgataatctgaatctctaacgagctcccgggcgacgttgatgcagctggtaccgggaccactcttcgaaaatcatcggtttagaggttttaattctgaatccattgcgaaaactgttgggcggacagagcactactaactcctaacttttctcagaaagctgggctctgctttcgccagcaacccggtccgaagtcgcgggcatattctgtctgaaatcgtgtgcaccgaaatccccgccttgcggtggaggctggcgctaggcggcctcagcctcggcctgctgcgctcaggaacccgcgccccggctcctcggcgatccattgctctttcctctggcgccggccgcaggcctcggtcacgcccccagcggcccgttggtttccgggtcccgcggggtgcccccgcccacacgctatgccttaaattgggccaggctgaggcgctgctgctggagcggccgatccgagacgtggctccctgggcggcagaaccatgttggacttcgcgatcttcgccgttaccttcttgctggcgttggtgggagccgtgctctacctctatccggtgagcgccgtcttggctctctggggccccgggcgccgccccagtctctctgtcgccggcatccaggccaacctgcccgctgcgggccgcagggggcgggcctgagaggagggttcgggttcgctccagagcttcagcgcggggaccgcacccggagtcacgtgacgcccctcccggcaagctctgagagcgacgtgggctgcgtcgctacccctcaggcgccgggccaggcgggcgtagagctgctgaggaaaagcccgcgcccccgcaggccggtctcaccttgccaggcaccccgcgccactctccaaggcggctctcaagtactttgggcagctttttggccataactcgccaaacccaaatttcatttcccagtgtgtcaggacgagactcctgggcgcgccactcctttctcctttcttgaggattctcccagcacttgtgtattcctcttttccatctgtccatcgatctatcctgactggaatccaaagtgctcgaggtccaggtcttgctcctcttaggggctccaggcaaatgcttctttggggagagcgccgcgctgcgggttcgggtgcgaggtttcctctgccgctgacgcctctgcgagcctccggtcctcctctctccacttgcctccgtcagcgagagagggagggtctgaaaacaaaagtgttgatgactgaggaccgtctttaaaacctgttctacacactttgggaggctgaggcgggcggatcacgaggtcaggatatcgagaccatcctggccaacatggtgacacaccgtctctactaaaaatacaaacattagctggctgtggtggcgggcgcctgtaatcc

SEQ ID NO: 13158 - DNA, 675 bp, Homo sapiens
ttcctaactgttgagtagaaaactcaatatgtagcaatgatacaacaaaagaaaactagtgaatccccttttcttctctttcttttgagacagggtctcacaaaaaatggaatatagtaagaaacagcaatagactaaatatatgttaaataatttgggaacataaaaataagtggcatttaaatataatgtaagagcactttctattttcagttgatttttaactttgttacatacttgtgttcttttagtgtcaacatgtaagatgccagtggagctatattgtgattaacctcaaattttctttgtaggtttgatccagatcggtttgatgatgaattagtaatgaaaactttttcctcacttggattctcaggcacacaggagtgtccagagttgaggtttgcatatatggtgaccacagtacttcttagtgtattggtgaagagactgcacctactttctgtggagggacaggttattgaaacaaagtatgaactggtaacatcatcaagggaagaagcttggatcactgtctcaaagagatattaaaattttatacatttaaaatcattgttaaattgattgaggaaaacaaccatttaaaaaaaatctatgttgaatccttttataaaccagtatcactttgtaatataaacacctatttgtacttaa

SEQ ID NO: 13159 - DNA, 161 bp, Homo sapiens
gaagaagttcaaaaaaaattatatgaagagataaaccaagtttttggaaatggtcctgttactccagagaaaattgagcagctcaggtaagaacacaataaaaagaggagattattaaaaggtaaatttgaactggtttatctaatttaaagctattgttg

SEQ ID NO: 13160 - DNA, 379 bp, Homo sapiens
ggtttgaagtgttaagaattcttaaaatatcagacaaatccatatctaaatataactatagaaatatagcaagaaggcaaatataattgagttttggattttgcagtaatttgaatttcatgaacctttgttctcatttattgatacagttaattcagagtcaactgttgtttttctcatttttccaaattaaattgattattttgtcaaatgttgctcttttgccagagatggtaatcttccagatattgtgaatagtggaagtttgcatgagttcctggttaatttgcatgagagatatgggcctgtggtctccttctggtttggcaggcgcctcgtggttagtttgggcactgttgatgtactgaagcagcatatc

SEQ ID NO: 13161 - DNA, 333 bp, Homo sapiens
cttgcaattatggcagcgttacactctactaggaagtaaatttgagatataaggttgatttttaatttagcacctatataggtatatcctgactaaagagtacctgctatatggtaactgatactaaagtccttatgatcacagtatgtaattgtctgttgtttaccaaattaactatgctcatacatataaagggattattttacattgatttgcttgtataatagccctcactattaaataaacaatgtgtacactccctccaaataactttaaaaatcttatctttttgtgataattcagattattgaaaaatttcggggtcatcaatca

SEQ ID NO: 13162 - DNA, 307 bp, Homo sapiens
tgtctttttcttagtttatgaaagcttttgtagattatatcttttaagaataacatttctgcatcataactgttaacatacacacacacacacacacacacacacacacacacacacgcacgcacacactcactgttccccagtctgtcaatttgccatttgactttacggtatgtttttcaatctataatttgccaactaagctatcttttcctttctggttttatgatctcctgcttaaactcctccctccccattttccctacccagatacatgacatgcagacaatatacaaatattctccta

SEQ ID NO: 13163 - DNA, 861 bp, Homo sapiens
ggtctaactctaaaattcacgttcctttattgtatcttatatcccccaagtatgtaaccaaaattaatagaatataatggtttcagtttttgaaatgctcttgtctaatttggataatttagtcatttaacactttcattatgtgtaaggaatgttttagttcaatggcaaaatagtgacatagttaattgctgcttcccaaagccagcttagtgatacagctaagtgatacagctgctccttgacttacagtgggattatgtcccgataaacccatcataagctgaaaataccgtaagttagaagcccgtttcctacacctaactaccaaacatcatagcttagcctagcctacattaaacatactcagaacacttaaacagtagcctgcagtcaggcaaaatcatctaaggcaaagcctgttttataataaactgttggatatctcaagtaatttattgaatattatactgaaataacggaatggttttgcaccattgtaaagtcaaaaaattttacattgaactattacaagtcagggactgtattgtacttttcaacaaaagtacaaatagattagcaaatttcttttttttccaaatagacatattctcttgttggatattctgtatgctagttatgtgtgtgtatgcatgtacgtctatatgctgtagccatttaagcctgacagaaattgttacttgcattttctatggataactttgtttactttgtgatatttttaggagatgctatatttatctctcacaagataggaataaaattttataaattatataaatgaaacatcttctggtatttgtacaaatagaaagattttctttcaccctaaatctgaca

SEQ ID NO: 13164 - DNA, 553 bp, Homo sapiens
ccaagccatagttgtgaggaaagctaaggaagcgattactttgtattttcagcctgtaccatcaagggaggtaggttcttccagcggggaagctggttgaaagaatgcctgtcatgtaggcaactaacaatgtcaaccgtagttactatatcatatttattcttcttaaatatctatcctttttgtcctcttgttcattttcctactgccactactttaatcaggtccttatctttttttcccccttagaccattacaagaactctactactcttgcttccaatctgtctctcctccaaactgttatctcagtgttgtagtagtgatcttcctaattgcagatatggtcttgtcacttacctacctcatgttcttcagtggctctgtaataaaatcctagactggtatctggaacactttaaaagcatatacttttgtggtcaggcacagaggctcacacttgtaatcccagcactttgggagccaaggcaggaggaacacttgagcccaggagtttgaagcctccgcaacatagggagactccatctttaca

SEQ ID NO: 13165 - DNA, 232 bp, Homo sapiens
tacaccgccacccacacctcaaaaggcaaatactgacagctgtttctgagtgggtagagaacactttgaagcttttgcagaaaaaacaaacaagaatcagcaggaaagctctgataaaaagccccagggcgggggcacccatcaccgaggatgctaaactttaccattagaggaatctatactctctgtgggaactgagtggagaaactaacctaagaccttaaaaccttta

SEQ ID NO: 13166 - DNA, 220 bp, Homo sapiens
gcccagccctactccctttgattcgtctctttaaaaatgacttcacaagttttattcagtaaaaaaattcttaaaaagtaatttagaattcccataatcagaagcctatataggacctttttacgcaaagttgaagaaagttttcaattctaaagcaaatttcagctttgatttagaaaagagtacattcttttgttccagcagtgaaaagaaaaaaatt

SEQ ID NO: 13167 - DNA, 510 bp, Homo sapiens
tcgtgcattgcaaacataactggggtacattatctctatttcacattctccatctctaaattgaattcatctgtagcttggataatcacataccaaaattaggaagattctatttgtattaaattacgtagatggtataagggtgaaaaaaaaatgtagacaaggtttttaaagtgaacactagaggtaaaatcatgtacataaataatttatgattatagacaacaggaaaaatgtgagctgaatgtagacccagaataatatactactcaataaagctgctgtgaggatttttttaaaaatactttttaaattggactaataattttttttcatggaagacactttagaaaacatataaacaattagaatgaacaaaaaaagtactcataatcccactgtcaaatactgtttacttttcagtttataactttttagataaatgcacatgtaccacactgtacacatggatgtataaaacttaccctcttacattttgtaacatgattt

SEQ ID NO: 13168 - DNA, 1903 bp, Homo sapiens
ggaggagacccggggaagtgagagtcggggatcagtcctgcaagctacggagtcactacagggagaggtctcatcactagaaatagccgaagaacctgcagcctcaaccagcgttaaggaggacgtgccgtttctagggagtcttagtcggggctcaccagcttcctgcattttctgaccggctccaggaatagaaccaaaagaagctgaacaaggaagcagcgcggcaccaagaaaagcagaagtcggggccttggaggcgtgactttcccctcgggtccaggtagggcctggagctgctgcaagtgccgcctgtgctggggaagggaccatgtggctgccttgggctctgttgcttctctgggtcccaggatgttttgctctgagcaaatgcaggaccgtggcgggccccgtggggggatccctgagtgtgcagtgtccctatgagaaggaacacaggaccctcaacaaatactggtgcagaccaccacagattttcctatgtgacaagattgtggagaccaaagggtcagcaggaaaaaggaacggccgagtgtccatcagggacagtcctgcaaacctcagcttcacagtgaccctggagaatctcacagaggaggatgcaggcacctactggtgtggggtggatacaccatggctccgagactttcatgatcccgttgtcgaggttgaggtgtccgtgttcccggcatcaacgtcaatgacacctgcaagtatcactgcggccaagacctcaacaatcacaactgcatttccacctgtatcatccactaccctgtttgcagtgggtgccacccacagtgccagcatccaggaggaaactgaggaggtggtgaactcacagctcccgctgctcctctccctgctggcattgttgctgcttctgttggtgggggcctccctgctagcctggaggatgtttcagaaatggatcaaagctggtgaccattcagagctgtcccagaaccccaagcaggctgccacgcagagtgagctgcactacgcaaatctggagctgctgatgtggcctctgcaggaaaagccagcaccaccaagggaggtggaggtggaatacagcactgtggcctcccccagggaagaacttcactatgcctcggtggtgtttgattctaacaccaacaggatagctgctcagaggcctcgggaggaggaaccagattcagattacagtgtgataaggaagacataggcttttgtcctgcctcgccatcggagctctcatgggccccaggaagtccagggacagctcccttatacctggcccacgtccttctcagcctgccctcgacaacagtgaccaacagacaggcagctgggtttcccaggccatccctctgttgccatcagcttgattggcttccccgagggccagcagggctgggggctccggagagcagcaggaagcactcccagccaccagtgcctgtcacctctttcccctttgcccctgcttcatcccagctctgtgtgtggaggacaaagcttcttcctgcgtggctccaggaaaagatgtggctcacgtaggtggcacctgccaatagctttgtcaatcacagccccataggaacgtctggaattgcttgggagttggggagaactgtcaagaagagtgaagagagtgccaaagcggagatctgttcacctgggggccatggaggggggacccactaaagatcaagatcaaagattctccccatctcacagacaaggaaactgaggccagagggaggagagaattgctcatggctccagaactggtggcaagtttctctggactcttaggtttatttttaatatgaaatataaaaacagtttcaaatatcttattgagggagaagtaaaaacttatttaaacaatgcc

SEQ ID NO: 13169 - DNA, 2477 bp, Homo sapiens
ggaggagacccggggaagtgagagtcggggatcagtcctgcaagctacggagtcactacagggagaggtctcatcactagaaatagccgaagaacctgcagcctcaaccagcgttaaggaggacgtgccgtttctagggagtcttagtcggggctcaccagcttcctgcattttctgaccggctccaggaatagaaccaaaagaagctgaacaaggaagcagcgcggcaccaagaaaagcagaagtcggggccttggaggcgtgactttcccctcgggtccaggtagggcctggagctgctgcaagtgccgcctgtgctggggaagggaccatgtggctgccttgggctctgttgcttctctgggtcccaggatgttttgctctgagcaaatgcaggaccgtggcgggccccgtggggggatccctgagtgtgcagtgtccctatgagaaggaacacaggaccctcaacaaatactggtgcagaccaccacagattttcctatgtgacaagattgtggagaccaaagggtcagcaggaaaaaggaacggccgagtgtccatcagggacagtcctgcaaacctcagcttcacagtgaccctggagaatctcacagaggaggatgcaggcacctactggtgtggggtggatacaccatggctccgagactttcatgatcccgttgtcgaggttgaggtgtccgtgttcccggcatcaacgtcaatgacacctgcaagtatcactgcggccaagacctcaacaatcacaactgcatttccacctgtatcatccactaccctgtttgcagtgggtgccacccacagtgccagcatccaggaggaaactgaggaggtggtgaactcacagctcccgctgctcctctccctgctggcattgttgctgcttctgttggtgggggcctccctgctagcctggaggatgtttcagaaatggatcaaagctggtgaccattcagagctgtcccagaaccccaagcaggctgccacgcagagtgagctgcactacgcaaatctggagctgctgatgtggcctctgcaggaaaagccagcaccaccaagggaggtggaggtggaatacagcactgtggcctcccccagggaagaacttcactatgcctcggtggtgtttgattctaacaccaacaggatagctgctcagaggcctcgggaggaggaaccagattcagattacagtgtgataaggaagacataggcttttgtcctgcctcgccatcggagctctcatgggccccaggaagtccagggacagctcccttatacctggcccacgtccttctcagcctgccctcgacaacagtgaccaacagacaggcagctgggtttcccaggccatccctctgttgccatcagcttgattggcttccccgagggccagcagggctgggggctccggagagcagcaggaagcactcccagccaccagtgcctgtcacctctttcccctttgcccctgcttcatcccagctctgtgtgtggaggacaaagcttcttcctgcgtggctccaggaaaagatgtggctcacgtaggtggcacctgccaatagctttgtcaatcacagccccataggaacgtctggaattgcttgggagttggggagaactgtcaagaagagtgaagagagtgccaaagcggagatctgttcacctgggggccatggaggggggacccactaaagatcaagatcaaagattctccccatctcacagacaaggaaactgaggccagagggaggagagaattgctcatggctccagaactggtggcaagtttctctggactcttaggtttatttttaatatgaaatataaaaacagtttcaaataaaaaaaaaaaaaaaaaaaaaaaaaaaaacaaaaagaaaacaaaaaaaaggggggcggcgcgcgcccactacaagaagtacaccacacaaggggggcgccaaacgtgaacgcccgaaccccacaggattatgtggaacaacaaggggcgaccacaataagaggggaggcgcgctagatataataccacagagcgcgagcgccgcgcgcggcgagttaaaaagaaccgggcggggagagccgggcgacaaaaccgcggagcaaaacagggggagaacatactgggagaagagcgaagccgcatcaaactccgcgaggggagaggacgaacaaacagttggggggacaaaaacacacgacaacgagacggagaaatgctaaaaaagcgcgcccccacgacggggcggaaacagctaaacaaagagccgctgccaaaaaagcgggggacaccaaacgacggcggcggccgaaaaccagacgagccgaggaaagtaacgggccggcgcgcggcgagcggggagaaggagcgcgccggcgcccacacagggagagacaacagaagccgccagcgcagccacccgtcgtaccaccgcgggggccgccgccgaccgaaacgg

SEQ ID NO: 13170 - DNA, 1564 bp, Homo sapiens
ggaggagacccggggaagtgagagtcggggatcagtcctgcaagctacggagtcactacagggagaggtctcatcactagaaatagccgaagaacctgcagcctcaaccagcgttaaggaggacgtgccgtttctagggagtcttagtcggggctcaccagcttcctgcattttctgaccggctccaggaatagaaccaaaagaagctgaacaaggaagcagcgcggcaccaagaaaagcagaagtcggggccttggaggcgtgactttcccctcgggtccaggtagggcctggagctgctgcaagtgccgcctgtgctggggaagggaccatgtggctgccttgggctctgttgcttctctgggtcccagcatcaacgtcaatgacacctgcaagtatcactgcggccaagacctcaacaatcacaactgcatttccacctgtatcatccactaccctgtttgcagtgggtgccacccacagtgccagcatccaggaggaaactgaggaggtggtgaactcacagctcccgctgctcctctccctgctggcattgttgctgcttctgttggtgggggcctccctgctagcctggaggatgtttcagaaatggatcaaagctggtgaccattcagagctgtcccagaaccccaagcaggctgccacgcagagtgagctgcactacgcaaatctggagctgctgatgtggcctctgcaggaaaagccagcaccaccaagggaggtggaggtggaatacagcactgtggcctcccccagggaagaacttcactatgcctcggtggtgtttgattctaacaccaacaggatagctgctcagaggcctcgggaggaggaaccagattcagattacagtgtgataaggaagacataggcttttgtcctgcctcgccatcggagctctcatgggccccaggaagtccagggacagctcccttatacctggcccacgtccttctcagcctgccctcgacaacagtgaccaacagacaggcagctgggtttcccaggccatccctctgttgccatcagcttgattggcttccccgagggccagcagggctgggggctccggagagcagcaggaagcactcccagccaccagtgcctgtcacctctttcccctttgcccctgcttcatcccagctctgtgtgtggaggacaaagcttcttcctgcgtggctccaggaaaagatgtggctcacgtaggtggcacctgccaatagctttgtcaatcacagccccataggaacgtctggaattgcttgggagttggggagaactgtcaagaagagtgaagagagtgccaaagcggagatctgttcacctgggggccatggaggggggacccactaaagatcaagatcaaagattctccccatctcacagacaaggaaactgaggccagagggaggagagaattgctcatggctccagaactggtggcaagtttctctggactcttaggtttatttttaatatgaaatataaaaacagtttcaaatatcttattgagggagaagtaaaaacttatttaaacaatgcc

SEQ ID NO: 13171 - DNA, 1456 bp, Homo sapiens
ggaggagacccggggaagtgagagtcggggatcagtcctgcaagctacggagtcactacagggagaggtctcatcactagaaatagccgaagaacctgcagcctcaaccagcgttaaggaggacgtgccgtttctagggagtcttagtcggggctcaccagcttcctgcattttctgaccggctccaggaatagaaccaaaagaagctgaacaaggaagcagcgcggcaccaagaaaagcagaagtcggggccttggaggcgtgactttcccctcgggtccaggtagggcctggagctgctgcaagtgccgcctgtgctggggaagggaccatgtggctgccttgggctctgttgcttctctgggtcccagcatcaacgtcaatgacacctgcaagtatcactgcggccaagacctcaacaatcacaactgcatttccacctgtatcatccactaccctgtttgcagtgggtgccacccacagtgccagcatccaggaggaaactgaggaggtggtgaactcacagctcccgctgctcctctccctgctggcattgttgctgcttctgttggtgggggcctccctgctagcctggaggatgtttcagaaatggatcaaagctggtgaccattcagagctgtcccagaaccccaagcaggcctcccccagggaagaacttcactatgcctcggtggtgtttgattctaacaccaacaggatagctgctcagaggcctcgggaggaggaaccagattcagattacagtgtgataaggaagacataggcttttgtcctgcctcgccatcggagctctcatgggccccaggaagtccagggacagctcccttatacctggcccacgtccttctcagcctgccctcgacaacagtgaccaacagacaggcagctgggtttcccaggccatccctctgttgccatcagcttgattggcttccccgagggccagcagggctgggggctccggagagcagcaggaagcactcccagccaccagtgcctgtcacctctttcccctttgcccctgcttcatcccagctctgtgtgtggaggacaaagcttcttcctgcgtggctccaggaaaagatgtggctcacgtaggtggcacctgccaatagctttgtcaatcacagccccataggaacgtctggaattgcttgggagttggggagaactgtcaagaagagtgaagagagtgccaaagcggagatctgttcacctgggggccatggaggggggacccactaaagatcaagatcaaagattctccccatctcacagacaaggaaactgaggccagagggaggagagaattgctcatggctccagaactggtggcaagtttctctggactcttaggtttatttttaatatgaaatataaaaacagtttcaaatatcttattgagggagaagtaaaaacttatttaaacaatgcc

SEQ ID NO: 13172 - DNA, 1815 bp, Homo sapiens
ggaggagacccggggaagtgagagtcggggatcagtcctgcaagctacggagtcactacagggagaggtctcatcactagaaatagccgaagaacctgcagcctcaaccagcgttaaggaggacgtgccgtttctagggagtcttagtcggggctcaccagcttcctgcattttctgaccggctccaggaatagaaccaaaagaagctgaacaaggaagcagcgcggcaccaagaaaagcagaagtcggggccttggaggcgtgactttcccctcgggtccaggatgttttgctctgagcaaatgcaggaccgtggcgggccccgtggggggatccctgagtgtgcagtgtccctatgagaaggaacacaggaccctcaacaaatactggtgcagaccaccacagattttcctatgtgacaagattgtggagaccaaagggtcagcaggaaaaaggaacggccgagtgtccatcagggacagtcctgcaaacctcagcttcacagtgaccctggagaatctcacagaggaggatgcaggcacctactggtgtggggtggatacaccatggctccgagactttcatgatcccgttgtcgaggttgaggtgtccgtgttcccggcatcaacgtcaatgacacctgcaagtatcactgcggccaagacctcaacaatcacaactgcatttccacctgtatcatccactaccctgtttgcagtgggtgccacccacagtgccagcatccaggaggaaactgaggaggtggtgaactcacagctcccgctgctcctctccctgctggcattgttgctgcttctgttggtgggggcctccctgctagcctggaggatgtttcagaaatggatcaaagctggtgaccattcagagctgtcccagaaccccaagcaggctgccacgcagagtgagctgcactacgcaaatctggagctgctgatgtggcctctgcaggaaaagccagcaccaccaagggaggtggaggtggaatacagcactgtggcctcccccagggaagaacttcactatgcctcggtggtgtttgattctaacaccaacaggatagctgctcagaggcctcgggaggaggaaccagattcagattacagtgtgataaggaagacataggcttttgtcctgcctcgccatcggagctctcatgggccccaggaagtccagggacagctcccttatacctggcccacgtccttctcagcctgccctcgacaacagtgaccaacagacaggcagctgggtttcccaggccatccctctgttgccatcagcttgattggcttccccgagggccagcagggctgggggctccggagagcagcaggaagcactcccagccaccagtgcctgtcacctctttcccctttgcccctgcttcatcccagctctgtgtgtggaggacaaagcttcttcctgcgtggctccaggaaaagatgtggctcacgtaggtggcacctgccaatagctttgtcaatcacagccccataggaacgtctggaattgcttgggagttggggagaactgtcaagaagagtgaagagagtgccaaagcggagatctgttcacctgggggccatggaggggggacccactaaagatcaagatcaaagattctccccatctcacagacaaggaaactgaggccagagggaggagagaattgctcatggctccagaactggtggcaagtttctctggactcttaggtttatttttaatatgaaatataaaaacagtttcaaatatcttattgagggagaagtaaaaacttatttaaacaatgcc

SEQ ID NO: 13173 - DNA, 1315 bp, Homo sapiens
ggaggagacccggggaagtgagagtcggggatcagtcctgcaagctacggagtcactacagggagaggtctcatcactagaaatagccgaagaacctgcagcctcaaccagcgttaaggaggacgtgccgtttctagggagtcttagtcggggctcaccagcttcctgcattttctgaccggctccaggaatagaaccaaaagaagctgaacaaggaagcagcgcggcaccaagaaaagcagaagtcggggccttggaggcgtgactttcccctcgggtccaggtagggcctggagctgctgcaagtgccgcctgtgctggggaagggaccatgtggctgccttgggctctgttgcttctctgggtcccagctggtgaccattcagagctgtcccagaaccccaagcaggctgccacgcagagtgagctgcactacgcaaatctggagctgctgatgtggcctctgcaggaaaagccagcaccaccaagggaggtggaggtggaatacagcactgtggcctcccccagggaagaacttcactatgcctcggtggtgtttgattctaacaccaacaggatagctgctcagaggcctcgggaggaggaaccagattcagattacagtgtgataaggaagacataggcttttgtcctgcctcgccatcggagctctcatgggccccaggaagtccagggacagctcccttatacctggcccacgtccttctcagcctgccctcgacaacagtgaccaacagacaggcagctgggtttcccaggccatccctctgttgccatcagcttgattggcttccccgagggccagcagggctgggggctccggagagcagcaggaagcactcccagccaccagtgcctgtcacctctttcccctttgcccctgcttcatcccagctctgtgtgtggaggacaaagcttcttcctgcgtggctccaggaaaagatgtggctcacgtaggtggcacctgccaatagctttgtcaatcacagccccataggaacgtctggaattgcttgggagttggggagaactgtcaagaagagtgaagagagtgccaaagcggagatctgttcacctgggggccatggaggggggacccactaaagatcaagatcaaagattctccccatctcacagacaaggaaactgaggccagagggaggagagaattgctcatggctccagaactggtggcaagtttctctggactcttaggtttatttttaatatgaaatataaaaacagtttcaaatatcttattgagggagaagtaaaaacttatttaaacaatgcc

SEQ ID NO: 13174 - DNA, 467 bp, Homo sapiens
  misc_feature (23)..(23): n is a, c, g, or t
ccaggcactggtggctgggagtncttcctgctgctctccggagcccccagcccctgcttcatcccagctctgtgtgtggaggacaaagcttcttcctgcgtggctccaggaaaagatgtggctcacgtaggtggcacctgccaatagctttgtcaatcacagccccataggaacgtctggaattgcttgggagttggggagaactgtcaagaagagtgaagagagtgccaaagcggagatctgttcacctgggggccatggaggggggacccactaaagatcaagatcaaagattctccccatctcacagacaaggaaactgaggccagagggaggagagaattgctcatggctccagaactggtggcaagtttctctggactcttaggtttatttttaatatgaaatataaaaacagtttcaaatatcttattgagggagaagtaaaaacttatttaaacaatgcc

SEQ ID NO: 13175 - DNA, 2656 bp, Homo sapiens
ccacaagcctcctgggtgaccctgggctagaattgctgcgcttgcctcggcttggccggttgtggcctctccttgagaaaaccagggttgtgaaagactcagaccattctctcatcttgccttgtcagaagtaaattgtgtcagatttgtgctctcgctggagacctttgccccttgcgtgcccctggccgatgggagggcggtggaggctctgtaccctggcctgctggagcatctcccccaagcccactccaggccctgggaatggccagagtctaggagaggtagaaacgatcctatcagcttctctcccacccaattaggcccagagagacaaagacagatctgaaagcaaatgcaacagagaagagacacttcttagagtaaaatgtgtctcatctctatcagccatcgcctttcatcttcccaggggcctcagaagaaggaattaagttaggctgaacaggcctcagagttaggccctggctgcttgattggctgagggggaaagagttcccttttctcattcagaaaccaaggtgctgtgtctagtcagggagccttggagatgcctggactagttggaggaatcgttggcagaggatcagagaccagcagcaggctgtctgccctgtctagagctcttcccctcaacttgtctgggcccatctgggggttgccacacaacactctaacttaccttttcctgaaagaagttgggaaaccatcatcactagaggcctttgctcagagaggagctgccttaggagtcttgggtcggaggacggggctaggaattgaccagggctttgcctgccgccctcagcagtgtcgggtacattctgacctcgcctgcagctgggctgtggattcttcctgacattcagatgtgagctgttttgggagtcagctagtatggagtacgagatgcaacccagcccccaaacctacattctgcactcaaattccaaaacactgctttactgtaaagaagaggcccctggcacccaatctccctgtccttcactgtcccctcagacctgggcggggaggggggggggcctgtgaccacctgagacatacgctcgtgacactgccccaccccagccacctccacttgcttcctcctccttccctccgctgctctttccccacggcccagaatttagctgctctgacagccacttttgagaccagctggctttgcagtcacttcagagagctggagcggctgcccactgggccctgactgggagtcccctgccagctcctgatcaggcgctgcgccctggtggcagtgatgactgggagtcccctgccagctcctgtccaggcgctgcatcctggtaacagtgaggccatgttgctgtcatctccacctctgcattcttgctgcctgtgggtcctttttctttcatggagcctgctgggtcttgtctcacctgtgctgagctcctctggggttttgatttcttccttccttatcaggccctttggggtaagcctgctggttgtacctgacatagggaggcagttaggggcagtccctggtggggccgccctggcagcctccagctggcaccatcgtgtgcctggtttccctgcaacacctgcctctctgtccctgctgctgcttggctcaggcccaacaggcagcgtgcatggaggtggttacacacagctgtttccgtgagggtgaccgtgtctgcagcacgcttccgtctccgcatgcacggctgcctctccagccacctctgatacttctctcttggggccatcagagcctcccttgggctgtcacctcccagctcacacacactcttcagtggtttcctctcttcattctcttatagggcgtggtccttcttatttatctaaagggctgaatttaggagactttttacccaggggcaaaaggctcttagggtaatgagatggatggtggcccaggtgcattttccagggcctgggttctccagatcccgtggcttctgttgagtggaggcaactttgctctgtgtgaacctcgcccctgtccctctgccgggcacccctggcaggaagcaggactcccatcctcaccctgacttagactgtcctctgagtcagctcctctccaagacaggagtgggcagccctgggcagtcttctggccccttgctaaagtgaggggcaggaagctggggctgccctccagaaagccggggtaggaactctgaaaaatacctcctctaaacggaagcagggctctccagttccacttggcgccccctcccacaaggcccttcctccctgaggaccccacccccctaccccttccccagcagcctttggaccctcacctctctccggtgtccgtgggtcctcagcccagggtgagctgcagtcaggcgggatgggacgggcaggccagaggtcagccagctcctagcagagaagagccagccagaccccaaccctgtctcttgtccatgccctttgtgatttcagtcttggtagacttgtatttggagttttgtgcttcaaagtttttgtttttgtttgtttggtttttgttttgagggggtggggggggatacagagcagctgatcaatttgtatttatttattttaacattttactaaataaagccaaataaagcctctcaaaaaaaag

SEQ ID NO: 13176 - DNA, 2548 bp, Homo sapiens
gtcactcccagctcacacacactcttcagtggtttcctctcttcattctcttatagggcgtggtccttcttatttatctaaagggctgaatttaggagactttttacccaggggcaaaaggctcttagggtaatgagatggatggtggccctgggaatggccagagtctaggagaggtagaaacgatcctatcagcttctctcccacccaattaggcccagagagacaaagacagatctgaaagcaaatgcaacagagaagagacacttcttagagtaaaatgtgtctcatctctatcagccatcgcctttcatcttcccaggggcctcagaagaaggaattaagttaggctgaacaggcctcagagttaggccctggctgcttgattggctgagggggaaagagttcccttttctcattcagaaaccaaggtgctgtgtctagtcagggagccttggagatgcctggactagttggaggaatcgttggcagaggatcagagaccagcagcaggctgtctgccctgtctagagctcttcccctcaacttgtctgggcccatctgggggttgccacacaacactctaacttaccttttcctgaaagaagttgggaaaccatcatcactagaggcctttgctcagagaggagctgccttaggagtcttgggtcggaggacggggctaggaattgaccagggctttgcctgccgccctcagcagtgtcgggtacattctgacctcgcctgcagctgggctgtggattcttcctgacattcagatgtgagctgttttgggagtcagctagtatggagtacgagatgcaacccagcccccaaacctacattctgcactcaaattccaaaacactgctttactgtaaagaagaggcccctggcacccaatctccctgtccttcactgtcccctcagacctgggcggggaggggggggggcctgtgaccacctgagacatacgctcgtgacactgccccaccccagccacctccacttgcttcctcctccttccctccgctgctctttccccacggcccagaatttagctgctctgacagccacttttgagaccagctggctttgcagtcacttcagagagctggagcggctgcccactgggccctgactgggagtcccctgccagctcctgatcaggcgctgcgccctggtggcagtgatgactgggagtcccctgccagctcctgtccaggcgctgcatcctggtaacagtgaggccatgttgctgtcatctccacctctgcattcttgctgcctgtgggtcctttttctttcatggagcctgctgggtcttgtctcacctgtgctgagctcctctggggttttgatttcttccttccttatcaggccctttggggtaagcctgctggttgtacctgacatagggaggcagttaggggcagtccctggtggggccgccctggcagcctccagctggcaccatcgtgtgcctggtttccctgcaacacctgcctctctgtccctgctgctgcttggctcaggcccaacaggcagcgtgcatggaggtggttacacacagctgtttccgtgagggtgaccgtgtctgcagcacgcttccgtctccgcatgcacggctgcctctccagccacctctgatacttctctcttggggccatcagagcctcccttgggctgtcacctcccagctcacacacactcttcagtggtttcctctcttcattctcttatagggcgtggtccttcttatttatctaaagggctgaatttaggagactttttacccaggggcaaaaggctcttagggtaatgagatggatggtggcccaggtgcattttccagggcctgggttctccagatcccgtggcttctgttgagtggaggcaactttgctctgtgtgaacctcgcccctgtccctctgccgggcacccctggcaggaagcaggactcccatcctcaccctgacttagactgtcctctgagtcagctcctctccaagacaggagtgggcagccctgggcagtcttctggccccttgctaaagtgaggggcaggaagctggggctgccctccagaaagccggggtaggaactctgaaaaatacctcctctaaacggaagcagggctctccagttccacttggcgccccctcccacaaggcccttcctccctgaggaccccacccccctaccccttccccagcagcctttggaccctcacctctctccggtgtccgtgggtcctcagcccagggtgagctgcagtcaggcgggatgggacgggcaggccagaggtcagccagctcctagcagagaagagccagccagaccccaaccctgtctcttgtccatgccctttgtgatttcagtcttggtagacttgtatttggagttttgtgcttcaaagtttttgtttttgtttgtttggtttttgttttgagggggtggggggggatacagagcagctgatcaatttgtatttatttattttaacattttactaaataaagccaaataaagcctctcaaaaaaaag

SEQ ID NO: 13177 - DNA, 3269 bp, Homo sapiens
cagactcgccccgccccagagactgcgcctgcgcgggcacgagacaccctctccgcgatgactgtgagtggtccagggacccccgagccccggccggccacccccggggccagctcagtggagcagctgcggaaggagggcaatgagctgttcaaatgtggagactacgggggcgccctggcggcctacactcaggccctgggtctggacgcgacgccccaggaccaggccgttctgcaccggaaccgggccgcctgccacctcaagctggaagattacgacaaagcagaaacagaggcatccaaagccattgaaaaggatggtggggatgtcaaagcactctaccggcggagccaagccctagagaagctgggccgcctggaccaggctgtccttgacctgcagagatgtgtgagcttggagcccaagaacaaagttttccaggaggccttgcggaacatcgggggccagattcaggagaaggtgcgatacatgtcctcgacggatgccaaagtggaacagatgtttcagatactgttggacccagaagagaagggcactgagaaaaagcaaaaggcttctcagaacctggtggtgctggccagggaggatgctggagcggagaagatcttccggagtaatggggttcagctcttgcaacgtttactggacatgggagagactgacctcatgctggcggctctgcgtacgctggttggcatttgctctgagcatcagtcacggacagtggcaaccctgagcatactgggaactcggcgagtagtctccatcctgggcgtggaaagccaggctgtgtccctggctgcctgccacctgctgcaggttatgtttgatgccctcaaggaaggtgtcaaaaaaggcttccgaggcaaagaaggtgccatcattgtggatcctgcccgggagctgaaggtcctcatcagtaacctcttagatctgctgacagaggtgggggtctctggccaaggccgagacaatgccctgaccctcctgattaaagcggtgccccggaagtctctcaaggaccccaacaacagcctcaccctctgggtcatcgaccaaggtctgaaaaagattttggaagtggggggctctctacaggaccctcctggggagctcgcagtgaccgcaaacagccgcatgagcgcctctattctcctcagcaagctctttgatgacctcaagtgtgatgcggagagggagaatttccacagactttgtgaaaactacatcaagagctggtttgagggccaagggctggccgggaagctacgggccatccagacggtgtcctgcctcctgcagggcccatgtgacgctggcaaccgggccttggagctgagcggtgtcatggagagtgtgattgctctgtgtgcctctgagcaggaggaggagcagctggtggccgtggaggctctgatccatgcagccggcaaggctaagcgggcctcattcatcactgccaatggtgtctcgctgctgaaggacctatataagtgcagcgagaaggacagcatccgcatccgggcgctagtgggactctgtaagctcggttcggctggagggactgacttcagcatgaagcagtttgctgaaggctccactctcaaactggctaagcagtgtcgaaagtggctgtgcaatgaccagatcgacgcaggcactcggcgctgggcagtggagggcctggcttacctgacctttgatgccgacgtgaaggaagagtttgtggaggatgcggctgctctgaaagctctgttccagctcagcaggttggaggagaggtcagtgctctttgcggtggcctcagcgctggtgaactgcaccaacagctatgactacgaggagcccgaccccaagatggtggagctggccaagtatgccaagcagcatgtgcccgagcagcaccccaaggacaagccaagcttcgtgcgggctcgggtgaagaagctgctggcagcgggtgtggtgtcggccatggtgtgcatggtgaagacggagagccctgtgctgaccagttcctgcagagagctgctctccagggtcttcttggctttagtggaagaggtagaggaccgaggcactgtggttgcccagggaggcggcagggcgctgatcccgctggccctggaaggcacggacgtggggcagacaaaggcagcccaggcccttgccaagctcaccatcacctccaacccggagatgaccttccctggcgagcggatctatgaggtggtccggcccctcgtctccctgttgcacctcaactgctcaggcctgcagaacttcgaggcgctcatggccctaacaaacctggctgggatcagcgagaggctccggcagaagatcctgaaggagaaggctgtgcccatgatagaaggctacatgtttgaggagcatgagatgatccgccgggcagccacggagtgcatgtgtaacttggccatgagcaaggaggtgcaggacctcttcgaagcccagggcaatgaccgactgaagctgctggtgctgtacagtggagaggatgatgagctgctacagcgggcagctgccgggggcttggccatgcttacctccatgcggcccacgctctgcagccgcattccccaagtgaccacacactggctggagatcctgcaggccctgcttctgagctccaaccaggagctgcagcaccggggtgctgtggtggtgctgaacatggtggaggcctcgagggagattgccagcaccctgatggagagtgagatgatggagatcttgtcagtgctagctaagggtgaccacagccctgtcacaagggctgctgcagcctgcctggacaaagcagtggaatatgggcttatccaacccaaccaagatggagagtgagggggttgtccctgggcccaaggctcatgcacacgctacctattgtggcacggagagtaaggacggaagcagctttggctggtggtggctggcatgcccaatactcttgcccatcctcgcttgctgccctaggatgtcctctgttctgagtcagcggccacgttcagtcacacagccctgcttggccagcactgcctgcagcctcactcagaggggccctttttctgtactactgtagtcagctgggaatggggaaggtgcatcccaacacagcctgtggatcctggggcatctggaagggcgcacacatcagcagcctcaccagctgtgagcctgctatcaggcctgcccctccaataaaagtgtgtagaactcca

SEQ ID NO: 13178 - DNA, 3224 bp, Homo sapiens
cagactcgccccgccccagagactgcgcctgcgcgggcacgagacaccctctccgcgatgactgccagctcagtggagcagctgcggaaggagggcaatgagctgttcaaatgtggagactacgggggcgccctggcggcctacactcaggccctgggtctggacgcgacgccccaggaccaggccgttctgcaccggaaccgggccgcctgccacctcaagctggaagattacgacaaagcagaaacagaggcatccaaagccattgaaaaggatggtggggatgtcaaagcactctaccggcggagccaagccctagagaagctgggccgcctggaccaggctgtccttgacctgcagagatgtgtgagcttggagcccaagaacaaagttttccaggaggccttgcggaacatcgggggccagattcaggagaaggtgcgatacatgtcctcgacggatgccaaagtggaacagatgtttcagatactgttggacccagaagagaagggcactgagaaaaagcaaaaggcttctcagaacctggtggtgctggccagggaggatgctggagcggagaagatcttccggagtaatggggttcagctcttgcaacgtttactggacatgggagagactgacctcatgctggcggctctgcgtacgctggttggcatttgctctgagcatcagtcacggacagtggcaaccctgagcatactgggaactcggcgagtagtctccatcctgggcgtggaaagccaggctgtgtccctggctgcctgccacctgctgcaggttatgtttgatgccctcaaggaaggtgtcaaaaaaggcttccgaggcaaagaaggtgccatcattgtggatcctgcccgggagctgaaggtcctcatcagtaacctcttagatctgctgacagaggtgggggtctctggccaaggccgagacaatgccctgaccctcctgattaaagcggtgccccggaagtctctcaaggaccccaacaacagcctcaccctctgggtcatcgaccaaggtctgaaaaagattttggaagtggggggctctctacaggaccctcctggggagctcgcagtgaccgcaaacagccgcatgagcgcctctattctcctcagcaagctctttgatgacctcaagtgtgatgcggagagggagaatttccacagactttgtgaaaactacatcaagagctggtttgagggccaagggctggccgggaagctacgggccatccagacggtgtcctgcctcctgcagggcccatgtgacgctggcaaccgggccttggagctgagcggtgtcatggagagtgtgattgctctgtgtgcctctgagcaggaggaggagcagctggtggccgtggaggctctgatccatgcagccggcaaggctaagcgggcctcattcatcactgccaatggtgtctcgctgctgaaggacctatataagtgcagcgagaaggacagcatccgcatccgggcgctagtgggactctgtaagctcggttcggctggagggactgacttcagcatgaagcagtttgctgaaggctccactctcaaactggctaagcagtgtcgaaagtggctgtgcaatgaccagatcgacgcaggcactcggcgctgggcagtggagggcctggcttacctgacctttgatgccgacgtgaaggaagagtttgtggaggatgcggctgctctgaaagctctgttccagctcagcaggttggaggagaggtcagtgctctttgcggtggcctcagcgctggtgaactgcaccaacagctatgactacgaggagcccgaccccaagatggtggagctggccaagtatgccaagcagcatgtgcccgagcagcaccccaaggacaagccaagcttcgtgcgggctcgggtgaagaagctgctggcagcgggtgtggtgtcggccatggtgtgcatggtgaagacggagagccctgtgctgaccagttcctgcagagagctgctctccagggtcttcttggctttagtggaagaggtagaggaccgaggcactgtggttgcccagggaggcggcagggcgctgatcccgctggccctggaaggcacggacgtggggcagacaaaggcagcccaggcccttgccaagctcaccatcacctccaacccggagatgaccttccctggcgagcggatctatgaggtggtccggcccctcgtctccctgttgcacctcaactgctcaggcctgcagaacttcgaggcgctcatggccctaacaaacctggctgggatcagcgagaggctccggcagaagatcctgaaggagaaggctgtgcccatgatagaaggctacatgtttgaggagcatgagatgatccgccgggcagccacggagtgcatgtgtaacttggccatgagcaaggaggtgcaggacctcttcgaagcccagggcaatgaccgactgaagctgctggtgctgtacagtggagaggatgatgagctgctacagcgggcagctgccgggggcttggccatgcttacctccatgcggcccacgctctgcagccgcattccccaagtgaccacacactggctggagatcctgcaggccctgcttctgagctccaaccaggagctgcagcaccggggtgctgtggtggtgctgaacatggtggaggcctcgagggagattgccagcaccctgatggagagtgagatgatggagatcttgtcagtgctagctaagggtgaccacagccctgtcacaagggctgctgcagcctgcctggacaaagcagtggaatatgggcttatccaacccaaccaagatggagagtgagggggttgtccctgggcccaaggctcatgcacacgctacctattgtggcacggagagtaaggacggaagcagctttggctggtggtggctggcatgcccaatactcttgcccatcctcgcttgctgccctaggatgtcctctgttctgagtcagcggccacgttcagtcacacagccctgcttggccagcactgcctgcagcctcactcagaggggccctttttctgtactactgtagtcagctgggaatggggaaggtgcatcccaacacagcctgtggatcctggggcatctggaagggcgcacacatcagcagcctcaccagctgtgagcctgctatcaggcctgcccctccaataaaagtgtgtagaactcca

SEQ ID NO: 13179 - DNA, 1549 bp, Homo sapiens
cagactcgccccgccccagagactgcgcctgcgcgggcacgagacaccctctccgcgatgactgtgagtggtccagggacccccgagccccggccggccacccccggggccagctcagtggagcagctgcggaaggagggcaatgagctgttcaaatgtggagactacgggggcgccctggcggcctacactcaggccctgggtctggacgcgacgccccaggaccaggccgttctgcaccggaaccgggccgcctgccacctcaagctggaagattacgacaaagcagaaacagaggcatccaaaggtaggggaatggtgggccctggtgtggagctgtagggcttctgtggtgggcaaggactctgggaccgctgcaccgtcacattctcctcctttggccccagagacacatctgccttctttctttcccactgcctcgggcctttccttttctgcagctaccctcaccttttctgaggctgaagcaccgagccccacattcgtcccccccaccttcttctggcctttcctcgagatctttccctactgctcttgcctggagacagtggcctcatgggtgctgacagcgctcctgtttgtgctcagccattgaaaaggatggtggggatgtcaaagcactctaccggcggagccaagccctagagaagctgggccgcctggaccaggctgtccttgacctgcagagatgtgtgagcttggagcccaagaacaaagttttccaggaggccttgcggaacatcgggggccagattcaggagaaggtgcgatacatgtcctcgacggatgccaaagtggaacagatgtttcagatactgttggacccagaagagaagggcactgagaaaaagcaaaaggcttctcagaacctggtggtgctggccagggaggatgctggagcggagaagatcttccggagtaatggggttcagctcttgcaacgtttactggacatgggagagactgacctcatgctggcggctctgcgtacgctggttggcatttgctctgagcatcagtcacgggtaggtggagtggagaggctggttacagcttcagtccctttgtctgtctgtccatccattcctccatccacccatctgtccatccgcccatctgcccgtccatccatccatccactcttccaccctctaccccttaccttattctaaaaagaacttaggtaggttatggtgcctcacacctgtaatcccagcactttggggggctgaggcaggtggatcacttgaggtcaggagttcaagaccagcctggccaacaaggcgaaaccctgtctctactaaaaataaaaaaattagccgggcatggtagtgcacgcctgtaatcccagctactcaggaggctgaggcacgagacttgcttgaacccaggaggtggaggttgtggtgagctgagatcgcgccactgcactccagcctgggtgacagagcgagactatctcagaaacaaaacaaaacaaaacaacaaaaaaagaaaaggcagagtacaaggagatacatgtaacaag

SEQ ID NO: 13180 - DNA, 3221 bp, Homo sapiens
gctggtacggtccggaattccgggattgcgcgggcacgagacaccctctccgcgatgactgccagctcagtggagcagctgcggaaggagggcaatgagctgttcaaatgtggagactacgggggcgccctggcggcctacactcaggccctgggtctggacgcgacgccccaggaccaggccgttctgcaccggaaccgggccgcctgccacctcaagctggaagattacgacaaagcagaaacagaggcatccaaagccattgaaaaggatggtggggatgtcaaagcactctaccggcggagccaagccctagagaagctgggccgcctggaccaggctgtccttgacctgcagagatgtgtgagcttggagcccaagaacaaagttttccaggaggccttgcggaacatcgggggccagattcaggagaaggtgcgatacatgtcctcgacggatgccaaagtggaacagatgtttcagatactgttggacccagaagagaagggcactgagaaaaagcaaaaggcttctcagaacctggtggtgctggccagggaggatgctggagcggagaagatcttccggagtaatggggttcagctcttgcaacgtttactggacatgggagagactgacctcatgctggcggctctgcgtacgctggttggcatttgctctgagcatcagtcacggacagtggcaaccctgagcatactgggaactcggcgagtagtctccatcctgggcgtggaaagccaggctgtgtccctggctgcctgccacctgctgcaggttatgtttgatgccctcaaggaaggtgtcaaaaaaggcttccgaggcaaagaaggtgccatcattgtggatcctgcccgggagctgaaggtcctcatcagtaacctcttagatctgctgacagaggtgggggtctctggccaaggccgagacaatgccctgaccctcctgattaaagcggtgccccggaagtctctcaaggaccccaacaacagcctcaccctctgggtcatcgaccaaggtctgaaaaagattttggaagtggggggctctctacaggaccctcctggggagctcgcagtgaccgcaaacagccgcatgagcgcctctattctcctcagcaagctctttgatgacctcaagtgtgatgcggagagggagaatttccacagactttgtgaaaactacatcaagagctggtttgagggccaagggctggccgggaagctacgggccatccagacggtgtcctgcctcctgcagggcccatgtgacgctggcaaccgggccttggagctgagcggtgtcatggagagtgtgattgctctgtgtgcctctgagcaggaggaggagcagctggtggccgtggaggctctgatccatgcagccggcaaggctaagcgggcctcattcatcactgccaatggtgtctcgctgctgaaggacctatataagtgcagcgagaaggacagcatccgcatccgggcgctagtgggactctgtaagctcggttcggctggagggactgacttcagcatgaagcagtttgctgaaggctccactctcaaactggctaagcagtgtcgaaagtggctgtgcaatgaccagatcgacgcaggcactcggcgctgggcagtggagggcctggcttacctgacctttgatgccgacgtgaaggaagagtttgtggaggatgcggctgctctgaaagctctgttccagctcagcaggttggaggagaggtcagtgctctttgcggtggcctcagcgctggtgaactgcaccaacagctatgactacgaggagcccgaccccaagatggtggagctggccaagtatgccaagcagcatgtgcccgagcagcaccccaaggacaagccaagcttcgtgcgggctcgggtgaagaagctgctggcagcgggtgtggtgtcggccatggtgtgcatggtgaagacggagagccctgtgctgaccagttcctgcagagagctgctctccagggtcttcttggctttagtggaagaggtagaggaccgaggcactgtggttgcccagggaggcggcagggcgctgatcccgctggccctggaaggcacggacgtggggcagacaaaggcagcccaggcccttgccaagctcaccatcacctccaacccggagatgaccttccctggcgagcggatctatgaggtggtccggcccctcgtctccctgttgcacctcaactgctcaggcctgcagaacttcgaggcgctcatggccctaacaaacctggctgggatcagcgagaggctccggcagaagatcctgaaggagaaggctgtgcccatgatagaaggctacatgtttgaggagcatgagatgatccgccgggcagccacggagtgcatgtgtaacttggccatgagcaaggaggtgcaggacctcttcgaagcccagggcaatgaccgactgaagctgctggtgctgtacagtggagaggatgatgagctgctacagcgggcagctgccgggggcttggccatgcttacctccatgcggcccacgctctgcagccgcattccccaagtgaccacacactggctggagatcctgcaggccctgcttctgagctccaaccaggagctgcagcaccggggtgctgtggtggtgctgaacatggtggaggcctcgagggagattgccagcaccctgatggagagtgagatgatggagatcttgtcagtgctagctaagggtgaccacagccctgtcacaagggctgctgcagcctgcctggacaaagcagtggaatatgggcttatccaacccaaccaagatggagagtgagggggttgtccctgggcccaaggctcatgcacacgctacctattgtggcacggagagtaaggacggaagcagctttggctggtggtggctggcatgcccaatactcttgcccatcctcgcttgctgccctaggatgtcctctgttctgagtcagcggccacgttcagtcacacagccctgcttggccagcactgcctgcagcctcactcagaggggccctttttctgtactactgtagtcagctgggaatggggaaggtgcatcccaacacagcctgtggatcctggggcatctggaagggcgcacacatcagcagcctcaccagctgtgagcctgctatcaggcctgcccctccaataaaagtgtgtagaactcca

SEQ ID NO: 13181 - DNA, 3654 bp, Homo sapiens
gctggtacggtccggaattccgggattgcgcgggcacgagacaccctctccgcgatgactgccagctcagtggagcagctgcggaaggagggcaatgagctgttcaaatgtggagactacgggggcgccctggcggcctacactcaggccctgggtctggacgcgacgccccaggaccaggccgttctgcaccggaaccgggccgcctgccacctcaagctggaagattacgacaaagcagaaacagaggcatccaaagccattgaaaaggatggtggggatgtcaaagcactctaccggcggagccaagccctagagaagctgggccgcctggaccaggctgtccttgacctgcagagatgtgtgagcttggagcccaagaacaaagttttccaggaggccttgcggaacatcgggggccagattcaggagaaggtgcgatacatgtcctcgacggatgccaaagtggaacagatgtttcagatactgttggacccagaagagaagggcactgagaaaaagcaaaaggcttctcagaacctggtggtgctggccagggaggatgctggagcggagaagatcttccggagtaatggggttcagctcttgcaacgtttactggacatgggagagactgacctcatgctggcggctctgcgtacgctggttggcatttgctctgagcatcagtcacggacagtggcaaccctgagcatactgggaactcggcgagtagtctccatcctgggcgtggaaagccaggctgtgtccctggctgcctgccacctgctgcaggttatgtttgatgccctcaaggaaggtgtcaaaaaaggcttccgaggcaaagaaggtgccatcattgtggatcctgcccgggagctgaaggtcctcatcagtaacctcttagatctgctgacagaggtgggggtctctggccaaggccgagacaatgccctgaccctcctgattaaagcggtgccccggaagtctctcaaggaccccaacaacagcctcaccctctgggtcatcgaccaaggtctgaaaaagattttggaagtggggggctctctacaggaccctcctggggagctcgcagtgaccgcaaacagccgcatgagcgcctctattctcctcagcaagctctttgatgacctcaagtgtgatgcggagagggagaatttccacagactttgtgaaaactacatcaagagctggtttgagggccaagggctggccgggaagctacgggccatccagacggtgtcctgcctcctgcagggcccatgtgacgctggcaaccgggccttggagctgagcggtgtcatggagagtgtgattgctctgtgtgcctctgagcaggaggaggagcagctggtggccgtggaggctctgatccatgcagccggcaaggctaagcgggcctcattcatcactgccaatggtgtctcgctgctgaaggacctatataagtgcagcgagaaggacagcatccgcatccgggcgctagtgggactctgtaagctcggttcggctggagggactgacttcagcatgaagcagtttgctgaaggctccactctcaaactggctaagcagtgtcgaaagtggctgtgcaatgaccagatcgacgcaggcactcggcgctgggcagtggagggcctggcttacctgacctttgatgccgacgtgaaggaagagtttgtggaggatgcggctgctctgaaagctctgttccagctcagcaggttggaggagaggtcagtgctctttgcggtggcctcagcgctggtgaactgcaccaacagctatgactacgaggagcccgaccccaagatggtggagctggccaagtatgccaagcagcatgtgcccgagcagcaccccaaggacaagccaagcttcgtgcgggctcgggtgaagaagctgctggcagcgggtgtggtgtcggccatggtgtgcatggtgaagacggagagccctgtgctgaccagttcctgcagagagctgctctccagggtcttcttggctttagtggaagaggtagaggaccgaggcactgtggttgcccagggaggcggcagggtaagctggtttacacaccccttcctgatggctgagccatcagcctataaaacatgactcagcagctgccacgccagagctgggtgttagatatggaacagaaaaacattaatggccagaggaacaccgtcccgctgagagagtgacgcggaagcaggcaagctccttggcccctccacactggtgcctgtgaaggtcctaggctctactgttcctttgtctcatttacccccatggccctggtgctcagcacaatccatgtccagcccttattaggtgtttcaggaagtgtttggatgcagagggtctgcacagggagtcaagcctggggagagggaggaaggtgagggtggcacggtcagggctggggagcccgatggtcggggtcttactcccagggatgtcctgagcagtgacgggcttgttcctacaggcgctgatcccgctggccctggaaggcacggacgtggggcagacaaaggcagcccaggcccttgccaagctcaccatcacctccaacccggagatgaccttccctggcgagcggatctatgaggtggtccggcccctcgtctccctgttgcacctcaactgctcaggcctgcagaacttcgaggcgctcatggccctaacaaacctggctgggatcagcgagaggctccggcagaagatcctgaaggagaaggctgtgcccatgatagaaggctacatgtttgaggagcatgagatgatccgccgggcagccacggagtgcatgtgtaacttggccatgagcaaggaggtgcaggacctcttcgaagcccagggcaatgaccgactgaagctgctggtgctgtacagtggagaggatgatgagctgctacagcgggcagctgccgggggcttggccatgcttacctccatgcggcccacgctctgcagccgcattccccaagtgaccacacactggctggagatcctgcaggccctgcttctgagctccaaccaggagctgcagcaccggggtgctgtggtggtgctgaacatggtggaggcctcgagggagattgccagcaccctgatggagagtgagatgatggagatcttgtcagtgctagctaagggtgaccacagccctgtcacaagggctgctgcagcctgcctggacaaagcagtggaatatgggcttatccaacccaaccaagatggagagtgagggggttgtccctgggcccaaggctcatgcacacgctacctattgtggcacggagagtaaggacggaagcagctttggctggtggtggctggcatgcccaatactcttgcccatcctcgcttgctgccctaggatgtcctctgttctgagtcagcggccacgttcagtcacacagccctgcttggccagcactgcctgcagcctcactcagaggggccctttttctgtactactgtagtcagctgggaatggggaaggtgcatcccaacacagcctgtggatcctggggcatctggaagggcgcacacatcagcagcctcaccagctgtgagcctgctatcaggcctgcccctccaataaaagtgtgtagaactcca

SEQ ID NO: 13182 - DNA, 3561 bp, Homo sapiens
gctggtacggtccggaattccgggattgcgcgggcacgagacaccctctccgcgatgactgccagctcagtggagcagctgcggaaggagggcaatgagctgttcaaatgtggagactacgggggcgccctggcggcctacactcaggccctgggtctggacgcgacgccccaggaccaggccgttctgcaccggaaccgggccgcctgccacctcaagctggaagattacgacaaagcagaaacagaggcatccaaagccattgaaaaggatggtggggatgtcaaagcactctaccggcggagccaagccctagagaagctgggccgcctggaccaggctgtccttgacctgcagagatgtgtgagcttggagcccaagaacaaagttttccaggaggccttgcggaacatcgggggccagattcaggagaaggtgcgatacatgtcctcgacggatgccaaagtggaacagatgtttcagatactgttggacccagaagagaagggcactgagaaaaagcaaaaggcttctcagaacctggtggtgctggccagggaggatgctggagcggagaagatcttccggagtaatggggttcagctcttgcaacgtttactggacatgggagagactgacctcatgctggcggctctgcgtacgctggttggcatttgctctgagcatcagtcacggacagtggcaaccctgagcatactgggaactcggcgagtagtctccatcctgggcgtggaaagccaggctgtgtccctggctgcctgccacctgctgcaggttatgtttgatgccctcaaggaaggtgtcaaaaaaggcttccgaggcaaagaaggtgccatcattgtggatcctgcccgggagctgaaggtcctcatcagtaacctcttagatctgctgacagaggtgggggtctctggccaaggccgagacaatgccctgaccctcctgattaaagcggtgccccggaagtctctcaaggaccccaacaacagcctcaccctctgggtcatcgaccaaggtctgaaaaagattttggaagtggggggctctctacaggaccctcctggggagctcgcagtgaccgcaaacagccgcatgagcgcctctattctcctcagcaagctctttgatgacctcaagtgtgatgcggagagggagaatttccacagactttgtgaaaactacatcaagagctggtttgagggccaagggctggccgggaagctacgggccatccagacggtgtcctgcctcctgcagggcccatgtgacgctggcaaccgggccttggagctgagcggtgtcatggagagtgtgattgctctgtgtgcctctgagcaggaggaggagcagctggtggccgtggaggctctgatccatgcagccggcaaggctaagcgggcctcattcatcactgccaatggtgtctcgctgctgaaggacctatataagtgcagcgagaaggacagcatccgcatccgggcgctagtgggactctgtaagctcggttcggctggagggactgacttcagcatgaagcagtttgctgaaggctccactctcaaactggctaagcagtgtcgaaagtggctgtgcaatgaccagatcgacgcaggcactcggcgctgggcagtggagggcctggcttacctgacctttgatgccgacgtgaaggaagagtttgtggaggatgcggctgctctgaaagctctgttccagctcagcaggttggaggagaggtcagtgctctttgcggtggcctcagcgctggtgaactgcaccaacagctatgactacgaggagcccgaccccaagatggtggagctggccaagtatgccaagcagcatgtgcccgagcagcaccccaaggacaagccaagcttcgtgcgggctcgggtgaagaagctgctggcagcgggtgtggtgtcggccatggtgtgcatggtgaagacggagagccctgtgctgaccagttcctgcagagagctgctctccagggtcttcttggctttagtggaagaggtagaggaccgaggcactgtggttgcccagggaggcggcagggcgctgatcccgctggccctggaaggcacggacgtggggcagacaaaggcagcccaggcccttgccaagctcaccatcacctccaacccggagatgaccttccctggcgagcggatctatgaggtggtccggcccctcgtctccctgttgcacctcaactgctcaggcctgcagaacttcgaggcgctcatggccctaacaaacctggctgggatcagcgagaggctccggcagaagatcctgaaggagaaggctgtgcccatgatagaaggctacatgtttgaggagcatgagatgatccgccgggcagccacggagtgcatgtgtaacttggccatgagcaaggaggtgcaggacctcttcgaagcccagggcaatgaccgactgaagctgctggtgctgtacagtggagaggatgatgagctgctacagcgggcagctgccgggggcttggccatgcttacctccatgcggcccacgctctgcagccgcattccccaagtgaccacacactggctggagatcctgcaggccctgcttctgagctccaaccaggagctgcagcaccggggtgctgtggtggtgctgaacatggtggaggcctcgagggagattgccagcaccctgatggagagtgagatgatggagatcttgtcagtgctagctaagggtgaccacagccctgtcacaagggctgctgcagcctgcctggacaaagcagtggaatatgggcttatccaacccaaccaagatggagagtgagggggttgtccctgggcccaaggctcatgcacacgctacctattgtggcacggagagtaaggacggaagcagctttggctggtggtggctggcatgcccaatactcttgcccatcctcgcttgctgccctaggatgtcctctgttctgagtcagcggccacgttcagtcacacagccctgcttggccagcactgcctgcagcctcactcagaggggccctttttctgtactactgtagtcagctgggaatggggaaggtgcatcccaacacagcctgtggatcctggggcatctggaagggcgcacacatcagcagcctcaccagctgtgagcctgctatcaggcctgcccctccaataaaagtgtgtagaactccaaaaaaaaaaaaaaaaaaataacatgagataatagccgtagaataaaaaaagggggcggggcgcaaagaaatattccatcgggggggggcgaattttataggtgtacccacgttttttttggtacaaagggtggcccctaagggacgggattttatagagcgaagagcacgggggcgcgagtaacaacagtctgtgcgtggggaaactgggtctgtggaatttatggagagcaccatatttctggggggccatctgggccagcttaccacgagataaagctcaacgacaattcacttcagggttatcgggttacacaatgcaatgtgcgtgaagattgtat

SEQ ID NO: 13183 - DNA, 3527 bp, Homo sapiens
gctggtacggtccggaattccgggattgcgcgggcacgagacaccctctccgcgatgactgccagctcagtggagcagctgcggaaggagggcaatgagctgttcaaatgtggagactacgggggcgccctggcggcctacactcaggccctgggtctggacgcgacgccccaggaccaggccgttctgcaccggaaccgggccgcctgccacctcaagctggaagattacgacaaagcagaaacagaggcatccaaagccattgaaaaggatggtggggatgtcaaagcactctaccggcggagccaagccctagagaagctgggccgcctggaccaggctgtccttgacctgcagagatgtgtgagcttggagcccaagaacaaagttttccaggaggccttgcggaacatcgggggccagattcaggagaaggtgcgatacatgtcctcgacggatgccaaagtggaacagatgtttcagatactgttggacccagaagagaagggcactgagaaaaagcaaaaggcttctcagaacctggtggtgctggccagggaggatgctggagcggagaagatcttccggagtaatggggttcagctcttgcaacgtttactggacatgggagagactgacctcatgctggcggctctgcgtacgctggttggcatttgctctgagcatcagtcacggacagtggcaaccctgagcatactgggaactcggcgagtagtctccatcctgggcgtggaaagccaggctgtgtccctggctgcctgccacctgctgcaggttatgtttgatgccctcaaggaaggtgtcaaaaaaggcttccgaggcaaagaaggtgccatcattgtgggtgagtggaagcaggtctggggtcttttggacgttactgtcatggaagggatggggctgagccagccaggccagttttttggggaccagacttgcagctgcaggttgtttggaatacggtttggtgacattattttactctagattctcagcaaccaaggtgcctcaggacaaagctggagctcagtctggagcctgggatgcggatccccccttccctgtgtctccctggtttgttggagaagttgaagggtcaaactgggctgggctgctgtggagcccactgatgtcttcttgttgttgccagatcctgcccgggagctgaaggtcctcatcagtaacctcttagatctgctgacagaggtgggggtctctggccaaggccgagacaatgccctgaccctcctgattaaagcggtgccccggaagtctctcaaggaccccaacaacagcctcaccctctgggtcatcgaccaaggtctgaaaaagattttggaagtggggggctctctacaggaccctcctggggagctcgcagtgaccgcaaacagccgcatgagcgcctctattctcctcagcaagctctttgatgacctcaagtgtgatgcggagagggagaatttccacagactttgtgaaaactacatcaagagctggtttgagggccaagggctggccgggaagctacgggccatccagacggtgtcctgcctcctgcagggcccatgtgacgctggcaaccgggccttggagctgagcggtgtcatggagagtgtgattgctctgtgtgcctctgagcaggaggaggagcagctggtggccgtggaggctctgatccatgcagccggcaaggctaagcgggcctcattcatcactgccaatggtgtctcgctgctgaaggacctatataagtgcagcgagaaggacagcatccgcatccgggcgctagtgggactctgtaagctcggttcggctggagggactgacttcagcatgaagcagtttgctgaaggctccactctcaaactggctaagcagtgtcgaaagtggctgtgcaatgaccagatcgacgcaggcactcggcgctgggcagtggagggcctggcttacctgacctttgatgccgacgtgaaggaagagtttgtggaggatgcggctgctctgaaagctctgttccagctcagcaggttggaggagaggtcagtgctctttgcggtggcctcagcgctggtgaactgcaccaacagctatgactacgaggagcccgaccccaagatggtggagctggccaagtatgccaagcagcatgtgcccgagcagcaccccaaggacaagccaagcttcgtgcgggctcgggtgaagaagctgctggcagcgggtgtggtgtcggccatggtgtgcatggtgaagacggagagccctgtgctgaccagttcctgcagagagctgctctccagggtcttcttggctttagtggaagaggtagaggaccgaggcactgtggttgcccagggaggcggcagggcgctgatcccgctggccctggaaggcacggacgtggggcagacaaaggcagcccaggcccttgccaagctcaccatcacctccaacccggagatgaccttccctggcgagcggatctatgaggtggtccggcccctcgtctccctgttgcacctcaactgctcaggcctgcagaacttcgaggcgctcatggccctaacaaacctggctgggatcagcgagaggctccggcagaagatcctgaaggagaaggctgtgcccatgatagaaggctacatgtttgaggagcatgagatgatccgccgggcagccacggagtgcatgtgtaacttggccatgagcaaggaggtgcaggacctcttcgaagcccagggcaatgaccgactgaagctgctggtgctgtacagtggagaggatgatgagctgctacagcgggcagctgccgggggcttggccatgcttacctccatgcggcccacgctctgcagccgcattccccaagtgaccacacactggctggagatcctgcaggccctgcttctgagctccaaccaggagctgcagcaccggggtgctgtggtggtgctgaacatggtggaggcctcgagggagattgccagcaccctgatggagagtgagatgatggagatcttgtcagtgctagctaagggtgaccacagccctgtcacaagggctgctgcagcctgcctggacaaagcagtggaatatgggcttatccaacccaaccaagatggagagtgagggggttgtccctgggcccaaggctcatgcacacgctacctattgtggcacggagagtaaggacggaagcagctttggctggtggtggctggcatgcccaatactcttgcccatcctcgcttgctgccctaggatgtcctctgttctgagtcagcggccacgttcagtcacacagccctgcttggccagcactgcctgcagcctcactcagaggggccctttttctgtactactgtagtcagctgggaatggggaaggtgcatcccaacacagcctgtggatcctggggcatctggaagggcgcacacatcagcagcctcaccagctgtgagcctgctatcaggcctgcccctccaataaaagtgtgtagaactcca

SEQ ID NO: 13184 - DNA, 3571 bp, Homo sapiens
cagactcgccccgccccagagactgcgcctgcgcgggcacgagacaccctctccgcgatgactgtgagtggtccagggacccccgagccccggccggccacccccggggccagctcagtggagcagctgcggaaggagggcaatgagctgttcaaatgtggagactacgggggcgccctggcggcctacactcaggccctgggtctggacgcgacgccccaggaccaggccgttctgcaccggaaccgggccgcctgccacctcaagctggaagattacgacaaagcagaaacagaggcatccaaaggtaggggaatggtgggccctggtgtggagctgtagggcttctgtggtgggcaaggactctgggaccgctgcaccgtcacattctcctcctttggccccagagacacatctgccttctttctttcccactgcctcgggcctttccttttctgcagctaccctcaccttttctgaggctgaagcaccgagccccacattcgtcccccccaccttcttctggcctttcctcgagatctttccctactgctcttgcctggagacagtggcctcatgggtgctgacagcgctcctgtttgtgctcagccattgaaaaggatggtggggatgtcaaagcactctaccggcggagccaagccctagagaagctgggccgcctggaccaggctgtccttgacctgcagagatgtgtgagcttggagcccaagaacaaagttttccaggaggccttgcggaacatcgggggccagattcaggagaaggtgcgatacatgtcctcgacggatgccaaagtggaacagatgtttcagatactgttggacccagaagagaagggcactgagaaaaagcaaaaggcttctcagaacctggtggtgctggccagggaggatgctggagcggagaagatcttccggagtaatggggttcagctcttgcaacgtttactggacatgggagagactgacctcatgctggcggctctgcgtacgctggttggcatttgctctgagcatcagtcacggacagtggcaaccctgagcatactgggaactcggcgagtagtctccatcctgggcgtggaaagccaggctgtgtccctggctgcctgccacctgctgcaggttatgtttgatgccctcaaggaaggtgtcaaaaaaggcttccgaggcaaagaaggtgccatcattgtggatcctgcccgggagctgaaggtcctcatcagtaacctcttagatctgctgacagaggtgggggtctctggccaaggccgagacaatgccctgaccctcctgattaaagcggtgccccggaagtctctcaaggaccccaacaacagcctcaccctctgggtcatcgaccaaggtctgaaaaagattttggaagtggggggctctctacaggaccctcctggggagctcgcagtgaccgcaaacagccgcatgagcgcctctattctcctcagcaagctctttgatgacctcaagtgtgatgcggagagggagaatttccacagactttgtgaaaactacatcaagagctggtttgagggccaagggctggccgggaagctacgggccatccagacggtgtcctgcctcctgcagggcccatgtgacgctggcaaccgggccttggagctgagcggtgtcatggagagtgtgattgctctgtgtgcctctgagcaggaggaggagcagctggtggccgtggaggctctgatccatgcagccggcaaggctaagcgggcctcattcatcactgccaatggtgtctcgctgctgaaggacctatataagtgcagcgagaaggacagcatccgcatccgggcgctagtgggactctgtaagctcggttcggctggagggactgacttcagcatgaagcagtttgctgaaggctccactctcaaactggctaagcagtgtcgaaagtggctgtgcaatgaccagatcgacgcaggcactcggcgctgggcagtggagggcctggcttacctgacctttgatgccgacgtgaaggaagagtttgtggaggatgcggctgctctgaaagctctgttccagctcagcaggttggaggagaggtcagtgctctttgcggtggcctcagcgctggtgaactgcaccaacagctatgactacgaggagcccgaccccaagatggtggagctggccaagtatgccaagcagcatgtgcccgagcagcaccccaaggacaagccaagcttcgtgcgggctcgggtgaagaagctgctggcagcgggtgtggtgtcggccatggtgtgcatggtgaagacggagagccctgtgctgaccagttcctgcagagagctgctctccagggtcttcttggctttagtggaagaggtagaggaccgaggcactgtggttgcccagggaggcggcagggcgctgatcccgctggccctggaaggcacggacgtggggcagacaaaggcagcccaggcccttgccaagctcaccatcacctccaacccggagatgaccttccctggcgagcggatctatgaggtggtccggcccctcgtctccctgttgcacctcaactgctcaggcctgcagaacttcgaggcgctcatggccctaacaaacctggctgggatcagcgagaggctccggcagaagatcctgaaggagaaggctgtgcccatgatagaaggctacatgtttgaggagcatgagatgatccgccgggcagccacggagtgcatgtgtaacttggccatgagcaaggaggtgcaggacctcttcgaagcccagggcaatgaccgactgaagctgctggtgctgtacagtggagaggatgatgagctgctacagcgggcagctgccgggggcttggccatgcttacctccatgcggcccacgctctgcagccgcattccccaagtgaccacacactggctggagatcctgcaggccctgcttctgagctccaaccaggagctgcagcaccggggtgctgtggtggtgctgaacatggtggaggcctcgagggagattgccagcaccctgatggagagtgagatgatggagatcttgtcagtgctagctaagggtgaccacagccctgtcacaagggctgctgcagcctgcctggacaaagcagtggaatatgggcttatccaacccaaccaagatggagagtgagggggttgtccctgggcccaaggctcatgcacacgctacctattgtggcacggagagtaaggacggaagcagctttggctggtggtggctggcatgcccaatactcttgcccatcctcgcttgctgccctaggatgtcctctgttctgagtcagcggccacgttcagtcacacagccctgcttggccagcactgcctgcagcctcactcagaggggccctttttctgtactactgtagtcagctgggaatggggaaggtgcatcccaacacagcctgtggatcctggggcatctggaagggcgcacacatcagcagcctcaccagctgtgagcctgctatcaggcctgcccctccaataaaagtgtgtagaactcca

SEQ ID NO: 13185 - DNA, 3369 bp, Homo sapiens
gctggtacggtccggaattccgggattgcgcgggcacgagacaccctctccgcgatgactgccagctcagtggagcagctgcggaaggagggcaatgagctgttcaaatgtggagactacgggggcgccctggcggcctacactcaggccctgggtctggacgcgacgccccaggaccaggccgttctgcaccggaaccgggccgcctgccacctcaagctggaagattacgacaaagcagaaacagaggcatccaaagctaccctcaccttttctgaggctgaagcaccgagccccacattcgtcccccccaccttcttctggcctttcctcgagatctttccctactgctcttgcctggagacagtggcctcatgggtgctgacagcgctcctgtttgtgctcagccattgaaaaggatggtggggatgtcaaagcactctaccggcggagccaagccctagagaagctgggccgcctggaccaggctgtccttgacctgcagagatgtgtgagcttggagcccaagaacaaagttttccaggaggccttgcggaacatcgggggccagattcaggagaaggtgcgatacatgtcctcgacggatgccaaagtggaacagatgtttcagatactgttggacccagaagagaagggcactgagaaaaagcaaaaggcttctcagaacctggtggtgctggccagggaggatgctggagcggagaagatcttccggagtaatggggttcagctcttgcaacgtttactggacatgggagagactgacctcatgctggcggctctgcgtacgctggttggcatttgctctgagcatcagtcacggacagtggcaaccctgagcatactgggaactcggcgagtagtctccatcctgggcgtggaaagccaggctgtgtccctggctgcctgccacctgctgcaggttatgtttgatgccctcaaggaaggtgtcaaaaaaggcttccgaggcaaagaaggtgccatcattgtggatcctgcccgggagctgaaggtcctcatcagtaacctcttagatctgctgacagaggtgggggtctctggccaaggccgagacaatgccctgaccctcctgattaaagcggtgccccggaagtctctcaaggaccccaacaacagcctcaccctctgggtcatcgaccaaggtctgaaaaagattttggaagtggggggctctctacaggaccctcctggggagctcgcagtgaccgcaaacagccgcatgagcgcctctattctcctcagcaagctctttgatgacctcaagtgtgatgcggagagggagaatttccacagactttgtgaaaactacatcaagagctggtttgagggccaagggctggccgggaagctacgggccatccagacggtgtcctgcctcctgcagggcccatgtgacgctggcaaccgggccttggagctgagcggtgtcatggagagtgtgattgctctgtgtgcctctgagcaggaggaggagcagctggtggccgtggaggctctgatccatgcagccggcaaggctaagcgggcctcattcatcactgccaatggtgtctcgctgctgaaggacctatataagtgcagcgagaaggacagcatccgcatccgggcgctagtgggactctgtaagctcggttcggctggagggactgacttcagcatgaagcagtttgctgaaggctccactctcaaactggctaagcagtgtcgaaagtggctgtgcaatgaccagatcgacgcaggcactcggcgctgggcagtggagggcctggcttacctgacctttgatgccgacgtgaaggaagagtttgtggaggatgcggctgctctgaaagctctgttccagctcagcaggttggaggagaggtcagtgctctttgcggtggcctcagcgctggtgaactgcaccaacagctatgactacgaggagcccgaccccaagatggtggagctggccaagtatgccaagcagcatgtgcccgagcagcaccccaaggacaagccaagcttcgtgcgggctcgggtgaagaagctgctggcagcgggtgtggtgtcggccatggtgtgcatggtgaagacggagagccctgtgctgaccagttcctgcagagagctgctctccagggtcttcttggctttagtggaagaggtagaggaccgaggcactgtggttgcccagggaggcggcagggcgctgatcccgctggccctggaaggcacggacgtggggcagacaaaggcagcccaggcccttgccaagctcaccatcacctccaacccggagatgaccttccctggcgagcggatctatgaggtggtccggcccctcgtctccctgttgcacctcaactgctcaggcctgcagaacttcgaggcgctcatggccctaacaaacctggctgggatcagcgagaggctccggcagaagatcctgaaggagaaggctgtgcccatgatagaaggctacatgtttgaggagcatgagatgatccgccgggcagccacggagtgcatgtgtaacttggccatgagcaaggaggtgcaggacctcttcgaagcccagggcaatgaccgactgaagctgctggtgctgtacagtggagaggatgatgagctgctacagcgggcagctgccgggggcttggccatgcttacctccatgcggcccacgctctgcagccgcattccccaagtgaccacacactggctggagatcctgcaggccctgcttctgagctccaaccaggagctgcagcaccggggtgctgtggtggtgctgaacatggtggaggcctcgagggagattgccagcaccctgatggagagtgagatgatggagatcttgtcagtgctagctaagggtgaccacagccctgtcacaagggctgctgcagcctgcctggacaaagcagtggaatatgggcttatccaacccaaccaagatggagagtgagggggttgtccctgggcccaaggctcatgcacacgctacctattgtggcacggagagtaaggacggaagcagctttggctggtggtggctggcatgcccaatactcttgcccatcctcgcttgctgccctaggatgtcctctgttctgagtcagcggccacgttcagtcacacagccctgcttggccagcactgcctgcagcctcactcagaggggccctttttctgtactactgtagtcagctgggaatggggaaggtgcatcccaacacagcctgtggatcctggggcatctggaagggcgcacacatcagcagcctcaccagctgtgagcctgctatcaggcctgcccctccaataaaagtgtgtagaactcca

SEQ ID NO: 13186 - DNA, 3355 bp, Homo sapiens
gctggtacggtccggaattccgggattgcgcgggcacgagacaccctctccgcgatgactgccagctcagtggagcagctgcggaaggagggcaatgagctgttcaaatgtggagactacgggggcgccctggcggcctacactcaggccctgggtctggacgcgacgccccaggaccaggccgttctgcaccggaaccgggccgcctgccacctcaagctggaagattacgacaaagcagaaacagaggcatccaaagccattgaaaaggatggtggggatgtcaaagcactctaccggcggagccaagccctagagaagctgggccgcctggaccaggctgtccttgacctgcagagatgtgtgagcttggagcccaagaacaaagttttccaggaggccttgcggaacatcgggggccagattcaggagaaggtgcgatacatgtcctcgacggatgccaaagtggaacagatgtttcagatactgttggacccagaagagaagggcactgagaaaaagcaaaaggcttctcagaacctggtggtgctggccagggaggatgctggagcggagaagatcttccggagtaatggggttcagctcttgcaacgtttactggacatgggagagactgacctcatgctggcggctctgcgtacgctggttggcatttgctctgagcatcagtcacggacagtggcaaccctgagcatactgggaactcggcgagtagtctccatcctgggcgtggaaagccaggctgtgtccctggctgcctgccacctgctgcaggttatgtttgatgccctcaaggaaggtgtcaaaaaaggcttccgaggcaaagaaggtgccatcattgtgggtgagtggaagcaggtctggggtcttttggacgttactgtcatggaagggatggggctgagccagccaggccagttttttggggaccagacttgcagctgcaggttgtttggaatacggtttggtgacattattttactctagattctcagcaaccaaggtgcctcaggacaaagctggagctcagtctggagcctgggatgcggatccccccttccctgtgtctccctggtttgttggagaagttgaagggtcaaactgggctgggctgctgtggagcccactgatgtcttcttgttgttgccagatcctgcccgggagctgaaggtcctcatcagtaacctcttagatctgctgacagaggtgggggtctctggccaaggccgagacaatgccctgaccctcctgattaaagcggtgccccggaagtctctcaaggaccccaacaacagcctcaccctctgggtcatcgaccaaggagctggtttgagggccaagggctggccgggaagctacgggccatccagacggtgtcctgcctcctgcagggcccatgtgacgctggcaaccgggccttggagctgagcggtgtcatggagagtgtgattgctctgtgtgcctctgagcaggaggaggagcagctggtggccgtggaggctctgatccatgcagccggcaaggctaagcgggcctcattcatcactgccaatggtgtctcgctgctgaaggacctatataagtgcagcgagaaggacagcatccgcatccgggcgctagtgggactctgtaagctcggttcggctggagggactgacttcagcatgaagcagtttgctgaaggctccactctcaaactggctaagcagtgtcgaaagtggctgtgcaatgaccagatcgacgcaggcactcggcgctgggcagtggagggcctggcttacctgacctttgatgccgacgtgaaggaagagtttgtggaggatgcggctgctctgaaagctctgttccagctcagcaggttggaggagaggtcagtgctctttgcggtggcctcagcgctggtgaactgcaccaacagctatgactacgaggagcccgaccccaagatggtggagctggccaagtatgccaagcagcatgtgcccgagcagcaccccaaggacaagccaagcttcgtgcgggctcgggtgaagaagctgctggcagcgggtgtggtgtcggccatggtgtgcatggtgaagacggagagccctgtgctgaccagttcctgcagagagctgctctccagggtcttcttggctttagtggaagaggtagaggaccgaggcactgtggttgcccagggaggcggcagggcgctgatcccgctggccctggaaggcacggacgtggggcagacaaaggcagcccaggcccttgccaagctcaccatcacctccaacccggagatgaccttccctggcgagcggatctatgaggtggtccggcccctcgtctccctgttgcacctcaactgctcaggcctgcagaacttcgaggcgctcatggccctaacaaacctggctgggatcagcgagaggctccggcagaagatcctgaaggagaaggctgtgcccatgatagaaggctacatgtttgaggagcatgagatgatccgccgggcagccacggagtgcatgtgtaacttggccatgagcaaggaggtgcaggacctcttcgaagcccagggcaatgaccgactgaagctgctggtgctgtacagtggagaggatgatgagctgctacagcgggcagctgccgggggcttggccatgcttacctccatgcggcccacgctctgcagccgcattccccaagtgaccacacactggctggagatcctgcaggccctgcttctgagctccaaccaggagctgcagcaccggggtgctgtggtggtgctgaacatggtggaggcctcgagggagattgccagcaccctgatggagagtgagatgatggagatcttgtcagtgctagctaagggtgaccacagccctgtcacaagggctgctgcagcctgcctggacaaagcagtggaatatgggcttatccaacccaaccaagatggagagtgagggggttgtccctgggcccaaggctcatgcacacgctacctattgtggcacggagagtaaggacggaagcagctttggctggtggtggctggcatgcccaatactcttgcccatcctcgcttgctgccctaggatgtcctctgttctgagtcagcggccacgttcagtcacacagccctgcttggccagcactgcctgcagcctcactcagaggggccctttttctgtactactgtagtcagctgggaatggggaaggtgcatcccaacacagcctgtggatcctggggcatctggaagggcgcacacatcagcagcctcaccagctgtgagcctgctatcaggcctgcccctccaataaaagtgtgtagaactcca

SEQ ID NO: 13187 - DNA, 2816 bp, Homo sapiens
ccaagaaatagcggacagactcatagagaagtgcgatacatgtcctcgacggatgccaaagtggaacagatgtttcagatactgttggacccagaagagaagggcactgagaaaaagcaaaaggcttctcagaacctggtggtgctggccagggaggatgctggagcggagaagatcttccggagtaatggggttcagctcttgcaacgtttactggacatgggagagactgacctcatgctggcggctctgcgtacgctggttggcatttgctctgagcatcagtcacggacagtggcaaccctgagcatactgggaactcggcgagtagtctccatcctgggcgtggaaagccaggctgtgtccctggctgcctgccacctgctgcaggttatgtttgatgccctcaaggaaggtgtcaaaaaaggcttccgaggcaaagaaggtgccatcattgtggatcctgcccgggagctgaaggtcctcatcagtaacctcttagatctgctgacagaggtgggggtctctggccaaggccgagacaatgccctgaccctcctgattaaagcggtgccccggaagtctctcaaggaccccaacaacagcctcaccctctgggtcatcgaccaaggtctgaaaaagattttggaagtggggggctctctacaggaccctcctggggagctcgcagtgaccgcaaacagccgcatgagcgcctctattctcctcagcaagctctttgatgacctcaagtgtgatgcggagagggagaatttccacagactttgtgaaaactacatcaagagctggtttgagggccaagggctggccgggaagctacgggccatccagacggtgtcctgcctcctgcagggcccatgtgacgctggcaaccgggccttggagctgagcggtgtcatggagagtgtgattgctctgtgtgcctctgagcaggaggaggagcagctggtggccgtggaggctctgatccatgcagccggcaaggctaagcgggcctcattcatcactgccaatggtgtctcgctgctgaaggacctatataagtgcagcgagaaggacagcatccgcatccgggcgctagtgggactctgtaagctcggttcggctggagggactgacttcagcatgaagcagtttgctgaaggctccactctcaaactggctaagcagtgtcgaaagtggctgtgcaatgaccagatcgacgcaggcactcggcgctgggcagtggagggcctggcttacctgacctttgatgccgacgtgaaggaagagtttgtggaggatgcggctgctctgaaagctctgttccagctcagcaggttggaggagaggtcagtgctctttgcggtggcctcagcgctggtgaactgcaccaacagctatgactacgaggagcccgaccccaagatggtggagctggccaagtatgccaagcagcatgtgcccgagcagcaccccaaggacaagccaagcttcgtgcgggctcgggtgaagaagctgctggcagcgggtgtggtgtcggccatggtgtgcatggtgaagacggagagccctgtgctgaccagttcctgcagagagctgctctccagggtcttcttggctttagtggaagaggtagaggaccgaggcactgtggttgcccagggaggcggcagggcgctgatcccgctggccctggaaggcacggacgtggggcagacaaaggcagcccaggcccttgccaagctcaccatcacctccaacccggagatgaccttccctggcgagcggatctatgaggtggtccggcccctcgtctccctgttgcacctcaactgctcaggcctgcagaacttcgaggcgctcatggccctaacaaacctggctgggatcagcgagaggctccggcagaagatcctgaaggagaaggctgtgcccatgatagaaggctacatgtttgaggagcatgagatgatccgccgggcagccacggagtgcatgtgtaacttggccatgagcaaggaggtgcaggacctcttcgaagcccagggcaatgaccgactgaagctgctggtgctgtacagtggagaggatgatgagctgctacagcgggcagctgccgggggcttggccatgcttacctccatgcggcccacgctctgcagccgcattccccaagtgaccacacactggctggagatcctgcaggccctgcttctgagctccaaccaggagctgcagcaccggggtgctgtggtggtgctgaacatggtggaggcctcgagggagattgccagcaccctgatggagagtgagatgatggagatcttgtcagtgctagctaagggtgaccacagccctgtcacaagggctgctgcagcctgcctggacaaagcagtggaatatgggcttatccaacccaaccaagatggagagtgagggggttgtccctgggcccaaggctcatgcacacgctacctattgtggcacggagagtaaggacggaagcagctttggctggtggtggctggcatgcccaatactcttgcccatcctcgcttgctgccctaggatgtcctctgttctgagtcagcggccacgttcagtcacacagccctgcttggccagcactgcctgcagcctcactcagaggggccctttttctgtactactgtagtcagctgggaatggggaaggtgcatcccaacacagcctgtggatcctggggcatctggaagggcgcacacatcagcagcctcaccagctgtgagcctgctatcaggcctgcccctccaataaaagtgtgtagaactcca

SEQ ID NO: 13188 - DNA, 2866 bp, Homo sapiens
ttatttcagccttttttgtagtaagaaaaacttggaacttgcctgaatgcccagccatagaggaatggctgaataaatgggtgcgatacatgtcctcgacggatgccaaagtggaacagatgtttcagatactgttggacccagaagagaagggcactgagaaaaagcaaaaggcttctcagaacctggtggtgctggccagggaggatgctggagcggagaagatcttccggagtaatggggttcagctcttgcaacgtttactggacatgggagagactgacctcatgctggcggctctgcgtacgctggttggcatttgctctgagcatcagtcacggacagtggcaaccctgagcatactgggaactcggcgagtagtctccatcctgggcgtggaaagccaggctgtgtccctggctgcctgccacctgctgcaggttatgtttgatgccctcaaggaaggtgtcaaaaaaggcttccgaggcaaagaaggtgccatcattgtggatcctgcccgggagctgaaggtcctcatcagtaacctcttagatctgctgacagaggtgggggtctctggccaaggccgagacaatgccctgaccctcctgattaaagcggtgccccggaagtctctcaaggaccccaacaacagcctcaccctctgggtcatcgaccaaggtctgaaaaagattttggaagtggggggctctctacaggaccctcctggggagctcgcagtgaccgcaaacagccgcatgagcgcctctattctcctcagcaagctctttgatgacctcaagtgtgatgcggagagggagaatttccacagactttgtgaaaactacatcaagagctggtttgagggccaagggctggccgggaagctacgggccatccagacggtgtcctgcctcctgcagggcccatgtgacgctggcaaccgggccttggagctgagcggtgtcatggagagtgtgattgctctgtgtgcctctgagcaggaggaggagcagctggtggccgtggaggctctgatccatgcagccggcaaggctaagcgggcctcattcatcactgccaatggtgtctcgctgctgaaggacctatataagtgcagcgagaaggacagcatccgcatccgggcgctagtgggactctgtaagctcggttcggctggagggactgacttcagcatgaagcagtttgctgaaggctccactctcaaactggctaagcagtgtcgaaagtggctgtgcaatgaccagatcgacgcaggcactcggcgctgggcagtggagggcctggcttacctgacctttgatgccgacgtgaaggaagagtttgtggaggatgcggctgctctgaaagctctgttccagctcagcaggttggaggagaggtcagtgctctttgcggtggcctcagcgctggtgaactgcaccaacagctatgactacgaggagcccgaccccaagatggtggagctggccaagtatgccaagcagcatgtgcccgagcagcaccccaaggacaagccaagcttcgtgcgggctcgggtgaagaagctgctggcagcgggtgtggtgtcggccatggtgtgcatggtgaagacggagagccctgtgctgaccagttcctgcagagagctgctctccagggtcttcttggctttagtggaagaggtagaggaccgaggcactgtggttgcccagggaggcggcagggcgctgatcccgctggccctggaaggcacggacgtggggcagacaaaggcagcccaggcccttgccaagctcaccatcacctccaacccggagatgaccttccctggcgagcggatctatgaggtggtccggcccctcgtctccctgttgcacctcaactgctcaggcctgcagaacttcgaggcgctcatggccctaacaaacctggctgggatcagcgagaggctccggcagaagatcctgaaggagaaggctgtgcccatgatagaaggctacatgtttgaggagcatgagatgatccgccgggcagccacggagtgcatgtgtaacttggccatgagcaaggaggtgcaggacctcttcgaagcccagggcaatgaccgactgaagctgctggtgctgtacagtggagaggatgatgagctgctacagcgggcagctgccgggggcttggccatgcttacctccatgcggcccacgctctgcagccgcattccccaagtgaccacacactggctggagatcctgcaggccctgcttctgagctccaaccaggagctgcagcaccggggtgctgtggtggtgctgaacatggtggaggcctcgagggagattgccagcaccctgatggagagtgagatgatggagatcttgtcagtgctagctaagggtgaccacagccctgtcacaagggctgctgcagcctgcctggacaaagcagtggaatatgggcttatccaacccaaccaagatggagagtgagggggttgtccctgggcccaaggctcatgcacacgctacctattgtggcacggagagtaaggacggaagcagctttggctggtggtggctggcatgcccaatactcttgcccatcctcgcttgctgccctaggatgtcctctgttctgagtcagcggccacgttcagtcacacagccctgcttggccagcactgcctgcagcctcactcagaggggccctttttctgtactactgtagtcagctgggaatggggaaggtgcatcccaacacagcctgtggatcctggggcatctggaagggcgcacacatcagcagcctcaccagctgtgagcctgctatcaggcctgcccctccaataaaagtgtgtagaactcca

SEQ ID NO: 13189 - DNA, 3067 bp, Homo sapiens
gctggtacggtccggaattccgggattgcgcgggcacgagacaccctctccgcgatgactgccagctcagtggagcagctgcggaaggagggcaatgagctgttcaaatgtggagactacgggggcgccctggcggcctacactcaggccctgggtctggacgcgacgccccaggaccaggccgttctgcaccggaaccgggccgcctgccacctcaagctggaagattacgacaaagcagaaacagaggcatccaaagccattgaaaaggatggtggggatgtcaaagcactctaccggcggagccaagccctagagaagctgggccgcctggaccaggctgtccttgacctgcagagatgtgtgagcttggagcccaagaacaaagttttccaggaggccttgcggaacatcgggggccagattcaggagaaggtgcgatacatgtcctcgacggatgccaaagtggaacagatgtttcagatactgttggacccagaagagaagggcactgagaaaaagcaaaaggcttctcagaacctggtggtgctggccagggaggatgctggagcggagaagatcttccggagtaatggggttcagctcttgcaacgtttactggacatgggagagactgacctcatgctggcggctctgcgtacgctggttggcatttgctctgagcatcagtcacggacagtggcaaccctgagcatactgggaactcggcgagtagtctccatcctgggcgtggaaagccaggctgtgtccctggctgcctgccacctgctgcaggttatgtttgatgccctcaaggaaggtgtcaaaaaaggcttccgaggcaaagaaggtgccatcattgtggatcctgcccgggagctgaaggtcctcatcagtaacctcttagatctgctgacagaggtgggggtctctggccaaggccgagacaatgccctgaccctcctgattaaagcggtgccccggaagtctctcaaggaccccaacaacagcctcaccctctgggtcatcgaccaaggtctgaaaaagattttggaagtggggggctctctacaggaccctcctggggagctcgcagtgaccgcaaacagccgcatgagcgcctctattctcctcagcaagctctttgatgacctcaagtgtgatgcggagagggagaatttccacagactttgtgaaaactacatcaagagctggtttgagggccaagggctggccgggaagctacgggccatccagacggtgtcctgcctcctgcagggcccatgtgacgctggcaaccgggccttggagctgagcggtgtcatggagagtgtgattgctctgtgtgcctctgagcaggaggaggagcagctggtggccgtggaggctctgatccatgcagccggcaaggctaagcgggcctcattcatcactgccaatggtgtctcgctgctgaaggacctatataagtgcagcgagaaggacagcatccgcatccgggcgctagtgggactctgtaagctcggttcggctggagggactgacttcagcatgaagcagtttgctgaaggctccactctcaaactggctaagcagtgtcgaaagtggctgtgcaatgaccagatcgacgcaggcactcggcgctgggcagtggagggcctggcttacctgacctttgatgccgacgtgaaggaagagtttgtggaggatgcggctgctctgaaagctctgttccagctcagcaggttggaggagaggtcagtgctctttgcggtggcctcagcgctggtgaactgcaccaacagctatgactacgaggagcccgaccccaagatggtggagctggccaagtatgccaagcagcatgtgcccgagcagcaccccaaggacaagccaagcttcgtgcgggctcgggtgaagaagctgctggcagcgggtgtggtgtcggccatggtgtgcatggtgaagacggagagccctgtgctgaccagttcctgcagagagctgctctccagggtcttcttggctttagtggaagaggtagaggaccgaggcactgtggttgcccagggaggcggcagggcgctgatcccgctggccctggaaggcacggacgtggggcagacaaaggcagcccaggcccttgccaagctcaccatcacctccaacccggagatgaccttccctggcgagcggatctatgaggtggtccggcccctcgtctccctgttgcacctcaactgctcaggcctgcagaacttcgaggcgctcatggccctaacaaacctggctgggatcagcgagaggctccggcagaagatcctgaaggagaaggctgtgcccatgatagaaggctacatgtttgaggagcatgagatgatccgccgggcagccacggagtgcatgtgtaacttggccatgagcaaggaggtgcaggacctcttcgaagcccagggcaatgaccgactgaagctgctggtgctgtacagtggagaggatgatgagctgctacagcgggcagctgccgggggcttggccatgcttacctccatgcggcccacgctctgcagccgcattccccaagtgaccacacactggctggagatcctgcaggccctgcttctgagctccaaccaggagctgcagcaccggggtgctgtggtggtgctgaacatggtggaggcctcgagggagattgccagcaccctgatggagagtgagatgatggagatcttgtcagtgctagctaagggtgaccacagccctgtcacaagggctgctgcagcctgcctggacaaagcagtggaatatgggcttatccaacccaaccaagatggagagtgagggggttgtccctgggcccaaggctcatgcacacgctacctattgtggcacggagagtaaggacggaagcagctttggctggtggtggctggcatgcccaatactcttgcccatcacagcctgtggatcctggggcatctggaagggcgcacacatcagcagcctcaccagctgtgagcctgctatcaggcctgcccctccaataaaagtgtgtagaactcca

SEQ ID NO: 13190 - DNA, 3014 bp, Homo sapiens
gctggtacggtccggaattccgggattgcgcgggcacgagacaccctctccgcgatgactgccagctcagtggagcagctgcggaaggagggcaatgagctgttcaaatgtggagactacgggggcgccctggcggcctacactcaggccctgggtctggacgcgacgccccaggaccaggccgttctgcaccggaaccgggccgcctgccacctcaagctggaagattacgacaaagcagaaacagaggcatccaaagccattgaaaaggatggtggggatgtcaaagcactctaccggcggagccaagccctagagaagctgggccgcctggaccaggctgtccttgacctgcagagatgtgtgagcttggagcccaagaacaaagttttccaggaggccttgcggaacatcgggggccagattcaggagaaggtgcgatacatgtcctcgacggatgccaaagtggaacagatgtttcagatactgttggacccagaagagaagggcactgagaaaaagcaaaaggcttctcagaacctggtggtgctggccagggaggatgctggagcggagaagatcttccggagtaatggggttcagctcttgcaacgtttactggacatgggagagactgacctcatgctggcggctctgcgtacgctggttggcatttgctctgagcatcagtcacggacagtggcaaccctgagcatactgggaactcggcgagtagtctccatcctgggcgtggaaagccaggctgtgtccctggctgcctgccacctgctgcaggttatgtttgatgccctcaaggaaggtgtcaaaaaaggcttccgaggcaaagaaggtgccatcattgtggatcctgcccgggagctgaaggtcctcatcagtaacctcttagatctgctgacagaggtgggggtctctggccaaggccgagacaatgccctgaccctcctgattaaagcggtgccccggaagtctctcaaggaccccaacaacagcctcaccctctgggtcatcgaccaaggtctgaaaaagattttggaagtggggggctctctacaggaccctcctggggagctcgcagtgaccgcaaacagccgcatgagcgcctctattctcctcagcaagctctttgatgacctcaagtgtgatgcggagagggagaatttccacagactttgtgaaaactacatcaagagctggtttgagggccaagggctggccgggaagctacgggccatccagacggtgtcctgcctcctgcagggcccatgtgacgctggcaaccgggccttggagctgagcggtgtcatggagagtgtgattgctctgtgtgcctctgagcaggaggaggagcagctggtggccgtggaggctctgatccatgcagccggcaaggctaagcgggcctcattcatcactgccaatggtgtctcgctgctgaaggacctatataagtgcagcgagaaggacagcatccgcatccgggcgctagtgggactctgtaagctcggttcggctggagggactgacttcagcatgaagcagtttgctgaaggctccactctcaaactggctaagcagtgtcgaaagtggctgtgcaatgaccagatcgacgcaggcactcggcgctgggcagtggagggcctggcttacctgacctttgatgccgacgtgaaggaagagtttgtggaggatgcggctgctctgaaagctctgttccagctcagcaggttggaggagaggtcagtgctctttgcggtggcctcagcgctggtgaactgcaccaacagctatgactacgaggagcccgaccccaagatggtggagctggccaagtatgccaagcagcatgtgcccgagcagcaccccaaggacaagccaagcttcgtgcgggctcgggtgaagaagctgctggcagcgggtgtggtgtcggccatggtgtgcatggtgaagacggagagccctgtgctgaccagttcctgcagagagctgctctccagggtcttcttggctttagtggaagaggtagaggaccgaggcactgtggttgcccagggaggcggcagggcgctgatcccgctggccctggaaggcacggacgtggggcagacaaaggcagcccaggcccttgccaagctcaccatcacctccaacccggagatgaccttccctggcgagcggatctatgaggtggtccggcccctcgtctccctgttgcacctcaactgctcaggcctgcagaacttcgaggcgctcatggccctaacaaacctggctgggatcagcgagaggctccggcagaagatcctgaaggagaaggctgtgcccatgatagaaggctacatgtttgaggagcatgagatgatccgccgggcagccacggagtgcatgtgtaacttggccatgagcaaggaggtgcaggacctcttcgaagcccagggcaatgaccgactgaagctgctggtgctgtacagtggagaggatgatgagctgctacagcgggcagctgccgggggcttggccatgcttacctccatgcggcccacgctctgcagccgcattccccaagtgaccacacactggctggagatcctgcaggccctgcttctgagctccaaccaggagctgcagcaccggggtgctgtggtggtgctgaacatggtggaggcctcgagggagattgccagcaccctgatggagagtgagatgatggagatcttgtcagtgctagctaagggtgaccacagccctgtcacaagggctgctgcagcctgcctggacaaagcagtggaatatgggcttatccaacccaaccaagatggagagtgagggggttgtccctgggcccaaggctcatgcacacgctacctattgtggcacggagagtaaggacggaagcagctttggctggtggtggctggcatgcccaatactcttgcccatcacttgggtttgcttggccactagggattgggcccttttgtttgctggagctcaag

SEQ ID NO: 13191 - DNA, 1336 bp, Homo sapiens
gcgtagtagaggccgggtgttaatcggacgaggaaaagctgctggcagcgggtgtggtgtcggccatggtgtgcatggtgaagacggagagccctgtgctgaccagttcctgcagagagctgctctccagggtcttcttggctttagtggaagaggtagaggaccgaggcactgtggttgcccagggaggcggcagggcgctgatcccgctggccctggaaggcacggacgtggggcagacaaaggcagcccaggcccttgccaagctcaccatcacctccaacccggagatgaccttccctggcgagcggatctatgaggtggtccggcccctcgtctccctgttgcacctcaactgctcaggcctgcagaacttcgaggcgctcatggccctaacaaacctggctgggatcagcgagaggctccggcagaagatcctgaaggagaaggctgtgcccatgatagaaggctacatgtttgaggagcatgagatgatccgccgggcagccacggagtgcatgtgtaacttggccatgagcaaggaggtgcaggacctcttcgaagcccagggcaatgaccgactgaagctgctggtgctgtacagtggagaggatgatgagctgctacagcgggcagctgccgggggcttggccatgcttacctccatgcggcccacgctctgcagccgcattccccaagtgaccacacactggctggagatcctgcaggccctgcttctgagctccaaccaggagctgcagcaccggggtgctgtggtggtgctgaacatggtggaggcctcgagggagattgccagcaccctgatggagagtgagatgatggagatcttgtcagtgctagctaagggtgaccacagccctgtcacaagggctgctgcagcctgcctggacaaagcagtggaatatgggcttatccaacccaaccaagatggagagtgagggggttgtccctgggcccaaggctcatgcacacgctacctattgtggcacggagagtaaggacggaagcagctttggctggtggtggctggcatgcccaatactcttgcccatcctcgcttgctgccctaggatgtcctctgttctgagtcagcggccacgttcagtcacacagccctgcttggccagcactgcctgcagcctcactcagaggggccctttttctgtactactgtagtcagctgggaatggggaaggtgcatcccaacacagcctgtggatcctggggcatctggaagggcgcacacatcagcagcctcaccagctgtgagcctgctatcaggcctgcccctccaataaaagtgtgtagaactcca

SEQ ID NO: 13192 - DNA, 3962 bp, Homo sapiens
gctggtacggtccggaattccgggattgcgcgggcacgagacaccctctccgcgatgactgccagctcagtggagcagctgcggaaggagggcaatgagctgttcaaatgtggagactacgggggcgccctggcggcctacactcaggccctgggtctggacgcgacgccccaggaccaggccgttctgcaccggaaccgggccgcctgccacctcaagctggaagattacgacaaagcagaaacagaggcatccaaagccattgaaaaggatggtggggatgtcaaagcactctaccggcggagccaagccctagagaagctgggccgcctggaccaggctgtccttgacctgcagagatgtgtgagcttggagcccaagaacaaagttttccaggaggccttgcggaacatcgggggccagattcaggagaaggtgcgatacatgtcctcgacggatgccaaagtggaacagatgtttcagatactgttggacccagaagagaagggcactgagaaaaagcaaaaggcttctcagaacctggtggtgctggccagggaggatgctggagcggagaagatcttccggagtaatggggttcagctcttgcaacgtttactggacatgggagagactgacctcatgctggcggctctgcgtacgctggttggcatttgctctgagcatcagtcacggacagtggcaaccctgagcatactgggaactcggcgagtagtctccatcctgggcgtggaaagccaggctgtgtccctggctgcctgccacctgctgcaggttatgtttgatgccctcaaggaaggtgtcaaaaaaggcttccgaggcaaagaaggtgccatcattgtggatcctgcccgggagctgaaggtcctcatcagtaacctcttagatctgctgacagaggtgggggtctctggccaaggccgagacaatgccctgaccctcctgattaaagcggtgccccggaagtctctcaaggaccccaacaacagcctcaccctctgggtcatcgaccaaggtctgaaaaagattttggaagtggggggctctctacaggaccctcctggggagctcgcagtgaccgcaaacagccgcatgagcgcctctattctcctcagcaagctctttgatgacctcaagtgtgatgcggagagggagaatttccacagactttgtgaaaactacatcaagagctggtttgagggccaagggctggccgggaagctacgggccatccagacggtgtcctgcctcctgcagggcccatgtgacgctggcaaccgggccttggagctgagcggtgtcatggagagtgtgattgctctgtgtgcctctgagcaggaggaggagcagctggtggccgtggaggctctgatccatgcagccggcaaggctaagcgggcctcattcatcactgccaatggtgtctcgctgctgaaggacctatataagtgcagcgagaaggacagcatccgcatccgggcgctagtgggactctgtaagctcggttcggctggagggactgacttcagcatgaagcagtttgctgaaggctccactctcaaactggctaagcagtgtcgaaagtggctgtgcaatgaccagatcgacgcaggcactcggcgctgggcagtggagggcctggcttacctgacctttgatgccgacgtgaaggaagagtttgtggaggatgcggctgctctgaaagctctgttccagctcagcaggttggaggagaggtcagtgctctttgcggtggcctcagcgctggtgaactgcaccaacagctatgactacgaggagcccgaccccaagatggtggagctggccaagtatgccaagcagcatgtgcccgagcagcaccccaaggacaagccaagcttcgtgcgggctcgggtgaagaagctgctggcagcgggtgtggtgtcggccatggtgtgcatggtgaagacggagagccctgtgctgaccagttcctgcagagagctgctctccagggtcttcttggctttagtggaagaggtagaggaccgaggcactgtggttgcccagggaggcggcagggcgctgatcccgctggccctggaaggcacggacgtggggcagacaaaggcagcccaggcccttgccaagctcaccatcacctccaacccggagatgaccttccctggcgagcggatctatgaggtggtccggcccctcgtctccctgttgcacctcaactgctcaggcctgcagaacttcgaggcgctcatggccctaacaaacctggctgggatcagcgagaggctccggcagaagatcctgaaggagaaggctgtgcccatgatagaaggctacatgtttgaggagcatgagatgatccgccgggcagccacggagtgcatgtgtaacttggccatgagcaaggaggtgcaggacctcttcgaagcccagggcaatgaccgactgaagctgctggtgctgtacagtggagaggatgatgagctgctacagcgggcagctgccgggggcttggccatgcttacctccatgcggcccacgctctgcagccgcattccccaagtgaccacacactggctggagatcctgcaggccctgcttctgagctccaaccaggagctgcagcaccggggtgctgtggtggtgctgaacatggtggaggcctcgagggagattgccagcaccctgatggagagtgagatgatggagatcttgtcagtgctagctaagggtgaccacagccctgtcacaagggctgctgcagcctgcctggacaaagcagtggaatatgggcttatccaacccaaccaagatggagagtgagggggttgttctatggctgctcaccatggcgataagcacttgcgtcgccatcgcacgcgctcctcatatgcctacgtagtgccttaagctaccctcaagcccctcgtccactcgctctggcttatccattcatgtatctcgtctcccatctcggcgtaatttcgtagccccttaatacactgagccgatctccctcgccattgtaacatacgcgcacctgtaatcccacgttcttgatcgtgtgcttccaagccctctactctcctcttctgttccaatccttgtctactcatcttcaactcggcctcagattatgtcctctgtcgaccgtcgactctggcagccctcgcttactcggctgcatactctatttctacgtcccgtatcctccctctacacgtctcactcttctccgcactctccactcatcgcgctattatccacctctctcttctctatcacgcatgcccctcccctcgacgctcccatatcttacccactcccctcgtgtccctctctctacatacagcacgttccttcctcctttctcatcacgccgatgcgcatcactcccgtccttcttcctcgcccatgcctgcagctttccaaccctcctttcacttctattcttctccacatctgctctctcctctcctctagcccacccatgtcatcctcactctccgactctccttcctactctcgcccttccgtcccacacttcccctctgatcacattctaccgtccctctcctcaacgactcttctatctgtccctctcactcactacttttcgctctcccatcgtccctctcgactttctcctgtctcctccgctctccacacgttccgcctcctctctctgtctcgcactacttctcaccgcgtcctccttcctacttccacactctctcttcgctcacgtctctcgcttcatctcgcctcatcctctcgactacgtgctctctcctctctattactcctctcacctctacgatccatcactccgcgtctcgtgcgcagctgctctctcacctctactcctcacacgacgatacgtccgctctctatcactgtacgatccggacttcacagcgcgctactctcaccttctcccc

SEQ ID NO: 13193 - DNA, 1228 bp, Homo sapiens
tataggctaggtacgagctggtggtcttcttggctttagtggaagaggtagaggaccgaggcactgtggttgcccagggaggcggcagggcgctgatcccgctggccctggaaggcacggacgtggggcagacaaaggcagcccaggcccttgccaagctcaccatcacctccaacccggagatgaccttccctggcgagcggatctatgaggtggtccggcccctcgtctccctgttgcacctcaactgctcaggcctgcagaacttcgaggcgctcatggccctaacaaacctggctgggatcagcgagaggctccggcagaagatcctgaaggagaaggctgtgcccatgatagaaggctacatgtttgaggagcatgagatgatccgccgggcagccacggagtgcatgtgtaacttggccatgagcaaggaggtgcaggacctcttcgaagcccagggcaatgaccgactgaagctgctggtgctgtacagtggagaggatgatgagctgctacagcgggcagctgccgggggcttggccatgcttacctccatgcggcccacgctctgcagccgcattccccaagtgaccacacactggctggagatcctgcaggccctgcttctgagctccaaccaggagctgcagcaccggggtgctgtggtggtgctgaacatggtggaggcctcgagggagattgccagcaccctgatggagagtgagatgatggagatcttgtcagtgctagctaagggtgaccacagccctgtcacaagggctgctgcagcctgcctggacaaagcagtggaatatgggcttatccaacccaaccaagatggagagtgagggggttgtccctgggcccaaggctcatgcacacgctacctattgtggcacggagagtaaggacggaagcagctttggctggtggtggctggcatgcccaatactcttgcccatcctcgcttgctgccctaggatgtcctctgttctgagtcagcggccacgttcagtcacacagccctgcttggccagcactgcctgcagcctcactcagaggggccctttttctgtactactgtagtcagctgggaatggggaaggtgcatcccaacacagcctgtggatcctggggcatctggaagggcgcacacatcagcagcctcaccagctgtgagcctgctatcaggcctgcccctccaataaaagtgtgtagaactcca

SEQ ID NO: 13194 - DNA, 2118 bp, Homo sapiens
gctggtacggtccggaattccgggattgcgcgggcacgagacaccctctccgcgatgactgccagctcagtggagcagctgcggaaggagggcaatgagctgttcaaatgtggagactacgggggcgccctggcggcctacactcaggccctgggtctggacgcgacgccccaggaccaggccgttctgcaccggaaccgggccgcctgccacctcaagctggaagattacgacaaagcagaaacagaggcatccaaagccattgaaaaggatggtggggatgtcaaagcactctaccggcggagccaagccctagagaagctgggccgcctggaccaggctgtccttgacctgcagagatgtgtgagcttggagcccaagaacaaagttttccaggaggccttgcggaacatcgggggccagattcaggagaaggtgcgatacatgtcctcgacggatgccaaagtggaacagatgtttcagatactgttggacccagaagagaagggcactgagaaaaagcaaaaggcttctcagaacctggtggtgctggccagggaggatgctggagcggagaagatcttccggagtaatggggttcagctcttgcaacgtttactggacatgggagagactgacctcatgctggcggctctgcgtacgctggttggcatttgctctgagcatcagtcacggacagtggcaaccctgagcatactgggaactcggcgagtagtctccatcctgggcgtggaaagccaggctgtgtccctggctgcctgccacctgctgcaggttatgtttgatgccctcaaggaaggtgtcaaaaaaggcttccgaggcaaagaaggtgccatcattgtggatcctgcccgggagctgaaggtcctcatcagtaacctcttagatctgctgacagaggtgggggtctctggccaaggccgagacaatgccctgaccctcctgattaaagcggtgccccggaagtctctcaaggaccccaacaacagcctcaccctctgggtcatcgaccaaggtctgaaaaagattttggaagtggggggctctctacaggaccctcctggggagctcgcagtgaccgcaaacagccgcatgagcgcctctattctcctcagcaagctctttgatgacctcaagtgtgatgcggagagggagaatttccacagactttgtgaaaactacatcaagagctggtttgagggccaagggctggccgggaagctacgggccatccagacggtgtcctgcctcctgcagggcccatgtgacgctggcaaccgggccttggagctgagcggtgtcatggagagtgtgattgctctgtgtgcctctgagcaggaggaggagcagctggtggccgtggaggctctgatccatgcagccggcaaggctaagcgggcctcattcatcactgccaatggtgtctcgctgctgaaggacctatataagtgcagcgagaaggacagcatccgcatccgggcgctagtgggactctgtaagctcggttcggctggagggactgacttcagcatgaagcagtttgctgaaggctccactctcaaactggctaagcagtgtcgaaagtggctgtgcaatgaccagatcgacgcaggcactcggcgctgggcagtggagggcctggcttacctgacctttgatgccgacgtgaaggaagagtttgtggaggatgcggctgctctgaaagctctgttccagctcagcaggttggaggagaggtcagtgctctttgcggtggcctcagcgctggtgaactgcaccaacagctatgactacgaggagcccgaccccaagatggtggagctggccaagtatgccaagcagcatgtgcccgagcagcaccccaaggacaagccaagcttcgtgcgggctcgggtgaagaagctgctggcagcgggtgtggtgtcggccatggtgtgcatggtgaagacggagagccctgtgctgaccagttcctgcagagagctgctctccagggtcttcttggctttagtggaagagggcgcacacatcagcagcctcaccagctgtgagcctgctatcaggcctgcccctccaataaaagtgtgtagaactcca

SEQ ID NO: 13195 - DNA, 1381 bp, Homo sapiens
gctggtacggtccggaattccgggattgcgcgggcacgagacaccctctccgcgatgactgccagctcagtggagcagctgcggaaggagggcaatgagctgttcaaatgtggagactacgggggcgccctggcggcctacactcaggccctgggtctggacgcgacgccccaggaccaggccgttctgcaccggaaccgggccgcctgccacctcaagctggaagattacgacaaagcagaaacagaggcatccaaagccattgaaaaggatggtggggatgtcaaagcactctaccggcggagccaagccctagagaagctgggccgcctggaccaggctgtccttgacctgcagagatgtgtgagcttggagcccaagaacaaagttttccaggaggccttgcggaacatcgggggccagattcaggagaaggtgcgatacatgtcctcgacggatgccaaagtggaacagatgtttcagatactgttggacccagaagagaagggcactgagaaaaagcaaaaggcttctcagaacctggtggtgctggccagggaggatgctggagcggagaagatcttccggagtaatggggttcagctcttgcaacgtttactggacatgggagagactgacctcatgctggcggctctgcgtacgctggttggcatttgctctgagcatcagtcacggacagtggcaaccctgagcatactgggaactcggcgagtagtctccatcctgggcgtggaaagccaggctgtgtccctggctgcctgccacctgctgcaggttatgtttgatgccctcaaggaaggtgtcaaaaaaggcttccgaggcaaagaaggtgccatcattgtggatcctgcccgggagctgaaggtcctcatcagtaacctcttagatctgctgacagaggtgggggtctctggccaaggccgagacaatgccctgaccctcctgattaaagcggtgccccggaagtctctcaaggaccccaacaacagcctcaccctctgggtcatcgaccaaggtaggtgatatagttcacaaaaacttgcttcagcagctgaagtttgtttattcttaggagtaataagaaaagttgtgagtggggccaggcatggtggatgacacactttgagaggcagggggtcacttgaagccgggagtttgagatcagcctgggcaacatggcgagaccctgtctctatgaaaaattaaaaaaaattagctgggcatggtggtgtgcatcggcagtcctagctactccagaggctgaggtgggagagttgcttaaccctgggaagtcaagtcttcagtgagctgtgattgtaccactgcactacagactgggcaacagagggagactgtctca

SEQ ID NO: 13196 - DNA, 1697 bp, Homo sapiens
gctggtacggtccggaattccgggattgcgcgggcacgagacaccctctccgcgatgactgccagctcagtggagcagctgcggaaggagggcaatgagctgttcaaatgtggagactacgggggcgccctggcggcctacactcaggccctgggtctggacgcgacgccccaggaccaggccgttctgcaccggaaccgggccgcctgccacctcaagctggaagattacgacaaagcagaaacagaggcatccaaagccattgaaaaggatggtggggatgtcaaagcactctaccggcggagccaagccctagagaagctgggccgcctggaccaggctgtccttgacctgcagagatgtgtgagcttggagcccaagaacaaagttttccaggaggccttgcggaacatcgggggccagattcaggagaaggtgcgatacatgtcctcgacggatgccaaagtggaacagatgtttcagatactgttggacccagaagagaagggcactgagaaaaagcaaaaggcttctcagaacctggtggtgctggccagggaggatgctggagcggagaagatcttccggagtaatggggttcagctcttgcaacgtttactggacatgggagagactgacctcatgctggcggctctgcgtacgctggttggcatttgctctgagcatcagtcacggacagtggcaaccctgagcatactgggaactcggcgagtagtctccatcctgggcgtggaaagccaggctgtgtccctggctgcctgccacctgctgcaggttatgtttgatgccctcaaggaaggtgtcaaaaaaggcttccgaggcaaagaaggtgccatcattgtggatcctgcccgggagctgaaggtcctcatcagtaacctcttagatctgctgacagaggtgggggtctctggccaaggccgagacaatgccctgaccctcctgattaaagcggtgccccggaagtctctcaaggaccccaacaacagcctcaccctctgggtcatcgaccaaggaggaggagcagctggtggccgtggaggctctgatccatgcagccggcaaggctaagcgggcctcattcatcactgccaatggtgtctcgctgctgaaggacctatataagtgcagcgagaaggacagcatccgcatccgggcgctagtgggactctgtaagctcggttcggctggagggactgacttcagcatgaagcagtttgctgaaggctccactctcaaactggctaagcagtgtcgaaagtggctgtgcaatgaccagatcgacgcaggcactcggcgctgggcagtggagggcctggcttacctgacctttgatgccgacgtgaaggaagagtttgtggaggatgcggctgctctgaaagctctgttccagctcagcagggtagctctgtggttcctgccgtcagcctggggacactgtctaggattagaccttaccaggctttctcggcagggcttggccaatggggtcttttgaccccagggaagagggctggtggctgagtggctgctctgtgtagtgtgggcatgttggccagcaccagtggtgttagcaaggacgttcttcttggaggagctggggaggtcaagtttgtaagctcccaaagtctggggcctgggagtttcccgaattcatcctgtacccaagggtccca

SEQ ID NO: 13197 - DNA, 491 bp, Homo sapiens
tcgcgccgctgttacagtagtacagaaaaagggcccctctgagttgaggctgcagcctgcctggacaaagcagtggaatatgggcttatccaacccaaccaagatggagagtgagggggttgtccctgggcccaaggctcatgcacacgctacctattgtggcacggagagtaaggacggaagcagctttggctggtggtggctggcatgcccaatactcttgcccatcctcgcttgctgccctaggatgtcctctgttctgagtcagcggccacgttcagtcacacagccctgcttggccagcactgcctgcagcctcactcagaggggccctttttctgtactactgtagtcagctgggaatggggaaggtgcatcccaacacagcctgtggatcctggggcatctggaagggcgcacacatcagcagcctcaccagctgtgagcctgctatcaggcctgcccctccaataaaagtgtgtagaactcca

SEQ ID NO: 13198 - DNA, 420 bp, Homo sapiens
ccctgtgctgaccagttcctgcagagagctgctctccaggtgagccagccttggtaggagccaacctttcccaactcctgagcctcagggctgcagatgtggctccagagggtgcaggttccagtgctgtgggcctcttagagcgacgggggctgcctgcgtggctgccgtctttgctgagcctaggagtgcagcgtctgcctgccagagtcccagagctgcctgcccaccaccgccttctccccacagggtcttcttggctttagtggaagaggtagaggaccgaggcactgtggttgcccagggaggcggcagggtaagctggtttacacaccccttcctgatggctgagccatcagcctataaaacatgactcagcagctgccacgccagagctgggtgttagatatggaacagaaa

SEQ ID NO: 13199 - DNA, 192 bp, Homo sapiens
atggggaaggtgcatcccaacacagcctgtggatcctggggcatctggaagggcgcacacatcagcagcctcaccagctgtgagcctgctatcaggcctgcccctccaataaaagtgtgtagaactccactgtgtgccctgtccttgggcagggagggctgctgtgagtgggagtctctgagtgggtgagtg

SEQ ID NO: 13200 - DNA, 410 bp, Homo sapiens
tggcctcccaaagtgctgggattacaggtgtaagccactgcacccggcccagtattcttaaataaatgcaaaataatctgagtatgatgttataggtttttttctaggcttaccataattctgaagtctttatactttcatacattcatgttttatttgaacatttgctcttaatttaggatgagtttatacctttaaaaagacagccttctgaaaacttttttgtgaagcagtataggaatatagctcttgtgaattttgagcatattgagtttgccttccagagcaatgcatggaattgcttaaacgtgcccatttttctaatcctaattttggtactggaataagagaacagggtgcaggactgcttggtttatagtagctcttatgtcagatttgcttgggatgag

SEQ ID NO: 13201 - DNA, 497 bp, Homo sapiens
acctcttctcagaatgtttttaaatgcatatcataaaatacttaggattacaaagaaaacaaattatactgaaatacatttctatccacagacccctttgggcggctcagcattcaaggctaataaccacttgcttccttcaatcccaactggcaaggaggagcaccaaaggaggtgacatttgtttcttagtgcatttgtttctaggtcagttaacatcttaaatgcccaaattctgaatgtcagtaagttcgatttctacatctaaacaaggccagggcaagaaagtggaataagaagaatgagtttctcctgagccttccatcagacctagtggcacaggtcatcagctaaatacacaatcttcctaaaggagggtgaccctgggctgggggccaggaagatcttgggcaccatctgcataatagtctagtaccgttgagaattctccagtgggagtttccaaaagtttggttactctttttgaaaaaaaaaaa

SEQ ID NO: 13202 - DNA, 499 bp, Homo sapiens
catagaaatgcattttagaggtgcagaggcacagagggaaatttgagccaaatgaatctgctagatatttctgcacagttttcataattcattgttaggtctggcttcaaggagggcaaagttcacatatttcttttttatattgaaataatcacaatattattttttagtaaaaatgtttgattttattccaaaaaatctttaagtaaggagtaagatttctgcatgatctgcgaaatgaaggtggaacagaatagaagccctcttctgtacaatgtcaccaaaacatcccgaagttttatcctgcctgggaaaatttcttacacatgattcttactgcttagcttgaaattgcacctaggaagaagcttttgttctcagtgctgccaaaacttccatttttcagcagtgacctcagtttaggcacctgcttataaggtgtgtttgcacatcgttggtacgttatagtgacatacatgttctcatctaggagattgtc

SEQ ID NO: 13203 - DNA, 1363 bp, Homo sapiens
ttacacagtagttttcagaaccctgtggacattattaattcatcaaagtaataggtttttaaaataaactaagatgttggctcccggtaaaatttgtacctaaatttaaaagtgcttaacatccaccaggaaatttgtgtattgctgtttattattaaactggtatgtattaataaaacctttttttcttagaatgaccttttatggaaaaactaaattttaacaatcagaaactagataaagttgaataatgtatccagcttaacatttggatatttggctcaagctcaacattcattcattcaattcaacttattaagtacctacagtgtaccagacactgttttaaatgctggaatcccaaagtaaccccaatagaaaccctgccctcatggagcttattcatgagacaatttcaggaccagtgaggagttgaaaggagctggggaaggaatcctctgctttaagtggagagatcagggaaccttttctcagatggctgcattttagactgcatttagactgcatttaagacttctacggcaagaatggcttggaggggcaggagtagaggagagagactacttaaagagcctaatattttgtgataagacttgctaacggttaggtgtagggagacaatgaggggaagaacggaatctgtgattatagctaggtttttggctgagcaattgaatggatattgagccattgactgagatgcggaaggatggaaaagaagtaggattaagggggagaagaggatcaggaattctgtcttatatagactccatttggaagatgtctattagacatatccaagtggagatagatgtcagtagatagttatatgtaagggtgtggttgtcagaggatagttggggctagagttataaatttaggaattagcagcatatatattgggtattgaaagtcttcaaacttaatgaaatcatcttaggaggaaatgaacagaatgaggaaaacagagcagaaaacaggcactaagtactttagcatttcaacatatagaggattgagaaacagagacttaaaaaacaaaggtcctaggccaggcgccgtggctcacccctgtaatcccagcgctttaggaggccgaggtggggggatcacgaggtcaggaattcgagactagcctggccaacatggtgaaacacatggtgaaactctgtctctactaaaaatacaaaaattagctgggcatggtgacaggcgcctataatcccagctactcaggaggctgaggcaggagaattgcctgtatctgggaggcagaggttgcagtgagctgagatcatgccactgcactccagcctgggcgacagagcaagactctgtctcg

SEQ ID NO: 13204 - DNA, 858 bp, Homo sapiens
ttacacagtagttttcagaaccctgtggacattattaattcatcaaagtaataggtttttaaaataaactaagatgttggctcccggtaaaatttgtacctaaatttaaaagtgcttaacatccaccaggaaatttgtgtattgctgtttattattaaactggtatgtattaataaaacctttttttcttagaatgaccttttatggaaaaactaaattttaacaatcagaaactagataaagttgaataatgtatccagcttaacatttggatatttggctcaagctcaacattcattcattcaattcaacttattaagtacctacagtgtaccagacactgttttaaatgctggaatcccaaagtaaccccaatagaaaccctgccctcatggagcttattcatgagacaatttcaggaccagtgaggagttgaaaggagctggggaaggaatcctctgctttaagtggagagatcagggaaccttttctcagatggctgcattttagactgcatttagactgcatttaagacttctacggcaagaatggcttggaggggcaggagtagaggagagagactacttaaagagcctaatattttgtgataagacttgctaacggttaggtgtagggagacaatgaggggaagaacggaatctgtgattatagctaggtttttggctgagcaattgaatggatattgagccattgactgagatgcggaaggatggaaaagaagtaggattaagggggagttgctgatcatgaaatcgaccctcagttaaacacgcactctcgataattcttattatcctgagtgtaacacgacagccaggtcatactgttcctgttgta

SEQ ID NO: 13205 - DNA, 448 bp, Homo sapiens
gaatttcaatggaaaatgagcaagcctgtttagtgtttactgctgaaccataaatacaattctattccctgctggtagaaaagccttaggaataaacgtctgattttacaaaatagtaagttaggagttccttaaaatgtcaagggggttttaaagtatgtttttacaacttgacagagtctggggagaaaacagtcttaaaactaaagtgttaggatctgctgccaactgaaaatcaatcacaaatgaagataaatcacccctgaacatataatatggaacaatgggaaaatattatcagaattgtaaaaatttgatttgcatgcaatttttcagaaacatagctttgcaagcataaattgaaacaagcagagtgattcatataatggggggaaaatcagtctaagattccaaacatgtatgtcaggagatgattatttgatgtgtt

SEQ ID NO: 13206 - DNA, 373 bp, Homo sapiens
taaatccttacaaaactctgaatccgttgtgactcaaatagtcctcatattttaattaaataatcagctgtttattgggtatttgtgtgctcaccatctttcaaggatttagagaaatgaactttactgaacaatctgagaggctgatttttattaagagtggctaagagtttccatgtagctttagtttattaaaacatatgggaatatttgacttaaattttattggaatatgctagactcagccagcatctgaaaaatgcagagcaattcaattaatcattgcaccacttcaggaaaaaaggaaccctctatccaattttactattggtaaaagttataataaaaggtttgattacaaaaattttccccc

SEQ ID NO: 13207 - DNA, 2735 bp, Homo sapiens
taaatcattattagggacttttttaaaaaaataaaataacaagatatcctactttaaaaaaaaaggacagtgcatgcatattgctgtaaggtcgtttaagtatttctaattttacaaaagtaaaaatcattagagctccaaatgctgaggtgtagattgacagctttaacactgctgaatgccaggttatacagtattcttacaaaaagggaagtcagccaaagactgatctgatggaccaaaatcggaattttgaaaagcaccagtactactttccaaatgatcagcaggttaaacatgttcagcaaggtatagtatgaatccattaacccttcgttgtccagggtccagaccagaactacttgttagttttgaaaacagtagcccaggatgtggttgtgtgctttaggaaagtcagcagtgctgcaggctgtgtagacaaccaaagtttacaaggctgggaagacacttctccaaatacatatacaccaggcatttctttaaaatcaaaaacaatccattagctttggggcggggggtggggggagggttaaatgtaggccttggaaacagttttaagtggcttttaagtatctgcatagaggcaatcctaaggtttgctttaagtctcttaaatctaacatttttaaaagcatttcttccctgtattttcatatacaagttggttttaattttgtttgggtggtgttattttttttaaatgactttttagtttagaaagttctgatgagcaaataaatacatctatctacatgttggaagtccatctgccagcacacctgcttaaagtgaaatgaaagcacataaccaggctctgaatgggttatattttatcatggtgctcccagaatcctttgacctcactctgctttctagtctgcttgtgacactggacagtcctttcttacagagctattatatgttctaggctacgaagggttaaataatcccaaaaatgaggtatgtcatacccacacgtctttatctctagaagctgtgatgtatgtgaaacagcactgttattcttaacactagtgtgtaaaataaggattagtacagtacgtctcattactttttaattcagggcaccctgagtgaaaacaaatacaaaaaaaaatccctaactctgagctctatctctgattcctcttcctccttcccctcttcctcctcttcctctcctcctgttttgctacattctcctcagtggcaaaaagtttcactctacctctgacagcatgtatattgcaccagtagctaacaaaaactggtctagtcaaaccaaatgggcacaaaagaaccaggataccaaaagttaagctcatacagctgcaaaccatatcacttcttggtaacaatgcagacctcataaacctaaagaagagaaagaaaagaaaacttttgttactttccttttttgcttgtcacttatatacaggctatgtgagaatataatttgtaggtataacacattaagaaaaagttatcttcattggatagaattgaatggtggtcgctgataggaatagggcgtcctctagctcttatctctgtctcttactcttttctctttctctttttctctgtcatgagactgtgtgtgacagggccacctgtcttttttttttcttaaattttttttttttttatgtgtaggtgcatgtcttggggatttaaaaatttcaaggctggtttacttatgcaaagcatgcctacgtctggaatacttagggaaagaaagcgactccatgttgtccgaattcctcaagggacagaaaaaaaattggagactgttgaaatgcagatttgaagtaatttttttaaaatattattttgggttctgcgacattgtgaaaaattaaagttgttgtgcaatacttaattcagacatgtaccacaagttaatggtagactaacactggggggtggggtctaggcatcatgcttttgtcagcatactcttgagcttttaagtctactatgtctgaactgtggtttcttgtttatccttttttccttagttggactgtaatgtatggtctgtcaacctgtgaatctttaaagtatgattcaggtattgttgtattctttactgtgtaataaaaaagttgaaaaaaatctggatcctctgtctccctcgtccccggtgtgccatggttgcccaccagtgaccccagcctgaggagtccatcctccatggtgctgaatcaaatctgtagagtttattcagctacaaagcgtggctctgtaacaggagttggcttatccatgcgtgttgagtagggaatgatgtcagaactttgcaaaagtcgagctcattcataaggggatgtttctcaggcaggaggagtaggaagagtgggaggagaattactaccttccataggaaaggagagcttggcttgcctagattagctgctgcatagatagcagaggcccttttggctgtgttttgataaaattagaaatgagtacctaaatctggatcactctgctcagagaggttcgtgccaacctcatgaggctctgactcttgtcaggttgcttggctgccttgtgcatacccgaatggcagatcagctgacatgacatggaactgctctatctgccttgtcccctctcctctaattaaaagtcgctaccattgtcactcttggttatgtagttaatatccactgtggctatctccaacttgctgggacatccagttatct

SEQ ID NO: 13208 - DNA, 2114 bp, Homo sapiens
taaatcattattagggacttttttaaaaaaataaaataacaagatatcctactttaaaaaaaaaggacagtgcatgcatattgctgtaaggtcgtttaagtatttctaattttacaaaagtaaaaatcattagagctccaaatgctgaggtgtagattgacagctttaacactgctgaatgccaggttatacagtattcttacaaaaagggaagtcagccaaagactgatctgatggaccaaaatcggaattttgaaaagcaccagtactactttccaaatgatcagcaggttaaacatgttcagcaaggtatagtatgaatccattaacccttcgttgtccagggtccagaccagaactacttgttagttttgaaaacagtagcccaggatgtggttgtgtgctttaggaaagtcagcagtgctgcaggctgtgtagacaaccaaagtttacaaggctgggaagacacttctccaaatacatatacaccaggcatttctttaaaatcaaaaacaatccattagctttggggcggggggtggggggagggttaaatgtaggccttggaaacagttttaagtggcttttaagtatctgcatagaggcaatcctaaggtttgctttaagtctcttaaatctaacatttttaaaagcatttcttccctgtattttcatatacaagttggttttaattttgtttgggtggtgttattttttttaaatgactttttagtttagaaagttctgatgagcaaataaatacatctatctacatgttggaagtccatctgccagcacacctgcttaaagtgaaatgaaagcacataaccaggctctgaatgggttatattttatcatggtgctcccagaatcctttgacctcactctgctttctagtctgcttgtgacactggacagtcctttcttacagagctattatatgttctaggctacgaagggttaaataatcccaaaaatgaggtatgtcatacccacacgtctttatctctagaagctgtgatgtatgtgaaacagcactgttattcttaacactagtgtgtaaaataaggattagtacagtacgtctcattactttttaattcagggcaccctgagtgaaaacaaatacaaaaaaaaatccctaactctgagctctatctctgattcctcttcctccttcccctcttcctcctcttcctctcctcctgttttgctacattctcctcagtggcaaaaagtttcactctacctctgacagcatgtatattgcaccagtagctaacaaaaactggtctagtcaaaccaaatgggcacaaaagaaccaggataccaaaagttaagctcatacagctgcaaaccatatcacttcttggtaacaatgcagacctcataaacctaaagaagagaaagaaaagaaaacttttgttactttccttttttgcttgtcacttatatacaggctatgtgagaatataatttgtaggtataacacattaagaaaaagttatcttcattggatagaattgaatggtggtcgctgataggaatagggcgtcctctagctcttatctctgtctcttactcttttctctttctctttttctctgtcatgagactgtgtgtgacagggccacctgtcttttttttttcttaaattttttttttttttatgtgtaggtgcatgtcttggggatttaaaaatttcaaggctggtttacttatgcaaagcatgcctacgtctggaatacttagggaaagaaagcgactccatgttgtccgaattcctcaagggacagaaaaaaaattggagactgttgaaatgcagatttgaagtaatttttttaaaatattattttgggttctgcgacattgtgaaaaattaaagttgttgtgcaatacttaattcagacatgtaccacaagttaatggtagactaacactggggggtggggtctaggcatcatgcttttgtcagcatactcttgagcttttaagtctactatgtctgaactgtggtttcttgtttatccttttttccttagttggatgttctgtatgggtgtctatacccttattccaaggtgaataaataaagttgtgtttgcctaatcatg

SEQ ID NO: 13209 - DNA, 761 bp, Homo sapiens
  misc_feature (1)..(3): n is a, c, g, or t
  misc_feature (291)..(291): n is a, c, g, or t
nnngaccaaaataatcgttgcaaaaaatcaaggatggcacagcaggtgcatgagcccgtgtctggagaaaggttatgaaggtgaatgctggttacatgggagggtgacttggagccctctagtttccttcttgtgccagctgggttcctgtttcaaggccaggcttctctaacttgtcttcctgggaaatgtagcttttccaagaatttggtagtgcacaccaggaaaaactaggtatcagaacagatttttttttaaatagtggaaacaccctcactcccacactttggncagttagggttggatatttaatttcatagttactctttttttccacagaagaaaggccagcctgacccaagttgcctatttttaatgtgttaatgcatcttattttctcttcaaagtgaaaaaggccagaaactagcagatagaaatggaacccgttgacttagttcccttataagaagttcttgcaaacacctctgtgacgttttcattcaagtggatatgttggacaaataggaaacagttttagtttacgcgaacagtatgagacttccaggtggtggacgccatttttttagaagtgttgatgatgtatttgataacattataaaagtatgtgtctcccgtgaaagaacattgagctatttccctggaatggatggggaagaaatgagcaaaggagtgctgttctgtatgggtgtctatacccttattccaaggtgaataaataaagttgtgtttgcctaatcatg

SEQ ID NO: 13210 - DNA, 335 bp, Homo sapiens
gattagctctatcaacaaatcatcctctttatatttttatgtaataagttatttgagattataacaactgaatgagatttccttcctttaacattatagtctgaaattgcaaaagctcctttttaactacctggacaaaatccagttaaatgttatgttatgaaattctggccagcatttcaaaacaattcctctattcaatacactgatgataattaccttttttcagaggataatttttttgttaattatgcttagagtgtcacttagatatggtatgctgtgtttagagtctgcttagcaaagcatgattttttaaaagaaatacaacttta

SEQ ID NO: 13211 - DNA, 2091 bp, Homo sapiens
aaagaaatagcattgaagaaaataccgcacatcagaggaaagcttattttctgcatggtgtcttttcaaagatagaatatttgaagcatgttttctagcgattgtgtggatgagggtgagctggctgaggcatcgctcaagctggggggtggtgtgtaagaagcacgtggagccacaagaggcacctcctatagtcagctaagggcttccctttctgcacccagcttttgggtgaagggtgatttctattagacacatctgtgcttcagtcatagatgttaatagaggaagcagttttcctgctgcagattcctgaatagagttgctgaaagagtctacttctggactcaggggaagttgaaggccagtctgtgtagaaaggctgaggcaacggggaaagacctgacagctagttacatacgctctgacatagtactcccatgatggcttccagtgacacatgtgctgatagaattctaaacctctggaatttccctgctggcgacttctatggccgttgactgtacagggtaacctgatgccagatgctatgggcgtgatgagaactagagcattgcagcatgggggaaactgtgaggcaccagatcctgtgcttctgcaggccattttctgaaaacccctgttaggaaggttggatttggcgtgacttgcttgagcaagagtcctggggagagattttgaggtttaatttaacggtatatccagagctaacagtgactcaactcgtctagttctgcaagtcagatgtacacttagagtctctctgtgaagggtttgggtctgagctgtatagtatgtccatccatttttttttaataaaagatcctcagctacagtctttccattttccttgcttctcttattgcacacccccagcccattttgcttctctcttggattttgttttttcagatccacatttattgggtttcctgtccagcttcttggaaaggagctcactcttggaaagactgatctttccaaaatattttccctggtctgaagctttggtgtgaacttctcaaggcttagagaatccagttacagaccttttggggttcaggatgctatagattgacaccctcctgcctgtttttctctgcatcccaacctggccaaggcccctcctgtggggtgcccatctgtgcctttattccggctgtgccctcgactttccagcttcccatgtttctttggttaggtttctctcccttccttctttctccttccccaatccgcctgtttcgtcagggcccagtttgtttcctcatacaccttcctcactaccccaccccacatggttgactctttccctcagctccaccagctcttcatcatgccactcatttcagaacttgagcaaaacagggcagtcaggatctgatgtctttctggtctccctaagaaaactaagctcttgagggacagcccttggcaatgctttcctatctgctgagcatggtgaccttccttaggacttccagagttcagttccttctggcagagaggttttctttctccatgccatatggatgtgactcaaatgaggggtcccacagcttttcctggctaccacttgctgtgaccttatacatgttggggtttgctcttaaagaggagagcaggaagaaaggttggtttcagaaaccaagagggtcggcagtggacgcgtacattttgtcacggagtccacagagctgagcttttgagcagactctgagaagtatcattgcttgtgttgaaagaatacaacaggatttaagtttctctttagaaattgcactgaagaaaggccgggcgcggtggctccccctgtaatcccagcgctttgggaggccgaggcggggggatcacgaggtcaagagatcgagaccatcctggccaacatggtgaaaccccgtctctaataaaaatacaaaaattagccgggcatggtgacgtgcacctgtagtcccagctactagataggctgaggcaggagaattgcttgaatccgggaggcggaggttgcagtgagccgagatcgtgccactgaactccaacctgccaatagagcgagactccgtctca

SEQ ID NO: 13212 - DNA, 798 bp, Homo sapiens
aaactaaggctaggtagaggctgggtgtgaatcggaagaggctcagctccaccagctcttcatcatgccactcatttcagaacttgagcaaaacagggcagtcaggatctgatgtctttctggtctccctaagaaaactaagctcttgagggacagcccttggcaatgctttcctatctgctgagcatggtgaccttccttaggacttccagagttcagttccttctggcagagaggttttctttctccatgccatatggatgtgactcaaatgaggggtcccacagcttttcctggctaccacttgctgtgaccttatacatgttggggtttgctcttaaagaggagagcaggaagaaaggttggtttcagaaaccaagagggtcggcagtggacgcgtacattttgtcacggagtccacagagctgagcttttgagcagactctgagaagtatcattgcttgtgttgaaagaatacaacaggatttaagtttctctttagaaattgcactgaagaaaggccgggcgcggtggctccccctgtaatcccagcgctttgggaggccgaggcggggggatcacgaggtcaagagatcgagaccatcctggccaacatggtgaaaccccgtctctaataaaaatacaaaaattagccgggcatggtgacgtgcacctgtagtcccagctactagataggctgaggcaggagaattgcttgaatccgggaggcggaggttgcagtgagccgagatcgtgccactgaactccaacctgccaatagagcgagactccgtctca

SEQ ID NO: 13213 - DNA, 387 bp, Homo sapiens
gcgcgattcatcatcctgctcctcctctagaatttagtggcgggtctgggctggcagaggtagggggctgctttgggctttgcacctgcactttggtgacattgttcttctgtgttccctttatttatgctggtggcttccatccgttcctcctctgagggtgagtggaggggtatatggaaacacggctatgaccaaagggagatcccagcctgggcaggctgcgctgctgaccaccctccccaaagtaagaggccttagtagaaaagcacttccacctgcagttttcccctaggtctgcagagagaaacagtgcagagtgcaatgccacagtcaaggaccacttcctacagagcccgggccccagggagggtgtcgaggatcctc

SEQ ID NO: 13214 - DNA, 334 bp, Homo sapiens
tactactaaattcgcggccgcgtcgacagcaagtcgagtgcggaggcgcagaccccagaagacacccccaacaagtcgggtgcggaggcaaagacccaaaaagacagctccaacaagtcgggtgcggaggcaaagacccaaaaaggcagcactagcaagtcgggttcggaggcgcagaccacaaaagacagcactagtaagtcgcatccggagctgcagactccaaaagacagcactggcaaatcgggtgcggaggcgcagaccccagaagacagccccaacaggtccagggcagaggaccaacgtcgacgcggccgcgaatttagtagtagta

SEQ ID NO: 13215 - DNA, 6932 bp, Homo sapiens
gattatcccaatatggggagaaaataaatatgcatagaggaaaagagaaatacactaattaagaagggaaagagtcctttttttttttttttaacaaaactaaatggaaacataataaactaatgtaagcggtaacctgtggaggagtaggaagacttttctaaagtctgtttactttaaaatccggttttcatttctgaaacattataatgtattatctattcaaaaacatcaaatgtttagagggcagacaatacactaaaacattaatagtgattatcccggaagggtaggagtcaggctttgttttctgcttctgtatcagaaaaaggatgcactttttggaaaagatgtttggcgacctggaaggacaccgtctccgtggagtcgggaaggaggagggccaggatgcgaaggcaacgctttgcaggtgatcggatggatttattcccacatgggagagaccagagcacagcacgtttgtgtacggccaggagggaaccacgaaaaaagcagaggatagaaacgcaagcacacgatggtggtggccaagaggagcctgcccctagtgacctcacttccgcggccagtgcgagaggcgagggagctccagctctgcctgtaaggtctcggaagtacgaggcggaggggacgaaaaacggggggccagactgttgtggctgtggtggagacgagaaaccaggaagaagaggctcgcttcccactcggcgaccgtaagcgaagcagccgaaggcgagcgccgacatcagcagctgccccctaaatcccgcccttcgtcttggcggcagcgggagactgagagacgcgcgcagcaggggcgggactggagaggggccccgcgcgcggatctcgcgagagcattagagggcggaagcgctatccgagcaggatgcggttcgtggttgccttggtcctcctgaacgtcgcagcggcgggagccgtgccgctcttggccaccgaaagcgtcaagcaagaagaagctggagtacggccttctgcaggaaacgtctccacccaccccagcttgagccaacggcctggaggctctaccaagtcgcatccggagccgcagactccaaaagacagccctagcaagtcgagtgcggaggcgcagaccccagaagacacccccaacaagtcgggtgcggaggcaaagacccaaaaagacagctccaacaagtcgggtgcggaggcaaagacccaaaaaggcagcactagcaagtcgggttcggaggcgcagaccacaaaagacagcactagtaagtcgcatccggagctgcagactccaaaagacagcactggcaaatcgggtgcggaggcgcagaccccagaagacagccccaacaggtcgggtgcggaggcaaagacccaaaaagacagccctagcaagtcaggttcggaggcgcagaccacaaaagatgtccctaataagtcgggtgcggacggccagaccccaaaagacggctccagcaagtcgggtgcggaggatcagaccccaaaagacgtccctaacaagtcgggtgcggagaagcagactccaaaagacggctctaacaagtccggtgcagaggagcagggcccaatagacgggcccagcaagtcgggtgcggaggagcagacctcaaaagacagccctaacaaggtggttccagagcagccttcccggaaagaccattccaagcccatctccaacccttctgataacaaggagctccccaaggctgacacaaaccagcttgctgacaaagggaagctttctcctcatgctttcaaaaccgaatctggggaggaaactgacctcatttctcccccgcaggaggaagttaagtcttcagagcctactgaggatgtggagcccaaagaggctgaagatgatgatacaggacccgaggagggctcaccgcccaaagaagagaaagaaaagatgtccggttctgcctccagtgagaaccgtgaaggaacactttcggattccacgggtagcgagaaggatgacctttatccgaacggttctggaaatggcagcgcggagagcagccacttctttgcatatctggtgactgcagccattcttgtggctgtcctctatatcgctcatcacaacaagcggaagatcattgcttttgtcctggaaggaaaaagatctaaagtcacccggcggccaaaggccagtgactaccaacgtttggaccagaagtcctaacagaatggtatattcctctggaaaaagatgaacgtcaccaatggattgtgctgctctcgtttcagctttgatttttttgtccttgagaaccttgtcctccctgctgatttgtttctaaatcaaaagaaatgaagaaaaaagtactgtgacctgagagacaccctcctctagaatttagtggcgggtctgggctggcagaggtagggggctgctttgggctttgcacctgcactttggtgacattgttcttctgtgttccctttatttatgctggtggcttccatccgttcctcctctgagggtgagtggaggggtatatggaaacacggctatgaccaaagggagatcccagcctgggcaggctgcgctgctgaccaccctccctggggcccgggctctgtaggaaagttggtccttgactgtggcattgcactctgcactgtttctctctgcagacctaggggaaaactgcaggtggaagtgcttttctactaaggcctcttactttgggggggatgtgccctacagaagacatagaagatggggaaatgccaatgggcaaagagctactttgaatacataattctcttcaaagacttcagcagcaaaccaaaacagcaggttaaaaaaaaagatgcttttttgggtgcaagtctaacctgtctagcatgagatcttcttgattttctgattattttatgtagcttgagacaaagtgaatcaacttccacttagttgtaccgagcataaaacagaacttgggcttcctggcagtgaggccactgtcccatcacagatttttaaaataaatatgatttgaagtagtgtgatctttcacacaatcatactcagtaggaactttttgaaatagggcaagtttatgtttcatgcgagaaaacatgaaggagggttttggttttggtctgcagtttttccaaagggcttttatgagatacatttcccacaaagtccattttgcctttgttgcctaaaacagacaaaatagacttagatttattaatagaaactatactctctgccaattttacctcagtgtatttaatggtcctttaatctgatataagatgccaagggtatttgataaaaattcttcttccatgccatgtcaggagttaatacaaatgaagaaattccgtgggttcccctgggataagtgagggtagtgtcttggacaacactattgtttgaaggtttatctcttctaatcatgctctaccgcattgtagagagcctaaagagagttgtttctgagctgatctcagggaaatacaaataacttgggagatgagggaaataagatgaattctgtgctgtcaaggcagtaagtctgaagaaaggaccatgcttcttatattatcttccaccttgcttaaaacagcccatagctttgagttgacattttcattcttggcggatagcctactttatgaaggtaaggaatgaactcctacccttcttgggtcattctctgtactgatgcgttagtcttataatactttgcaccaacctgaggaatcttctaggcttctctagcatcccctaagactgtggctatttcacgtctctctccctgcctgccttccttttcccttcctttcccctcctcatgttttctggttgtgcccatctgtaccagctcctttccatccaccttcgtatgcacccagatttttctgttcccatctgtcctatttgttattcatcccgctgctcaacttctccagtatgttgcttcccttaagttgccattcattctcttcatgactttactaactcacttcggtctctgtctgtcaactaaacttttctaaaggttaccagttatccaatcaccaaatccatggctttttctcaaagcttagtcttgtccttggcagaactggacactattgaccatccaaatggaaattcccctttcttggtgtctctgacaaatggtcctttgccttatcttgtgctggtggtgaagaggccctcaaagccaggcctctctattcctttgactgtctcctcagccattaacccattcttcatcctcggagtgagtgattcccaagtctttgtcttggcttaatccctaaagaacccagttctgctggtatcgaatagttcagcttggttgtcattgaaaggaatttctctcttctgtccatcagcctgtccctcccaactgtctaggacagtcttcggtcacctaaattcctaactgcagacttttgccctttttctctctcatcaccaaagtcccatccatttttttttaataaaagatcctcagctacagtctttccattttccttgcttctcttattgcacacccccagcccattttgcttctctcttggattttgttttttcagatccacatttattgggtttcctgtccagcttcttggaaaggagctcactcttggaaagactgatctttccaaaatattttccctggtctgaagctttggtgtgaacttctcaaggcttagagaatccagttacagaccttttggggttcaggatgctatagattgacaccctcctgcctgtttttctctgcatcccaacctggccaaggcccctcctgtggggtgcccatctgtgcctttattccggctgtgccctcgactttccagcttcccatgtttctttggttaggtttctctcccttccttctttctccttccccaatccgcctgtttcgtcagggcccagtttgtttcctcatacaccttcctcactaccccaccccacatggttgactctttccctcagctccaccagctcttcatcatgccactcatttcagaacttgagcaaaacagggcagtcaggatctgatgtctttctggtctccctaagaaaactaagctcttgagggacagcccttggcaatgctttcctatctgctgagcatggtgaccttccttaggacttccagagttcagttccttctggcagagaggttttctttctccatgccatatggatgtgactcaaatgaggggtcccacagcttttcctggctaccacttgctgtgaccttatacatgttggggtttgctcttaaagaggagagcaggaagaaaggttggtttcagaaaccaagagggtcggcagtggacgcgtacattttgtcacggagtccacagagctgagcttttgagcagactctgagaagtatcattgcttgtgttgaaagaatacaacaggatttaagtttctctttagaaattgcactgaagaaaggccgggcgcggtggctccccctgtaatcccagcgctttgggaggccgaggcggggggatcacgaggtcaagagatcgagaccatcctggccaacatggtgaaaccccgtctctaataaaaatacaaaaattagccgggcatggtgacgtgcacctgtagtcccagctactagataggctgaggcaggagaattgcttgaatccgggaggcggaggttgcagtgagccgagatcgtgccactgaactccaacctgccaatagagcgagactccgtctcaaaaaaaaaaaaaaaaaagaaagaaatagcattgaagaaaataccgcacatcagaggaaagcttattttctgcatggtgtcttttcaaagatagaatatttgaagcatgttttctagcgattgtgtgaatgagggtgagctggctgaggcatcgctcaagctggggggtggtgtgtaagaagcacgtggagccacaagaggcacctcctatagtcagctaagggcttccctttctgcgcccagcttttgggtgaagggtgatttctactagacacatctgtgcttcagtcatagatgttaatagaggaagcagttttcctgctgcagattcctgaatagagttgctgaaagagtctacttctggactcaggggaagttgaaggccagtctgtgtagaaaggctgaggcaacggggaaagacctgacagctagttacatacgctctgacatagtactcccatgatggcttccagtgacacatgtgctgatagaattctaaacctctggaatttccctgctggcgacttctatggccgttgactgtacagggtaacctgatgccagatgctatgggcgtgatgagaactagagcattgcagcatggaggaaactgtgaggcaccagatcctgtgcttctgcaggccattttctgaaaacccctgttaggaaggttggatttggcgtgacttgcttgagcaagagtcctggggagagattttgaggtttaatttaacggtatatccagagctaacagtgactcaactcgtctagttctgcaagtcagatgtacacttagagtctctctgtgaagggtttgggtctgagctgtatagtatgtcaaactgccagtaagccagcccctcaccctctgatagatattcctttaatgcaccagacttcatgtttgataaatgattaatggttgaaattgtttctcttcttttgtgttttcccagttaatagatggtcactgtttccacaatgttttatactttcagctttttgtaacttaactataattacttaattttatttttttaaagcttgttgtggtctaatgagaagtatttttcagtgcataatgtttttctgagcttctgtaaatgccatcccaatgtggtttggttttgttgaacagaaaccaaaataaatttcaaaatgttaaagcaa

SEQ ID NO: 13216 - DNA, 7618 bp, Homo sapiens
  misc_feature (7317)..(7317): n is a, c, g, or t
gattatcccaatatggggagaaaataaatatgcatagaggaaaagagaaatacactaattaagaagggaaagagtcctttttttttttttttaacaaaactaaatggaaacataataaactaatgtaagcggtaacctgtggaggagtaggaagacttttctaaagtctgtttactttaaaatccggttttcatttctgaaacattataatgtattatctattcaaaaacatcaaatgtttagagggcagacaatacactaaaacattaatagtgattatcccggaagggtaggagtcaggctttgttttctgcttctgtatcagaaaaaggatgcactttttggaaaagatgtttggcgacctggaaggacaccgtctccgtggagtcgggaaggaggagggccaggatgcgaaggcaacgctttgcaggtgatcggatggatttattcccacatgggagagaccagagcacagcacgtttgtgtacggccaggagggaaccacgaaaaaagcagaggatagaaacgcaagcacacgatggtggtggccaagaggagcctgcccctagtgacctcacttccgcggccagtgcgagaggcgagggagctccagctctgcctgtaaggtctcggaagtacgaggcggaggggacgaaaaacggggggccagactgttgtggctgtggtggagacgagaaaccaggaagaagaggctcgcttcccactcggcgaccgtaagcgaagcagccgaaggcgagcgccgacatcagcagctgccccctaaatcccgcccttcgtcttggcggcagcgggagactgagagacgcgcgcagcaggggcgggactggagaggggccccgcgcgcggatctcgcgagagcattagagggcggaagcgctatccgagcaggatgcggttcgtggttgccttggtcctcctgaacgtcgcagcggcgggagccgtgccgctcttggccaccgaaagcgtcaagcaagaagaagctggagtacggccttctgcaggaaacgtctccacccaccccagcttgagccaacggcctggaggctctaccaagtcgcatccggagccgcagactccaaaagacagccctagcaagtcgagtgcggaggcgcagaccccagaagacacccccaacaagtcgggtgcggaggcaaagacccaaaaagacagctccaacaagtcgggtgcggaggcaaagacccaaaaaggcagcactagcaagtcgggttcggaggcgcagaccacaaaagacagcactagtaagtcgcatccggagctgcagactccaaaagacagcactggcaaatcgggtgcggaggcgcagaccccagaagacagccccaacaggtcgggtgcggaggcaaagacccaaaaagacagccctagcaagtcaggttcggaggcgcagaccacaaaagatgtccctaataagtcgggtgcggacggccagaccccaaaagacggctccagcaagtcgggtgcggaggatcagaccccaaaagacgtccctaacaagtcgggtgcggagaagcagactccaaaagacggctctaacaagtccggtgcagaggagcagggcccaatagacgggcccagcaagtcgggtgcggaggagcagacctcaaaagacagccctaacaaggtggttccagagcagccttcccggaaagaccattccaagcccatctccaacccttctgataacaaggagctccccaaggctgacacaaaccagcttgctgacaaagggaagctttctcctcatgctttcaaaaccgaatctggggaggaaactgacctcatttctcccccgcaggaggaagttaagtcttcagagcctactgaggatgtggagcccaaagaggctgaagatgatgatacaggacccgaggagggctcaccgcccaaagaagagaaagaaaagatgtccggttctgcctccagtgagaaccgtgaaggaacactttcggattccacgggtagcgagaaggatgacctttatccgaacggttctggaaatggcagcgcggagagcagccacttctttgcatatctggtgactgcagccattcttgtggctgtcctctatatcgctcatcacaacaagcggaagatcattgcttttgtcctggaaggaaaaagatctaaagtcacccggcggccaaaggccagtgactaccaacgtttggaccagaagtcctaacagaatggtatattcctctggaaaaagatgaacgtcaccaatggattgtgctgctctcgtttcagctttgatttttttgtccttgagaaccttgtcctccctgctgatttgtttctaaatcaaaagaaatgaagaaaaaagtactgtgacctgagagacaccctcctctagaatttagtggcgggtctgggctggcagaggtagggggctgctttgggctttgcacctgcactttggtgacattgttcttctgtgttccctttatttatgctggtggcttccatccgttcctcctctgagggtgagtggaggggtatatggaaacacggctatgaccaaagggagatcccagcctgggcaggctgcgctgctgaccaccctccctggggcccgggctctgtaggaaagttggtccttgactgtggcattgcactctgcactgtttctctctgcagacctaggggaaaactgcaggtggaagtgcttttctactaaggcctcttactttgggggggatgtgccctacagaagacatagaagatggggaaatgccaatgggcaaagagctactttgaatacataattctcttcaaagacttcagcagcaaaccaaaacagcaggttaaaaaaaaagatgcttttttgggtgcaagtctaacctgtctagcatgagatcttcttgattttctgattattttatgtagcttgagacaaagtgaatcaacttccacttagttgtaccgagcataaaacagaacttgggcttcctggcagtgaggccactgtcccatcacagatttttaaaataaatatgatttgaagtagtgtgatctttcacacaatcatactcagtaggaactttttgaaatagggcaagtttatgtttcatgcgagaaaacatgaaggagggttttggttttggtctgcagtttttccaaagggcttttatgagatacatttcccacaaagtccattttgcctttgttgcctaaaacagacaaaatagacttagatttattaatagaaactatactctctgccaattttacctcagtgtatttaatggtcctttaatctgatataagatgccaagggtatttgataaaaattcttcttccatgccatgtcaggagttaatacaaatgaagaaattccgtgggttcccctgggataagtgagggtagtgtcttggacaacactattgtttgaaggtttatctcttctaatcatgctctaccgcattgtagagagcctaaagagagttgtttctgagctgatctcagggaaatacaaataacttgggagatgagggaaataagatgaattctgtgctgtcaaggcagtaagtctgaagaaaggaccatgcttcttatattatcttccaccttgcttaaaacagcccatagctttgagttgacattttcattcttggcggatagcctactttatgaaggtaaggaatgaactcctacccttcttgggtcattctctgtactgatgcgttagtcttataatactttgcaccaacctgaggaatcttctaggcttctctagcatcccctaagactgtggctatttcacgtctctctccctgcctgccttccttttcccttcctttcccctcctcatgttttctggttgtgcccatctgtaccagctcctttccatccaccttcgtatgcacccagatttttctgttcccatctgtcctatttgttattcatcccgctgctcaacttctccagtatgttgcttcccttaagttgccattcattctcttcatgactttactaactcacttcggtctctgtctgtcaactaaacttttctaaaggttaccagttatccaatcaccaaatccatggctttttctcaaagcttagtcttgtccttggcagaactggacactattgaccatccaaatggaaattcccctttcttggtgtctctgacaaatggtcctttgccttatcttgtgctggtggtgaagaggccctcaaagccaggcctctctattcctttgactgtctcctcagccattaacccattcttcatcctcggagtgagtgattcccaagtctttgtcttggcttaatccctaaagaacccagttctgctggtatcgaatagttcagcttggttgtcattgaaaggaatttctctcttctgtccatcagcctgtccctcccaactgtctaggacagtcttcggtcacctaaattcctaactgcagacttttgccctttttctctctcatcaccaaagtcccatccatttttttttaataaaagatcctcagctacagtctttccattttccttgcttctcttattgcacacccccagcccattttgcttctctcttggattttgttttttcagatccacatttattgggtttcctgtccagcttcttggaaaggagctcactcttggaaagactgatctttccaaaatattttccctggtctgaagctttggtgtgaacttctcaaggcttagagaatccagttacagaccttttggggttcaggatgctatagattgacaccctcctgcctgtttttctctgcatcccaacctggccaaggcccctcctgtggggtgcccatctgtgcctttattccggctgtgccctcgactttccagcttcccatgtttctttggttaggtttctctcccttccttctttctccttccccaatccgcctgtttcgtcagggcccagtttgtttcctcatacaccttcctcactaccccaccccacatggttgactctttccctcagctccaccagctcttcatcatgccactcatttcagaacttgagcaaaacagggcagtcaggatctgatgtctttctggtctccctaagaaaactaagctcttgagggacagcccttggcaatgctttcctatctgctgagcatggtgaccttccttaggacttccagagttcagttccttctggcagagaggttttctttctccatgccatatggatgtgactcaaatgaggggtcccacagcttttcctggctaccacttgctgtgaccttatacatgttggggtttgctcttaaagaggagagcaggaagaaaggttggtttcagaaaccaagagggtcggcagtggacgcgtacattttgtcacggagtccacagagctgagcttttgagcagactctgagaagtatcattgcttgtgttgaaagaatacaacaggatttaagtttctctttagaaattgcactgaagaaaggccgggcgcggtggctccccctgtaatcccagcgctttgggaggccgaggcggggggatcacgaggtcaagagatcgagaccatcctggccaacatggtgaaaccccgtctctaataaaaatacaaaaattagccgggcatggtgacgtgcacctgtagtcccagctactagataggctgaggcaggagaattgcttgaatccgggaggcggaggttgcagtgagccgagatcgtgccactgaactccaacctgccaatagagcgagactccgtctcaaaaaaaaaaaaaaaaaagaaagaaatagcattgaagaaaataccgcacatcagaggaaagcttattttctgcatggtgtcttttcaaagatagaatatttgaagcatgttttctagcgattgtgtgaatgagggtgagctggctgaggcatcgctcaagctggggggtggtgtgtaagaagcacgtggagccacaagaggcacctcctatagtcagctaagggcttccctttctgcgcccagcttttgggtgaagggtgatttctactagacacatctgtgcttcagtcatagatgttaatagaggaagcagttttcctgctgcagattcctgaatagagttgctgaaagagtctacttctggactcaggggaagttgaaggccagtctgtgtagaaaggctgaggcaacggggaaagacctgacagctagttacatacgctctgacatagtactcccatgatggcttccagtgacacatgtgctgatagaattctaaacctctggaatttccctgctggcgacttctatggccgttgactgtacagggtaacctgatgccagatgctatgggcgtgatgagaactagagcattgcagcatggaggaaactgtgaggcaccagatcctgtgcttctgcaggccattttctgaaaacccctgttaggaaggttggatttggcgtgacttgcttgagcaagagtcctggggagagattttgaggtttaatttaacggtatatccagagctaacagtgactcaactcgtctagttctgcaagtcagatgtacacttagagtctctctgtgaagggtttgggtctgagctgtatagtatgtcaaactgccagtaagccagcccctcaccctctgatagatattcctttaatgcaccagacttcatgtttgataaatgattaatggttgaaattgtttctcttcttttgtgttttcccagttaatagatggtcactgtttccacaatgttttatactttcagctttttgtaacttaactataattacttaattttatttttttaaagcttgttgtggtctaatgagaagtatttttcagtgcataatgtttttctgagcttctgtaaatgccatcccaatgtggtttggttttgttgaacagaaaccaaaataaatttcaaaatgttaaagcaaaaaaaaaaaaaaaaaaaaaaaaaaaaaaaaaaaaaaaaaaaaaaaaaaaaaaaaaaaaaaaaaaaaaaaaaaaaaaaagcagagaccaaaaacacacaaggcacaaacggcgaccatgagaacagaaacgcggcaaccacacgtgtaggccccaacagaaacgcctcacagatggagcgcagccatcaataaaagaacgcacgccatgcacaccaacttctcaaccacagactatactcaatgacagaagcaccacaacactgatctgatcggatcaaacatacagcagacccggacccgcccgataagtgaatcaccccacaccacacaaaactatccacgcgaaggcaatgcacgaaacccacatcctccatttactgttagntgccaaaaactcttcccgactcctaggctcgctaacgcaaccctcacactcgtaccgacaaataacaagcaacaccgcacacccatctgtacagaacacagccacaaccaccaacacaatcagacaacgacactgaaccacaccacgcaaacaacaacaacgccagacccaaaccaacaaagacgaaccccccaaaacacaaacaaggacacaccacaccgcagacacaaacaacacacgcaccacagacaaccaaccagacgcacgaacacgaactaatcgaaaagacaccaacccccaa

SEQ ID NO: 13217 - DNA, 6511 bp, Homo sapiens
gattatcccaatatggggagaaaataaatatgcatagaggaaaagagaaatacactaattaagaagggaaagagtcctttttttttttttttaacaaaactaaatggaaacataataaactaatgtaagcggtaacctgtggaggagtaggaagacttttctaaagtctgtttactttaaaatccggttttcatttctgaaacattataatgtattatctattcaaaaacatcaaatgtttagagggcagacaatacactaaaacattaatagtgattatcccggaagggtaggagtcaggctttgttttctgcttctgtatcagaaaaaggatgcactttttggaaaagatgtttggcgacctggaaggacaccgtctccgtggagtcgggaaggaggagggccaggatgcgaaggcaacgctttgcaggtgatcggatggatttattcccacatgggagagaccagagcacagcacgtttgtgtacggccaggagggaaccacgaaaaaagcagaggatagaaacgcaagcacacgatggtggtggccaagaggagcctgcccctagtgacctcacttccgcggccagtgcgagaggcgagggagctccagctctgcctgtaaggtctcggaagtacgaggcggaggggacgaaaaacggggggccagactgttgtggctgtggtggagacgagaaaccaggaagaagaggctcgcttcccactcggcgaccgtaagcgaagcagccgaaggcgagcgccgacatcagcagctgccccctaaatcccgcccttcgtcttggcggcagcgggagactgagagacgcgcgcagcaggggcgggactggagaggggccccgcgcgcggatctcgcgagagcattagagggcggaagcgctatccgagcaggatgcggttcgtggttgccttggtcctcctgaacgtcgcagcggcgggagccgtgccgctcttggccaccgaaagcgtcaagcaagaagaagctggagtacggccttctgcaggaaacgtctccacccaccccagcttgagccaacggcctggaggctctaccaagtcgcatccggagatcagaccccaaaagacgtccctaacaagtcgggtgcggagaagcagactccaaaagacggctctaacaagtccggtgcagaggagcagggcccaatagacgggcccagcaagtcgggtgcggaggagcagacctcaaaagacagccctaacaaggtggttccagagcagccttcccggaaagaccattccaagcccatctccaacccttctgataacaaggagctccccaaggctgacacaaaccagcttgctgacaaagggaagctttctcctcatgctttcaaaaccgaatctggggaggaaactgacctcatttctcccccgcaggaggaagttaagtcttcagagcctactgaggatgtggagcccaaagaggctgaagatgatgatacaggacccgaggagggctcaccgcccaaagaagagaaagaaaagatgtccggttctgcctccagtgagaaccgtgaaggaacactttcggattccacgggtagcgagaaggatgacctttatccgaacggttctggaaatggcagcgcggagagcagccacttctttgcatatctggtgactgcagccattcttgtggctgtcctctatatcgctcatcacaacaagcggaagatcattgcttttgtcctggaaggaaaaagatctaaagtcacccggcggccaaaggccagtgactaccaacgtttggaccagaagtcctaacagaatggtatattcctctggaaaaagatgaacgtcaccaatggattgtgctgctctcgtttcagctttgatttttttgtccttgagaaccttgtcctccctgctgatttgtttctaaatcaaaagaaatgaagaaaaaagtactgtgacctgagagacaccctcctctagaatttagtggcgggtctgggctggcagaggtagggggctgctttgggctttgcacctgcactttggtgacattgttcttctgtgttccctttatttatgctggtggcttccatccgttcctcctctgagggtgagtggaggggtatatggaaacacggctatgaccaaagggagatcccagcctgggcaggctgcgctgctgaccaccctccctggggcccgggctctgtaggaaagttggtccttgactgtggcattgcactctgcactgtttctctctgcagacctaggggaaaactgcaggtggaagtgcttttctactaaggcctcttactttgggggggatgtgccctacagaagacatagaagatggggaaatgccaatgggcaaagagctactttgaatacataattctcttcaaagacttcagcagcaaaccaaaacagcaggttaaaaaaaaagatgcttttttgggtgcaagtctaacctgtctagcatgagatcttcttgattttctgattattttatgtagcttgagacaaagtgaatcaacttccacttagttgtaccgagcataaaacagaacttgggcttcctggcagtgaggccactgtcccatcacagatttttaaaataaatatgatttgaagtagtgtgatctttcacacaatcatactcagtaggaactttttgaaatagggcaagtttatgtttcatgcgagaaaacatgaaggagggttttggttttggtctgcagtttttccaaagggcttttatgagatacatttcccacaaagtccattttgcctttgttgcctaaaacagacaaaatagacttagatttattaatagaaactatactctctgccaattttacctcagtgtatttaatggtcctttaatctgatataagatgccaagggtatttgataaaaattcttcttccatgccatgtcaggagttaatacaaatgaagaaattccgtgggttcccctgggataagtgagggtagtgtcttggacaacactattgtttgaaggtttatctcttctaatcatgctctaccgcattgtagagagcctaaagagagttgtttctgagctgatctcagggaaatacaaataacttgggagatgagggaaataagatgaattctgtgctgtcaaggcagtaagtctgaagaaaggaccatgcttcttatattatcttccaccttgcttaaaacagcccatagctttgagttgacattttcattcttggcggatagcctactttatgaaggtaaggaatgaactcctacccttcttgggtcattctctgtactgatgcgttagtcttataatactttgcaccaacctgaggaatcttctaggcttctctagcatcccctaagactgtggctatttcacgtctctctccctgcctgccttccttttcccttcctttcccctcctcatgttttctggttgtgcccatctgtaccagctcctttccatccaccttcgtatgcacccagatttttctgttcccatctgtcctatttgttattcatcccgctgctcaacttctccagtatgttgcttcccttaagttgccattcattctcttcatgactttactaactcacttcggtctctgtctgtcaactaaacttttctaaaggttaccagttatccaatcaccaaatccatggctttttctcaaagcttagtcttgtccttggcagaactggacactattgaccatccaaatggaaattcccctttcttggtgtctctgacaaatggtcctttgccttatcttgtgctggtggtgaagaggccctcaaagccaggcctctctattcctttgactgtctcctcagccattaacccattcttcatcctcggagtgagtgattcccaagtctttgtcttggcttaatccctaaagaacccagttctgctggtatcgaatagttcagcttggttgtcattgaaaggaatttctctcttctgtccatcagcctgtccctcccaactgtctaggacagtcttcggtcacctaaattcctaactgcagacttttgccctttttctctctcatcaccaaagtcccatccatttttttttaataaaagatcctcagctacagtctttccattttccttgcttctcttattgcacacccccagcccattttgcttctctcttggattttgttttttcagatccacatttattgggtttcctgtccagcttcttggaaaggagctcactcttggaaagactgatctttccaaaatattttccctggtctgaagctttggtgtgaacttctcaaggcttagagaatccagttacagaccttttggggttcaggatgctatagattgacaccctcctgcctgtttttctctgcatcccaacctggccaaggcccctcctgtggggtgcccatctgtgcctttattccggctgtgccctcgactttccagcttcccatgtttctttggttaggtttctctcccttccttctttctccttccccaatccgcctgtttcgtcagggcccagtttgtttcctcatacaccttcctcactaccccaccccacatggttgactctttccctcagctccaccagctcttcatcatgccactcatttcagaacttgagcaaaacagggcagtcaggatctgatgtctttctggtctccctaagaaaactaagctcttgagggacagcccttggcaatgctttcctatctgctgagcatggtgaccttccttaggacttccagagttcagttccttctggcagagaggttttctttctccatgccatatggatgtgactcaaatgaggggtcccacagcttttcctggctaccacttgctgtgaccttatacatgttggggtttgctcttaaagaggagagcaggaagaaaggttggtttcagaaaccaagagggtcggcagtggacgcgtacattttgtcacggagtccacagagctgagcttttgagcagactctgagaagtatcattgcttgtgttgaaagaatacaacaggatttaagtttctctttagaaattgcactgaagaaaggccgggcgcggtggctccccctgtaatcccagcgctttgggaggccgaggcggggggatcacgaggtcaagagatcgagaccatcctggccaacatggtgaaaccccgtctctaataaaaatacaaaaattagccgggcatggtgacgtgcacctgtagtcccagctactagataggctgaggcaggagaattgcttgaatccgggaggcggaggttgcagtgagccgagatcgtgccactgaactccaacctgccaatagagcgagactccgtctcaaaaaaaaaaaaaaaaaagaaagaaatagcattgaagaaaataccgcacatcagaggaaagcttattttctgcatggtgtcttttcaaagatagaatatttgaagcatgttttctagcgattgtgtgaatgagggtgagctggctgaggcatcgctcaagctggggggtggtgtgtaagaagcacgtggagccacaagaggcacctcctatagtcagctaagggcttccctttctgcgcccagcttttgggtgaagggtgatttctactagacacatctgtgcttcagtcatagatgttaatagaggaagcagttttcctgctgcagattcctgaatagagttgctgaaagagtctacttctggactcaggggaagttgaaggccagtctgtgtagaaaggctgaggcaacggggaaagacctgacagctagttacatacgctctgacatagtactcccatgatggcttccagtgacacatgtgctgatagaattctaaacctctggaatttccctgctggcgacttctatggccgttgactgtacagggtaacctgatgccagatgctatgggcgtgatgagaactagagcattgcagcatggaggaaactgtgaggcaccagatcctgtgcttctgcaggccattttctgaaaacccctgttaggaaggttggatttggcgtgacttgcttgagcaagagtcctggggagagattttgaggtttaatttaacggtatatccagagctaacagtgactcaactcgtctagttctgcaagtcagatgtacacttagagtctctctgtgaagggtttgggtctgagctgtatagtatgtcaaactgccagtaagccagcccctcaccctctgatagatattcctttaatgcaccagacttcatgtttgataaatgattaatggttgaaattgtttctcttcttttgtgttttcccagttaatagatggtcactgtttccacaatgttttatactttcagctttttgtaacttaactataattacttaattttatttttttaaagcttgttgtggtctaatgagaagtatttttcagtgcataatgtttttctgagcttctgtaaatgccatcccaatgtggtttggttttgttgaacagaaaccaaaataaatttcaaaatgttaaagcaa

SEQ ID NO: 13218 - DNA, 5048 bp, Homo sapiens
attgtgatgatgagtgatgtctgaagtcggcttaccggcctgcgaacttggcgctgacctgtccggttctgccgttcatgtgctgagcgtgccctgaacactttcggattccacgggtagcgagaaggatgacctttatccgaacggttctggaaatggcagcgcggagagcagccacttctttgcatatctggtgactgcagccattcttgtggctgtcctctatatcgctcatcacaacaagcggaagatcattgcttttgtcctggaaggaaaaagatctaaagtcacccggcggccaaaggccagtgactaccaacgtttggaccagaagtcctaacagaatggtatattcctctggaaaaagatgaacgtcaccaatggattgtgctgctctcgtttcagctttgatttttttgtccttgagaaccttgtcctccctgctgatttgtttctaaatcaaaagaaatgaagaaaaaagtactgtgacctgagagacaccctcctctagaatttagtggcgggtctgggctggcagaggtagggggctgctttgggctttgcacctgcactttggtgacattgttcttctgtgttccctttatttatgctggtggcttccatccgttcctcctctgagggtgagtggaggggtatatggaaacacggctatgaccaaagggagatcccagcctgggcaggctgcgctgctgaccaccctccctggggcccgggctctgtaggaaagttggtccttgactgtggcattgcactctgcactgtttctctctgcagacctaggggaaaactgcaggtggaagtgcttttctactaaggcctcttactttgggggggatgtgccctacagaagacatagaagatggggaaatgccaatgggcaaagagctactttgaatacataattctcttcaaagacttcagcagcaaaccaaaacagcaggttaaaaaaaaagatgcttttttgggtgcaagtctaacctgtctagcatgagatcttcttgattttctgattattttatgtagcttgagacaaagtgaatcaacttccacttagttgtaccgagcataaaacagaacttgggcttcctggcagtgaggccactgtcccatcacagatttttaaaataaatatgatttgaagtagtgtgatctttcacacaatcatactcagtaggaactttttgaaatagggcaagtttatgtttcatgcgagaaaacatgaaggagggttttggttttggtctgcagtttttccaaagggcttttatgagatacatttcccacaaagtccattttgcctttgttgcctaaaacagacaaaatagacttagatttattaatagaaactatactctctgccaattttacctcagtgtatttaatggtcctttaatctgatataagatgccaagggtatttgataaaaattcttcttccatgccatgtcaggagttaatacaaatgaagaaattccgtgggttcccctgggataagtgagggtagtgtcttggacaacactattgtttgaaggtttatctcttctaatcatgctctaccgcattgtagagagcctaaagagagttgtttctgagctgatctcagggaaatacaaataacttgggagatgagggaaataagatgaattctgtgctgtcaaggcagtaagtctgaagaaaggaccatgcttcttatattatcttccaccttgcttaaaacagcccatagctttgagttgacattttcattcttggcggatagcctactttatgaaggtaaggaatgaactcctacccttcttgggtcattctctgtactgatgcgttagtcttataatactttgcaccaacctgaggaatcttctaggcttctctagcatcccctaagactgtggctatttcacgtctctctccctgcctgccttccttttcccttcctttcccctcctcatgttttctggttgtgcccatctgtaccagctcctttccatccaccttcgtatgcacccagatttttctgttcccatctgtcctatttgttattcatcccgctgctcaacttctccagtatgttgcttcccttaagttgccattcattctcttcatgactttactaactcacttcggtctctgtctgtcaactaaacttttctaaaggttaccagttatccaatcaccaaatccatggctttttctcaaagcttagtcttgtccttggcagaactggacactattgaccatccaaatggaaattcccctttcttggtgtctctgacaaatggtcctttgccttatcttgtgctggtggtgaagaggccctcaaagccaggcctctctattcctttgactgtctcctcagccattaacccattcttcatcctcggagtgagtgattcccaagtctttgtcttggcttaatccctaaagaacccagttctgctggtatcgaatagttcagcttggttgtcattgaaaggaatttctctcttctgtccatcagcctgtccctcccaactgtctaggacagtcttcggtcacctaaattcctaactgcagacttttgccctttttctctctcatcaccaaagtcccatccatttttttttaataaaagatcctcagctacagtctttccattttccttgcttctcttattgcacacccccagcccattttgcttctctcttggattttgttttttcagatccacatttattgggtttcctgtccagcttcttggaaaggagctcactcttggaaagactgatctttccaaaatattttccctggtctgaagctttggtgtgaacttctcaaggcttagagaatccagttacagaccttttggggttcaggatgctatagattgacaccctcctgcctgtttttctctgcatcccaacctggccaaggcccctcctgtggggtgcccatctgtgcctttattccggctgtgccctcgactttccagcttcccatgtttctttggttaggtttctctcccttccttctttctccttccccaatccgcctgtttcgtcagggcccagtttgtttcctcatacaccttcctcactaccccaccccacatggttgactctttccctcagctccaccagctcttcatcatgccactcatttcagaacttgagcaaaacagggcagtcaggatctgatgtctttctggtctccctaagaaaactaagctcttgagggacagcccttggcaatgctttcctatctgctgagcatggtgaccttccttaggacttccagagttcagttccttctggcagagaggttttctttctccatgccatatggatgtgactcaaatgaggggtcccacagcttttcctggctaccacttgctgtgaccttatacatgttggggtttgctcttaaagaggagagcaggaagaaaggttggtttcagaaaccaagagggtcggcagtggacgcgtacattttgtcacggagtccacagagctgagcttttgagcagactctgagaagtatcattgcttgtgttgaaagaatacaacaggatttaagtttctctttagaaattgcactgaagaaaggccgggcgcggtggctccccctgtaatcccagcgctttgggaggccgaggcggggggatcacgaggtcaagagatcgagaccatcctggccaacatggtgaaaccccgtctctaataaaaatacaaaaattagccgggcatggtgacgtgcacctgtagtcccagctactagataggctgaggcaggagaattgcttgaatccgggaggcggaggttgcagtgagccgagatcgtgccactgaactccaacctgccaatagagcgagactccgtctcaaaaaaaaaaaaaaaaaagaaagaaatagcattgaagaaaataccgcacatcagaggaaagcttattttctgcatggtgtcttttcaaagatagaatatttgaagcatgttttctagcgattgtgtgaatgagggtgagctggctgaggcatcgctcaagctggggggtggtgtgtaagaagcacgtggagccacaagaggcacctcctatagtcagctaagggcttccctttctgcgcccagcttttgggtgaagggtgatttctactagacacatctgtgcttcagtcatagatgttaatagaggaagcagttttcctgctgcagattcctgaatagagttgctgaaagagtctacttctggactcaggggaagttgaaggccagtctgtgtagaaaggctgaggcaacggggaaagacctgacagctagttacatacgctctgacatagtactcccatgatggcttccagtgacacatgtgctgatagaattctaaacctctggaatttccctgctggcgacttctatggccgttgactgtacagggtaacctgatgccagatgctatgggcgtgatgagaactagagcattgcagcatggaggaaactgtgaggcaccagatcctgtgcttctgcaggccattttctgaaaacccctgttaggaaggttggatttggcgtgacttgcttgagcaagagtcctggggagagattttgaggtttaatttaacggtatatccagagctaacagtgactcaactcgtctagttctgcaagtcagatgtacacttagagtctctctgtgaagggtttgggtctgagctgtatagtatgtcaaactgccagtaagccagcccctcaccctctgatagatattcctttaatgcaccagacttcatgtttgataaatgattaatggttgaaattgtttctcttcttttgtgttttcccagttaatagatggtcactgtttccacaatgttttatactttcagctttttgtaacttaactataattacttaattttatttttttaaagcttgttgtggtctaatgagaagtatttttcagtgcataatgtttttctgagcttctgtaaatgccatcccaatgtggtttggttttgttgaacagaaaccaaaataaatttcaaaatgttaaagcaa

SEQ ID NO: 13219 - DNA, 4959 bp, Homo sapiens
tcgatctagaggatccctgatgcatgggtagcgagaaggatgacctttatccgaacggttctggaaatggcagcgcggagagcagccacttctttgcatatctggtgactgcagccattcttgtggctgtcctctatatcgctcatcacaacaagcggaagatcattgcttttgtcctggaaggaaaaagatctaaagtcacccggcggccaaaggccagtgactaccaacgtttggaccagaagtcctaacagaatggtatattcctctggaaaaagatgaacgtcaccaatggattgtgctgctctcgtttcagctttgatttttttgtccttgagaaccttgtcctccctgctgatttgtttctaaatcaaaagaaatgaagaaaaaagtactgtgacctgagagacaccctcctctagaatttagtggcgggtctgggctggcagaggtagggggctgctttgggctttgcacctgcactttggtgacattgttcttctgtgttccctttatttatgctggtggcttccatccgttcctcctctgagggtgagtggaggggtatatggaaacacggctatgaccaaagggagatcccagcctgggcaggctgcgctgctgaccaccctccctggggcccgggctctgtaggaaagttggtccttgactgtggcattgcactctgcactgtttctctctgcagacctaggggaaaactgcaggtggaagtgcttttctactaaggcctcttactttgggggggatgtgccctacagaagacatagaagatggggaaatgccaatgggcaaagagctactttgaatacataattctcttcaaagacttcagcagcaaaccaaaacagcaggttaaaaaaaaagatgcttttttgggtgcaagtctaacctgtctagcatgagatcttcttgattttctgattattttatgtagcttgagacaaagtgaatcaacttccacttagttgtaccgagcataaaacagaacttgggcttcctggcagtgaggccactgtcccatcacagatttttaaaataaatatgatttgaagtagtgtgatctttcacacaatcatactcagtaggaactttttgaaatagggcaagtttatgtttcatgcgagaaaacatgaaggagggttttggttttggtctgcagtttttccaaagggcttttatgagatacatttcccacaaagtccattttgcctttgttgcctaaaacagacaaaatagacttagatttattaatagaaactatactctctgccaattttacctcagtgtatttaatggtcctttaatctgatataagatgccaagggtatttgataaaaattcttcttccatgccatgtcaggagttaatacaaatgaagaaattccgtgggttcccctgggataagtgagggtagtgtcttggacaacactattgtttgaaggtttatctcttctaatcatgctctaccgcattgtagagagcctaaagagagttgtttctgagctgatctcagggaaatacaaataacttgggagatgagggaaataagatgaattctgtgctgtcaaggcagtaagtctgaagaaaggaccatgcttcttatattatcttccaccttgcttaaaacagcccatagctttgagttgacattttcattcttggcggatagcctactttatgaaggtaaggaatgaactcctacccttcttgggtcattctctgtactgatgcgttagtcttataatactttgcaccaacctgaggaatcttctaggcttctctagcatcccctaagactgtggctatttcacgtctctctccctgcctgccttccttttcccttcctttcccctcctcatgttttctggttgtgcccatctgtaccagctcctttccatccaccttcgtatgcacccagatttttctgttcccatctgtcctatttgttattcatcccgctgctcaacttctccagtatgttgcttcccttaagttgccattcattctcttcatgactttactaactcacttcggtctctgtctgtcaactaaacttttctaaaggttaccagttatccaatcaccaaatccatggctttttctcaaagcttagtcttgtccttggcagaactggacactattgaccatccaaatggaaattcccctttcttggtgtctctgacaaatggtcctttgccttatcttgtgctggtggtgaagaggccctcaaagccaggcctctctattcctttgactgtctcctcagccattaacccattcttcatcctcggagtgagtgattcccaagtctttgtcttggcttaatccctaaagaacccagttctgctggtatcgaatagttcagcttggttgtcattgaaaggaatttctctcttctgtccatcagcctgtccctcccaactgtctaggacagtcttcggtcacctaaattcctaactgcagacttttgccctttttctctctcatcaccaaagtcccatccatttttttttaataaaagatcctcagctacagtctttccattttccttgcttctcttattgcacacccccagcccattttgcttctctcttggattttgttttttcagatccacatttattgggtttcctgtccagcttcttggaaaggagctcactcttggaaagactgatctttccaaaatattttccctggtctgaagctttggtgtgaacttctcaaggcttagagaatccagttacagaccttttggggttcaggatgctatagattgacaccctcctgcctgtttttctctgcatcccaacctggccaaggcccctcctgtggggtgcccatctgtgcctttattccggctgtgccctcgactttccagcttcccatgtttctttggttaggtttctctcccttccttctttctccttccccaatccgcctgtttcgtcagggcccagtttgtttcctcatacaccttcctcactaccccaccccacatggttgactctttccctcagctccaccagctcttcatcatgccactcatttcagaacttgagcaaaacagggcagtcaggatctgatgtctttctggtctccctaagaaaactaagctcttgagggacagcccttggcaatgctttcctatctgctgagcatggtgaccttccttaggacttccagagttcagttccttctggcagagaggttttctttctccatgccatatggatgtgactcaaatgaggggtcccacagcttttcctggctaccacttgctgtgaccttatacatgttggggtttgctcttaaagaggagagcaggaagaaaggttggtttcagaaaccaagagggtcggcagtggacgcgtacattttgtcacggagtccacagagctgagcttttgagcagactctgagaagtatcattgcttgtgttgaaagaatacaacaggatttaagtttctctttagaaattgcactgaagaaaggccgggcgcggtggctccccctgtaatcccagcgctttgggaggccgaggcggggggatcacgaggtcaagagatcgagaccatcctggccaacatggtgaaaccccgtctctaataaaaatacaaaaattagccgggcatggtgacgtgcacctgtagtcccagctactagataggctgaggcaggagaattgcttgaatccgggaggcggaggttgcagtgagccgagatcgtgccactgaactccaacctgccaatagagcgagactccgtctcaaaaaaaaaaaaaaaaaagaaagaaatagcattgaagaaaataccgcacatcagaggaaagcttattttctgcatggtgtcttttcaaagatagaatatttgaagcatgttttctagcgattgtgtgaatgagggtgagctggctgaggcatcgctcaagctggggggtggtgtgtaagaagcacgtggagccacaagaggcacctcctatagtcagctaagggcttccctttctgcgcccagcttttgggtgaagggtgatttctactagacacatctgtgcttcagtcatagatgttaatagaggaagcagttttcctgctgcagattcctgaatagagttgctgaaagagtctacttctggactcaggggaagttgaaggccagtctgtgtagaaaggctgaggcaacggggaaagacctgacagctagttacatacgctctgacatagtactcccatgatggcttccagtgacacatgtgctgatagaattctaaacctctggaatttccctgctggcgacttctatggccgttgactgtacagggtaacctgatgccagatgctatgggcgtgatgagaactagagcattgcagcatggaggaaactgtgaggcaccagatcctgtgcttctgcaggccattttctgaaaacccctgttaggaaggttggatttggcgtgacttgcttgagcaagagtcctggggagagattttgaggtttaatttaacggtatatccagagctaacagtgactcaactcgtctagttctgcaagtcagatgtacacttagagtctctctgtgaagggtttgggtctgagctgtatagtatgtcaaactgccagtaagccagcccctcaccctctgatagatattcctttaatgcaccagacttcatgtttgataaatgattaatggttgaaattgtttctcttcttttgtgttttcccagttaatagatggtcactgtttccacaatgttttatactttcagctttttgtaacttaactataattacttaattttatttttttaaagcttgttgtggtctaatgagaagtatttttcagtgcataatgtttttctgagcttctgtaaatgccatcccaatgtggtttggttttgttgaacagaaaccaaaataaatttcaaaatgttaaagcaa

SEQ ID NO: 13220 - DNA, 3512 bp, Homo sapiens
cgtacgcgtgggtccggacgcgtgggctaatcatgctctaccgcattgtagagagcctaaagagagttgtttctgagctgatctcagggaaatacaaataacttgggagatgagggaaataagatgaattctgtgctgtcaaggcagtaagtctgaagaaaggaccatgcttcttatattatcttccaccttgcttaaaacagcccatagctttgagttgacattttcattcttggcggatagcctactttatgaaggtaaggaatgaactcctacccttcttgggtcattctctgtactgatgcgttagtcttataatactttgcaccaacctgaggaatcttctaggcttctctagcatcccctaagactgtggctatttcacgtctctctccctgcctgccttccttttcccttcctttcccctcctcatgttttctggttgtgcccatctgtaccagctcctttccatccaccttcgtatgcacccagatttttctgttcccatctgtcctatttgttattcatcccgctgctcaacttctccagtatgttgcttcccttaagttgccattcattctcttcatgactttactaactcacttcggtctctgtctgtcaactaaacttttctaaaggttaccagttatccaatcaccaaatccatggctttttctcaaagcttagtcttgtccttggcagaactggacactattgaccatccaaatggaaattcccctttcttggtgtctctgacaaatggtcctttgccttatcttgtgctggtggtgaagaggccctcaaagccaggcctctctattcctttgactgtctcctcagccattaacccattcttcatcctcggagtgagtgattcccaagtctttgtcttggcttaatccctaaagaacccagttctgctggtatcgaatagttcagcttggttgtcattgaaaggaatttctctcttctgtccatcagcctgtccctcccaactgtctaggacagtcttcggtcacctaaattcctaactgcagacttttgccctttttctctctcatcaccaaagtcccatccatttttttttaataaaagatcctcagctacagtctttccattttccttgcttctcttattgcacacccccagcccattttgcttctctcttggattttgttttttcagatccacatttattgggtttcctgtccagcttcttggaaaggagctcactcttggaaagactgatctttccaaaatattttccctggtctgaagctttggtgtgaacttctcaaggcttagagaatccagttacagaccttttggggttcaggatgctatagattgacaccctcctgcctgtttttctctgcatcccaacctggccaaggcccctcctgtggggtgcccatctgtgcctttattccggctgtgccctcgactttccagcttcccatgtttctttggttaggtttctctcccttccttctttctccttccccaatccgcctgtttcgtcagggcccagtttgtttcctcatacaccttcctcactaccccaccccacatggttgactctttccctcagctccaccagctcttcatcatgccactcatttcagaacttgagcaaaacagggcagtcaggatctgatgtctttctggtctccctaagaaaactaagctcttgagggacagcccttggcaatgctttcctatctgctgagcatggtgaccttccttaggacttccagagttcagttccttctggcagagaggttttctttctccatgccatatggatgtgactcaaatgaggggtcccacagcttttcctggctaccacttgctgtgaccttatacatgttggggtttgctcttaaagaggagagcaggaagaaaggttggtttcagaaaccaagagggtcggcagtggacgcgtacattttgtcacggagtccacagagctgagcttttgagcagactctgagaagtatcattgcttgtgttgaaagaatacaacaggatttaagtttctctttagaaattgcactgaagaaaggccgggcgcggtggctccccctgtaatcccagcgctttgggaggccgaggcggggggatcacgaggtcaagagatcgagaccatcctggccaacatggtgaaaccccgtctctaataaaaatacaaaaattagccgggcatggtgacgtgcacctgtagtcccagctactagataggctgaggcaggagaattgcttgaatccgggaggcggaggttgcagtgagccgagatcgtgccactgaactccaacctgccaatagagcgagactccgtctcaaaaaaaaaaaaaaaaaagaaagaaatagcattgaagaaaataccgcacatcagaggaaagcttattttctgcatggtgtcttttcaaagatagaatatttgaagcatgttttctagcgattgtgtgaatgagggtgagctggctgaggcatcgctcaagctggggggtggtgtgtaagaagcacgtggagccacaagaggcacctcctatagtcagctaagggcttccctttctgcgcccagcttttgggtgaagggtgatttctactagacacatctgtgcttcagtcatagatgttaatagaggaagcagttttcctgctgcagattcctgaatagagttgctgaaagagtctacttctggactcaggggaagttgaaggccagtctgtgtagaaaggctgaggcaacggggaaagacctgacagctagttacatacgctctgacatagtactcccatgatggcttccagtgacacatgtgctgatagaattctaaacctctggaatttccctgctggcgacttctatggccgttgactgtacagggtaacctgatgccagatgctatgggcgtgatgagaactagagcattgcagcatggaggaaactgtgaggcaccagatcctgtgcttctgcaggccattttctgaaaacccctgttaggaaggttggatttggcgtgacttgcttgagcaagagtcctggggagagattttgaggtttaatttaacggtatatccagagctaacagtgactcaactcgtctagttctgcaagtcagatgtacacttagagtctctctgtgaagggtttgggtctgagctgtatagtatgtcaaactgccagtaagccagcccctcaccctctgatagatattcctttaatgcaccagacttcatgtttgataaatgattaatggttgaaattgtttctcttcttttgtgttttcccagttaatagatggtcactgtttccacaatgttttatactttcagctttttgtaacttaactataattacttaattttatttttttaaagcttgttgtggtctaatgagaagtatttttcagtgcataatgtttttctgagcttctgtaaatgccatcccaatgtggtttggttttgttgaacagaaaccaaaataaatttcaaaatgttaaagcaa

SEQ ID NO: 13221 - DNA, 3282 bp, Homo sapiens
cgacccacgcgtccggatagttctagatcgcggaatgaactcctacccttcttgggtcattctctgtactgatgcgttagtcttataatactttgcaccaacctgaggaatcttctaggcttctctagcatcccctaagactgtggctatttcacgtctctctccctgcctgccttccttttcccttcctttcccctcctcatgttttctggttgtgcccatctgtaccagctcctttccatccaccttcgtatgcacccagatttttctgttcccatctgtcctatttgttattcatcccgctgctcaacttctccagtatgttgcttcccttaagttgccattcattctcttcatgactttactaactcacttcggtctctgtctgtcaactaaacttttctaaaggttaccagttatccaatcaccaaatccatggctttttctcaaagcttagtcttgtccttggcagaactggacactattgaccatccaaatggaaattcccctttcttggtgtctctgacaaatggtcctttgccttatcttgtgctggtggtgaagaggccctcaaagccaggcctctctattcctttgactgtctcctcagccattaacccattcttcatcctcggagtgagtgattcccaagtctttgtcttggcttaatccctaaagaacccagttctgctggtatcgaatagttcagcttggttgtcattgaaaggaatttctctcttctgtccatcagcctgtccctcccaactgtctaggacagtcttcggtcacctaaattcctaactgcagacttttgccctttttctctctcatcaccaaagtcccatccatttttttttaataaaagatcctcagctacagtctttccattttccttgcttctcttattgcacacccccagcccattttgcttctctcttggattttgttttttcagatccacatttattgggtttcctgtccagcttcttggaaaggagctcactcttggaaagactgatctttccaaaatattttccctggtctgaagctttggtgtgaacttctcaaggcttagagaatccagttacagaccttttggggttcaggatgctatagattgacaccctcctgcctgtttttctctgcatcccaacctggccaaggcccctcctgtggggtgcccatctgtgcctttattccggctgtgccctcgactttccagcttcccatgtttctttggttaggtttctctcccttccttctttctccttccccaatccgcctgtttcgtcagggcccagtttgtttcctcatacaccttcctcactaccccaccccacatggttgactctttccctcagctccaccagctcttcatcatgccactcatttcagaacttgagcaaaacagggcagtcaggatctgatgtctttctggtctccctaagaaaactaagctcttgagggacagcccttggcaatgctttcctatctgctgagcatggtgaccttccttaggacttccagagttcagttccttctggcagagaggttttctttctccatgccatatggatgtgactcaaatgaggggtcccacagcttttcctggctaccacttgctgtgaccttatacatgttggggtttgctcttaaagaggagagcaggaagaaaggttggtttcagaaaccaagagggtcggcagtggacgcgtacattttgtcacggagtccacagagctgagcttttgagcagactctgagaagtatcattgcttgtgttgaaagaatacaacaggatttaagtttctctttagaaattgcactgaagaaaggccgggcgcggtggctccccctgtaatcccagcgctttgggaggccgaggcggggggatcacgaggtcaagagatcgagaccatcctggccaacatggtgaaaccccgtctctaataaaaatacaaaaattagccgggcatggtgacgtgcacctgtagtcccagctactagataggctgaggcaggagaattgcttgaatccgggaggcggaggttgcagtgagccgagatcgtgccactgaactccaacctgccaatagagcgagactccgtctcaaaaaaaaaaaaaaaaaagaaagaaatagcattgaagaaaataccgcacatcagaggaaagcttattttctgcatggtgtcttttcaaagatagaatatttgaagcatgttttctagcgattgtgtgaatgagggtgagctggctgaggcatcgctcaagctggggggtggtgtgtaagaagcacgtggagccacaagaggcacctcctatagtcagctaagggcttccctttctgcgcccagcttttgggtgaagggtgatttctactagacacatctgtgcttcagtcatagatgttaatagaggaagcagttttcctgctgcagattcctgaatagagttgctgaaagagtctacttctggactcaggggaagttgaaggccagtctgtgtagaaaggctgaggcaacggggaaagacctgacagctagttacatacgctctgacatagtactcccatgatggcttccagtgacacatgtgctgatagaattctaaacctctggaatttccctgctggcgacttctatggccgttgactgtacagggtaacctgatgccagatgctatgggcgtgatgagaactagagcattgcagcatggaggaaactgtgaggcaccagatcctgtgcttctgcaggccattttctgaaaacccctgttaggaaggttggatttggcgtgacttgcttgagcaagagtcctggggagagattttgaggtttaatttaacggtatatccagagctaacagtgactcaactcgtctagttctgcaagtcagatgtacacttagagtctctctgtgaagggtttgggtctgagctgtatagtatgtcaaactgccagtaagccagcccctcaccctctgatagatattcctttaatgcaccagacttcatgtttgataaatgattaatggttgaaattgtttctcttcttttgtgttttcccagttaatagatggtcactgtttccacaatgttttatactttcagctttttgtaacttaactataattacttaattttatttttttaaagcttgttgtggtctaatgagaagtatttttcagtgcataatgtttttctgagcttctgtaaatgccatcccaatgtggtttggttttgttgaacagaaaccaaaataaatttcaaaatgttaaagcaa

SEQ ID NO: 13222 - DNA, 5763 bp, Homo sapiens
gattatcccaatatggggagaaaataaatatgcatagaggaaaagagaaatacactaattaagaagggaaagagtcctttttttttttttttaacaaaactaaatggaaacataataaactaatgtaagcggtaacctgtggaggagtaggaagacttttctaaagtctgtttactttaaaatccggttttcatttctgaaacattataatgtattatctattcaaaaacatcaaatgtttagagggcagacaatacactaaaacattaatagtgattatcccggaagggtaggagtcaggctttgttttctgcttctgtatcagaaaaaggatgcactttttggaaaagatgtttggcgacctggaaggacaccgtctccgtggagtcgggaaggaggagggccaggatgcgaaggcaacgctttgcaggtgatcggatggatttattcccacatgggagagaccagagcacagcacgtttgtgtacggccaggagggaaccacgaaaaaagcagaggatagaaacgcaagcacacgatggtggtggccaagaggagcctgcccctagtgacctcacttccgcggccagtgcgagaggcgagggagctccagctctgcctgtaaggtctcggaagtacgaggcggaggggacgaaaaacggggggccagactgttgtggctgtggtggagacgagaaaccaggaagaagaggctcgcttcccactcggcgaccgtaagcgaagcagccgaaggcgagcgccgacatcagcagctgccccctaaatcccgcccttcgtcttggcggcagcgggagactgagagacgcgcgcagcaggggcgggactggagaggggccccgcgcgcggatctcgcgagagcattagagggcggaagcgctatccgagcaggatgcggttcgtggttgccttggtcctcctgaacgtcgcagcggcgggagccgtgccgctcttggccaccgaaagcgtcaagcaagaagaagctggagtacggccttctgcaggaaacgtctccacccaccccagcttgagccaacggcctggaggctctaccaagtcgcatccggagccgcagactccaaaagacagccctagcaagtcgagtgcggaggcgcagaccccagaagacacccccaacaagtcgggtgcggaggcaaagacccaaaaagacagctccaacaagtcgggtgcggaggcaaagacccaaaaaggcagcactagcaagtcgggttcggaggcgcagaccacaaaagacagcactagtaagtcgcatccggagctgcagactccaaaagacagcactggcaaatcgggtgcggaggcgcagaccccagaagacagccccaacaggtcgggtgcggaggcaaagacccaaaaagacagccctagcaagtcaggttcggaggcgcagaccacaaaagatgtccctaataagtcgggtgcggacggccagaccccaaaagacggctccagcaagtcgggtgcggaggatcagaccccaaaagacgtccctaacaagtcgggtgcggagaagcagactccaaaagacggctctaacaagtccggtgcagaggagcagggcccaatagacgggcccagcaagtcgggtgcggaggagcagacctcaaaagacagccctaacaaggtggttccagagcagccttcccggaaagaccattccaagcccatctccaacccttctgataacaaggagctccccaaggctgacacaaaccagcttgctgacaaagggaagctttctcctcatgctttcaaaaccgaatctggggaggaaactgacctcatttctcccccgcaggaggaagttaagtcttcagagcctactgaggatgtggagcccaaagaggctgaagatgatgatacaggacccgaggagggctcaccgcccaaagaagagaaagaaaagatgtccggttctgcctccagtgagaaccgtgaaggaacactttcggattccacgggtagcgagaaggatgacctttatccgaacggttctggaaatggcagcgcggagagcagccacttctttgcatatctggtgactgcagccattcttgtggctgtcctctatatcgctcatcacaacaagcggaagatcattgcttttgtcctggaaggaaaaagatctaaagtcacccggcggccaaaggccagtgactaccaacgtttggaccagaagtcctaacagaatggtatattcctctggaaaaagatgaacgtcaccaatggattgtgctgctctcgtttcagctttgatttttttgtccttgagaaccttgtcctccctgctgatttgtttctaaatcaaaagaaatgaagaaaaaagtactgtgacctgagagacaccctcctctagaatttagtggcgggtctgggctggcagaggtagggggctgctttgggctttgcacctgcactttggtgacattgttcttctgtgttccctttatttatgctggtggcttccatccgttcctcctctgagggtgagtggaggggtatatggaaacacggctatgaccaaagggagatcccagcctgggcaggctgcgctgctgaccaccctccctggggcccgggctctgtaggaaagttggtccttgactgtggcattgcactctgcactgtttctctctgcagacctaggggaaaactgcaggtggaagtgcttttctactaaggcctcttactttgggggggatgtgccctacagaagacatagaagatggggaaatgccaatgggcaaagagctactttgaatacataattctcttcaaagacttcagcagcaaaccaaaacagcaggttaaaaaaaaagatgcttttttgggtgcaagtctaacctgtctagcatgagatcttcttgattttctgattattttatgtagcttgagacaaagtgaatcaacttccacttagttgtaccgagcataaaacagaacttgggcttcctggcagtgaggccactgtcccatcacagatttttaaaataaatatgatttgaagtagtgtgatctttcacacaatcatactcagtaggaactttttgaaatagggcaagtttatgtttcatgcgagaaaacatgaaggagggttttggttttggtctgcagtttttccaaagggcttttatgagatacatttcccacaaagtccattttgcctttgttgcctaaaacagacaaaatagacttagatttattaatagaaactatactctctgccaattttacctcagtgtatttaatggtcctttaatctgatataagatgccaagggtatttgataaaaattcttcttccatgccatgtcaggagttaatacaaatgaagaaattccgtgggttcccctgggataagtgagggtagtgtcttggacaacactattgtttgaaggtttatctcttctaatcatgctctaccgcattgtagagagcctaaagagagttgtttctgagctgatctcagggaaatacaaataacttgggagatgagggaaataagatgaattctgtgctgtcaaggcagtaagtctgaagaaaggaccatgcttcttatattatcttccaccttgcttaaaacagcccatagctttgagttgacattttcattcttggcggatagcctactttatgaaggtaaggaatgaactcctacccttcttgggtcattctctgtactgatgcgttagtcttataatactttgcaccaacctgaggaatcttctaggcttctctagcatcccctaagactgtggctatttcacgtctctctccctgcctgccttccttttcccttcctttcccctcctcatgttttctggttgtgcccatctgtaccagctcctttccatccaccttcgtatgcacccagatttttctgttcccatctgtcctatttgttattcatcccgctgctcaacttctccagtatgttgcttcccttaagttgccattcattctcttcatgactttactaactcacttcggtctctgtctgtcaactaaacttttctaaaggttaccagttatccaatcaccaaatccatggctttttctcaaagcttagtcttgtccttggcagaactggacactattgaccatccaaatggaaattcccctttcttggtgtctctgacaaatggtcctttgccttatcttgtgctggtggtgaagaggccctcaaagccaggcctctctattcctttgactgtctcctcagccattaacccattcttcatcctcggagtgagtgattcccaagtctttgtcttggcttaatccctaaagaacccagttctgctggtatcgaatagttcagcttggttgtcattgaaaggaatttctctcttctgtccatcagcctgtccctcccaactgtctaggacagtcttcggtcacctaaattcctaactgcagacttttgccctttttctctctcatcaccaaagtcccatccatttttttttaataaaagatcctcagctacagtctttccattttccttgcttctcttattgcacacccccagcccattttgcttctctcttggattttgttttttcagatccacatttattgggtttcctgtccagcttcttggaaaggagctcactcttggaaagactgatctttccaaaatattttccctggtctgaagctttggtgtgaacttctcaaggcttagagaatccagttacagaccttttggggttcaggatgctatagattgacaccctcctgcctgtttttctctgcatcccaacctggccaaggcccctcctgtggggtgcccatctgtgcctttattccggctgtgccctcgactttccagcttcccatgtttctttggttaggtttctctcccttccttctttctccttccccaatccgcctgtttcgtcagggcccagtttgtttcctcatacaccttcctcactaccccaccccacatggttgactctttccctcagctccaccagctcttcatcatgccactcatttcagaacttgagcaaaacagggcagtcaggatctgatgtctttctggtctccctaagaaaactaagctcttgagggacagcccttggcaatgctttcctatctgctgagcatggtgaccttccttaggacttccagagttcagttccttctggcagagaggttttctttctccatgccatatggatgtgactcaaatgaggggtcccacagcttttcctggctaccacttgctgtgaccttatacatgttggggtttgctcttaaagaggagagcaggaagaaaggttggtttcagaaaccaagagggtcggcagtggacgcgtacattttgtcacggagtccacagagctgagcttttgagcagactctgagaagtatcattgcttgtgttgaaagaatacaacaggatttaagtttctctttagaaattgcactgaagaaaggccgggcgcggtggctccccctgtaatcccagcgctttgggaggccgaggcggggggatcacgaggtcaagagatcgagaccatcctggccaacatggtgaaaccccgtctctaataaaaatacaaaaattagccgggcatggtgacgtgcacctgtagtcccagctactagataggctgaggcaggagaattgcttgaatccgggaggcggaggttgcagtgagccgagatcgtgccactgaactccaacctgccaatagagcgagactccgtctca

SEQ ID NO: 13223 - DNA, 3260 bp, Homo sapiens
aaagaaatagcattgaagaaaataccgcacatcagaggaaagcttattttctgcatggtgtcttttcaaagatagaatatttgaagcatgttttctagcgattgtgtggatgagggtgagctggctgaggcatcgctcaagctggggggtggtgtgtaagaagcacgtggagccacaagaggcacctcctatagtcagctaagggcttccctttctgcacccagcttttgggtgaagggtgatttctattagacacatctgtgcttcagtcatagatgttaatagaggaagcagttttcctgctgcagattcctgaatagagttgctgaaagagtctacttctggactcaggggaagttgaaggccagtctgtgtagaaaggctgaggcaacggggaaagacctgacagctagttacatacgctctgacatagtactcccatgatggcttccagtgacacatgtgctgatagaattctaaacctctggaatttccctgctggcgacttctatggccgttgactgtacagggtaacctgatgccagatgctatgggcgtgatgagaactagagcattgcagcatgggggaaactgtgaggcaccagatcctgtgcttctgcaggccattttctgaaaacccctgttaggaaggttggatttggcgtgacttgcttgagcaagagtcctggggagagattttgaggtttaatttaacggtatatccagagctaacagtgactcaactcgtctagttctgcaagtcagatgtacacttagagtctctctgtgaagggtttgggtctgagctgtatagtatgtccatccatttttttttaataaaagatcctcagctacagtctttccattttccttgcttctcttattgcacacccccagcccattttgcttctctcttggattttgttttttcagatccacatttattgggtttcctgtccagcttcttggaaaggagctcactcttggaaagactgatctttccaaaatattttccctggtctgaagctttggtgtgaacttctcaaggcttagagaatccagttacagaccttttggggttcaggatgctatagattgacaccctcctgcctgtttttctctgcatcccaacctggccaaggcccctcctgtggggtgcccatctgtgcctttattccggctgtgccctcgactttccagcttcccatgtttctttggttaggtttctctcccttccttctttctccttccccaatccgcctgtttcgtcagggcccagtttgtttcctcatacaccttcctcactaccccaccccacatggttgactctttccctcagctccaccagctcttcatcatgccactcatttcagaacttgagcaaaacagggcagtcaggatctgatgtctttctggtctccctaagaaaactaagctcttgagggacagcccttggcaatgctttcctatctgctgagcatggtgaccttccttaggacttccagagttcagttccttctggcagagaggttttctttctccatgccatatggatgtgactcaaatgaggggtcccacagcttttcctggctaccacttgctgtgaccttatacatgttggggtttgctcttaaagaggagagcaggaagaaaggttggtttcagaaaccaagagggtcggcagtggacgcgtacattttgtcacggagtccacagagctgagcttttgagcagactctgagaagtatcattgcttgtgttgaaagaatacaacaggatttaagtttctctttagaaattgcactgaagaaaggccgggcgcggtggctccccctgtaatcccagcgctttgggaggccgaggcggggggatcacgaggtcaagagatcgagaccatcctggccaacatggtgaaaccccgtctctaataaaaatacaaaaattagccgggcatggtgacgtgcacctgtagtcccagctactagataggctgaggcaggagaattgcttgaatccgggaggcggaggttgcagtgagccgagatcgtgccactgaactccaacctgccaatagagcgagactccgtctcaaaaaaaaaaaaaaaaaagaaagaaatagcattgaagaaaataccgcacatcagaggaaagcttattttctgcatggtgtcttttcaaagatagaatatttgaagcatgttttctagcgattgtgtgaatgagggtgagctggctgaggcatcgctcaagctggggggtggtgtgtaagaagcacgtggagccacaagaggcacctcctatagtcagctaagggcttccctttctgcgcccagcttttgggtgaagggtgatttctactagacacatctgtgcttcagtcatagatgttaatagaggaagcagttttcctgctgcagattcctgaatagagttgctgaaagagtctacttctggactcaggggaagttgaaggccagtctgtgtagaaaggctgaggcaacggggaaagacctgacagctagttacatacgctctgacatagtactcccatgatggcttccagtgacacatgtgctgatagaattctaaacctctggaatttccctgctggcgacttctatggccgttgactgtacagggtaacctgatgccagatgctatgggcgtgatgagaactagagcattgcagcatggaggaaactgtgaggcaccagatcctgtgcttctgcaggccattttctgaaaacccctgttaggaaggttggatttggcgtgacttgcttgagcaagagtcctggggagagattttgaggtttaatttaacggtatatccagagctaacagtgactcaactcgtctagttctgcaagtcagatgtacacttagagtctctctgtgaagggtttgggtctgagctgtatagtatgtcaaactgccagtaagccagcccctcaccctctgatagatattcctttaatgcaccagacttcatgtttgataaatgattaatggttgaaattgtttctcttcttttgtgttttcccagttaatagatggtcactgtttccacaatgttttatactttcagctttttgtaacttaactataattacttaattttatttttttaaagcttgttgtggtctaatgagaagtatttttcagtgcataatgtttttctgagcttctgtaaatgccatcccaatgtggtttggttttgttgaacagaaaccaaaataaatttcaaaatgttaaagcaa

SEQ ID NO: 13224 - DNA, 4519 bp, Homo sapiens
gattatcccaatatggggagaaaataaatatgcatagaggaaaagagaaatacactaattaagaagggaaagagtcctttttttttttttttaacaaaactaaatggaaacataataaactaatgtaagcggtaacctgtggaggagtaggaagacttttctaaagtctgtttactttaaaatccggttttcatttctgaaacattataatgtattatctattcaaaaacatcaaatgtttagagggcagacaatacactaaaacattaatagtgattatcccggaagggtaggagtcaggctttgttttctgcttctgtatcagaaaaaggatgcactttttggaaaagatgtttggcgacctggaaggacaccgtctccgtggagtcgggaaggaggagggccaggatgcgaaggcaacgctttgcaggtgatcggatggatttattcccacatgggagagaccagagcacagcacgtttgtgtacggccaggagggaaccacgaaaaaagcagaggatagaaacgcaagcacacgatggtggtggccaagaggagcctgcccctagtgacctcacttccgcggccagtgcgagaggcgagggagctccagctctgcctgtaaggtctcggaagtacgaggcggaggggacgaaaaacggggggccagactgttgtggctgtggtggagacgagaaaccaggaagaagaggctcgcttcccactcggcgaccgtaagcgaagcagccgaaggcgagcgccgacatcagcagctgccccctaaatcccgcccttcgtcttggcggcagcgggagactgagagacgcgcgcagcaggggcgggactggagaggggccccgcgcgcggatctcgcgagagcattagagggcggaagcgctatccgagcaggatgcggttcgtggttgccttggtcctcctgaacgtcgcagcggcgggagccgtgccgctcttggccaccgaaagcgtcaagcaagaagaagctggagtacggccttctgcaggaaacgtctccacccaccccagcttgagccaacggcctggaggctctaccaagtcgcatccggagccgcagactccaaaagacagccctagcaagtcgagtgcggaggcgcagaccccagaagacacccccaacaagtcgggtgcggaggcaaagacccaaaaagacagctccaacaagtcgggtgcggaggcaaagacccaaaaaggcagcactagcaagtcgggttcggaggcgcagaccacaaaagacagcactagtaagtcgcatccggagctgcagactccaaaagacagcactggcaaatcgggtgcggaggcgcagaccccagaagacagccccaacaggtcgggtgcggaggcaaagacccaaaaagacagccctagcaagtcaggttcggaggcgcagaccacaaaagatgtccctaataagtcgggtgcggacggccagaccccaaaagacggctccagcaagtcgggtgcggaggatcagaccccaaaagacgtccctaacaagtcgggtgcggagaagcagactccaaaagacggctctaacaagtccggtgcagaggagcagggcccaatagacgggcccagcaagtcgggtgcggaggagcagacctcaaaagacagccctaacaaggtggttccagagcagccttcccggaaagaccattccaagcccatctccaacccttctgataacaaggagctccccaaggctgacacaaaccagcttgctgacaaagggaagctttctcctcatgctttcaaaaccgaatctggggaggaaactgacctcatttctcccccgcaggaggaagttaagtcttcagagcctactgaggatgtggagcccaaagaggctgaagatgatgatacaggacccgaggagggctcaccgcccaaagaagagaaagaaaagatgtccggttctgcctccagtgagaaccgtgaaggaacactttcggattccacgggtagcgagaaggatgacctttatccgaacggttctggaaatggcagcgcggagagcagccacttctttgcatatctggtgactgcagccattcttgtggctgtcctctatatcgctcatcacaacaagcggaagatcattgcttttgtcctggaaggaaaaagatctaaagtcacccggcggccaaaggccagtgactaccaacgtttggaccagaagtcctaacagaatggtatattcctctggaaaaagatgaacgtcaccaatggattgtgctgctctcgtttcagctttgatttttttgtccttgagaaccttgtcctccctgctgatttgtttctaaatcaaaagaaatgaagaaaaaagtactgtgacctgagagacaccctcctctagaatttagtggcgggtctgggctggcagaggtagggggctgctttgggctttgcacctgcactttggtgacattgttcttctgtgttccctttatttatgctggtggcttccatccgttcctcctctgagggtgagtggaggggtatatggaaacacggctatgaccaaagggagatcccagcctgggcaggctgcgctgctgaccaccctccctggggcccgggctctgtaggaaagttggtccttgactgtggcattgcactctgcactgtttctctctgcagacctaggggaaaactgcaggtggaagtgcttttctactaaggcctcttactttgggggggatgtgccctacagaagacatagaagatggggaaatgccaatgggcaaagagctactttgaatacataattctcttcaaagacttcagcagcaaaccaaaacagcaggttaaaaaaaaagatgcttttttgggtgcaagtctaacctgtctagcatgagatcttcttgattttctgattattttatgtagcttgagacaaagtgaatcaacttccacttagttgtaccgagcataaaacagaacttgggcttcctggcagtgaggccactgtcccatcacagatttttaaaataaatatgatttgaagtagtgtgatctttcacacaatcatactcagtaggaactttttgaaatagggcaagtttatgtttcatgcgagaaaacatgaaggagggttttggttttggtctgcagtttttccaaagggcttttatgagatacatttcccacaaagtccattttgcctttgttgcctaaaacagacaaaatagacttagatttattaatagaaactatactctctgccaattttacctcagtgtatttaatggtcctttaatctgatataagatgccaagggtatttgataaaaattcttcttccatgccatgtcaggagttaatacaaatgaagaaattccgtgggttcccctgggataagtgagggtagtgtcttggacaacactattgtttgaaggtttatctcttctaatcatgctctaccgcattgtagagagcctaaagagagttgtttctgagctgatctcagggaaatacaaataacttgggagatgagggaaataagatgaattctgtgctgtcaaggcagtaagtctgaagaaaggaccatgcttcttatattatcttccaccttgcttaaaacagcccatagctttgagttgacattttcattcttggcggatagcctactttatgaaggtaaggaatgaactcctacccttcttgggtcattctctgtactgatgcgttagtcttataatactttgcaccaacctgaggaatcttctaggcttctctagcatcccctaagactgtggctatttcacgtctctctccctgcctgccttccttttcccttcctttcccctcctcatgttttctggttgtgcccatctgtaccagctcctttccatccaccttcgtatgcacccagatttttctgttcccatctgtcctatttgttattcatcccgctgctcaacttctccagtatgttgcttcccttaagttgccattcattctcttcatgactttactaactcacttcggtctctgtctgtcaactaaacttttctaaaggttaccagttatccaatcaccaaatccatggctttttctcaaagcttagtcttgtccttggcagaactggacactattgaccatccaaatggaaattcccctttcttggtgtctctgacaaatggtcctttgccttatcttgtgctggtggtgaagaggccctcaaagccaggcctctctattcctttgactgtctcctcagccattaacccattcttcatcctcggagtgagtgattcccaagtctttgtcttggcttaatccctaaagaacccagttctgctggtatcgaatagttcagcttggttgtcattgaaaggaatttctctcttctgtccatcagcctgtccctcccaactgtctaggacagtcttcggtcacctaaattcctaactgcagacttttgccctttttctctctcatcaccaaagtccgttccgttaaccctcgggtctctagac

SEQ ID NO: 13225 - DNA, 1854 bp, Homo sapiens
ggacgcgtgggtcgaacccacgcgtcggaccacgcgtgcgcagcccttggcaatgctttcctatctgctgagcatggtgaccttccttaggacttccagagttcagttccttctggcagagaggttttctttctccatgccatatggatgtgactcaaatgaggggtcccacagcttttcctggctaccacttgctgtgaccttatacatgttggggtttgctcttaaagaggagagcaggaagaaaggttggtttcagaaaccaagagggtcggcagtggacgcgtacattttgtcacggagtccacagagctgagcttttgagcagactctgagaagtatcattgcttgtgttgaaagaatacaacaggatttaagtttctctttagaaattgcactgaagaaaggccgggcgcggtggctccccctgtaatcccagcgctttgggaggccgaggcggggggatcacgaggtcaagagatcgagaccatcctggccaacatggtgaaaccccgtctctaataaaaatacaaaaattagccgggcatggtgacgtgcacctgtagtcccagctactagataggctgaggcaggagaattgcttgaatccgggaggcggaggttgcagtgagccgagatcgtgccactgaactccaacctgccaatagagcgagactccgtctcaaaaaaaaaaaaaaaaaagaaagaaatagcattgaagaaaataccgcacatcagaggaaagcttattttctgcatggtgtcttttcaaagatagaatatttgaagcatgttttctagcgattgtgtgaatgagggtgagctggctgaggcatcgctcaagctggggggtggtgtgtaagaagcacgtggagccacaagaggcacctcctatagtcagctaagggcttccctttctgcgcccagcttttgggtgaagggtgatttctactagacacatctgtgcttcagtcatagatgttaatagaggaagcagttttcctgctgcagattcctgaatagagttgctgaaagagtctacttctggactcaggggaagttgaaggccagtctgtgtagaaaggctgaggcaacggggaaagacctgacagctagttacatacgctctgacatagtactcccatgatggcttccagtgacacatgtgctgatagaattctaaacctctggaatttccctgctggcgacttctatggccgttgactgtacagggtaacctgatgccagatgctatgggcgtgatgagaactagagcattgcagcatggaggaaactgtgaggcaccagatcctgtgcttctgcaggccattttctgaaaacccctgttaggaaggttggatttggcgtgacttgcttgagcaagagtcctggggagagattttgaggtttaatttaacggtatatccagagctaacagtgactcaactcgtctagttctgcaagtcagatgtacacttagagtctctctgtgaagggtttgggtctgagctgtatagtatgtcaaactgccagtaagccagcccctcaccctctgatagatattcctttaatgcaccagacttcatgtttgataaatgattaatggttgaaattgtttctcttcttttgtgttttcccagttaatagatggtcactgtttccacaatgttttatactttcagctttttgtaacttaactataattacttaattttatttttttaaagcttgttgtggtctaatgagaagtatttttcagtgcataatgtttttctgagcttctgtaaatgccatcccaatgtggtttggttttgttgaacagaaaccaaaataaatttcaaaatgttaaagcaa

SEQ ID NO: 13226 - DNA, 1707 bp, Homo sapiens
gcggggttcgcggcccgtcgaccacagcttttcctggctaccacttgctgtgaccttatacatgttggggtttgctcttaaagaggagagcaggaagaaaggttggtttcagaaaccaagagggtcggcagtggacgcgtacattttgtcacggagtccacagagctgagcttttgagcagactctgagaagtatcattgcttgtgttgaaagaatacaacaggatttaagtttctctttagaaattgcactgaagaaaggccgggcgcggtggctccccctgtaatcccagcgctttgggaggccgaggcggggggatcacgaggtcaagagatcgagaccatcctggccaacatggtgaaaccccgtctctaataaaaatacaaaaattagccgggcatggtgacgtgcacctgtagtcccagctactagataggctgaggcaggagaattgcttgaatccgggaggcggaggttgcagtgagccgagatcgtgccactgaactccaacctgccaatagagcgagactccgtctcaaaaaaaaaaaaaaaaaagaaagaaatagcattgaagaaaataccgcacatcagaggaaagcttattttctgcatggtgtcttttcaaagatagaatatttgaagcatgttttctagcgattgtgtgaatgagggtgagctggctgaggcatcgctcaagctggggggtggtgtgtaagaagcacgtggagccacaagaggcacctcctatagtcagctaagggcttccctttctgcgcccagcttttgggtgaagggtgatttctactagacacatctgtgcttcagtcatagatgttaatagaggaagcagttttcctgctgcagattcctgaatagagttgctgaaagagtctacttctggactcaggggaagttgaaggccagtctgtgtagaaaggctgaggcaacggggaaagacctgacagctagttacatacgctctgacatagtactcccatgatggcttccagtgacacatgtgctgatagaattctaaacctctggaatttccctgctggcgacttctatggccgttgactgtacagggtaacctgatgccagatgctatgggcgtgatgagaactagagcattgcagcatggaggaaactgtgaggcaccagatcctgtgcttctgcaggccattttctgaaaacccctgttaggaaggttggatttggcgtgacttgcttgagcaagagtcctggggagagattttgaggtttaatttaacggtatatccagagctaacagtgactcaactcgtctagttctgcaagtcagatgtacacttagagtctctctgtgaagggtttgggtctgagctgtatagtatgtcaaactgccagtaagccagcccctcaccctctgatagatattcctttaatgcaccagacttcatgtttgataaatgattaatggttgaaattgtttctcttcttttgtgttttcccagttaatagatggtcactgtttccacaatgttttatactttcagctttttgtaacttaactataattacttaattttatttttttaaagcttgttgtggtctaatgagaagtatttttcagtgcataatgtttttctgagcttctgtaaatgccatcccaatgtggtttggttttgttgaacagaaaccaaaataaatttcaaaatgttaaagcaa

SEQ ID NO: 13227 - DNA, 938 bp, Homo sapiens
gcgactatagagcatccccgaacgggtgatttctactagacacatctgtgcttcagtcatagatgttaatagaggaagcagttttcctgctgcagattcctgaatagagttgctgaaagagtctacttctggactcaggggaagttgaaggccagtctgtgtagaaaggctgaggcaacggggaaagacctgacagctagttacatacgctctgacatagtactcccatgatggcttccagtgacacatgtgctgatagaattctaaacctctggaatttccctgctggcgacttctatggccgttgactgtacagggtaacctgatgccagatgctatgggcgtgatgagaactagagcattgcagcatggaggaaactgtgaggcaccagatcctgtgcttctgcaggccattttctgaaaacccctgttaggaaggttggatttggcgtgacttgcttgagcaagagtcctggggagagattttgaggtttaatttaacggtatatccagagctaacagtgactcaactcgtctagttctgcaagtcagatgtacacttagagtctctctgtgaagggtttgggtctgagctgtatagtatgtcaaactgccagtaagccagcccctcaccctctgatagatattcctttaatgcaccagacttcatgtttgataaatgattaatggttgaaattgtttctcttcttttgtgttttcccagttaatagatggtcactgtttccacaatgttttatactttcagctttttgtaacttaactataattacttaattttatttttttaaagcttgttgtggtctaatgagaagtatttttcagtgcataatgtttttctgagcttctgtaaatgccatcccaatgtggtttggttttgttgaacagaaaccaaaataaatttcaaaatgttaaagcaa

SEQ ID NO: 13228 - DNA, 768 bp, Homo sapiens
tgccatttactccatggcgcaatgctctagttacatacgctctgacatagtactcccatgatggcttccagtgacacatgtgctgatagaattctaaacctctggaatttccctgctggcgacttctatggccgttgactgtacagggtaacctgatgccagatgctatgggcgtgatgagaactagagcattgcagcatggaggaaactgtgaggcaccagatcctgtgcttctgcaggccattttctgaaaacccctgttaggaaggttggatttggcgtgacttgcttgagcaagagtcctggggagagattttgaggtttaatttaacggtatatccagagctaacagtgactcaactcgtctagttctgcaagtcagatgtacacttagagtctctctgtgaagggtttgggtctgagctgtatagtatgtcaaactgccagtaagccagcccctcaccctctgatagatattcctttaatgcaccagacttcatgtttgataaatgattaatggttgaaattgtttctcttcttttgtgttttcccagttaatagatggtcactgtttccacaatgttttatactttcagctttttgtaacttaactataattacttaattttatttttttaaagcttgttgtggtctaatgagaagtatttttcagtgcataatgtttttctgagcttctgtaaatgccatcccaatgtggtttggttttgttgaacagaaaccaaaataaatttcaaaatgttaaagcaa

SEQ ID NO: 13229 - DNA, 1706 bp, Homo sapiens
gattatcccaatatggggagaaaataaatatgcatagaggaaaagagaaatacactaattaagaagggaaagagtcctttttttttttttttaacaaaactaaatggaaacataataaactaatgtaagcggtaacctgtggaggagtaggaagacttttctaaagtctgtttactttaaaatccggttttcatttctgaaacattataatgtattatctattcaaaaacatcaaatgtttagagggcagacaatacactaaaacattaatagtgattatcccggaagggtaggagtcaggctttgttttctgcttctgtatcagaaaaaggatgcactttttggaaaagatgtttggcgacctggaaggacaccgtctccgtggagtcgggaaggaggagggccaggatgcgaaggcaacgctttgcaggtgatcggatggatttattcccacatgggagagaccagagcacagcacgtttgtgtacggccaggagggaaccacgaaaaaagcagaggatagaaacgcaagcacacgatggtggtggccaagaggagcctgcccctagtgacctcacttccgcggccagtgcgagaggcgagggagctccagctctgcctgtaaggtctcggaagtacgaggcggaggggacgaaaaacggggggccagactgttgtggctgtggtggagacgagaaaccaggaagaagaggctcgcttcccactcggcgaccgtaagcgaagcagccgaaggcgagcgccgacatcagcagctgccccctaaatcccgcccttcgtcttggcggcagcgggagactgagagacgcgcgcagcaggggcgggactggagaggggccccgcgcgcggatctcgcgagagcattagagggcggaagcgctatccgagcaggatgcggttcgtggttgccttggtcctcctgaacgtcgcagcggcgggagccgtgccgctcttggccaccgaaagcgtcaagcaagaagaagctggagtacggccttctgcaggaaacgtctccacccaccccagcttgagccaacggcctggaggctctaccaagtcgcatccggagccgcagactccaaaagacagccctagcaagtcgagtgcggaggcgcagaccccagaagacacccccaacaagtcgggtgcggaggcaaagacccaaaaagacagctccaacaagtcgggtgcggaggcaaagacccaaaaaggcagcactagcaagtcgggttcggaggcgcagaccacaaaagacagcactagtaagtcgcatccggagctgcagactccaaaagacagcactggcaaatcgggtgcggaggcgcagaccccagaagacagccccaacaggtcgggtgcggaggcaaagacccaaaaagacagccctagcaagtcaggttcggaggcgcagaccacaaaagatgtccctaataagtcgggtgcggacggccagaccccaaaagacggctccagcaagtcgggtgcggaggatcagaccccaaaagacgtccctaacaagtcgggtgcggagaagcagactccaaaagacggctctaacaagtccggtgcagaggagcagggcccaatagacgggcccagcaagtcgggtgcggaggagcagacactccagaccagacagtctctcaactcgaatgatttcatgacaccactgcccagtaaacattcag

SEQ ID NO: 13230 - DNA, 401 bp, Homo sapiens
gagcaagactccgtctcaaaaaagaagaaaaccaccaccaacaaaaaacacatgtaaataattcacaacagtacagaacagtatgaagcagaagccaggattcctctctctccatcaagtgtatatctttctagtgttaggtttcatttcaaactttaaaaatcattttgtgtgctattttaattaattgctgtttctgtggtggtgggtcagtatgtcttaattctgaatgttttccctgcacctcctaaaagatcttttctcccctcctaacagaatggtatattcctctggaaaaagatgaacgtcaccaatggattgtgctgctctcgtttcagctttgatttttttgtccttgagaaccttgtcctccctgctgatttgtttctaaatcaaaagaa

SEQ ID NO: 13231 - DNA, 6986 bp, Homo sapiens
gattatcccaatatggggagaaaataaatatgcatagaggaaaagagaaatacactaattaagaagggaaagagtcctttttttttttttttaacaaaactaaatggaaacataataaactaatgtaagcggtaacctgtggaggagtaggaagacttttctaaagtctgtttactttaaaatccggttttcatttctgaaacattataatgtattatctattcaaaaacatcaaatgtttagagggcagacaatacactaaaacattaatagtgattatcccggaagggtaggagtcaggctttgttttctgcttctgtatcagaaaaaggatgcactttttggaaaagatgtttggcgacctggaaggacaccgtctccgtggagtcgggaaggaggagggccaggatgcgaaggcaacgctttgcaggtgatcggatggatttattcccacatgggagagaccagagcacagcacgtttgtgtacggccaggagggaaccacgaaaaaagcagaggatagaaacgcaagcacacgatggtggtggccaagaggagcctgcccctagtgacctcacttccgcggccagtgcgagaggcgagggagctccagctctgcctgtaaggtctcggaagtacgaggcggaggggacgaaaaacggggggccagactgttgtggctgtggtggagacgagaaaccaggaagaagaggctcgcttcccactcggcgaccgtaagcgaagcagccgaaggcgagcgccgacatcagcagctgccccctaaatcccgcccttcgtcttggcggcagcgggagactgagagacgcgcgcagcaggggcgggactggagaggggccccgcgcgcggatctcgcgagagcattagagggcggaagcgctatccgagcaggatgcggttcgtggttgccttggtcctcctgaacgtcgcagcggcgggagccgtgccgctcttggccaccgaaagcgtcaagcaagaagaagctggagtacggccttctgcaggaaacgtctccacccaccccagcttgagccaacggcctggaggctctaccaagtcgcatccggagccgcagactccaaaagacagccctagcaagtcgagtgcggaggcgcagaccccagaagacacccccaacaagtcgggtgcggaggcaaagacccaaaaagacagctccaacaagtcgggtgcggaggcaaagacccaaaaaggcagcactagcaagtcgggttcggaggcgcagaccacaaaagacagcactagtaagtcgcatccggagctgcagactccaaaagacagcactggcaaatcgggtgcggaggcgcagaccccagaagacagccccaacaggtcgggtgcggaggcaaagacccaaaaagacagccctagcaagtcaggttcggaggcgcagaccacaaaagatgtccctaataagtcgggtgcggacggccagaccccaaaagacggctccagcaagtcgggtgcggaggatcagaccccaaaagacgtccctaacaagtcgggtgcggagaagcagactccaaaagacggctctaacaagtccggtgcagaggagcagggcccaatagacgggcccagcaagtcgggtgcggaggagcagacctcaaaagacagccctaacaaggtggttccagagcagccttcccggaaagaccattccaagcccatctccaacccttctgataacaaggagctccccaaggctgacacaaaccagcttgctgacaaagggaagctttctcctcatgctttcaaaaccgaatctggggaggaaactgacctcatttctcccccgcaggaggaagttaagtcttcagagcctactgaggatgtggagcccaaagaggctgaagatgatgatacaggacccgaggagggctcaccgcccaaagaagagaaagaaaagatgtccggttctgcctccagtgagaaccgtgaaggaacactttcggattccacgggtagcgagaaggatgacctttatccgaacggttctggaaatggcagcgcggagagcagccacttctttgcatatctggtgactgcagccattcttgtggctgtcctctatatcgctcatcacaacaagcggaagatcattgcttttgtcctggaaggaaaaagatctaaagtcacccggcggccaaaggccagtgactaccaacgtttggaccagaagtatgtcttaattctgaatgttttccctgcacctcctaaaagatcttttctcccctcctaacagaatggtatattcctctggaaaaagatgaacgtcaccaatggattgtgctgctctcgtttcagctttgatttttttgtccttgagaaccttgtcctccctgctgatttgtttctaaatcaaaagaaatgaagaaaaaagtactgtgacctgagagacaccctcctctagaatttagtggcgggtctgggctggcagaggtagggggctgctttgggctttgcacctgcactttggtgacattgttcttctgtgttccctttatttatgctggtggcttccatccgttcctcctctgagggtgagtggaggggtatatggaaacacggctatgaccaaagggagatcccagcctgggcaggctgcgctgctgaccaccctccctggggcccgggctctgtaggaaagttggtccttgactgtggcattgcactctgcactgtttctctctgcagacctaggggaaaactgcaggtggaagtgcttttctactaaggcctcttactttgggggggatgtgccctacagaagacatagaagatggggaaatgccaatgggcaaagagctactttgaatacataattctcttcaaagacttcagcagcaaaccaaaacagcaggttaaaaaaaaagatgcttttttgggtgcaagtctaacctgtctagcatgagatcttcttgattttctgattattttatgtagcttgagacaaagtgaatcaacttccacttagttgtaccgagcataaaacagaacttgggcttcctggcagtgaggccactgtcccatcacagatttttaaaataaatatgatttgaagtagtgtgatctttcacacaatcatactcagtaggaactttttgaaatagggcaagtttatgtttcatgcgagaaaacatgaaggagggttttggttttggtctgcagtttttccaaagggcttttatgagatacatttcccacaaagtccattttgcctttgttgcctaaaacagacaaaatagacttagatttattaatagaaactatactctctgccaattttacctcagtgtatttaatggtcctttaatctgatataagatgccaagggtatttgataaaaattcttcttccatgccatgtcaggagttaatacaaatgaagaaattccgtgggttcccctgggataagtgagggtagtgtcttggacaacactattgtttgaaggtttatctcttctaatcatgctctaccgcattgtagagagcctaaagagagttgtttctgagctgatctcagggaaatacaaataacttgggagatgagggaaataagatgaattctgtgctgtcaaggcagtaagtctgaagaaaggaccatgcttcttatattatcttccaccttgcttaaaacagcccatagctttgagttgacattttcattcttggcggatagcctactttatgaaggtaaggaatgaactcctacccttcttgggtcattctctgtactgatgcgttagtcttataatactttgcaccaacctgaggaatcttctaggcttctctagcatcccctaagactgtggctatttcacgtctctctccctgcctgccttccttttcccttcctttcccctcctcatgttttctggttgtgcccatctgtaccagctcctttccatccaccttcgtatgcacccagatttttctgttcccatctgtcctatttgttattcatcccgctgctcaacttctccagtatgttgcttcccttaagttgccattcattctcttcatgactttactaactcacttcggtctctgtctgtcaactaaacttttctaaaggttaccagttatccaatcaccaaatccatggctttttctcaaagcttagtcttgtccttggcagaactggacactattgaccatccaaatggaaattcccctttcttggtgtctctgacaaatggtcctttgccttatcttgtgctggtggtgaagaggccctcaaagccaggcctctctattcctttgactgtctcctcagccattaacccattcttcatcctcggagtgagtgattcccaagtctttgtcttggcttaatccctaaagaacccagttctgctggtatcgaatagttcagcttggttgtcattgaaaggaatttctctcttctgtccatcagcctgtccctcccaactgtctaggacagtcttcggtcacctaaattcctaactgcagacttttgccctttttctctctcatcaccaaagtcccatccatttttttttaataaaagatcctcagctacagtctttccattttccttgcttctcttattgcacacccccagcccattttgcttctctcttggattttgttttttcagatccacatttattgggtttcctgtccagcttcttggaaaggagctcactcttggaaagactgatctttccaaaatattttccctggtctgaagctttggtgtgaacttctcaaggcttagagaatccagttacagaccttttggggttcaggatgctatagattgacaccctcctgcctgtttttctctgcatcccaacctggccaaggcccctcctgtggggtgcccatctgtgcctttattccggctgtgccctcgactttccagcttcccatgtttctttggttaggtttctctcccttccttctttctccttccccaatccgcctgtttcgtcagggcccagtttgtttcctcatacaccttcctcactaccccaccccacatggttgactctttccctcagctccaccagctcttcatcatgccactcatttcagaacttgagcaaaacagggcagtcaggatctgatgtctttctggtctccctaagaaaactaagctcttgagggacagcccttggcaatgctttcctatctgctgagcatggtgaccttccttaggacttccagagttcagttccttctggcagagaggttttctttctccatgccatatggatgtgactcaaatgaggggtcccacagcttttcctggctaccacttgctgtgaccttatacatgttggggtttgctcttaaagaggagagcaggaagaaaggttggtttcagaaaccaagagggtcggcagtggacgcgtacattttgtcacggagtccacagagctgagcttttgagcagactctgagaagtatcattgcttgtgttgaaagaatacaacaggatttaagtttctctttagaaattgcactgaagaaaggccgggcgcggtggctccccctgtaatcccagcgctttgggaggccgaggcggggggatcacgaggtcaagagatcgagaccatcctggccaacatggtgaaaccccgtctctaataaaaatacaaaaattagccgggcatggtgacgtgcacctgtagtcccagctactagataggctgaggcaggagaattgcttgaatccgggaggcggaggttgcagtgagccgagatcgtgccactgaactccaacctgccaatagagcgagactccgtctcaaaaaaaaaaaaaaaaaagaaagaaatagcattgaagaaaataccgcacatcagaggaaagcttattttctgcatggtgtcttttcaaagatagaatatttgaagcatgttttctagcgattgtgtgaatgagggtgagctggctgaggcatcgctcaagctggggggtggtgtgtaagaagcacgtggagccacaagaggcacctcctatagtcagctaagggcttccctttctgcgcccagcttttgggtgaagggtgatttctactagacacatctgtgcttcagtcatagatgttaatagaggaagcagttttcctgctgcagattcctgaatagagttgctgaaagagtctacttctggactcaggggaagttgaaggccagtctgtgtagaaaggctgaggcaacggggaaagacctgacagctagttacatacgctctgacatagtactcccatgatggcttccagtgacacatgtgctgatagaattctaaacctctggaatttccctgctggcgacttctatggccgttgactgtacagggtaacctgatgccagatgctatgggcgtgatgagaactagagcattgcagcatggaggaaactgtgaggcaccagatcctgtgcttctgcaggccattttctgaaaacccctgttaggaaggttggatttggcgtgacttgcttgagcaagagtcctggggagagattttgaggtttaatttaacggtatatccagagctaacagtgactcaactcgtctagttctgcaagtcagatgtacacttagagtctctctgtgaagggtttgggtctgagctgtatagtatgtcaaactgccagtaagccagcccctcaccctctgatagatattcctttaatgcaccagacttcatgtttgataaatgattaatggttgaaattgtttctcttcttttgtgttttcccagttaatagatggtcactgtttccacaatgttttatactttcagctttttgtaacttaactataattacttaattttatttttttaaagcttgttgtggtctaatgagaagtatttttcagtgcataatgtttttctgagcttctgtaaatgccatcccaatgtggtttggttttgttgaacagaaaccaaaataaatttcaaaatgttaaagcaa

SEQ ID NO: 13232 - DNA, 6758 bp, Homo sapiens
gattatcccaatatggggagaaaataaatatgcatagaggaaaagagaaatacactaattaagaagggaaagagtcctttttttttttttttaacaaaactaaatggaaacataataaactaatgtaagcggtaacctgtggaggagtaggaagacttttctaaagtctgtttactttaaaatccggttttcatttctgaaacattataatgtattatctattcaaaaacatcaaatgtttagagggcagacaatacactaaaacattaatagtgattatcccggaagggtaggagtcaggctttgttttctgcttctgtatcagaaaaaggatgcactttttggaaaagatgtttggcgacctggaaggacaccgtctccgtggagtcgggaaggaggagggccaggatgcgaaggcaacgctttgcaggtgatcggatggatttattcccacatgggagagaccagagcacagcacgtttgtgtacggccaggagggaaccacgaaaaaagcagaggatagaaacgcaagcacacgatggtggtggccaagaggagcctgcccctagtgacctcacttccgcggccagtgcgagaggcgagggagctccagctctgcctgtaaggtctcggaagtacgaggcggaggggacgaaaaacggggggccagactgttgtggctgtggtggagacgagaaaccaggaagaagaggctcgcttcccactcggcgaccgtaagcgaagcagccgaaggcgagcgccgacatcagcagctgccccctaaatcccgcccttcgtcttggcggcagcgggagactgagagacgcgcgcagcaggggcgggactggagaggggccccgcgcgcggatctcgcgagagcattagagggcggaagcgctatccgagcaggatgcggttcgtggttgccttggtcctcctgaacgtcgcagcggcgggagccgtgccgctcttggccaccgaaagcgtcaagcaagaagaagctggagtacggccttctgcaggaaacgtctccacccaccccagcttgagccaacggcctggaggctctaccaagtcgcatccggagccgcagactccaaaagacagccctagcaagtcgagtgcggaggcgcagaccccagaagacacccccaacaagtcgggtgcggaggcaaagacccaaaaagacagctccaacaagtcgggtgcggaggcaaagacccaaaaaggcagcactagcaagtcgggttcggaggcgcagaccacaaaagacagcactagtaagtcgcatccggagctgcagactccaaaagacagcactggcaaatcgggtgcggaggcgcagaccccagaagacagccccaacaggtcgggtgcggaggcaaagacccaaaaagacagccctagcaagtcaggttcggaggcgcagaccacaaaagatgtccctaataagtcgggtgcggacggccagaccccaaaagacggctccagcaagtcgggtgcggaggatcagaccccaaaagacgtccctaacaagtcgggtgcggagaagcagactccaaaagacggctctaacaagtccggtgcagaggagcagggcccaatagacgggcccagcaagtcgggtgcggaggagcagacctcaaaagacagccctaacaaggaggaagttaagtcttcagagcctactgaggatgtggagcccaaagaggctgaagatgatgatacaggacccgaggagggctcaccgcccaaagaagagaaagaaaagatgtccggttctgcctccagtgagaaccgtgaaggaacactttcggattccacgggtagcgagaaggatgacctttatccgaacggttctggaaatggcagcgcggagagcagccacttctttgcatatctggtgactgcagccattcttgtggctgtcctctatatcgctcatcacaacaagcggaagatcattgcttttgtcctggaaggaaaaagatctaaagtcacccggcggccaaaggccagtgactaccaacgtttggaccagaagtcctaacagaatggtatattcctctggaaaaagatgaacgtcaccaatggattgtgctgctctcgtttcagctttgatttttttgtccttgagaaccttgtcctccctgctgatttgtttctaaatcaaaagaaatgaagaaaaaagtactgtgacctgagagacaccctcctctagaatttagtggcgggtctgggctggcagaggtagggggctgctttgggctttgcacctgcactttggtgacattgttcttctgtgttccctttatttatgctggtggcttccatccgttcctcctctgagggtgagtggaggggtatatggaaacacggctatgaccaaagggagatcccagcctgggcaggctgcgctgctgaccaccctccctggggcccgggctctgtaggaaagttggtccttgactgtggcattgcactctgcactgtttctctctgcagacctaggggaaaactgcaggtggaagtgcttttctactaaggcctcttactttgggggggatgtgccctacagaagacatagaagatggggaaatgccaatgggcaaagagctactttgaatacataattctcttcaaagacttcagcagcaaaccaaaacagcaggttaaaaaaaaagatgcttttttgggtgcaagtctaacctgtctagcatgagatcttcttgattttctgattattttatgtagcttgagacaaagtgaatcaacttccacttagttgtaccgagcataaaacagaacttgggcttcctggcagtgaggccactgtcccatcacagatttttaaaataaatatgatttgaagtagtgtgatctttcacacaatcatactcagtaggaactttttgaaatagggcaagtttatgtttcatgcgagaaaacatgaaggagggttttggttttggtctgcagtttttccaaagggcttttatgagatacatttcccacaaagtccattttgcctttgttgcctaaaacagacaaaatagacttagatttattaatagaaactatactctctgccaattttacctcagtgtatttaatggtcctttaatctgatataagatgccaagggtatttgataaaaattcttcttccatgccatgtcaggagttaatacaaatgaagaaattccgtgggttcccctgggataagtgagggtagtgtcttggacaacactattgtttgaaggtttatctcttctaatcatgctctaccgcattgtagagagcctaaagagagttgtttctgagctgatctcagggaaatacaaataacttgggagatgagggaaataagatgaattctgtgctgtcaaggcagtaagtctgaagaaaggaccatgcttcttatattatcttccaccttgcttaaaacagcccatagctttgagttgacattttcattcttggcggatagcctactttatgaaggtaaggaatgaactcctacccttcttgggtcattctctgtactgatgcgttagtcttataatactttgcaccaacctgaggaatcttctaggcttctctagcatcccctaagactgtggctatttcacgtctctctccctgcctgccttccttttcccttcctttcccctcctcatgttttctggttgtgcccatctgtaccagctcctttccatccaccttcgtatgcacccagatttttctgttcccatctgtcctatttgttattcatcccgctgctcaacttctccagtatgttgcttcccttaagttgccattcattctcttcatgactttactaactcacttcggtctctgtctgtcaactaaacttttctaaaggttaccagttatccaatcaccaaatccatggctttttctcaaagcttagtcttgtccttggcagaactggacactattgaccatccaaatggaaattcccctttcttggtgtctctgacaaatggtcctttgccttatcttgtgctggtggtgaagaggccctcaaagccaggcctctctattcctttgactgtctcctcagccattaacccattcttcatcctcggagtgagtgattcccaagtctttgtcttggcttaatccctaaagaacccagttctgctggtatcgaatagttcagcttggttgtcattgaaaggaatttctctcttctgtccatcagcctgtccctcccaactgtctaggacagtcttcggtcacctaaattcctaactgcagacttttgccctttttctctctcatcaccaaagtcccatccatttttttttaataaaagatcctcagctacagtctttccattttccttgcttctcttattgcacacccccagcccattttgcttctctcttggattttgttttttcagatccacatttattgggtttcctgtccagcttcttggaaaggagctcactcttggaaagactgatctttccaaaatattttccctggtctgaagctttggtgtgaacttctcaaggcttagagaatccagttacagaccttttggggttcaggatgctatagattgacaccctcctgcctgtttttctctgcatcccaacctggccaaggcccctcctgtggggtgcccatctgtgcctttattccggctgtgccctcgactttccagcttcccatgtttctttggttaggtttctctcccttccttctttctccttccccaatccgcctgtttcgtcagggcccagtttgtttcctcatacaccttcctcactaccccaccccacatggttgactctttccctcagctccaccagctcttcatcatgccactcatttcagaacttgagcaaaacagggcagtcaggatctgatgtctttctggtctccctaagaaaactaagctcttgagggacagcccttggcaatgctttcctatctgctgagcatggtgaccttccttaggacttccagagttcagttccttctggcagagaggttttctttctccatgccatatggatgtgactcaaatgaggggtcccacagcttttcctggctaccacttgctgtgaccttatacatgttggggtttgctcttaaagaggagagcaggaagaaaggttggtttcagaaaccaagagggtcggcagtggacgcgtacattttgtcacggagtccacagagctgagcttttgagcagactctgagaagtatcattgcttgtgttgaaagaatacaacaggatttaagtttctctttagaaattgcactgaagaaaggccgggcgcggtggctccccctgtaatcccagcgctttgggaggccgaggcggggggatcacgaggtcaagagatcgagaccatcctggccaacatggtgaaaccccgtctctaataaaaatacaaaaattagccgggcatggtgacgtgcacctgtagtcccagctactagataggctgaggcaggagaattgcttgaatccgggaggcggaggttgcagtgagccgagatcgtgccactgaactccaacctgccaatagagcgagactccgtctcaaaaaaaaaaaaaaaaaagaaagaaatagcattgaagaaaataccgcacatcagaggaaagcttattttctgcatggtgtcttttcaaagatagaatatttgaagcatgttttctagcgattgtgtgaatgagggtgagctggctgaggcatcgctcaagctggggggtggtgtgtaagaagcacgtggagccacaagaggcacctcctatagtcagctaagggcttccctttctgcgcccagcttttgggtgaagggtgatttctactagacacatctgtgcttcagtcatagatgttaatagaggaagcagttttcctgctgcagattcctgaatagagttgctgaaagagtctacttctggactcaggggaagttgaaggccagtctgtgtagaaaggctgaggcaacggggaaagacctgacagctagttacatacgctctgacatagtactcccatgatggcttccagtgacacatgtgctgatagaattctaaacctctggaatttccctgctggcgacttctatggccgttgactgtacagggtaacctgatgccagatgctatgggcgtgatgagaactagagcattgcagcatggaggaaactgtgaggcaccagatcctgtgcttctgcaggccattttctgaaaacccctgttaggaaggttggatttggcgtgacttgcttgagcaagagtcctggggagagattttgaggtttaatttaacggtatatccagagctaacagtgactcaactcgtctagttctgcaagtcagatgtacacttagagtctctctgtgaagggtttgggtctgagctgtatagtatgtcaaactgccagtaagccagcccctcaccctctgatagatattcctttaatgcaccagacttcatgtttgataaatgattaatggttgaaattgtttctcttcttttgtgttttcccagttaatagatggtcactgtttccacaatgttttatactttcagctttttgtaacttaactataattacttaattttatttttttaaagcttgttgtggtctaatgagaagtatttttcagtgcataatgtttttctgagcttctgtaaatgccatcccaatgtggtttggttttgttgaacagaaaccaaaataaatttcaaaatgttaaagcaa

SEQ ID NO: 13233 - DNA, 7195 bp, Homo sapiens
gattatcccaatatggggagaaaataaatatgcatagaggaaaagagaaatacactaattaagaagggaaagagtcctttttttttttttttaacaaaactaaatggaaacataataaactaatgtaagcggtaacctgtggaggagtaggaagacttttctaaagtctgtttactttaaaatccggttttcatttctgaaacattataatgtattatctattcaaaaacatcaaatgtttagagggcagacaatacactaaaacattaatagtgattatcccggaagggtaggagtcaggctttgttttctgcttctgtatcagaaaaaggatgcactttttggaaaagatgtttggcgacctggaaggacaccgtctccgtggagtcgggaaggaggagggccaggatgcgaaggcaacgctttgcaggtgatcggatggatttattcccacatgggagagaccagagcacagcacgtttgtgtacggccaggagggaaccacgaaaaaagcagaggatagaaacgcaagcacacgatggtggtggccaagaggagcctgcccctagtgacctcacttccgcggccagtgcgagaggcgagggagctccagctctgcctgtaaggtctcggaagtacgaggcggaggggacgaaaaacggggggccagactgttgtggctgtggtggagacgagaaaccaggaagaagaggctcgcttcccactcggcgaccgtaagcgaagcagccgaaggcgagcgccgacatcagcagctgccccctaaatcccgcccttcgtcttggcggcagcgggagactgagagacgcgcgcagcaggggcgggactggagaggggccccgcgcgcggatctcgcgagagcattagagggcggaagcgctatccgagcaggatgcggttcgtggttgccttggtcctcctgaacgtcgcagcggcgggagccgtgccgctcttggccaccgaaagcgtcaagcaagaagaagctggagtacggccttctgcaggaaacgtctccacccaccccagcttgagccaacggcctggaggctctaccaagtcgcatccggagccgcagactccaaaagacagccctagcaagtcgagtgcggaggcgcagaccccagaagacacccccaacaagtcgggtgcggaggcaaagacccaaaaagacagctccaacaagtcgggtgcggaggcaaagacccaaaaaggcagcactagcaagtcgggttcggaggcgcagaccacaaaagacagcactagtaagtcgcatccggagctgcagactccaaaagacagcactggcaaatcgggtgcggaggcgcagaccccagaagacagccccaacaggtcgggtgcggaggcaaagacccaaaaagacagccctagcaagtcaggttcggaggcgcagaccacaaaagatgtccctaataagtcgggtgcggacggccagaccccaaaagacggctccagcaagtcgggtgcggaggatcagaccccaaaagacgtccctaacaagtcgggtgcggagaagcagactccaaaagacggctctaacaagtccggtgcagaggagcagggcccaatagacgggcccagcaagtcgggtgcggaggagcagacctcaaaagacagccctaacaaggtggttccagagcagccttcccggaaagaccattccaagcccatctccaacccttctgataacaaggagctccccaaggctgacacaaaccagcttgctgacaaagggaagctttctcctcatgctttcaaaaccgaatctggggaggaaactgacctcatttctcccccgcaggaggaagttaagtcttcagagcctactgaggatgtggagcccaaagaggctgaagatgatgatacaggacccgaggagggctcaccgcccaaagaagagaaagaaaagatgtccggttctgcctccagtgagaaccgtgaaggaacactttcggattccacgggtagcgagaaggatgacctttatccgaacggttctggaaatggcagcgcggagagcagccacttctttgcatatctggtgactgcagccattcttgtggctgtcctctatatcgctcatcacaacaagcggaagatcattgcttttgtcctggaaggaaaaagatctaaagtcacccggcggccaaaggccagtgactaccaacgtttggaccagaagtcctaacagaatggtatattcctctggaaaaagatgaacgtcaccaatggattgtgctgctctcgtttcagctttgatttttttgtccttgagaaccttgtcctccctgctgatttgtttctaaatcaaaagaaatgaagaaaaaagtactgtgacctgagagacaccctcctctagaatttagtggcgggtctgggctggcagaggtagggggctgctttgggctttgcacctgcactttggtgacattgttcttctgtgttccctttatttatgctggtggcttccatccgttcctcctctgagggtgagtggaggggtatatggaaacacggctatgaccaaagggagatcccagcctgggcaggctgcgctgctgaccaccctccctggggcccgggctctgtaggaaagttggtccttgactgtggcattgcactctgcactgtttctctctgcagacctaggggaaaactgcaggtggaagtgcttttctactaaggcctcttactttgggggggatgtgccctacagaagacatagaagatggggaaatgccaatgggcaaagagctactttgaatacataattctcttcaaagacttcagcagcaaaccaaaacagcaggttaaaaaaaaagatgcttttttgggtgcaagtctaacctgtctagcatgagatcttcttgattttctgattattttatgtagcttgagacaaagtgaatcaacttccacttagttgtaccgagcataaaacagaacttgggcttcctggcagtgaggccactgtcccatcacagatttttaaaataaatatgatttgaagtagtgtgatctttcacacaatcatactcagtaggaactttttgaaatagggcaagtttatgtttcatgcgagaaaacatgaaggagggttttggttttggtctgcagtttttccaaagggcttttatgagatacatttcccacaaagtccattttgcctttgttgcctaaaacagacaaaatagacttagatttattaatagaaactatactctctgccaattttacctcagtgtatttaatggtcctttaatctgatataagatgccaagggtatttgataaaaattcttcttccatgccatgtcaggagttaatacaaatgaagaaattccgtgggttcccctgggataagtgagggtagtgtcttggacaacactattgtttgaaggtttatctcttctaatcatgctctaccgcattgtagagagcctaaagagagttgtttctgagctgatctcagggaaatacaaataacttgggagatgagggaaataagatgaattctgtgctgtcaaggcagtaagtctgaagaaaggaccatgcttcttatattatcttccaccttgcttaaaacagcccatagctttgagttgacattttcattcttggcggatagcctactttatgaaggtaaggaatgaactcctacccttcttgggtcattctctgtactgatgcgttagtcttataatactttgcaccaacctgaggaatcttctaggcttctctagcatcccctaagactgtggctatttcacgtctctctccctgcctgccttccttttcccttcctttcccctcctcatgttttctggttgtgcccatctgtaccagctcctttccatccaccttcgtatgcacccagatttttctgttcccatctgtcctatttgttattcatcccgctgctcaacttctccagtatgttgcttcccttaagttgccattcattctcttcatgactttactaactcacttcggtctctgtctgtcaactaaacttttctaaaggttaccagttatccaatcaccaaatccatggctttttctcaaagcttagtcttgtccttggcagaactggacactattgaccatccaaatggaaattcccctttcttggtgtctctgacaaatggtcctttgccttatcttgtgctggtggtgaagaggccctcaaagccaggcctctctattcctttgactgtctcctcagccattaacccattcttcatcctcggagtgagtgattcccaagtctttgtcttggcttaatccctaaagaacccagttctgctggtatcgaatagttcagcttggttgtcattgaaaggaatttctctcttctgtccatcagcctgtccctcccaactgtctaggacagtcttcggtcacctaaattcctaactgcagacttttgccctttttctctctcatcaccaaagtcccatccatttttttttaataaaagatcctcagctacagtctttccattttccttgcttctcttattgcacacccccagcccattttgcttctctcttggattttgttttttcagatccacatttattgggtttcctgtccagcttcttggaaaggagctcactcttggaaagactgatctttccaaaatattttccctggtctgaagctttggtgtgaacttctcaaggcttagagaatccagttacagaccttttggggttcaggatgctatagattgacaccctcctgcctgtttttctctgcatcccaacctggccaaggcccctcctgtggggtgcccatctgtgcctttattccggctgtgccctcgactttccagcttcccatgtttctttggttaggtttctctcccttccttctttctccttccccaatccgcctgtttcgtcagggcccagtttgtttcctcatacaccttcctcactaccccaccccacatggttgactctttccctcagctccaccagctcttcatcatgccactcatttcagaacttgagcaaaacagggcagtcaggatctgatgtctttctggtctccctaagaaaactaagctcttgagggacagcccttggcaatgctttcctatctgctgagcatggtgaccttccttaggacttccagagttcagttccttctggcagagaggttttctttctccatgccatatggatgtgactcaaatgaggggtcccacagcttttcctggctaccacttgctgtgaccttatacatgttggggtttgctcttaaagaggagagcaggaagaaaggttggtttcagaaaccaagagggtcggcagtggacgcgtacattttgtcacggagtccacagagctgagcttttgagcagactctgagaagtatcattgcttgtgttgaaagaatacaacaggatttaagtttctctttagaaattgcactgaagaaaggccgggcgcggtggctccccctgtaatcccagcgctttgggaggccgaggcggggggatcacgaggtcaagagatcgagaccatcctggccaacatggtgaaaccccgtctctaataaaaatacaaaaattagccgggcatggtgacgtgcacctgtagtcccagctactagataggctgaggcaggagaattgcttgaatccgggaggcggaggttgcagtgagccgagatcgtgccactgaactccaacctgccaatagagcgagactccgtctcaaaaaaaaaaaaaaaaaagaaagaaatagcattgaagaaaataccgcacatcagaggaaagcttattttctgcatggtgtcttttcaaagatagaatatttgaagcatgttttctagcgattgtgtgaatgagggtgagctggctgaggcatcgctcaagctggggggtggtgtgtaagaagcacgtggagccacaagaggcacctcctatagtcagctaagggcttccctttctgcgcccagcttttgggtgaagggtgatttctactagacacatctgtgcttcagtcatagatgttaatagaggaagcagttttcctgctgcagattcctgaatagagttgctgaaagagtctacttctggactcaggggaagttgaaggccagtctgtgtagaaaggctgaggcaacggggaaagacctgacagctagttacatacgctctgacatagtactcccatgatggcttccagtgacacatgtgctgatagaattctaaacctctggaatttccctgctggcgacttctatggccgttgactgtacagggtaacctgatgccagatgctatgggcgtgatgagaactagagcattgcagcatggaggaaactgtgaggcaccagatcctgtgcttctgcaggccattttctgaaaacccctgttaggaaggttggatttggcgtgacttgcttgagcaagagtcctggggagagattttgaggtttaatttaacggtatatccagagctaacagtgactcaactcgtctagttctgcaagtcagatgtacacttagagtctctctgtgaagggtttgggtctgagctgtatagtatgtcaaactgccagtaagccagcccctcaccctctgatagatattcctttaatgcaccagacttcatgtttgataaatgattaatggttgaaattgtttctcttcttttgtgttttcccagttaatagatggtcactgtttccacaatgttttatactttcagctttttgtaacttaactataattacttaattttatttttttaaagcttgttgtggtctaatgagaagtatttttcagtgcataatgtttttctgagcttctgtaaatgccatcccaatgtggtttggttttgttgaacagaaaccaaaataaatttcaaaatgttaaagcaatggatttaatacatttatttatttatttattttattttatttttgagacagagtcttgctctgtcaccaggctggagtgcagtggtatgatcttggctcactgcaacctccgcctcccaggttcaagcgattctcctgcctcagcctcccgagtagctgggactacaggtgcgtgccaccacgcccagctaatttttgcatttttagtggagacggggtttcaccatgttggccaggatggtctcaatctcttcttcgtgatc

SEQ ID NO: 13234 - DNA, 6003 bp, Homo sapiens
  misc_feature (5991)..(5991): n is a, c, g, or t
gattatcccaatatggggagaaaataaatatgcatagaggaaaagagaaatacactaattaagaagggaaagagtcctttttttttttttttaacaaaactaaatggaaacataataaactaatgtaagcggtaacctgtggaggagtaggaagacttttctaaagtctgtttactttaaaatccggttttcatttctgaaacattataatgtattatctattcaaaaacatcaaatgtttagagggcagacaatacactaaaacattaatagtgattatcccggaagggtaggagtcaggctttgttttctgcttctgtatcagaaaaaggatgcactttttggaaaagatgtttggcgacctggaaggacaccgtctccgtggagtcgggaaggaggagggccaggatgcgaaggcaacgctttgcaggtgatcggatggatttattcccacatgggagagaccagagcacagcacgtttgtgtacggccaggagggaaccacgaaaaaagcagaggatagaaacgcaagcacacgatggtggtggccaagaggagcctgcccctagtgacctcacttccgcggccagtgcgagaggcgagggagctccagctctgcctgtaaggtctcggaagtacgaggcggaggggacgaaaaacggggggccagactgttgtggctgtggtggagacgagaaaccaggaagaagaggctcgcttcccactcggcgaccgtaagcgaagcagccgaaggcgagcgccgacatcagcagctgccccctaaatcccgcccttcgtcttggcggcagcgggagactgagagacgcgcgcagcaggggcgggactggagaggggccccgcgcgcggatctcgcgagagcattagagggcggaagcgctatccgagcaggatgcggttcgtggttgccttggtcctcctgaacgtcgcagcggcgggagccgtgccgctcttggccaccgaaagcgtcaagcaagaagaagctggagtacggccttctgcaggaaacgtctccacccaccccagcttgagccaacggcctggaggctctaccaagtcgcatccggagccgcagactccaaaagacagccctagcaagtcgagtgcggaggcgcagaccccagaagacacccccaacaagtcgggtgcggaggcaaagacccaaaaagacagctccaacaagtcgggtgcggaggcaaagacccaaaaaggcagcactagcaagtcgggttcggaggcgcagaccacaaaagacagcactagtaagtcgcatccggagctgcagactccaaaagacagcactggcaaatcgggtgcggaggcgcagaccccagaagacagccccaacaggtcgggtgcggaggcaaagacccaaaaagacagccctagcaagtcaggttcggaggcgcagaccacaaaagatgtccctaataagtcgggtgcggacggccagaccccaaaagacggctccagcaagtcgggtgcggaggatcagaccccaaaagacgtccctaacaagtcgggtgcggagaagcagactccaaaagacggctctaacaagtccggtgcagaggagcagggcccaatagacgggcccagcaagtcgggtgcggaggagcagacctcaaaagacagccctaacaaggtggttccagagcagccttcccggaaagaccattccaagcccatctccaacccttctgataacaaggagctccccaaggctgacacaaaccagcttgctgacaaagggaagctttctcctcatgctttcaaaaccgaatctggggaggaaactgacctcatttctcccccgcaggaggaagttaagtcttcagagcctactgaggatgtggagcccaaagaggctgaagatgatgatacaggacccgaggagggctcaccgcccaaagaagagaaagaaaagatgtccggttctgcctccagtgagaaccgtgaaggaacactttcggattccacgggtagcgagaaggatgacctttatccgaacggttctggaaatggcagcgcggagagcagccacttctttgcatatctggtgactgcagccattcttgtggctgtcctctatatcgctcatcacaacaagcggaagatcattgcttttgtcctggaaggaaaaagatctaaagtcacccggcggccaaaggccagtgactaccaacgtttggaccagaagtcctaacagaatggtatattcctctggaaaaagatgaacgtcaccaatggattgtgctgctctcgtttcagctttgatttttttgtccttgagaaccttgtcctccctgctgatttgtttctaaatcaaaagaaatgaagaaaaaagtactgtgacctgagagacaccctcctctagaatttagtggcgggtctgggctggcagaggtagggggctgctttgggctttgcacctgcactttggtgacattgttcttctgtgttccctttatttatgctggtggcttccatccgttcctcctctgagggtgagtggaggggtatatggaaacacggctatgaccaaagggagatcccagcctgggcaggctgcgctgctgaccaccctccctggggcccgggctctgtaggaaagttggtccttgactgtggcattgcactctgcactgtttctctctgcagacctaggggaaaactgcaggtggaagtgcttttctactaaggcctcttactttgggggggatgtgccctacagaagacatagaagatggggaaatgccaatgggcaaagagctactttgaatacataattctcttcaaagacttcagcagcaaaccaaaacagcaggttaaaaaaaaagatgcttttttgggtgcaagtctaacctgtctagcatgagatcttcttgattttctgattattttatgtagcttgagacaaagtgaatcaacttccacttagttgtaccgagcataaaacagaacttgggcttcctggcagtgaggccactgtcccatcacagatttttaaaataaatatgatttgaagtagtgtgatctttcacacaatcatactcagtaggaactttttgaaatagggcaagtttatgtttcatgcgagaaaacatgaaggagggttttggttttggtctgcagtttttccaaagggcttttatgagatacatttcccacaaagtccattttgcctttgttgcctaaaacagacaaaatagacttagatttattaatagaaactatactctctgccaattttacctcagtgtatttaatggtcctttaatctgatataagatgccaagggtatttgataaaaattcttcttccatgccatgtcaggagttaatacaaatgaagaaattccgtgggttcccctgggataagtgagggtagtgtcttggacaacactattgtttgaaggtttatctcttctaatcatgctctaccgcattgtagagagcctaaagagagttgtttctgagctgatctcagggaaatacaaataacttgggagatgagggaaataagatgaattctgtgctgtcaaggcagtaagtctgaagaaaggaccatgcttcttatattatcttccaccttgcttaaaacagcccatagctttgagttgacattttcattcttggcggatagcctactttatgaaggtaaggaatgaactcctacccttcttgggtcattctctgtactgatgcgttagtcttataatactttgcaccaacctgaggaatcttctaggcttctctagcatcccctaagactgtggctatttcacgtctctctccctgcctgccttccttttcccttcctttcccctcctcatgttttctggttgtgcccatctgtaccagctcctttccatccaccttcgtatgcacccagatttttctgttcccatctgtcctatttgttattcatcccgctgctcaacttctccagtatgttgcttcccttaagttgccattcattctcttcatgactttactaactcacttcggtctctgtctgtcaactaaacttttctaaaggttaccagttatccaatcaccaaatccatggctttttctcaaagcttagtcttgtccttggcagaactggacactattgaccatccaaatggaaattcccctttcttggtgtctctgacaaatggtcctttgccttatcttgtgctggtggtgaagaggccctcaaagccaggcctctctattcctttgactgtctcctcagccattaacccattcttcatcctcggagtgagtgattcccaagtctttgtcttggcttaatccctaaagaacccagttctgctggtatcgaatagttcagcttggttgtcattgaaaggaatttctctcttctgtccatcagcctgtccctcccaactgtctaggacagtcttcggtcacctaaattcctaactgcagacttttgccctttttctctctcatcaccaaagtcccatccatttttttttaataaaagatcctcagctacagtctttccattttccttgcttctcttattgcacacccccagcccattttgcttctctcttggattttgttttttcagatccacatttattgggtttcctgtccagcttcttggaaaggagctcactcttggaaagactgatctttccaaaatattttccctggtctgaagctttggtgtgaacttctcaaggcttagagaatccagttacagaccttttggggttcaggatgctatagattgacaccctcctgcctgtttttctctgcatcccaacctggccaaggcccctcctgtggggtgcccatctgtgcctttattccggctgtgccctcgactttccagcttcccatgtttctttggttaggtttctctcccttccttctttctccttccccaatccgcctgtttcgtcagggcccagtttgtttcctcatacaccttcctcactaccccaccccacatggttgactctttccctcagctccaccagctcttcatcatgccactcatttcagaacttgagcaaaacagggcagtcaggatctgatgtctttctggtctccctaagaaaactaagctcttgagggacagcccttggcaatgctttcctatctgctgagcatggtgaccttccttaggacttccagagttcagttccttctggcagagaggttttctttctccatgccatatggatgtgactcaaatgaggggtcccacagcttttcctggctaccacttgctgtgaccttatacatgttggggtttgctcttaaagaggagagcaggaagaaaggttggtttcagaaaccaagagggtcggcagtggacgcgtacattttgtcacggagtccacagagctgagcttttgagcagactctgagaagtatcattgcttgtgttgaaagaatacaacaggatttaagtttctctttagaaattgcactgaagaaaggccgggcgcggtggctccccctgtaatcccagcgctttgggaggccgaggcggggggatcacgaggtcaagagatcgagaccatcctggccaacatggtgaaaccccgtctctaataaaaatacaaaaattagccgggcatggtgacgtgcacctgtagtcccagctactagataggctgaggcaggagaattgcttgaatccgggaggcggaggttgcagtgagccgagatcgtgccactgaactccaacctgccaatagagcgagactccgtctcaaaaaaaaaaaaaaaaaagaaagaaatagcattgaagaaaataccgcacatcagaggaaagcttattttctgcatggtgtcttttcaaagatagaatatttgaagcatgttttctagcgattgtgtgaatgagggtgagctggctgaggcatcgctcaagctggggggtggtgtgtaagaagcacgtggagccacaagaggcacctcctgtgacaaagtgaatggggancgagctcatcag

SEQ ID NO: 13235 - DNA, 4519 bp, Homo sapiens
  misc_feature (4494)..(4494): n is a, c, g, or t
gattatcccaatatggggagaaaataaatatgcatagaggaaaagagaaatacactaattaagaagggaaagagtcctttttttttttttttaacaaaactaaatggaaacataataaactaatgtaagcggtaacctgtggaggagtaggaagacttttctaaagtctgtttactttaaaatccggttttcatttctgaaacattataatgtattatctattcaaaaacatcaaatgtttagagggcagacaatacactaaaacattaatagtgattatcccggaagggtaggagtcaggctttgttttctgcttctgtatcagaaaaaggatgcactttttggaaaagatgtttggcgacctggaaggacaccgtctccgtggagtcgggaaggaggagggccaggatgcgaaggcaacgctttgcaggtgatcggatggatttattcccacatgggagagaccagagcacagcacgtttgtgtacggccaggagggaaccacgaaaaaagcagaggatagaaacgcaagcacacgatggtggtggccaagaggagcctgcccctagtgacctcacttccgcggccagtgcgagaggcgagggagctccagctctgcctgtaaggtctcggaagtacgaggcggaggggacgaaaaacggggggccagactgttgtggctgtggtggagacgagaaaccaggaagaagaggctcgcttcccactcggcgaccgtaagcgaagcagccgaaggcgagcgccgacatcagcagctgccccctaaatcccgcccttcgtcttggcggcagcgggagactgagagacgcgcgcagcaggggcgggactggagaggggccccgcgcgcggatctcgcgagagcattagagggcggaagcgctatccgagcaggatgcggttcgtggttgccttggtcctcctgaacgtcgcagcggcgggagccgtgccgctcttggccaccgaaagcgtcaagcaagaagaagctggagtacggccttctgcaggaaacgtctccacccaccccagcttgagccaacggcctggaggctctaccaagtcgcatccggagccgcagactccaaaagacagccctagcaagtcgagtgcggaggcgcagaccccagaagacacccccaacaagtcgggtgcggaggcaaagacccaaaaagacagctccaacaagtcgggtgcggaggcaaagacccaaaaaggcagcactagcaagtcgggttcggaggcgcagaccacaaaagacagcactagtaagtcgcatccggagctgcagactccaaaagacagcactggcaaatcgggtgcggaggcgcagaccccagaagacagccccaacaggtcgggtgcggaggcaaagacccaaaaagacagccctagcaagtcaggttcggaggcgcagaccacaaaagatgtccctaataagtcgggtgcggacggccagaccccaaaagacggctccagcaagtcgggtgcggaggatcagaccccaaaagacgtccctaacaagtcgggtgcggagaagcagactccaaaagacggctctaacaagtccggtgcagaggagcagggcccaatagacgggcccagcaagtcgggtgcggaggagcagacctcaaaagacagccctaacaaggtggttccagagcagccttcccggaaagaccattccaagcccatctccaacccttctgataacaaggagctccccaaggctgacacaaaccagcttgctgacaaagggaagctttctcctcatgctttcaaaaccgaatctggggaggaaactgacctcatttctcccccgcaggaggaagttaagtcttcagagcctactgaggatgtggagcccaaagaggctgaagatgatgatacaggacccgaggagggctcaccgcccaaagaagagaaagaaaagatgtccggttctgcctccagtgagaaccgtgaaggaacactttcggattccacgggtagcgagaaggatgacctttatccgaacggttctggaaatggcagcgcggagagcagccacttctttgcatatctggtgactgcagccattcttgtggctgtcctctatatcgctcatcacaacaagcggaagatcattgcttttgtcctggaaggaaaaagatctaaagtcacccggcggccaaaggccagtgactaccaacgtttggaccagaagtcctaacagaatggtatattcctctggaaaaagatgaacgtcaccaatggattgtgctgctctcgtttcagctttgatttttttgtccttgagaaccttgtcctccctgctgatttgtttctaaatcaaaagaaatgaagaaaaaagtactgtgacctgagagacaccctcctctagaatttagtggcgggtctgggctggcagaggtagggggctgctttgggctttgcacctgcactttggtgacattgttcttctgtgttccctttatttatgctggtggcttccatccgttcctcctctgagggtgagtggaggggtatatggaaacacggctatgaccaaagggagatcccagcctgggcaggctgcgctgctgaccaccctccctggggcccgggctctgtaggaaagttggtccttgactgtggcattgcactctgcactgtttctctctgcagacctaggggaaaactgcaggtggaagtgcttttctactaaggcctcttactttgggggggatgtgccctacagaagacatagaagatggggaaatgccaatgggcaaagagctactttgaatacataattctcttcaaagacttcagcagcaaaccaaaacagcaggttaaaaaaaaagatgcttttttgggtgcaagtctaacctgtctagcatgagatcttcttgattttctgattattttatgtagcttgagacaaagtgaatcaacttccacttagttgtaccgagcataaaacagaacttgggcttcctggcagtgaggccactgtcccatcacagatttttaaaataaatatgatttgaagtagtgtgatctttcacacaatcatactcagtaggaactttttgaaatagggcaagtttatgtttcatgcgagaaaacatgaaggagggttttggttttggtctgcagtttttccaaagggcttttatgagatacatttcccacaaagtccattttgcctttgttgcctaaaacagacaaaatagacttagatttattaatagaaactatactctctgccaattttacctcagtgtatttaatggtcctttaatctgatataagatgccaagggtatttgataaaaattcttcttccatgccatgtcaggagttaatacaaatgaagaaattccgtgggttcccctgggataagtgagggtagtgtcttggacaacactattgtttgaaggtttatctcttctaatcatgctctaccgcattgtagagagcctaaagagagttgtttctgagctgatctcagggaaatacaaataacttgggagatgagggaaataagatgaattctgtgctgtcaaggcagtaagtctgaagaaaggaccatgcttcttatattatcttccaccttgcttaaaacagcccatagctttgagttgacattttcattcttggcggatagcctactttatgaaggtaaggaatgaactcctacccttcttgggtcattctctgtactgatgcgttagtcttataatactttgcaccaacctgaggaatcttctaggcttctctagcatcccctaagactgtggctatttcacgtctctctccctgcctgccttccttttcccttcctttcccctcctcatgttttctggttgtgcccatctgtaccagctcctttccatccaccttcgtatgcacccagatttttctgttcccatctgtcctatttgttattcatcccgctgctcaacttctccagtatgttgcttcccttaagttgccattcattctcttcatgactttactaactcacttcggtctctgtctgtcaactaaacttttctaaaggttaccagttatccaatcaccaaatccatggctttttctcaaagcttagtcttgtccttggcagaactggacactattgaccatccaaatggaaattcccctttcttggtgtctctgacaaatggtcctttgccttatcttgtgctggtggtgaagaggccctcaaagccaggcctctctattcctttgactgtctcctcagccattaacccattcttcatcctcggagtgagtgattcccaagtctttgtcttggcttaatccctaaagaacccagttctgctggtatcgaatagttcagcttggttgtcattgaaaggaatttctctcttctgtccatcagcctgtccctcccaactgtctaggacagtcttcggtcacctaaattcctaactgcagacttttgccctttttctctctcatcaccaaagtcctncgttgaagcgtcgggtaccgagctc

SEQ ID NO: 13236 - DNA, 4475 bp, Homo sapiens
gattatcccaatatggggagaaaataaatatgcatagaggaaaagagaaatacactaattaagaagggaaagagtcctttttttttttttttaacaaaactaaatggaaacataataaactaatgtaagcggtaacctgtggaggagtaggaagacttttctaaagtctgtttactttaaaatccggttttcatttctgaaacattataatgtattatctattcaaaaacatcaaatgtttagagggcagacaatacactaaaacattaatagtgattatcccggaagggtaggagtcaggctttgttttctgcttctgtatcagaaaaaggatgcactttttggaaaagatgtttggcgacctggaaggacaccgtctccgtggagtcgggaaggaggagggccaggatgcgaaggcaacgctttgcaggtgatcggatggatttattcccacatgggagagaccagagcacagcacgtttgtgtacggccaggagggaaccacgaaaaaagcagaggatagaaacgcaagcacacgatggtggtggccaagaggagcctgcccctagtgacctcacttccgcggccagtgcgagaggcgagggagctccagctctgcctgtaaggtctcggaagtacgaggcggaggggacgaaaaacggggggccagactgttgtggctgtggtggagacgagaaaccaggaagaagaggctcgcttcccactcggcgaccgtaagcgaagcagccgaaggcgagcgccgacatcagcagctgccccctaaatcccgcccttcgtcttggcggcagcgggagactgagagacgcgcgcagcaggggcgggactggagaggggccccgcgcgcggatctcgcgagagcattagagggcggaagcgctatccgagcaggatgcggttcgtggttgccttggtcctcctgaacgtcgcagcggcgggagccgtgccgctcttggccaccgaaagcgtcaagcaagaagaagctggagtacggccttctgcaggaaacgtctccacccaccccagcttgagccaacggcctggaggctctaccaagtcgcatccggagccgcagactccaaaagacagccctagcaagtcgagtgcggaggcgcagaccccagaagacacccccaacaagtcgggtgcggaggcaaagacccaaaaagacagctccaacaagtcgggtgcggaggcaaagacccaaaaaggcagcactagcaagtcgggttcggaggcgcagaccacaaaagacagcactagtaagtcgcatccggagctgcagactccaaaagacagcactggcaaatcgggtgcggaggcgcagaccccagaagacagccccaacaggtcgggtgcggaggcaaagacccaaaaagacagccctagcaagtcaggttcggaggcgcagaccacaaaagatgtccctaataagtcgggtgcggacggccagaccccaaaagacggctccagcaagtcgggtgcggaggatcagaccccaaaagacgtccctaacaagtcgggtgcggagaagcagactccaaaagacggctctaacaagtccggtgcagaggagcagggcccaatagacgggcccagcaagtcgggtgcggaggagcagacctcaaaagacagccctaacaaggtggttccagagcagccttcccggaaagaccattccaagcccatctccaacccttctgataacaaggagctccccaaggctgacacaaaccagcttgctgacaaagggaagctttctcctcatgctttcaaaaccgaatctggggaggaaactgacctcatttctcccccgcaggaggaagttaagtcttcagagcctactgaggatgtggagcccaaagaggctgaagatgatgatacaggacccgaggagggctcaccgcccaaagaagagaaagaaaagatgtccggttctgcctccagtgagaaccgtgaaggaacactttcggattccacgggtagcgagaaggatgacctttatccgaacggttctggaaatggcagcgcggagagcagccacttctttgcatatctggtgactgcagccattcttgtggctgtcctctatatcgctcatcacaacaagcggaagatcattgcttttgtcctggaaggaaaaagatctaaagtcacccggcggccaaaggccagtgactaccaacgtttggaccagaagtcctaacagaatggtatattcctctggaaaaagatgaacgtcaccaatggattgtgctgctctcgtttcagctttgatttttttgtccttgagaaccttgtcctccctgctgatttgtttctaaatcaaaagaaatgaagaaaaaagtactgtgacctgagagacaccctcctctagaatttagtggcgggtctgggctggcagaggtagggggctgctttgggctttgcacctgcactttggtgacattgttcttctgtgttccctttatttatgctggtggcttccatccgttcctcctctgagggtgagtggaggggtatatggaaacacggctatgaccaaagggagatcccagcctgggcaggctgcgctgctgaccaccctccctggggcccgggctctgtaggaaagttggtccttgactgtggcattgcactctgcactgtttctctctgcagacctaggggaaaactgcaggtggaagtgcttttctactaaggcctcttactttgggggggatgtgccctacagaagacatagaagatggggaaatgccaatgggcaaagagctactttgaatacataattctcttcaaagacttcagcagcaaaccaaaacagcaggttaaaaaaaaagatgcttttttgggtgcaagtctaacctgtctagcatgagatcttcttgattttctgattattttatgtagcttgagacaaagtgaatcaacttccacttagttgtaccgagcataaaacagaacttgggcttcctggcagtgaggccactgtcccatcacagatttttaaaataaatatgatttgaagtagtgtgatctttcacacaatcatactcagtaggaactttttgaaatagggcaagtttatgtttcatgcgagaaaacatgaaggagggttttggttttggtctgcagtttttccaaagggcttttatgagatacatttcccacaaagtccattttgcctttgttgcctaaaacagacaaaatagacttagatttattaatagaaactatactctctgccaattttacctcagtgtatttaatggtcctttaatctgatataagatgccaagggtatttgataaaaattcttcttccatgccatgtcaggagttaatacaaatgaagaaattccgtgggttcccctgggataagtgagggtagtgtcttggacaacactattgtttgaaggtttatctcttctaatcatgctctaccgcattgtagagagcctaaagagagttgtttctgagctgatctcagggaaatacaaataacttgggagatgagggaaataagatgaattctgtgctgtcaaggcagtaagtctgaagaaaggaccatgcttcttatattatcttccaccttgcttaaaacagcccatagctttgagttgacattttcattcttggcggatagcctactttatgaaggtaaggaatgaactcctacccttcttgggtcattctctgtactgatgcgttagtcttataatactttgcaccaacctgaggaatcttctaggcttctctagcatcccctaagactgtggctatttcacgtctctctccctgcctgccttccttttcccttcctttcccctcctcatgttttctggttgtgcccatctgtaccagctcctttccatccaccttcgtatgcacccagatttttctgttcccatctgtcctatttgttattcatcccgctgctcaacttctccagtatgttgcttcccttaagttgccattcattctcttcatgactttactaactcacttcggtctctgtctgtcaactaaacttttctaaaggttaccagttatccaatcaccaaatccatggctttttctcaaagcttagtcttgtccttggcagaactggacactattgaccatccaaatggaaattcccctttcttggtgtctctgacaaatggtcctttgccttatcttgtgctggtggtgaagaggccctcaaagccaggcctctctattcctttgactgtctcctcagccattaacccattcttcatcctcggagtgagtgattcccaagtctttgtcttggcttaatccctaaagaacccagttctgctggtatcgaatagttcagcttggttgtcattgaaaggaatttctctcttctgtccatcagcctgtccctcccaactgtctaggacagtcttcggtctcgacttagcttgttttatcctctagagtcagatagaa

SEQ ID NO: 13237 - DNA, 1572 bp, Homo sapiens
  misc_feature (1361)..(1361): n is a, c, g, or t
gattatcccaatatggggagaaaataaatatgcatagaggaaaagagaaatacactaattaagaagggaaagagtcctttttttttttttttaacaaaactaaatggaaacataataaactaatgtaagcggtaacctgtggaggagtaggaagacttttctaaagtctgtttactttaaaatccggttttcatttctgaaacattataatgtattatctattcaaaaacatcaaatgtttagagggcagacaatacactaaaacattaatagtgattatcccggaagggtaggagtcaggctttgttttctgcttctgtatcagaaaaaggatgcactttttggaaaagatgtttggcgacctggaaggacaccgtctccgtggagtcgggaaggaggagggccaggatgcgaaggcaacgctttgcaggtgatcggatggatttattcccacatgggagagaccagagcacagcacgtttgtgtacggccaggagggaaccacgaaaaaagcagaggatagaaacgcaagcacacgatggtggtggccaagaggagcctgcccctagtgacctcacttccgcggccagtgcgagaggcgagggagctccagctctgcctgtaaggtctcggaagtacgaggcggaggggacgaaaaacggggggccagactgttgtggctgtggtggagacgagaaaccaggaagaagaggctcgcttcccactcggcgaccgtaagcgaagcagccgaaggcgagcgccgacatcagcagctgccccctaaatcccgcccttcgtcttggcggcagcgggagactgagagacgcgcgcagcaggggcgggactggagaggggccccgcgcgcggatctcgcgagagcattagagggcggaagcgctatccgagcaggatgcggttcgtggttgccttggtcctcctgaacgtcgcagcggcgggagccgtgccgctcttggccaccgaaagcgtcaagcaagaagaagctggagtacggccttctgcaggaaacgtctccacccaccccagcttgagccaacggcctggaggctctaccaagtcgcatccggagccgcagactccaaaagacagccctagcaagtcgagtgcggaggcgcagaccccagaagacacccccaacaagtcgggtgcggaggcaaagacccaaaaagacagctccaacaagtcgggtgcggaggcaaagacccaaaaaggcagcactagcaagtcgggttcggaggcgcagaccacaaaagacagcactggcgtgtgagtgtgcagattcccctgtgtggtcgaacctaagaactgtggcttggaagtgatgctccatgtgacgacgactntgctttctttcctcttagtaagcaggtgattggtagatcccaactgcctatgtaatgtaaataatgtacatttaagtttattgctatggtagcacattgtatttgttaatgtacaaaacaaattctaaaaggttgacaaatgtatattttgttgcttaaatgtgtctttgcaaaaattgacaataaataccatattttgtgtccaaaaaaa

SEQ ID NO: 13238 - DNA, 405 bp, Homo sapiens
tctggtcctataattatttattgaatgaatgaataagtgtatgaattatgaaaagttggtaatttctgaggtcttaacatgatttatttaaattatttttagagtaatattaattctatggctcagtttatttaacatccatccagagcaaaatgggttcttcaagtaatataagtatataaaaggaatattaacctcatccctgcccttgggtgcagtataatctagagtaagaaatagcatgacattcgtcatttaattttttcatttttaatgtactttttaaaaaccgcatggtttaatatagaattagaataggtggttaactttctctgtgtttcgtatgtatagcttatgtgatcgcaaattattaatgaaaaagcaaacggagtcaaaaaaaaacaa

SEQ ID NO: 13239 - DNA, 432 bp, Homo sapiens
gatgatacttgcacacgtgttcctcagccttgggtttgccactcctgctatccttggaagttggctgacttttgagacttacaggaagagagtaaacatacatttacaagtagtagtcaagtttctgtgtattgcttggacatatacgtggaaccttctaattggcaataatacttttggaaataaacattgcatgtgtggtttttttttgttgttattttttagatagaagcgagaatttgcctaaaaaacaaaaacaacaacaataaaaaagaggggtggtggacttaatcataagaaatagttatttgcaggccaggcgcagtggcttatacctgtaattccagtgcttttggaggccaagttgggaggattccttgagcccaggagttcaagaccagcctgggcaacatagcaagaccctgtctgtac

SEQ ID NO: 13240 - DNA, 801 bp, Homo sapiens
tgtcagggaagtccacgtttctggtgattgcgggtatggattggaaaggagattactcacaactgcccgtcccaactttgcttaagcaattccagggtgaggcattcgcaactttataaagagcaaattccattttaggattgctctagcttttaaaaaattcttcttaaagttgatccaaaattggcctccctgtaagcttctgaccgtttgtctgagttccgtactctggagccaggagggtcaatctacttccctccctccatgatagcaccttcagtaccagaggatggcagtcgcaccacctataagtctgtcttccttgctgcgcatccttgtgccttcaaccactctgcggggattctgactctctgctctgttggctgcactccaccttacaagctgcagctccctgtgggcccctgaaatgtgccctgggttacatactgcactgcacacaccgtctgagctgcacagggcatgggcagagcattacctcctgaatttaggacactgttcttattaatgtgctccagcctccacaccatcacacttacgcaactggcgtttttcattccgtcagtcactcaacaaatattgccttcaagaaaattatttccataccaaaagctgagaattttccatgagatgactgagagacaaatagactaacaaaacacgtgtacttctgacctatggttgaacctgaaattatatttttccacacatttaaaagctaactacatcatttatcagttagtggttaaagggcaaagccaccatgcagaattctaacaatat

SEQ ID NO: 13241 - DNA, 432 bp, Homo sapiens
cctgaagtcaggagtttgagaccagcctgaccaacatggagaaaccccatctctactaaaaatacagaattagatgggcgtggcgacgcatgcctgtaatcccagcttcccagctactctggaggctgaagcaggagaatcacttgaacctgggagatggaggttgtggtgagccgagatcacgccattgcactccagcctgggcaacaagaacaaaactccatctcagaaaaaaagaaagaaagaaagcaaaacagaagcaaagcatgccagaggtttattccaagcctctgacagtaggagtcctgaaatccacctggtggatgaaggaggaaacaaaatttagaggacttggcagaatcacagaatgtggggagatgtttccaaaggggacctcatctcatgctgcaaacgttttgtctggagaatacc

SEQ ID NO: 13242 - DNA, 566 bp, Homo sapiens
agcagggaggagtcacatctcctagatgatgaatgcagagatatgtcacgaggctcttgagagtggtagggctaaagccctgtttgcagggcataggcagacacttcccatcttctaggtgtttggcccagtgatatgttacagttctcaaaacgagtggggctgatgcaaaagacaagagtcacattccctaggtgctaggtccagtgatatttaaccatcccgcacctgacagaaagagaagaacacatcacctaaatcataaatgtaaaagtatattgtagacagctgtgatggctcatgcctgtaattccaatgctttgggaggctgaggcaggtggattttttgtaatcagaagtttgagatcagcctggaaaacatggcaaaactcaatctctactaaaatacaaaaaaagaaagaaagaaagaagaaagaaaaaaagaagaaagaagaaagaaaaagaaagaaagaaagaagaaagaaagaagaaagaaagagaagaaaaggaaagaaagaagaaagaaagaaagaaagaaagaaagaaagaaagaaagaaagaaagaa

SEQ ID NO: 13243 - DNA, 232 bp, Homo sapiens
ggactactaggggctcagactcttcaagaactaaagtttgaattacaccactaagtaaataatatcaacctgaggaggacctgcttgagattaaaggaaacatgaggctgggtgcattgactcatgcctgtaatcccagacattgggaggccaaggcaggaagatggcttgaacacatgagttcaagacaagcctgggcaacatggcaagacccctgtctctacagaaattt

SEQ ID NO: 13244 - DNA, 373 bp, Homo sapiens
aataatcacagactgaaaatttaaatttttattatacaaataaacttgaaaacatagataaagttggtaatactcttaggttatataaatgacaaaaactgattctaaaacaaattgaaaatatagatagaacaattcatgtagaagaaataccataagatattaaagaggtaccttatcttctatccccaacttaggcaacccccaacccctaacataggcaccaggcccagatcatttcacacgaatactattaaagctttactacaaagacaaaattgatgctttatctgtttcctaaagctttataagtttcttttataagcctataaattctttttacatacatagtatttcaaaacttgatagcatc

SEQ ID NO: 13245 - DNA, 125 bp, Homo sapiens
agcctgggtgttagaaattgtttttgactgattcaagataacatgttatctttcttaattcatacagctttgtcaaaacagcactagattaagatgaagtgccaaccaatactttgaaatttaaa

SEQ ID NO: 13246 - DNA, 282 bp, Homo sapiens
tggcgtgtacacagaaaactataaaacactgttgaaagaaattacagattgaatgcaatccctatcaaaattccaaatgccatttttttagcaatggaaaagcagatcctaaattcatattatgcaagggacccagaatacccaaaatcatcttgaaaaagaacaaagttgggatgactcgcacctcgcaatttcaaaattcattacacagctacagtaatcaagacactgtgttactggcatatggatagaaatatagatcaatggagtagcattgagacc

SEQ ID NO: 13247 - DNA, 326 bp, Homo sapiens
ccagcagccatttggaagtctaattagtccctggcgggctgtggtctaccctgcactcccaagccctacccagactccagcccagaggctgtgggctcccactacaacagcactagccacattcttgagtagaaatcatggtagatactaactcaaatctctcctcctccctgcttctctccctctgtccagcttagcccaccccaggcagcccaagaagaacagtgcctctctgagcatgagtcgtccgcccccatccccaccccgcccctgtgagtcgtttcaggagacagtgtggtgtagtggaaagtgtcttagcctggggg

SEQ ID NO: 13248 - DNA, 626 bp, Homo sapiens
tagtagagacagggtttaaccatggtctcgatctcctgacctcgtgatccgcccgcctcagcctcccaaagtgctgggattataggcgtaagccactgctcctggcctataaacaactcttaaaactaacaataaagttgaataatctgatttggaaatggacaaataattgaactaaatttttaccaaaaatatacacaaatgggaagaagcatttaaaaagacacaaaattacaatttgtagagaaatgcataaaaatcacaatgaaaaacaaaatcacctatcacccatttagaatggctactataaattttttaaaaatacaaaatctgttgatgatgcaataaaaataaaaccatccaggtaggtacagtggctcacatctttaaacccagtgctttgggaggctgagacaggtgaatcaccataggtcagaagttcgagatcagcccggccaacatggcaaaaccccatctctactaaaaacacaaaaattagccgggcatagtggtgggtgcctgtaatctcggctaccctgaggctgaggcaggagaattgtttgaacctgggacatgagaacaaatcactgcacttcagtctgggtgacagagtgtgactccatctc

SEQ ID NO: 13249 - DNA, 373 bp, Homo sapiens
gaaaaccctgacccccaaaaggaccctcagtcatggctgctcgctcactgtcactaaagaacatcctcattccattcctacctcttctctaggagaccccacaattggagggcctgtaggagggaagctggggagggacagacagtacccaccctcaggcatggaccctggtcaaagagaagaatgcccctctctaggatggaatattttgcatcaactttgaaataacattttcacaccaagtgtctgttcctttccctttctcatggaaatccccagtctcatgccatcaggtgccttacagaggcttagtgctggcggcaagtgtgagggtctctaaatcttcctctaatgtctgcaagtgccgctgcga

SEQ ID NO: 13250 - DNA, 1553 bp, Homo sapiens
aaggtttaaagggcgcctccatggggggcgctcagctggagctaccgagcggtgccaggccaggtgtgtgcgtccgtcggtctttccgtgcccacgccggagaccagccccggaggccgcctgggcctatccctgtgccaggcaccatgaagcaggagtctgcagccccgaacaccccgcccacctcgcagtcccctacgccgtccgctcagttcccccgaaacgacggcgaccctcaagcgctgtggattttcgggtacggctccctggtgtggaggcccgacttcgcctacagcgacagccgtgtgggcttcgtgcgcggctacagccgccgtttctggcagggagacaccttccatcggggcagcgacaagatgcctggccgtgtggtgacgctccttgaagatcatgagggctgcacttggggcgtggcataccaagtgcaaggggagcaggtaagcaaggccctgaagtacctgaatgtgcgagaggcagtgcttggtggctacgataccaaggaggtcaccttctatccccaagatgctcctgaccaaccactgaaggcattggcctatgtggccaccccacagaaccctggttacctgggccctgcgcctgaagaggccattgccacgcagatcctggcctgccggggcttctccggccacaaccttgaatacttgctgcgtctggcagacttcatgcagctctgtgggcctcaggcgcaggacgagcacctggcagccatcgtggacgctgtgggcaccatgttgccctgcttctgccccaccgagcaggctctggcgctggtgtgaggggctgagcccctgcggggagtgctcatgtggacatcagggccagacacccactccagtgcacaagacagacttgcgaccgcttgagcccactgagcagatatggtgggtggctggaggcttctctttctcagtccctgcctgtctgccagcctgcagctctcctgcttgacactgacttactacttgaaactttatttattgcaccatgttggtgtggtgggcaggtggagggcctgccctggacacaggggccctgctgagcagtggccccatcctggaacttgaccagattccccccagtgctgctgctaaccccacaccacccaggcctccacctccccagggagtctccaagagcctcgatcctctgctcactcagcccagccatccatagccctgggaattccacctgccaaggatcccagcaggctggatgagggatagtagggcatgaggagaaggagccctgtaaggactgaggccccggccagcccttctcctccaccagttccccagagcagagctggagctgatgcctggacacagctgctgagcctggcctgggcctcttacccacttggttgttttcttgtccctctgtctgtctgtctatctacttgtctgtctgggccactcctgcctgtgtgttggtctattcctgggaagctcatcactacaggccctggcaaccttcccagtctgtcccatactgttacccataaaactatctcttta

SEQ ID NO: 13251 - DNA, 358 bp, Homo sapiens
tgggcattgccctctggctggagtcagtcaagaagatcccaggtcccaggggctggtcagaggcctggactgtgggagcagtgggggcttgagaggaggtgaggccccggccagcccttctcctccaccagttccccagagcagagctggagctgatgcctggacacagctgctgagcctggcctgggcctcttacccacttggttgttttcttgtccctctgtctgtctgtctatctacttgtctgtctgggccactcctgcctgtgtgttggtctattcctgggaagctcatcactacaggccctggcaaccttcccagtctgtcccatactgttacccataaaactatctcttta

SEQ ID NO: 13252 - DNA, 1582 bp, Homo sapiens
aaggtttaaagggcgcctccatggggggcgctcagctggagctaccgagcggtgccaggccaggtgtgtgcgtccgtcggtctttccgtgcccacgccggagaccagccccggaggccgcctgggcctatccctgtgccaggcaccatgaagcaggagtctgcagccccgaacaccccgcccacctcgcagtcccctacgccgtccgctcagttcccccgaaacgacggcgaccctcaagcgctgtggattttcgggtacggctccctggtgtggaggcccgacttcgcctacagcgacagccgtgtgggcttcgtgcgcggctacagccgccgtttctggcagggagacaccttccatcggggcagcgacaagatgcctggccgtgtggtgacgctccttgaagatcatgagggctgcacttggggcgtggcataccaagtgcaaggggagcaggtaagcaaggccctgaagtacctgaatgtgcgagaggcagtgcttggtggctacgataccaaggaggtcaccttctatccccaagatgctcctgaccaaccactgaaggcattggcctatgtggccaccccacagaaccctggttacctgggccctgcgcctgaagaggccattgccacgcagatcctggcctgccggggcttctccggccacaaccttgaatacttgctgcgtctggcagacttcatgcagctctgtgggcctcaggcgcaggacgagcacctggcagccatcgtggacgctgtgggcaccatgttgccctgcttctgccccaccgagcaggctctggcgctggtgtgaggggctgagcccctgcggggagtgctcatgtggacatcagggccagacacccactccagtgcacaagacagacttgcgaccgcttgagcccactgagcagatatggtgggtggctggaggcttctctttctcagtccctgcctgtctgccagcctgcagctctcctgcttgacactgacttactacttgaaactttatttattgcaccatgttggtgtggtgggcaggtggagggcctgccctggacacaggggccctgctgagcagtggccccatcctggaacttgaccagattccccccagtgctgctgctaaccccacaccacccaggcctccacctccccagggagtctccaagagcctcgatcctctgctcactcagcccagccatccatagccctgggaattccacctgccaaggatcccagcaggctggatgagggatagtagggcatgaggagaaggagccctgtaaggactgaggccccggccagcccttctcctccaccagttccccagagcagagctggagctgatgcctggacacagctgctgagcctggcctgggcctcttacccacttggttgttttcttgtccctctgtctgtctgtctatctacttgtctgtctgggccactcctgcctgtgtgttggtctattcctgggaagctcatcactacaggccctggcaaccttcccagtctgtcccatactgttacccataaaactatctctttaaaaaaaaaaaaggggggggcggaaaagaa

SEQ ID NO: 13253 - DNA, 1198 bp, Homo sapiens
aaaatatttcttccctccctagcctggccgtgtggtgacgctccttgaagatcatgagggctgcacttggggcgtggcataccaagtgcaaggggagcaggtaagcaaggccctgaagtacctgaatgtgcgagaggcagtgcttggtggctacgataccaaggaggtcaccttctatccccaagatgctcctgaccaaccactgaaggcattggcctatgtggccaccccacagaaccctggttacctgggccctgcgcctgaagaggccattgccacgcagatcctggcctgccggggcttctccggccacaaccttgaatacttgctgcgtctggcagacttcatgcagctctgtgggcctcaggcgcaggacgagcacctggcagccatcgtggacgctgtgggcaccatgttgccctgcttctgccccaccgagcaggctctggcgctggtgtgaggggctgagcccctgcggggagtgctcatgtggacatcagggccagacacccactccagtgcacaagacagacttgcgaccgcttgagcccactgagcagatatggtgggtggctggaggcttctctttctcagtccctgcctgtctgccagcctgcagctctcctgcttgacactgacttactacttgaaactttatttattgcaccatgttggtgtggtgggcaggtggagggcctgccctggacacaggggccctgctgagcagtggccccatcctggaacttgaccagattccccccagtgctgctgctaaccccacaccacccaggcctccacctccccagggagtctccaagagcctcgatcctctgctcactcagcccagccatccatagccctgggaattccacctgccaaggatcccagcaggctggatgagggatagtagggcatgaggagaaggagccctgtaaggactgaggccccggccagcccttctcctccaccagttccccagagcagagctggagctgatgcctggacacagctgctgagcctggcctgggcctcttacccacttggttgttttcttgtccctctgtctgtctgtctatctacttgtctgtctgggccactcctgcctgtgtgttggtctattcctgggaagctcatcactacaggccctggcaaccttcccagtctgtcccatactgttacccataaaactatctcttta

SEQ ID NO: 13254 - DNA, 2360 bp, Homo sapiens
aaggtttaaagggcgcctccatggggggcgctcagctggagctaccgagcggtgccaggccaggtgtgtgcgtccgtcggtctttccgtgcccacgccggagaccagccccggaggccgcctgggcctatccctgtgccaggcaccatgaagcaggagtctgcagccccgaacaccccgcccacctcgcagtcccctacgccgtccgctcagttcccccgaaacgacggcgaccctcaagcgctgtggattttcgggtacggctccctggtgtggaggcccgacttcgcctacagcgacagccgtgtgggcttcgtgcgcggctacagccgccgtttctggcagggagacaccttccatcggggcagcgacaagatgcctggccgtgtggtgacgctccttgaagatcatgagggctgcacttggggcgtggcataccaagtgcaaggggagcaggtaagcaaggccctgaagtacctgaatgtgcgagaggcagtgcttggtggctacgataccaaggaggtcaccttctatccccaagatgctcctgaccaaccactgaaggcattggcctatgtggccaccccacagaaccctggttacctgggccctgcgcctgaagaggccattgccacgcagatcctggcctgccggggcttctccggccacaaccttgaatacttgctgcgtctggcagacttcatgcagctctgtgggcctcaggcgcaggacgagcacctggcagccatcgtggacgctgtgggcaccatgttgccctgcttctgccccaccgagcaggctctggcgctggtgtgaggggctgagcccctgcggggagtgctcatgtggacatcagggccagacacccactccagtgcacaagacagacttgcgaccgcttgagcccactgagcagatatggtgggtggctggaggcttctctttctcagtccctgcctgtctgccagcctgcagctctcctgcttgacactgacttactacttgaaactttatttattgcaccatgttggtgtggtgggcaggtggagggcctgccctggacacaggggccctgctgagcagtggccccatcctggaacttgaccagattccccccagtgctgctgctaaccccacaccacccaggcctccacctccccagggagtctccaagagcctcgatcctctgctcactcagcccagccatccatagccctgggaattccacctgccaaggatcccagcaggctggatgagggatagtagggcatgaggagaaggagccctgtaaggactgaggccccggccagcccttctcctccaccagttccccagagcagagctggagctgatgcctggacacagctgctgagcctggcctgggcctcttacccacttggttgttttcttgtccctctgtctgtctgtctatctacttgtctgtctgggccactcctgcctgtgtgttggtctattcctgggaagctcatcactacaggccctggcaaccttcccagtctgtcccatactgttacccataaaactatctctttatctgtgctgtgccggaatgtggttctttctcagatgggggtttggggcaagtgaggtggtgatgccctggaaggctcctaagaggggaaagggctccctcttcctctccttccctctcttcccaggaggggcagctgggcaggcagaattagcaggtgacatcactctcatgggtacagttcatgccttacgcatgcaaatagtaccccctgagttgtgcagaattcagctcatgctctacttggcagccctgtgagcagtgtccttgccaccaacctggactctgtctcatcctgcccagctgccccaaggaggctggcaggcttggagctcagaccagctcttcctccagctgcagggccagcggctgcctcttcctaacagctaggccagaaccctggtgtcctgctaaaggagcacgtgggttagggtagggtgatgacaacttctaaggcaaggctaatggcagggacctgtagcctggaggacctggtgtcccttttactttcagagtctgagtgctcactgttgcctccgggagtgtggtgttgcctgtgccttccccattgccatcacctgccctggtttacccacactggaatgcgggccccaagtttaccccctgcctgtccccagatgttcttgtctagcccttggggacagatcacagctccaggatctcagcctgggcctgagctcctcatcaggagtggcctcttagtgctactcaatccctgaacttgcagaatggggcagacccaaaatgacaggctctagcagcagaagagcttgaggccaagggctggg

SEQ ID NO: 13255 - DNA, 373 bp, Homo sapiens
gaagtaccataacacaactagaatatatctcaatattgattgttctgcatcaatttttgatggtagagactttgtcgttttgaggagcaggttcaattcttcctttatttctggaaacttttcacatatggcatctgtggatatttttctatcccatttattaggctctttacttaaggcatgtaaattatcttaatgttggatcagcattagcgtgaccatctaaagtccttcctccatgcccttgtttcgatttgtgtgcatgtctcttctgcatcttgctcttcctaatttacttctttgatccaccatgtggttctttgagttctcggtttcttttctgagctcagtaatctccttttttaaaaaaaaa

SEQ ID NO: 13256 - DNA, 508 bp, Homo sapiens
agcctcacttagctttgagacagcattttgcagcaaggtaatctttgagtcctgaatgcattttggagccttaagataccgaatgagatatgtgccctgtttggactgtatgattttatagcaatggtcttttagtttatttctaagaaaaacaaactgtttgaataatccccataacatgtcaccagctggagttccagaacggggaatctatcttgccatgcgtttcaaccttgagagcccaaactgtaaataaactcatttaggtgattcagtttaatgccaactacacaaagccaaaataaaatccgagcgcgcaaatgaactgaaagataaagtttgtactcatcaggaaagacaagctttctttaacaggaggggaatataatccctcctaaacagaagacctcataaccaggatggacaaaatccctcataaacaggaggccttatgtccagcaggtagaaaatccctcataagcagaaggcctcatagataggatggggg

SEQ ID NO: 13257 - DNA, 689 bp, Homo sapiens
tcctttaacctataatgcacacagtgttttcttaatagtatgtgactgtagtcgtataatactggtttaagtcaaatatgatttgaagattactaaatggtattaggtatcttcaaaccaatgatggataagtaaattcccaatatttaatttcagtataaaactgatctagcggtcttaatttggctgctctacagggcataagaaaagttatcatttggaacaaagagctcttttatgaatatgaggttttcaacttaaaaaaacccaacaaccataagacactatccacatatgctttacattttttaacacattttcatatgtatgatttcattcagtcttcagaataaccctatgtaataggtatcacagtgttcgttttatagattaagagagtgaagaaaacgagttcacattaaatggtaaaaataacacagcttgtgggcagagccacgacataatccgagagtcttgactccaaatcccatgccctctccactaaagctcgctatattaatctgaaaatgcctgtaaattgtagattatcaaaagtagttgttatttctctaaaaaatctacctagagaagaaggaaattgaagaattccaagcaaagaaaataaaatctttggtttttgacaagtgacagggttgccacagatgtaggcgctcccatcttccccccac

SEQ ID NO: 13258 - DNA, 483 bp, Homo sapiens
agctgtggaggaaggagagctgttctgcatccataaaaaccagttaaaagggatttcataaggtctgaaattgagaactttcccaagaatactgcatcttgttctcttgtgcaatatacagacgtgtgaatattcctaacagtaaccaaatgggtgcactctctgtgaaaacgcatctttcaaagagttttttaaacaaaggagactcctgggcctttagaaataattgccacaaactgcaaaaacaatctccaacctcccacttctgtaattctcatctgttgtcttactagaaaatttatttctctggtaataatgttataattgatatccctgtcttctcaagatgtaaaatacttgtaaaaacttctctgtccatcagaaaataattattggcacttttcttctctctcatgtgcatgatggaacaataaaaagcttatggctttgctagatctattatttaacaaacaatttgagagt

SEQ ID NO: 13259 - DNA, 7020 bp, Homo sapiens
  misc_feature (687)..(687): n is a, c, g, or t
  misc_feature (1757)..(1757): n is a, c, g, or t
  misc_feature (2954)..(2954): n is a, c, g, or t
  misc_feature (4241)..(4241): n is a, c, g, or t
  misc_feature (4770)..(4770): n is a, c, g, or t
ggctccagctccagcagccatggcgccttgtgcagcctcctttgtgggtggagaagagctcagccaaccttggatggagcgtcggtgaagcaagagctcagaggggagaggggctggcctggcatgaccgtcgccagtccccccacctggctgggtgatgtcccccggcccgggttctggggccccttggcagtaccatggagcaactgacaaccctcccacggcctggggaccctggagccatggagccatgggcactgcccacctggcatagctggactccaggtcgagggggtgaacctagcagtgcagccccaagcatcgctgatactcctccggcagctctgcagcttcaagaactgaggtctgaggagagttccaagcccaaaggagacgggagctccaggcccgtggggggaactgaccctgaaggagcagaggcttgtctgcccagcctgggccagcaagcatccagctctggacccgcctgccagaggccagaggatgaggaagtggaggctttcctgaaggccaagctgaatatgagctttggggacaggcccaatctggagctgctgagggccctgggggagctgcggcagcgctgtgccatccttaaggaggaaaaccagatgctgaggaagagcagcttccctgagacagaagagaaggtgcggaggctgaagnggaagaacgccgagctggcggtcattgccaagcgcctggaggagagggcccgaaagctgcaggaaacgaacctgagggtggtgagtgcccccttgccccggccggggaccagcttggagttgtgtcggaaggccctagcccgccagcgagcccgggacctcagtgagacagccagtgcactgctggccaaggacaagcagattgctgccttgcagcgggagtgcagggagctgcaggccaggctcactctggtgggcaaggagggtccccagtggctccacgtgcgggacttcgatcggctgctgcgcgagtcccagcgggaggtgctgcggctgcagaggcagatcgcgctgcgcaaccagcgggagacgctcccgctcccgccgtcctggcccccgggccctgctctccaggccagagcaggggcgcctgctcccggggccccgggagaggccacgccccaggaggatgcggacaacctacccgtgattctaggggagccagagaaagagcagagggtgcagcagctggaatcggagctcagcaagaagcggaagaaatgcgagagcctggagcaggaagcccggaaaaagcagaggcgatgtgaggagctggaactgcagctgagacaagcgcagaatgagaatgcccgcctggtggaggagaactcccggctcagtgggagagccacagagaaggagcaggtggagtgggagaatgcggagctgaggggccagctcctgggggtgacacaggagagggactcagcccttcgcaagagccagggcctgcagagcaagctggagagcctggagcaagtgctgaagcacatgcgggaggtggcccagcggcggcagcagctggaggtggagcatgaacaggctcggctcagcctacgggagaagcaggaggaggtccggagactgcagcaggcccaggctgaagcccagagggaacatgaaggagccgtgcagctgctggagtctaccttggattccatgcaggcccgggttcgagagctcgaagaacagtgccgcagccaaaccgagcagttcagcctcctggcacangaactccaggctttccgcctgcacccgggccccttggatctgctcacatctgccctggactgtgggagccttggagactgcccaccacccccctgctgctgctccattccccagccttgccgggggtctggccccaaagaccttgacctcccgccgggctcccctgggcgctgcaccccaaagtcttccgagcctgcccctgccactctcactggggtccctcgaaggacagccaagaaggcagagtctctctccaactcctcccactccgagtccatccacaacagccccaagtcatgccctacacctgaggtggacacagccagtgaggtagaggagctggaggcagacagtgtctccctgctcccagctgcgccagagggcagccggggaggagccaggatccaggtcttcctagcacgttatagctacaacccctttgagggtcccaatgagaatccagaagcagagcttccgctgacagctggcgagtacatctacatctatggcaacatggatgaggatggcttttttgaaggagagctcatggatggccgaaggggcctggtcccttccaattttgtagagcgtgtgtcggatgatgacctcctgacctccctccctccagagctggccgatttgtcccacagctcaggccctgaactcagtttcctgagtgtaggtgggggtggcagcagtagcgggggccaaagcagtgtgggaaggagccagcccagacctgaggaggaggatgcaggggacgagctcagtctgagcccatcaccggagggcctgggcgagcctcctgccgtgccttacccccgccgtctggtggtcctcaagcagctggcccacagcgtggtgctggcctgggagccgcctcctgagcaagtggagctacacggcttccatatctgtgtgaatggggagctgcgacaggccctggggcctggggcgccacccaaggccgtgctggagaacctggacctgtgggccgggccccttcacatttctgtccaggccctgactagccggggcagctctgacccactgcgctgttgcttggcggtgggtgcccgggccggagtggtgcccagccagctgcgggtccatcggttgacagccacatctgctgagatcacctgggtgcccggcaatagcaacttggcccatgccatctacctcaatggggaagantgcccacctgccagccccagtacctactgggccaccttctgccacttacggcctggcacaccctatcaggcccaagtggaggctcagctcccaccccaagggccctgggaaccaggctgggagaggctggagcagcgggctgccaccctgcagttcaccacactcccagcaggcccacctgatgcccctctggatgtgcagatcgagcctgggccctcccctgggatcttgatcatcagttggctcccagtcaccatcgatgctgctggcacatccaacggtgtccgggtcacaggctatgccatctacgctgatgggcagaagatcatggaggtggcctcacccacggcaggcagtgtactggtggagttgtcccagctgcagctgctgcaggtgtgtcgtgaggtggtcgtgcgcaccatgtcgccccacggggagtcggcggactccatcccggctcctatcactcccgccctggctccggccagcctgccagcccgagtctcctgcccctcaccgcacccaagcccagaggccagagcgccccttgcttcagcctccccagggcctggagaccccagctctcctctccagcaccctgctccccttggaactcaagagcctccaggagcaccccctgcaagcccttccagagagatggcaaaagggtcccacgaggaccctccagcaccttgctcccaggaggaggctggggcagcagtgctgggcacctcagaggagaggacagccagcacatctaccctgggtgagaaggaccctggccccgcagctccctcactggccaagcaggaggccgagtggactgcaggagaggcctgtccggcctccagctccacccagggagcacgggcccagcaggcgccaaataccgagatgtgccaaggaggagacccagggtctgggctgaggcccagggctgagaaggaggacacagcagagcttggggttcatctggtgaactccctcgtggaccacggccgcaactcagacctgtcagacatccaggaggaagaggaagaggaggaggaggaggaggaagaggagctgggttccaggacttgctccttccagaagcaggttgctggcaacagcatcagggagaatggggccaagtcccagcccgaccccttttgtgagactgacagcgatgaggagatcttggagcagatcctggagctgcccctccagcagttctgtagcaagaagctctttagcatcccggaggaggaggaagaggaagaggaggacgaggaggaggagaagtcnggggcaggctgttcttcccgagaccctggcccgcctgaacctgcattgctggggctgggctgtgacagtggtcagccccgaagacctggccagtgtcccttgtctcctgagtcctccagggctggagactgcctggaagacatgcctggattagttggtggaagcagccggaggagaggagggggctcccctgagaagcccccaagccgcaggcggcctccagatccccgagaacactgcagccgacttctcagcaacaatgggccccaggcctctggacgactgggccccacacgggagaggggtggcctccccgtaattgagggccccaggactggactagaggctagcgggagaggccggctgggcccttcccggaggtgctcccgtggccgggcgctggagcctggcctggccagctgcctttcccccaagtgcttggaaatcagcattgaatatgattcggaggatgagcaggaggcgggcagcgggggcatcagcatcaccagctcctgctaccctggagatngggaggcctggggcacagcaactgtaggaaggcccagggggcctccgaaggccaattcaggccccaagccctacccacgcctcccagcctgggagaaaggggaaccagagcggagaggccgcagtgcgacgggcagagccaaggagccactctcccgggcaacagagaccggagaggccagagggcaggacggctctgggcggaggggcccccagaagagaggtgtccgagtcctcaggccaagcactgcagagctagtccctgcgaggagcccctcagaaacactggcttaccagcacctacccgtcaggatctttgtggctctgtttgactatgaccccgtgtcaatgtcgcccaatcctgatgctggagaagaagagcttcccttccgagagggtcagatcctgaaggtgtttggggacaaggatgccgatggcttctaccagggcgaaggtgggggccggacaggctacattccctgcaacatggtggctgaggtggctgtggacagccctgctgggagacagcaactgctccagcggggttatttgtccccagatattctccttgagggctcagggaatggtccgtttgtgtactccacagcccacacaactgggcctcctcccaagccccgccgctccaagaaagctgagtcggaaggccctgcccagccctgtccaggcccccctaagctggtcccctctgctgacctgaaagctccccactccatggtggctgcatttgactacaacccccaggagagttcccccaatatggacgtggaggcagagctgcccttccgggcaggggatgtcattactgtgtttgggggcatggacgatgacggtttctactatggggaattaaatggacaaaggggcctggttccatccaacttcctggagggccctgggcctgaggcaggcggcctggacagggaacccaggacaccccaggctgagagtcagagaacgaggaggagaagagtccagtgctagatggagatagatatatgtagagagagcaacatgactggggctgcaccacacaagggtccccagggcccccaggtgggccttgtacccccagctctggcagcgcccccaggattgaacgtggggagccccagggcagaagcgagaaggtgtggggtttcttctccaaggggaagcagctcctcaggaggctgggctctgggaagaaggagtgaagctgtggcccatcctgcaggcagaagaggccctgagaggcccccagatcactgtctctgctgagcagggaaggctcagactgggcccagagcccccgttcttctgcgttaacactgtggcattcagagggaatcaaagagccttggtgaaggtcagagctaaatggctccttaaggatgaactctctagagaagcaccttcctcctacaggaggggaaactgagcccacagtgagtatgtaacttgaccaaggtcactgagccaggactggacccaggaccctcgcgtcctggtccacccacctcgtctactagtgtcccacagtgctgcgctagtcccttctgccacccttcccagtcccaggacgggccctggagggagaaaggagcctgtgccccctgatggctctggctgtcctgatcctgtcttccctcccctgaaggaaagtttgcactggattttattggagccccatctccccagcgggcaggcgggcggagcctgtatatatgtatatactcagtgcctcagttcagcttcctccacctcgcttccactgcacaggcccaggaaggagaaaggccaagccaaagtgggccccaccctgcccccgtcgtgctccatccttccctgccggggcctgctggcccctgtaaggtcccgcccccaaagaccctggggccagcggggccgaaagcggagttgggtttgccttattttgctcattggattcaagttcttttgcatagttttcttctaacccctgttggagtccaggggctggagaaaaggacagatttatgcagctattttcatacattccctgttcagagtggggtaggggttctccgccgttacccgatccactccatcccccaccctctgaggggtgagtgtgtctttgcatgtttcctttgctgtggtgggagatagtttgactgaacccccaccttgaccttggtctccaggggtgtggaatggtgggggaatttgtttaaaaagacattttattataataaagtctattttcacaaaa

SEQ ID NO: 13260 - DNA, 7164 bp, Homo sapiens
  misc_feature (687)..(687): n is a, c, g, or t
  misc_feature (1577)..(1577): n is a, c, g, or t
  misc_feature (2774)..(2774): n is a, c, g, or t
  misc_feature (4061)..(4061): n is a, c, g, or t
  misc_feature (4590)..(4590): n is a, c, g, or t
ggctccagctccagcagccatggcgccttgtgcagcctcctttgtgggtggagaagagctcagccaaccttggatggagcgtcggtgaagcaagagctcagaggggagaggggctggcctggcatgaccgtcgccagtccccccacctggctgggtgatgtcccccggcccgggttctggggccccttggcagtaccatggagcaactgacaaccctcccacggcctggggaccctggagccatggagccatgggcactgcccacctggcatagctggactccaggtcgagggggtgaacctagcagtgcagccccaagcatcgctgatactcctccggcagctctgcagcttcaagaactgaggtctgaggagagttccaagcccaaaggagacgggagctccaggcccgtggggggaactgaccctgaaggagcagaggcttgtctgcccagcctgggccagcaagcatccagctctggacccgcctgccagaggccagaggatgaggaagtggaggctttcctgaaggccaagctgaatatgagctttggggacaggcccaatctggagctgctgagggccctgggggagctgcggcagcgctgtgccatccttaaggaggaaaaccagatgctgaggaagagcagcttccctgagacagaagagaaggtgcggaggctgaagnggaagaacgccgagctggcggtcattgccaagcgcctggaggagagggcccgaaagctgcaggaaacgaacctgagggtggagggtccccagtggctccacgtgcgggacttcgatcggctgctgcgcgagtcccagcgggaggtgctgcggctgcagaggcagatcgcgctgcgcaaccagcgggagacgctcccgctcccgccgtcctggcccccgggccctgctctccaggccagagcaggggcgcctgctcccggggccccgggagaggccacgccccaggaggatgcggacaacctacccgtgattctaggggagccagagaaagagcagagggtgcagcagctggaatcggagctcagcaagaagcggaagaaatgcgagagcctggagcaggaagcccggaaaaagcagaggcgatgtgaggagctggaactgcagctgagacaagcgcagaatgagaatgcccgcctggtggaggagaactcccggctcagtgggagagccacagagaaggagcaggtggagtgggagaatgcggagctgaggggccagctcctgggggtgacacaggagagggactcagcccttcgcaagagccagggcctgcagagcaagctggagagcctggagcaagtgctgaagcacatgcgggaggtggcccagcggcggcagcagctggaggtggagcatgaacaggctcggctcagcctacgggagaagcaggaggaggtccggagactgcagcaggcccaggctgaagcccagagggaacatgaaggagccgtgcagctgctggagtctaccttggattccatgcaggcccgggttcgagagctcgaagaacagtgccgcagccaaaccgagcagttcagcctcctggcacangaactccaggctttccgcctgcacccgggccccttggatctgctcacatctgccctggactgtgggagccttggagactgcccaccacccccctgctgctgctccattccccagccttgccgggggtctggccccaaagaccttgacctcccgccgggctcccctgggcgctgcaccccaaagtcttccgagcctgcccctgccactctcactggggtccctcgaaggacagccaagaaggcagagtctctctccaactcctcccactccgagtccatccacaacagccccaagtcatgccctacacctgaggtggacacagccagtgaggtagaggagctggaggcagacagtgtctccctgctcccagctgcgccagagggcagccggggaggagccaggatccaggtcttcctagcacgttatagctacaacccctttgagggtcccaatgagaatccagaagcagagcttccgctgacagctggcgagtacatctacatctatggcaacatggatgaggatggcttttttgaaggagagctcatggatggccgaaggggcctggtcccttccaattttgtagagcgtgtgtcggatgatgacctcctgacctccctccctccagagctggccgatttgtcccacagctcaggccctgaactcagtttcctgagtgtaggtgggggtggcagcagtagcgggggccaaagcagtgtgggaaggagccagcccagacctgaggaggaggatgcaggggacgagctcagtctgagcccatcaccggagggcctgggcgagcctcctgccgtgccttacccccgccgtctggtggtcctcaagcagctggcccacagcgtggtgctggcctgggagccgcctcctgagcaagtggagctacacggcttccatatctgtgtgaatggggagctgcgacaggccctggggcctggggcgccacccaaggccgtgctggagaacctggacctgtgggccgggccccttcacatttctgtccaggccctgactagccggggcagctctgacccactgcgctgttgcttggcggtgggtgcccgggccggagtggtgcccagccagctgcgggtccatcggttgacagccacatctgctgagatcacctgggtgcccggcaatagcaacttggcccatgccatctacctcaatggggaagantgcccacctgccagccccagtacctactgggccaccttctgccacttacggcctggcacaccctatcaggcccaagtggaggctcagctcccaccccaagggccctgggaaccaggctgggagaggctggagcagcgggctgccaccctgcagttcaccacactcccagcaggcccacctgatgcccctctggatgtgcagatcgagcctgggccctcccctgggatcttgatcatcagttggctcccagtcaccatcgatgctgctggcacatccaacggtgtccgggtcacaggctatgccatctacgctgatgggcagaagatcatggaggtggcctcacccacggcaggcagtgtactggtggagttgtcccagctgcagctgctgcaggtgtgtcgtgaggtggtcgtgcgcaccatgtcgccccacggggagtcggcggactccatcccggctcctatcactcccgccctggctccggccagcctgccagcccgagtctcctgcccctcaccgcacccaagcccagaggccagagcgccccttgcttcagcctccccagggcctggagaccccagctctcctctccagcaccctgctccccttggaactcaagagcctccaggagcaccccctgcaagcccttccagagagatggcaaaagggtcccacgaggaccctccagcaccttgctcccaggaggaggctggggcagcagtgctgggcacctcagaggagaggacagccagcacatctaccctgggtgagaaggaccctggccccgcagctccctcactggccaagcaggaggccgagtggactgcaggagaggcctgtccggcctccagctccacccagggagcacgggcccagcaggcgccaaataccgagatgtgccaaggaggagacccagggtctgggctgaggcccagggctgagaaggaggacacagcagagcttggggttcatctggtgaactccctcgtggaccacggccgcaactcagacctgtcagacatccaggaggaagaggaagaggaggaggaggaggaggaagaggagctgggttccaggacttgctccttccagaagcaggttgctggcaacagcatcagggagaatggggccaagtcccagcccgaccccttttgtgagactgacagcgatgaggagatcttggagcagatcctggagctgcccctccagcagttctgtagcaagaagctctttagcatcccggaggaggaggaagaggaagaggaggacgaggaggaggagaagtcnggggcaggctgttcttcccgagaccctggcccgcctgaacctgcattgctggggctgggctgtgacagtggtcagccccgaagacctggccagtgtcccttgtctcctgagtcctccagggctggagactgcctggaagacatgcctggattagttggtggaagcagccggaggagaggagggggctcccctgagaagcccccaagccgcaggcggcctccagatccccgagaacactgcagccgacttctcagcaacaatgggccccaggcctctggacgactgggccccacacgggagaggggtggcctccccgtaattgagggccccaggactggactagaggctagcgggagaggccggctgggcccttcccggaggtgctcccgtggccgggcgctggagcctggcctggccagctgcctttcccccaagtgcttggaaatcagcattgaatatgattcggaggatgagcaggaggcgggcagcgggggcatcagcatcaccagctcctgctaccctggagatngggaggcctggggcacagcaactgtaggaaggcccagggggcctccgaaggccaattcaggccccaagccctacccacgcctcccagcctgggagaaaggggaaccagagcggagaggccgcagtgcgacgggcagagccaaggagccactctcccgggcaacagagaccggagaggccagagggcaggacggctctgggcggaggggcccccagaagagaggtgtccgagtcctcaggccaagcactgcagagctagtccctgcgaggagcccctcagaaacactggcttaccagcacctacccgtcaggatctttgtggctctgtttgactatgaccccgtgtcaatgtcgcccaatcctgatgctggagaagaagagcttcccttccgagagggtcagatcctgaaggtgtttggggacaaggatgccgatggcttctaccagggcgaaggtgggggccggacaggctacattccctgcaacatggtggctgaggtggctgtggacagccctgctgggagacagcaactgctccagcggggttatttgtccccagatattctccttgagggctcaggtatgacctgctgctgtccctcacccacctcccaccagcccccttccaactccacctgaccctgagcaattgttgtgtctggggtgctcccacttacccagactctagcagagccttggagcctgccttgaaccctgctgcgtagtggtcagactgtacgtgggctggccgcgtggagtgggcgtctgttgcagaggggaatacagccatgcagccaggaattttgggtcctggaggttgggtggggctcttgtcagggatgggagatgaatgcccttacgaaacaagctcagtaacctagcacggccctgagaggaaactccagagtcccagtcctgtctctcccacctcccctgcctcgctttctctctgcttttctggatcagggaatggtccgtttgtgtactccacagcccacacaactgggcctcctcccaagccccgccgctccaagaaagctgagtcggaaggccctgcccagccctgtccaggcccccctaagctggtcccctctgctgacctgaaagctccccactccatggtggctgcatttgactacaacccccaggagagttcccccaatatggacgtggaggcagagctgcccttccgggcaggggatgtcattactgtgtttgggggcatggacgatgacggtttctactatggggaattaaatggacaaaggggcctggttccatccaacttcctggagggccctgggcctgaggcaggcggcctggacagggaacccaggacaccccaggctgagagtcaggactggggctgcaccacacaagggtccccagggcccccaggtgggccttgtacccccagctctggcagcgcccccaggattgaacgtggggagccccagggcagaagcgagaaggtgtggggtttcttctccaaggggaagcagctcctcaggaggctgggctctgggaagaaggagtgaagctgtggcccatcctgcaggcagaagaggccctgagaggcccccagatcactgtctctgctgagcagggaaggctcagactgggcccagagcccccgttcttctgcgttaacactgtggcattcagagggaatcaaagagccttggtgaaggtcagagctaaatggctccttaaggatgaactctctagagaagcaccttcctcctacaggaggggaaactgagcccacagtgagtatgtaacttgaccaaggtcactgagccaggactggacccaggaccctcgcgtcctggtccacccacctcgtctactagtgtcccacagtgctgcgctagtcccttctgccacccttcccagtcccaggacgggccctggagggagaaaggagcctgtgccccctgatggctctggctgtcctgatcctgtcttccctcccctgaaggaaagtttgcactggattttattggagccccatctccccagcgggcaggcgggcggagcctgtatatatgtatatactcagtgcctcagttcagcttcctccacctcgcttccactgcacaggcccaggaaggagaaaggccaagccaaagtgggccccaccctgcccccgtcgtgctccatccttccctgccggggcctgctggcccctgtaaggtcccgcccccaaagaccctggggccagcggggccgaaagcggagttgggtttgccttattttgctcattggattcaagttcttttgcatagttttcttctaacccctgttggagtccaggggctggagaaaaggacagatttatgcagctattttcatacattccctgttcagagtggggtaggggttctccgccgttacccgatccactccatcccccaccctctgaggggtgagtgtgtctttgcatgtttcctttgctgtggtgggagatagtttgactgaacccccaccttgaccttggtctccaggggtgtggaatggtgggggaatttgtttaaaaagacattttattataataaagtctattttcacaaaa

SEQ ID NO: 13261 - DNA, 6751 bp, Homo sapiens
  misc_feature (687)..(687): n is a, c, g, or t
  misc_feature (1577)..(1577): n is a, c, g, or t
  misc_feature (2774)..(2774): n is a, c, g, or t
  misc_feature (4061)..(4061): n is a, c, g, or t
  misc_feature (4590)..(4590): n is a, c, g, or t
ggctccagctccagcagccatggcgccttgtgcagcctcctttgtgggtggagaagagctcagccaaccttggatggagcgtcggtgaagcaagagctcagaggggagaggggctggcctggcatgaccgtcgccagtccccccacctggctgggtgatgtcccccggcccgggttctggggccccttggcagtaccatggagcaactgacaaccctcccacggcctggggaccctggagccatggagccatgggcactgcccacctggcatagctggactccaggtcgagggggtgaacctagcagtgcagccccaagcatcgctgatactcctccggcagctctgcagcttcaagaactgaggtctgaggagagttccaagcccaaaggagacgggagctccaggcccgtggggggaactgaccctgaaggagcagaggcttgtctgcccagcctgggccagcaagcatccagctctggacccgcctgccagaggccagaggatgaggaagtggaggctttcctgaaggccaagctgaatatgagctttggggacaggcccaatctggagctgctgagggccctgggggagctgcggcagcgctgtgccatccttaaggaggaaaaccagatgctgaggaagagcagcttccctgagacagaagagaaggtgcggaggctgaagnggaagaacgccgagctggcggtcattgccaagcgcctggaggagagggcccgaaagctgcaggaaacgaacctgagggtggagggtccccagtggctccacgtgcgggacttcgatcggctgctgcgcgagtcccagcgggaggtgctgcggctgcagaggcagatcgcgctgcgcaaccagcgggagacgctcccgctcccgccgtcctggcccccgggccctgctctccaggccagagcaggggcgcctgctcccggggccccgggagaggccacgccccaggaggatgcggacaacctacccgtgattctaggggagccagagaaagagcagagggtgcagcagctggaatcggagctcagcaagaagcggaagaaatgcgagagcctggagcaggaagcccggaaaaagcagaggcgatgtgaggagctggaactgcagctgagacaagcgcagaatgagaatgcccgcctggtggaggagaactcccggctcagtgggagagccacagagaaggagcaggtggagtgggagaatgcggagctgaggggccagctcctgggggtgacacaggagagggactcagcccttcgcaagagccagggcctgcagagcaagctggagagcctggagcaagtgctgaagcacatgcgggaggtggcccagcggcggcagcagctggaggtggagcatgaacaggctcggctcagcctacgggagaagcaggaggaggtccggagactgcagcaggcccaggctgaagcccagagggaacatgaaggagccgtgcagctgctggagtctaccttggattccatgcaggcccgggttcgagagctcgaagaacagtgccgcagccaaaccgagcagttcagcctcctggcacangaactccaggctttccgcctgcacccgggccccttggatctgctcacatctgccctggactgtgggagccttggagactgcccaccacccccctgctgctgctccattccccagccttgccgggggtctggccccaaagaccttgacctcccgccgggctcccctgggcgctgcaccccaaagtcttccgagcctgcccctgccactctcactggggtccctcgaaggacagccaagaaggcagagtctctctccaactcctcccactccgagtccatccacaacagccccaagtcatgccctacacctgaggtggacacagccagtgaggtagaggagctggaggcagacagtgtctccctgctcccagctgcgccagagggcagccggggaggagccaggatccaggtcttcctagcacgttatagctacaacccctttgagggtcccaatgagaatccagaagcagagcttccgctgacagctggcgagtacatctacatctatggcaacatggatgaggatggcttttttgaaggagagctcatggatggccgaaggggcctggtcccttccaattttgtagagcgtgtgtcggatgatgacctcctgacctccctccctccagagctggccgatttgtcccacagctcaggccctgaactcagtttcctgagtgtaggtgggggtggcagcagtagcgggggccaaagcagtgtgggaaggagccagcccagacctgaggaggaggatgcaggggacgagctcagtctgagcccatcaccggagggcctgggcgagcctcctgccgtgccttacccccgccgtctggtggtcctcaagcagctggcccacagcgtggtgctggcctgggagccgcctcctgagcaagtggagctacacggcttccatatctgtgtgaatggggagctgcgacaggccctggggcctggggcgccacccaaggccgtgctggagaacctggacctgtgggccgggccccttcacatttctgtccaggccctgactagccggggcagctctgacccactgcgctgttgcttggcggtgggtgcccgggccggagtggtgcccagccagctgcgggtccatcggttgacagccacatctgctgagatcacctgggtgcccggcaatagcaacttggcccatgccatctacctcaatggggaagantgcccacctgccagccccagtacctactgggccaccttctgccacttacggcctggcacaccctatcaggcccaagtggaggctcagctcccaccccaagggccctgggaaccaggctgggagaggctggagcagcgggctgccaccctgcagttcaccacactcccagcaggcccacctgatgcccctctggatgtgcagatcgagcctgggccctcccctgggatcttgatcatcagttggctcccagtcaccatcgatgctgctggcacatccaacggtgtccgggtcacaggctatgccatctacgctgatgggcagaagatcatggaggtggcctcacccacggcaggcagtgtactggtggagttgtcccagctgcagctgctgcaggtgtgtcgtgaggtggtcgtgcgcaccatgtcgccccacggggagtcggcggactccatcccggctcctatcactcccgccctggctccggccagcctgccagcccgagtctcctgcccctcaccgcacccaagcccagaggccagagcgccccttgcttcagcctccccagggcctggagaccccagctctcctctccagcaccctgctccccttggaactcaagagcctccaggagcaccccctgcaagcccttccagagagatggcaaaagggtcccacgaggaccctccagcaccttgctcccaggaggaggctggggcagcagtgctgggcacctcagaggagaggacagccagcacatctaccctgggtgagaaggaccctggccccgcagctccctcactggccaagcaggaggccgagtggactgcaggagaggcctgtccggcctccagctccacccagggagcacgggcccagcaggcgccaaataccgagatgtgccaaggaggagacccagggtctgggctgaggcccagggctgagaaggaggacacagcagagcttggggttcatctggtgaactccctcgtggaccacggccgcaactcagacctgtcagacatccaggaggaagaggaagaggaggaggaggaggaggaagaggagctgggttccaggacttgctccttccagaagcaggttgctggcaacagcatcagggagaatggggccaagtcccagcccgaccccttttgtgagactgacagcgatgaggagatcttggagcagatcctggagctgcccctccagcagttctgtagcaagaagctctttagcatcccggaggaggaggaagaggaagaggaggacgaggaggaggagaagtcnggggcaggctgttcttcccgagaccctggcccgcctgaacctgcattgctggggctgggctgtgacagtggtcagccccgaagacctggccagtgtcccttgtctcctgagtcctccagggctggagactgcctggaagacatgcctggattagttggtggaagcagccggaggagaggagggggctcccctgagaagcccccaagccgcaggcggcctccagatccccgagaacactgcagccgacttctcagcaacaatgggccccaggcctctggacgactgggccccacacgggagaggggtggcctccccgtaattgagggccccaggactggactagaggctagcgggagaggccggctgggcccttcccggaggtgctcccgtggccgggcgctggagcctggcctggccagctgcctttcccccaagtgcttggaaatcagcattgaatatgattcggaggatgagcaggaggcgggcagcgggggcatcagcatcaccagctcctgctaccctggagatngggaggcctggggcacagcaactgtaggaaggcccagggggcctccgaaggccaattcaggccccaagccctacccacgcctcccagcctgggagaaaggggaaccagagcggagaggccgcagtgcgacgggcagagccaaggagccactctcccgggcaacagagaccggagaggccagagggcaggacggctctgggcggaggggcccccagaagagaggtgtccgagtcctcaggccaagcactgcagagctagtccctgcgaggagcccctcagaaacactggcttaccagcacctacccgtcaggatctttgtggctctgtttgactatgaccccgtgtcaatgtcgcccaatcctgatgctggagaagaagagcttcccttccgagagggtcagatcctgaaggtgtttggggacaaggatgccgatggcttctaccagggcgaaggtgggggccggacaggctacattccctgcaacatggtggctgaggtggctgtggacagccctgctgggagacagcaactgctccagcggggttatttgtccccagatattctccttgagggctcagcccacacaactgggcctcctcccaagccccgccgctccaagaaagctgagtcggaaggccctgcccagccctgtccaggcccccctaagctggtcccctctgctgacctgaaagctccccactccatggtggctgcatttgactacaacccccaggagagttcccccaatatggacgtggaggcagagctgcccttccgggcaggggatgtcattactgtgtttgggggcatggacgatgacggtttctactatggggaattaaatggacaaaggggcctggttccatccaacttcctggagggccctgggcctgaggcaggcggcctggacagggaacccaggacaccccaggctgagagtcaggactggggctgcaccacacaagggtccccagggcccccaggtgggccttgtacccccagctctggcagcgcccccaggattgaacgtggggagccccagggcagaagcgagaaggtgtggggtttcttctccaaggggaagcagctcctcaggaggctgggctctgggaagaaggagtgaagctgtggcccatcctgcaggcagaagaggccctgagaggcccccagatcactgtctctgctgagcagggaaggctcagactgggcccagagcccccgttcttctgcgttaacactgtggcattcagagggaatcaaagagccttggtgaaggtcagagctaaatggctccttaaggatgaactctctagagaagcaccttcctcctacaggaggggaaactgagcccacagtgagtatgtaacttgaccaaggtcactgagccaggactggacccaggaccctcgcgtcctggtccacccacctcgtctactagtgtcccacagtgctgcgctagtcccttctgccacccttcccagtcccaggacgggccctggagggagaaaggagcctgtgccccctgatggctctggctgtcctgatcctgtcttccctcccctgaaggaaagtttgcactggattttattggagccccatctccccagcgggcaggcgggcggagcctgtatatatgtatatactcagtgcctcagttcagcttcctccacctcgcttccactgcacaggcccaggaaggagaaaggccaagccaaagtgggccccaccctgcccccgtcgtgctccatccttccctgccggggcctgctggcccctgtaaggtcccgcccccaaagaccctggggccagcggggccgaaagcggagttgggtttgccttattttgctcattggattcaagttcttttgcatagttttcttctaacccctgttggagtccaggggctggagaaaaggacagatttatgcagctattttcatacattccctgttcagagtggggtaggggttctccgccgttacccgatccactccatcccccaccctctgaggggtgagtgtgtctttgcatgtttcctttgctgtggtgggagatagtttgactgaacccccaccttgaccttggtctccaggggtgtggaatggtgggggaatttgtttaaaaagacattttattataataaagtctattttcacaaaa

SEQ ID NO: 13262 - DNA, 1860 bp, Homo sapiens
  misc_feature (687)..(687): n is a, c, g, or t
ggctccagctccagcagccatggcgccttgtgcagcctcctttgtgggtggagaagagctcagccaaccttggatggagcgtcggtgaagcaagagctcagaggggagaggggctggcctggcatgaccgtcgccagtccccccacctggctgggtgatgtcccccggcccgggttctggggccccttggcagtaccatggagcaactgacaaccctcccacggcctggggaccctggagccatggagccatgggcactgcccacctggcatagctggactccaggtcgagggggtgaacctagcagtgcagccccaagcatcgctgatactcctccggcagctctgcagcttcaagaactgaggtctgaggagagttccaagcccaaaggagacgggagctccaggcccgtggggggaactgaccctgaaggagcagaggcttgtctgcccagcctgggccagcaagcatccagctctggacccgcctgccagaggccagaggatgaggaagtggaggctttcctgaaggccaagctgaatatgagctttggggacaggcccaatctggagctgctgagggccctgggggagctgcggcagcgctgtgccatccttaaggaggaaaaccagatgctgaggaagagcagcttccctgagacagaagagaaggtgcggaggctgaagnggaagaacgccgagctggcggtcattgccaagcgcctggaggagagggcccgaaagctgcaggaaacgaacctgagggtggagggtccccagtggctccacgtgcgggacttcgatcggctgctgcgcgagtcccagcgggaggtgctgcggctgcagaggcagatcgcgctgcgcaaccagcgggagacgctcccgctcccgccgtcctggcccccgggccctgctctccaggccagagcaggggcgcctgctcccggggccccgggagaggccacgccccaggaggatgcggacaacctacccgtgattctaggggagccagagaaagagcagagggtgcagcagctggaatcggagctcagcaagaagcggaagaaatgcgagagcctggagcaggaagcccggaaaaagcagaggcgatgtgaggagctggaactgcagctgagacaagcgcagaatgagaatgcccgcctggtggaggagaactcccggctcagtgggagagccacagagaaggagcaggtggagtgggagaatgcggagctgaggggccagctcctgggggtgacacaggagagggactcagcccttcgcaagagccagggcctgcagagcaagctggagagcctggagcaagtgctgaagcacatgcgggaggtggcccagcggcggcagcagctggaggtggagcatgaacaggctcggctcagcctacgggagaagcaggaggaggtccggagactgcagcaggtggggcggcagtgagggaagctggcaggctgctggacaccagctttgccactcactcattccacaagcatttactgtgtgcccggcactgtgctaggcgtcggggagactgtggggaacaaagaccaggtccctgagcagtcagcaaattagcatccaggagtgagctgatttcagacactgatgagcacagtggtggagaagaacagggtgatgtgacaaagtgactgggatggggtgaggagccactttagaggtcatcagggaaggcctccctgaggaggtgacaattgaccttgccagccaggaggtgtagacatgcacatgctctgtggcagggaagagctgaagaagcctgagaccaatgtggctagaatacagcaagggatgggcagcgtggtgggagtagacaagaacccga

SEQ ID NO: 13263 - DNA, 6840 bp, Homo sapiens
  misc_feature (687)..(687): n is a, c, g, or t
  misc_feature (1577)..(1577): n is a, c, g, or t
  misc_feature (2774)..(2774): n is a, c, g, or t
  misc_feature (4061)..(4061): n is a, c, g, or t
  misc_feature (4590)..(4590): n is a, c, g, or t
ggctccagctccagcagccatggcgccttgtgcagcctcctttgtgggtggagaagagctcagccaaccttggatggagcgtcggtgaagcaagagctcagaggggagaggggctggcctggcatgaccgtcgccagtccccccacctggctgggtgatgtcccccggcccgggttctggggccccttggcagtaccatggagcaactgacaaccctcccacggcctggggaccctggagccatggagccatgggcactgcccacctggcatagctggactccaggtcgagggggtgaacctagcagtgcagccccaagcatcgctgatactcctccggcagctctgcagcttcaagaactgaggtctgaggagagttccaagcccaaaggagacgggagctccaggcccgtggggggaactgaccctgaaggagcagaggcttgtctgcccagcctgggccagcaagcatccagctctggacccgcctgccagaggccagaggatgaggaagtggaggctttcctgaaggccaagctgaatatgagctttggggacaggcccaatctggagctgctgagggccctgggggagctgcggcagcgctgtgccatccttaaggaggaaaaccagatgctgaggaagagcagcttccctgagacagaagagaaggtgcggaggctgaagnggaagaacgccgagctggcggtcattgccaagcgcctggaggagagggcccgaaagctgcaggaaacgaacctgagggtggagggtccccagtggctccacgtgcgggacttcgatcggctgctgcgcgagtcccagcgggaggtgctgcggctgcagaggcagatcgcgctgcgcaaccagcgggagacgctcccgctcccgccgtcctggcccccgggccctgctctccaggccagagcaggggcgcctgctcccggggccccgggagaggccacgccccaggaggatgcggacaacctacccgtgattctaggggagccagagaaagagcagagggtgcagcagctggaatcggagctcagcaagaagcggaagaaatgcgagagcctggagcaggaagcccggaaaaagcagaggcgatgtgaggagctggaactgcagctgagacaagcgcagaatgagaatgcccgcctggtggaggagaactcccggctcagtgggagagccacagagaaggagcaggtggagtgggagaatgcggagctgaggggccagctcctgggggtgacacaggagagggactcagcccttcgcaagagccagggcctgcagagcaagctggagagcctggagcaagtgctgaagcacatgcgggaggtggcccagcggcggcagcagctggaggtggagcatgaacaggctcggctcagcctacgggagaagcaggaggaggtccggagactgcagcaggcccaggctgaagcccagagggaacatgaaggagccgtgcagctgctggagtctaccttggattccatgcaggcccgggttcgagagctcgaagaacagtgccgcagccaaaccgagcagttcagcctcctggcacangaactccaggctttccgcctgcacccgggccccttggatctgctcacatctgccctggactgtgggagccttggagactgcccaccacccccctgctgctgctccattccccagccttgccgggggtctggccccaaagaccttgacctcccgccgggctcccctgggcgctgcaccccaaagtcttccgagcctgcccctgccactctcactggggtccctcgaaggacagccaagaaggcagagtctctctccaactcctcccactccgagtccatccacaacagccccaagtcatgccctacacctgaggtggacacagccagtgaggtagaggagctggaggcagacagtgtctccctgctcccagctgcgccagagggcagccggggaggagccaggatccaggtcttcctagcacgttatagctacaacccctttgagggtcccaatgagaatccagaagcagagcttccgctgacagctggcgagtacatctacatctatggcaacatggatgaggatggcttttttgaaggagagctcatggatggccgaaggggcctggtcccttccaattttgtagagcgtgtgtcggatgatgacctcctgacctccctccctccagagctggccgatttgtcccacagctcaggccctgaactcagtttcctgagtgtaggtgggggtggcagcagtagcgggggccaaagcagtgtgggaaggagccagcccagacctgaggaggaggatgcaggggacgagctcagtctgagcccatcaccggagggcctgggcgagcctcctgccgtgccttacccccgccgtctggtggtcctcaagcagctggcccacagcgtggtgctggcctgggagccgcctcctgagcaagtggagctacacggcttccatatctgtgtgaatggggagctgcgacaggccctggggcctggggcgccacccaaggccgtgctggagaacctggacctgtgggccgggccccttcacatttctgtccaggccctgactagccggggcagctctgacccactgcgctgttgcttggcggtgggtgcccgggccggagtggtgcccagccagctgcgggtccatcggttgacagccacatctgctgagatcacctgggtgcccggcaatagcaacttggcccatgccatctacctcaatggggaagantgcccacctgccagccccagtacctactgggccaccttctgccacttacggcctggcacaccctatcaggcccaagtggaggctcagctcccaccccaagggccctgggaaccaggctgggagaggctggagcagcgggctgccaccctgcagttcaccacactcccagcaggcccacctgatgcccctctggatgtgcagatcgagcctgggccctcccctgggatcttgatcatcagttggctcccagtcaccatcgatgctgctggcacatccaacggtgtccgggtcacaggctatgccatctacgctgatgggcagaagatcatggaggtggcctcacccacggcaggcagtgtactggtggagttgtcccagctgcagctgctgcaggtgtgtcgtgaggtggtcgtgcgcaccatgtcgccccacggggagtcggcggactccatcccggctcctatcactcccgccctggctccggccagcctgccagcccgagtctcctgcccctcaccgcacccaagcccagaggccagagcgccccttgcttcagcctccccagggcctggagaccccagctctcctctccagcaccctgctccccttggaactcaagagcctccaggagcaccccctgcaagcccttccagagagatggcaaaagggtcccacgaggaccctccagcaccttgctcccaggaggaggctggggcagcagtgctgggcacctcagaggagaggacagccagcacatctaccctgggtgagaaggaccctggccccgcagctccctcactggccaagcaggaggccgagtggactgcaggagaggcctgtccggcctccagctccacccagggagcacgggcccagcaggcgccaaataccgagatgtgccaaggaggagacccagggtctgggctgaggcccagggctgagaaggaggacacagcagagcttggggttcatctggtgaactccctcgtggaccacggccgcaactcagacctgtcagacatccaggaggaagaggaagaggaggaggaggaggaggaagaggagctgggttccaggacttgctccttccagaagcaggttgctggcaacagcatcagggagaatggggccaagtcccagcccgaccccttttgtgagactgacagcgatgaggagatcttggagcagatcctggagctgcccctccagcagttctgtagcaagaagctctttagcatcccggaggaggaggaagaggaagaggaggacgaggaggaggagaagtcnggggcaggctgttcttcccgagaccctggcccgcctgaacctgcattgctggggctgggctgtgacagtggtcagccccgaagacctggccagtgtcccttgtctcctgagtcctccagggctggagactgcctggaagacatgcctggattagttggtggaagcagccggaggagaggagggggctcccctgagaagcccccaagccgcaggcggcctccagatccccgagaacactgcagccgacttctcagcaacaatgggccccaggcctctggacgactgggccccacacgggagaggggtggcctccccgtaattgagggccccaggactggactagaggctagcgggagaggccggctgggcccttcccggaggtgctcccgtggccgggcgctggagcctggcctggccagctgcctttcccccaagtgcttggaaatcagcattgaatatgattcggaggatgagcaggaggcgggcagcgggggcatcagcatcaccagctcctgctaccctggagatngggaggcctggggcacagcaactgtaggaaggcccagggggcctccgaaggccaattcaggccccaagccctacccacgcctcccagcctgggagaaaggggaaccagagcggagaggccgcagtgcgacgggcagagccaaggagccactctcccgggcaacagagaccggagaggccagagggcaggacggctctgggcggaggggcccccagaagagaggtgtccgagtcctcaggccaagcactgcagagctagtccctgcgaggagcccctcagaaacactggcttaccagcacctacccgtcaggatctttgtggctctgtttgactatgaccccgtgtcaatgtcgcccaatcctgatgctggagaagaagagcttcccttccgagagggtcagatcctgaaggtgtttggggacaaggatgccgatggcttctaccagggcgaaggtgggggccggacaggctacattccctgcaacatggtggctgaggtggctgtggacagccctgctgggagacagcaactgctccagcggggttatttgtccccagatattctccttgagggctcagggaatggtccgtttgtgtactccacagcccacacaactgggcctcctcccaagccccgccgctccaagaaagctgagtcggaaggccctgcccagccctgtccaggcccccctaagctggtcccctctgctgacctgaaagctccccactccatggtggctgcatttgactacaacccccaggagagttcccccaatatggacgtggaggcagagctgcccttccgggcaggggatgtcattactgtgtttgggggcatggacgatgacggtttctactatggggaattaaatggacaaaggggcctggttccatccaacttcctggagggccctgggcctgaggcaggcggcctggacagggaacccaggacaccccaggctgagagtcagagaacgaggaggagaagagtccagtgctagatggagatagatatatgtagagagagcaacatgactggggctgcaccacacaagggtccccagggcccccaggtgggccttgtacccccagctctggcagcgcccccaggattgaacgtggggagccccagggcagaagcgagaaggtgtggggtttcttctccaaggggaagcagctcctcaggaggctgggctctgggaagaaggagtgaagctgtggcccatcctgcaggcagaagaggccctgagaggcccccagatcactgtctctgctgagcagggaaggctcagactgggcccagagcccccgttcttctgcgttaacactgtggcattcagagggaatcaaagagccttggtgaaggtcagagctaaatggctccttaaggatgaactctctagagaagcaccttcctcctacaggaggggaaactgagcccacagtgagtatgtaacttgaccaaggtcactgagccaggactggacccaggaccctcgcgtcctggtccacccacctcgtctactagtgtcccacagtgctgcgctagtcccttctgccacccttcccagtcccaggacgggccctggagggagaaaggagcctgtgccccctgatggctctggctgtcctgatcctgtcttccctcccctgaaggaaagtttgcactggattttattggagccccatctccccagcgggcaggcgggcggagcctgtatatatgtatatactcagtgcctcagttcagcttcctccacctcgcttccactgcacaggcccaggaaggagaaaggccaagccaaagtgggccccaccctgcccccgtcgtgctccatccttccctgccggggcctgctggcccctgtaaggtcccgcccccaaagaccctggggccagcggggccgaaagcggagttgggtttgccttattttgctcattggattcaagttcttttgcatagttttcttctaacccctgttggagtccaggggctggagaaaaggacagatttatgcagctattttcatacattccctgttcagagtggggtaggggttctccgccgttacccgatccactccatcccccaccctctgaggggtgagtgtgtctttgcatgtttcctttgctgtggtgggagatagtttgactgaacccccaccttgaccttggtctccaggggtgtggaatggtgggggaatttgtttaaaaagacattttattataataaagtctattttcacaaaa

SEQ ID NO: 13264 - DNA, 7386 bp, Homo sapiens
  misc_feature (687)..(687): n is a, c, g, or t
  misc_feature (1577)..(1577): n is a, c, g, or t
  misc_feature (2774)..(2774): n is a, c, g, or t
  misc_feature (4061)..(4061): n is a, c, g, or t
  misc_feature (4590)..(4590): n is a, c, g, or t
  misc_feature (7299)..(7299): n is a, c, g, or t
ggctccagctccagcagccatggcgccttgtgcagcctcctttgtgggtggagaagagctcagccaaccttggatggagcgtcggtgaagcaagagctcagaggggagaggggctggcctggcatgaccgtcgccagtccccccacctggctgggtgatgtcccccggcccgggttctggggccccttggcagtaccatggagcaactgacaaccctcccacggcctggggaccctggagccatggagccatgggcactgcccacctggcatagctggactccaggtcgagggggtgaacctagcagtgcagccccaagcatcgctgatactcctccggcagctctgcagcttcaagaactgaggtctgaggagagttccaagcccaaaggagacgggagctccaggcccgtggggggaactgaccctgaaggagcagaggcttgtctgcccagcctgggccagcaagcatccagctctggacccgcctgccagaggccagaggatgaggaagtggaggctttcctgaaggccaagctgaatatgagctttggggacaggcccaatctggagctgctgagggccctgggggagctgcggcagcgctgtgccatccttaaggaggaaaaccagatgctgaggaagagcagcttccctgagacagaagagaaggtgcggaggctgaagnggaagaacgccgagctggcggtcattgccaagcgcctggaggagagggcccgaaagctgcaggaaacgaacctgagggtggagggtccccagtggctccacgtgcgggacttcgatcggctgctgcgcgagtcccagcgggaggtgctgcggctgcagaggcagatcgcgctgcgcaaccagcgggagacgctcccgctcccgccgtcctggcccccgggccctgctctccaggccagagcaggggcgcctgctcccggggccccgggagaggccacgccccaggaggatgcggacaacctacccgtgattctaggggagccagagaaagagcagagggtgcagcagctggaatcggagctcagcaagaagcggaagaaatgcgagagcctggagcaggaagcccggaaaaagcagaggcgatgtgaggagctggaactgcagctgagacaagcgcagaatgagaatgcccgcctggtggaggagaactcccggctcagtgggagagccacagagaaggagcaggtggagtgggagaatgcggagctgaggggccagctcctgggggtgacacaggagagggactcagcccttcgcaagagccagggcctgcagagcaagctggagagcctggagcaagtgctgaagcacatgcgggaggtggcccagcggcggcagcagctggaggtggagcatgaacaggctcggctcagcctacgggagaagcaggaggaggtccggagactgcagcaggcccaggctgaagcccagagggaacatgaaggagccgtgcagctgctggagtctaccttggattccatgcaggcccgggttcgagagctcgaagaacagtgccgcagccaaaccgagcagttcagcctcctggcacangaactccaggctttccgcctgcacccgggccccttggatctgctcacatctgccctggactgtgggagccttggagactgcccaccacccccctgctgctgctccattccccagccttgccgggggtctggccccaaagaccttgacctcccgccgggctcccctgggcgctgcaccccaaagtcttccgagcctgcccctgccactctcactggggtccctcgaaggacagccaagaaggcagagtctctctccaactcctcccactccgagtccatccacaacagccccaagtcatgccctacacctgaggtggacacagccagtgaggtagaggagctggaggcagacagtgtctccctgctcccagctgcgccagagggcagccggggaggagccaggatccaggtcttcctagcacgttatagctacaacccctttgagggtcccaatgagaatccagaagcagagcttccgctgacagctggcgagtacatctacatctatggcaacatggatgaggatggcttttttgaaggagagctcatggatggccgaaggggcctggtcccttccaattttgtagagcgtgtgtcggatgatgacctcctgacctccctccctccagagctggccgatttgtcccacagctcaggccctgaactcagtttcctgagtgtaggtgggggtggcagcagtagcgggggccaaagcagtgtgggaaggagccagcccagacctgaggaggaggatgcaggggacgagctcagtctgagcccatcaccggagggcctgggcgagcctcctgccgtgccttacccccgccgtctggtggtcctcaagcagctggcccacagcgtggtgctggcctgggagccgcctcctgagcaagtggagctacacggcttccatatctgtgtgaatggggagctgcgacaggccctggggcctggggcgccacccaaggccgtgctggagaacctggacctgtgggccgggccccttcacatttctgtccaggccctgactagccggggcagctctgacccactgcgctgttgcttggcggtgggtgcccgggccggagtggtgcccagccagctgcgggtccatcggttgacagccacatctgctgagatcacctgggtgcccggcaatagcaacttggcccatgccatctacctcaatggggaagantgcccacctgccagccccagtacctactgggccaccttctgccacttacggcctggcacaccctatcaggcccaagtggaggctcagctcccaccccaagggccctgggaaccaggctgggagaggctggagcagcgggctgccaccctgcagttcaccacactcccagcaggcccacctgatgcccctctggatgtgcagatcgagcctgggccctcccctgggatcttgatcatcagttggctcccagtcaccatcgatgctgctggcacatccaacggtgtccgggtcacaggctatgccatctacgctgatgggcagaagatcatggaggtggcctcacccacggcaggcagtgtactggtggagttgtcccagctgcagctgctgcaggtgtgtcgtgaggtggtcgtgcgcaccatgtcgccccacggggagtcggcggactccatcccggctcctatcactcccgccctggctccggccagcctgccagcccgagtctcctgcccctcaccgcacccaagcccagaggccagagcgccccttgcttcagcctccccagggcctggagaccccagctctcctctccagcaccctgctccccttggaactcaagagcctccaggagcaccccctgcaagcccttccagagagatggcaaaagggtcccacgaggaccctccagcaccttgctcccaggaggaggctggggcagcagtgctgggcacctcagaggagaggacagccagcacatctaccctgggtgagaaggaccctggccccgcagctccctcactggccaagcaggaggccgagtggactgcaggagaggcctgtccggcctccagctccacccagggagcacgggcccagcaggcgccaaataccgagatgtgccaaggaggagacccagggtctgggctgaggcccagggctgagaaggaggacacagcagagcttggggttcatctggtgaactccctcgtggaccacggccgcaactcagacctgtcagacatccaggaggaagaggaagaggaggaggaggaggaggaagaggagctgggttccaggacttgctccttccagaagcaggttgctggcaacagcatcagggagaatggggccaagtcccagcccgaccccttttgtgagactgacagcgatgaggagatcttggagcagatcctggagctgcccctccagcagttctgtagcaagaagctctttagcatcccggaggaggaggaagaggaagaggaggacgaggaggaggagaagtcnggggcaggctgttcttcccgagaccctggcccgcctgaacctgcattgctggggctgggctgtgacagtggtcagccccgaagacctggccagtgtcccttgtctcctgagtcctccagggctggagactgcctggaagacatgcctggattagttggtggaagcagccggaggagaggagggggctcccctgagaagcccccaagccgcaggcggcctccagatccccgagaacactgcagccgacttctcagcaacaatgggccccaggcctctggacgactgggccccacacgggagaggggtggcctccccgtaattgagggccccaggactggactagaggctagcgggagaggccggctgggcccttcccggaggtgctcccgtggccgggcgctggagcctggcctggccagctgcctttcccccaagtgcttggaaatcagcattgaatatgattcggaggatgagcaggaggcgggcagcgggggcatcagcatcaccagctcctgctaccctggagatngggaggcctggggcacagcaactgtaggaaggcccagggggcctccgaaggccaattcaggccccaagccctacccacgcctcccagcctgggagaaaggggaaccagagcggagaggccgcagtgcgacgggcagagccaaggagccactctcccgggcaacagagaccggagaggccagagggcaggacggctctgggcggaggggcccccagaagagaggtgtccgagtcctcaggccaagcactgcagagctagtccctgcgaggagcccctcagaaacactggcttaccagcacctacccgtcaggatctttgtggctctgtttgactatgaccccgtgtcaatgtcgcccaatcctgatgctggagaagaagagcttcccttccgagagggtcagatcctgaaggtgtttggggacaaggatgccgatggcttctaccagggcgaaggtgggggccggacaggctacattccctgcaacatggtggctgaggtggctgtggacagccctgctgggagacagcaactgctccagcggggttatttgtccccagatattctccttgagggctcaggtatgacctgctgctgtccctcacccacctcccaccagcccccttccaactccacctgaccctgagcaattgttgtgtctggggtgctcccacttacccagactctagcagagccttggagcctgccttgaaccctgctgcgtagtggtcagactgtacgtgggctggccgcgtggagtgggcgtctgttgcagaggggaatacagccatgcagccaggaattttgggtcctggaggttgggtggggctcttgtcagggatgggagatgaatgcccttacgaaacaagctcagtaacctagcacggccctgagaggaaactccagagtcccagtcctgtctctcccacctcccctgcctcgctttctctctgcttttctggatcagggaatggtccgtttgtgtactccacagcccacacaactgggcctcctcccaagccccgccgctccaagaaagctgagtcggaaggccctgcccagccctgtccaggcccccctaagctggtcccctctgctgacctgaaagctccccactccatggtggctgcatttgactacaacccccaggagagttcccccaatatggacgtggaggcagagctgcccttccgggcaggggatgtcattactgtgtttgggggcatggacgatgacggtttctactatggggaattaaatggacaaaggggcctggttccatccaacttcctggagggccctgggcctgaggcaggcggcctggacagggaacccaggacaccccaggctgagagtcaggactggggctgcaccacacaagggtccccagggcccccaggtgggccttgtacccccagctctggcagcgcccccaggattgaacgtggggagccccagggcagaagcgagaaggtgtggggtttcttctccaaggggaagcagctcctcaggaggctgggctctgggaagaaggagtgaagctgtggcccatcctgcaggcagaagaggccctgagaggcccccagatcactgtctctgctgagcagggaaggctcagactgggcccagagcccccgttcttctgcgttaacactgtggcattcagagggaatcaaagagccttggtgaaggtcagagctaaatggctccttaaggatgaactctctagagaagcaccttcctcctacaggaggggaaactgagcccacagtgagtatgtaacttgaccaaggtcactgagccaggactggacccaggaccctcgcgtcctggtccacccacctcgtctactagtgtcccacagtgctgcgctagtcccttctgccacccttcccagtcccaggacgggccctggagggagaaaggagcctgtgccccctgatggctctggctgtcctgatcctgtcttccctcccctgaaggaaagtttgcactggattttattggagccccatctccccagcgggcaggcgggcggagcctgtatatatgtatatactcagtgcctcagttcagcttcctccacctcgcttccactgcacaggcccaggaaggagaaaggccaagccaaagtgggccccaccctgcccccgtcgtgctccatccttccctgccggggcctgctggcccctgtaaggtcccgcccccaaagaccctggggccagcggggccgaaagcggagttgggtttgccttattttgctcattggattcaagttcttttgcatagttttcttctaacccctgttggagtccaggggctggagaaaaggacagatttatgcagctattttcatacattccctgttcagagtggggtaggggttctccgccgttacccgatccactccatcccccaccctctgaggggtgagtgtgtctttgcatgtttcctttgctgtggtgggagatagtttgactgaacccccaccttgaccttggtctccaggggtgtggaatggtgggggaatttgtttaaaaagacattttattataataaagtctattttcacaaaaaaaaaaacacaaaaaaaaaaaactcgggggggcccggacccaatcgcctataggagtcgattacaattattggcggcgttacacgtcggactggaaaccctgcgtacccaactaacgcttgaagaaatccctttnccgctgcgtatagcaaaggcccgcacgacgccttccacaatgcccacctgaagccaaggcaaatgaagcttatattgtaaaatccgt

SEQ ID NO: 13265 - DNA, 427 bp, Homo sapiens
gacacagcagagcttggggttcatctggtgaactccctcgtggaccacggccgcaactcagacctgtcagacatccaggaggaagaggaagaggaggaggaggaggaggaagaggagctgggttccaggacttgctccttccagaagcaggttgctggcaacagcatcagggagaatggggccaaggtaacggggtagggatgggctgttgggccccaggcctcaaactccggggcctccccactgtgtgtcagcaggtgctctgaccaccactgagtgccagaaacattctaggtctgtggcctgggccctgtcctaagcagaagataggaagtgccccaggattggcccctgccctcctggaaagaaaggggaaggggaggagttcatttctgtaccttctctccctccagcccaccagatacag

SEQ ID NO: 13266 - DNA, 386 bp, Homo sapiens
aaagtagatatgattctttctctaatgcagcttatattttgatggaatattttagtatttctataaataaataaagatatgtgttacaaagaaaattaaagagatgtgataatgatgaaatgggataatttgcttgggtgcccaggaaggttactttgaggaagtgacattggaactgagactcaaatgtcaagttttaaatgtaggaaaaagctttgcatgcctgaaaaatggaaagatgaatattatggcttgaggctgaaggggcaaaggaagtggtgtggaggtgagtggaaagattccaaggtggtcttttcacagaggagggtgagggagctaggtaatgtcaaaagctgacccatgttgctaggctgtcaaaagtacca

SEQ ID NO: 13267 - DNA, 462 bp, Homo sapiens
ctcttagatctagctggtattcaacaatttacatgatttaatcctaacttcaaattatattattgttcatctcactgcatctcactgttcatatgatttcttaccttcatacctttccttgagcagtttagtatgtcattcctttctccacaccacccccacactcatttgcaaccaggaactaagtgcagtctgtgcagtgtgaaatgggtagcaatggcccacacatggaaaaacatatagcctttctggtctagtgaatcagaaaagagaaactgggaaaaaaaataatgcaaaatatacctgagtgcagtggtgtgtgccattagtcccagttattcagtaggctgaggcaggaggatcacttgagcttagaagttcaaggctttagtgcactataattgtgcctgtgaataaccactgtattccagcctaggatacatagtaagaccccatctcttt

SEQ ID NO: 13268 - DNA, 461 bp, Homo sapiens
ccaatttggaggtcaaaaagagaccaaagtctctgtacatctcacatgactttacttgcattaactttgccttcctaaattacagtctataattaagaagtgctagtctcctggccagctcttatggttatttttgaagctccttgggtgcttgcctcttccagagggctgttactttgccccctctctggaagctcatttgcttccacaggaagccttaagccaaagcacattggcttattcaatctggtgtctggatcttaaaacctggcttctcagtttatgatgctcaccagtaaaacactcatggctcttcttgccatgaagcgaaccagggcttgcttagcttagctttcatgtgtgggccttcgtgaatcaaaataaggaaggaaggtaggaactagtcccacccttaagtcaagaaggaactggttagtcatgaagtgaagccacatgacttt

SEQ ID NO: 13269 - DNA, 482 bp, Homo sapiens
tagagacgggatttcaccgtgtgagccaggatggtctggatctcctgacctcgtgatccacccgccttggcctcccaaagtgttgggattataggcacgagccactgcgcccagcaagatttttttttttaaagctcagataaagtattatggaggcgaagaagtaggtaactcactggagtacttgagaaaggcatcatatttcagctgggtcctgaagaatgagattttccatataagaagcagaggaggaacattctaggtaaaaggaagggcatatgcaaaaacacgagggttgtgaaaggacctgattggactgagatacaggaataagcacggaggatatctctggggatctttttccctaatacacagttatagttatatccatattgggtttcttgactgttgacttcaggaggttctcaactcaggcaggcccccaatttccagaggagataaccttaaccaatgttttgggt

SEQ ID NO: 13270 - DNA, 368 bp, Homo sapiens
actcaagctagcctcccacctcagcctcccaagtagctagcactacaggtgtgcaccaccacagccagctaatttttaattgtatgtcgaaacagggtctcaccgtgttgcccaggctggtctcaaactcctagtctcaagccttggcctctcaaagtgctaggattacaggggtgaaccaccatggtaggccagaagaccacatgttatttgattcccatttggggagtgattgctaatggctatggggtttctttcaggggctctaaaattgattgagatggttgcacaattctgtgaatagagtcaaaaccattgatttgtgccctttaaatgagttaactgtatggtacatctcaaagctgtta

SEQ ID NO: 13271 - DNA, 412 bp, Homo sapiens
gtgtgatatattggcagtttgggaaattttatcccaagtcataaaaacccatttatataatattaggatagttgcttttaaaaggaatattttgtaactgatattcaacacatgaaattgtgagttctggctaggcgtggtgactcatgcttgtaatcccagcactttgggaggccaaggtgggctgatcacttgagtccagaagttcaagaccagcctgggcaacatggtgaaaccccacttctaccgaaaatacaaaaatttgccaggcatgatggcacctgcctatagtcccagctcctttcagggggctgaggcaggaggattgttcaagcccagaagttgaggctacggtgagccaagattgcaccattacagtccagcttaggtgacaaagtgagaccctgtctcc

SEQ ID NO: 13272 - DNA, 381 bp, Homo sapiens
gtcggcacccatgtccaatgatgggagatggttaagcaaattatgataaattcacagaatgaaactgtgtataaccattaaaaattatacttaccaaggctgggcgtggtgactcatgcttgtaatcccagcactttgggaggccaaggtgggctgatcacttgagtccagaagttcaagaccagcctgggcaacatggtgaaaccccacttctaccgaaaatacaaaaatttgccaggcatgatggcacctgcctatagtcccagctcctttcagggggctgaggcaggaggattgttcaagcccagaagttgaggctacggtgagccaagattgcaccattacagtccagcttaggtgacaaagtgagaccctgtctcc

SEQ ID NO: 13273 - DNA, 182 bp, Homo sapiens
ttttgtagagacagggtttcaccatgtttgtcaggcttgaactcctgacctcaagtgatccacccacctcagcctcccaaagtgctgggattacaggcgtgagccaccacacccggccacattatttttttctatattcatcctgatacgctatcaaatagtgggtcttattcattctttct

SEQ ID NO: 13274 - DNA, 407 bp, Homo sapiens
agaccacggctgaggccaggagcagtagcaggtgggaactcaagactggttgcactgtaactcctgagagtcagggttcttctgtttagctaagaaaatttgggggtgtttggtagaacagtgaatccttttccaggggctggtaaatgcaatgaaatgaatactacagagataacatgcatatcaaacacatacttttgtccaatgcacagcccaactctcattctagccacactgccctgcctttaaaaagttaaaaagaaaaataagataaaaagtgcaccatgggccaggtgcagtggcccacgcctgtaatcccaacactttgagaggctgaggtggaggatcactggagcccaggagtttgagaccagcttgggcaacacagtgagacctctctactactt

SEQ ID NO: 13275 - DNA, 254 bp, Homo sapiens
ctcactgatgctttttaaaaatcactttttaagattttttttttctttttgtactttagctagtgtctgttcttgtatcttcaagtttgctaatcttttcttctgcagtttctaatctgctttagttcatccaatgtaattttcatctcaaatgtttttgtctttgaaagtttgattttggcttttcttgtttatctcccatgtctctatttaactttttgattatatgggatacatgtataaaaacagttgaa

SEQ ID NO: 13276 - DNA, 160 bp, Homo sapiens
tggaaacaaaaaagagaccaaatagccaaagcagtcctgagcaaaaagaacaaagctggaggcatcatactacctgacttcaatatatattacaaggctatactgagcacaacagcatgatatttgtataaatcagacacatagaccaatggaacagaat

SEQ ID NO: 13277 - DNA, 350 bp, Homo sapiens
agatactaatacttgggttggaaatagacccaataggtcatcttgtccatcctcctgcctcaggcaggactaatgatatatgtttgtcttattcttcccctagaactccaggggtcaaaatactgtatattcctccactcatccatccatccatccatccgtcatttattgaaacatgagtaggacagtggacctctcctttaacaactcatggtatagtcttttcagagtttccaatccctaaccagcaagagtaatttctaatgtctaaactaaatgtctaatctaatccagtgtctaatttctaacatctaatctaatgtcttcatttcgtaaataaagagaaggat

SEQ ID NO: 13278 - DNA, 432 bp, Homo sapiens
ctgcaagttcaattttataaaaaacggtattaaacttttgaaacatgattgggtttaatttttagtgttctcatcctttttgcactcttcaccacttaattattcacatttcttgactcagtttgtttatcataagactcttaattcctgaagggcaatcattaaattcatcacaagtcattccttgataattccttttattttggctgcttattggtaagatgcttcagcaataccaaacgtcagcttaataatgcagatactcaggacctgcgtttcttggaggaagcttcatggttatcctaccccttgctgaaccagtgttttaaaagctacagtaagtaaagcagacaaacgcatagtttttctaattttgtttaaatatctaatcatcttttaataaagcattcagttgcttcacctgtgtttcac

SEQ ID NO: 13279 - DNA, 343 bp, Homo sapiens
ctctctaatgagcccatcgcagtacttggtgatgactttttcctggcaagtttcatagaagaaatgagtttggtaaaaactaaattactcctgggtgacctgttagatctcttctgcttattttcatgttgttctcagaatgattactaaggtgatttagttagaaagtatatttaaaataattttatttagtttttgaaaaatttgtttgtggtttcttagcaggggtgtttcactgactgttccaaagcttccagcctgggcacacattatggagctccataatgtgtgcccacaggagtgaggtggtagagtggtgttctaaaaagagcagcagagagag

SEQ ID NO: 13280 - DNA, 499 bp, Homo sapiens
ctctctaatgagcccatcgcagtacttggtgatgactttttcctggcaagtttcatagaagaaatgagtttggtaaaaactaaattactcctgggtgacctgttagatctcttctgcttattttcatgttgttctcagaatgattactaaggtgatttagttagaaagtatatttaaaataattttatttagtttttgaaaaatttgtttgtggtttcttagcaggggtgtttcactgactgttccaaagcttccagcctgggcatggtattttaatggataacaaatcccttcccacctctgttctgtacttcatagcatgatggccacagtgctgacagcacttagcttccagtagtcattcgagagagtggctggcgtctctcttctggaagaaatgggacacatggtcccataccaactgtgcctttgcttagatctgccatcataggaacaagactttaacaaccagcagcagcagcaaaccagcattgaggct

SEQ ID NO: 13281 - DNA, 626 bp, Homo sapiens
tttctcctgaaacagattgatgtctgcagcttggcttgcagactgtgcgggggatgcaaactgaataagatctctgcagtctgaaggcatccaaggagacctgggcaaaatggctggtcaggactgcctgccaagtataactattccctcacttgaatgcgccctagaggcgccagctgtgcttgggctgcagcaccgaccaaggtgaacacacacagcctcctttccacaattttaccgttaagttgctgcatttgcaaaggaaaatcttcattgtcacaaatgatgactgtatctgtctgggctttagattgtgatagggaagagcctctccatctcttttgtatgataagtatacttatcacttattacatgggaaggtgagcggtccagggtcctccctgccattttaggtgagacagcatcccaggagaatgaaaaaaaaaaaaagggaaaaaaaaaaaagcaggatctgggagaatgtcttacctggaggacctggcttttacctgggagatgttgcaacttctcagtgaggaaaaacctgacattagctctcctttgaagacattaaagaaaagcaaaaacaaaacaaaacaaaaacaaacgacaaacaagaaaacaaa

SEQ ID NO: 13282 - DNA, 234 bp, Homo sapiens
caatgaactttcaaaacgtatctcatttgaaagttagaagctaattatactagttatatgttgggatgaaagtagagaagcctagtaccaaatctgctgtcagaaccttatacaaagttggaagtgttctgtaccatcaaatatggtagtccctagccacacgtgactattgagcactgaaattgtggccactgtgactgaggaactgaatttttaaattttattccattttag

SEQ ID NO: 13283 - DNA, 519 bp, Homo sapiens
ttttcaccaagttctttagttaacaaagaatgcttttaaaaatgttattaggccaggtgcggtggctcatggctgtaatcccagcacttcgggaggccgaagtgggtggatcacttgaggtcaggagttcaggaccagcctggccaacatggtgaaaccctgtctctcctaaaaatacaaaaattagctgggtgtggttgcccacactgtaatcccagctactcaggaggctgagacagagcaatcccttgaacctggggagacggaggttgcagtgagccgagatgatgccattgcacttgcagcttggggtgacagagcaagactccatctcaaaaacaaaaatgttgttggatttcttttgaagcattagacaaatgggtagttaattcagaaaggagtttacttactagttgcatatacatgtgtaatacttgacattttcaaaacacacactattttctttgatttccttcacatcttagaagtaccacagctagtatttttcctattttggat

SEQ ID NO: 13284 - DNA, 492 bp, Homo sapiens
tatttacgtgtaaaatcaatgatggctagtatgcatttttggtcaaattttgttttccttaatacgggagagcaaaattttgacagaaaatggttcgctagaattgagcttagattctttttatttttaaagagaaactagaagaatgcttctcttcttgaatgcagtatattgctgtaggagtatcttcgttttggtgcctgtgaaacagttatggaaaatggcaacatgaaaacgagaacaactaatgtctgaaataagtgtttctggatgttgaaaagcatcatatgtgtgtttttatttgacacaatttgctttgcaggttgcatttatgataaacctctttgcacctggttattttatgtcagattcagtaaaataataagtcagttgtctgaccaatcagctttcttccaacacctactttgtgtagatcatggacattgaaaactattaaataggagcctttagttaaggactcaacagaaagga

SEQ ID NO: 13285 - DNA, 458 bp, Homo sapiens
atttggttttggactaaaattctgttttctttagaatgaaatatttcttaattgcttttggcttagtctattcagagtagaaggatagatgttaaggcaggtgtacacagggcagctgtcagaaaaggatgcaggacaagccaaaaggagtaaacttatctgaagaaaatgggggaagcaaggaaacagtggcgttaaaacaaagtaatcatgacaagaaataattaagtactggttagactttttttttcttatgattgtaagaatttttggactcctatctgcttatttaaagcgattattttataaacatagggcaagtgaccttgaagtcttttttttcagtgaaggttttgtgagaatcataggaaataatgtctatgaaagcatttcctacattgtaaagtgctcaaaacatacgttgaaattattaataaaagcaaagatgaattgctgtg

SEQ ID NO: 13286 - DNA, 275 bp, Homo sapiens
aatgaaaataaaaaccaactgcgaaggggcagatggtggggcctggagcttctataattcagggttctttagaaaaagaacacaaaattacagacaaaattaggtgcaagaccatgaaggggctctgcaagtgaggggccctgagctccggtttcctttgctttgtggcaaatctctggttccttagtgtcatctgccagtctcttggaggaattagcccattatcccaaattgccttaaacaaagcaaaacacagcttaaggaatatgcagata

SEQ ID NO: 13287 - DNA, 294 bp, Homo sapiens
ccaccctcaaagactggagggcagcttgccctggacttccttccccagtcaagagtaattagctccttccatcatttcaaggaactgtgctaggccaccacatgctgaataggctctctctagtctttgtaatccaccttctcagatcgatgatagtggctgaataaatattgcaaggaataatagctgagctgtcacctattgacacctgaggacaggagactgtggtagtgccacactgttggcttgtgcaggtggatgaaccggggaatgacgacaaggtcaaattggggc

SEQ ID NO: 13288 - DNA, 377 bp, Homo sapiens
ttgaatggtttaaaaataataaatgccatgacattttaaatggaaatttggcatatttttgagataaatatgattggatacatgtgtgtgccattcttttatctcttcttacttttactgtatctctactttaatgatgacaataatatggctacagacatgaaatggtttatctttcttcttttctttcactctttcatttaaagcatttatattattttttattgatgtcaatgttaacattttggcatccttcccaagtatattgcaagaaatacatcaataaaaacttaaatttaaaaaatatgtagtctggggccagataataatggcatatttctttaaaattaggtataaaggagtacagacgaggtcaa

SEQ ID NO: 13289 - DNA, 482 bp, Homo sapiens
taattccagggaagatcagccttagaagacctagaagaagcaagcgtgaggagttcagagttcggtaaggtcacagcttgccgaggaaatgccaggaggacatcagtgaggaaggtgacaggtagcaggataaaaatataactaccttctccctgtaacaagccacgtctgactgtccatgactgtggcccaagaacgtgagcatcacacaattctcaactagacttccgccaacctcctttctctctcttcaccttccagtgtttctttcattcttctcttctcttttcacataatacaagctttcacagagttactctattacagttgggattagggcacatgaaatttatccaaggaaggtcttctccatgcccaatgagtccatcaaaaaaaaaaagccaggttatgttaatacacattatttgatttatatcacaaatacatttgtcagaaattcaataaatatcatacactgccca

SEQ ID NO: 13290 - DNA, 590 bp, Homo sapiens
aactatgatctgtccaaatccagcctgcagcttgtttatgtatagccagcacactaaaaatgatttttacattttaaatggttggaaaaaaattaaaaggagaataatatttcatgacatttgaaaattatatgaaatccagatttcattgtccataaacaggttttatttgaatacagctcatcagttatttatacattatccataactatttttgctacagtggtacaggtgagcagttgcaacaagatactcaaaggttaacattcttgctttctgactctttctttacaggaaaaaaaaaaattactgacccttgcactgtaagatcaagattaagaagagcagcttttgcttagtactttacaatattttaagacttcattgtgtatttttattatagattgagttaaaggaaagactgatgggaaaaatggatgagtccctaaatcaaattttcatggtgtgacctgattatcatttgaaattattttctataatattgccaagcaaattgtaagaccaactttaggaagttatgttttctgcctgtcaccagattattaacctgttttctttccacacagtca

SEQ ID NO: 13291 - DNA, 438 bp, Homo sapiens
tcatcttgaaattatatatacattttattttcaagtatagtggctgtagtttctataaaaggcaagcagtactgcagtttttgttgttgtttgtgtaaagctgctcgtccctggttttccatggtgctcaaatgttggtactccttaaaatgatctaaaatcacctaccctgctaatgatcttagctatttttaactccaattggacagtttgtttcctcccaatttttcttcctcagaatcttcagttttctaaattcttttcctgatttttcttccaaaatatcaagaatattttataccttaaaataggttgaggccaggcacagtggctcatgcttgtaatcccagcacttttgagaagctgaggctggaggattgcttgaactcacgagttcaagaccagcctgggcaacatgatgaaatcctgtctgtacac

SEQ ID NO: 13292 - DNA, 402 bp, Homo sapiens
ggggcaaactagagggagtctgcagagaaagacatcatctggaaacttttcaaaaagagttaacatggaatagcaacaggtaggggagagctccaacatgttgtgttggtgcccccttctggctgatagagagcagagctggtgaaaaatggttgttggctttccaacagtgtaccttcctaagggcactgaccccaagggggtatcatgaacattcagtgagccttgatgtagtaacagattcacctttcctttgaacaaccagtattcaagggtagtgagattggtattttcctgggctcaagtttggcttcgctcaagttaggcttctctagaccttatgtcttccctcctttacctccttctgacttttgaccgttaaattgtagatggtgagtggaa

SEQ ID NO: 13293 - DNA, 338 bp, Homo sapiens
ggaagttcaaggctgcagtgagctatgatcacgccactgcactccagtttgggcgacagagagagaccttgtctcaaaaatttaaaaaaagcaaatgcatgggccacattcagtgcagagtccactgccctgccaaggtgcagggacccagccgggaagtggcaggtgtgaaccatgactgagtctcccacccctaccccagctgcgggctccaggcttcctccagctgcatggggtggatgggagcccagggatgctggaacaggcccaggcccccggcctctatcagcgcctcagcctctgcaccctgggccaggagcctctgcccagcccggaag

SEQ ID NO: 13294 - DNA, 934 bp, Homo sapiens
tgttgcccacacgcccgaggcgcgctggattggcggagcatggcccaggaggagggtgggagcctgcccgaggtgcgggcgcgggtcagggccgcgcatggcatccccgacctggcccaaaagctccatttctatgaccgctgggctccggactacgaccaggatgtggccaccctgctgtaccgtgcgccccgcctcgcagtggactgcctcacacaagcccttccaggcccgccccacagtgccctgatcctggacgtggcctgtggcacaggcctagtggctgccgagctgcgggctccaggcttcctccagctgcatggggtggatgggagcccagggatgctggaacaggcccaggcccccggcctctatcagcgcctcagcctctgcaccctgggccaggagcctctgcccagcccggaagggaccttcgacgcggtgctgatagtcggtgccctcagtgacggccaggtgccctgcaatgcgatacctgagctacatgtcaccaagccaggtgggctggtgtgtctgaccaccaggaccaactggtccaaccttcaatacaaggaggctctggaggccaccctggacaggctggagcaggctgggatgtgggaaggcctggtggcctggcctgtggaccgcctgtggaccgctgggagctggctacctccgagctggaggtggtatccggcatctctgccaaggatggcttcatctccggcattgtctacctgtaccgaaagtggaaggcgacccaggttgaggaagtgagatccagcccccagcccccagctggcccctgactccatgtggccttagctgggcccatctgctgggcctcctctgcctcccctgtaaaatgggacctccgaaccaaccctgcccctcagaaatgccctgcctattaaatgagctcccagaaaacagt

SEQ ID NO: 13295 - DNA, 556 bp, Homo sapiens
cactcagcccctcctggggtgcttgtggcctcctatacccacttctgctcctcggacctgtgcaatagtgccagcagcagcagcgttctgctgaactccctccctcctcaagctgcccctgtcccaggagaccggcagtgtcctacctgtgtgcagccccttggaacctgttcaagtggctccccccgaatgacctgccccaggggcgccactcattgttatgatgggtacattcatctctcaggaggtgggctgtccaccaaaatgagcattcagggctgcgtggcccaaccttccagcttcttgttgaaccacaccagacaaatcgggatcttctctgcgcgtgagaagcgtgatgtgcagcctcctgcctctcagcatgagggaggtaggctgggggcctggagtgtctcacttggggggtggggctagcactggccctagcgctgtggtggggagcggtttgcccttcctgctaactccatttcccccacgattcttcaccgctgctcaccaccacactcaaccgtcccttgtgcttgtaacctaatggcct

SEQ ID NO: 13296 - DNA, 667 bp, Homo sapiens
cactcagcccctcctggggtgcttgtggcctcctatacccacttctgctcctcggacctgtgcaatagtgccagcagcagcagcgttctgctgaactccctccctcctcaagctgcccctgtcccaggagaccggcagtgtcctacctgtgtgcagccccttggaacctgttcaagtggctccccccgaatgacctgccccaggggcgccactcattgttatgatgggtacattcatctctcaggaggtgggctgtccaccaaaatgagcattcagggctgcgtggcccaaccttccagcttcttgttgaaccacaccagacaaatcgggatcttctctgcgcgtgagaagcgtgatgtgcagcctcctgcctctcagcatgagggagttgaggttccccattgactgaaccccctagaggccacagaagcaggagactccactggtccagcccccatagatctgccattcacactacagaacagaggagaggagagggaagaggagaagagagcgaatctggagaaggaaacagaacacgtctagtaccgttcactcccttgcccctcggcatccaccctttccctttgtccaaatgaaaatcaaagtccaggacaggctcggtggctcacgcctgtaatgccagcactttgggaagctgaggtgg

SEQ ID NO: 13297 - DNA, 611 bp, Homo sapiens
cactcagcccctcctggggtgcttgtggcctcctatacccacttctgctcctcggacctgtgcaatagtgccagcagcagcagcgttctgctgaactccctccctcctcaagctgcccctgtcccaggagaccggcagtgtcctacctgtgtgcagccccttggaacctgttcaagtggctccccccgaatgacctgccccaggggcgccactcattgttatgatgggtacattcatctctcaggaggtgggctgtccaccaaaatgagcattcagggctgcgtggcccaaccttccagcttcttgttgaaccacaccagacaaatcgggatcttctctgcgcgtgagaagcgtgatgtgcagcctcctgcctctcagcatgagggagttgaggttccccattgactgaaccccctagaggccacagaagcaggagactccactggtccagcccccatagatctgccattcacactacagaacagaggagaggagagggaagaggagaagagagcgaatctggagaaggaaacagaacacgtctagtaccgttcactcccttgcccctcggcatccaccctttccctttgtccaaatgaaaatcaaagtcc

SEQ ID NO: 13298 - DNA, 326 bp, Homo sapiens
cactcagcccctcctggggtgcttgtggcctcctatacccacttctgctcctcggacctgtgcaatagtgccagcagcagcagcgttctgctgaactccctccctcctcaagctgcccctgtcccaggagaccggcagtgtcctacctgtgtgcagccccttggaacctgttcaagtggctccccccgaatgacctgccccaggggcgccactcattgttatgatgggtacattcatctctcaggaggtgggctgtccaccaaaatgagcattcagggctgcgtgcccaaccttccagcttgaacaccgacgggatcctctagtcg

SEQ ID NO: 13299 - DNA, 816 bp, Homo sapiens
actgaccccgcctgggaacaacagtcattcttcctctttgttaatgtgccagaacctgggaggcttctctgtttatctgtttggcatcccttcctcctaaactaagaaggatcctggacagggagaagtggaggaggataaggtaccaggactcaggcttctcatcccctcctcccgcaaagcggttttctgaccctcagggcctctcggaatgtagttgctcgaggtaaccgctagagggtgcgcacctggatgctggatggggacggctgcgggcatctgcagggtggagggggccaccatccagtgtagggcacaaccctggggactgccctccatagcctgtcccgactgccgactcctagctctcatcgcctcggcgcctcccaccttcaccctctcggggatgcctccccaagagggtagttaggggtggggaagccgcctccacccagggggcgtggtgggggcggagggaaggagggcggcggggcacagagacagagagcaaggctgtgaaactgaggcaccgttcctagacatctcggtgctgtgtcgttcattcaaggagagttgagatacagtgaaatgagccagggcgaggagggagggtgaaggaacggagggcgggcggctccgaggagcgagagtcgggctgagggcaacctggcgccagggaaaattctggttattcaccacttctacagctctcctgccgctccctgcagaggatgctcgttttgcagagaaggcagtgttcctctattcccttcttccgaattaaaaataccccctcagagcgaatagcctcccgaa

SEQ ID NO: 13300 - DNA, 267 bp, Homo sapiens
gcagcatgacagaagtaggtgtgtccaagtcaggtcatgttgaccagaatcacccagcctgtgaggaagtattggtcctgtcttctaaccccaattgtatggaagatttctagccatatatattcatttacacataaattagaaacagtgtggtgaaaccattccctagggcaacacagtataatattgaaattgtgtttttagatgaccattactgaacccatataaacagatacttttaatttccaacagttcatctttaacccc

SEQ ID NO: 13301 - DNA, 486 bp, Homo sapiens
tggaaatttaatactttttcagtagagatggggtcttgccatgttgcctaggctgttctcgagctcctaggctcaagtgattcttccacctcggcctcccaaagtgctagggttaacaggcatgaaccaccgtgcctggcctagactttattgtaactaattgcttattcataactttcagaatgtttcctaaattgtgctatataaaaaatgctgtaacgaagttttgtatgtatggcattttgcacaagtgtgagtgatattgagtcttagtagttctgttttaagctagaatctttagtttcgtttttctgccttatcttctggaccaaagctcttttagccaataaaagtgactgaagctgggcatggtggttcacacctgtaataacagctctttgggagactgaggcccaaggattgcttgaagccaggagttgagaccagcctgaggaacatagtgagatctccatctccaccaaaaaa

SEQ ID NO: 13302 - DNA, 478 bp, Homo sapiens
taaagattacttatatctagttcatacctcctaaaggtaatttgaattgaaatagtgatgcatacaataaggtcattaaagtagaaacagaaaataaaggattataaagccattgatggtaagagcaattgattttgtgaactacaaatcatagatttaactgaatagtttgttgtttatacaaaatagctgttgaaaagtttctgactgactgggtgcagtggcttatgcctataatcccagcacttttggaggccaaggcaggtggatcacttgagaacagcctggccaacatggagaaactctgtttctactaaaaatacaaaaattagccaggcatggtggtgcacgcctgtaatcccagctactccagtgagtcaagagaattggttgaacccaggaggcagaggttgcagtgagctgagatcacaccactgcactccagcctgggtgacggagtgaaactcttgtctcaaaa

SEQ ID NO: 13303 - DNA, 415 bp, Homo sapiens
tagttccatttcaaagcctttgcaatggtatttggttctgttaagcatgatcagcagtcttggagctggcgaggtctatatcccttactcagtgcagttctcaaagtcctttgtatgtcgtacaggatcacatctgtacatacacaccttgtggggtaagcccagaagctcatacacagcttcatgggtttactttcccaagcacttcctccctccctgcaatctccccagcactttctgcttccctcagcttccccttttcaaccttgtagccatgaagctgttgctgtcgctttagtgactcttctctgccacacgcttcctgtgcctttgccttcctctggtgtgattcggcaggaagaccaaagaggggaaaaagaagtcacgggcacccctttgggacctacaatcagag

SEQ ID NO: 13304 - DNA, 1180 bp, Homo sapiens
  misc_feature (1)..(1): n is a, c, g, or t
  misc_feature (3)..(3): n is a, c, g, or t
  misc_feature (5)..(5): n is a, c, g, or t
  misc_feature (239)..(239): n is a, c, g, or t
nantnaataaaataaaataaaataaaataaaataaaataaaaatggatggtgtcccataaaaagcactagacatttccatctccatctttgaactatgctataccttccagaagggatgccaactagtacatgaaaactatctagaaacacagataggaccaagcttcccttctctgaattcttacagcatatgtttgaagactgctgtgtttgtaatctctctctgcaactcaaatgntttgaacacttgtgatgcaccacagattcttacagggggataaacatgaatgagatatagattacccttttggggcttatacttcagtagtattttaacttgtagacactcttatagtaagcgacacatgctgttctccatggtaatgtctttatattgtatataacatagctaatgtaatctagcttgagctcaaaggacaccagagctaaagcaagatatgtccctttatatttacttatttctttgtttattgagacagggtctcagcccaccacccaggctggagtgcagtggcaccaccacaacttactgtagattctgcctcttgggctcaggtgatcctcccacctcagcctcccaagcagctcagagtacaggcgcatgtcaccatacctggctaattttttgtattttttatttttttaagtagagacgggttttgccatgttgccaggctggtctcaaactcctgggctcaagtgatcagcctgccttggtttcccaaagtgctggacaagatacattcttacatgagacattttgagcctaatgaagataaggcgtggtttttctgtttaagaacttagtagatgatgtatcaaaatagttgcagctatttaaatgatttgaagcagattttatttagttcacggtgaaaattacagttggaaataatcaagtgaaaataagattggctttgactaaatccagagatagcaaaattttgtactgactgaatattaaaagaataatcaaatattttgaaaaaagttagacctaataaatttaatccaagaaaattgaacttggtagaaatgcccacaagaaaaatgcagaggcagaaggttaaatagtaaaactccatgaaaaaaaatgatgactgaactgaatctctgttgtaaaattgaaacatggaataaataattttatgaagataa

SEQ ID NO: 13305 - DNA, 425 bp, Homo sapiens
ttatatgtgccaaaaatacactgaaaacactaggttggctgagtgtgcaaacaatataatccaaagatttcttgtattaagaatgataaaacctcttatttccatacactgtattgtcccaaatcatcaacctggccctgcggtcctcatgatttattgctctcagctggtaacttggcgaggcagcgggcagagcgtgtcaggccttctgtactcacgcaccagcctttaacgcctgctgctccaaccagcagagcagaaagttgggagggacagtgttgaagcctcggccatctgaggcgttgccatctcgcgctgcctcccccgggagccctctggttccttctcggagtcagcagaagctcctctccctctggcacaggacacatggccctcggagtagaatcagcagaggcagtggctgg

SEQ ID NO: 13306 - DNA, 151 bp, Homo sapiens
cggggccgagcgtgcagtttgggaggtggcacagttgggggcggcggggatcagggcagcgtcctgggggttctaggttgggtctccagattgggtccccgacggcgctcgcgggcgctctttccagggagcgcgggctctcgtggggacg

SEQ ID NO: 13307 - DNA, 464 bp, Homo sapiens
tctgcagcctggtcatctctctctttgcccagttttggagaaagggttcccagcacccgtcagattctccaaggtgctgcttctttcagaaatctggcgtttctgaagagcttgccacgctgcggtatctaaggggaaggaactatttagtcctcttacacttaaagaaacttaagcccaggccaggcgtggtggctcatgcctgtaatcccagcactttgggaggccgaggaaggtggatcacttgaggtcaggagttcgagaccagcctggccaacatggtgaaaccccgtctctaccaaaaatacatagttagctgggtgtggtggcgggcgcctgtaatcccagctactcgggtggctgaggcaggaaacttgcttgaacccgtgaggcggaggttgcagtgagcagagatggagccactgctctccagcctgggtaacagggagactctgtctcaaaaa

SEQ ID NO: 13308 - DNA, 300 bp, Homo sapiens
ggggagcacagttgctcctgcgctggctgtggctgtgggggaaggaagagccgctccattcctgcgtttgatcaggttgtcacgaggactgagtgagtcaccaggtgtgaggggctttggtgggtgtgtcacagtggcaaagcattcacaccggccaggtccccagctgggagcatgtgcccaggagcctgcggtgtgcagctggtctagccccaccgtggagcagccacgtgggagaggccccgggaacaggcgaggtggctgtgccgttcacacccagagagtcgtcagggcaactgg

SEQ ID NO: 13309 - DNA, 513 bp, Homo sapiens
ggatcacttgagctcaggagttcaagaccagcctgggcaacatagtgagaccctgtccccacaaaaaattgaaaaattaacttggcatggtgttacgcgtgtgtagtcccagctacttgggaggctgaagtgggaggatggtgtgagcatgggagggcaaggctgcagtgagccatgatcacgccactgcactccagcctgggcaacagagtgagaccctgtctcaaaaaataaataaataaaataaaacaaagtgttgccacttagtttgctaaatacagattcctttcttccctattcatgttgaagggggaaaatatttcagttataaatgtgaagagaatccacaagttgtttttgttttgttttgttttgttttgttttgttttgttttgttttgtttttgagacagtctcgctgttgtcacccgggccggactagtctcgaactcctgatcctcccagagtgctggaattacaggcgtgagccactgtgctcagcccgagaatccaa

SEQ ID NO: 13310 - DNA, 996 bp, Homo sapiens
ggcgtgccggggcggggcggggcgtgccggggcggggcgtagtacggactgggcctggcctggggcgtccccgcgaagcctgggcctgtcaggcggttccgtccgggtctcggccaccgtcgagttccgtcgagttccgtcccggccctgctcacagcagcgccctcggagcgcccagcacctgcggccggccaggcagcgcgatcctgcggcgtctggccatcccgaatgctatggccgccgtcgccgtcttgcgggccttcggggcaagtgggcccatgtgtctccggcgcggcccctgggcccagctccccgcccgcttctgcagccgggacccggccggggcggggcggcgggagtcggagccgcggcccaccagcgcgcggcagctggacggcataaggaacatcgtcttgagcaatcccaagaagaggaacacgttgtcacttgcaatgctgaaatctctccaaagtgacattcttcatgacgctgacagcaacgatctgaaagtcattatcatctcggctgaggggcctgtgttttcttctgggcatgacttaaaggagctgacagaggagcaaggccgtgattaccatgccgaagtatttcagacctgttccaaggtcatgatgcacatccggaaccaccccgtccccgtcattgccatggtcaatggcctggccacggctgccggctgtcaactggttgccagctgcgacattgccgtggcgagcgacaagtcctcttttgccactcctggggtgaacgtcgggctcttctgttctacccctggggttgccttggcaagagcagtgcctagaaagagtctcgctctgtcacccaggctggagtacagtggcgctatctcagctcactgcaatgttcaagggattctcctgcctcagcctccatagtaactgggattacaggcacgtgccaccatacccggctaattttgtatttttcgtaaagatggggtttcaccctgttggccag

SEQ ID NO: 13311 - DNA, 848 bp, Homo sapiens
ggtgatttctggagtgtgttgggtttacaacggttgcatttcaggaacatgaatctcctgtgcgtggtatgttgaatctgcccaagaaggagccgtgttgcaaagtggttttgttaactacagtgaagtctgtttccgccacaaagctttcttccttcctataacatcataaaataatatttcctaaacttccctcaagtgtaaaccaacagtgttcttgttgcggaaaaagtgcatccttgttcttaattggaaatctataaaaaagggggcagaatcttagaccacaccaagtaaagaagctaaattgctttctaatgtatatgatctgctttagcatcagctgtgaaaatcagcaattgctcacatgcctaagacgcaaaagaaataagatccaagggaaatccagtagtaggaccaagaagtttagggaagtattcctttcttttgcagtgcccctttgttagtttttgcagaaatgtgtgtttgtggggaaattctgaagacagatacctgcgaacacacacacttaggacagtgggctggaagtgggcttcacactacagtaggtgatggctggctaaagtgtcttcagactaagaggatgttttcgattctgtcaagatagacacttaccttaaactcattcagtaatttttttttttttttgaaacagagtctcgctctgtcacccaggctggagtacagtggcgctatctcagctcactgcaatgttcaagggattctcctgcctcagcctccatagtaactgggattacaggcacgtgccaccatacccggctaattttgtatttttcgtaaagatggggtttcaccctgttggccag

SEQ ID NO: 13312 - DNA, 212 bp, Homo sapiens
gcctctcctgagcagccaggattaactctgcttaggacgtttcagataagggtcaggctggctgctcaggagaggcgacacatttcaaatctccacgagatattctccacacagaaaatcttcttgattctatagagacttaatcatgcctatggctttgaataatcttatgtgatttaaataaattaaatctttatagagaaaaaaaaaat

SEQ ID NO: 13313 - DNA, 1344 bp, Homo sapiens
ggcgtgccggggcggggcggggcgtgccggggcggggcgtagtacggactgggcctggcctggggcgtccccgcgaagcctgggcctgtcaggcggttccgtccgggtctcggccaccgtcgagttccgtcgagttccgtcccggccctgctcacagcagcgccctcggagcgcccagcacctgcggccggccaggcagcgcgatcctgcggcgtctggccatcccgaatgctatggccgccgtcgccgtcttgcgggccttcggggcaagtgggcccatgtgtctccggcgcggcccctgggcccagctccccgcccgcttctgcagccgggacccggccggggcggggcggcgggagtcggagccgcggcccaccagcgcgcggcagctggacggcataaggtcagccccgggccgcgcgggctcctcgcgttggtgccgagtcggggtcagggcgccgccattgacccggggaggacccggggaaccggagccccgtttacgcccctggggagggaactccccgtgtcccggacccgggcctggcagcgagacgcgcaggaacatcgtcttgagcaatcccaagaagaggaacacgttgtcacttgcaatgctgaaatctctccaaagtgacattcttcatgacgctgacagcaacgatctgaaagtcattatcatctcggctgaggggcctgtgttttcttctgggcatgacttaaaggagctgacagaggagcaaggccgtgattaccatgccgaagtatttcagacctgttccaagctggccacggctgccggctgtcaactggttgccagctgcgacattgccgtggcgagcgacaagtcctcttttgccactcctggggtgaacgtcgggctcttctgttctacccctggggttgccttggcaagagcagtgcctagaaaggtggccttggagatgctctttactggtgagcccatttctgcccaggaggccctgctccacgggctgcttagcaaggtggtgccagaggcggagctgcaggaggagaccatgcggatcgctaggaagatcgcgtcactgagccgtccggtggtgtccctgggcaaagccaccttctacaagcagctgccccaggacctggggacggcttactacctcacctcccaggccatggtggacaacctggccctgcgggacgggcaggagggcatcacggccttcctccagaagagaaaacctgtctggtcacacgagccagtgtgagtggaggcagaggagtgaggccaccgtcaaggccccaggctggtttctgaacttgatattgtgcatccatatggcctccatttgcccacatttt

SEQ ID NO: 13314 - DNA, 638 bp, Homo sapiens
ttagctgggcgtggtagcccatgcctgtagtcccagctactcaggaggctgaggcaggaggatggcttgaactcgggaggaagaggttgcagtgagccaggatcttgccactgcactccatcctgggcaacagagtgagactctgtcaaaaaaaaaaaaaaaaaaaagcaataggcgttaatgtcgtgcctccctctgggtggaaatgaagtaggtgtgtttgtcccgcaggtcatgatgcacatccggaaccaccccgtccccgtcattgccatggtcaatggcctggccacggctgccggctgtcaactggttgccagctgcgacattgccgtggcgagcgacaagtcctcttttgccactcctggggtgaacgtcgggctcttctgttctacccctggggttgccttggcaagagcagtgcctagaaaggtaatttaactccccccacccacctctgcctcccagccttctccggagttcctcctccagtgcatgcgatgattcaagatccgcttgttaaaagtgcctttcatatcaggacgttctgcccagagtgcctctggctagatgggccaggatgttccctctaatggcagggagggaagagccgaccgcctgcctgttcctctgtagct

SEQ ID NO: 13315 - DNA, 1682 bp, Homo sapiens
ggcgtgccggggcggggcggggcgtgccggggcggggcgtagtacggactgggcctggcctggggcgtccccgcgaagcctgggcctgtcaggcggttccgtccgggtctcggccaccgtcgagttccgtcgagttccgtcccggccctgctcacagcagcgccctcggagcgcccagcacctgcggccggccaggcagcgcgatcctgcggcgtctggccatcccgaatgctatggccgccgtcgccgtcttgcgggccttcggggcaagtgggcccatgtgtctccggcgcggcccctgggcccagctccccgcccgcttctgcagccgggacccggccggggcggggcggcgggagtcggagccgcggcccaccagcgcgcggcagctggacggcataaggaacatcgtcttgagcaatcccaagaagaggaacacgttgtcacttgcaatgctgaaatctctccaaagtgacattcttcatgacgctgacagcaacgatctgaaagtcattatcatctcggctgaggggcctgtgttttcttctgggcatgacttaaaggagctgacagaggagcaaggccgtgattaccatgccgaagtatttcagacctgttccaaggtcatgatgcacatccggaaccaccccgtccccgtcattgccatggtcaatggcctggccacggctgccggctgtcaactggttgccagctgcgacattgccgtggcgagcgacaagtcctcttttgccactcctggggtgaacgtcgggctcttctgttctacccctggggttgccttggcaagagcagtgcctagaaaggtggccttggagatgctctttactggtgagcccatttctgcccaggaggccctgctccacgggctgcttagcaaggtggtgccagaggcggagctgcaggaggagaccatgcggatcgctaggaagatcgcgtcactgagccgtccggtggtgtccctgggcaaagccaccttctacaagcagctgccccaggacctggggacggcttactacctcacctcccaggccatggtggacaacctggccctgcgggacgggcaggagggcatcacggccttcctccagaagagaaaacctgtctggtcacacgagccagtgtgagtggaggcagaggagtgaggcccacgggcagcgcccaggagcccaccttcccctctggcccagccaccactgcctctcagcttcaacaggtgacaggctgctttcgtgacttgatattggtgtcatagcatttggcctacattaaaagccacaatttcatggggaaaggacaaaatggagagtgactgaggtgctgacctcagtgcaaggctggtgaaccctgcagcgggccagctatggtgggaagcctggcatttggggtgctccttgcaacgtcttaagcaagcgacccccctgacatagcaaaaggtggcaacccatggaggcagaaagaaggacgccagcctgacccttatctgaaacgtcctaagcagagttaatcctggctgctcaggagaggcgacacatttcaaatctccacgagatattctccacacagaaaatcttcttgattctatagagacttaatcatgcctatggctttgaataatcttatgtgatttaaataaattaaatctttatagagaaaaaaaaaat

SEQ ID NO: 13316 - DNA, 1841 bp, Homo sapiens
ggcgtgccggggcggggcggggcgtgccggggcggggcgtagtacggactgggcctggcctggggcgtccccgcgaagcctgggcctgtcaggcggttccgtccgggtctcggccaccgtcgagttccgtcgagttccgtcccggccctgctcacagcagcgccctcggagcgcccagcacctgcggccggccaggcagcgcgatcctgcggcgtctggccatcccgaatgctatggccgccgtcgccgtcttgcgggccttcggggcaagtgggcccatgtgtctccggcgcggcccctgggcccagctccccgcccgcttctgcagccgggacccggccggggcggggcggcgggagtcggagccgcggcccaccagcgcgcggcagctggacggcataaggtcagccccgggccgcgcgggctcctcgcgttggtgccgagtcggggtcagggcgccgccattgacccggggaggacccggggaaccggagccccgtttacgcccctggggagggaactccccgtgtcccggacccgggcctggcagcgagacgcgcaggaacatcgtcttgagcaatcccaagaagaggaacacgttgtcacttgcaatgctgaaatctctccaaagtgacattcttcatgacgctgacagcaacgatctgaaagtcattatcatctcggctgaggggcctgtgttttcttctgggcatgacttaaaggagctgacagaggagcaaggccgtgattaccatgccgaagtatttcagacctgttccaaggtcatgatgcacatccggaaccaccccgtccccgtcattgccatggtcaatggcctggccacggctgccggctgtcaactggttgccagctgcgacattgccgtggcgagcgacaagtcctcttttgccactcctggggtgaacgtcgggctcttctgttctacccctggggttgccttggcaagagcagtgcctagaaaggtggccttggagatgctctttactggtgagcccatttctgcccaggaggccctgctccacgggctgcttagcaaggtggtgccagaggcggagctgcaggaggagaccatgcggatcgctaggaagatcgcgtcactgagccgtccggtggtgtccctgggcaaagccaccttctacaagcagctgccccaggacctggggacggcttactacctcacctcccaggccatggtggacaacctggccctgcgggacgggcaggagggcatcacggccttcctccagaagagaaaacctgtctggtcacacgagccagtgtgagtggaggcagaggagtgaggcccacgggcagcgcccaggagcccaccttcccctctggcccagccaccactgcctctcagcttcaacaggtgacaggctgctttcgtgacttgatattggtgtcatagcatttggcctacattaaaagccacaatttcatggggaaaggacaaaatggagagtgactgaggtgctgacctcagtgcaaggctggtgaaccctgcagcgggccagctatggtgggaagcctggcatttggggtgctccttgcaacgtcttaagcaagcgacccccctgacatagcaaaaggtggcaacccatggaggcagaaagaaggacgccagcctgacccttatctgaaacgtcctaagcagagttaatcctggctgctcaggagaggcgacacatttcaaatctccacgagatattctccacacagaaaatcttcttgattctatagagacttaatcatgcctatggctttgaataatcttatgtgatttaaataaattaaatctttatagagaaaaaaaaaat

SEQ ID NO: 13317 - DNA, 380 bp, Homo sapiens
ttattttccttctcccttacaaattatccaactgcactgggagagcaacatggtagaaacatgaaccctatcttcaaagaaagatatatgcacaactccagactacaaaatgtgatgaagaatgataaatgcagttaaaaatgcccacagctgcagatctcacacaaagctggcagaactttctagggggcaaaaccaataatgcccagtttatgggataggatttgtgtactagcagcaggagctttcttggccttcctagggtataaagaagaaagcgggggtgctgggcacggtgactcacgcctgtaatcccagcactttgggaggctgaggcgtgcggatcacctgaggtcaggagctcaaaaccctgtctctac

SEQ ID NO: 13318 - DNA, 355 bp, Homo sapiens
tttttttttggagacagggtctcactctgtcacccaggctggagtgcagtggtgccatcatggctcactgcacactcaacctcccaggctcatgggttgctcccacctcagcctcctaagcagctggaactacaggcgcacaccaccacacccagctaatttttaaattttcttggaagagacggggtcttgctatgttgcctaggctaaagacctttttaaaaattataattgattcctttgctcaactctgtgcaaataatttcaaaacatggataaaggagataattttctagaaattattgtatgtcaacctacttccagaagagagagaaatattacactaattatcaca

SEQ ID NO: 13319 - DNA, 448 bp, Homo sapiens
cccccacacacacacacactcacacacacacacaccccaatcactcagctgtcccatcccacctgccccaccacaggcatcttcagtggtgaagtgggggtgcccatccttgtaggcgattctttccccctatgcagagccctctcctctttccaccgatctggcctgaggcctgtgggtcagtgagtctggatatggagctggttctggggcaagaacagacttgaaggaagcctgcaaaattgaggagaatcccagggctttgagtaacagaggtcagccccccaacttgtcggaaaggaggatgagccagaggcctggctcaagggacagggagagcccaagacagcagctgccagaggcctagggcatgcgcctcaggaccttacctggagcaggccccttaggactccatggggtctgtgcagggagcctgggaggctgtcac

SEQ ID NO: 13320 - DNA, 403 bp, Homo sapiens
cgacttgtttacaacaacctgtaaaacctttaaatactaaaatttaaataaaaactttacctcactagattatttcctcgacaatttatactaagaaataaaaggaatattagtggttgaggtgagagatcaggtctgaagcaaaggaggctgactctgataaaaccaagggcctctaaaagctacctctgtggccagaggacttaggagagatgttgctttgttaaagcgtaatgctaagaaaacaagtaagattaaattgggtaaaaattactttattagttttttgatgaaacagttgtaatcatatcattagttttgatctctgggtatattaataactaaacagcatagtaattgtattccagactacaatttaaaaattaaatgtttcaatgtgtag

SEQ ID NO: 13321 - DNA, 793 bp, Homo sapiens
tctaaatctgaactggacaaatgttcaacttttgaacataacttctagatgctgagcagcacacaccttgctgaataacagatgactcatgctcacaatacagtcttctctccttgctaatatgtttataatttcacaaatattcttatatttctatcatataccaattaagtaattttcaaagtatggttcgtggattctttcaggggtgcaaaatagcacacagttttcaaacaaggtgtgatttgccttttcacaaaggttgctatttgccctgaaggtataaaagcaatgctgactaaaactgccggtgccttggcacaattcaggaaccaaactaagaatacaatggtattcttcactgtcatacacctgaactaaaggaaaaaaacagagacagttccacttacaaatgttcttgatgaagcaataaaaatgactgatttcattaaatcttgaccctgagtaacacatctttttattattctgcatgactaattaggaagtatgtaacaagcctttctccacatgctaaagcatgtcttgaggaaaagcacttctagaactgagttgtgagctgaactagcagctttgttcattgagctccaattttactcaaaagtcaactgggtatttggtagacattttctaaaaaatgaacaaagtgaactttttacttcaaagaacacatctgacggtatttgtgataaaatttatgtttttaagtgaattctagaatactggaaaacttgggccaggcatggtggctcatgcctgtaattccagcactttg

SEQ ID NO: 13322 - DNA, 497 bp, Homo sapiens
gttaaaattgttagcctttagttatcaaagcatatgtcacgaattcagttcatggggatccttgcccacttatggataagagggtaatagttggtatttaaagaaaacattaactgcagagatatgatacagatatgtagctatagatatatctcactgaaatttatatgagtcagaggtggagaatatccaagccatgttaccatcttccagtatccacttcttatgggctctcaaatatcggacctttgcccattgcctaaactgcagttcatcttgccaactggttttgttttgattcctatttattatgtcttaggctgtaatctcatccagacctgattctgagaccaagctctgtgtcttcttgccttacttgctgcttttgacctcttaaactagagcttatcattttaaatggcccaacttgattacactgtagataagactaaatactgtgactctgagaaaaaataaactttatttgtgcgacaaat

SEQ ID NO: 13323 - DNA, 669 bp, Homo sapiens
attgttttctatttcacctgagaaatcttttttagttaagtagaaaattacaatcgtctacatctttcttgctcagtatttttcaagttatagttgccagttgagagaaacgacatctcattttcaggcttaacaggtttccgcaggtccatctgagccatggggcttaaaggcgagcatgcagcagagtcactgggaaggcttattaaaacacaggtcactgggcctatccccaggttctgattcagcagggctcggatgggggattaagaattcacatttctaacaggctcccagttgacacaccagtgatgtcagtccacttttaggtccactggatcatagttttcagaagaaagtctcagccagtcacagaggcgcacgcctgtaatcccatggggcactttcagaggctgaggtagctgggtcacttgagctcaggagttcgagaccagcctgagcaacatggcgaaaccccattcctacaaaaaaaaaaaaaactagctgggcgtggtggtgcattcctatagtcccagctgaggaaggcggaggtggaaggatcacttgagcccagaaattcaagacttcagtgagccgagattgcaccactgcactccagcctgagtgacagagtgacaccctgtctcaagaaaaaaaaaaaaaaaactc

SEQ ID NO: 13324 - DNA, 3082 bp, Homo sapiens
gtacgtgtgtgtgtgtgtgtgtgtgtgtgtgtgtgtgtatgcgtgcctatgcaattttgtcatgtttagctttgtataaccaccactggaactgtttcactaccacatggctcccttgtgctacctctttatagctgcagcttctaatctgttctctgtctataattttataattcaaaaatgctatgtacatgaatctgtaaccatttggcttggctttctccattcagcatgattcccatgagatccatccaagttgttgagattatcgatagttcattccttgttattgctgcattgtgtcccatggtacaggtgtaccatagtttgtttagcagttcacccactgaagggcatttgagttgtttccagtttttggctattacaaataaagctgttatgaatatttgtgcacacagacatacattgtgtgagcataggttttcatttctctgggataaatgcccaagagtggaattgttgggtcataagttaaatgcatgtttagctttttaagaaactgccaaactattttccagtgtggctgtaccattttatattccgaccagcagtatatgagtaatatcacttctccacagccttgccagcatttgatgttgtttttacgtttcactttagtcatgctgatgggtgtgtagtgatacctcattgtggttttagttgacatttctctaccggctaatgatgtgaaaacatcttttcgtgtacttatttgctatgtgtgttatcttctttggtgaaatgtctgtcttttgccttctcatatagtttggatatttgtcgcctccaaatttcatgttgaaattgaatccctggtattagtagcagggcctggtgggaagtttggatcatggggaggatacctcataaatcatttttatagtggcaagttctcactatattattatcatgagaatataccatcccctcctttctttcttcttctcttaccatgtgatgcctgctcccattgccttctgccatgagtggaagcttcctgaggccctcactggaagcagatgctgataccatacttcttgtacagtctggagaactgtgagccaaatcaacttcttctctttataaactacccagcctcaggccaaagaagccctcgaaaatactgaagttcctgttggctgtcttatggtctacaacaatgaagttgtagggaaggggagaaatgaagttaaccaaaccaaaaatgctactcgacatgcagaaatggtggccatcgatcaggtcctcgattggtgtcgtcaaagtggcaagagtccctctgaagtatttgaacacactgtgttgtatgtcactgtggagccgtgcattatgtgtgcagctgctctccgcctgatgaaaatcccgctggttgtatatggctgtcagaatgaacgatttggtggttgtggctctgttctaaatattgcctctgctgacctaccaaacactgggagaccatttcagtgtatccctggatatcgggctgaggaagcagtggaaatgttaaagaccttctacaaacaagaaaatccaaatgcaccaaaatcgaaagttcggaaaaaggaatgtcagaaatcttgaacatgttctgatgaaagaaccaagtgacccaaagtgacctggacaagattcatagactgaaagctgttgacatcgttgaatcatatgtttatatattgtttttaatctgcaggaaaatggtgtctctcatcatttgctctgttaagggaacaaattagcactttttagaagtctgacaattgtaaacagttattagcttttccagaagctgattcccattttaagatgggggaaaattaaggtttgaggttttagaaattagcaagtagtgcatacccttctagccacaagtgcccagtccaggcaagtgctgacttcttagagaatgtgtggccagacccagggacctggagtgtgtttggactgcagtttgccaccctgagaacaccttctccaggactggcatttcagaatcagattcttcattttttgcagctacgatgttcttccagggcactgggggctgtgacttctctctaaattgtatataagttgtgtatatagagaccataattatatggtccttagaaaagactttgcttttataaagcatttagaaaaaatgcatacttttaaaacaagtgcttgagttgtcacttaaaaattatagcatattgctataataaaaccttatttatgtcttatttgaagatgaatagtcttaaaagataaagacataaatgggacaattgttattgagcaaaaaaccaaattatcccaccctcatggagcttatattctagcaaggggagatggatatgatagattacacagtttattggaggacaataagagttatggcaaaaagcaaaaggaacacagggtaaaggggataggtgccatttggtggtgagaatgctgactgaaaaatagaatgatcaatttaatctgaaacaaatggttatttcttttataatccatataataaatttaaaatctaaaatgtaaaattttgaacacaacactggaaagggtatccacagcaggaagtccccagttcacctccatgactacagggcagctttgcacagccctctgggcgcactgtgtgcctctgcccagaagggggcctcgccgttccaccagaagctcagctccaggccctggaggggctgctgctcctcagttgcatttcttcagtagattcatttccttgatgcaaagcatctgtatttgttggttctgtcatttgagcgatgtctctgacttgtttgttttgaattacattacaggctggaatgtaattgtggtgaaagtatttttatattgctgagagtagcagctaatcacagttacatgcttcagaggacttataattgcttggttgtgtgtgtgtgtgtgtgtgtgtgtgtgtgtgtgtgtgtttaactgcatttgaaaagttttatggagaatatgcatgattttaaatctgtgataatgttacatgcaccttcaatttcatccactttaaaaattatcttctcattgaaaaaaaaag

SEQ ID NO: 13325 - DNA, 1162 bp, Homo sapiens
gtacgtgtgtgtgtgtgtgtgtgtgtgtgtgtgtgtgtatgcgtgcctatgcaattttgtcatgtttagctttgtataaccaccactggaactgtttcactaccacatggctcccttgtgctacctctttatagctgcagcttctaatctgttctctgtctataattttataattcaaaaatgctatgtacatgaatctgtaaccatttggcttggctttctccattcagcatgattcccatgagatccatccaagttgttgagattatcgatagttcattccttgttattgctgcattgtgtcccatggtacaggtgtaccatagtttgtttagcagttcacccactgaagggcatttgagttgtttccagtttttggctattacaaataaagctgttatgaatatttgtgcacacagacatacattgtgtgagcataggttttcatttctctgggataaatgcccaagagtggaattgttgggtcataagttaaatgcatgtttagctttttaagaaactgccaaactattttccagtgtggctgtaccattttatattccgaccagcagtatatgagtaatatcacttctccacagccttgccagcatttgatgttgtttttacgtttcactttagtcatgctgatgggtgtgtagtgatacctcattgtggttttagttgacatttctctaccggctaatgatgtgaaaacatcttttcgtgtacttatttgctatgtgtgttatcttctttggtgaaatgtctgtcttttgccttctcatatagtttggatatttgtcgcctccaaatttcatgttgaaattgaatccctggtattagtagcagggcctggtgggaagtttggatcatggggaggatacctcataaatcatttttatagtggcaagttctcactatattattatcatgagaatataccatcccctcctttctttcttcttctcttaccatgtgatgcctgctcccattgccttctgccatgagtggaagcttcctcttctttctctctcttttcctctctttctctcctctgtctcttcttcctctcctttcttcctctcttctctcttcctctcctctctttcttctcttatctctcttcccctcctttctctcccccctcccaatccccgggttt

SEQ ID NO: 13326 - DNA, 168 bp, Homo sapiens
gctgagtggtggctgggtatggaggcgaaggcggcacccaagccagctgcaagcggcgcgtgctcggtgtcggcagaggagaccgaaaagtggatggaggaggcgatgcacatgatactatgctatgcacagtgttttcatgtgggccatgttataagccccacagaa

SEQ ID NO: 13327 - DNA, 2074 bp, Homo sapiens
gctgagtggtggctgggtatggaggcgaaggcggcacccaagccagctgcaagcggcgcgtgctcggtgtcggcagaggagaccgaaaagtggatggaggaggcgatgcacatggccaaagaagccctcgaaaatactgaagttcctgttggctgtcttatggtctacaacaatgaagttgtagggaaggggagaaatgaagttaaccaaaccaaaaatgctactcgacatgcagaaatggtggccatcgatcaggtcctcgattggtgtcgtcaaagtggcaagagtccctctgaagtatttgaacacactgtgttgtatgtcactgtggagccgtgcattatgtgtgcagctgctctccgcctgatgaaaatcccgctggttgtatatggctgtcagaatgaacgatttggtggttgtggctctgttctaaatattgcctctgctgacctaccaaacactgggagaccatttcagtgtatccctggatatcgggctgaggaagcagtggaaatgttaaagaccttctacaaacaagaaaatccaaatgcaccaaaatcgaaagttcggaaaaaggaatgtcagaaatcttgaacatgttctgatgaaagaaccaagtgacccaaagtgacctggacaagattcatagactgaaagctgttgacatcgttgaatcatatgtttatatattgtttttaatctgcaggaaaatggtgtctctcatcatttgctctgttaagggaacaaattagcactttttagaagtctgacaattgtaaacagttattagcttttccagaagctgattcccattttaagatgggggaaaattaaggtttgaggttttagaaattagcaagtagtgcatacccttctagccacaagtgcccagtccaggcaagtgctgacttcttagagaatgtgtggccagacccagggacctggagtgtgtttggactgcagtttgccaccctgagaacaccttctccaggactggcatttcagaatcagattcttcattttttgcagctacgatgttcttccagggcactgggggctgtgacttctctctaaattgtatataagttgtgtatatagagaccataattatatggtccttagaaaagactttgcttttataaagcatttagaaaaaatgcatacttttaaaacaagtgcttgagttgtcacttaaaaattatagcatattgctataataaaaccttatttatgtcttatttgaagatgaatagtcttaaaagataaagacataaatgggacaattgttattgagcaaaaaaccaaattatcccaccctcatggagcttatattctagcaaggggagatggatatgatagattacacagtttattggaggacaataagagttatggcaaaaagcaaaaggaacacagggtaaaggggataggtgccatttggtggtgagaatgctgactgaaaaatagaatgatcaatttaatctgaaacaaatggttatttcttttataatccatataataaatttaaaatctaaaatgtaaaattttgaacacaacactggaaagggtatccacagcaggaagtccccagttcacctccatgactacagggcagctttgcacagccctctgggcgcactgtgtgcctctgcccagaagggggcctcgccgttccaccagaagctcagctccaggccctggaggggctgctgctcctcagttgcatttcttcagtagattcatttccttgatgcaaagcatctgtatttgttggttctgtcatttgagcgatgtctctgacttgtttgttttgaattacattacaggctggaatgtaattgtggtgaaagtatttttatattgctgagagtagcagctaatcacagttacatgcttcagaggacttataattgcttggttgtgtgtgtgtgtgtgtgtgtgtgtgtgtgtgtgtgtgtttaactgcatttgaaaagttttatggagaatatgcatgattttaaatctgtgataatgttacatgcaccttcaatttcatccactttaaaaattatcttctcattgaaaaaaaaag

SEQ ID NO: 13328 - DNA, 472 bp, Homo sapiens
gatttttgtatttttagtagagacagggtttcaccatgttggccaggctggtctcgaactcctgacctcaagcgatctgcccgccttggcctcccaaaatgctggattacagggccctgccactgcacctggctaatttttttgcagtttttagtagagacgaggtttcaccatcttggccaggctggtcttgaactcctgacctcatgatccaccccactcggcctcccaaagtgctgggattataggccagaccctgcctggctgaaacttaattcttaaatgtttcttttgcttttcatcttgtgatgtataatgtacaaggctaaggctgtttctccaacttatttttaagttttttattaatgagtaccacaaaaatttcagatcccaaattgggttcttgggaactgtgaattcaaaatgagtttctggcggaatactgtatatgcctcttgtttcttcctgaatt

SEQ ID NO: 13329 - DNA, 310 bp, Homo sapiens
acacttaataaaataaaataaaataaaataaaataaaaatggatggtgtcccataaaaagcactagacatttccatctccatctttgaactatgctataccttccagaagggatgccaactagtacatgaaaactatctagaaacacagataggaccaagcttcccttctctgaattcttacagcatatgtttgaagactgctgtgtttgtaatctctctctgcaactcaaatgttttgaacacttgtgatgcaccacagattcttacagggggataaacatgaatgagatatagattacccttttgggg

SEQ ID NO: 13330 - DNA, 165 bp, Homo sapiens
ctgtggggtgccagtgctcccagcagcgcgttcaccagcactggcaggtttggagagctgtatctgattgggccttgggaactgaggtaggctgcattgaagagatttgaccatttttaactaagttatatgagtttttttgaataggtgatacatttaaaaagt

SEQ ID NO: 13331 - DNA, 717 bp, Homo sapiens
gaccttcagctcacggctccaggcctgggccagttcttgctgctcctgccgtctcccccgactggctgtgtcctgagtaactggaacatgagactgtatctgcaggactggccccatggtggccgagtcagaagtctgtttcctgtgagtcgccaccgttcactcagtcttgccctcccatgctttggagccagtctggtggctcctgtaaggttctcaaggctggtggcagctcagtctggggtcaggacatgtcggggtcatgcgtttctggccctgacataagctgtctggcctctctgtgacatgatgaaattgaaatcaatccacagtccatgaaattgtgacactccaccagattaagttagggcataacattaacttggaaatggccatgtcatcacccctgcggctgtcctatagctgagatgcgtgggtcgcaggggaggtgatttctaggcatattgctgtcccttttgtgtatctgtcatccggatgcttcggaccccacgcctctgcaagtgggagagacccgagcatcctccccacccccatagctccagtgcacgccacccccgtcttgcctgggtcggggcctgcggccagcaccatttcacacacactccttgtagatgggagccagaggaaacctgaacgtgggtggagcgttccactgagtctacttcaggagacagaaggcccatgctgatgggggag

SEQ ID NO: 13332 - DNA, 405 bp, Homo sapiens
ggtcgacggacacacaaaatgccgagtgtggaagggaaagaaggctggcgattgctttttaaggtagcaagttggaaggggggcatgcggggactatgggtgggtggggaattctctaaagaatacaagtcccaaaggctgaagtcacctgtgaccacagggcctcagtggctggctccagtctctacacagcagccacagagatatctccaaaatgcaaatcccattgtccactggtgaacgtcaaactcttccgcatgcttacaaaccctcccatgttctcgcacctgcttacaccacctaactctgctcccacctgtattccaccctcgggctatatctgtaggcctttgcacatgccatcctctttgcacatgtcatcctttgtgtctcagctgagatcgg

SEQ ID NO: 13333 - DNA, 499 bp, Homo sapiens
cctgccctttgagcaggaggagcgtgacctcctgccacagctacagccacaattattgaaattgtggtcaacattccatttaaagcattaaagtctgttgttttagtcctgactaagcagtaggcttctatggattgggtattttttttttttacccacccaaatgtgttttatgttgagatgtttcgagtttttttggggggttgagggtggtgcaggtcgtgaggggcaagagctgctgcataggagataattctctttaactgattaatgtttttgctttattcaacagctattgaattaggcagtctgtacctttagtgttttccagaacaaatgtgttgaagtggcagaagggtggaagaattgaaaattattcttgcacagttgcacctgagttgtattattgctccatgtctccttatgtgcacaagttttacacagttatcttgtcttcctatctcaattgtgaataaatcagaagttccctgttaatgtt

SEQ ID NO: 13334 - DNA, 418 bp, Homo sapiens
tgttgctccatggggcaaaccaaactggatgtaactcaaacaaaattagacactgcatactctactggggggtgtgcccagcatttgggaaaactctgtgtgacttacaagtgccccaaatttggaaagggttcctggcaaagaaatgatttttttttttaatttctacaactacacaagcagatagtgaattaaagccttaaatggcacttaataaagaggtcactggggcaagatgaccctgaaagctacaatggtctccagtacccaagctgttatcatcttcgtagcttcagaaaccctccaaggaaactctcttgatgtggctacttaatagtataacagaaaggtgtaagatcaagtttttcccccatactgattagctgaagactaaacatggtgaagtctttttcttttt

SEQ ID NO: 13335 - DNA, 380 bp, Homo sapiens
acacacccaacacaacaaatgaaatgaaaataagacaaaatatcaagtgttaggaaggaaatagaacatcttgactcatatgctgttgagtaaaaaaacactaggcacttatgcatgccatatgatccagcaattccacctctaggtatttgttcaacataaacgcatacatatgttaaccaaaagacaggtactagaattagaatattcacagtaacactacttgtaatatcccttaactagaatgcccactagcagtataatagatgagtaaattgggatatagtaacaccactgaaatctacacctcaatgaagatgaataaattattgctacatgcaatcgcatggttgaagatcacaaatgtaattctgagtgat

SEQ ID NO: 13336 - DNA, 775 bp, Homo sapiens
tatcattcatggctttgacgagtaactgtgatggagtagtaggggataaagcctcacttgagtgggttcaagagagatgagaggaaaggagaaacagtgagtatagattactgtctcaggaatttatcttataaggggagcagaaaaacgtagctgtcaggaaaactggggtcaagagaattaaaaaaagatagaatagaatagacaacccagtaagtgttttattgactctacgaatgtgacaccttgcaggcagataaaaatgtgattcaggaatttagaaatcaatccaagacaatgaataaaaataagaagctatgcatgaagataatgataaatgtagaaataaatagggttctcatgtgtaaattgtagagagatgaaggaaattttgcatggccagaaccttgggaaacattcttttagaaagcaaaaaaaaaaaaaaaaaactcgctcgtgccgaattcggcacgagccaaatatgagatgcgttgttacaggaagtcccttgccatcctaaaagccaccccacttctctctaaggagaatggcccagtcctctcccaagtccacacaggggaggtgatagcattgctttcgtgtaaattatgcaatgcaaaatttttttaatcttcgccttaatacttttttattttgttctattttgaatgatgagccttcgtgcccccccttcccccttttttgccccccaacttgagatgtatgaaggctttcggtctccctgggagtgggtggaggcagccagggcttacct

SEQ ID NO: 13337 - DNA, 355 bp, Homo sapiens
ccatggctattatactgcaaaaaccaaaatcaaagccaaaaaaccaacatgcctaattccttgagtccactagatgtttgcatgcctcttataattcttttagtaaatgccttatgtcatttttatattttaactattgtctcaaaatgaccacagtacgtttatttggaatttcaagtaggcagaaagtatgccaagaacagttgttccagaagactcttgaggtgtatgtttgtttaattagaggcaggattcggtgggcaaacaagacagagaaatgttgatggggaaaatattggctctgtaagtgtgcttttggtaaatggtagtatctgtagtgaccatattcaaagaa

SEQ ID NO: 13338 - DNA, 377 bp, Homo sapiens
tgtggtttctctaccattcctcctggattgtgtccaccttaaccagtgcagtgttatcctggaacagaggaaaccacagacctccagggcacacattagagaatactatttgcaggtttaaaaagataactgaatgacaaaattaaaaccagtttggttgaatgtttctcatcctgttttaaccacaaggagcagaaagatctgaaattctacagagattagaattttatcagaagaacttcaacatgataataaaattcaccataaacttaactgaataagagcaataataatttttaaaaagcttaaaaatgtagttgaattacctgttcaatattgtatgaaatgtgttcacagtaaaccttttgcaaatgtca

SEQ ID NO: 13339 - DNA, 307 bp, Homo sapiens
gattgctggtcacaggccacagtgatcttttgtggctttcatgtatatttcatcatgtttagtgcaatcccataaaccttgaataacacgatgggacccatatggagtgccactactgatgctggaaatgctcccaagaagcagaaaaaagtcatgacattacaagaaaaagttgcattgcttgatatgcactgtagattgaggtctgaggtctgcagctgtggttgccccgacttcagacagatgatttgtcgtgtaaacagaccatgtaaacttacagcgtcaataaatacatttcagtactgta

SEQ ID NO: 13340 - DNA, 507 bp, Homo sapiens
agcagattactccacacgtttttacacactgaactctccagtccttccacttccttaattctgcaaatggagggggtggggactcttgggaaactactcctgtaaaattgaagttggaggtaggcgtgggctgaggaaagaggaatcagattaattctctgggttgcaaagaggctattctgcaagccccttacagtggccctgaaagctcaataagtgttttgtacctcttgtaaatgtgccattgtgtgaagcattaaacccaacatctagaattcaggattcatccagaataaaaggatgtaaaatctttcccaacagaagagtgttacttttggtcagacaacttcatgggttcttactgcacattaaattatgacttatggaacattgcaatatattctcggtccttaagttatgacttatggaacattacaatatattctcggtccaagtgagtaagttctttgctttatgtgaatccaataaaaaatccaaagaatttta

SEQ ID NO: 13341 - DNA, 436 bp, Homo sapiens
ttctctgtgtttgaagaacaaggaaaagactgggggttttattagaaaaaaatgtgtattgttttgaaagaaaactaattggcactagagaaggttttgggagctggcaaactggtgagtgagagtgtaaatggtgactggctaaaacgagtcttaaatcttattcattcttcctaacacaatagggtaactacagttagtcataattgtacacttaaaaattactaaaagagtatatataattggctgatttgtaacacaaaggataaatgtttgaggggatggatgcctcattctccatgatgtgactcttatgcattgcatgcttttatcagagcatctcatgtaccccataaacatatatgctactatatgtacccacaaaaattcagtattaaaaagtaaaaattaaaaacaaaatgaaataacaaaaaaa

SEQ ID NO: 13342 - DNA, 462 bp, Homo sapiens
aaatttaaacatttcatccagaaaagatatggagatggatcatccagaaaagatatgagcatataaaaagatgctcagcataatctgtcattagggaaataaaaataaaatcacagtgagacactactacacacctattagaaggtcaactttggcacattgctgatggggtgcaaaaatggtgcagacacttcaaaacagtttgacagtttcttataatgttaaaacagacttaccacacagcaatgccacaccagagaaatgaaaacttacgttcacacaaaagtttatacgtgattatttatagaggttttattcacaattgccaaaactggaaaataattcaaatgtccttcgactaattaaacaagctgggatatatccatactgctgaatgctgtaattcagtggcaatgagatacacaagtactataatatgaatctcaaatgcagtatgccaag

SEQ ID NO: 13343 - DNA, 433 bp, Homo sapiens
tatgtgaaaaatactctatatcactaatcatcagagaaaaaaaaatcaaaaccacactatcaccttaccctattcagaatggctatgattaaaacaaacaaacaaacaaaacagatgttgggatggatgtggagaaaggagagctcttatacaccctgattggaaagtaaatagtataaactctatggaaaacagtatgatttctcaaagaactaaaactcgattactattcaatctagcaatcttactactgtatctatgcagaggaaatgaaatcagtatatgaaaaataaatctgcacttctatgtttattgaaacaccatacacaacagcaaagatatggcatcaacctaagtaaccatcaatggatactaatgggtttgtaggtaaagaaatcgtgatatttacacaatgcaatactactctgcaaaa

SEQ ID NO: 13344 - DNA, 301 bp, Homo sapiens
tgcctgtataggttgcttaccataaataaagcttgcaggttggaagttactctgggtgagtcagtgagtaaatgatgagtgaatgtgaggcccttggacatcactgtaccctactgtagactttataaacactgtacacttaggttaccctaaatctattttaaaattgttttctttcttcaataataaattacccttagcttactgtaacatttttacttgacaaaccttttaatttttaaaattttctgactgttataataatacttagcctgaaatacaaatgaattgtctaagtgta

SEQ ID NO: 13345 - DNA, 4256 bp, Homo sapiens
agcagacattttcaaaggcttctctccccttcttctcctctctctgtcccccatgcggaaaggggaaaatagaagtagaatccagattggggcgcgtggctgatttggtcctcctcccgcaccatcctcccccagacagcagagaaactttgatgtctgggtgcatggcattcagggacagaggagcctgggcatcccagcaaatgcagccgcatgttccgcctctggacggcctctctgaactcctttgtgaggggagatgaagcccacagagctggaaagagcagcgttttgaaatgaggaagtgtggatcggcattccttgagctcagtgctagccaccttggcgatggggtgagccaaccaggagctcagatttataaaacttttgagctttgtgggccctagggggccactgtggcctacctgctgattttcagatggggaaatgggggctcagagaggggacaagatttgcttaatggcacctagcaaattggtaacaggtccaggagtagattccatgccttcagcctctggtgagacgtctttcctctgcaccaggaagtggaacttcaaacagcaccaggggttggaacttttgtttcaaatcctctctgcctcatccccacccactgcccagcaactcaaggctgggtctttcgccccctcaggctcagaagggctgtggcccagccacagagccagggggcctcctcagtagtattggccttcacactcttggtgctaaagttctccagttacttttttattaaaccaacatgtacagaaaaactcagttttcggctgggcacagtggctcacacctgtaatcccagcactttgggaggccgaggcaggcagatcacttgaggtcaggagttcgagaccagcctggccaacatggtgaaaccctgtctctacaaaaatacaaaaattagctgggcgtggaggcgcgtgcctgtagtccctgctagtcaagagggtgaggcaggagaatcgcttgaacctgggaagccgaagtagcagtgagccgagatcgcgccactgcactccagcctgggtgatagagctggagggaaaccctgataccacttctgggtccagatggctgtggctggaatgcggccacagccaggaacagcgtggtacggataccagtggggctctggtcttttcccagaggctggcacctttcatgccgagttgggcctcgggtctcggggctctaggccctgctgtgccagtggcctgatgtgtggccttatatgccagtcacaccctgctccagacctcggtttcctcatccacaaaatgggaaagctgggctagaaaatctctcaggaaggtaggtctctgctagctcccagccttccatggcagtgcaaagggaaccttcccaacaaagtaagagccaaaggctaagatggcagtctgtggtttgtagaaccttctagaagaccacgagacttggtaagctgagcttctaagtggtccaggatgcagggctggtgtcacaggtgtgtgaccagtagagctacacagggctttgtgcccagaagggccccacgcttgggaaataaggctctgcagtcactgtcttcaaattcttaataattttatctttgtcactgtgttttgtaagtgaagtccaatgggacagtggaatgtgaactgggagcatggagcctcccatctccctgcgtccaggatctgcttctcagctgcttgctcctctgcccccacagctccagctccagctccactcaccttctacctccctgcctcccacccagcaaccactgccaacctgcccccaacctgggcacaggcacaccctgtgggggagggggacaagcacaccccacagcatctcagagtggggcatggtggcagcagtccccatcctgcgctggcagcccagggcacatttcgtgtgggactctgcgggggtgagcctctagccccccccagatccagtacctcgtgtgtcctggtacaaaatttgtagtgccccgggggctgcccatctgctatgggttggggcaggggcctgtgggaggatgcctggctcaacctcctgccctaggcctggagcacaacatgtgggcccagcagctcacaggaaagggagccagaagatgggttcaagtgtttgtgtgttccccaagtcaccagggtgcctgtgggggtctgcactcccccaggagaaccctcatgtctagggagcaccccatggggtcatctccatgcctgagaggaccctctcttccttctttcaaccttccggagcccagcttgtctcttccggccaggtcaaggtatcctcctgagagaaccgtgaaatacagtgtgccgctttgataattccacatgcatgttcaatattcggatatttccagttaaaactggcattgcacaatataaaaaggaatggtaaaagtcatgctaataatttaaaattttgactttacttagaatggtattaactagcaaatttaaaacaccatgacaaattgaaagtgagactggggaagaaagcaaaaagcatgttttctgactgtttgaacaaggggccccacattttcattttgtagtgggtcctgaaaattatgtagccagtcctgcctggtgagccacctaccctcttgggcatttagttgtctatcagtaaactagatcattaacactgcgcctgcccctcctgctcacgggcacgttaggaacatgcgcttggataaaatccaagccagagatttagaaaccagtgtgtggtgccagctctcagccttggaaccacaagcccatttttcttaaaaagggatctggactggcatccaaagagatttcagtcccctcatgtaggtttaaccaccatgggcaaggcagtctctctcccaggtattcctctcactaggtgctctgctctagaaatgaagtctaaaagcagccccatcaatacagaacagagttagaaccacccggagagatttaatctggaatcccagcaagttgtgaaatggaaagactagtcggccagagagctgaggtctcacagtgtgcaaagaccagtcctcagtatctgcacccatccatttgagtttcaggtgaagcctaggatttgggagctcaatacaaagatgccagcatgaaggagggtgggtgccaactaggtttggatttagagacatcctccttttgggaaaggaaaaaatcctgattccacttaggtttccaggaagaaggcatccccatttcagaacagttttctaagccaccctcatggaggtttcacctgcagctttcagtctgctttgtctgatgtttgaggatgcaactgcccaaaaatgggtctaaagtagcatcccgtcacgttctgtaaaaagtaatactgctttaaggtaacacttatgggaatgaatggaatgcatgaatgaatgagtcagtttggatgaagttgcctcaaatagagtctaaatataagatttcatactcgatagtgtcatttcaggatcaggaaaaattaggtgactcccatttggtttctacagcttttccccaatatcatgttaaagttttggcttttatcttatttcacttatttcattttgagtcatgtcttctggctccagctcagcttcctagagataattcattaggcccgagagctgctccagagtgggattagaacccgtgtagtacatagtcacattaaactgagatcggctaattaatcgctcttctccgtgtaactgagcgatcgcgctccttccccgaggaattgcaatttcatggttcctaatgatggtgcgattacattatgtggatcacttaggctgtgggtgtcaggagcggtacttggagcctctctcggtggggatgggagaagtcacttctaaaaccggggagatggaggaaagcagttagaatgtctgttactaatttttgttaacgtgctgctgtttcctacatctcattcaggcattagtttcaagttccattttcccccagcaccgtgtggcaccttccccagaaccctcacattttttttctaatattcacagggttattgtttgtaaaaaatctatttatttgctttattccatcaagtaatttattttcatgagatttcttggaaatgtggctctacatatcgttagtacaagtaatacattttgattgttgtttcctggaataacttgtattatttgatgagttaaataaaatgcctaattctaaagtcggcaaaaaaaaaaa

SEQ ID NO: 13346 - DNA, 873 bp, Homo sapiens
cccatggaggatgatgaggacagagatgaggatgaggaggatgaggaggacaaggaggaagatttggatgaagttgcctcaaatagagtctaaatataagatttcatactcgatagtgtcatttcaggatcaggaaaaattaggtgactcccatttggtttctacagcttttccccaatatcatgttaaagttttggcttttatcttatttcacttatttcattttgagtcatgtcttctggctccagctcagcttcctagagataattcattaggcccgagagctgctccagagtgggattagaacccgtgtagtacatagtcacattaaactgagatcggctaattaatcgctcttctccgtgtaactgagcgatcgcgctccttccccgaggaattgcaatttcatggttcctaatgatggtgcgattacattatgtggatcacttaggctgtgggtgtcaggagcggtacttggagcctctctcggtggggatgggagaagtcacttctaaaaccggggagatggaggaaagcagttagaatgtctgttactaatttttgttaacgtgctgctgtttcctacatctcattcaggcattagtttcaagttccattttcccccagcaccgtgtggcaccttccccagaaccctcacattttttttctaatattcacagggttattgtttgtaaaaaatctatttatttgctttattccatcaagtaatttattttcatgagatttcttggaaatgtggctctacatatcgttagtacaagtaatacattttgattgttgtttcctggaataacttgtattatttgatgagttaaataaaatgcctaattctaaagtcggcaaaaaaaaaaa

SEQ ID NO: 13347 - DNA, 351 bp, Homo sapiens
aatgggccaatcatactcccaactagggataatgtgcatcatacatacttggaatacagtgtggtatcattattccattttacagatgaagaaaatgaggctccccaaagttatgagtttcaggggcagagtttctcctcacctcactctaggccagagtgatctccttacagaatctgtgattttcaggctggatcacagaactgttgggttctgtgggccagtgagagaaactgggggatatcaagcaggcaggcagggtctccagcctgaccagccaggtgcctgctacaaagcaacacttgatgaatagctgttgaatggatgtatgaatgaataaatgtgtcaata

SEQ ID NO: 13348 - DNA, 473 bp, Homo sapiens
aaaaatggctccaattctactgtcttattcaagcaaggtatttacttcttatttcttttctatccatttcatgaccttgttttatttcaagcactatcacagagtcagatggaccttaactcacctgagcaaaggcaacctagagccacacagctgagctgccctctttgtggcatcacgttgtccctctgccccacagagtcacctccccacttcccttttccagccctactgcccttttgtaagtgtaagacatcatttcctctcaactgcataacagaaatagcctctgaaagggcctttttacagctgatttcttctgtctccaattcatcgtccatactgcatccaaagtcttcttgccactgccttcaaaatttaaagctgattcctaaattatgaatctttgtcactgggaaggcaaaggacagttgcatagtctggttgagtgaagttttgcccacacttaactg

SEQ ID NO: 13349 - DNA, 222 bp, Homo sapiens
tttcacaggtttgaataaagggattgtggagagaaagcccagtaaagcagatgagcttgctcaggatcagggccaccactcaggggaataaagctctagggacctcccctttttaggagtgtaggttcccaagatctccctcctaaatgaagtggccgctgctcactccagggaaaacgaatcttgttaccacatccaccacggatggctagaacaggggac

SEQ ID NO: 13350 - DNA, 314 bp, Homo sapiens
tgaatattatacagataccaatccccagagcttattaaggtccctatttaagaataaatatacattgctaacagtgtaaatttggtgaaatatttcaagagccttcaaaatgttcacaccctttctccaaggactaaatagagaaaaaactttatgcacaagatgctcaaacttctcctttagagcctagataataactctcatgtcttcctcaaggtcttctcttcccagtttcatcaacctttactcacctggtttccagactgttctctatcctggttgtttccccctaaatggactatagtttgttagtg

SEQ ID NO: 13351 - DNA, 437 bp, Homo sapiens
gcgtgcacacgcacacacacacacacacacacatgcatcttgttggttctatcttctagctgttcttcaatcagccagcttccttctatcttctctgccaccaccctaggctaagctgcaagcctctggtccccacttctacagcagcctctttactggtttccctgccatatgttttgtcctccctccaaccagttctccatgttgtatgtaaccagagagagcttttaaaattgcaaatctaagcttgtcatttctctttataaaacctttcaggtttccgactgggcgcggtggctcacgcctgtaatcccagcactttgggaggccgaggcgggcgaatcacgaggtcaggagatcaagaccatcctggccaacatggtgaaaccccatctcttctaaaaatacaaaaattagccgggcatggtggtgcgtgc

SEQ ID NO: 13352 - DNA, 1269 bp, Homo sapiens
cagtgaaaacaccagctctggcaactgatcctgcttttcaacattgtctgcaatgttgtgtctcataaatataatatactagcagagatattgacagttgagggtgttaactttcttagcctgtgtgttcattccagacagcaccagagataatcaaactgacttctttggttttcatcacatgaaaccatggctgttttgtttttctgctgaatgcctgctcccagctgtagccctggcccagccgccttcctgggagagggctgggcaggacagagctgagggtgggcaggtgcagctgggacttccctccctctgttctgccctatgcccatccttagtccaagggctgggtattgttctttggtgattttcttatgtttccaggttgccttttaggggaagcttgttcattcccagccctcactggctgacccacctcaaagaccagggctggccagccccttccgcagcctcagagcagctctctagcctccaggggtttgtcctgttgtaggagcaggttgcatcctgtgcctctccctgcagctttcactgctcttgcctaattaaataatctgtagtttccaggacagtggcagaggctgatggaggagggagggtttttgctccttaagaatcatgagatcatggagcagaaagttaccccctcctcttgaatcacttaaagtattgtgccctggggcttagagctagggatcctagctgccagtgcttggagatgagaattgctgaagatttgcccaaggggcatcagtagcttttgtggagtaatgctagccagtgatgcttttgatatttcagcacagtttagtagatgatttatggaaccaagcagtggctccagataacaaggatcctaggcaggtatgggtcagtaagtcggacagggtgttattaggcctccctagtggaagagtctcttggataggaagccttaagcctgggaaggcaattagggtttcagagtttcatttactgtcctcaaatatacattaagccctactttgtcctctgcacaaagatgtatttgatgatccccagtggcacagagctaatcctgcctgggggttaatcctgcagtttaatctcctgttcatttctgtctgacttgagtacccggggtccatcagtcttgtccatcatttccaggtgaggcggagcagaggtttaatggaggtgtgggatgtttgcattacgctaggtcaattccattgtccttaaaaaatgagaacctttctgatttga

SEQ ID NO: 13353 - DNA, 441 bp, Homo sapiens
tgcttcagattcctggagtagctggactgaaggcagagatgaggggcttgttgacctgggagctctttatagctaatgctgcttggcttcagttcctgaggcctgccgccgtagggcctgcctgcaaacgcactgtcaccaccccccgccgctgcagccccccaggagttacgcttttgcagaagacccagctgcctaagtaaaattaaacaccctcaagctgtttgaggctcttaaaaacattttctcagcactgaacttctctgaagatctgagactattagcacaaaaccaagagttctctctaaactgcttttctctttcccctgaatgcaaatgaacttcccctgctggtttccattcatctgacaggtcataattgtgacgttggtaaaatagagaaagttcccttttgaaaattgagctatgagaacttttttt

SEQ ID NO: 13354 - DNA, 109 bp, Homo sapiens
tgtatttatttaagaaatactttgtcaacaactttaaagcccagcaatttttccaaggctgcctggtcattttaaaataaatactctgcttattcaccacgaatagcct

SEQ ID NO: 13355 - DNA, 406 bp, Homo sapiens
catccctaccattcagacacctcccacccagcccacctccactgttggaaatcacattgcaacatgagatgtgggggacaaagatcctgcaaaccatgtcaagcaagattcatgacacctcttcttctaacataaatctaaatttctttttaacagggaaatggtttacctctggaatctttaatttagattcatttatagaaaattacataaaattaatttttaagaaggatacagaggcgccactgtgttgattgagaaaggaatattttggatggatctcagcattataagatgtagtattatattaagtactatattttcttgaatagtaatataaattttgcctggtatccttacagagtgtgctttttaaagtaaataaagcttcactggatcccctgga

SEQ ID NO: 13356 - DNA, 473 bp, Homo sapiens
cgtgagccaacatgcctggcctgtaggacaagttttataaccccagaaatacagagcaaaacccttatttgttagaatatgtcatccctgaaatcaacgttaaagcacaaacttaggaacaaaattacttgcaacatataagaaaggataaaagaaggctcacataaatcactaaggaaaaaacaaaataactttaaaaattggctgggcgcagtggctcacgtctgtaatcccagcactttgggaggccgaggtgggtggatcatttgaggtgaagagtttgagaccagcttggccaacatggtggccgtctctactaaaaatacaaaaattagctgggtgtggtggcgcgcacctgtaatcccagctacttgggaggctgaggcagtagaatcgcttgaacccaggaggcagaggttgcagtgagccaagatcgcccactgcactctagcctgggcgacaaagtgagactc

SEQ ID NO: 13357 - DNA, 6076 bp, Homo sapiens
cgcagcggccggagagggatggggggcgcccacccagtctgagcctcgccgcgggcgccttcggctcacgcagcgcttcccgcgggccgccagtgcgcaccctcggccacatcagcctccgcctggcgggtgcacccgggccggcgaggaaggggcaaccgtccgggtgggtggggcgggctgggtacctgaggtcaccagctcggctgtagaggcaggggcggcggaggcggaactgcggagttgctgggtccaccgacccttaccctcagcgagagaagtaaccaatgtgaaagatgttgcagaagtgttccagaagtggctgaagatagaaggaaaaaagtgccactgcctatcagaaaaaacaaaacaaaacatgggaaatacaaccaccaaattccgtaaagcactcatcaatggtgatgaaaacctggcctgccaaatatatgaaaacaatcctcagctaaaagaatctcttgatccaaatacatcttatggggagccctaccagcacaatactccattacattatgctgctagacatggaatgaataaaatattagggacttttcttggtagagatggaaatccaaataaacggaatgtgcacaatgaaacatctatgcatttgttgtgtatgggacctcaaattatgatatctgaaggagcccttcatcctcgcttggcacgccccacagaagatgatttcagaagagcagattgtctgcagatgatcttaaaatggaaaggagcaaaacttgaccagggtgaatatgagagagcagctattgatgctgttgataacaaaaaaaacacacccttgcactatgctgctgcctcagggatgaaagcctgtgtagagcttttagtaaaacatggaggagacttgtttgctgagaatgaaaataaagatactccttgtgattgtgctgaaaagcaacaccacaaagatttggccctcaatctggaatctcaaatggtattctcacgggatcccgaggctgaagaaatagaagctgaatatgctgcattagacaaacgagagccatatgaaggattaaggcctcaggatcttcgtagactaaaagatatgcttattgtggaaactgcagacatgcttcaggctcctctctttactgctgaagctttacttcgagctcatgactgggacagggagaaattacttgaagcttggatgtccaacccggagaactgctgccaacgatcaggtgttcaaatgccaactccaccaccaagtgggtataatgcctgggacacgctcccatctccaagaactccaaggactacacgctcttctgtcacctccccagatgaaatcagcttatctcctggggatttagacaccagtttgtgtgacatttgtatgtgcagtatctctgtatttgaagaccctgtggatatgccctgtggacatgacttttgtagaggatgttgggagtcgtttttgaatctgaaaattcaagaaggtgaagctcacaacattttttgccctgcatatgattgcttccaacttgtacctgtggatatcatagaaagtgtagtttcaaaggagatggacaaacgatacctacagtttgatattaaggcctttgttgaaaataatcctgccattaaatggtgtcctactccaggctgtgacagagcagtaagactaacgaaacaagggtcaaatacatctggatctgatacactcagcttcccattgctgagagctcctgctgttgattgtggaaaaggacacctcttctgctgggagtgccttggtgaagcacatgagccttgtgactgccaaacatggaagaattggctgcaaaaaataaccgaaatgaaaccagaagaacttgtgggagttagtgaagcctacgaggatgccgccaattgtctctggttattaactaactccaagccttgtgccaactgtaagtctccaatacagaagaatgaaggctgcaatcacatgcagtgtgctaagtgcaagtatgacttttgctggatttgccttgaagagtggaaaaaacatagttcgtccactggaggttattacagatgtactcgctatgaagtcattcaacacgtggaggagcaatccaaggaaatgactgtggaggctgagaaaaaacacaaacgatttcaggaacttgacagatttatgcactattatacaagatttaaaaaccatgagcatagttatcagctagaacaacgccttcttaaaacagccaaagaaaagatggagcaattgagcagagctctcaaagaaactgaaggaggctgtccagataccactttcattgaagatgcagttcatgtgctcttaaaaactcggcgcattctcaagtgttcttatccatatggatttttcttggaacctaaaagcacaaagaaagaaatttttgaactaatgcaaacagacctagaaatggtcactgaagaccttgcccagaaagtcaataggccttaccttcgcacaccccgccacaagatcatcaaagcagcatgccttgtacagcagaagaggcaagaattcctggcatctgtggctcggggagtagctcctgcagactcaccagaagctccaaggcgcagctttgctggtggaacatgggattgggaatatttaggatttgcatcaccagaggaatatgctgaatttcagtatcggaggaggcacagacaacgtcgtcgaggagatgttcacagtctactcagtaatcctccagaccctgatgagccaagtgaaagcactttagatattccagaaggcggcagcagcagccgcaggcctggcacatccgtggtaagttctgcatctatgagtgtgctgcacagctcttccctgcgtgactacacccctgccagtcgctctgaaaaccaggactctcttcaggctctgagttccttggatgaagacgatcccaatatacttcttgcaatacagttatcactgcaagagtctgggctggccctcgatgaagaaactagagacttcctcagtaatgaagcatccttaggtgcgataggcacttctttaccttccaggctggactctgtccccagaaatacagatagccctcgggctgcattgagcagctctgagcttttggaacttggtgacagcctcatgagactaggagcagagaatgacccattttcaactgacaccctgagctcacaccctctcagtgaggcaagaagtgatttctgtccctcatctagtgatcctgactcagctggccaggaccccaacatcaatgacaatcttctcggcaacatcatggcttggtttcatgacatgaaccctcagagtattgccctgattcctccagcaactacagaaatcagtgcagattcccagctcccctgtatcaaagatgggtcagaaggtgtgaaggatgtggaactggtgctgccagaagattcaatgtttgaagatgccagtgtcagtgaaggtagaggaacccagatagaagaaaatcctttggaagaaaatattctggcgggggaagcagcatctcaagctggtgacagtggtaacgaggcagccaacagaggagatggttcagatgtttcaagtcaaacacctcaaacctcaagtgactggcttgaacaagtacatttagtgtgaactgcacacatctgggctctaaatgaattacaggtacagatggtatgctaggtggagtatgcttgatagagactttgattcacttaattccaactcagtgataaaccactgacattagggttgaatacagagaagttcccttgaatggtagcttcattttttattttaaccttacagggaatttcctttgtacttaattgaatagcttttcccctttttgctgacaaaaagaagagcaagagaaagagaaacaaaaatgaaataaataagttgtattccacactctaagaaaatgcagtcctctatttagcctaggcttgacaatacttaaattgaacatttaaactaaaggcttactccctaatctttgggtggctttcctttaaaaaaaaaaaaaaagttttcttcattctagaaatttattttggataaatccgataacatatatgtcctcaatctctttgtgctcttccataacttacttcctttttgtctgagcaatgtgaattgaagtctctttagtaccacatctaccatagtgtaattagttttaattttcacatgaatcaaaggtttcctttcatgtctatttacagtccaattgtgccaaactcttacttgtgtgctgactaacaaggcatttaggtgtgcagcatcctagagtgctccagggcagtgtcagcgttctcgggagtaaaaggtgccacttggtagcaatgatattccagaattaaatgggtttttgttgccatggagactgcatttatataaatgtagcctgtagcttaagttaactaaacctaatgctgctgttaaaaacagtttattttaatattaaaatacagttgattagcaacagcggtgctgtattttaagagacactttattggaagtgcaatcatagttatttgttttcacaattttacagtgcattctaattactgatgggtgcaattacttttaatcgtgttttataaaatagaaaaaaagtggagttttcatgagttatagtaaatcccacgattattaagaaattcaataaaacatcctgcgcaacatgttaccgtgcctttgcctaacctaaatggatagttgccagttaaataagtgagtaattcaaatttcaatgtctcttctgaagtaactatgctatgaattgcaaagacctccataaaaccacccatggccttgcttttacactaactataacaactaaatgttcaatcagtttgtttgcctaactagcaaatgctgacatgtgtttgttctactgcgcaatactcatttgctgtgtgattactgtttagtgttgaaaaaaatcaacttcctagttatcagtgtcttactgtgaagaaaatactggtcttagttgtaattaggatacaatggtacagtgtgtaattaaaactagagtaaactgttggaatggctgttttacttaaatattatcaaaactagcataacataagcaaaatagataagtacaacactccatttagtgttttgccagattgttaccagaagtctacagataccaaactttcagttctgagtttgtacaggcaagtcctgggctgggtaaaaagttatattaatattgttatccacaagagatgtgattatgggttttgattactttttttttttccaaaccctgcttttgaaatatccttgtacttaaaattcatattgctaagacactgtattagaatatttaatattccccagatcctcttaggataaactgtgggaatcctcctatgccatggatatcaaaggtccacattagtttttatttctccagtgatcagaaacattgatatcaatccctattaaattagtggggggaatattaactttatctacagtgtattactgtatattaaactgaaatagtccattaaaggatttttttataaatttattttggattaaaaatatcaacaccaataagtttttagaccaagttgtaatttttccaatatagagtctttgcatcacactgaggcatcttgcacagctgcagttaaggtgagaaagaatgctctgtgtgaagacagtgtacacaatgggttccggtttccttgcaccttgtgcagtatcctttatttctgtgctgttctctcctgagcatgaaaaatgatcattatccaatttgtatttccttggtacatattttaaaaacaacacagtcattgactttacaattcagtaatgaagtttggcaaagcctattttgtaaacaagttaattttataatgtaaaaaaaaaaagttaatctaaccttgacttgttatttgcactttcatagtctatacttgatacattcccactttatatacagtaggattctacaaacgtgtagatgtttggccaaatgaatgctgttaataatatgtaaaattctttgattaaacatttattacttaa

SEQ ID NO: 13358 - DNA, 6157 bp, Homo sapiens
cgcagcggccggagagggatggggggcgcccacccagtctgagcctcgccgcgggcgccttcggctcacgcagcgcttcccgcgggccgccagtgcgcaccctcggccacatcagcctccgcctggcgggtgcacccgggccggcgaggaaggggcaaccgtccgggtgggtggggcgggctgggtacctgaggtcaccagctcggctgtagaggcaggggcggcggaggcggaactgcggagttgctgggtccaccgacccttaccctcagcgagagaagtaaccaatgtgaaagatgttgcagaagtgttccagaagtggctgaagatagaaggaaaaaagtgccactgcctatcagaaaaaacaaaacaaaacatgggaaatacaaccaccaaattccgtaaagcactcatcaatggtgatgaaaacctggcctgccaaatatatgaaaacaatcctcagctaaaagaatctcttgatccaaatacatcttatggggagccctaccagcacaatactccattacattatgctgctagacatggaatgaataaaatattagggacttttcttggtagagatggaaatccaaataaacggaatgtgcacaatgaaacatctatgcatttgttgtgtatgggacctcaaattatgatatctgaaggagcccttcatcctcgcttggcacgccccacagaagatgatttcagaagagcagattgtctgcagatgatcttaaaatggaaaggagcaaaacttgaccagggtgaatatgagagagcagctattgatgctgttgataacaaaaaaaacacacccttgcactatgctgctgcctcagggatgaaagcctgtgtagagcttttagtaaaacatggaggagacttgtttgctgagaatgaaaataaagatactccttgtgattgtgctgaaaagcaacaccacaaagatttggccctcaatctggaatctcaaatggtattctcacgggatcccgaggctgaagaaatagaagctgaatatgctgcattagacaaacgagagtactgactgctttgaaggttattgctggtttgtttagtctgaaaatggaagcagtttatctttgcaacaggaaagagaaagccatatgaaggattaaggcctcaggatcttcgtagactaaaagatatgcttattgtggaaactgcagacatgcttcaggctcctctctttactgctgaagctttacttcgagctcatgactgggacagggagaaattacttgaagcttggatgtccaacccggagaactgctgccaacgatcaggtgttcaaatgccaactccaccaccaagtgggtataatgcctgggacacgctcccatctccaagaactccaaggactacacgctcttctgtcacctccccagatgaaatcagcttatctcctggggatttagacaccagtttgtgtgacatttgtatgtgcagtatctctgtatttgaagaccctgtggatatgccctgtggacatgacttttgtagaggatgttgggagtcgtttttgaatctgaaaattcaagaaggtgaagctcacaacattttttgccctgcatatgattgcttccaacttgtacctgtggatatcatagaaagtgtagtttcaaaggagatggacaaacgatacctacagtttgatattaaggcctttgttgaaaataatcctgccattaaatggtgtcctactccaggctgtgacagagcagtaagactaacgaaacaagggtcaaatacatctggatctgatacactcagcttcccattgctgagagctcctgctgttgattgtggaaaaggacacctcttctgctgggagtgccttggtgaagcacatgagccttgtgactgccaaacatggaagaattggctgcaaaaaataaccgaaatgaaaccagaagaacttgtgggagttagtgaagcctacgaggatgccgccaattgtctctggttattaactaactccaagccttgtgccaactgtaagtctccaatacagaagaatgaaggctgcaatcacatgcagtgtgctaagtgcaagtatgacttttgctggatttgccttgaagagtggaaaaaacatagttcgtccactggaggttattacagatgtactcgctatgaagtcattcaacacgtggaggagcaatccaaggaaatgactgtggaggctgagaaaaaacacaaacgatttcaggaacttgacagatttatgcactattatacaagatttaaaaaccatgagcatagttatcagctagaacaacgccttcttaaaacagccaaagaaaagatggagcaattgagcagagctctcaaagaaactgaaggaggctgtccagataccactttcattgaagatgcagttcatgtgctcttaaaaactcggcgcattctcaagtgttcttatccatatggatttttcttggaacctaaaagcacaaagaaagaaatttttgaactaatgcaaacagacctagaaatggtcactgaagaccttgcccagaaagtcaataggccttaccttcgcacaccccgccacaagatcatcaaagcagcatgccttgtacagcagaagaggcaagaattcctggcatctgtggctcggggagtagctcctgcagactcaccagaagctccaaggcgcagctttgctggtggaacatgggattgggaatatttaggatttgcatcaccagaggaatatgctgaatttcagtatcggaggaggcacagacaacgtcgtcgaggagatgttcacagtctactcagtaatcctccagaccctgatgagccaagtgaaagcactttagatattccagaaggcggcagcagcagccgcaggcctggcacatccgtggtaagttctgcatctatgagtgtgctgcacagctcttccctgcgtgactacacccctgccagtcgctctgaaaaccaggactctcttcaggctctgagttccttggatgaagacgatcccaatatacttcttgcaatacagttatcactgcaagagtctgggctggccctcgatgaagaaactagagacttcctcagtaatgaagcatccttaggtgcgataggcacttctttaccttccaggctggactctgtccccagaaatacagatagccctcgggctgcattgagcagctctgagcttttggaacttggtgacagcctcatgagactaggagcagagaatgacccattttcaactgacaccctgagctcacaccctctcagtgaggcaagaagtgatttctgtccctcatctagtgatcctgactcagctggccaggaccccaacatcaatgacaatcttctcggcaacatcatggcttggtttcatgacatgaaccctcagagtattgccctgattcctccagcaactacagaaatcagtgcagattcccagctcccctgtatcaaagatgggtcagaaggtgtgaaggatgtggaactggtgctgccagaagattcaatgtttgaagatgccagtgtcagtgaaggtagaggaacccagatagaagaaaatcctttggaagaaaatattctggcgggggaagcagcatctcaagctggtgacagtggtaacgaggcagccaacagaggagatggttcagatgtttcaagtcaaacacctcaaacctcaagtgactggcttgaacaagtacatttagtgtgaactgcacacatctgggctctaaatgaattacaggtacagatggtatgctaggtggagtatgcttgatagagactttgattcacttaattccaactcagtgataaaccactgacattagggttgaatacagagaagttcccttgaatggtagcttcattttttattttaaccttacagggaatttcctttgtacttaattgaatagcttttcccctttttgctgacaaaaagaagagcaagagaaagagaaacaaaaatgaaataaataagttgtattccacactctaagaaaatgcagtcctctatttagcctaggcttgacaatacttaaattgaacatttaaactaaaggcttactccctaatctttgggtggctttcctttaaaaaaaaaaaaaaagttttcttcattctagaaatttattttggataaatccgataacatatatgtcctcaatctctttgtgctcttccataacttacttcctttttgtctgagcaatgtgaattgaagtctctttagtaccacatctaccatagtgtaattagttttaattttcacatgaatcaaaggtttcctttcatgtctatttacagtccaattgtgccaaactcttacttgtgtgctgactaacaaggcatttaggtgtgcagcatcctagagtgctccagggcagtgtcagcgttctcgggagtaaaaggtgccacttggtagcaatgatattccagaattaaatgggtttttgttgccatggagactgcatttatataaatgtagcctgtagcttaagttaactaaacctaatgctgctgttaaaaacagtttattttaatattaaaatacagttgattagcaacagcggtgctgtattttaagagacactttattggaagtgcaatcatagttatttgttttcacaattttacagtgcattctaattactgatgggtgcaattacttttaatcgtgttttataaaatagaaaaaaagtggagttttcatgagttatagtaaatcccacgattattaagaaattcaataaaacatcctgcgcaacatgttaccgtgcctttgcctaacctaaatggatagttgccagttaaataagtgagtaattcaaatttcaatgtctcttctgaagtaactatgctatgaattgcaaagacctccataaaaccacccatggccttgcttttacactaactataacaactaaatgttcaatcagtttgtttgcctaactagcaaatgctgacatgtgtttgttctactgcgcaatactcatttgctgtgtgattactgtttagtgttgaaaaaaatcaacttcctagttatcagtgtcttactgtgaagaaaatactggtcttagttgtaattaggatacaatggtacagtgtgtaattaaaactagagtaaactgttggaatggctgttttacttaaatattatcaaaactagcataacataagcaaaatagataagtacaacactccatttagtgttttgccagattgttaccagaagtctacagataccaaactttcagttctgagtttgtacaggcaagtcctgggctgggtaaaaagttatattaatattgttatccacaagagatgtgattatgggttttgattactttttttttttccaaaccctgcttttgaaatatccttgtacttaaaattcatattgctaagacactgtattagaatatttaatattccccagatcctcttaggataaactgtgggaatcctcctatgccatggatatcaaaggtccacattagtttttatttctccagtgatcagaaacattgatatcaatccctattaaattagtggggggaatattaactttatctacagtgtattactgtatattaaactgaaatagtccattaaaggatttttttataaatttattttggattaaaaatatcaacaccaataagtttttagaccaagttgtaatttttccaatatagagtctttgcatcacactgaggcatcttgcacagctgcagttaaggtgagaaagaatgctctgtgtgaagacagtgtacacaatgggttccggtttccttgcaccttgtgcagtatcctttatttctgtgctgttctctcctgagcatgaaaaatgatcattatccaatttgtatttccttggtacatattttaaaaacaacacagtcattgactttacaattcagtaatgaagtttggcaaagcctattttgtaaacaagttaattttataatgtaaaaaaaaaaagttaatctaaccttgacttgttatttgcactttcatagtctatacttgatacattcccactttatatacagtaggattctacaaacgtgtagatgtttggccaaatgaatgctgttaataatatgtaaaattctttgattaaacatttattacttaa
